United States Patent Application Publication US 2026/0103690 A1 - sequence listing, part 78

SEQ ID NO: 383669 - protein, 352 aa, unidentified
MDTSKNVIVVATLLPGQDSPVTDRIANEEAAIRRLVGRFADRSVLRCWYEAGPGGYELYRLLASMGVACQVVAPSLIPKGGSDKVKTDKRDSRRLARLGRAGELTPVRIPSPAEEAVRDLVRARDAMLADRKRAQQRLTAVLMRHGRIWRGATYWTAAHRAWIAAQRYGEPALAAAVGYYRATLAVREAELASLEAELIPWAGREPLAGPVARLGCYRGIAELGGLTLAAEVVDWRRFPAARAFMSYTGLVPAEYSSGERTRRGHITKAGSEPVRTALTEAAWAYRFAPAIGAGLRRRQAGADPDTLARSWKAQRRLHARYQHLLHAGKAGPEAATAVARELAGFVWAEMTA

SEQ ID NO: 383670 - protein, 343 aa, unidentified
MQVVRIGLDLAKYVFEVHGVDGQGNVVIRKTLRRGSVSTFFANLPPCLVGMEASNGAHYWARVLTELGHKVRLISPQFVAPYVKTNKNDRNDAEAICEAVGRPTMRFVPPKSPEQLAVQALHRIRQRLVRSRTKLVNQIRGILAEHGIVIARDIWRLRRALAEITENSTDSLNTLVRVLIIEGQAELLDLDRRIASCDRRIRELYRTSELCQRLGEIEGIGPVTATALVAAVGDRSCFKNGRQFAAWLGLVPKQRSSGGRNRLFGISKRGDRYLRTLMIHGARASLGKARGKQDPRSRWLASLRQRRHPNVAAVALANKNARIVWAMLAGNVSYEPARSVQAA

SEQ ID NO: 383671 - protein, 414 aa, unidentified
MKKNRLKMIVKDTRNYLTIAIDIGKMTHYVFWCDCFGNEGKSTAFQNTREGFEMLWQVIRTAQAITGVSDVVIGFESTSCYWIPLAHFLSEKPVTMVQVNPMHTKRVKELDGNSPLKSDRKDPRIIASLIRLGHWLTVVLPKGLTAELRQLSHARERGVHDATVAINRLRQALDVLFPEFGGIMGFSSVTASYLLRHYPSPQALLAMDENDLAAVITKISRRKLGQERARLLRNAAAHTIGITEGISALLIEINHLLDTLEQKKTYIQSLEAQMNHCLSRIPAAKALLSIKGIGTVIAAGILGEVGDFAAYPTQASLQKMAGLSLYEVSSGIHQGTRRITKRGRSKLRKYLFSACTNMIRKGGIFYESYQARIARGKHTFNAHVALMRKLLNILYALVRDGVPYNPRHRCGRAA

SEQ ID NO: 383672 - protein, 344 aa, unidentified
MKITTIGIDLAKSVFQIHGVDKHGKAVLRKSLKRSQMAEYFVKLAPCLIGMEACGGAHYWARKLRSYGHAVKLMAPQFVKPYVKTNKNDMADAEAICEAVSRPNMRFVPIKTEEQQAILSVHRARSGFVKARTAQANQIRGLLSEFGIVLNPGIRTLIKQMPEILEDGENGLPMAMRPLLERLVEHLKALDQQVGDLEKEIHQWHRENEASVRLEAIPGVGPLTASAIVATVGNASEFSNGRQLAAWLGLVPRQHSSGGKQTLLGISKRGDTYMRTLLIHGARSVIRYVESKADEASWLHKVTVRRNKNVAAVALANKNARTIWALLAHQRTYHPDYAAAKATA

SEQ ID NO: 383673 - protein, 435 aa, unidentified
MIPAVLTHCAGIDIGKRGVAVCLMIGAAEAEPKVEVREFSTFTADIEAMKAWLVQAGCTHVVMESTGSYWKPVFNILEGSLVVCLANSEDVMGRKGHKTDRKDAKWLAHLLRHDMIRASFVPPRAIRELRDLTRRRKQLLGDATSERNRVQKTLEDANVKLGSVLSDVFGVSGQRMLEALLEGRGGAQEIAEMARHKARQKIPQIIESLAGHRFSEHHRLMIRMSLEHMRMLEGQIIALDEEVVQRIQSLGLERMLNLLAAIPGLGHDSAVAILAEVGPDMNQFPTAKQLSSWAGVCPGNKKSAGKNFSGHTTRGNRWLRSTLTECAWAVSRSKKSALRDKFWRWAAGGKKKAVVAVAHGLLLQVYQVLQTQQPLAQAPSPPMDEQRRKRIVRHHLRCLGRLGVSTGPKRISADGVAAKPGRPSKAKTKKPEACG

SEQ ID NO: 383674 - protein, 330 aa, unidentified
MMFHAIDLHKRTLEVATLMSGDEGEPQVVQMPACERAFGTYLAQWPASRHRVVVETTGAWYWVADLLRSRGAELKLAHAAKVQAITAAKVKTDSIDAVTLLTMLRLNLVPEAHVISPELRELRDLLRMRLRLIEKRTSAKNSIARLLEKYNRASVEALPELAQVQVGLHRRQISLLAAQIKALEKRVHRELRPNAIVRRLRRIPGIGRLSAWTLYLEIDGIERFATERNFFSYCRLVPGSDNSGGRTRNKRSKAGNRYLKLAFSHAGIRATQRYAEVGAAYRKKLRKKNKPLAQAWVRQQLARIVYHVLKKDVDYDDTFRGVALSRPKRA

SEQ ID NO: 383675 - protein, 410 aa, unidentified
MKVAGIDVHKKVLMVVVVDASRPEEKPARRRFVTMPSELQRLLTWLREQGVEEAVMESTAQYWRSVWLELEPHMRLHLAQAFSNRAPRGRKHDFKDAERLVRRLIANELILSFVPNGEQRIWRSMTRMKLQLRRDRVRLQNQIECLLEEMRIKLSIVVSNLLGASGLRILHALANGETDPKKLAQLGGERLQCTEEQLVDALTGRAQPVHGEMLALQLQRLQLIDEQMMRLNRMIAAAMKPQQEAVIRLAEVPGLGVDSAQQIIAEVGAQASTFPSAAELTSWVGTCPGKDESAEQNHSSRSAKGNKYLRRVLNQAAHAAVAKKGSHFQIVFRRLLPRLGYQSAIWAVAHRLCRLVWKILHEGVRFIEQGAEVGPREKKKRAQMLARALRKLGYEVTITPINQLAPKPAV

SEQ ID NO: 383676 - protein, 329 aa, unidentified
MSKLSKKVIGVDVGAKFLTVSFTDNVNQDQVFNIENNQRSILSFLKKFPTEDYCLVIEATGNYSSRILHLSLDNGFESSLINCMSVKYFSRMKNIISKTDAEDAKVIRLYGEIFRPEVYIPKSIEIEHLDQEIKLLNDLEEEKRRYSVKLKSLRYNPQLNPNTEKHYEKRLKQLDKEIREVEMRLPQLQDEEFREIKGLIQSVSGIGEKTSLQLMTATSGFKNFDSSKSLVKYFGLAPRIYQSGKKSYSPGKCRTSKTHIRSLLYVCSWTAIKHNTQCKELYLRLLEKGKPKKLALIAVCNKLLRICFGVVKNKTAYQQNFQKNFKILT

SEQ ID NO: 383677 - protein, 310 aa, unidentified
METITVGIDVAKDHLDVAVRPSGDVFAVERNGAGLAALCEKLVALGPAIVAIEATGGFEEVAAAALAGAGLPLVVVNPAQVRSFAKAIGQRAKTDPIDAAVIAHFAEATKPEIRPLPDEETRHLSELVARRRQIVEMIGAEKQREKRAALKRTRRSIARIVTALEKELKDMDGDIGTAVRASPVWREKEDLLASVPGVGAIISRTLIAEMPELGSLDRKEIAALAGLAPYTRQSGTWRGKSFIGGGRTRVRTALYMGAMNAKRWNPPLKAFFDRLVAAGKPKKLALIAVARKLLTILNAILRDKTPWQNA

SEQ ID NO: 383678 - protein, 429 aa, unidentified
MNDVTDSLSLFRVMRSSVRGSEKHLLVGIDVAKSKHHAFFGTPNGRTLRKNLVFDNSTKSFESVRSLAKDLQKQHGLVDIVYGLEPTASYHKPLAEYLIRQGDQVVYVSNVAVKNNRALLDGRWDKNDKKDAANVADLVGQGRCLYYDVPEERLRELRSLIAFRSRLKKQEHALRMRLRNNVFAQYFPELEKLYLRAGQPDDMVLSIADHCLDPREIARMEFDVFLKLITTRKIRIEQEKRLRELWEAAKSTAGCLVHDAVRWEAKSLVSQLKSLREIVNDNELRMKTAAQSYPEYQCLLSIPGFGPIVSAMVLGAIGDPLRFENRRQVLRLAGLDLSAARSGKNSDSVKPVISKQGKAALRYALVQAAMVASAKNPAVRSYFSDLIKGRELERGIKLKMKVKLAAKLLIIAWALMKSRKEFKPSCFPG

SEQ ID NO: 383679 - protein, 389 aa, unidentified
MKIYVGIDIAKLNHFASAISSDGEELIKPFKFTNDNDGFQLLISKLDPLDKDSLIIGLESTAHYSDNLVRYLVAKNYNVCVLNPIKTSTMRKNNIRKTKTDKVDTFIICKTLMMQESLRFVTFYDLDLMDLKALGRFRQKTIKQRTRLKIQLTSYVDEIFPELQYFFKSGLHQKSVYALLKEAPTPEAVASMHMTHLAHLLKVNSHGHFNKEVAQQLRVLAQKSVGASDSSLSIQVTHTIQQIELLDSQLERVEAEMTEIMKFNDSVIMTIPGIGYINGGMILGEIGDIHRFSSPNKLLAYAGLDPSVYQSGNFQAKKTRMSKRGSKVLRYALVNAAHNVVKNNATFKAYYEAKMVEGRTHYNALGHCAGKLVRIIWKMMTDNVEFNLD

SEQ ID NO: 383680 - protein, 346 aa, unidentified
MKGATELKKQIINTANSNQIDQVIIGMEATSIYSFHPAMFFQEDIDLKAFNTQSVVVDPKKTKRFHDVFAEDKNDQIDAYYIADYLRVGHYSIGIVRQENYIALQRLTRSRYEIVQSLVRAKQHFIENLYYKLNKLVISDELNTSIFGSTMMQLLTEDLTTDDLLNISINDLTDYLAEHGRGRFADPEALAKTIQKAIRSSYRLDKVVANSVNAVLSVYAEEIKAFQKMIKDLDKSIEKVVKVTDDEQILRSIPGIGPVYAAGILAEIGQIDRFDNEAKLAKYAGLSWREKQSGSYTSDNTPLKRTGNTYLRYYLVEAANLVRTHDPVFGEYYQRKYKEVKHTPSK

SEQ ID NO: 383681 - protein, 371 aa, unidentified
MRDYNTYVGLDVHKDSISIAVAEGCRNGEVRYYGSTGGDLDSLDKVVKKLRSQGGELHFVYEAGPCGYGIYRHLSRQGLSCTVVAPSMIPKRSGDRIKNDRRDAESLARLHRSGELTAIYVPREEDEAMRDLTRAREDAVKAQRVARQELGAFLLRHGLRYTGKSHWTAVHRRWFAEIKMEHRGQQITFQEYIDTEREAGERIERLTEQIRQHVDSWRMAPVVKALQAMRGISLIVATTTIAEIGDMSRFANPRELMAYLGLNPSEHSSGDKIKRGRITKTGNGHVRRSLIEAAQAYAHPARISRRLVGRQESLPKAIRDLAWQAQLRLCGRFRHLIARGKNRNTVITAIARELCGFIWAMAKEVSLQPAA

SEQ ID NO: 383682 - protein, 429 aa, unidentified
MVLPRAAVLVLASRTGERVQLLLVGDDWAEDHHDVELMDEAGRTLARARLPEGAAGMARLHAMIGEQLGEDAETAEVRVGIETDRGLWVTALAAAGYTVFGVNPLQVARYRERHGVSGAKSDAADAHTMADMVRTDAHQLRAVAADSPAAQAVKVVARAHKTLIWERTRQVQRLRYQLRDYFPAALEAYPDLDAPDALELLARAPDPASAARLTTAQVAAALKRARRRDIAGKTAAIRAALRSPQLAQPPQVTAACAAVVRSLTAVITAVSEQVKVLEGQVQAHFSQHPDAEIIASQPGLGPILGARVLAEFGDDPHRYASAKARKNYAATSPITRKSGKRRTVLARYVHNDRLRDALDGQAFTALKASPGARAYYDQQRARGLSHRAALRQLANRLVGILHGCLKTRTLYNEATAWPQHASHEITTAA

SEQ ID NO: 383683 - protein, 450 aa, unidentified
MNNSFVLGIDPGKSFFVATLLDATGRKVWKAKQFEMSRAGFEALVWNLPPADVTVGVEASGRIDDNLLTYLRQWALASQGRRVKVIRINPGQSARFGGPKPRRDQTDGSDSEHIAEYTRVYAHRLEAFDSDPSAQSMVRLIGERQRLIDEVAATKNRIHEQLLVCFPEFTQVFPDPFAKLAVAVLRRAPTARHTAHRRALSLARIRSDRRGCSLGIERAQRLVSLAERSIASATSAQDADALIFLLDQLELLQKRVASIEKTLADYVRQAKVESAPSVADGVSAARQIELLDSLPGMGLVAAASLVLGSRGITRFCSGKAMAAQWASCPERMQTGTSLNKTRLTARGDHKRRAMLYLSTQVACMYDPAFAFHKWRMMQKGLCAQQAVCAAMNRMARVAWALASKNEAYDLNRMLEQIERHHPGLWKTFVRLHENDPKLAQKLQPWARKIA

SEQ ID NO: 383684 - protein, 440 aa, unidentified
MSDVTPSVSEPEWAAFVAIDWADKKHCWKLLVAGSETSEEGTLENTPEALSRWAANRHERFGGRPIAVCLEQSRGPLVYALCKFPHLVLYPVHSTTAARYRQAFFPSGSKDDPVDTTLLLELLTRHRDRLRRLNPETPETRLLQMLVEQRRKLVDERTRYSNQLTAWLKMYFPQALIWIDNIDSPLGCDLLERWPSLEQLKCVNPAKLHDFFTTHNSRSEQRIQERINAIYQAVPAVSDPALLQAGPASVQALVQIIKALNSAIADFDQRIESAANNHPEAPLFVGLPGAGPVLRPRLIAAFGTQRERYQDAGELQNYSGIAPVTKRSGGTQSIHFRRACPKFLRQTFHEFAGHSIQKSTWARAYYRSQRELRKDHHAAVRALAFKWIRVLYACWRDRQPYDEATYARSLGKRNSPLAKLTTALQWKDVAGFKKFSPKTT

SEQ ID NO: 383685 - protein, 337 aa, unidentified
MKKQHPPHALFWAGIDLAKATFEAALWGHKDFRAMRVHSFPRGEEGARALLAWLRDNAGPDDPIGLVMEATATFAEELATWLLDLDPGLHIAIVNPIQTSAFLRSLGLRNKTDDLDAKALAQYGAERRPVPWEKPKPEMAILKDLVRVRMDLVHARTAMALRLKDHARVSKSAAKAMANVIRALDVQIKALVVEIRKHLRAHEALAEQAERMDSVVGVGLLTAVTVMAELGDLRRFARSRQLTAFAGMSPRRKESGTSVRGKPRLCKQGSTRVRAALYLAASAAVRFNPDMKAFYDRLLAQGKVRRVALAAVMRKLLVLMRAVVKADHDWIPKAQAV

SEQ ID NO: 383686 - protein, 311 aa, unidentified
MDNVFIGIDVSKEYCDVAVIPDGTRKRFTNDEEGQEAVAAFMLPLKPGRIVIEATGGYEMGVVRVLADNLLPVVAVNPRQVRDFAKATGRLAKTDTIDAEVLSQFARAIQPDIRPLPEKEAQVFRALVARRRQLVQMLTMEKNRLEKSPPAGSKDIRNHIYYLTEALKKIDRDISRTIRKSPLWKEKETILTSTPGIGPVISCTLIAALPELGTLNRKEIAALVGVAPFNRDSGKHRGKRTIWGGRSHVRATLYMGTLSAIRFNPVIRAFYKRLVDAGKVKKLAITACMRKLLTILNTMMKNKTTWAEVRS

SEQ ID NO: 383687 - protein, 354 aa, unidentified
MSQKFNTAIAVIGIDIGKNSFHVVGHDERGAIMLRQKWSRGQVEARLANVPPCLIGMEACVGAHHLSRKLKGLGHDARLMPAKYVRPYSKGQKNDFRDAEAITEAVQRPTMKFVATKTADQLDLQALHRVRERLVSQRTGIINQIRAFLLERGIAVRQGQRFLRAELPRILAAPPDVLSPRMVRLIEDLADDWRRLDERIEGLSSEIETIARHDAGCERLMSVPGIGPIISSAMVAAIGTGEAFSKGRDFGAWLGLVPRQMSTGGRTILGRISKRGNRYLRVLFVQAAWVVLIRPKSWQRHGLKSWIEAAKKRLHPNVLAIALANKLARIAWGVLAHGRDFEVRKISEAAAQSA

SEQ ID NO: 383688 - protein, 278 aa, unidentified
MNQRNQAIDGEAKAKPKVIKLGLDLHVRQVTECRQLDGSTPKPAQQWDPWKLLAQVKDWVQAGIKVYSSYEAGACGYWYHRELIKAGALNFVVVPRVLENQRTRHQKTDRLDARALLDRLENYLNGNLHAMSIVRVPSLQEEQQRSVVRYREQLMRDRRRAEARGRAIALVQGIEVPVGWWREARWQEFNRQLPEWMSLQVRHWREQAVALDYQERTIRRELQKSLSIELPLGIGALSWITLERELRGWDRFHNRRQIASYTGLCPGIHHSNGRGREG

SEQ ID NO: 383689 - protein, 340 aa, unidentified
MQVIRFGIDLAKNVFQVHGVDASGRVVVQRQLRRAQVAKFFAAQPPALIGMEACGSAHHWARTLSALGHEVKLMPPAYVKPYVPRNKNDARDAHGCCEAVSRPDMRFVPIKTVEQQWARALHRTRDLLVRQRTQLANAMRGMLYEMGLTSAQGAAGLEALLRRIEASDEAIPEALLICLAPLAGQWRALDGEIGKLDKQILAQVRQQQAALRLTTIPSVGPIIAHAIIAAIGDGRQFASARDFAAWLGLTRKSHDTGGKHRLTGHISRAGDRDLRRLLILGASSWLRQVRAKPDRGSPWIRGLLARRPVKVAVVAQAAKTARIIWAMLSSGQQYRAPVAA

SEQ ID NO: 383690 - protein, 391 aa, unidentified
MIYVGIDVAKNKHDCCILGSSGTVLREAFTLNNDRKGFQELYSAIQEALHQEGADQIKAGLESTGHYSENLVAFLRSSGIQPIVFNPLQVNLFRKSQSLRRTKTDKVDAKCIAQLLMSAESTPVPASYQIQELKTLTRHRSRLVSQRTKLKQCISRLVDILFPELPSVCCSAAQASMRTLLLELPSARQIAACRIDRLTNLLYAASKGRYSREKALEIKQLAQQSIGANSPASELELRLTLQQLDFLLDQLKQLEKAIQTIVAAIHSPILSIPGIGPTLTAIILAEIGDIHRFSSPDKLLAFAGLDPSTYQSGKFTAGHTPMVKHGSTYLRWALMQAARLASIHCDTFRDYMGSKLAQGKHYFVALGHVSKKLVRVIFRILTANEAFVPQA

SEQ ID NO: 383691 - protein, 350 aa, unidentified
MTNISNVIIGVDTHKATHVAVAIDNNGSRLAAFSAPATTEGYSALEDWASALGTITSFGIEGTGSYGAGLSRHLLAHGHKVIEVTRPNRQLRYQHGKSDSLDAEGAARSVLAGQATAQPKTQSGSVEMIRHLKIARDTAVKSRSQAMVTLKTLIINAPASLRDTLDQISGKITLIRYIAAFRPGAMTSTIASAKTALRALAQRWLTLHEEIQSHDKALEQLVASRASTLLKSHGIATMTAAEMLILVGDDPTRIRSEAALAKLCGACPIPASSGMTNRFRLNRGGNRQANAALYRVAIVRMRNHKPTLAYVSKRKKEGKSNREIIRCLKRYIVREIFSGLCRPDIPPAIG

SEQ ID NO: 383692 - protein, 482 aa, unidentified
MKKRSIYQQQSQELMCIFEEAGSHKKVLVVPMDYAKKEHFVMFCNGNGDILRKPFSVKNTPEGVEYLIEQVRKTCAYHKIKKQHLFFGGEDCASYTENFTRYLREQGWLVAGVNAQDAKKQRENVQASTDRLDLLGIASMLINRRGNCASAQSGAYRNLRTLVRHRRELVRLTTEEKNRMHCVVDRLFPGFLEESKSGLTPFHEPSLRVMEGRFSAAQIRRRKQSTLADLLARAGAQKPQEKATQLQVYAANVLQPPEEYVSTLQTSLAQHVALYRCLGENVSSLEREMAIWLAQTQGAFLTSVRGIGLVLASGVSAEIGNPATQRPVGNLTSYAGIIPRVSQSGGSDGDTHVGSVAKRSNRILKDYLVQSACHLGLHGAEDLMADHKRRSANGQHADFGIARRYLRIAMHMMRYSHIYLPTNLHGLSNVAARGAYYQATWPSILEKWKKYDAHEVAFASENPLGQWRDTVQRIYSIKLKIK

SEQ ID NO: 383693 - protein, 374 aa, unidentified
MGKVTRYVGMDVHAETISVAIVEGRGVARSLGTIANRPEAIRRLIGKLGDASSLRVCYEAGPTGYVLYWQLTKLGVACEVVAPSLIPTKPGDRVKTDRRDAEKLARSYRSGDLTAVWVPNAEHEALRDLVRAREAAKKDELRGKHRLSKYLLRNGQRQAEGCRGPWTVTWWQWVRGLTLPYAAQNVTLLDYILAVDHEAQRLVRLESAINEAVLTAPTEMKAVIDALQALRGVAKITAITLATELGTFARFTCAPQVMSYTGLVPSEHSSGARDRRGAITKAGNAHLRRVLVEAAWHYRHRPKLNVRQKQLQGSLTPQVAAIAWKAQERLHRRFSRLTSRSKPAGKVVIAIARELVGFIWAIGVEAEKRKERSA

SEQ ID NO: 383694 - protein, 346 aa, unidentified
MSYSTTIGVDLAKNVIQVSVVSGHGKELLNRSLTRKKFAELLGKQNSALVAFEGCASAHYWARTAVRLGHEVKIIPAKAVTPFLQGHKTDSNDALAVAEAARRPNIKDAPMKSAEQQGLQAIQRARELLIHECVALSNHMRGILLEFGITIPQGFASLLRMLPEILEDAENELPDLYRPTLNRLHQRMLNLRVDIEAMTKEIEQLVKAHPVCQKLTALEGIGPICALSLYAVLGSGKAFAKSREFSAYLGLTPRQFSSGGKTNIIGLSKKVGNRRMRALLIQGALTYVYRMKEPKCAKDRWLRDLIDRAGPRRAAVALANKNARTAWALITQGTEYQRLQPLEVAA

SEQ ID NO: 383695 - protein, 369 aa, unidentified
MATRAEETAMNKDIVLVADYHAENIAYRWFNEATGEERTGKYPTGRADILQQTDRAAGELVPGGRVVWIMESTTGWARVKTLLDARTEFVLANVLQMPLPPKARRRKTDKIDTARILREYLHGTLPRSFQPPQWWRQVRRLVDSRQDLVERQTAVRNWISSLLHHETWEDRSNLWSGVGQRRLSVMAKKLSPSDRMLVELKQSQLAQLADQIDRVEAALQKVYDSWSQAQWVDRVRGIGMVTAVSLLAHIGPIDRFATAEDLISYAGLAPGVHQSDQTRRHGRIGGGGTDSHLRYLLIEATQWLCQIPRYRPTYEHVLAKRGKKVAKIVVARLLLRSLHKMLSTRVQFNPTPRMSHATSQTTTTAGCSR

SEQ ID NO: 383696 - protein, 321 aa, unidentified
MDPVGHVLFRKRLRREKLLGFFAAQAPCVVAIEACAGSHYWGREISKFGHMVRLIPPAYVKPFVKRQKNDAADAEAICEAAQRPSMRFVPIKNEEQQANGVVFRARDLLVRQRTQCINALRGHLSEYGYVFRQGITHAPTLIAHVEDPNSSLPETARPILKLLTKTFAALEAQIKELDVEINRRSKADPIARRLMTIPGVGPIAATAITALVPAAGSFRAGRDFAAWLGLTPVQKSTGGKQRLGATSKRGERTIRRLLIIGASAVIRQARLRGAPTGSWLAQMLPRKPKMLVTVALANKMARVVWALLVKGGVYRAPALAA

SEQ ID NO: 383697 - protein, 368 aa, unidentified
MPRIAEQARPVTGDVDTHADVHVAAVVDQVGRVLGTQAFPAGAAGYQAALAWMSAHGELTKVGVEGTGSYGAGLARYLAACGVEVAEVMRPNRQARRQRGKSDAADAVAAALAALSGEASGVPKSRDGAVESIRALRVARAGAVKARTQAGNQLRDLILTAPEQVRQQLAGLPSQRQVDLAARFRPRDLAGPAEGAKAAMASVARRHQELAAEIARLDVALEELLSHAAPQQLLAKQGVATVVAATLLATAGDNPSRFRREASFAALCGASPVDASSGKQLRHRLNRGGDRQANSALWTIAMTRLAHDPRTKAYAARRTTEGKTKKEIIRCLKRYIAREIYKALCRPRQPATASAPQVKQDLPAPVLT

SEQ ID NO: 383698 - protein, 364 aa, unidentified
MREQQNNKRDRITIGLDLGDRWHRFCVLGESGQVVEEGSVANNRVAVSELSSRYPGALIVMEVGCHSRHLEQAGCEVIVSNPRKARAIYQHERKSDRRDALMLARIARMEPALLYPVRHGSEEAQQDLLRIKLRDSLVRARVGLINSLRFTLKSLGYTIANPSTERFHKVIQSALPQSVAQVIAPSVQALEELTLRIKLLQREISDQTRSKYPDTAWLEQIPGVGPITALYFVLKIEDPARFKRARDVGAFLGLCPRRDQSGENDPQLRISKRGDAYLRRLLVSSAQYILGPFAPPSALRQYGLALASGATARAKKRAVVAVARKLAVLLLTLWKNKSSYEAFPQRSSREKMRTNDLERLRCIA

SEQ ID NO: 383699 - protein, 458 aa, unidentified
MGKGSESGMTRGDRRRNARREVLRGLVPGDGAVIGIDLGEDKQALAVADHDGRVVARRTVRVKAFRLGEALDWAVGQARAAGFGAVAVACEPTGARWLQVQRLCAERGLALVCIQPLVSHVAREQQDLTGHKTDEADCVMIARLAFELHCYVPEELDQAWAELRHLGRRREQLVTAATASVLRVRDFLSVAWPVAAEACAQPFESVTWLAAVQVVTGRDGSGPEELAAGGLAGFTAAVRGALPGWGGQRVSGRVCRAVFAALASTEGVVTAHRRGLFRRIAAELGDLQRTRAQLRAAGAGMAAVPAELGLSRLGDIPGLTAVGAAAILAETGDPRRYDSSSSLVKHAGLAPAGNASGAFEGQAHISRRGRPGLRLAVWRAVWPMLAHNPVLAAKHASLTAPAGAGSRPAGPGAARAQRARARVACAASLLRWIYSMTVHGTSWDPAVAAGAASQPEAA

SEQ ID NO: 383700 - protein, 320 aa, unidentified
MATESSDVFVGIDVSKHRLDVHVLPAATAFAFDNTLEGIAQLIERLKPMNVYRLVVEATGGYQRRVAVELTAAGIPVMTVNPRQARDFARSLGKLAKTDKIDAAVLAEFARAIRFRADPESSQAQLQLQERVVRRRQLTEMLVRETNRLHLAWDKVALKSLRVIIKALEKQRDELDARIAELIKSDDDWNNKLQLLQSVPGVGANTAQQLIAEMPELGKLNRQRVAALAGLAPFNRDSGLMRGRRSIFGGRATVRSALYMATVASIKWNELIRSSYRRLKAAGKPSKVALVACMRKLLIVLNTLIRENRKWIDEPHRTHA

SEQ ID NO: 383701 - protein, 402 aa, unidentified
MNAVGIDVSKGKSMVAIMRPFGEIVSTPFEIKHTSSDINSLVKLIKSIEGESRIVMEHTGRYYEVLAHQLSEANLFVSAINPKLIKDFDNDSLRKVKTDKADSVKIARYALDKWQNLKQYSVMDELRNQLKTMNRQFGFYMKHKTAMKNNLIGILDQTYPGVNTYFDSPARSDGSQKWVDFASTYWHVDCVRKMSINAFIDHYENWCKRKKYNFSKSKSEEIYGKAKELVPVLPKDDITKLIIKQAVDQLNSASITVESLRTLMNETASKLPEYPVVMAMKGVGTSLGPQLMAEIGDVSRFTHKGAITAFAGVDPGVNESGSYEQKSVPTSKRGSSDLRKTLFQVMDVLIKTHPQDDPVYQFLDKKRAQKKPYYVYMTAGANKFLRIYYGRVKEYLASLPES

SEQ ID NO: 383702 - protein, 430 aa, unidentified
MMEEVDDAELVVERIAALDLGKAGLEACVRVPSPHRPGRRMQELRGYGTTTAQLLEMVAWLRHWGVQRAVMESTSTYWKGVYYLLEAEGFECWLVNAREVKNVPGRAKTDRADAIWLAKVAERGMCRPSLVHPAEIRRLRDLTRYRRALVQDRTREQQRIEKLLEDAQIKISSVLSELHGVTARAMMDALIAGQRDPRALAQLAKGRARKKTAQLEEALRGFFTDHHAAILRMMLDNTDRISAQIAALDARIEKEIGPFSGQAARLAEIPGVDAVAAAELIAEIGVDMTRFPSDAHLVSWAKFCPQTHESAGKSKSKGRGRGNPWLAGTLGRIAFANSRADTFLGARYRRLARRRGKQKAIVATGNSVLTVVYYLLSDPMATFCDLGPGYYESRINKHRRARDLVTQLQALTGQHIVIRDGKAVITDAAA

SEQ ID NO: 383703 - protein, 423 aa, unidentified
MMKLKYSICCGLDVHKNVIVATIVITNADGISEYKQKSFSTFNSDIRKFHSWLIENNCYHVCMESTGKYWIPIFNYLENDIEVCLTHPKYVKAIKGKKTDKKDSKWIADLYKFDLVRCSFIPPKDFRQLREIARYRFKLVCMKSSEKNRIQNCMTVSNVGIASVLSDPFGKTATEIMSYLLTHTSDSIDERAIRKLIKKGAKAKSDEIIAAISGYNIESDQAKKLELARSHLEYLDGMITQSEVELYVRMKPYYKFVELVSTMPGMTELSSTIVLAETGVDMSIFDDAKHLCSWCGLSPTNNESAGKKKSVRISKAGDYLKPMMVQCALAAIKSKKQTYFAIKYGRVKKRRGHKKAIIAIARMMIVCIYHMVSEEKPFNPIDYEELMSPKNQIERVILNENNVFAYLESLGYDSSKLVKRNDN

SEQ ID NO: 383704 - protein, 346 aa, unidentified
MLYVGVDVGKSKCRASMMNAEGKIMKEIDFANNSQGISSLTSLLSMDDHVVMESTGPYWLDLYNHLDDLHIPVVLANPLKTKAIASARIKSDKVDARILAHLLRTNLIPQCYVPPKEMREIRSLVRHRVSIVKLRTMVKNKVHALVDRNGLKHEFSDLFGKAGMKWLKSLELSGLDRLMLDNYLMHLESLDAQIDRVDDEITSKASVDGDVRILMSLTGISVYSALLIKSEIGTIERFADYKKLVSWAGLAPSLHQSGNVEFHGNITKQGSTMLRWIMVEAARVASNHDPRLRAFYERVKVRRGDQKAVVALANKMLKIIWFMLTWKEEYESANEKSYARKLNSLD

SEQ ID NO: 383705 - protein, 331 aa, unidentified
MEKSDFKYFVGVDISKKSFDIAIIEGDDTSSFVFDNSQKGTRAFIRLLKNRDIPLESTLICLEHTGIYGRLLIARLLEKQANFCVEMSLRIIRSLGIQRGKNDRLDAIRIARYAAKNHNEVELYRPLPEILEKVNALLKVRDQLVRFRADLGKHPNELKTFDPELGKLVQRHIKKTTKCLNDEIHRIEGEIEALVLSDERLNTTVRLATSVTGIGLFTALYFTIYTNFFTRYENPKQLACYCGVVPFEHTSGSSIQKRSRVHHMANKMMKKQLHMCALAAVRHDPDLKAYYERKAEEGKNKMLVLNNVRNKLVLRVCAVVKRQRPYQKNAA

SEQ ID NO: 383706 - protein, 433 aa, unidentified
MQDVQDEPLFAERVAGLDIAKAGVEVTVRVPSDTAAGSRQQETRTFGTTRAELESLGDWLACWGVARAGMEATGDYWKPVFFVLEARGFDCQLYNAGQVKALPGRPKTDRADSIWLARITERGTVCSSFVPPEPIRRLRTHTRYRRHLTQARTAEKQRVEKLLEDGHLKLSSVISDIHGVSGRDMLDAIAAGQRDPKALAQLARGTMRSKIRRLEQALDCSFFTDQHAAVLAMMLTTIDHYTTQIQALTAKIEELIAPYLHQVAQLDAVPGIGTICAQDIIAETGTDMTAFPTAAHLVSWARWSPQVRQSAGKRKGSNATGRGNPYLGAALGEAAISTGRTQTFLGAKYRRLTRRMPKNKALVATGNSMLTIIHALLSDPEACYQDLGADYYEQRMHARRQARNHVRSLERLGYKVTIQAINPDTGELPAAAG

SEQ ID NO: 383707 - protein, 391 aa, unidentified
MRKPKKQKKPLNDLSRSLTPFDPNRTLITVVELSKESWLVGGIIPGVERQPLKKLKPDENELLKLLERWRKEAEKAGHKIDRIAVAFEAGRDGFWLARWLRAHGIEAHVIHAASVAVSREHRRPKSDRLDTKGLKRVFLGWLRGEREHCKMCAIPTAAEEDAKRPHRERETLVGEQTTIINRIKATLARLGIRSFNSKLKKAPERLEHLRTPEGEPIPPNTLAELQRDMARKQFVAEQIRQIEKVRLEQLKEAPKTGPNLMVLVLMRVIGIGIETADMLVNEILSRNMRDRRAVARYGGLTGSPHESGSKSREKGLARSGNARVRRGMIQLAWRFLDYQKDSALAKWFEARTKNGSRKKMIVALARKLLIALWHFVRDGVVPEGVVLRPAH

SEQ ID NO: 383708 - protein, 418 aa, unidentified
MGKRKNRVCGADVHKDIIVATIQYSDDTEFQEKFGTTSIELGRFRDWLIAHNCEQVAFEATGVYWFPVYDALSPSIDTIVANPWMIKGIPRNKSDTLDSKWIAGNCLDGKIKRSRVLPKDGRDLRTLTRARSAYTKTRTQLRNRIHKYLALCGITLSSYISDIFGKSGRHILDGLIESKDIDTIMDGIPSGKVKKKREPIKASLGNGLDDVSRMLIKDTLELLDHLDEKVSDTSLEILGRLQERARDLAIVMSVPGIGFVSASIILAEIGDYHDFQKSEQLVKWCGLAPGLNESAGKKSPCGITKQGSKHLRTILVEIAQVVAKMSKNNLSSFFHRLRARKNYNVAITALARKLISIIFHLLINQELYKEDNCATVKTKPIKKDLLCLSKEEQFKDGVAAIVDAFYYFKKKSSLEGGG

SEQ ID NO: 383709 - protein, 312 aa, unidentified
MESMYYIGLDVHKKTISYCVKDVSGRIHREGKIPATRFDLGRWMKTLPQPWTVAMEATIFTGWIYDHLRPHAAAVKVAHPLMLRAIAAAKKKNDRIDAKKIADVLRCNFLPECYMAPTAIRERRRTLRYRNLLVRQTVQLKNRISGLLMEAGVSYNKEKLHKVGYFRELLKSNPDIDESLRPLLQLCRETLVRLQKTESALIRSLARDRFLVERVEHLMTIPAVGPITALTWALEVGEVSRFSSIKKAISYCGLCGDEQSSGEHVKRTPISKQRNKHLQCVLVEAAKMAPRLSSLPFITIKKGFKRYKSPAL

SEQ ID NO: 383710 - protein, 309 aa, unidentified
MNDTSPAYVGIDVAKKDLAVCGPGMKKLYTNTPLGHAWLIKALPSNAHVVMEATGGYERALTLALHAQNIPVSVVNPRHVRDFAKAMGQLAKSDNIDAQIIVAFAQTKRPAADTPPAQSLIELEELMARREQLVALRTIEKNRQEHHRLKLLQVRSQKLLITIELQIEELEQKVRELIAADALLKSKRERMLQVEGVGEITVASVLAFMPELGSVSRAQAAALLGVAPFVCESGMERGKRHIWGGRANVRTCFYMAAMTAMRDNRVLREFYQRLRAAGKPGKVAIVAVMRKLICLLNHLLKNPDFLLAH

SEQ ID NO: 383711 - protein, 314 aa, unidentified
MNQYVGLDVSLEETKIHVLDEAGGRVWRGKCASHPDELETTICKHAPGAVRIGLETGPLTTWLWTELSKRRLPMVCLDARQAQRALDMRANKTDANDADGLAHLVRAGWYKEVRVKSRDAMLSKAVSAARRQLLVISTNLSNQVRGLMKTFGLVVPKGRGRIFAQRAAELDRLLLRKVRDDANCRRLMTAPGIGAVVAASYVAAIESPANFKHARDVGAWVGLTPRRFQSGEMDYDGHISRRGDERLRALLYEAATVILTRVRSASALRSWALALKKRLGFKRAAVALARKLAVVLHVMWKTRKNFDPNHRLVA

SEQ ID NO: 383712 - protein, 346 aa, unidentified
MEHYAGIDVSLELSSVCVADTQGKIVKEAKVASDPEDLIAFFASLGFAVKRIGLEAGPLSQWLQSGLKCAGLEVVLLETRHVKAALSAMTVKTDRKDARGLAQLIRMGWFRPVHAKSMGSQEVRALLVARKQLRERLIDVELSIRGILRGFGLKIGLVTRKGFEARVRELVTGQATLDHITRAMLSARAVLRVEYEKLHKSVLAMAREDAVCRRLMTVPGVGPLVAMTYKSAIDDPSRITKSKAAGALFGLTPKKYQSGEKDITGGITRTGDEMVRTALYEAANVLLSRITRFSKLKRWGLDVAKRRGSKRAKVALARKIAVILHRMWIDGTTYRWSEAQLMATQA

SEQ ID NO: 383713 - protein, 336 aa, unidentified
MLYVGLDVHSRQSSLCILNSAGGTVNQIQLTGPRAAVVDRLRQLDQPFSICYEASCGYGHLYDALRPLAHHVAVAHSGKLRLIYGSKRKNDRVDAAKLAKLLLLDMVPPVHVPSIDVRAWRSLIMLRQRVLTLVVRCKNQIRGVLREHDIVGAKWLWSKKQLAWLESLELHPVAKLRLELAVGEFKSLQEKIKRIERELQKYADVHPAVKLLMTIPGVGIRTAETFVAWVDDIGRFRNNRQLGSYFGLVPCQDASADKNRLGHITRDGPPVMRKLICEATWTAIKRCDVFNAFFERVVGGKHERRKIALVATMHRMIKVMGAMLRSGEAYDANYKR

SEQ ID NO: 383714 - protein, 448 aa, unidentified
MAQGSGLTRGDRNRNRKLAALREVVRRDRAVLAVDLGEDKQVAVVLDHEGRVLARTVVKAKAHQLGRLLEWGARQAERNGFAGLAVACEPTGHRWKALMGLAEEAGHGFVCVQSLAVHRTRENDDLTLGKTDHRDSILIGKLVIRLECYLPERAEAEWARLRHLGARRGALVADTTACKQQAGDLLGCAWPAPLGAAGKPMESATWLAGMAVIAQRCGGRPERIRKMGYEKFLAAVRRELPRWGGKLIRHAIARRLREALADPAGVTAQRPGVLERLHLLLEDWRGLRLRLADTEERMLAVLDGLGLTELASSIDGISALPAAVILAESGDPRRFSSARALVKHAGLNPSEHLSATLNGQSRISLRGRPGLRCAAWRAAWPAVLHNKVLKAKYAHLTGRDAKRLADGQARCACAAALLRWLWAVITTGRAWDASVAAGQAAPAIAAAA

SEQ ID NO: 383715 - protein, 331 aa, unidentified
MDQRNYVGIDVSARSLEVALVGAERRSATATFANTSTGHRQLIKWATKRGRLAQVCLEATGVYGLAVAFALHLHPKTEVMVVNPQVIKNYAGATMQRAKTDAVDAQLILDYGRRMPFARWQPPSDEVLQLQAITRRISQLKVELNREANRLDAEDYKVATTDLIERDIQVNLRHLNRRMVRLEKEAVALVLSVPHLSMLFQRLLSIPGIGETSALRLLAELAVLPEGMKPPQWVAHAGLDPRPHESGQSVHRPRAITKAGNKYLRAALYMPALVAIRHQPNVKAFYDQLIAAGKKPLQAITAVMRKLLHAIWGVWKHDQDFDGQKFYKIAT

SEQ ID NO: 383716 - protein, 428 aa, unidentified
MNNHKITRRQQFCQIQSEITGSDQYLVVGIDVAKDKHHAFMGSATGKSLLRKLVFENDLEGFRKLLERSDAVKTQNALSKVVFGIEPTGNYHKPLGAYLIRCGRHVVLVTGKAVKNNRELLDGRWDKNDDKDAANVADLVSRAKCLYYDYPSSSINDLRQLLSLRRRLKKEEHSLRMRIRNNLLAQYFPELDRFYSACESESLAIVRWCLDPGRIAGMEFEQFFSMVTRSRRGIAQKQRLKKIHQLAVESVGCAMGPAAEFEAALLVDKLKEVRRQLKQIADRMEDICMQFAEYSWLLTIPGFGPYISARVLASIANPWRFDNSSQVLKLAGYDLSAERSGKKSDDAVPVISKRGNSELRYALYQAAHVASTRNRGFIRYFTRMLRGRERERGIKTKMKVKLAAKMLKIAWTLMRKQEVFDPDHLFIE

SEQ ID NO: 383717 - protein, 409 aa, unidentified
MSTDACSNVFAGLDWAVHTHAVCVIDAAGAIRERFEIAHDREGLAELMRRLARFGASLRIAIERPSGLIVDALVEAGHQVFPIHPNAVKASRPRYRSHGAKSDASDAYLLADLLRTDGHRWRQLSPQSDSIRALRALVRSRDDLVATRVALGNQLHSTLEASWPGAACIFADVTSPIGLAFLKRYPSAASAARLSEAALRRFCRSQHYSGRRSPAELLARLNSAATGLAGPLTNEAAAQLVRSMVAVLQPLVAQIAVLTRRIERFVESLPDGQIIMSFPRAGHICAAQILAELGDVRERFPTLDQLTAEAGAVPVTYQSGKTRSMAFRWACNHRLRQAVTCLADNSRHANEWARGIYTAARARGCDHPHAIRILARAWLRVIWRAWTDRKPYDPELHLGALKLAYHQGG

SEQ ID NO: 383718 - protein, 397 aa, unidentified
MHGQIHSTTFTRILALDLGKFNTVSCLYPRSGGDHQFMGLRTTPQAVHDLLAQHVGDDPSQTLVVFETCDCAGWIYDIAVALGFTVAVANPAHEAWRWTRVKRKTDKDDALKLARMSAMNQLPTVHMPDPQQRQRRRLVHHRRALVQRRTQIKNQVRSIFSQQGLELPRGTKCWTKAGIEQLRAMSQPISRCEIDDLWKGRLHVELQLLVSLDKQLRKIDQKLDALGRTDERIKRLQTVPGVGPRLAEAVVVHLDDPHRFKSARQVSSYAGLVPKQLESGTMKRVGRITRRGPSLLRGMLVEVAWMVYRHNDWARAFVQKVSRGMKQRKKIAIVALARRLLVKLWAMLRDGTSWRDPGGAGANQGEDVRFAHDRWRLSPPEDTAPVTALSSDGGMIG

SEQ ID NO: 383719 - protein, 341 aa, unidentified
MQITTIGFDIAKNVFQVHGIDAAERVVVRKQIRRGQLMKFFEALPPCLVGLEACATAHYWARELTKLGHEVRLMPAKDVKAYVKRNKNDAADAEAICEAVRRPSMRFVPVKSAEQQGQLMQHRTRDLLMRQRTQVINALRAHLAELGITAAQGREGIRDLLAIIADDGDARLPIDARASLIVLAAQLQAIQTLIGSMEKRIIARHRSSEASKRLQTIPGIGILGASTIATMVTDPKAFRSGRDFAAWVGLVPRQDSTGGKRKLGPISKQGDRYLRRILVVGAHAVLKRARLHPQKYPWLTQLLARRPFKVVAIALANKMARVAWALLAKGETYRVPRLAAA

SEQ ID NO: 383720 - protein, 411 aa, unidentified
MHNRQNYLYVGVDLHKEHHTAVIINCWQEKLGEIQFDNKPSAFSKFLLEVETYVSDGLSVVFGLEDVGGYGRALAKYLVDHEQVVKEVNPALSFLERKSQVMIHKNDSWDAECVARILINKFNQLPDAKPNDLLWSIQQLVSRRNALVKAQSSLKNQLHIQLNHHYPSYKKFFSELDGKTALAFWQQYPSPSCLEGANIKQLTAFLLDVSNNTCSVKKASDILKLVKEDGHTMKEYQETRDFLVRSIVRDIEFKKKEMKYIERELKRLVNLLDYQLDTMPGIELVTASALIAEIGDIRRFLNANKLARFAGIAPVYFGSGGKGKAHKSKQGNRALHALFYNLAVQQVQVAKGSKTPRNPVFHAYYQKKLKEGKTKGQALVCIMRRLVNIIYGMMKYKTAYELPVVQEKEVV

SEQ ID NO: 383721 - protein, 340 aa, unidentified
MSNISTIGLDIAKSVFQIHGVDTAGEVVVRRKLTRGRVLAFFESLPRCLVGIEACSSSHYWARELIALGHDVRLLPAQYVKPYLKRQKNDAADAEAICEAVTRPTMRFVPVKSPEQQSVMMLHRVRLMLNRQRTQISNALRSHLSEFGVVAPIGRNGIEQLLMVVNDENDSRIPADARLCLRMLEAQLKVVKEQILENDRRVRASARETELGRRLMEIPGVGPLLASAFVATVADPHAFKSGRCLAAWIGLVPKQNSSGGKERLGSISKAGNRYLRQLLVVGSMAVIRYAERNGTRRPWLVQLMARRTTKVAAVALANKTARMVWALMTNGERYREPIIA

SEQ ID NO: 383722 - protein, 325 aa, unidentified
MVTCVCNKQIVKTATMQADPTALAARLPRWFPGATLYSVYEAGFSAFVLHRVLTTAGITNIIVNPASVAVAAHDKVKTDRRDSKKLAIDLADGRLRGLSVPTEAEELARLLPRTRAQIVKHRATIARQSKAKLPQCGRIAPSRRRMLRSRYVREIAAGSLPPERSVRLTLLAEQWRCATRQLIEMRRLRRDQAQAQEEIDKVYRSVPGLGEVVARTCATEWGDMTRVAKERALCSATGLTPSEDASGASVRRGPMSRQGSRRVRPVLVETAWRAMPRDGVRKERFARIAATRGKKRAIGAMARRLTGRIRACFRQGTTYAVGTYA

SEQ ID NO: 383723 - protein, 339 aa, unidentified
MKKTFQNFLGIDVSKLTFDVALIVSVNSMNNIVSSSFSNNKKGVSQLLKFLKKQGVKNLNDELLICMEHTGMYSRILVNNLNKFTTNIWVENAYSNKHSTGIKRGKTDAADSIDIAKYACRFMDNAKPYDEKTNTVQTLQDVLSNRTRLMNALTNLQKPIKEMESIGLNEAANLLAKHCKAVIDGLTKSLKLIEKEIAEIVKKDEEAKQKIHLLQTVPGVGLLTALSFYCTTNGFTKFINKKQLACYCGIAPFPYQSGISIRRRNQVHFMGNKTLKSTLFLCSMRVIQLKGEMQEYYKRKVEEGKSKMSVLNAISNKIVARMCAVIQNNEPYKNYLLLS

SEQ ID NO: 383724 - protein, 356 aa, unidentified
MSYDVKYIGMDVHKEAIVIAVQNESGKLVMESVIETKASSILQFLHGLRGELHVTWEEGTWAAWLYDLLQPHVQHIVVCNPRRNALLKEGSKSDKVDAHKLAELLRSGMLRPVYHGENGLRTLRELGRSYQTISKDLTRVMNRLKALYRGWGIPCAGTQVYAARCREEWLSKIPQAGVRRRAELLYQQLDGLQALRRDVRPEFLAESRKHKAAKLLRQIPCIGPVRAARLIGLMQTPHRFRSKRQLWTYSGLGIETHDSAQYRFVSGQVQRSKKPQQVRGLNRNHNHEMKEIFKSAATRASGGRGPFHDFYAGLLAKGMKPEMARLTLARKIAAITLTLWKKEERFDVEQLKTQAA

SEQ ID NO: 383725 - protein, 427 aa, unidentified
MPYRIAGIDVHKKMLAVAVADVEVEGDVHFERLKVGTSPDQLRGLAEWLVEREVEEVVMESTAQYWRPVWEALERYWSPKRRTRSDASPVSGTLHLAQAQSNRAAGGRKRDFPDAERLVKRLVAQELILSFVPDGEQRLWRTVMRRKYQITRSRVQLHNRLEALLEEAHIKISSVVSDLLGTSARRMLHAVGDGETDPAALAALADQRLRATPEQLRDAFGACADLHPVYRRLVKLTLDELRLIEAHITQLDQQMAQLLAHHHDAVQRLAEVPGLGVDSAQQIIAEVGATAAAFPSAKQLASWMGACPGNEESAGVNYSHRCPKGNRQMRRVLNQAANAAVKAKGTIFAIVYRRLVPRLGHAQAIGAIAHRLCRLIWKLLHEGIRYEERGPTVSAEAKKVRTRKMIRELRTLGYHVELPPAPSSNPA

SEQ ID NO: 383726 - protein, 341 aa, unidentified
MLYVGIDVHQNRSNACILGDDGQKVKTLEVRGHVEKLIQALRDFARRHDQPMAAAFEASLGYGPIHERLSKFCHRVVVAHPGKLRLISQCKRKHDRIDAEKLAVLLRVDLLPQVHVPKVQVRHWRKMIEFRRRAVDARTRTKNSLRSLLRSELIVKPKGVGGLWTKKGLAWLAQVELDPALAMQRDMLLDDLTHQQQRITRLTAELDRMGQRHPAVALLKTIPGVGPRTAEAFVAYIDRPERFGRSRQAGTYVGLVPCEDSSGGKQRLGHITKEGPGTLRKLLVEASWRGVKTCPRLAATFDRLVAGDPGRRKIAIVAMARRLAELMCAMMRSGEVYRQAA

SEQ ID NO: 383727 - protein, 257 aa, unidentified
MVDVPCFIGIDVAKAQLDIALRPAGERWAVPNDASGIAPLVDRLQALHPTLIVLEATGGLERAATAALAAAGLPVVVVNPRQARDFARATGQLAKTDALDARALAHFADVIRPTPRPLPDAQTQELRALLGRRQQLIVMRTAEQNRLAGTSGRLQTDIAAHITWLHARLATLDDDLETTLRASPLWRENDDLLQSAPGIGPVCARTLLLELPELGTLTRQQIAALVGVAPLNGDSRTLRGRRTICGAGGRMCAPCCT

SEQ ID NO: 383728 - protein, 370 aa, unidentified
MSVRRILAKTIDTDLEYEAIGIDLAKNCVSAALLTTDGEVVCIDRLDYSELEKSAQALSPTTFAMEPCTEMNYLVQKLEAWGHRCLVIGGKNVQNYVENHYSGQKTDLNDAQALAFLAQDTQLRTIKAKDIEQQKYASLTTLREQYIKQYRQTIVSLKGICQAWGLNISKGISGKAQLKDLIENHAAFPEELRESLVDMVTHAQTTQKVLNKITKTLEVLAKNDKVCQLIQTIPGLGTICSCRLRATIGDIKRFKNPKDFPAYYGLVPRSIATGHNEKKGKITHRGDRTMRSLMVQGAGCVIRLATCGKLKSKQLTKWILKKQKEKMPWGKLVCAVAAKLLRIVRAVLISNKPYNSKIAGVAKCSLPKGS

SEQ ID NO: 383729 - protein, 318 aa, unidentified
MTNITYQFNIGVDIAKQKLDVSFSDQRVVSFENNLAGFKRLLKEITDKSQTRVVMEATGGYEKPLAHFLQGQGVAVSIVNAKRVRDYAKALGLLAKNDVIDAKVIRLFADAVNPKLLSAASDTQQALDAQVHRREQLVKQRAMEKQHLETVGNKDAVRSIKRTIAFLDKEIERIEKALKALINADSTLTGKVDRLSGVKGIGDITALTLIADLPELGQLTNKEISALVGVAPFCRDSGTLKGKRTTWGGRAQVRSILYMAALSAVQYNHPIKAFYNRLLKNGKTKKVALVACMRKLLTVANSMLRNNTEWNPNHGKLA

SEQ ID NO: 383730 - protein, 410 aa, unidentified
METIVKRAAGLDVHKAQVTACVRVPGRGRERTQEVAEFQTTVRGLLTLRDWLKAHRVSQVAMEASGVYWKPVWVILEDEFDCLLVNARHVKQVPGRKTDVSDAAWLYQLLEAGLLRRSFVPPKPIRALRNLTRYRKAQIGERQREANRLHKLLEDTGIKLDCVASDILGASGRAMLDALVAGTTDPQVLAELAKGKLRAKIPALREALVGRFDRQHALIVSAILAHLDFLDEQIQLLSDEIEAQLIPFAAAVELLCTIPGVQRRSAEVIVAEIGLDMSRFPTERHLASWAGQCPGNDRWAGKRRSGKTRHGSKWLDSALTEAAMAATRSNDVYLAAQYQRLRPRRGHGRALGAVKHSIITGCWHMLTTGELYREPGGDYFTRRDPERATRRLIGQLERLGHRVTLEAATA

SEQ ID NO: 383731 - protein, 368 aa, unidentified
MKQVTTYVGIDAHRKDLFVAMTVGQQRTPVTWQVANEPNAVRRLVKKLEREAPGPVQVCYEAGPCGYALQRQLTTARVSCQVIAPALIPRKPGERIKTNRRDARKLVELHRAGLLTEVRPPTPADEAVRDLCRARDDAREDLQRSRHRLGKLLLRRGLHFSGRNWTKAHRRWIDTLEWTHAPERVVVDDYLLAIDHLEARLIELDARLTDIAQTDPYREPVGWLRCFRGIDTLTAMLLLAELHDFRRFQSPRALMAYVGLVPGEDSSGEKHRRGRITRTGNALVRRLLVETAWHYQHRPTVGVALAKRRKAQPTRVIGIADKAQQRLCRRFRRLAEQHKPVPKIAVAIARELAGFLWAALQPAPSPAK

SEQ ID NO: 383732 - protein, 330 aa, unidentified
MNLGIDTHTRYAQVAVVDDDGNLQDELRVPNDQLEELAEQYAGSDAVIEATGNYRPIYEVLDEHLNVTLANPSKNRLIADATVKTDRLDAKRLAHMLRSGMLAESYVPTDEIRELRDLVRTRKGLVDERTAEKNRVRAVLKRTDNAYDSELFGPNGREFLAELSLSTTDRTIVEAHLSVIDEYDTQIASLEDEIERHVLESAAAQRLLSIPGVGQFTAAVVIAEVGEIDRFDSDNALVSYAGLDPVVHQSGEKEIHGSISKEGSAQLRWALVQAAHTAVRCDDYFGNFYTRLKRRKNHQVAIVATARKMLVSIYYMLTRKEMYDPPEVSA

SEQ ID NO: 383733 - protein, 445 aa, unidentified
MGQRTVGIDLAIRGDHVARILDDGRPHAKPIRFRLTSDSLNQLIARLRDGLPAGSTITAVMEPTGMSWFPVAHWLEQAGIKVIRVKGQRVRALRRYLSEHAKTDATDAHVLGAIPLFGGVPADPVYVPDAERHALQRLTRQRERLEGEVCAIKRRLIDLVRWACPAIEAVLPDFRTNLALAILHDLLDPAVVAKAKRTTLCRFVAKHASGNHPHSGPFADNLVTGLKAAAEETRRLHGTGVSFEHLQLEVALEIDRMRLLEHQLGELVRQIEELYSKLHPSDALRTIPGIGDALAPLVLGVLHEARRFAGLDQLRGFCGLFPRTSSSGGTDHPGQTITQSGNNRIKRALYLAADAARRIDPGLAEVYWRLMVRKGHHHKQALCAVATRLVNRIGKVLRTGEAYELRDSDGKPISVAEGKAIVAERFSIPAEIRNARRRHRAESLA

SEQ ID NO: 383734 - protein, 427 aa, unidentified
MHAAGLDIGSRYVYVGLENGSVRSFETFTSSLISLKDYLLENKVISVAMEATGVYWYVLYDILVEAGLDVWLVDGRETRQVPGRKTDVKDCQWIQQLHSHGLLKRCYVSAGQVKELRSYQRLREDHLRNMSMHIQHMQKALIEMNIRLPEVLSQVHGKSGLAMITAILGGERDREALVLLCDKSLRQNKRDELLKALEGHYTEYGIFALHQAYQGFMFYKHQIQDCDYKMEAVLKEINNDKKLPPGVEPGVRKAIRHNKPKIEELGKHLLKIFDGRDATKIPGITDYNWLQLYSELGADLSKWPTEKQFASWTGLAAGQDDSGKRKKNKSKGKPTVGQLFKEMAHGLLNSKYIGLGAFAKRLRGRKGPAIAIKATARKIAIQYWRLMVKGSDYVEKGIEAYEQLVKQQKNKQLQRLALELNVQLIHV

SEQ ID NO: 383735 - protein, 424 aa, unidentified
MLGVGIDWAETFHVVALGRPGDGVVQVLRVEHTKPALEALLEQLRALEPDPDQVRVVLETRHGLLVERLVEAGFVVVPVNPDLIARRRGPAKKKDDVEDARIACLLALDRFQPLRPLIPHGELAAELRSLGRDDERACQDERRLLNRLRADLLAVFPAAVQIAGPDMGAPTFLRMLQRWPTATALAATSRQELVAFARAAHSGYPERFADRVGQALGREHFTARQTLAQAKVDTIQLMVTQLLLIGAQRRTWERRMGQLLLGAPRHRGGALPSQAERDRGQAVPGGEIYLSFPGLGDRLAARIAGEIGDHPEQFQTPNSLQCYAGQAPVTRRSGKRELLITRRLACNRHLADAVHQWALASLRRSAWAKDSDDRQRDRGKDHHAALRALGNRWLEILWHCLQRQVPDDEAVHLANRTRALHPAA

SEQ ID NO: 383736 - protein, 362 aa, unidentified
MRIIGCDLHARQQTLAMLDTTTGEVVGVTLKHEGDNVREFYSSLPRPVRVGIEATGSMQWFVNLMEELGMECLVGHPAEIRAAEPRKQKHDRRDADLILKMLVEGRFPAIWLPSKELQDLRSLLRHRHQWVRMRTRIQNALQSIALANGLRRGTALWSHDGQSRIASLPLAPHTAYRRSELQAMYEKFEAEIEKLNQRVEEQACQRPGARLLMTHPGVGPITALATEVFLGDPARFADSKALASYVGMIPREYSSGGRQRLGGLSKQGNPLLRFLWGEAGAHAARKDPELQRFYRRKLVQKGLGTASGAVARKLGIRLWIMLRDQIEYNEFCRRGQKQQKSSDACAGMPETPYGANSHRPVD

SEQ ID NO: 383737 - protein, 333 aa, unidentified
MEKNLLYCAIDVSKDKLDLDRTALALPEQLGNDHAGYRQLIKAAKKYEGAVQFVFEATGPYHLGLALALWEALIPLSVLNPARVRFYAKAQGKAKTDPLDTQVIGDFARSFRPPPTPAPDPVRRELTELLQRRDGLVSTRAAEQNRLGQCRHTLIKGQIHRLMTQLSQQTDQIDRLMKKLVGTSQELKLKVKALCEVKGVGHLTAVTLLITLPELGTLGRNHIVRLVGLAPLNDDSGKLKHKRFIQGGRKRPRCALYMPALTASRHNPVLKEFYERLLKAGKLKKVALTAVMRKLLICLNARLRNFADQHSSPERSLPCKALVTFTAQRVAKC

SEQ ID NO: 383738 - protein, 319 aa, unidentified
MLVGIDVAKAELVVATRPSGERWTVDNDERGARTLVERLRRDGAELIVLEATGGYELLCVAALAAASLPVVVVNPRQVRDFAKATGQLAKTDRIDADILALFADRVRPAVRALPDTEAQELEALLARRRQLLEMLQAERNRLGQVFGRGKAPVKKSLKAHIAFLERGLRMADTDLGDQVRQSPAWRERDDLLRSVPGVGPVLSLTLLANLPELGRLSRRAIAKLVGVALLSRDSGTLRGRRFVQGGRASVRGVLYMGALVATKRNAVIRAFYTRLLAVGKPKKLALVACMRKLLTILNTMMRTGQRWCAEHADRGLIHA

SEQ ID NO: 383739 - protein, 347 aa, unidentified
MDHFAGLDVSVKETSICIVDDAGKIVREVKVASEPEALLAVLKNLAYHFKRIGLEAGPLSQWLFSALAEAGLPVICVETRHMQAVLKAQINKTDRNDARGIAQMMRAGLYRPVHVKTIRSQKLRMLLTHRKLLQSKAIAIENDLRGTLRNFGLKVGVVGKVKFEARIRELVENLPDLAVLVEPMLIVRRTLREQIVILHRRLLAIVRDDEVCRRLMTTPGVGPVVALSYRATVDVPARFRKSKAVGAVFGLTCAKYQSGEVDRNGRISRCGDEMMRVMLYEAAQSMLRSKKWSWLKAWAMQIARRRGMKKAIVALARRLAVIMHRIWVDGTEFRWTREQATAAAAAA

SEQ ID NO: 383740 - protein, 342 aa, unidentified
MEDISTIGLDLAKNVFQAHGARSDGSVAFSRKIPRAKPLAFFGSLPKCRVAMEACGSAHHWARQIEALGHEVRLIAPIYVKPFVKRNKNDAADAEAIAEAALRPTMRFVAVKSVEKQASGMAFKTRDLLVRQRTQTINALRGHLAEYGVVAPNGPAHIARLAETIADGDDRLPASVVALCRMLLSHIASLNDQIRSLEKELAERARRDDTAKRLMTIPGIGMICATALEALAPPPESFSKGRDFAAWLGLTPRQKSSGGKTRLGSTSKMGQRDLRRLLISGAIAVVRWALRKGAPRGSWLASMLARKPPLVIAIALANRNARIAWALMAKGGVYKVSSPSGA

SEQ ID NO: 383741 - protein, 325 aa, unidentified
MNTKQNTNTPSTDNTSLYLGVDVAKAQIVVDLPGSISAFENSRKGLLRLFKSLASLHRPHLVVEATAGYERLLVLMAQEHSVALSLIQPSRVRHYAKALGLLAKSDPIDAALLSRFGRDIRPAPTEPREPLREKLDELLARRSQLLDMLTCETNRAAHYSCSLTLRQHRNLVRSLKTQIAALEQESARLIDSNPRLQRAEALLRSVTGVGPQTSRILLAALPELGKTGRAQIAALAGLAPYDHDSGSSQGKRFIKGGRACVRKNLYLAALCAASHNPVLRAFYQRLRANGKPVKVALVATARKLLSHLNSLLHDLYKNPSFPLAS

SEQ ID NO: 383742 - protein, 363 aa, unidentified
MATKAMTLVGLDVHARQTHAAILDPASGELRVSRLRMPAVEVAGFLEGLGPRTLAVYEAGPTGFGLARAARARGIDMRVAAPGSIPRGSGDRVKTDRRDAIRLVRLLAAGELSFAFVPSVADEQFRDLVRAIEDVRGDLMRARHRLGKFLLRRGERYPAAGRAWTGAHRAWLRGLRFEDACSQATFADYLSAVELLMGRRASLLVALEEQIPASSHAGVIARLRCFRGIDILSAAGLCAEIGAFARFAKPALLSGFLGVVPSERSSDTKRRQGSITKAGPPHARRLLVEAAHHYRHPPRIGEALAARQHGQDPRIIEIAWRAQRRLHARWQHLHHQRRKPSGVVAIACARELAAFCWEAATLD

SEQ ID NO: 383743 - protein, 317 aa, unidentified
MGGVNAAIEVGKHELKVCLGSEGELFSEPNQPRAINRIIKRLSSAGCARVLIEGGSYQSVLIAALRAAELPVVIVNPRRVREFAKSIGRLAKTDEIDARVLALYGERTEPPLRELADEQTQSLRTLSVRREQLIEMLVMEENRLEHVPAKAKAVRHNLSSHIDYLRKQIKQADDDLDREVRNSPLWDKYEMLSSVPGVGRVLSVALLSDLPELGRLNRGEIAALAGVAPFNCDSGTLRGQRKIAGGRTRLRRALYMAALSSVRCNPVLKPFYLRLRGAGKPAKVALVAVMRKLLLILNAILKTNTAWRALPCPTANS

SEQ ID NO: 383744 - protein, 317 aa, unidentified
MTEAIPTFVGIDVSKTRLDVALHPSGTTKSIPHDASGIHTVVEWLSGITPTLIVLEATGGLERAVLRALVAAALPATVVNPRQVRDFAKATGQLAKTDRLDAQILARFAEAVRPGLRPVPDDVASALRAMITRRRQIIEMLTAEKNRLSRAPRQMHTRVEAHIRWLQADVERLDADLDQIIRQSPIWQEQDDLLQSVPGIGSTVSRTLLAELPELGRLNRKQIAALVGVAPLNRDSGTWRGRRAVWGGRAHVRTMLYMAVLAASRHNPAIRTFYTRLRAAGKAPTVALVACMRKLLIILNVMLRHRVPWRPVMVSVP

SEQ ID NO: 383745 - protein, 361 aa, unidentified
MSDGICFAGLDVHARATAAAAVRLGSGEVFRARLSGGPVATIDWLRSLPGPVRAVYEAGPTGFGLARAARAAGVEVMVCAPGAIPRQPGDRVKTDALKLARLHAAGQLRPVVVPAPELEALRDLVRAREDLRGDLMAARHRISKLLLRRGLVWAGPGETWSERYLGWLSRVSLDAPLADVVLGEYLACHEALLARRERLDALIAEQAAREPWAPTVARLRCLRGVDTLTAVGLVAEIGDIAAFAHPKHLASYVGLVPSEQSTGERRRQGTITKAGSGHARRLLIESAWHYRRAPRVSRTLRRRQAGQPAATIDAAWRAQLRLHRRWTHLDATRGKKRTTVAVAVARELACFVWEIARQPEG

SEQ ID NO: 383746 - protein, 343 aa, unidentified
MQAVTTIGLDIAKSVFQVHGIDATGSVIIRRQLKRRHVLAFFEKLPPCLIGIEACATSHHWSRELRASGHTVRLMPPAYVKPYVKRQKNDAADAEAICEAVTRANMRFVGTKTPEQQGCLMLHRTRHLFIRQQTAVINAIRAHLGEFGVVAPVGRRGVEELLDVVADSGDERVPEVARACVGALGVQLRMLKAQILAFDRQIMAWHRSNETSKRLDEIPGVGPALATALVASVADPGAFRSGRNFSAWVGLVPRQHSSGGKDRLGSISKQGDRYLRSLFTAGALAVIRYAKIHGTKHRPWLTALLARRPTKVAAIALANKIARMAWAMMARGERYKEPAALVA

SEQ ID NO: 383747 - protein, 384 aa, unidentified
MQKPNDLNQSRIVLKQDSTLIAVIEMSLRSWLVAGIVPGVERQPLKKLAVDESALLKLLNRWREEAEKAGRRIERITVAFEAGRDGFWLARWLRARGIEAHVIHASSVAVSREHRRAKTDRLDTEVLKRAFLGWLRGERDHCKMVAIPTTKDEDAKRPNRERQSLVGEQTRIVNRMKAALIRLGIRGFNPKLKKAAGRLEDLRTPEGEPIPPNTLAELHRDMERRRLVSDQIRQIEEARLARMEQAPGDGPHAMVRLIARVIGVGIETADMLVHEVLSRKLRDRRAVARYAGLTGAPDESGSKRRVKGLAKAGNARVRGGMIQLAWRFLLFQKNSALAQWYRTRTEGGRNRKTIIVALARKLLIALWRLVTTGEVPAGVVLRAA

SEQ ID NO: 383748 - protein, 454 aa, unidentified
MQRKVPRSKIGTLTPKVSEPKKQEVPEMNNTQNEKIAQVTNDTMVIGIDIGSEKHWARAFDNRGMELSKKAFWFMNTAEGFASFEVWYENQRRAAGLKRIMVGLEPTGHYWFNLNQFLAENGVRVVLVAPQHVKHSKELDDNTQRKDDLKDPRVIAKLVTEGRYFLPYRPSGVHADLRDGFNRRCGIVESMTRAKNRLHRWFSINFPEYLHAYGSVTAKTGLMVLKKAPLPKDIVELGVDGVDKIWRDAKVRGSGKKRAMTLVALAEQSIGEKTANEAARLELWQLLEDYEHFAHQFEVIEEMLKRKVHEVPHADNLLAIPGIGYFTVIGFFAEVGAVDRFDDPKQIQKLAGLAVVENSSGKRKGLPGISKRGRDRLRWVLFQAAMSAVKNNQEFREIHLYFTTRKDKPLKKMQSLMAVAGKIIRVFYGMVRTGAAYDPERLLRDIRRPEKDAA

SEQ ID NO: 383749 - protein, 412 aa, unidentified
MEVLHRCCCGLDVHKNSITACVLRVDSNGRKHKEKRRFGTVTRELLALADWLRESGVRHVAMEATGVYWKPVWNVLEGQFELLLANAQHIKAVPGRKSDQNDCEWIADLLQHGLLRNSFVPPRPTRELRDLTRYRVSLAQECNRIANRVQKVLEDANVKLASVATDTLGASGRAMLNAIVGGREDSQELAEMAKGLLRNKLPELRLALEGRVTDHHRFMLKQLLDHLRFTESKLAEVEVEIESRLRPFDEQVVRLCTIPGVDRITAWGLLAEIGFDMDQFPSARHVASWAGLCPGSFESAGKRLSGRTRKGSASLRRCLSQAAWAISMTKNNYLSALYRRLAARRGSKRAIIAVAHSLLVIAYSMLRNKTTYRDLGPDHFDRRNPSGIKRSLTRRLERLGYKVTLEPLEQTA

SEQ ID NO: 383750 - protein, 323 aa, unidentified
MPSVIGIDIAKHTFDLATLQPNGKYRTKAKLANDKAGFAVLRDWLNKHSEPGAWVVMEATGIHHEALAEWLLEQGYRVCVLNPAQIAHYARSQLQRVKTDKVDAKLIAEYGERHQDSLRPWQPEPRAVRRLKALVRRLEDLREIEQMERNRLEVADASVQASIQSVLEHIGQEIEETLKAIDDHIDNDPDLRGKRDLLTSIDGIADKTAALLLAELGDPLRFANSRAVTAFAGLNPRLQESGNHRGQTRISKTGSSRLRAGLFMPAISALTYNEAVRALSERLRAKGKTGKQIVCAAMRKLLSIAYGVLKSGRPFDAKLALAH

SEQ ID NO: 383751 - protein, 348 aa, unidentified
MKNKSFVGIDISKKVIDVSIFREDTNIKMFPHEVFNNTRKGFGDMCSWLKKSRVVLSQALFGMEFTGCYSLDLEKFLTSKNYSFCMLSTRIVKHHPMGTIDKRDKNDSAKIADFLYRYDGTECAKPYKLPSKAMQQLKQLVNERKFLVEQRTNFMNRMQMFETKEDSAMYESYIKKLNHDIEKIDQEECELMSKEEDVLDTFQNLLTIPGIGFVNATNIIAITRNFTAFDTARQYARYVGVAPCSHTSGTSVKWRARPSAHCNGQVKADLSMAALRAVEYDVEMQMFYNRKLGGRKDSDTKRKALNAVKFKLIRRMFAIGKQKRKWEVLNTSDDRKNLHIEKSKASEL

SEQ ID NO: 383752 - protein, 458 aa, unidentified
MARNRSTDKIIRGMALVHPNAAAIDIGATMHMAAVSADRTPEPVRSFGTFTADLHRLVDWFTECGVETVVMESTGVYWIPIFELLDASGFAVFLVNARDAKHVPGRKTDVSDAQWLQRLHSYGLLSASFRPKGRIAELRSYVRQRERLLEYAASHIQHMQKALTEMNLQIHHVVADITGATGMRIIRSILAGERDPAVLAAMRDSRCRADAGTIEKALGGNYRAEHLFALEQALALYDTYQEKASACDARIEAVLKELSIDRDRCTTPLPPPGRRMPNTANALDFDVRAALFELLGKDVTRINGLGPYLTLKLIAECGDDLSNWPSAKHFTSWLCLAPRNKISGGKVLSSRTRRSGNKATSLLRLAAISVGRTNTALGAFYRRLATRIGKAKAVTATARKIAVLFYNALRYGMEYIDPGALAYETRYRERVIDNLQRRAKAFGFALQPLEPTPDYAVS

SEQ ID NO: 383753 - protein, 369 aa, unidentified
MTSQPIATPKLYISMDIHKKSWSVHMRTDISDHKSFTIPSNCEVLYNYVEKNFGDHEVSLVYEAGCCGFGASRYFLNLGWNVLVVNPSDVPRMDKQNYQKSDIIDCRNLAKQLHAGQLKGIYIPDEPQDLLKSLLRQRAETSRQLRCIKSSIKSLLLYHAIVIPIEHDNSSWTKAFLDWLAQIKWSYATGKLCLESKLRMYAAIHKEYLQLANELRSYCRKHNKKDYYLLKSIPGVGGYLASAILAEIGDLRRFNNESSFASYVGIIPTMRNSGGTEIIQGVTPRCRGLLRSYIIESSWVALRMDPTMQSYYRKHTGKNSKSIIIKIARKLLNRMLSVIKTETPYQINYSLNNGKETIIKSKQIKVSAK

SEQ ID NO: 383754 - protein, 346 aa, unidentified
MMIIGCDFHPSWQQVCWLDTETGETGEQKLVQALGDAERFYRQLSAPALIGMEATGNCHWLVDLLSELGHELWVGDAAQIRASYVRQQKTDKRDAAHILKLLVEGRFPRIWMPSSEVRDLRQLLLHRHKLVIIRARVKNELQHLCLNQGVQRKHKLWSRAGQQVLRELPLKPWAARRREDLLRLMAMLDQQIEPLDQAVKAEAQRDKMALLLQTQPGVGPITALAYVLTMGDVSRFPRGKQVASYLGLIPREHSSGGRQKLGAITKQGNRMMRMLLVEAAQSAVHYDPEFRKEYLHRCHQKPKAVAKVAAARKLAIRLYWMLRTQKPYPAVVRIESSPRVPLVGAS

SEQ ID NO: 383755 - protein, 352 aa, unidentified
MTVTNLPRSITGGVDTHLDVHVAAALDERGALLGVESFDTTAEGYKKLLGWLSDFGPVELVGVEGTGSYGAGLTRHLQAEQVRVVEVDRPNRQRRRRKGKSDPQDAISAAHAAQSGDATGEAKTRDGNVESMRVLRVARVSARKGRTQALNQMRSLISTAPEPIRDELRGLNVFHLLERASAYRPGTKRDIVSLTKLSLRMLARRAIALEEEISEIDAILKNLLKETAPELVATLGIGTDAASALLVAAGDNPERLRNEAAFAHLCGTSPIDASSGKQHRHRLNRSGDRQANSALWHIVITRMVYDPRTTEYIDRRTKEGLTKKEAVRCLKRYVAREVYSLLPHEKLGVDSP

SEQ ID NO: 383756 - protein, 338 aa, unidentified
MTIVMGLDQHRAQITAEWLDTSTGEISRARVAPAHRAGVRRFVERFRGLELEVALEATTGWRFVVEELRRVGATVHLAEPAETAARRGNKKRAKNDRADARHLRELLMAGRLPESWIPPDHILDLRARVRLRHTLVDQRGEWQQRIQAVLYHHGCPLRRNLMTGEGRQWLAAQRLPVTAREQVTVALSVIDGLDRQLAPLDKELRAWARRQPGCRALMGQFGVGEVTAVTILAELGDARRFSSSREAVRYAGMDITVHQSDQRRAPGHLSRQGPPALRWALFEAAQSAARAGSPDRAYYRQAAERLGANRACLSIARKLLKRAYHTLRELGEEALQPA

SEQ ID NO: 383757 - protein, 410 aa, unidentified
MQHPTPPSTTAPVAGVDWATDSNALCVVDRDGQVLRELVAAADAAGTRRLLGELDRHGVTQVAIERPDGPLVEALLAAGKAVVVVPPRQVRHLRGRYGQAGNKHDRFDAFVLADVLRTDHRRLQPLHPDSPRTVALRTTVRARSDLVEARVALCNQLRAHLRLVFPGAVGLFADLDAPDSLAFLARFPSADQAAWLTHKRLAAWLAANRYGGRTAVEVLLGRLTGAPAGLSGEHGHAAAATTLAYVHALAAVRGQVAALEARIAEQLALHPDRLVFQSLPRSGTVRAAKLLVEVGDARGRFPTPDSLAALAGAAPSTRQSGRHRAVTFRWACDKKLRDAVVDFAADSRRASPWAQAIYQRHRAAGKTHPHATRILARAWLRVIWRCWQNHTPYNPALHGIAKHRRLPLAA

SEQ ID NO: 383758 - protein, 370 aa, unidentified
MLDTTTFVGLDVHARSIKAVSLDVMTGEVRCATFGYDAGAVAEWVRSVDPRARCVYESGVTGFDLQKRLSGLGVDCVVGAVSKMIKPSADRRRKNDRNDAEFLARMLSVGNVVEVWVPDDECEAARDLTRALEDARDDLSRSKQRLSKFLLRHGLAFDERTPTGRRKGNWTRAHWSWIESIRFAERADNDVLAYYVDAVRRAAEEKARLEGLVEAEARKPRWRKRVDSLRCLKGVDTASAADLVFEAGEFSRFGNARSFAAWVGLTPSEHSSGESDRRGAITKAGNKHLRKTLVEAAWHYLTCSGRPKDLAKGQAPDRVARRHAAKGVRRLAERREALLARGVHGNKANVATARELACWVWAVGLMAEEA

SEQ ID NO: 383759 - protein, 368 aa, unidentified
MLTSIAPITYVGLDVHQDSISVALARPGAQLPEEQQIPNTPEALRKLVRRWKDPAAVRVCYEAGPTGYGLQRTFATLGVDCAVIAPGLIPRRAGVRVKTDRRDARKLVGLFRAGELTAIRIPPPQEEAARDLIRAREDLSEDILRARHRLSKFLLRHDRIFRETKTRWTDRHLAWIRRQQFETAGLEDLVGHHLAIIEARLRQRDLMDGAIERIAASEPYAAAVRRLCCLRGIKSLSALTLLVEVGDFRRFAGAPAFMGFTGLVPSEASSGERHQRGSITKTGNAHLRRVLVEAAWAYRQKPALGSAWRKRFADQPAELVAYAIAAQQRLYTRYWRMTQRGKLSTVATVAIARELAGFVWGVMTERWA

SEQ ID NO: 383760 - protein, 510 aa, unidentified
MLKYPVLNLVPETGAWIIGDGESLPFRKFPLRAPGLKHTPNPAEADMTKSVKKATPVRFHEGLKQLRKDAGGMDIGAGEIWVDVGLENDSEPVRRFETFTADLNRMAEWLIDCGITTVVMESTGVYWIPACQILEDKGVEVLLVNPRYAKNVSGRKTDALDCQWLRTLHCYGLLPASFRPAREIATLRSYLRHRQMLIEYAAAHIQHMQKAMTQMNLQLHHVISDVTGLTGMRIIRAIVGGERDCKKLADMRHERTHANHATIRKALEGDYRTQHLFALKQSLEAFDHYQKQIGECDQQIGKHVRSLETKAEPSHRLKAARKAKQKHRNQMDFNVRDEAFRISGVDLTQIDGISESAALGLISEIGINMNAWRTEKHFASWLTLCPNKRISGGRVLNRRTRKSANRARNILCFCAQSLLRSRSALGAFCRRICSRLGKPKGLIATAHKLACLIYRMLKSGRDYADIGQEQYEKQFKERALRSLARKAKDFGFQLVSTAELIPENPEKAVP

SEQ ID NO: 383761 - protein, 320 aa, unidentified
METEKVYVGIDVSKETLDMAVHASEQRWEFANTVKGIDEALSILENLSPALVVMEATGGMEYPSAAALAVAEIPVAVVNPRQVRAFARAIGRLAKTDAIDAKVIAHFAAAVHPTPHPLPDAQGQELKAILTRRRQLIEMLTAERNRLGSSRSKAVKAHIQAHIAWLEKEMIQINDDLGHSIRETPVWQEKDDLLKSVPGVGPVLSTTLLADLPELGALNRRRIAALVGVAPFNRDSGHLRGQRTIWGGRAVVRSALYMSTLVATRYNPVIRDFYQHLLAAGKPKKVALTACMRKLLTILNAMLKHQTPWCYPTSKTAQTP

SEQ ID NO: 383762 - protein, 470 aa, unidentified
MAAPSEAVMRAAPESAGVGPDDTAGAEARRVPSPAPELESGAAGPGSTRVEPEGRVAVCSPVANAKGTPTRSETQSKGAPKEQTTMRSVGLDLGSRKISYCVVEGGRVRSRGTVSAVEELEAVIGPDTPPSTVAFEACREAWYVFRTITDWGQEARVIDTTRVKQLGIGQHGRKNDRIDAECIARAVEDNRIPLAHVLSIPRQRLRTELLTRRALVEGRAQLVTTIRGIVRAEGLRLPSCGPEIFVEKVRNTELPPDVRERITPLLSVLVTTQKELCVVDARLEKQFAEDRDMRLLTTAPGVNLIVAAMFVSVIDDAKRFHSAREVASYLGLVPRESSTGLQTQRLGSITKQGNPYARTLLVQAAWFVLQRGDKSDPIVMRGRAIAERRGNTIAAVAVARRLACMLWAMWRRGTAYDPVHAATFSADGLEANGAALASQATALRREAKKTEVRRKVLDRRTRAAQQLSVR

SEQ ID NO: 383763 - protein, 350 aa, unidentified
MIHIGIDLHHKNSYIRAMDDDGVLYAGKRIQHSNIEELWQYMEQFGEQKKRVVFEATANARWLERLLRKDPTIEPVAVTPHKVRIIAETVAKTDKIDATVLALLSKMDALPRAWLPDEEVEDLREITRHRAALVVLRTRAKNRVNAALVRRGILRPHGDIFGVQGRQWLGELTPPWVTRLQLDQWLESIDHYQKQIDRIENKLYRELARNDRWREDLELLESMPGWGKLTALTVLAELGDYRRFRSRSAVSCFAGLVPSSKRSDQSCRYGKITKRGSTALRSILVEVSLNAVRKVPRYQKLYNRLKAARGGNTGKVAIARQMLEDGWTMLIKREPFRYQPVQDESLTRVG

SEQ ID NO: 383764 - protein, 338 aa, unidentified
MIGVDLAKNVFQLHAASMTGHPKYRKKLPRNNFAAFMAQQPPAIVVMEACGSAHYWAREMIKLGHEVKLIAPQYVKPFVKRQKNDAADAEAIVTAAQRPEMRFVDPKTAEQQSRAILFRARERLVHQRTELVNALRACLYEYGHVVPQGIHNIKRIEGILDVPNSDLPDLMREECKELLVQIAEKTIRINARTGKIKALAAEADAARRLQTIPGVGPLTALAVEAFAPAMECFKCGRDFAAWLGLVPRQFSSGGKERLGRISKAGQADIRRLLIIGAMSRLNWLGRKSIPEDSWLARLAARKPRMLVAIALANKMARTIWALMTKGEDYRDSAQAAVA

SEQ ID NO: 383765 - protein, 459 aa, unidentified
MQTEVPCFIPAAPSALQQYGTSPLWDFMNEPDAGVIFPQIFMQDMTHKDMRNCLYINRKGRCQHYVHCGIDIAKRSHEAIIIAEDGQVVRKAFSFRNNCTGYNLLLEQVRRLTLVKSQIVFAMESTAHYWLALYARLLKDGYAVMVLNPIQSHSLRELYIRKAKTDTRDSLIIADLVRFGRCKASNVPQDKILALRELCRSRAYLVDMAADLKRKLIALLDRIFPEYESLFDSVFSKASIAVLSKYSTPQKVKNANLRKLTDILMESSNGHFGEWKAHQLKEAACSSFGIDDSGGVYSTLLGMFLEQILSLTAQADSLEKQISVFFQEFNNPLTSIPGVGTVLAATILSEIGDITRFSSADKLLAYAGLDPSVKQSGEFKSNQNRMSKRGSPYLRRAIWLASTVAVHRDPMFQTYYEKKISEGLHYMNVIGHVSRKMTAVIFAVLRDGQPYQPILHSAG

SEQ ID NO: 383766 - protein, 356 aa, unidentified
METAYDGRQVVGMDLHRRRSVLVRMTEDGRRLGTAKFTSSPQELRREIARAGKHPQVVLEATYGWYWAADTLAAAGAGVHLAHPLGVKAFSYRRVKNDERDSADLADLLRMGRLPGAWIAPHQVRELRELTRYRIRLVRLRTSCKDQVHGVLAKLGVEVTCSDISGRAGPAWLGELRLPQPYAGKVTSLRHLAGELGTEITMLSEVIASLLAGDRGYQVIQQLPGIGPVLAAVITAEIGDVTRFSNAGQLCSWAGLTPRHRESGTKVARGHVTKQGSRLLRWALIEAIQRIPRDCVTGSARDAIIARRGKEARNIAKVAAARRLLTLVCYGLRDGQIRCLSRPPADPPVTQTARAA

SEQ ID NO: 383767 - protein, 326 aa, unidentified
MQSILGIDVSKDTLDAILLIGHRRIHKVFSNDLKGHHYLENWLIINQAGQVHACLEATGQYGEEIAEYLYDLQHKVSVVNPARIKRYGQSKLHRNKTDKADAELISEFCWKEKPGLWKPLSPEMKHLRALVRRSQDLKAQLQQENNRLKSGEKNPWVLDDLSLNVEFLRGRIKAAEKEIKEIIKQSETLKTKHDLLTSIPGIGLITASTLLAEVGDFSAFESAPQLAAFAGLNPTNHRSGSSVYKKTRVSKEGRSELRACLYMPALVALSWNPVIQDLADRMMKSNHNKMEIVIAAMKKLLHLAYGVLKTQKPFDPAYGTQFNFSS

SEQ ID NO: 383768 - protein, 309 aa, unidentified
METIVGIDVSKERLDVAVIPQGDAFQVGNDHAGIDELAERLASLRPDVIALEATGGFETVAAADLAAAGFAVIIVNPAQVRAYGQALGQKAKTDTIDASLIAAFVQATKPQIRPLPDAQTQELSALVTRRRQIVQMITAEENRSQMALAKPARKSIKRLLTALRRELESLEADLDDHIRNSPVWRVRESLMTSVPGVGVTVARTLIAELPELGSLDRRQIAALAGLAPWTRQSGKWKGKSFIGGGRSNVRTVLFMAALVASRFNPVLKAFRDKLVAAGKPKIVAIVAVMRKLLTILNAIIRDGKPWQIA

SEQ ID NO: 383769 - protein, 342 aa, unidentified
MAQQMSVLGIDIAKLVFHVVGMDDTGAVVLRKRIARSELLHFIATLPPLRIGMEACGSAHYWARRFREHGHDVRLIAPQFVKAYVKSPKNDARDAEAICEAVTRPTMRFVPIKRAEQQDLQALHRVRERLIKARTALVNEIRGLLNEYGIVLPQSLTKFRALIVDQLHKEQAKLTTLSAEVFWHLYDEFRALEKRLEYYDEQLAAIGQAHPECQRLQTIPGIGPVTATALIAAIGDVTQFKNGRQLAAWLGLVPREHSTGGKPRLLGISKRGNIYLRKLLVHGARATLRWIETKDDARSRWLRALIARRGKNRAAVALANKNARIVWALLAHDQEYRLPVTA

SEQ ID NO: 383770 - protein, 398 aa, unidentified
MTSEYMVFCGLDVGKETHHACALDPSGRRLFDAALPQDEIRLRELFSRLMEHGPVLVVVDQPNTIGALPIAVARAMGLGVAYLPGLAMRRIADLHPGSAKTDSSDAYVIADAARVMPHTLRRVDVGEETLAELKVLVGFDDDLAAEATRLTNRLRGLLTQVHPALERVLGPRIHTKAVIALTARYGGPAGLRDAGRGRLLQTARKANPRGAAELVDQLWAALQEQTVTVPGTAAAETVLPKLATSLQDTLDQRAALAAQVEQVLDAHPLAAVLTSMPGVGVRTAARILLEVGDASSFPTAGHLAAYAGLAPVTRQSGISIRGEHPPRSGNKHLKRALFLSAFAALRADPVSRTYYDRKRAQGKRHNAALICLARRRCDVLYAMIKTRSPYELRLPAAA

SEQ ID NO: 383771 - protein, 293 aa, unidentified
MSKLLFVGLDVHAETIAVAVAEAGGEVRSVGVIPNRLESVRKLVHKLGPVAQLRACYEAGPTGYVLYWQLTQLGVACEVIAPSLVPTKAGDRVKTDRRDAEKLARCYRAGELTAVWVPDASHEALRDLVRAREAAKKDQLKARHRLGKFLLRHGRRPGGIKPWTLKHREWIQSHVHFDQPALEATLADYLAEVDHVAARIVKLEKALDEAVQQAPAQIRAVIEALQALRGVAQTTAASIVSELGSLSRFQSPRQLMGYSGLVAREHSSGNRIQRGGITKTGNGHLRRVLVEAA

SEQ ID NO: 383772 - protein, 338 aa, unidentified
MNVSLLSIDLAKNIFQLYGVDERGHPVLSRRVSRSKLLEVVVGLPCCRIVMEACGGAHYWARRFSAMGHHVQIIAPRFVKPFVKSQKNDRNDAEAIAEAASRPTMRYVAVNSVQQQDIQSMHRIRSLLMRDRIAQINQIRGLLAEYGVIIAQTALKVRQQLPAIIDDERNELTGLTRSMMRDMYERLVLLDKQIARYDESIHQIHKASPASQRLEKIRGVGPLIATAVIAAAGSAAEFSNGRQFAAWLGLTPRQHSSGGKDRLFGITKRGNGYLRMLLVHGARSVVQQAVKHTDTLSRWILEVQARRGTNIAVVALANKIARTIWVLLARGQEYAPPA

SEQ ID NO: 383773 - protein, 377 aa, unidentified
MGEGTAFVGLDVHKETIAVAVAEDRRGGEVRYLGEIANTREAIRKLVAKLSKAHDTLHFCYEAGPCGYGIHRQLSEMGHDCELVAPSKTPARPGDRVKTDRRDAVLLARLHRAGELTPVWVPDEGHEAMRDLVRARTAAMESLRRARQQLSGFLLRHDRVFRTGCNWTKKHRVWLSGLRFQHPAHQIVLQEYIHAVDDAAARLARIEGQIRTLVPIWSLAPVVEAIQAMRGVSFISAVTVMAETGDLGRFDNPRQLMSWLGLVPSEYSSGPRTARGGITKAGSKDARRMLIEGAWTYRCHAAVGKVHMARLEGLPQEIRDIAWKAQIRLCARYRRLSARGKPATLVVTAIARELAAFIWAIARIVTPSTRPAAAAAC

SEQ ID NO: 383774 - protein, 328 aa, unidentified
MEQELHFIGIDVSKAKLDIDVLRPDGRHRSKKFANTPKGHEELLSWLRSHNVAPAHICMEATSTYMEDAAASLSDAGFTVSIINPALGKAFAQSEGLRSKTDAVDARMLAEFCRQKRPAAWEAPHPLERALRALVLRHQSLTDMHTQELNRRETAREVQMPSIDAHLLWLEAELKRLEKQIKDLTDDDPDLKHRRKLLDSIPGIGEKTSAVLLAYVGLKDRFGQARQFAAFAGLTPRQHESGSSVTRASRMSKAGHVSLRRALYMPAMVALYKTEWGKAFRTRLEKNGKGAKLIIGAMMRKLAQVAYGVLKSGRPFDATLHQENACVA

SEQ ID NO: 383775 - protein, 350 aa, unidentified
MIEVGMDQHKHFSLAGSLDPATGATESARLEHNDPDVIRRYLRSFGEPVRVSLESTGNWYWLVDLAEEEGAQVRLANNVEARRLYKARAKNDRLDALALARLSAEEILPEVYVPPRDVRDGRERHRYRIRLIWMRCRIKNVVHAILGKLNIEHPFSDLFGKGGRAFLDELELREPYETELRSALRLLDAFDAEVKLMLGEIRVALKADPRAGIVQTAPGIAELTAYLILYEVGPVERFASEKEFASYCCLAPGTWQSAERRRDMPIGRHGNLYLKTAFVEAAQTAVRVDARLGAFYRRLRHRKGTGKAMAATARKLAVSVYYMLKRGQAWRPAPRIIKGSGKPVLRRGQK

SEQ ID NO: 383776 - protein, 357 aa, unidentified
MPSSNVKYIGLDVHTEATAVAVRNGAGKLVMESIVETKARTLLDLLDGLRGELHVTLEEGAWAAWLYDVFKSHVQEIVVCNPRRNALLKEGSKGDRIDARKLSELLRAGLLRAVYHGENGLRSLRELARSYEVVSKDLMRVMNRIKALYRSWGIACSGTQVYGRRHREQWLKKILQAGVRRRAELFYQQMDALQALRCTVRGELIAESRKHEAVKILRQIPFIGPLRGAQLVALMQTPHRFRSKRQLWAYSGLAIETHDSAQYRYVDGQLRRSKKPQQVRGLNQNHNHAMKEIFKSVALSATLHAGPFRDFYAKLLAKGMKPELARVTLARKIAAITLTLWKKGERFDAGYVKPQAA

SEQ ID NO: 383777 - protein, 358 aa, unidentified
MVDKVTEAAVVGGVDTHKDLHVAAVVDQNNKVLGTQYFSTTRQGYRQMLAWMTSFGTLKRIGVECTGTYGSGLLRYFQNAGLEVLEVTAPDRMERRKRGKSDTIDAECAAHAAFSGIRTVTPKTRDGMIESLRVLKTCRKTAISARRVALQIIHSNIISAPDELREQLRNMTRMQLIRTLGSWRPDASEYRNVTNVYRISLKSLARRYLELHDEIADLDVMIAAIVDELAPELIKRNAIGYESASQLLITAGDNPQRLRSESGFAALCGVNPVPVSSGKTNRYRLNRGGDRAANSALHIIAIGRLRTDAKTKEYVARRVAEGHTKMEAIRCLKRYISREVYTLLRNQNRRINSIPITA

SEQ ID NO: 383778 - protein, 438 aa, unidentified
MEVRHPRAAGIDVGSEQLHVAVVDGAVRVFETFTAGLYQVRDYLVGEGVTTVAMEATGVYWLPIYEVLEEAGIQVCVVNGAHVKSLPGRKSDMADCQWLATLHSYGLLRSGFVPDEWIRRLRDYQRLRQDHVQMGSTHIQHMQKALDRMNLKIHEVLSDLLGASGMRLVRAILDGERDAERLLALCDVQVLRKKKERMRRALQGHWKPEHLFALRQALQAWEFYQAQIAACDGEIAATLQEIAALSPPTDLAPTVPLASKRIHHNAPHIADLKSLLVRITGGHDLAALPAFTDYSILQLLAETGPTMTAWPTVKHFTAWLGLAPSCRQSGQRRRHERRFRNRAGRLFALMARSLARSNKLALGGFYRRLRAARSPAVANGAAARKLAVLYYNTLKHGLAYVEEGLEAYERHHKAQSFRRLQAAARRLGMTLVPEPNTA

SEQ ID NO: 383779 - protein, 406 aa, unidentified
MEEIIIDKGCGLDVHKETVVGCVMGSGIKQEIRTFSTMTGDLFRLKGWLSEKGITHVAMESTGPYWKPVFNVLEDSFEVILVNARHIKNVPGRKTDVKDSEWICKLLRSGLLAASFVPPQGIRELRDLTRYRRKLTQTISSEKNRIQKVLEDANVKISSVLSDTFGVSGMEMIEAIMEGNLSVEQISELAKGRLKSKKAEIRESLVGNFRDHHRFMIQASLGQIGSLEKTIADLDQEIDRKLEGYHQEYELLQTIPGVKEQGAASIIAEIGVDMDTFPSEGHLSSWAGMSPGNNESAGKKKSGKTTHGNKNLRAILTQCAWAASKTKNTYLSAKYHSLVGRRGKKRALIAVGHKILIMAYHILKNGVPYKELGKHYLIHRREDKIVKSHVKRLQDIGYEVELKKVA

SEQ ID NO: 383780 - protein, 340 aa, unidentified
MNKTTTLAIDLAKQVFQLHGADFRGKATLRQKVRRCQLPALLAQTPPCSVVMEACASSHYWAREARSHGHKVRLIAPQHVKAFTRGQKNDRNDAEAIAVAAGQPGIPEVPVKSEEQQAVMALHRIRARLVKEKLQVTNQLHGLMGEFGVTLPRKSVIGMRRAIVTLIDEARVPLLLHAPLKDQLEHLSQIEKRLETLTVGLTEMANNSSACRRLMKHDGVGPIIATAFAAEVASPALFKNGRQVGAWLGLVPRQHSSGGKERLFGITKRGDQYLRGLLVHGARSSLRVAERRCDHLSKWALQVSARRGRHRAVVALANKMARRLWAALRYDDYVPFTATA

SEQ ID NO: 383781 - protein, 406 aa, unidentified
MLNAVGIDVSKGRSTVAVLQPGGIVLHKPFDVYHNFKDLHDLVHYLASLEGETKVVMESTGRYHEPICNTLSEAGLFVCAVNPHLIKNFGNNTIRKVKTDPADAKKIARYTLDNWTSLHEYSAMDTTRAELKTLNSQFNFFMKQKTSAKTNLIALLDETYPGVNKLFDSPVRSDGSEKWVDYAYSFWHVNCVLDSGLKVFTERYQNFCKHHRYEYQPDKPGAIYEQAKSLVPAVPKDPIYKELIQDSIQQLNLMSQHVEQLRKRMNDLASTLPEYNTVLSMYGVGQSLGPQLIAEIGDISRFTHREALTAFAGVDPGKDDSGQVVHKSGHASKCGSARLRKTLFQIMKVMLQVGPRDDDPVSQFLFKKKAENKPYLVYMTAGANKFLRVYYGKVKECLRNQAKTEV

SEQ ID NO: 383782 - protein, 468 aa, unidentified
MPSKKGPKKRELDELACVFPNAAGLDIGSAEIVAAVPPDRDAEPVQVFQTFTPDLHALVAWLLECGIDTVVMESTGVFWIPIYELLEAAGITPYLVNARHVKTVPGRKTDWNDAQWLQKLHALGLLAASFRPDAEIRTLRTLVRYRAELIERRAPHINHMIQALKHMNIQLNLVLTDITGKSGLAILRAIVAGARDPQQLACFRESGCKHSEAEIAKALTGTWDDAQLFILEQALEIFDYYTAKITGCDDKLEQQYQALESRAEKEAALPDLPPAKKDSRSKNALSFNARAQIARVVGVDLVAVMGLSAVTVQTIISEIGTDMELFPTVKHFCSWLGLAPHNDKSGGKVLRSRTMKVRNRANQAFRQAAQSVAQSDSSFGAYYRAMRARLGPKQAIVATAHKIARTVYHLLKTREPYQEESAAEYDRKRRERELKHLARRAQKLGYTLTVAQATAPESSPEPGGEGRF

SEQ ID NO: 383783 - protein, 386 aa, unidentified
MSRPSNILVRAINYDHTLVLSVELSNKSWVLAAQVPGLPRTKAQRTIEPNKNALLAAIDGYRARAAAVGYTVDRVIATYEAGWSGFWLARWLVAQGVEVHVVQPSSVPVDRRLRRAKSDGIDAELLLRTLLAWLRGEPRVCSMVPIPDEADEDARRCVRERTELLSDRVGLTNRIGAVLATLGVNDYNPLLQSRRRRLAELRTGLDEPIPPNALAKIERLLARLELVLAQIAELERERDEVAAADAPDRAGKMIQQLASLRGIGVQSATVLVREAFVRHFPNGKALGSYAGLTSTPYSSGGIDREQGIGKAGNRRLRTVMVELAWLWQRYQPGAAQVAWFRDRVGSIGRRIRKVMVVALARKLLIALWRFVIDGVMPEGAVMKPSI

SEQ ID NO: 383784 - protein, 342 aa, unidentified
MKTFVGLDVSQKKTSICVIDHNGNKIRMANVDTHPGVIANYLFSEGFDNSKVGLETGPLCVWLYHSLKSFGLDIDCIHARHVHAALSMQLNKTDQNDAFGIARLVLSGWYKPVHVKSLECHQQRLILTSREKLVQLRVAVTNQIRGLLKTFGVVLPPGKNSVFERSVLESSPSLETVKPAVIMLLNTWEHLSDQIKKFNSMLEKLARKDPVCQILRSIPGVGVLTALSFKTSIDDPSRFRRVSDVGAFLGLTPKKYQSGEVDRNGGISKQGNRMTRTLLYEAASCLLTRYGTDTSLAIWANGLRHRMGYKKVIVALARKLTTLMLSMWKSETTYNERLNAIN

SEQ ID NO: 383785 - protein, 355 aa, unidentified
MSRDIKYIGMDVHKEATVIAVLNANGNLVMESIVETKAGSLLQFIHGLRGELHVTWEEGTWAAWLYDLLKPQVQVLVCDPRRNALLKEGNKSDKVDARKLADLLRTGMLRPVYHGENGLRTLRELGRSYQTISQDLNRVMNRLKALYRGWGIACAGTQVYAPRYREEWLQKIEHAGVRRRAELLYQQLDGLQALRRTLRPELLAESRKHKATKLLRQIPCIGPIRAARLLALMQTPHRFRSKRQLWTYCGLGIETRDSAQYRFVRGQLQHAKKPQQIRGLNQNHNHEMKEIFKAAATRASCGVGPLRGFYLNLLAKGMKPEMARLTLARKIAAIALTLWKKEERFDAEQLKPQAA

SEQ ID NO: 383786 - protein, 386 aa, unidentified
MHQATTLPDPQRTCSRGDCATLFVSLELSRSTWLATALVPGSSKMSKYTLVGGDGHKLLELLAQLKSRAEQRIAAPVKIVTIHEVGLDGFWIHRLLEANGVESHVVDPASIAVPRRHRRAKTDTIDGETLLRTLMAWQRGEPRVCAMTVPPSPSEEDCRRISRERAKLLQERVRHTNRIRGLLFGQGITNYNPLHKDRRKNLEQLRTGDGRSVPAHLKSAILREIDRLELVLRQISEVETERDEMLQVAQPSSPAALLMRLKGIGAEFASVLYLEGLFRRFDNRRQLAAYAGLTPSPWKSGSIDQEQGISKAGNPRLRTTMVELAWMWVRYQPASALSCWFRQRVGSKRGRIRRISIVALARKLLIALARYLSHGEIPAGAVMTAG

SEQ ID NO: 383787 - protein, 353 aa, unidentified
MKNQAIQYLAFDVHQATVVATLRDESGKVVMRATVPTEAKAILTLVKSAGVHIAFEEGTQAQWLHDLLQPHGERVMVCNVRGRSETSNKSDRIDADGLSEMLRIGSIKSVYHGGSGVLTLKELVRCYMNLVDDCTRVMLRIKALFRARGILTPGTSVYRASERAKWLAKIESRGARMRAESLLRQLDSLLELRPKAKTAMIAEARRQSGWKVLRSIPFFGPVRVALLLAIIATPFRFRTKRQLWPYIGLAVVTHSSADREFVQGKLRRSRRAPLTRGLNRNHNPALKNVFKGAANAAAAKPGPLKDFYDACVARGAREELAKVTLARKISSIALRLWKKGELWNPDKLTTQTT

SEQ ID NO: 383788 - protein, 375 aa, unidentified
MNNNNTLYVGLDVHKESITVAYAINSEPVELMGKIGTSPTDIQNLCKRLRSKSSQVSIVYEAGPCGYGLYRRLVKSGFDCMVCAPSLIPKKPGERVKTDRRDAIRLVRSLRAGDLSAVYVPGIEDEAFRDLARAWASARDDLRHARQRLKSFLLVHGVHYVGRADWGPAHRRWLSKYSFESPWRQLAFDEHRRTIEDRQAQCERLESALKEAVTEWRLYPVVEALQAMRGIQFITAVGLISELGDLTRFEHPRQLISWFGITPSEYSSGGSRHQGSITKAGNSYARKLLVEAAWSYRHPARISPAIQKRQENLPRPVIDRAWDAQLRLCKRYRKLQAKGKNVNITIVAVARELAGFIWDMGRIAMSVAQQPQCHK

SEQ ID NO: 383789 - protein, 447 aa, unidentified
MSESLDPRSSGSTPPSPTPPTPSQQFARLTHFCGFDWARRAEHVCVVVDRAGKVVLEVSFADDAEGWDSFRKKLSAVAEPSEVGVAIETRCGPEVERLLGMGLAVYPMNPKAASRYRDRKSAAGAKSDPADAFCFADGLRTDGHGWRRLCPLDPLTHELRILCRDEVALIEQRTALVNQLRAALREYYPAALEALEQWNEPPAWKLVITFPTPKELVKAGRGRWNRFLHANKIYRPETTPRRLEVFARADTFASPNPAVTAAKSLLAVSLCEQLITLERQLDKYRKRIEELFEDHPDHDLFGSLPGAGPKLAPRLLSELGSDRGVFDTAEGLQCFAGTAPVTRQSGRTRIVQFRRACDMGLRAAVHLWSDCSRPKCAWAQAYYQKKREQRMNHAQALRCLGQRWLKILWKMWQEKKPYDEARHTLDQVQHGSWVVALLPEAAAAKPA

SEQ ID NO: 383790 - protein, 343 aa, unidentified
MDYFAGLDVSLEETAICIVDDAGRIVREARAASDPETLVAFFGACGMMMQRVGLEACSLTAWLHAGLTDAGIPAICIEARQAKAAMGAMPNKTDRNDARGIAQIMRTGWYRAVHVKSSACRSWRALLTARRMVLNKRRDVENGVRALLREVGLKIGTPSRKDFPTRVRELAAGDAVLSGLVESLLSVIDVMTREVERLTKRVLDEVRVEPTCRRLMTVPGVGPLTALAFRATIDQPERFRKSRDVGVHLGLTPRRYQSGETDVQGRISRCGDELARTALYEAAHSLLIRSTRWSALRAWGMAIAKRRGMARARVAVARKLAVILHRMWADGSEFRWGKQAAAA

SEQ ID NO: 383791 - protein, 377 aa, unidentified
MAHYRLACKEFLPGSTPDHVASRKDNIATSMVAGLFDFVVGVDTHAATHTLVVVDATTGAERHRSTFPTSPAGLTRAVSWIRRRTIARVLVVVEGVGSYGALVADALAAAGMEVCEPSPIPPHHGQGKSDDLDAARIARSVLGVDIAMLRHPRSDTGPRVALRVLVIAREEMTADRTRAINALTALLRTIDLGMDARRPLTTSQVTTITGWRARQEATWLATCRGEAVRLARHIRDLDHQIATNRAQLDTLVAAHAPELTTLTGVGSVVAATVLVAWSHPGRIRSEAAFAALAGTCPIPASSGNTIRHRLNRGGDRRLNRALHTVVLVRMRVDPGTRAYVARRRAEGRTTKEIMRSLKRYVTRQLFRALPAAPLDTT

SEQ ID NO: 383792 - protein, 342 aa, unidentified
MTEVSTIGLDLAKLVFQVHGADASGAVVFRKTLRRARVLEFFRDLPRCVVAMEACGGAHHWAREIGRLGHEVRLIPPIYVKPFVKRQKNDASDAEAICEAAQRPTMRFVAVKSESAQASAAIFRTRDLLVRRRTQLINAVRGQLTEYGLVAAKGTANLPRLLALVDEPGSDLPQATRAMLDVLIGMVMMLAEQISALDREIARRAKEEDMPSRLMTIPGVGPITATAIAALAPPVETFHKGRDFAAWLGLTPVQRSTGGRQKLGATSKMGERTIRRLLIIGAAALVRQTSRREPPPGSWLARMLARKPRMLVITALANKMARTVWALLAHNEVYRAPAVAAT

SEQ ID NO: 383793 - protein, 456 aa, unidentified
MKIPQSTIRLLTGRLVKILLNKEVSIMKSNTQNAKIEAITENTLVLGIDIGSETHYARAFDYRGIEYSKKPFKFSNTEVGFMSFKAWIQDMKEMHEKDKVVPGMEPTGHYWFNLGKFLQDNEMRPVLVNPHHVKKSKELDDNHPTKNDRKDPKVIAGLVREGRYMIPYLPEGVYADLRTASNIRFQLQAELTRIQNRISRWFNIYFPEYKTVYGKPDAKSGMMILKVAPLPEDILTLGIDGVNQIWRDAKMRAVGKARAKTLMEAAEHSVGSKEGAVSARMEIRMLLEDYESRNVRLQEVMDLIEELVKQIPMAEKLLEIKGVGIKTVSGFLAEVGDISRFNNPKELQKLAGLALVENSSGKHKGETRISRRGRKRLRYLLFEVAMSLVSKNAEFKELHIYYTTRRINPLKKMQSLMAVAAKALRIFYAILTKGVAYDPKKMINDIKMPKIYLQAA

SEQ ID NO: 383794 - protein, 348 aa, unidentified
MKTFLKQVVGIDVAKGELVVSLGRIDEDLSIEIFAHRIFLNRDSGFSLLKKWADKLFQPETTTLYVMEATGVYHEALAYWLDDNRADVSIVLPNKISNFFKTLDINTITDRTASEAIARFGLERKLLPWQRPKEIFSELKQLTRERNQLIDERAVLKNQLHAEQARAFPNMQSVKRLKKRIQLINQQELEIRSEIAATAKKDPEVAVKIDRIGTIPGVGNLTAVTILAETNGFELIRNKRQLVSYCGLDVKNKDSGISVKGKPKISKKGNRHIRKALHMPALSAIRHNEKYSGLFIRLVSKHGIKMKAVVAAQRKLLELIYVIAKNDCVYDKEYERKKAEAGVPTLAI

SEQ ID NO: 383795 - protein, 341 aa, unidentified
MEHYAGIDVSLEYSSVCVVEAGGRIAREGKVASEPAALIVWFESCGLSLTRIGLEAGPLSQWLFAAMRDTGLPIELLETRHVRDAFKAMPVKSDRNDARNIAQLMRLGWFRPVHCKSLAAQETRAILTARKLVQSKLRDIESSLRGILRGFGLKVGKTTPKQFEARINELVVGHPSLQIVTAALLAVRVVLLREFNGFEKRVRATARSNVRARLLMTTPGVGPIVSLTYASAIDDPARFTSSKRVGAHFGMTPKKHQSGEKDVTGRISKIGDKGVRTALYEAAHIILTKPVKGSALKSWAARLAKRAGMQKAKVALARKLAVIMHRMLVDGTPFNPAAAAA

SEQ ID NO: 383796 - protein, 409 aa, unidentified
MERQIERGCGLDVHRDTVAACVRVPGARGERAQHVRTFGTTAAELLRLRDWLGAHGVTHVAMESTGVYWKPVFYVLEDACTCLLVNAAHIKQVPGRKTDVLDCIWIAQLLEHGLLRGSFVPPVEIRELRDLTRHRKVLIQERQRAANRLHKLLQDAGIKLASVATDILGVSGRAMLEALVQGTTDPEVLADLAQGKLRKKLAALRDALAGRFRPHHAFLVGQLLAHVDYLDEAVATVSGEVEAHLAPFAHHVTQLDTIPGIARRTAEVILAEIGVDMTRFPSDRHLASWAGLCPGNHESAGKHKTGKTRKGNPWLRMALIEAALAAIRTKDSALAARYRRVMRHRGHKKAVVAVAHAILRAVYHILTDHTPYRDPGPHYYDRRHAHRVTRRAVELLERQGYRVVLEPAA

SEQ ID NO: 383797 - protein, 358 aa, unidentified
MNSVGLDVHKTRCVACVKTPEGRILEEFAFQNNPHGHEELITHLKAYPQIQVAIESTGNLWIPIYDHLEDEHIHTVLTNPKKTRMIAEAKIKTDKLDARILADLLRANLLSASYVPPPEIREQRSIIRERARLAQLRTIIKNRIHALLDKHAYKSPYTDIFGKHGLEWLHKLDLPPTDRTLLEVNLEQVTSLNHSIDRLTETIAISAITNPEVKLLMGFTGIDYYSAMLLINEIGPVARFSSPKKLVSYAGLAPSTRQSGNHTTHGHITKEGNSHIRWILVEAAQHAARHDPRLSQFYLRIMKRRGHNRAVVAVARKMLVTIYHVLNHHREYRGLRPELYTNKIRRLERITNSSLQTA

SEQ ID NO: 383798 - protein, 440 aa, unidentified
MIDTNQNKEIEFAAFVGIDWADLKHAWALQIPGHLEVERGDLDHTPQAVEDLAAELGRRFGGRPIAVALEQSRGSLLFMLTKYAHLVLFPVHPTTLYDYRKGFRPSGAKSDPSDAGLLVDLLVRHREKLRRLNPDTEQTRTLQFLVEARRKFVSDKTRYSNRLTAYLKMYFPQVLGWFSEVTSPIAGDFLERWPSLQKVQKARPETLRKFFIQRHSCTLDNVDRRLEEIRSALTATHDVAVACSCSAAVLALVRIVRTVRDAILSYDQQIETLARQHPDFAIIDSLPGAGPALVPRLIAALGTQRDRYQSASELQSYSGIAPVLASSGKQHWVHWRWACPKFVRQTFHEWAAHSIGSSAWAKAYYEQQRANGKPRNTVVRALAFKWIRILFRCWKDRKPYREDFYREALARHQQRASKRAPVQLQWKTCAGFSKITAIPS

SEQ ID NO: 383799 - protein, 314 aa, unidentified
MDASQDFMVGIDVSKAYLDVARYGVTSVARWNNDVTGCHELAAAVAGASLVVVEATGGYETPMVRTLAAVGIAVAVVNPRQVRDFARASGRLAKTDRVDARVILHFAKAMRPAQIPHIDDGRIALAALVTRRRQLIDMAIAEKNRLEHASADIAALIHELLASFKAQLIRIDTAIALAIEAEPEMAERRNLLLSVPGIGETTAAILIAELPELGSIDDKKLAALIGVAPIAYDSGMMRGQRHIGGGRTTVRCALYMATLSAIRCSTTIKIFYTRLRDAGKPPKVAIVAAMRKLATILNTILRRRTPWTSQQHGC

SEQ ID NO: 383800 - protein, 351 aa, unidentified
MLIIGVDYHPSFQTIAFLMEETGECGEQELNHRDGQAERFYRELKQRGVSVRVGLEATGYSCWFERLLAELGFEVWIGDAAEISRQRVRKQKTDREDARLLLKLLLENRFPRIWVPSPENRDVRQLLWHRHRLVQMRTRIMNQLQAVAMNEGYRWKKKLFSEQGRALLEKLPLAPWASRRRKELLELLDQLDPKIAELTAAVMQEANQRPEVRRLMTHPGVGPVTGLAYVQVIGTPDRFPCGKQIGSYIGLIPCEDSSAGKQRLGHLSKQGNVLLRFLLVEAAQAAARSNPHWRRRYMHLAMRRHKNIAKAAMARKLAVRLYWMWRNGWDYSQLVSFGSHAGKLATGHGVK

SEQ ID NO: 383801 - protein, 340 aa, unidentified
MKYYAGLDVSMKETFICILNEEGQKVFESRACSDPKPIYDELLKSGYKLEKIGLECGSLSSYLTKGLQILGLKAICIDARKMAAILSVTINKTDKNDARGIADAMRCNHYKETRIRDDNDESISILLRSRAMLVETRTTLKNTLRGYLKSYGIRLGTVSHKDFSSRIQSYFPQFLPEAIKGIESLLKSYDTLCAEIDKLDKSLENICKKDENVQLLMTAPGVGKIVALTFKADIGDPTRFKKSESVGAYYGMTPRQYSSGETVKMGGISRCGSKEIRFLLMESAVVLLTRCKSWSPLKAWGLKLVKKHGLKKASMAVGRKLAVIMHRMLMTGESFKYSKA

SEQ ID NO: 383802 - protein, 399 aa, unidentified
MTVMIGVDPHKRSHTAVAIDGDDVELAAIEVRASARQIDELLGWAAGFADRAWAVEGAGGVGYLLAQQLVGAGERVLDVPATLAARVRVLGSGRSNKTDANDGYSIAVAARHASKLHQVAPADHASVLRLLAKRNKELGSARTRTACRLHALLVELVPGGIAKKITVNRAAAVLAEVTATNPVEATRHELALEHLEDLRRIDSQMHASKRRLADAVRASRTTVTEVFGFGPVGAAIAVGQVRDVSRFADRDHFAAYNGTAPIEVGSGGHSVHRLSRRGNRQLNHAIHIAAITQIRHAHSPGRAFYDRKLAEGKTKKGAIRALKRRISDALYQRLVADAAHAGPGGQTGTTEQASVTGLAPHKPALRNSHSRTHTEGRTRPAPAVTNQPTRRPKATPTRT

SEQ ID NO: 383803 - protein, 346 aa, unidentified
MNSMNYAGLDIHKKSISCCVRQADGTIIEESTITATRQALDEWVRQLPQPWMAGMEATLFTGWIYDHLVSGGALVKVAHPAMLQAIAAGKKKNDRVDARKIADLLRCDYFPECHMAPREIRDRRRVLRYRNLLVRQAVQMKNKVSGLLMEAGVPYNQQKVHQKKYFAELLQKQKKEMPPSMPELLRLSRSTVEALTGMQRQLIRALERDALLAARVERLASIPGVGRVVALTWALEMGDIRRFASVKKAVSYCGLCGAEKSSGGKTERTPISKQRNKHLQTILVEAAKLAPRWSTELALVYEREKQRGNRNRATLAVARKLVAYLMAVDREQRPFDTQLRVAGNAA

SEQ ID NO: 383804 - protein, 347 aa, unidentified
MGEIKRIGMDTSKQIFQLHGVNEAEQPVLRKKLRRTEMVRFFERQEPTVVAIEACGAAHYWARELGRLGHEVKLIAPQLAKPYVKRGKNDAADAEALCEAASRPSMRFVPGKTAEQQAALMLAGVRERLVRNRTQLANTIRGTAAEFGVIAAKGLAQIEPLLARLQADATLPALARELFAVQAEEAAQLAARIAVIDAKLLAWHRANALSRRLTAVPTIGPIVATLLVMKTPDAHAFRRGRDFAAWLGLTPKDHSTAGKVKLGGITRAGDETLRSLLVVGATAVVWQTRRGADRHPLPWLVELLKRKPPKLAAVALANKTARIAWKMMMSGQAYDPTRARSATPAAT

SEQ ID NO: 383805 - protein, 469 aa, unidentified
MICSVGIDLHQGQHRARCLDDRAQPCDGFSFQTTPEGLATLEERVFRDGANPVIVLEPAGLPWLMVAVYLRTRHPDCRLVKARTQKVAALRRYLRGPVKSDRLDALTLAKMPFIDPEQLDEIYLPPAEIHALQRLTRQRKRLESDVSGRKIRISAIIDGYLPGVRRAFDDAWSSPFRAFLRSRISPFCVVRDGEEALHAYLSKASPRSRWSRVQTRQVFLACQSVAAVCELSAAAGTVNEEFFLNLQDEIARELRMMEMDEAESESLAHRIDGLYRKLHPSDNLCTIPGVGEHTAPIFLASVGDPARFRNQSAFANWEGVVPGARQSSNVEAKGLRMTKAGPSIMRMALFQAGDIGRRWDPQLASVYYRQMVYHGKNHRQAMGAVMSHLGARVLRVLKEDRPYELRNIKGKPIDKKEARKLILSQYHVSEAIRRERRRRNSRNRRRRLISGDSDLQDTRGSRAPQPIQA

SEQ ID NO: 383806 - protein, 440 aa, unidentified
MRSTYAGVDWASEKHDVLIADETGKEILAATFAHDEAGLRSLCRALVRHEVTLVAIERPDGLLVERLLDAGLRILPLHPNQVAATRDRFRVSGGKSDRFDAFVLCELARTDHHRFRVLDPDSDNTKALRALTRAREDLVGTRTALSNQLRAELERFWPGPVGLFTDLYSRISLAFLERYPSPTDARALGEARLQGFLAREHYTGSQKPAKLLSKLRRAPAARVGELELGTRRALVLSLVATLKTINEQIRQLERQIATAMHEHPDGAIFLSLFKNPSSVICAAELLAEIGDCRARYRTRDTLAADAGQAAVAKESGKYKAACFRWACNKRLRGAVCTLADSTRHHNPWAQDLYASARGRGHDHPRAIRTLGRAWCRILWRCWQDRVPYDPARHRALQQHITVTIPTVSGPVLDHAATQRMVAGAFPRAANSRQQEVTATQ

SEQ ID NO: 383807 - protein, 346 aa, unidentified
MVLIGCDYHPSWQQVCWFDPATGETGDEELVHASGGAEKFYRRFSSPVRVGLEATGNCQWFLELLNRLGHEVWVGDAAKIRASDSRQQKHDKRDARLLLQLLLENRFPRIWIPTREQKDLRQLLMHRYKLVVLRARVKNELQHLAMNQGITRKRKLWSQAGEKVLRELALAPWASQRRKDLFGIREMLNKQIDLLDRAVVEAAEKNEKARLLMTQPGVGPITSLAFVLTMGDVNRFQRGKQVASYLGLIPREYSSGGHQRFGSISKQGNRFMRMLLVEAAQGAVRYDRGFRNEYLHRCHTKAKGVAKVAAARKLAIRLYWMLRTNTGYPGVVRVESSSRVALVSES

SEQ ID NO: 383808 - protein, 346 aa, unidentified
MEHYVGLDVSLKLTSICIVDRTGKVEREGVVASDPEAIATFIKLHAPHVVRIGLETGATSTWLWTELNKMGLPVICIDARHAKAALKMQINKSDRNDAVGIARIMQCGWYKEVCVKDLDSHATKALLVSRALLVKIKRDIENQIRGLLKNLGLVIGRAKMNMFAVRAAQLAEGRSELLAAVDPLLKAREAVEQQILDLDRKVLRLARNNAQVRRFMTAPGIGPVTALCFLATIDDPARFKRSRSVGAYAGLTTRRYASGEIDWTGRISKCGDKMLRSYLYEAANVLLTRVAKWSALKAWGVKLAKRSGLRKAKVAVARKLAVILHRMWIEGTEFKWSSKEAADQPA

SEQ ID NO: 383809 - protein, 416 aa, unidentified
MEVIVSRCAGLDVHKNTVMACVRVPGPNGGRTSTVRQFRTFTAGLRQLRDWLVAEQVSQVVMEATGVYWKPVWHVLDATPGLELMLVNAHAVKNMPGRKTDVADAVWLAELGECGLLRPSFVPPPVIAQLRDLTRYRKKLIEERARETQRIQKLLEDAGIKLDSVVSDILGVSARQMLEALIAGVRDVAALAELARTRMRPKIPQLRQALEGRFGAHHALMLRMHLEHVDQLSVSIDRLDSEVDRVIRPFSSALQRLITIPGVGRRTAEVIIAETGADMRRFRTAGHLASWAGMCPGNHESGGKRRSGRARKGNAALRAALCEAAWAASHARSGYLPAQYRHLLRTFGKKGQTRAVFAVGHSILVIAWHLMAHDRDYADLGGDHFTRATDAEARERYLVRQLEALGHKVTLEPAAA

SEQ ID NO: 383810 - protein, 363 aa, unidentified
MEDAKRWYVGIDLAKRTMEVCFLREDGKSTRWSAKTDVEGRKRLVKQLHREDVVGVEACVFAFSLQRQLLKVVGCEVIVLNPGKLAIIHQSTNKTDRLDAYRIGLMISRFDRSELPEVTVPTEREEMMRTYVSAKQFFTDSRTRLINRLHALYVQAGITDVESRELKTHEERIRRGEDLEGFFKITAEALCREIDTTETNIGELEQELSAIVAKDELAPYLLSVPGVGPNVVTAFLAFIGNGDRFANAAQVANYAGLVPRVDCSGETERRGGITKSGNPILRRLMLQAAWSLTRSRDGGRLKVKYAYFLERKGKMRSVVALARKILELLWILAQRRTYYADCSEARLAAKLKRYGIVKTERAA

SEQ ID NO: 383811 - protein, 348 aa, unidentified
MLIIGCDYHPGFQQIAFVDTDTGECGERRLTHQEEAEQFYSALKGRSVRVGMEASGHGRWFERLLAELQFELWIGDAAEIRRKRVRKQKTDRQDAQLLLRLMIEDRFPRIWVADAENRDLRQLLWHRHRLVQMRTRVMNQLHVVALNEGLRRKKALWRPAGRNELESLVLARWASRRRQDLLDVLDQLTPKIQELTRALEEEVQNRPVTRRLMTHPGVGPLPALAFELVIGTPERFHYGKQIASYVGLVPSEESSGDRRRLGHISKQGNALLRFLLVEAAQVTVRSQPQWRSKFFHLAMRRGRKIAKLTMARKLAVHLYWMWRRGWDYGQFEKLGSHAGEPGNRHGVQ

SEQ ID NO: 383812 - protein, 394 aa, unidentified
MKLIGIDIGKNKHFFCIMDQQTGEIIFQPVSFSNDKEGFDFLIQKINSYPKDSVLIGMEDTGHYHFALLKYLLDLQYTVALINPKTTDFNRKMQGGITKNDKLDTINICDVLDTPERKKQYRITKVNSFDLYEQKQLTRHHHNLKEEENVYKNRLQKCIDIVFPEFNKLFNSKYGTVYMNILKTFGSAENIANTDIRTIRKCFEIEGRGNRISLTPERLKECARSSIGISSSAEVIQIKHLTAQIELIEEQLTEIDKKIEEFSIQNNSPILSIPGISHFSGTSILAELGDVSNYSKPSQIIKFAGVAPLHYESSQFNAQHTAITKKGSKYLRKTLYQIILPVIRHNPVFNKYYQLKISQGKGHRCAQGHCVRKLLRIIYHLLKTNQQFDHQLLR

SEQ ID NO: 383813 - protein, 320 aa, unidentified
MQTPPVALDIGADVGKDEMAMACAEASFPTRKIHNQRAALLAFLKDLPAGSRIGMESTGIYHELLAELAHQRGFVVYVLNPKDTRHYAKAMGLRGKTDRVDAELIARMIAHEHEKLHPWIAPTAEQRQIDRLLKRRAKVSRIRATLTQSFKDVKGFAAEIKALRQRLDQLLAGLDATIKTLIEASTERKQDYARLRKIGGVGAVVGSSVLNTLERVPFKNADAFVAFTGLDPRPDESGHHHGRRRLSKRGPSELRRLLYLAAMAAAKTKTWKPIYQHYRAGGLSTTAALVVLARRIARTAWSIYTHKTAFDPQQLTKAFP

SEQ ID NO: 383814 - protein, 376 aa, unidentified
MKKVQFVGLDVHADTIAVAVAEPGGAVRSVGVIPNRPESVRTLVKRLGSPEQLRACYEAGPTGYVIYWQLTALGVRCEVVAPTLVPVKAGDRVKTDRRDALKLARSYRAGDLTPVWVPDAAHEALRDVVRAREAAKKDQLRARHRLGKFLLRHGRRPPAGINRWTQRHLLWVKGVRFAEAAQEATLLDYLHEVEHMADRLVRLEAALDEAVQAAPAPMRTVIAALQALRGVAQLSAATIVAELGQISRFGRPRQLMSYSGTVASEHSSGDRIRRGGITKTGNAHLRRIVIEAAWAYRHRPARGRALLKRQQPVSEEVKAIAWKAQHRLHARYRTLTARGKSTQQVVTAIGRELLGFIWAIGTTVEAEAGCARPVAA

SEQ ID NO: 383815 - protein, 375 aa, unidentified
MTKIIRIGVDTSKSIFVLHGVDASEQPVLRKKLRRKQFLEFFSKLEPTKIGMEACGAAHYWARELRALGHEVALLPPQYVKPYVKRNKNDAADAEAICEAMSRPTMRFVPVKSAEQQAALMLAGTLDGLTARRTQLTNTIRGYAAEFGLTAAKGLDKIEPLLARIAADARLPRLAKQLFAVYAKEYAQLKGQIAKIEAKLMAWHKHNELSRRLAEIPGIGPIGASLLTMKVTDPHAFSCGRDFAAWIGLTPKDHSTAGKKRLGVITRAGDERLRSVLVVGATAVIKQVPHGKGHPSPWLVNLVKRKAAKLAAVALANKTARTAWKLMVSGERYDRAHAVPSHRDGRAAALADGYAPRPSLSPCPSAPKASMPAKA

SEQ ID NO: 383816 - protein, 359 aa, unidentified
MRALNRNSGSGPIIKDIERASFAVTLNLISMKQMYYIGVDVSKGKVDIAVLNATKEVVLEQIIKNEVKVLNRFFRVLFRKLKIEKEDILVCCETTGIYNHPLEVCCTQMDIFLWVENALKIKKAASDLRGKSDRKDACRIAEYAIRYEDRKYRFVPQDETTQKLDDLLKVRDTLIAQKVGIENQLSESKAMYPERYKTLSACYKATLKTMLTEIAKVEKQIDELTKNEPEVKKNIELLTSIPGIGKQNALQFILHTNNFKNFESANHLACYSGVVPFPNQSGVSIKRDRVSNLANHKLKKLLHMAAMSCIRAHGELKEYFIRKVKEGKNKMLVINAIRNKLVHRMFAVVKRQTPYLREI

SEQ ID NO: 383817 - protein, 373 aa, unidentified
MKIIGCDFHPSFQQIAMFDSETGEITELRLSHANAEATKFYESLTGPAVVGVEASGNMRWFQRLLARLGHTLLIGDATKMRAGNPRKQKTDKRDARYILDILLEKRFPSIWVPSMEEVDLRQLLKHRHTLVQMRTRVKNQLQHIAINEGFQKKRKLWTVEGLGFLRNLALGPWTGRRRDDLLQLLEQLHGQIQEMNQAAEKEAAKQPLVQLLMTHPGVGPILGLATVLTLGTVQRFERSKNATSYVGLIPSEDSSGERRRLGGISKQGNSFMRFLLVQAGMVAARHEPELGRFYQRLVHKKHHGVAKVAVARKLLVRLYWMLRTNTPYPEVVVRTQGSSSHSVAKKAKTERLSGRPASRKKGKQNKQPGKNQQ

SEQ ID NO: 383818 - protein, 270 aa, unidentified
MAIAIVGLDLAKHVFQVHAVDETGRAILRRQLRGAGVEAFFKTLPPCVVGLEACASAHHWARRISALGHTVRLIAPAKVKPYVQRGRKNDANDAAAIVEALMRPHMVFVPIKNEAQQAVLMLHRTRDLLVRQRTMLVNAIRAHLAEFGIVAAQGRRKVKELITGLDNTEVPELARLALWQIADQIDECDKRIDALERRILAWHKSDEASCNLATIPGVGPITASALAATVPDPSAFRNGRQLAAWLGLVPRQNSSGGKDRLSGITKAGNP

SEQ ID NO: 383819 - protein, 355 aa, unidentified
MISTKYIGMDIHKESISIAVRNAAGKIVMECVIETKANMILQFFDGLRGDLHVTFEEGTWAAWLYDLLKPHVTKLVVCDPRRNALLQDGNQNDRVDARKLSDLLYMNKLNAVHHGDHGLRTLKELGRSYLTMTKDQSRVMSRIKAIYRSWAIPCSGKQVYGSRHRAEWLGKIPEPGVHRRAELYYQQLDALRTLRQEVRRDLLAESKKHKIWKRLCEIPSIGPIRAAELLGILQTPHRFRTKRQLWTYCGLAVVTSSSADHEVDNGQLRRRKKRKETRGLNENCNHDLKNLFKGAAVVASIKPGPFAEFYAALLAKGIRPEMARLTLARKIATIVLIVWKKGVCFDANHLKPQTA

SEQ ID NO: 383820 - protein, 461 aa, unidentified
MNRTSGKQRRPIQASDLDALEQINLDAAGIDIGANEIYVAVPKGRDVESVRVFATFTVDLERLADWLQHCGVTTVAMESTGVYWIPLFEILDSRGLDVYLVNARHLKNVTGRKSDVLDCQWLQRLHTCGLLQASFRPPDEICALRALVRQRGMLVQYRAAHIQHIQKALQQMNVQLTRVLSDITGVTGMKIIRAIVAGERDGQVLASYRDTKCKHSAADIVAALQGNYRREHLFALRQALSLYDIYDSKIRECDTELEAMYQDLKAPQAPDDPPTQPPAPRTGKPRKNQAHFDLATSLYAMAGVDLTRANGIDALTVQTVVSEIGTDVSAWPTVKHFSSWLCLCSQNKITGGKVKHRGTAPTSNRVSTALRVAAQSLSRSNTANGAFYRRICARRGPAIAVTATAHRLARQIYFMLKHRTDYIDPGPEEYERRHQERVLANLRRRAARLGFALTPVTASVS

SEQ ID NO: 383821 - protein, 336 aa, unidentified
MRYIGLDVHKTNIAACVVADNGKPVKHMELRNRNFLHEITDYMGDRKYCVMMESSTYVYDVYRFFSERGVEAHVAHAKALKMITSSDKKTDKNDAEALGRFLRLWKRGEIELSISYIPTEEECELRDICRLKEEISGKIGDESRRIKSHMSRNMQPFPDGNGNLAVKGVINFIKETYRDDAVLMFRISELEHIREEGDEIGETIKKKLPGDVNVELLCSIPGIARLTAVQIMSMIIDVGRFEDPEKMCSYFGLVPRVRDSGGKERHGRMTKNGDKMMRAIMERVTLSHITHCDSTIKEFYHRKVSEMGHKKALISASRKMLTMVHSILRTGKPFKA

SEQ ID NO: 383822 - protein, 414 aa, unidentified
MSTQVFCGIDWAEDHHDVALVDRDGQLLARRRISDDAAGLAALLDLLAEHGDSAGQPVPVAIETPRGLLVACLRATGRKVYPINPMAVARYRDRHSVSGGKSDQGDSVVLANVLRTDLTFHRPLPADTELAQAIAVLARAQQDAVWDRITAHNRLRSCLREYYPGFLAAFEAARGGIMRPEARVILAAAPTPADAAKLTLAQLRGLLKKAGRRRGIDAEAARLREAFRAGQMRQLPLVEQAMGRQTLALLRQLDAACASAEDLEQAAIESFNQHPDAGIITSFPGLGLLTGARVLAEIGDDRSRFCDAKGLKAYAGAAPITRASGKTKSVTHRRVKNNRLNATGYTWAFSALTASPGARAHYDRRRDDGDRHAAAQRNLFGRLLGCLHRCLATGQHYDETIAFPDTTQKLPTAA

SEQ ID NO: 383823 - protein, 343 aa, unidentified
MKRMYCGIDLHSTSMQVCVIGQDLVKVLDRTVRNDLPSLLSVLHPFGSGLRIAVESTFNWYWLIDGLQDKGYEVHLAHTLGLFLITRAKVKTDRRDAYALAKLLATGMLPEAYIYPKETRPIRDLVRQRTRLVAARAQGYAALRLRLYQHGIHDHSRNDTKNWAVEDLDEITDQPIVRMLCGQDLERIALLSDQIVAIEERILEAAQPESGYQRLTALPGVGRAISAIVFYETGDISRFPSARHYSSYCRLVPGTADSGGSSHRGRGAKQGNSHLKAAFTQAAQCAVRHYPTMKAFYERHAANHPSRGSRLIATNILGHKLALAVYHILKEGTEYDERRLLTA

SEQ ID NO: 383824 - protein, 389 aa, unidentified
MARTLYVGIDLGKGFHQVAVVDERKERLGEPFRIGRGRSGVELMLKRLRLCGARPEDLVVTIEATGDYWRELVWALVNRGCRVYLAQPKKAHDLRKFYADHTKTDITDAEALARMPLVDEGLRPVWVAPPAEQMLLRLCRLRWKYRCRIADLKRRLSTLSEMIMPGIDGVMPVRYSKSARLFLRRYLAPSRARRLGRRRLVELLTKSAWGKFSERKAEDLWACIENAPDLGWQTDDLLLEVNVQLDELEMLERQVERLDERIAELYSEVDPEQRLMKIGGLGEFLAAALTASLGVDVRRRFPSTKHVVSFAGLAPRVKSSAGHTKPGQGITKRGNPFLRAWAYLGASCARQYDPELEAYYHWMRDRGKHYNVALCATAARLLERCYEAL

SEQ ID NO: 383825 - protein, 342 aa, unidentified
MQETIYVGLDLGSSHCCQSIIGADGSLRSSRIVRTSEQQLRDAFTGLDGEVRVHMEAGELADWAGSVIGPLVSQVVVSHPRSLAWIGKDSVKDDRVGAGKLAELLRLGRVHEVYREEDAKRRTFKHLVMHHEQMSHEQARRKSKIKARLRCLGIIRKDAALFTSAGQSVLLDAIESIEIKVMIAQSFSVLNRMIEIQREAKHAMVEYSKRFPEVHTLQSAPGVGAITACRFVGYVQTPRRFSNKRKLWRYCRLGITRRESNGKRLSHPRLDNAGVGSLKDVSRKVFEAARRCKGDNSFKRCFEQSLENTKNAVHARLAAQRKILAVMRAMWAHNQPYRDNLG

SEQ ID NO: 383826 - protein, 435 aa, unidentified
MSRQNPDPNPNPSTLSAPVFAAFIGLDWGDEKHALSLCAAGSTTLERTTLEQTPEALADWANALRTRFPNGRIAVCLEQARGALLAAMLPYEHLVPYPVNPKSLARFRQALYPSRSKNDPVDGDLLLELILKHRDRLRPWRPDTVQTRQIALANEQRRHFIDHRTALTNQLTAHLKAIFPQALQLVGEVLASSMATDFLKKWPTLQALQKVSPSVLRKFYYGHNSRSEALMTQRLHRVKNALALTQDPALLAVHSLAIQTLAAQLQALRPFLDQFDEQIAQLFAAHPDVALFESLPGAGAALAPRLLAALGTDRDRFESAVAVSCYSGIAPVTEQSGKTQHWVHLRWSCPKFLRQSWHEFANASRRFSPWARACYEHLRTKMDHHEAVRKLAYKWQRIVWRMWQQRQPYDEARYLGSLQQRGLEIYAGLPAQTGG

SEQ ID NO: 383827 - protein, 334 aa, unidentified
MSRLAVWELKRKTEVRTGRSYPIITIQEAGLDGFWLHRVLQQERIESHVVDPASIATPRRRRRAKTDRLDGETLLRALLAYKRGEPRVCAMVVAPSPEEEDRRRLCRERRTLIEERITHVNRIKGLLFAQGISGYAPMRRDRRARLEALRTGDGRELPSHLRAQIDRELDRIELLLGQIKAVEAAQDALLAAARKPASEEAAPDPVTMLLALKGMGANFAAVLWSEAFYRQFANRRQVAAYAGLAATPWQSGGIRHEQGVSKAGNPRLRTTMIQLAWLWIRHQPQSALTRWFKERSQQGRKRAIVALARKLLVALWKYVTQGVVIEGAVMKPAA

SEQ ID NO: 383828 - protein, 364 aa, unidentified
MNKESLSSKGNSQISVVNQEKRVLKLGLDTHYRQVTAAMQEDGGRIKAAGKMGYGDFGNWVQKKLDEGWEISSCYEAGATGYWLHRQLEQMGVKNLVVVPKAMGQGGKKQKTDKRDCGELCDALDRYLRGHDKALSVVAVPTEEQEEKRALIRYHRQIMADRGRCEARGKGLLCAQGLQVRGRWWKGDTWLELTGDPRLKDWVKEQLVGWRTKILSTDEEQNALRERIAALAPAILPKGVGAYSAAVLHYEMRGFGRFKNRRQVASMTGLCPGIHLSDGRGKEGSINRCGIGIVRWTLVEMVWRLVIWQPQYPPVRRLAAGLVKSRRAKKRLVVQAARRLAIDLWRLSTGQTTPEKLGLVMQSN

SEQ ID NO: 383829 - protein, 395 aa, unidentified
MQVMHPVCCGIDVHQKSIVCCILDGPLTSNEPKKYQTSFGTTTKELKAALDWILEHQVTHVFFESTGQYWIPLFNIFSDSDLELVLANPQHIKNVPGRKTDVKDAEWIAQLGRCGLINQSYIPSQEVLQLRYLTRYHLSVKQRLTQIKNHIHVILQRANIKITSYLSDIFSKTGQALLTLFIDGEVINEDNVESCIHGRIKASTRQLIEAMEGKLSTVDRFLIKECMEEYKLQKKISDELNKEINEYILEHFPEEYQLLLTIPGISDNCCATILAEIGPNVDAFKTDKKLASWAGMCPGSNESAGVKKSSHTTQGNKYLKQALVMSVLSVQRAKEETFSLFYQRISSRGSKMKAIIACGHKMLRIIYKILQSHQPYNSQKALGLRQQTNALSLTI

SEQ ID NO: 383830 - protein, 339 aa, unidentified
MQQQTTLDLNRATYVGIDVHPGTHTAFAINRFEEKKGQLCFENTSVGISQFIAWLKTVDTSSDNVIVGVEGRGSNGHALVSRLIDSYRHVYEVNPLYTKHRRDYGTKGEKTDAIDAKLIAEVLTRKLPELPSISKCEYLPKRVALRRTVWFYEETTIAGARLKNQLRKLKRDLKLCTDKTEIRLLTFTLKEKEADLARIKKRQKELVKQLEMLLEGNGKNLTTYRGINTIAAARIATQINGIERFASIDSFIRYAGISPVEKSSGKSRRHMQNHKGNRDLNSILYLVALNQIRWNPKSKEYFEKKVKEGKTKKHALRCLMKRTACIIYGMLKSGEDFRE

SEQ ID NO: 383831 - protein, 403 aa, unidentified
MFVGIDWASKTHELCVVDPQGKIVEQFGFAHTEHGIAGAVGRLAKLGNPSELPIAIERPDGLLVERLLDAGHEVVPIHPNAFHAARPRWEGAGSKSDVGDAFRLADLLRTDRHRLRPLRPLDQATRELQELVRLRDDHVAARVAATNQLAALLARHWPGAAAIFARLDSEIALDFLERYPTPHSTARLGESRLGAFLRRHSYSGRRSARELLTRLRQAPQPVHTLDPELVAELVHAQTRVVRTLLSTIADLDRAIAASLDQHGKAQLLKPLPRIGTISLGQVVAEVGPLLDRTTTTEQAAALCGSSPITKRSGQQRSVCFRYATNTKARKALMLFADNSRHASPWAERIYHDARARGCRHPHAIRILARAWLRVIWACWHTNTPYDPTRHRGHDRHLQDLTLT

SEQ ID NO: 383832 - protein, 345 aa, unidentified
MKYIGIDYHKQYFVATAMDERGKIISKDKVSTDRDSIRHYFKKVGTGETKAVMEACYGWEYFYDEVDNLIDDLIMAHPLKTRLIAEARIKTDSIDSETLAHLLRADLIPEAYAPSLETRDKKNLLRYRSSLTAIKVRIKNTIHSILARNHIEDKGFTSLSDKFGKKGRAYLRSVRLRGNDTIILNQYLDLLGETETKIAAAEKQIRAVCHQDEICKLLGSVPGIGDILAVTIRYEIDEIGRFVSGGKLCAYAGLVPFTYSSGNRTYQGKITKQGNKWLRWAMIEAAQRAPLNDMWLREFYNRISKKGKKIARVAVARKLLEIIYRMWIDRKPYCKKSVTAALQCV

SEQ ID NO: 383833 - protein, 344 aa, unidentified
MHIASIGIDLGKTNFHLVALGERNKVLVRKKFSRAQLLVYTANLSSSLIRLEACAGAHFMGARLREQGHQVRLIPAQFVQPYRKSNKNDFIDAEAIAEAVTKQNMRFAQLKTEEQLDVQAMHRVRDRLVQRRTALINEIRGFLLERGITFAANPIHLRKSLAGVMEDAEQNLSPRLRWLLERLWQEWKQVEIDIQTITDEIERISKENALCRRLRQIPGFGPLVSTATVAAIGNGAAFRRGRDFAAWLGVVPRQYSTGGKQKLLGISKRGNIYLRRMLIHGARAVLFRVKYETGGFGQWVHRLAQRAPRNKVVVAIANKLARIAWAVLSGGKDYQHQPLQITAA

SEQ ID NO: 383834 - protein, 418 aa, unidentified
MEVEHDEQEIIQRVAALDIGKAELVCCVRVPGPGRRRMQEVRTFLTMTRSLLVLSDWLRSLGVTRVVMEATSDYWRPPFYLLEGSFETWLVNAGDVKHLPGRPKTDRLDAVWLCKVAERQMLQPSFVPPPPIRILRDLTRYRVDLVTARTAEKQRVEKLLEDAQIKLSVVVSDIFGVSGREMMAALIAGERDPQVLAEMARGRMRSKTARLVEAFIGRFSDHHAFLLTTMLARIDALSIDIDTVQERTEEELAPFASAVARLDEIPGIGATAAAVIIAEIGVDMTRFPTPAHLSSWAKFAPGVKESAGRKKGNGATGHGDRYLARVLGEAAVNAGRTDTFLGERYRRIARRRGKKRAIVAVGRSILIIAWHLLSDDNAQFRDLGPGYYDSRANLNRKMHNHIRELQALGYKVTLEAAA

SEQ ID NO: 383835 - protein, 373 aa, unidentified
MANVEKDFAKGKPIFVGIDVHKRDWVVTVLCQGEELYQATVVPDPGALVRLLRRFKSSEVHTVYEAGPTGYNLHDALTEAGFDSMVTPPSLVPRVGGRVKTDHRDSRKLVSMLAGGFLKRVHVLTPEERAHRQLLRTRNQIERHRQHTQNQIKSLLLFHGKRVPTTLREHWSAAYVHWIETIEWDHPALKTSIGALLDLFRHLDGQYKALTREIEVLALTEKYRERVRLLTHIPGVGIFTAMAILIELQDIERFRRADQLASYLGLTPSQRSSGERIRMGHITHCGNVHLRTRFVQSSWTLIRYDQAMRARYERIKHQTGSGKKAITAIARGLALRVRRVLLDKAEYKLNYCETSKHERARTGQFKRFVLRPA

SEQ ID NO: 383836 - protein, 287 aa, unidentified
MPIVGGLDIHRKQITFDCVDTDTGELQRGRIAPADRQHLAGWLARHLSEDTEMHLAFEGCTGWRYVAEELARAGVQGHLAEPADTAALRGPKRHAKTDRADSQHLRQLLIDGRLPECWIPPAHILEARALLETYHDLRVEHTAWVQRIHAVLFHQGARRCAGLRSVEGQALLAQISATELSAAGQLQVAIALSMLTALEGHLTTLHRQLIIASRHLRGARVLRARLYGVGPITALALTCWLGGAGRFSSARKAVRFAGLDITVHSSDGKHSPGRLSRQGPEVLRWCV

SEQ ID NO: 383837 - protein, 329 aa, unidentified
MKVTAIMGIDVSKKTLDCHLFVQQKSLPAVSNDSKGFKAIKRWLKKELKSLDGLLVVMEYTGIYTYQVERFLQQHGIQFVKRPALDIKRSLGMVRGKSDKIDARFISKYGWMRKEELQPMSVLSDTQLELQQLMGHRDKLVADHASYQCKLKEMISQMGEKVNEKLITSMKLVMEVLKQEIKETEKAIKELIGSDEPLQTNYELACSVTGIGFATAVHMLIATENFTRFSDVRKLICYCGVAPFEHSSGTSIRGKVRVSHLANKKIKSLLTMAAISAIQHDPELKAKYEQKLKEGKAKMCVINIIRAKLIERVFAVIKKQKAYEVRLAA

SEQ ID NO: 383838 - protein, 421 aa, unidentified
MTTIAKKLAQVKPGSVFAGIDLGLDDCTVVVLDASGQRLDRFKTAHSRDGYEYLLQRGQQVVTRSGASGVLVGMEPTNYYWKLVALFLNQHQIPFRLVNALTVKRHREGDQLDKAKDDWRDAFMIADLLRTGKFNETQLRTGPYAELQLGYAAYWRLRHDRGRQLTLLTNTARQVFPELQSVFKDLVGHTARAVLRSLPAAARIRTVTCDEFIAQVRRAAQGKRLAVKRLRQLHALAAASIGLTAGLDSLCADLQNSLATLELVDQQSVRLFDSLRTQLRTLPETPYVCSIQGLDEAFALGILAETGDLTCYGSGKDLIKLAGTQPTPNASGRRQRSQTPFSKKGRSRLRWILYWATLQLLSRNDAIAHYYHALQTRTKHPLTKMEALGACMNKLLWYVWCTGHGRNKYDPDRWQSSGKPV

SEQ ID NO: 383839 - protein, 356 aa, unidentified
MKQVKTLSFAGQDIYCGIDVHKNDWSICIRDNERELRCFSQPPQPAILSDYLKRSYPQANFQAVYEAGFCGYWIQQALSQQGICCIITHAADVPTTDKDRRQKTDRADCRKLAQALKEGSIKAIYIPSQQIIEDRSLVRGREQLVQDQTRYKNRILSWLHFFGITIPEGYKKSTHFSKRFISWLEQLPINENAKFSLQAKLGALQGIRNQLLLVNRSLRKVAQSEKYQKKIELLRSIPGIGITNAMIFLTELDDISRFKTFDQLSSYAGLKPDIYSSSDTTIIKGITHRCNLLLRESLVESAWKAVAKDPALLIAYKKYKNRMHYNKAIIRITKKLLRRICYVLLHQIPYVTGIVG

SEQ ID NO: 383840 - protein, 471 aa, unidentified
MGGAVAARKQKQKRMSAQVVEDEDYQLRYEVAAGIDVAKESAVVCVRMPPAAGRKHRTSHLQTVPATVPAITELAAELKATGVQMVSMEATSDYWRVWFVVLEEAGLAVQLVSSSQARNLPGRPKTDKEDARWIARLTEMGMLRSSFVPPPEIRALRVYTRHIWDLTGDRTRYWQRLEKLLEDALCKLTSVVSKLAGHQTARAVIEKMIEGERDPRVLAALGQGKMRNDKLPALAEALSGMRFGPQHAHAAASLLRAIDLLEAELRDLQERVTAHLAAIPGSWGVDSGGVTGPEAGRAADAAALPAAERLDEIPGLGREAAMALIAEIGLDMSRFPTPEALVSWAGLTPTARQSGPRSGRGKKGHGNTYAKRIAVLAAYAAANTDTFLGERFRRLSARPGGGGRKKAGCAVGRSILVIVWHLLNDPAARYRDLGSDWHARHTDRSRKARNARRQLEALGYDVIITLREDAA

SEQ ID NO: 383841 - protein, 318 aa, unidentified
MFIGIDVAKDALVVAVRPSGEVMTVANTPAGVRTLMQRWREAPPTLIVLEATGGYEAVAASALATAGLPVVVINPRQARDFAKATGQLAKTDQIDAAVLAQFAEMVRPPVRPLADEDTHQLDALLRRREQLLDMLLAERVRLQQTHARAKLVRQSLAKTIAFLEKQLGRTDDEIGTCIAASPVWAAREALLQSVPGIGAVIARTLLGALPELGQLTRQQIGKLVGVVPLNRDSGQHRGKQHISGGRADVRTKLYMGALVAMRRNPRIKQFYQRLIAQGKAPKVALVACMHKLLTILNQIVRTATPWDATHNLAVLQPT

SEQ ID NO: 383842 - protein, 287 aa, unidentified
MKIVGCDLHARQQSIAMMDMETGEITEKTLSHEGNAVREFYAGLEGPVVVGIEATGAMQWFLELLEELGIKYRVGHPAKIRAQETRKQKHDRRDAGLLLTLLSEDRFPEIWMPSTEQRDLRTLLRDRDQWVRMRSRVQHTLQAIALNHALRKGRALWSVAGQSALRALSLPPYTAQRRNELLAMYGQLQRRIQELDKEVERQASQRPHSRRLMTHPGVGPVTALATEVFLGDASRFSKGNEVASYIGMIPCERTSGKRQRLGKLTKGRQQAAALSVDGGDPACGRER

SEQ ID NO: 383843 - protein, 360 aa, unidentified
MNATTVAVDLAKSVFQLAVADEHWRIVETQRLTRTQFERWFANRSVGLVIMEACGSAHHWARWLNALGIEVRLLPAQYVRAYVRRNKTDATDAAALLEAARASDIRPVRVKSVEQQALQGLHRIRSLWMGTRTSRINALRGFLREFGIAVPAGARTGLEAISRVLADPASAVPELIRGSARLLVEEIRLLEARIAQLERELAAVARLSPACTTLLSIPGIGLLTATALVAATSGDVTHFKDARHFASWFGLTPREHSSGSSRFLGNISKRGDRYLRMLLTHGARSVLRAAKVAEAAEREVCGVRRWALDVQRRSNHNKAACALANKLARICYATLRDKTPFGDTERLNRKITRETFVMPA

SEQ ID NO: 383844 - protein, 607 aa, unidentified
MSTIASLDRIGVGIDTARYGHRVSFLRPDRKPAAKPLTVMENRAGYQALQDRLNQLHEQHPTAHFHVRIDAAGQYAVNLELFLRGLKLPMTISVGEPKRNKDYQKAHFPKRTTDDTESQAMARFAVIELPNATPAPSTPMILLREVAGRLQSKVKQTTQAINRLHNLLARVFPELATLTEDISVGWVLKLLDKYPTAERIAQAQIASLEKIPYLSVEQAHAVHQAAKQSVASLRGELAEALVRDLVNQLRLCQKAEQHLHQLLLEAFADLPASPHVQVLTITGIGEATAAALVAKIVDINRFATPNHLVSYFGVFPEESSSGVDKHGKPLPPGTLIMSPKGNDLVRFYLWNAARNAIQHNPAIRALYRRLRAKGKRGDVAFGHCMRKLLHLVYAVWKTDRLFDKEHFPWEGSSDTQPSATTPPSADAGTTPSANEEAVGHKRDLPAEEVVTTADSTLEPASPAVKPASQSAAPRPKVDFACVREHVTMEQVLQHLGYFASLRGRGRQRRGPCPVHSQPTAPERTFSVHLGKNAFQCFHAECAVKGNVLDLWAAIHRLPLYEAALDLAETFQVPRNREEEPVKGTSSPRTATAKTSAPAAATATDGAK

SEQ ID NO: 383845 - protein, 412 aa, unidentified
MQAIIERCCGLDVHQETVVACVLVGVPGAQPTKEVRTFRTMTRDLEVLRDWLRAAAVTHVGMESTGVYWRPVYAVLEEHFELIVGNARHIRNVPGRKTDVKDSEWIADLVRHGLIAKSFVPPRPLRELRELLRYRRKLVESQAAERNRLLKLLETANIKLASVASDVFGVSGRAMLRALIAGEASAEAMADLAKGQLRRKRADLILALDGRTEEHHRFLLAMQLRRLEAIEADIAALDLRIGERLEPYRMPHALLTQIPGVDWLVAAVLVAEIGVDMSVFLSVYHLSAWAGVCPGSHESAGRQKSGRARKGNVHLRTILVGAAISAGRTKGSYLKDKFHRLKARRGALRAALAIAHKILVSAYHMLAKNLPYRELGEAYLDQIGHTRTVANLKRRLARLGYRVTLEPTVQAT

SEQ ID NO: 383846 - protein, 410 aa, unidentified
MKYYTSTTEYNCGIDLHAHQMYVCVMDRQGKKLVHTNVKDNDFNFFLKLVEPYKHDLTVCCECMFGWYWLADACQEAGLTFVLAHALYVKAIHGGKNKNDRIDSEKLTHLLRSNLIPPAYVYPADKRPLRALLRQRIFFVWRRTDLLARVYSHQLAHNRLTPRQNTRHNRTPWETTILASEDHPLRQIALRNDIAMVKHFDHQIHQLEEEPQRQTKKVASREYELLQTVPGIGETLALTILYEIGDINRFPTVKDFVSYCRLVKGTVASAGKIKGLRGAKLGNPYLRWAFGEAAVIAKRNHYVIAPLAQRLEAQMNGNKFKSNTVVAIKMARAVYFMLKNKTVFDPERLIASMQKCFRPGRRQPGGLTGRAKEAMPLRATAHASCASSTSLCVGQASSPADLAGTCDQAH

SEQ ID NO: 383847 - protein, 408 aa, unidentified
MQVLYTRCAGLDVHKDTIVACVRCVSPPMHQEVRSFGTTTVELLKLTDWLAEHDCTHVAMEATGVYWKPVWHVLEAEFELVLANAAHIRNVPGRKTDVNDAMWIADLLAHGLIRSSFVPPQAIQQLRDLTRTRKQLVREVSQHALRIQKVLEDANLKLGSVLSDVLGKSGRAMLDAIVAGETDPARLAALAQGTARKKTAELREALRGRITEHHRTMLRLHLQVIDALQRTLGELDAAVGKALAPIQQRARLLTTMPGVSDLTASVVVAEIGVDMSRFPSAGHLVSWAGLCPRSDESAGKRRSTRVRKSGTWIKTTLVTAAWAAVRVKTSYLRAQFLRIKARRGAKKAILAVAASMLTAAFHMLRDGTEYNDLGSEHFDRQDKSKTIRRLLKRLQDLGCNVPEMVHTA

SEQ ID NO: 383848 - protein, 407 aa, unidentified
MFCGIDWAEAHHDIAIVDPEGRLVARRQIRDDAAGFAELVELLAAHGDRPEDPIPVAIETSRGLLVACLRATGRPVYAINPLAVARYRERHSVAPKKSDRGDALVLANILRTDLAAHRPLPADSELVRAIAVLARAQQDAVWDRTLAHNRLRSLLREFYPAILAAVAAKRGGLLRPEARAILAAAPTPTAAARLTLAQLRSLLARAGRRRGVDGEACRLRAVFRASYLHQPPLVEEAMGRQALALLGQLEAACTSAEELAAATIAQFATHPDAELITSHPGLGPLTGARVLAEVGDDRSRFADARAVKAYAGAAPVTWASGKSHRVSHRRVKNQRLAAAGYLWAFSALTASPGAHAHYERRRAAGDGHVAAQRNLFNRLLGCLYHCLQTRTPYSEQAAFPTQTATAA

SEQ ID NO: 383849 - protein, 343 aa, unidentified
MKLTRIGVDVAKQVFQVHGVDRNETAIWRRRLPRERWLQAVSDAAEPGCEIGIEACGGAHHWARQLQARGYRVKLIAPQFVKPYVKSNKNDANDAEAICEAMSRPSMRFVAVKTVQQQDIQAVHRVRSGLVEQRTAKGNQIRGLVAEFGLVAPKELSSLRRAIPCWLEDADNGLSGCFRQLLEGLWRDLRTADDRINELDRTIADLARADPDAQRLQQLRGVGPMVATALIAAVGDAKQFANGRQMAASLGLTPRQHSSGGKDRLLGISKRGDAYVRGLLIHGARSALRTAPSKDDRLSQWATRLAQRAHPNVACVALANKTARLAWALLRHGTDYQPALAAA

SEQ ID NO: 383850 - protein, 323 aa, unidentified
MTRMICGVDIASSSLAARIGRDGIAATFANTTDGIAQLAAFCHSHEVELVAMEATGGYEQRSFAQLSEHGLPVAVLNPRAVRQFAQSMGALEKTDAIDAGMIAWYAETKHSQPLCLAPATQLELRARVTRLRQLTEVRTAQSNQQRLVTNAAVRKGFSAMLKFLDEQIEELEEAIAALVDADPLWHQLNRVFRTIKGVASRTVSRLMAEMPEIGTLSNKTISKLAGLAPLANDSGKRQGRRAVRGGRAAIREILFIVGSVVARYEPDFIAFQQRLRAAGKPPKVVRIAVAHKLLVRLNAKAREVRTGNALTKGTPACLQFGKG

SEQ ID NO: 383851 - protein, 343 aa, unidentified
MRHYAGLDVSVKETSVCIVDESGKVCRETKVPSHPEDLARALHDRAWCLERVGLEAGPLSQWLFSGLAATGLPVVCIETRHTKAFLQAQVNKSDRNDARGIAQMMRVNLFRPVHVKTLTSQKRRALLTARKLLQEKALAVDNDIRGLLRNFGLKVGPIGASRFETRTRELVDGMPELAEIIDPLLEARRKLRELFAVLHRKLLVIVRDDTVCRRLMTVPGVGPVVSMAFTATIDVPARFKSSKAVGAALGLTPILNQSGESKRLGRVSLCGDGMTRTLLYEAAQVMLTRTTKWSWLKAWAMKVAARRGIQKAIVALARRLAVILHRIWVSGTDFRWTREAQSP

SEQ ID NO: 383852 - protein, 430 aa, unidentified
MDYNTQNKKIEAITEKTLVIGIDVGSETHYARAFDHRGIEYSKKTFKFSNDEAGFAIFKEWIQEHQKAHDKDKVIPGMEPTGHYWFNLGKFLQDNEMKPVLVNPHHVKKSKELDDNIQTKNDRKDPKVIAGLVREGRYMIPYLPDGVYADLRTASNMRFQIQSELTRILNRINRWFSIYFPEYKTVYGKMDAVSGVMILKKAPLPEDILALGVEGINKIWRDAKMRAAGKKRAQTLADAAEHSIGSKEGAVSARMEIRMLLEDYESRNARLQEVMELIEELVKKIPMAEKLMAIKGVGIKTVSGFLAEVGDISRFNNPKELQKLAGLAIIENSSGKHKGETTISRRGRKRLRYLLFEVAMSLVAKNPEFAEMHCYYTTRKVNPLKKMQSLMAIAAKLMRVFYTILTKGVDYDPKKMVGDIKRPEAYQQAA

SEQ ID NO: 383853 - protein, 350 aa, unidentified
MIIIGCDYHPGFQQIAFVDTETGDYGEQRLAHSEGAEKFYRDLAAQGKKVRVGMEASGHARWFERLMAELNFELWIGDATEIARKRERKQKTDRQDAQHILQLLMENRFPKIWVPSGEKRDLRQLLWHRHRMVQARTRIMNQLQAVALNEGLRCKKKLWREKGRQQLEAFRLAPWASRRRKDLLQLLDRLNPTISDLTQAIEQEVEKCPEARRLRTHPGVGALTALAFVLIIGRTERFQCGKQIAAYLGLVPLEDSSGNRRRLGHITKQGSSILRFLLVEAAQVTARSIPEWRNKYVHLTMRRGRKIAKVAMARRLAIALYWMWRKGWDYEQLRKFGSHAGQPGHRDGVK

SEQ ID NO: 383854 - protein, 345 aa, unidentified
MMVIGIDAHKRSHTAVTVDEMGRQGFVKTVGTTTQDHLRLLKWAVGLAGERLWAIEDCRHLTRRLERDLIAAGESVVRVSPKLMAHVRDSARSYGKSDPIDALAVARAALREPNLPTARLDGVEREIRLLVDHREDLVAERTRIIARLRWHLHELDPGWTAPTKLERHRAFDKVQAHLSDLNDGAMVRRLALRLVEHLRLLTHEIDELAAEITVRVTTIAPSLLAIVGCGALSAAKIIGETAHAGRFRSKDAFARHNGTAPLPVWSSNKQRHRLSRTGNRQLNAALHRIALTQARSYPPARDLLDRRKSNGDGGMEALRILKRRLSDVVYRAMLADQTGQPPVAA

SEQ ID NO: 383855 - protein, 402 aa, unidentified
MYFVGIDWSDLNHDVAVLNEKGQELTYFTVPHKKEGMERLKQKLLSIDPNPENFACLVETKNGLLVQFLLEAGFPVYPLNPKVVDYRRKPSGAKSDPIDARLLANIGRSDLAQLKRLKPDTELIAELKMLTRDQNNLIQESTRLTNKLIACLKEYYPVALEFFSKPTLPIALEFYKRYPTPELIKEATVPEIAAFLKSHKHPRPNQTAISIWQKAQEPQLRASAPTVRAKSRLMLALVRQLEVVQEQISAYDEEIDRLFQQHSDSSIFASLPRAAGRLAPRLLAEWGDDRERYVNAAVVQALAGTSPVIFQSGKYHFARQRKSCVKPFRQAMHLFAFQSIRAVSWAREYYDAKRSQGKTHHEALRALANIWVRIIFAMWKNRTCYDEAKFIAARARHLNRAA

SEQ ID NO: 383856 - protein, 448 aa, unidentified
MPLDCCQESTRVCVLAEVPPDRRCEVMVASRAERGRDAMEVLFDRVAGLDVGKETLTVCVRTPGPRGGRRSQTRTFKTTTGSLRVMRDWLVEAGVSIAAMESTSTYWKPPFYCLEEVMEVWLLNAAHMKAVPGRKSDVRDAEWITQLLEHGLLAPSFVPPPKIRRLRMLTRYRMQLMGDRRREIVRLELMLEDASIKLSSVASSLKTVSARAILTAMINGETDPLRLADMAKGRMRRKIPDLAQALTGTFDAHHAQLARSMLRRLELVESALAELDAVIAAACQPWQHQIDLLQTIPGVGPKVAQVIVAETGADMTRFPSAAHLAAWAGLAPAMHESAGKQTPAGKRHGNKWLTAMLVEAAGSVGRMHGKNYLAAQHARLLKRRGMGRTQVAVAHSMLVSAYWMLKRDEPYHDLGADWHRRRNDEAHTRRLVAQLEHLGHTVTINPAA

SEQ ID NO: 383857 - protein, 362 aa, unidentified
MNTLARVTSAAQIEVAGGVDTHQDTHTAAVVDHAGRMLGHRTFPTTEAGYRQLLAWLGGFGTLRVVGVEGTGAYGAGLARYLMAQGQVIVEVDRPDRKTRRAAGKSDPIDAESAARAALNRVRTGLPKQRDGMVEALRNLRVARRSAVSQRADCMRQIKTLIITAPQELRERLRDLSNTQLLRLCTGFRPNLCLVGEPEQAAKVALRALGHRHAALSEEIAELEALIAPLVEQINPALLALNGVGPDSAGQLLITAGQNTERLHSEGAFAMLCGVAPIPASSGKTNRHRLNRGGDRQANAALYRVVLSRMRWDPRTREYVARRTTEGLSKKEIIRCLKRLIAREIYYVLRQPAATLVSAHAR

SEQ ID NO: 383858 - protein, 352 aa, unidentified
MTSVKYIGMDVHKEAISIALMNGAGKLLMESIIETKAGTILQFFAGLRGDLRVTFEEGTWAAWLYDLLKAHVTEIVVCNPRKNALLKDGSKSDRIDARKLADLLRGNYLKPVYHGEHGLRMLKELSRTYLAISKDLVRVMNRLKALYRGWGIACSGRSVYAASYREAWLKKPGVRLRAEYFYQQLDTLLRLRREVRRNLLIESRKHSATKMLSQIPTIGPIRSAHLVALIQTPHRFRTKRQLWAYSGLAVETHDSAQFRYVDGQLFRSRKPQQLRGLNEDHNHDLKNIFKGAAQKATVGAGPFREFYERLLAKGIKPSMARLTVARKIAAITLAVWKKGVRFDPEQLKLQAA

SEQ ID NO: 383859 - protein, 334 aa, unidentified
MKGNSTTKFIGLDVHSKTISVAIADEGREGEVRHYGTIENTFEAIDKVIKKLTVSGTELKFIYEAGPCGFALYRYLTGNGFKCIITAPGLIPKRSGVRIKNDRRDALTLARLYRAGELTGIYVPEPEDEAVRDLTRARDDARVAERKAKQRLNSFLLRNNLIYPGKTKWNRTYFDWLGLVGMKYPAQKIALQEYIESVHECTGRVKRLSEQIRLAVEEWRMAPMVKALQALRGVSLICATVTVAELGDLSRFNKPKELMAYLGLVPSEHSSGESIRRGGITKTGNSHARRVLVEGAWTYKHHARVTRPLIKRQRDLPKNICQISWKAQLRLCAR

SEQ ID NO: 383860 - protein, 393 aa, unidentified
MICVGIDVAKDKHDCVILNSEGKILAGVFTIPNNADGFDTLLQKIRSCTSSDDKIKVGLEATGHYSYNILGFLINQGLPTYVINPLHTNLYRKSMSLRKTKTDRVDAKTIATMLMSNVDLKSYTDTAYHNEELKSLTRYRFDKVRERAQLKQSVSRLVTILFPELEKLVPTLHMSSIYALLIEFPGVKQITEAHLTHLKSLLKDASKGRYGRDMATEIRDAAKHSIGSVMPAKSLELRHTIRLIRELDSEIEDIEAAIEAIMEELQSPITTIPGMGFRMGAMILAEIGDFARFDSPDKILAYAGMSPSTYQSGQLSLAGTYSHMEKRGSRYLRYALYNATKYVCHWDPGFAAYLAKKRAEGKHYNVALSHAAKKLVRLIYAMEKSRQPYKRAA

SEQ ID NO: 383861 - protein, 314 aa, unidentified
MTKQAVVVGIDIAKGWFDVAVLETGETFRLGNDKAGWAELIKRLRRFSVKAIGLEPSGGYERGLGQTLHKAGLMVRNVNPHKLRNYARACSVLAKTDGIDALMIARYTAQLPTQPLRVDPLTRQLADLVLARRQLSDEKVRLGNQLELLADGIVRRMFLARLKRIKLDMLVIDKHLTELVASDPELARKDKLIQSLCGAGPVLSHTLLALAPELGSANRRQIAALAGLAPYAFDSGVFRGRRAIWGGRSEVRRVLYMAALTASRANPTLRLFAQRLTAAGKAAKVVLIAVARKILTILGAMLRTNQPWTQPIAG

SEQ ID NO: 383862 - protein, 429 aa, unidentified
MNYNTQNAKIASITEKTLIVGIDVGSETHYARAFNWRNYEYSKKPFAFSNDEAGFASFKAWMNDMAEKHGMETIIPGMEPTGHYWLNLGAYLQEQGMKPVHVNPHHVKKSKELDDNNPSKNDRKDPKTIAGLVNEGRFSYPYIPTGIYAEIRNLSNLRIQTQEEITRIKNRIARWFSIYFPEIKDVYRNPDAVSGLMVIKQAPLPCDIKELGVNGVNKIWRDARLKGAGIKRATILVTAAEHSIGNTEAPRSARKEIRNLLNDYETYKNRMDELMQEIKETLSEIPYIDKLMEINGIGIKTVSCFIAEVGDIGRFDNPKQVQKLAGYAIVADSSGKHNGESRISHRGRKRLRYALYEAAISVIGKNKEFKEIHSYYRTREKNPLKKMQSVIAVACKLIRIFYTILTKGVDYDSQKMLNDIVRPEIQLAA

SEQ ID NO: 383863 - protein, 405 aa, unidentified
MEIFCGIDWSEAAHDVAVVDETGRLLARRRIADDAAGFTALTELLAGYAGRPERVDVAIETGRGLLVAALRAAGHRVFAINPKAVDRYRDRHGVAGAKSDPGDARVLADILRTDRDRHRPLPADSDLAAAVGVLARAHQDAVWARVQDANRLRSLLREFFPAALTAFADLTTNTALAVLAAAPTPTAAARLSRANLTDLLRVAGRGTRPTEAARLAEIFTVDQLRQPPVVEAAMGQAVRAIVRTPTAANQSISDLEAALAAAFDQHPDGEILRSLPGLGPILAARVLSEFGDDPTRFPDPASRRAYAGTAPITRASGRSRVVLARHVRNKRLADACYLWAFAALNRSPGARAYYDTRRAAGDRHNAALRRLASKLLGQLHHCLTTSRPYDEALAWPQPDTTPAAA

SEQ ID NO: 383864 - protein, 454 aa, unidentified
MAQCAPSSSMPVIHPNAAGIDIGSQFHVVAVPPDRIAKSVRTFKSFTGELHAMAKWLKKCRVDTIAMESTSVYWIPAFEILESYGFEVFLVNAREAKTVPGRKTDINDAQWLQKLHQFGLLRASFQPSKEVAELRAYVRQREKLLEYRAAHIQHLQKSMMQMNIQLHHVVTDVTGKTGIDIIRAIVRGEHNPDELVKLRDAHCKNSVEVMKEALTGSYKSEHLFSLTQALELIDIYTEKIEACDQVIESALKRLQQEDDSTPPALPKPRSKSASKNTPGFDVRQALFSFTGMDLTQIHGIGSAVALKLVAECGTDMTKWPTSKHFTSWLCLSPCNKISGGKILSSRTRRSSSKVAMILRLAAVVVGKTDTALGATYRRLSARIGKAKAVTAIARKLATLFYNALRYGMDYVDQGANYYEEQYRKKVVSNLKRRAESLGFTLLENTQTLSAAGVS

SEQ ID NO: 383865 - protein, 356 aa, unidentified
MCVLKHQKEKRSMEYYAGLDVSVKETSVCIVDEAGKIVREIKVASEPETLVGELTNKIYVFKRIGLEAGPLSQWLYSALAEAGLAVICVETRHMKAVLKAQVNKTDRNDARGIAQMMRVGLYRPVHVKTLSSQKRRMLLTSRKLLQSKAIDIENDMRGTLRNFGLKVGVVGKVKFETRIRELVEGHPDLAVIAESMLRVRAVLRQQLDVLHRQLLKVARSDEVCRRLMTIPGVGPVVALTFRATIDIPGRFKNSKKVGALFGLTPSQHQSGESNWTGRISKCGDEMMRVMLYKAAQTMLTRSSKWSWLKAWAMQIAKRRGMKRAIVALARRLAVVMHRMWVDGTEFRWTREIALPA

SEQ ID NO: 383866 - protein, 392 aa, unidentified
MYIVGIDIGKNHHEASIVSPEGKQIGHSLRFATTHKGADSIMSFIFNNIGNSSCIFGMEATGHYWYPIYSFLKARGYTIYVINPIQSDSLRKMYIRQTKNDSIDSFLIAEVIRFGQFTTTSMADENILAMRQLCRYRDSVISSRTEIKLRISTIMEQIFPEYEKQFSSLWLSTSMGILEKYLTPENIENAPIDELFEIIKDKSHNKLTMKKAISIREAAADTFGIKIAQDAFSFQLKQLIDRMNFLDKQIEALDCQILEYYEKFDCYLHTIPGIGMIAAATILAEIGDINRFKSSSALVAFAGIDPTVRQSGEFSNTHNHMSKRGSPYLRHAIFLAATTCSFHNSPLNAYYKKKREQGKHHLTATGAVARKLTTVIYAVLRDGKPYEPKSFC

SEQ ID NO: 383867 - protein, 429 aa, unidentified
MEQIPQPIVKAEPEPEFAALVAIDWADQKHYWSLRVAGQEGLQRGTLDNTPEAVEVWIMALHVRFGGRPLAVALEQRRGALAVMLSKYAHVHLYPVHPTTLAKFREAWYPSRSKSDPSDADLLLEILTTHRSRLRRLDPDTVEMRFLQSLVENRRKLVDERTALSNRLTDLLKLYFPQILGWFNDVASPVVGDLLQQWPSLQDLQQVQPAKLEKFLRDHHCSEIPERLTQIRQAIAATHDRALLDSAPYLVAAWVRQMAVLRESIRQLEKRIAELAAQQEDWPIFQSLPGAGAALAPRLMVALGTQRDRYSSAGDLQSFSGIAPVKEASGNTQWVHFRWACPKFLRQTFHEWAACSIAQCEWAKAYYEQQKTRGKQHHVAVRALAFKWMRILYRCWKDRQPYREEIYLASLTKRRTALVAALAQAVKMP

SEQ ID NO: 383868 - protein, 424 aa, unidentified
MKVTYQTCCGVDVHKSFLVATIIKTTAGIEPSYQKKRFSTFNNSILDFKSWLLENECHDVCMESTGKYWVPVFNLLEDQINVTIANPKWVKAVKGNKDDTKDSKWIGDLFRLGLVKSSYIPCRLIRILREYTRYRYKLVSCRSSEKNRYQNALTVCNVALDSVVSDIFGKSSSSIIDYLLEQSGTTINHEEIASKLLKSLKSKEDAVIESIEGYQMTDAQKYRMRLIRAHMDYITAEINDIDKQIESLISSDPDYDKAIRLLTTIPGVKRDSAITIISEIGIDMSQFCNSKRLCCWAGLTPGNNESAGKKKSVRITRAGVYLKPALVQCAHAAVKSDKSPYYKTKYESLVKRRGKKRAVIAIARMILIAIYRMLSTGEVWNPSDLYKIDMPAPLAEKQKAKAIKQAKKLLQKEGLLPPDEPLAS

SEQ ID NO: 383869 - protein, 404 aa, unidentified
MELTAIYRCVAALDVHQSKLTVCILYENESGEIITELKEFGGFKRDRRAMADWVASFQPELVVMESTGIYWKSPYAALEKQGLTIWVVNARHVKQVPGRKTDFADAQWLAILARNGLLRGGFVPPAVFRELRLIARQMQKLTGILSGEKNRLHKILSDGGIRLGVVVSDIHGKSAKAMIKGLLAGESPEQVLKYASNRLKASEEELLDALAGDLSPSHHFVLTELMAHIDELEARIETFLQALLQGLAPYQAILRSLQTIPGLDETGAALLLVEIGDDMSAFGTPERLASWAGVCPGNNESAGKKKTGKTRKGNPYVRRILCEAANAASRTQCRLQDMFKGLLIRRGRKRAIFALAHKLLKIVFLLIERGDYYRDATVDYEKLSVQRNAPRWIKTLKKYGYIAA

SEQ ID NO: 383870 - protein, 355 aa, unidentified
MNVYTRQHPYYCGIDLHARTMFICVLDADGKIVFHKNRPCNPESFLEAVAPFREGLVVGVECIFCWYWLADLCEQEGIDFILGHALYMRAIHGVKTKNDKLDSLKIARLMRGGNFPLAYVYPPQMRPTRDLMRRGNLFVRKRAELLSHIQNTTSQYNLEPLGTISRPHHRRGKAMDTYFPDPALQLMIDTDLKLIDHYDPIIKDLDRQILALAKQHNSGSLHLLRSIHGVGQVLALTMLYEIHDINRFPSKQDFCSYARLVKGQKSSNGKTYTGSGSRIGNAHLRWAFSEAAVTFIRKNKQANRYYNRLITRHGKSKALTILAKRLGIAVYYMLKRKKPFNTEQFLSHMMNKATI

SEQ ID NO: 383871 - protein, 348 aa, unidentified
MAVTMLETRPVTGGVDTHLDIHVAAALDANGGLLGVESFATTPEGFTTLYRWLASFGPVARVGVEGTGAYGAGLARHLRRAGIEVIEVDRPNRLLRRVAGKSDTVDAVEAARAVLSGRARGVAKTADGNVEAMRALLIAKRSGREARITCLNQLRHLGFCAPDELRERFRGVPRTQLADVAAALRPRLDSDPVTYATKLAMRALARRVLSAVQDTDHIDTVLAHLVTATAPGLLELYGVGIDTAAILLVAAGDNADRLHSEAAWAHLCGVAPLPATSGKVTQRHRLNRGGNRQANHALWRIVFTRMSSESRTRAYVTRRLDEGLSKPEIMRVLKRYVARETYRHLRPT

SEQ ID NO: 383872 - protein, 403 aa, unidentified
MSSSVALAPAAAVVAVDVGKTTAAVLVTDAARRRLLGPLEFPMTAAGLGRVISQAQAMVAGTPLIRVGVEAAGHYHRPLAAPSVWPGWEVVELNPAHVSEQRRVMGRRRVKTDAVDLEAMTELLLAGRGLVVTEPPKLIGELTAWAAHRHRRVATRAATKNQLLGQLDRCFPGLTLAVPDVLRTKVGRLVAEHFADPRRLAGLGASRFIRFAAVRGLQVRRPVADRLVAAAHDALPSADAAVARQVLAADLALLASLDEQVQAAETRMAELVPASPFAPLLSVPGWGVVRAGNYGAAVGDPARWPGHRQLYRASGLSPAQYESAGRRRDGAISREGSVQLRRALIDLGIGLWLSEPAAKRYGQALRARGKNGGVIACAMAHRANKIAYAMVRDQTGYQPLRWA

SEQ ID NO: 383873 - protein, 352 aa, unidentified
MTLVGCDLHSRKQQVAVLDTDTGEVLEQELLHEGDAVERFYRALPRPVTVGIEATGYTLWFHALMQKLEHTLLVGEAAKIRAMVVRKTKTDRRDAQHLLDLLKHDRFPTVWMPDPTTRDLRALIAHRVRLIRMRTMIKNGLHAIALNQRLALGPSLWTKRGLAQLQALALLPHTAHRREDSLELLTWLTTRIDQLDAQIAAAAAADAQAQRLLTHPGVGPLTALITVLVLGPAARFPTSKHVVSYVGLAPAVSASADKYHLGKITKQGNALLRWILGQAAPLAARADDELKRGYFAVLHRRGRPKAKVALARKLLVRLYIMLRDQIDYDEFRRRGRARRAPTERPPVAAPAM

SEQ ID NO: 383874 - protein, 353 aa, unidentified
MNTYYVGIDLHRDFFVAVAQDERGTEVLKKRYENSIVSVEELVNEFETPPMVVVEATRNWMWFIQALQKRGCSVQLAHPFRTKAIAFARIKTDSIDAKTLCDLLRADLIPQAYIAPVETLDNREIGRARISLVHDQTMLKNRIHAIVIKENLKYAGTDMFGIKGKIWLAQQEFTTGARDVITIYLSQLERIQESIIKIEELIKQRSSSIPEVKQLQTIPGFGTTTAFLLAAEVGDVNRFTSAKKFASYFGMVPRLSQSGNHAYYGRITKLGNPYVRWLLVQAAHRYYRMDTEAKRFVDRLSFRTGKKKAIVALARKMSVIVYSVLKENRSYEKRTKQAMKVCPVIIPENQSLG

SEQ ID NO: 383875 - protein, 311 aa, unidentified
METFVGIDISKTHVDVAIRPGDQDLHVERTPAALSELAKRLLELSPALVVMEATGGLEVEVASILAASNLPVVVVNPRQVRDFAKAIGRLAKTDRIDARVLAHFAEAVRPEPRALQGAEADELQALVARRLQLTEMLVAEENRLRNCRVDRIRTSLKLHIEGLKKELSAISRDLKDFLQKNEVWKTKDQLLQSFKGVGPNTSAMLLVDLPELGKLNRKQIAALVGVAPFNCDSGAFKGKRRIWGGRARVRRALYMAALVASRRNPEIASFYNRLVGAGKPAKVALTACMRKLLTILNAMLRTLQPWNAQLA

SEQ ID NO: 383876 - protein, 351 aa, unidentified
MSRSSFSAVIATLGIDLGKNSFHLVGQDERGAIVLRIKLSRSQLTQRLANIPPCLIGMEACAGAHHIGRQLQALGHDVRLIPAQYVKPFLKGHKNDYRDAEAIAEAVQRPTMSFVAIKTPEQMDLLALHRVRSRLVSQRTGVTNQIRGFLLERGITVRQGLAPLRQALPGILGSSADALSPRLVRLIADLIEDWRQLDERIAAVSAEIEALAAQDDHCQRLMSVPGVGPIISSAVVAAIGTGAGFKQGRDFGAWLGLVPKQESTGDRTILGKISKRGNKYLRTLFVQAAHIVLVRRPHGARLGLWPWIEAAGRRLHRNMLVIALANKLARIAWAVLARGHAYQPRSASHAM

SEQ ID NO: 383877 - protein, 418 aa, unidentified
MKKHNNSPKKSEPTSRRTKARGPVQRDTKEVLAELVGKLKEKLDRKKVAATSAEEEHQRDELGPNLDRLTVGVDLGDQWSHYCILGLQGETLAEGQLRTTAQEVGEFFQGLNAARVVLEVGTHSAWIRDVLCSCGHEVLVANPRLMEGSKRRKRKNDRIDANKLARLGRVDPQSLHPIEHRSKEVRQDLVMLRARDALVAARTELINATRGLVKSMGTRLPKCSSPSFAQKAEETVPVEIGDALLPLVRMTAALSDCIQEYDEKIEKLASEKYGHTALLRQVKGVGPITSLAYVLTLENPRRFGKSRDVGPYLGLVPRQEDSGESQPQLGISKAGDRMVRRLLVGSAHYILGPFGPDTDLRRYGLRLCERGGKNAKKRAAVAVARKLAVLLHRLWVSGEMYEPLRQGRSATTAHAVAA

SEQ ID NO: 383878 - protein, 526 aa, unidentified
MPYHVRSSHRVLRKSNQPKRQSLQKPNGVISPRVRKVGGERFAIVCVDPAKHRSEWMMADYFGNLLIQPRTLEHQGRFFKSAVELIRQAQELHNIEDMIVVVERTGNYHLPPKRAFASAGFETRVVHPFATKQFRMPADPGNKTDETDLYAQHRAAVAGFGLCEYELESPYRELQLRARHRRNLVERAAAIACQIREHLHLAMPGYAKLFDRLFESPTALAIAHHCDSPARLLQLGQAGVSKHLRKNKIRHQVRSIVKVLTWAAQVADDNIQDGPMHHAIWTDLHELYQHFQRKISILEQELAGDLVQTPYVRLLAIPGINVVSAADLAGEMGPMTRYANSNAITGRAGLYPSRHQSDQTDHDSGPIIRQANRRLRCVLMRIADNLACHCAYYRGQADVDQKRGVDKRASRVKIAKRFSRLALACVAGDQPMRHPCFQQAGSILEKLRQFHRLHETSLEQLLADLETAVEQLPGSTRRREAEMVAGLLAQQTTRQRGTSAIGDVLPAVLARLNLKTTKESENRDRS

SEQ ID NO: 383879 - protein, 378 aa, unidentified
MKCLKKALARRANGMDPAFGLSWVGKPSLAEQEAYMEVIRIGVDLAKYVFHLHGVDDHGKVVLRKTLRRQGVAPFFANLPRCLVGMEASNGAHYWAKTLSELGHDVRLISPQFVTPYVKSNKNDRNDAEAICEAVGRPNMRFVPVKSAEQLSIQAIHRVRSRLVGDRVRLVNQIRGLLGEHGVVIAQAIGNLRRELPRIIDEQANGLTSIIRALIGELREELNDLDKRIGIYDRKIAELYRASEACQRLGKVEGIGPITATALVAAAGDGKSFKNGREFAAWIGLVPRQRSSGGRSRLLGISKRGDRYLRTLLIHGARAALGRIQRKQDPRSLWLLKMRERHHANIVAVALANKNARIVWSLLAHDTAYDQRLTVSSA

SEQ ID NO: 383880 - protein, 465 aa, unidentified
MRQSDDRRPRKPRVSPSVLDRINPHAAGIDCGSAEHYVAVPPDRDATPVQSFSTFTHDLHRLADWLTACGVTSVAMEATGIYWIPVYEILEGRGIEVHLVNARHVKNVPGRKSDVSDCEWLRELHSVGLLRGSFRPTDVIVALRAYLRHRQTLVESTAMYIHRMQKALAQMNLQLTLVVTDITGDTGLRILRDIVAGQHDPTHLAQYRHRRCNASEAEIAAALTGHYRPEHLFVLQQNLELFDACHGQITACDRAIETHLQAVAAAVPIPASPLPAARVKRTPRGHDPRFEIRTPLHHLTGVDLSQIDGIAPYTALRLISEIGTDMGRWQTEKHFTSWLTLAPRNKISGGRLLSSRTQPSANRAAAILRMTAMSLGRTQTALGAFYRRLAVRIGKAQAITATARKIAILVYRTLKGDFVYRDPGANGYDAQQRKRTLRSIRQRAEALGFALVNRQTGELLETVVS

SEQ ID NO: 383881 - protein, 314 aa, unidentified
MTEGYVYVGIDVSKAWLDVAVEPAGQNWRTENDPRGINQLVGRLGGLAAKIIVVEATGGYEANLVEHLCEAQLPVARVNPGRVRRFAQGLNWLAKTDRIDARLLAHFGEKANPRLTKLPSEHERRLAALVKRRKQVLEMLVGEHNRLENADGEVSPYIQDMMTMLQKQLDELERAIGSLIEDTPDLKGKHDVLLTVPGIGQVTASTLTSQLPELGSCDRKEIAALVGLAPFSQDSGKKRGRRAIKGGRPAIRSVLYMATLSSIRFNPVIKKFYDRLRGYGKETKVAIVACMRKLLTILIAMIRHNQPWRPDFSS

SEQ ID NO: 383882 - protein, 368 aa, unidentified
MKHVTTYVGIDAHKKDLFIAMLIGQQKTPVTWQLANEPNAVRRLVRKLEREAPGPVSVFYEAGPCGYALQRQVTTSRVSCDVIAPALIPRKPGERVKTNRRDARKLVELGRAGLLTVVQPPTPEDEAVRDLARARDDAREDLQRCRHRLGKLLLRRGLHYAGRNWTRAHRQWIDSLAWTHAAERVVVEDYLLAIDHTEARLLELDARLAEIAEREPYREPVGWLRCFRGIDTLTAMLILAELHDFRRFASAPALMAYLGLVPGEDSSGEKHRRGRITRTGNALVRRVLVETAWHYQHRPSVGVALTRRRKGQPGRVIAIADKAQQRLCRRFRKLAAEHKPGPKIAVAIARELAGFLWAALQPAPVAVK

SEQ ID NO: 383883 - protein, 417 aa, unidentified
MEDFAAYVGLDWADQKHDVCLFDTAGGSRELSVLKQTPEAIDEWAAALRGRFPGRRVAVCLEQSRGPLIYALLKYDFLTLYPVNPKTLARFREAFSPSRAKDDPTDAEYLVELLLHHRARLRAWLPDDEKTRELRLLVEHRRRLVSDQTRTSNRLTSLLKGYFPQVLEWFPEVGTALVCDFLLRWPSLGALKGVRRSTLEGFFRRHNSRRRDLLDGRLEAIKRATPLTTDAAVINSSVLLARSLASQMKATLAAVREFDRRIDELCRAHEDFELFASFPGAGPVYASRLLSAVGARRERWQTAEELLRLSGVAPVVECSGQSRWVRWRYFCPKFLRQSFVEYAGESVRHSQWARAYYDEQRAKGKGHQAAVRALAYKWVRIIFRCWQTRTPYDETRYLECLRRKGSKLVPAEAPASA

SEQ ID NO: 383884 - protein, 333 aa, unidentified
MVAGTNGSLDKAGTTKMTQTNTLTAGIDTSKAKLDIAVHGRAECWQVANTPRGWRRLVAALVQIGVERVGIEATGGYECGVVAQLRAAGIMVLLLQPVQVRSYARVHLRRAKNDRLDAMLIAACAAGLDPPSIEPDARLAKLAGYLTFLEQIEEDIARSKVRLEHIKEIRLRRIVLADIARLRKRRRVELARIVAALRSHDDLACRLDLVGSVPGIGERTAVAIVVRMPEIGRISREQAAALAGLAPFDRDSGVHKGQRRIEGGRARLRRSLFAAALPAAFRWNKALIALYARLIARGKAHNAALVACARKLLVYANTVVQRGTPWTERPATT

SEQ ID NO: 383885 - protein, 329 aa, unidentified
MIGLDTAKSVFQVHAVDEAGKVAIRRKLRRSELIAFFEKQEACTVVMEACGAAHHWARVLTGLGHDLKLIAPEAVRPFVKKGKKNDAADAAAICEAASRPDVTFVPIKSLEQQGILALHSARSLLVKQQTMLANAIRGLAAEFGLIAPQGIRKLGELMALVEADEAFPEKARQAVRGLLDQRRWLAESTETFEAEIVAHARHDETARRLATIPGIGPITASLIAATVADIGVFKSARHFAAWLGLVPRQHSTGGKTRLGRITKTGNREIRRLLVLGATSMVRRAGQWNSVAGVWARGLLERRPVRLVTVALANKMARIAWAELVKVPAA

SEQ ID NO: 383886 - protein, 347 aa, unidentified
MVTLGSDSHKRTHTFVAVDENGKQLDYQTLPATTPGHLEALRWASQWPDRRWALENCRHLSRRLESDLLHAGEAVVLVQARLMATVRVTGRQLGKSDPIDALAVARAALSEPNLPVARLEGKRREVKLLLDHREDLVGERTRICCRLHWNLHEIEPGMELSDSALIRWCVMDRVERVARQHSCLLAEIVLEQLESIRRLTRRIKALELQLRALMHQLTPNLLELQGCGTLCAAKIFAESADIRRFETRAAFALNNGTAPIPVWSGNNVRHRLNRGGNRQLNAAIYRIAIIQARDEGLGRLYMAKRLALGNTRREALRSLKRRLSDEVFRRLWLDLPLALNLRFWATA

SEQ ID NO: 383887 - protein, 323 aa, unidentified
MTVYIGIDIASKKFDAAELRDGAYRCKTFENTPTGFTALYNWLKTDSIPDIHVCLDATGSYGTALATFLYEKNLKVSVVNPARIKGFAASELTRTKTDKADSRLIARFCKAAQPDPWRPVPAPVRKLQVLVRRIGALNGMLRMECNRRENADIDAQESVERMITHLKMELKSVRQAIKEHISNVPELKKQNDLLLSIPGIGAVSASLILSFMASKDFTKAKEVTAFLGLNPRHHQSGTSVRGKTRMSKMGDAKLRCALYMPALVALKHNPDIRAFGLRLLAAGKPRMLVVGAIMQKLIHIIFGVLKSGTGFSSRVTVNAGFNQ

SEQ ID NO: 383888 - protein, 450 aa, unidentified
MARRRKSIQNLPVIESNAAGADVGATQIFVAVPADRDPEPVRCFDTFTVDLEALADWLESCGIRTVAMESTGVYWIPLFQILERHGIEARLVNARHVKNVPGRKSDVADCQWLQYLHAVGLLRGSFRPDQEICALRSLWRHRDSLIQMASVHLQHMQKALDQMNLQIHHVISDIAGTTGLAILDAILAGERDPKKLADLRDWRIRATEETIMKSLVGDYRGEHLFTLRQSLVAYRHYQQLIGEVDEKVKQLLSELPAQVDPAEDPIPKARNPRKTPWRNEPIGLREDLYRAFGVDLTQVPGIDSLTAQRLLTEIGPDLSAFPNVAAFASWLRLCPDKRVSGGKVLSSRTGPTKNRAALALRMAAQSLNRSQTFLGEYFRRMRARLGAPKAITAAAHKLARIIYHLLTSRQPYDESIFIVQEIRFRKRKEARLRAQAHELGFQLVPVQAVP

SEQ ID NO: 383889 - protein, 345 aa, unidentified
MNKISVIGLDLAKNVFQVHGVDSAGEVVVRKQLKRSQVRRFFTNVEPCLVGMEACGGAHYWTRELAGLGHTIRMMAPVFVKPYLKTNKNDRNDAEAICEAVQRPSMRFVQPKTPEQQCVLHLHRARRLLVRQRVALSNHLRGILSEYGIVLPQGTKALSGCLPALLEDAENDLPMLTRDLLAECKEEYDQLMERIERLEGRIKAWHATHSVSQRLASIPGIGVLTASALAATVGEGQDFRNGRQLAAYLGLVPRQASSGGKVRLLGISKRGDGYLRGLLIHGARNVIYHVRRRLMAGQPGGNAWVERLLQRAHPNAVAVALANKMARIAWVLLVRNQTWRPARTL

SEQ ID NO: 383890 - protein, 338 aa, unidentified
MPIYAGLDVSDKATHVCVVDVEGAVLRREVMASDPAILAKWLGRYCPDLVRVVMETGPLSTFLYHSMVARDIPIECICARHAKGVLSARVNKSDVHDAEGLAQMARTGWFKRIHMKASATHFDRAAIRIRAQLITARTAMINQLRGLLKLFGLQLGSARAPGKRAERLSVLYSQRPDLEALFAPLLASIEAVEKQLRNLNSNLEKRAASDPVCARLMTVPGVGPITALTYTMSIEDPRRFARGDDVGAYAGLVPRRSQSGERDTQGHISKAGDPMLRHSLYEAANILLTRLKRPCALQTWGRKMAEAKGPKRAKIAVARKLATLLHSIWLNETEFRWA

SEQ ID NO: 383891 - protein, 433 aa, unidentified
MHEAEDEPLFAERAAGVDIAKAGIEVTVRVPSETRRGGRQQDTRSFRTTRKDLLALADWLRVWGVAKIGMESTGDYWKPVLFLLESEGFDCVLYHAAQVKALPGRPKTDKLDSAWLAKITERGALPGCFVPPEEIRRLRTHTRYRRHLTQARTAEKSRVEKLLEDAHLKLSSVISDIHGVSGRAMLEAIAAGERNPGTLAQLARGTMRGKIARLVEALDCSFVTEEHAAVLTMMLSTIDYYTAQIGELTAKIAVLCQPYEQQIAQLDAVPGTGVITGQDIIAEIGTDMTVFPTAAHLVSWAKWCPQVAQSGGRRKGANASGRGNRYLSAALGEAAVNAGRTQTFPGAKYRRLVRRMPKKKALVATGNSLLAIYYALLSDPAAAYTDLGADYYERRANIRRQARNHVRGLERLGYKVTIEPADPATGATAEPAA

SEQ ID NO: 383892 - protein, 346 aa, unidentified
MEHYAGVDVSLELSSVCVVDAQGKIVKETKVSSEPEALVSFFKGLGFPMKRIGLEAGPLSQWLHAGLTQAGFETVLLETRHVKAALSAMTVKTDRKDARGIAQLLRMGWFRAVHAKSIGSQEVRALLVARKQLLGRLIDVELSIRGILRGFGLKVGPVTRKEFEARIRELVMGQATLERIADAMLSARAALKAEYEKLHKAVLAIVREDAVCRRLMTVPSVGPLVAITYKSAMDDPNRIVKSKAAGALFGLTPKKYQSGEKDVTGGITRTGDEMVRTALYEAANVLLSRIARFSKLKCWGMDVAKRRGSKRAKVALARKLAVILHRMWVDGTTYRWAAAEPIAAQA

SEQ ID NO: 383893 - protein, 315 aa, unidentified
MSTAVFVGIDVSQDCLDVAVAPSGDAWQVTNDEPGLAELVERLKDLAPQLIVLEATGRLELPAVAALAAADLPVVVINPRQSRDFARALGQLAKTDTLDARGLALFAERVRPAVRPLRDAEAQALADLVVRRRQLVEMLVAEKNRLQRASTRVAKDIRRHIAFLEKQVGQLDDELQEAITASPVWLEKQQLLMSTPGVGPTLAATLLAHLPELGELNRRQIAALVGVAPLNRDSGRYRGQRTIWGGRARVRAPLYMAVLVAMRWNPVIQTFYQRLLAAGKKKKVALTACMRKLLTILNAMLKTKTAWHEKTATAS

SEQ ID NO: 383894 - protein, 341 aa, unidentified
MLYAGIDIHKSVFQTVVLDPDSGELNESRFAPSRERLAEWADEWEGKLAAVAIESTTGWRWVARELTQRGFEVRLVDPGRASALRGRRRSPKTDKLDARWLALVLARELLSECEAWMPPAGIQLLRDQTRLRKSLVNSRTGWAQRLHALLAHEGWPCSRGRLLTRQGRRWVTALELDPAVRAQVDVMLTIIEALDEQLGLVEGELRRFARTDARCQALQTIFGVGAIFSCHLLAEIGDATRFKRSRQIIRASGLDPAVIESADSKRRGRLAKQGSPHLRWALVEAASHSSRSSSPDHALYVSTAERCGRGRARLTVARKIARRAYHLLAAVEAASVETQTT

SEQ ID NO: 383895 - protein, 347 aa, unidentified
MRFYTKQHKFYCGIDLHARTMYLCILNRDGEILVHRNMKAAPEPFLKAIAPYREDLVVCVECMFTWYWLADLCAQEGIPFVLGHALYMKAIHGGKAKNDKIDAHKIAVLLRGGMIPQAYVYPAEMRATRDLLRRRMYLTRKRAELLTHVQNTNSQYNLAEIGKKIAYKANRDGVAERFPDPAVQKSIEVDLALLGSYDELLRDLELHLVTAAKQDRANALYLLQTVPGIGKILSLVLLYEIHDIGRFPRVQDFVSYCRLVKCAKESAGKRYGTAGTKIGNAYLKWAFSEAAVLFLRNNAAGQKLLARLEKKHGKGKALTVLAHKLARAVYYMLKRGTAFNLDKFLHN

SEQ ID NO: 383896 - protein, 442 aa, unidentified
MQEIKIHPKMRYTYVGVDSHKNSHTFVFLNFLSEKLGELDTTNTPSDFDPFLKKAQKFLQPNTEFIFGFEDTTHYGRPIVKFLLDKGYTVKHVNANLVNSERNSYNVIQKTDYIDAECAGRVLISRYDDLPIARLDEKYYIMSLLVVKRQSFSKQATRLKRTLHNLLYLQYPDYQRFFSELNGKSAMDFFENYPSPHTLVGTTVETLNDFFYVNNPKAQGLTKRKAKLILESVEKSGVKPSDFQDTIDHVIRFTVRELRVVSQYLDEIESRMAKMLEHFDYPLTSMKGIDTLTACRLITEIGDIRRFKSSNSLAQYAGIAPVPHSSGNNDAMLSNKRGNRQLNSLFFQIAMGMIAPKKQGMVLNPFFYDFYHQKISEGKTKKQALKIIQRRLVNIIYGIMKHGEEYINPPVSYVDVKTGEILEDELNENQLTHMEKRLSTFE

SEQ ID NO: 383897 - protein, 348 aa, unidentified
MIVIGIDSHKRSHTAVAVEGTGRKLAERTVAATSAGHLELVRWAGRFEARTWALEDCRHLSRRLSTDLLVAGERVIRVPPKLMAGARRSSREPGKSDPIDALAVARAALREDLPVATLDGVEREVRLLVDHRDDLVAERTRAQNRLRWHLHELDPGNEPVARGLDRAVVLGALDRDLAEVPGTVARIARELVGRIRDLTVTINDLEREIGRLVADLAPSLLALPGCGALSAAKLIGETAGIGRFRSAAAFARHNGTAPLPVWSGNAERHRLSRTGNRQLNVAIHRIAITQMRIDERGQAYVDHRRTLGNTKTEAIRALRRRISDEVFRRMLHDEAARAALPSGLAAAA

SEQ ID NO: 383898 - protein, 341 aa, unidentified
MSKPNTYIGVDLHKKTCYVTVMNTGGKVRIQREISTDAKKVSRFFKRYADIPVAVESTMNWIPFYENLEGLGCNVVLSNPLQTKAIASARIKNDKVDSRILADLLRTNLLPTAYIQPRKIRDLKELVRERASFVEMRTKIKNKIHSVLFKTNHRHSFSSLYGVAGMKWLENIELRDIYRQELNRYIETLKHLNGQIDKISAIIESTAKLDFDCKLLMTIPGISYYSALMIKSEIGDIARFRNANKLCSYAGLIPSTYASADKIRTGRITKRGSKWLRKTLIDAVTSGSRNHNRIAAFYKKLKKNKGTGKAKVAAARKLCTIIFAMLTDQVPFQNFAPVKQR

SEQ ID NO: 383899 - protein, 399 aa, unidentified
MSSRIVQEIRVGVDVGCHSHNVAIGLPDGHFLEEFEIPHTPDGFREFFSRIGKHEQKYNCNVAVAMEGYNGHARPLDTMVRVRNYQLYNINNLKLARFKEIFPAAAKTDTIDARKALELFQLQDHLESARGVLQEVQAIPVENAILKRLTRRRRSLVNEQVRVINSIQADLRAVCPGLLEITNSADNLWFLNFLTSTDSFKKIARLRCATLLKIPGVGKRYAGIIQNWQTKAHFSHEVDWVGDMIQEDALRVLDLHHKIKSLEKKCMQVAKDSVLAALIVSIPGFGPVCSSTLTGEIGTGIRFSSEASLALYLGMATLDKSSGKHKGSRSPKQVNTRAKAAMMIAVDRHRKYVPESQRYYLKKRAEGKAHNQAIRALGRHLCRVIFKMIKEERTYQIRN

SEQ ID NO: 383900 - protein, 343 aa, unidentified
MQAVTTIGFDIAKSVFQVHGVDMQGRVIIRRQLKRRQVLTFFRKLPPCLVGIEACASSHHWSRELQKLGHTVRLMPPAYVKPYVKRQKNDATDAEAICEAVTRPNMRFVATKTPEQQSCLMLHRTRHLFVRQQTAVINAIRAHLAEFGIVAPVGRHGVEELLKIVADASDQRVPEIARACVAALGAQLRVLKMQILEFDRRIMAWHRSNAVSKRLDAIPGVGPALATALVASVADPKAFRSGRDFSAWIGLVPKQHSSGGKDRLGGISKQGDRYLRSLFTAGALAVIRYAKIHGTRHRPWLTALLARRPTKVVAIALANKIARMAWAMMAKGEQYKEPVALAA

SEQ ID NO: 383901 - protein, 345 aa, unidentified
MTEAYDGRQVVGMDLHRRRSVLVRMTGDGRKLETVRIENSPRALRAVLGRAGKNPRVVVEATYGWYWAVDVLEEAGAEVHLAHPLGVKAFTYRRVKDDERDAADLADLLRMGRLPEAWIAPPEIRELRELTRCRHKLVGLRTSCRDQVHAVLAKLGVPVTHSDIFGVHGQAWLDGLRLPQPYAGKVASLRQLNAELSTEITLLEQVIGDLLAGHEGYCAIRALPGIGPVLGAVIVAEIGDIRRFPGSGQLCSWAGLTPRHRESDTKVSRGHVTKQGSRMLRWAVCEAIQRQPAGTRPRQVKDGIIARRGPQARNIAKTAAARELLTLIFYAMRDGRVRRAASPAA

SEQ ID NO: 383902 - protein, 393 aa, unidentified
MVALQGKLEFAGDPLGGPQRPAASSFVPWCFTHRPVAGTAAGVLVSTRTIAWAIEARIRKEGSTTMNDSILLKADVQGFFGIDVSSLSLDLADFPASFAESFSNDPEGIAHIVEHLRERPVARIVVEATGGYEVSLVVTLHEAGLPVVLVNPRQVRDYARALGILAKTDRIDAGVLARFAHDIQPPLRDFPDENGRKLDALVSRRRQLLEVRTAELNRRHQANLPEIQRSIDSVINLLNRQLAEIDEQLARAIQASDTWRTKDQILQSVKGVGPATSHALLAELPELGRLNRRQIASLVGVAPFNRDSGRLRKPRSIRGGRASVRSALYMAAFNAVRCNHRLRSFYERLRQAGKTFKVAITACMRKLLTTLNAILRDLTPWRDITVANSQNTS

SEQ ID NO: 383903 - protein, 405 aa, unidentified
MDIIIEKGCGLDVHKETVVACIMGTGIKKEVRTYTAMTNDLLRLKGWLQEAGITHVAMESTGVYWKPVFNILEDHFEVILVNARHVKNVPGRKTDVQDSEWLCKLLRSGLLKGSFIPPRGIRELRDLTRYKRKLIQTIVAEKQRVEKVLEDANIKLSSIASDTFGASGKRIMEELIKGQLGAEKMAELSKGRLRRKREDLKEALVGELREHHKFMIKVSLKHIGAMEKILLGIERKIREKIEGDYQEECELLQTIPGVKENASTVIAEIGVDMDIFPNEMHLSSWSGMSPGNNESAGKKKPGSTPYGNKSLKAMLIEFAWVASRTRDTYLRSKYHSLVGRRGKKRALVALGHKILIMCYHILKYKRPYKELGGDYLDKRRKDRITTSYVKRLNHLGYEVILQEAA

SEQ ID NO: 383904 - protein, 343 aa, unidentified
MQSISTIGLDIAKSVFQVHGVDAAGQVVLRRQLKRRHVLAFFQKLPPCLVGIEACASSHHWSRELQALGHTVRLMPPAYVKPYVKRQKNDTTDAEAICEAVARPNMRFVPTKTVEQQSCLMLHRARHLFIRQQTAVINSIRAYLAEFGIVAPVGRRGVEQLLEVAADTDDHRLPETARACLAALGSQLRALKAQILEFDRRIIAWHRSNATSKRLDAIPGVGPALATALVASIADPGAFRSGRDFSAWIGLVPKQNSSGGKDKLGNISKQGDRYLRSLFTAGALAVIRYAKIHGTGHRPWLTGLLARRPTKIAAIALANKLARIAWAMMARGERYKEPVALAA

SEQ ID NO: 383905 - protein, 433 aa, unidentified
MKVMYERVAGIDVHKDMVKVAIRSPGEKPWTRKTEILEFRTFYGVLQEMARELRKRGVTHVVMEASGVYTEPVYYALAEQDFTAVAVINPAHAKALKGHKTDARDCARLAELFECGLLRGSYIPPAELKEVRDLTRYRMKTVQARTSEIQRLGKALESAGIKLGSVASSITGTASTAMIEALIDGERRGGVLADLAIGRMRAAGKLTDLSMALAGRFTEHHALLCRLHLDRIAVFDDAVDGLDKRITGKAARWQREAGLLTSVPGFGNVVAQAWLGEIGPAPHRHFATCDKLASWVTLCPGNNISARKRKHGRTGDAGTYIKPMLVQAAWAAIRVRGRLQARYNRLVRRFGGDKNPGAKKKAITAIAHTLLKIAYQVLKSGTPYQEPGADFYTRRESPEHKQAWLERQLQKLHPGCTITVTISPPEAALPPRG

SEQ ID NO: 383906 - protein, 395 aa, unidentified
MFIVGIDIAKRSHEAIIIAEDGQVVRKAFSFRNNCTGYNLLLEQVRRLTLVKSQIVFAMESTAHYWLALYARLLKDGYAVMVLNPIQSHSLRELYIRKAKTDARDSLIIADLVRFGRCKASNVPQDKILALRELCRSRAYLVDMAADLKRKLIALLDRIFPEYESLFESVFSKASIAVLSKYSTPQKVKNAHLGKLTDILMESSNGHFGEWKAHQLKEAACSSFGIDDSGGVYSTLLGMFLEQILSLTAQADSLEKQISVFFQEFNNPLTSIPGVGTVLAATILSEIGDITRFSSADKLLAYAGLDPSVKQSGEFKSNQNRMSKRGSPYLRRAIWLASTAAVHRDPMFQTYYEKKISEGLHYMNVIGHVSRKMTAVIFAVLRDGQPYQPVLQTAD

SEQ ID NO: 383907 - protein, 412 aa, unidentified
MNPVVGLDVSKGESQVQAFLDKGKPYRKSFSIKHTLDGLDGLLGFLRDIEKVADGKQPSVILESTGQYHMPIIQFLEEQQYVYIIVNPLISHRARSTNLRKVKTDAIDAYHLCELYYKEELEPYKKRGIQLLNLRNLTRQQETVSSTAAQTKLQLQSILDQVFPEYRGVFGNLYSKISLQILSIFPTSKEVLSVNELDLTNKIAELCTTRSEKWAKEKAIKLREAALRNPFQNNLYQSHIFNLRMFINIVLQYQEHLSKLAAEIDALAKEIEEYEIIQSIPGVGEKIAATIISEIGEIERFNHPKKLVAFAGIDPSVYSSGRFTASINRITKRGSSRLRQALFMAVQCGIRDARKQKTSDEIIPRNKKLREFYDKKREEGKPFRVAIIACANKLLHWIYALLKRKMTFQNTD

SEQ ID NO: 383908 - protein, 338 aa, unidentified
MGYKRISIDTSKHVFAIHGVDEAERPTLRLELRRSQIEAFFARLAPTEVALEACGGAHHWGRQLSAMGHQVKLIPPQYVKPFIKRNKNDRHDAEAIGEAASRPSMPTVAVKTVDEQAATMIAKHRELLVGQRTAAINALRGHAAEFGVIAAKGTAKIEALLVVLTSEPGIPAAAKAMFAAMGEHIADLDAKLTAAERQLLEQHKRYPVSQRLAAIPGVGPITAITMALSVNPANFESGRHFAAWLGLTPRERSTGGKQRLGRISKAGNERLRQLLVVGATAVIRVARPGRPSSSAWLLGLLARKPKKLAAVALANKVARIIWAMMARGEAYRHQPITA

SEQ ID NO: 383909 - protein, 393 aa, unidentified
MKPAMSVLGIDIAKRVFHAVGMDERGKIVLRKRLSRHDLIPFLAKLPPVLIGMEACGGAHYWARRFREHSHEVKLMAPQFVKPYVKSNKNDSRDAEAIAEAMTRPTMRFVPTKEVDQQDLQALHRVRERLIGARTALVNEVHGLLHEYGIVIPKGVAKFRQAVVGKLESEQDKLTPLSQEMFWKLIDEFAALEKQLAYYQEKLEALATTHPECQRLMTIPGIGPFTATALVAAVSDASAFKNGRQCAAWLGLVPRQHATGGKERFLGISTRGDSSLHTLLVHGARTTIRWVGRQTDRRSQWMRQLVERRGKNRTAVAVANKNERIVWALLTSHQDSQLTTGEGQLRRASVASVRMEYGKVTKEEMPNLLMAMVLDKSMEESCRTMQGGIELMT

SEQ ID NO: 383910 - protein, 388 aa, unidentified
MQVIADRPEAPSAIRTNLGAIFTSLELSHSTWLITSLSPSSGEKMSKHLVHGGDIAGLLQRFAQLREKAVAQTGRNFPIIVIQEAGLDGFWIDRVLKNEGIESHVVDPASVATSRRRRRAKTDKIDGEALVRTLLAYKRGEPRVCAMVKTPTPEEEDRRRLCRERKVLITERVRHVNRIKGLLFSQGVCGYEPLHRNRRRRLDELRTGDGRRLPKHLKAQISRELDRLELLLEQIKVVESERDALLAAQQIAAPAPAAMLLAIKGIGPEFAAILWSEGFFRHFDNRRQIASYAGLAPTPWKSGSIDREQGVSKAGNPRLRTTLIQLAWLWLRHQPQSALALWFKERVVRNGGRLKKAAIVALARKLLVALWKYVAAGVVIEGAIMKAV

SEQ ID NO: 383911 - protein, 413 aa, unidentified
MYFAGIDIAKKQHEVCVIDSDGNQMLSMPFANSQAGAKRLLTAVHNRVGTELNAIAFCMEATGHYWLSTYCFLRGQGYQVHVINPIQSDAVRDLYIRKSKTDRKDAFILADLLRMNQTQETFLASETVLKLQTLSRTRFAFVDQISELKQRIIGILDRIFPEYEDCFSNIFIKTSRELLKNFSTPDEIANLDLTELAEFLAKHSRGRLGLSRAEQIQRYAKGTFGIGLAVDAFALELKLLMQQIEFIEEQVQALEDAAKMVLAELSAQNAPGSLSGEYHHVIETIPGIGPVLASAIIGEIGDIHRFANAKKLVAYAGIDATTRQSGQFTGTRNRMSKRGSADLRRALWLAASSAYRFNPEFAAYYASKRAEGKHHMVVIGAIARRLVHLIYSVWSQERPFEQNYQWAPPGSTN

SEQ ID NO: 383912 - protein, 331 aa, unidentified
MFPVGIDVSKNTLDLCMLYDGIKGRIKTRNIQNNRHSVENILRWLRLQHCGPEDVHVVMEATGVYHERLATELHDAGFRVSLANPHRSRKFARGMGIMTKTDKVDAYILACYAFLKKPHRWEPPAPEIRYLGALLRRRDVLLGDALREENWLEKYLSTDTPADIISSCRRMAQLLREEVSNIERQIKAHIKACPALRRDYTLLTSIKSVGPQLGMHMLVVLRSHNFASAEQAAAFLGVVPIEKRSGTSVRSRPRMSKIGPPQLRAKLYMSALCGKIYNKRMRNIYDEICLRGKPKMVAIGALMRKLVHWCYGVLKTGTVFNDESLKQVLST

SEQ ID NO: 383913 - protein, 409 aa, unidentified
MSKLYVGIDVSSRNNVAYPMKPDGSKHSNFSVENSPRGSAELVKQIVKALTSYNLTEVTVGLESTGCYGDHLVYFLKENAELAKFNRSIHVLNPKQVKKFKDTYNDLQKNDYIDSFVIADCLRFGRINKEVYMDDARFKALQILTRQRFFAVRSLTVEKQRFLNVIFKKYSSLAQNKVFSNTFGASALALYEEFDSADTLAYMDLHELTDFLVKKSKNRFSDPEAVAKAIQKAARSSYRLPKTVNDSVNQVLSSSICLIRALEQQIKVLDKAIAEQLELIPNTLQSIPGIGPVYSAGIIAEIGDIHRFKNQSALGKYAGLAWTQNQSGDFESKNTKLIRSGNKFLKYYLCEAALSLVRCDTEYSRFYHLKYNEVNKGQHKRALALTARKFVRLVYALLIDNKLYTPSEL

SEQ ID NO: 383914 - protein, 319 aa, unidentified
MLIGIDVAKSELVVAARPSGERWTVANDERGVRALVERLRGEAPELIVLEATGGYELLSVAALVALALPVVVVNPRQVRDFAKATGQLAKTDRIDADILALFAERVRPAVRTLPDADAQELEALLARRRQLLEMLGAERNRLGQVFGRGKQRVKKSLKGHIAFLERELRIADTDLGDMVRRSSAWREKDDLLQSVPGVGRVVSFTLIADLPELGRLSRREIAKLVGVAPLSRDSGTFRGRRFVQGGRASVRAVLYMAALVATKRNAVIRAFYQRLLTAGKPKKLALVACMRKLLAILNTMIRTGQRWSIDQTPAVLIPA

SEQ ID NO: 383915 - protein, 401 aa, unidentified
MKRACELDVHKDTIFCATYDGNKHGPVTEYSTLTSSIRAMGEALRSEGVDGIAMESTGMYWIPVWNILEEIGFDLMLVNPYLIKQMPGRKSDVKDAQWIATLLHKGLLRSSLVPCKEIRELRTYSRKYVKLQQRQTSVLQEMERTMEMCSIRITSFVSNISGKSVLRVIEQIVQGETTPDVLVESIHGRIVNAHTKQNIKESLTGFITEHHRFILELSLQEYELLVSQSNKCLLKMEELCNERYKNEMKLLLTIPGISHISAMIVLAETGADMKAFENSGKFSGWTGLRPRNDESAGKYKSTATTKGNRFLRAVLVQIAWAASRTKGTYFKEKFNRLAMRKSRKKALIAIARKVGVLIWNVLYYEQAYNPEKLIVYDPGKLHAKISYHQKEYDRLQKLVQK

SEQ ID NO: 383916 - protein, 430 aa, unidentified
MNHSDLKTIEFAAYIGLDWADQKHDICLQENHSHRVESLRLDHKPDAINNWAAELRQRFQGRPLAVALEQKRGALLYALMRFEFIVLYPINPKSLASYRDAFTTSGAKDDPSDALLLMEMVRLHRDKFQPWIPDDPLTREISLLVEYRRRLVDDRTRLTNRLIALLKQYFPQALNWAGKLGSLAAVDFLAQWPQLETIQRASSAEVQDFYRQHGFRLGKKIQTRLDEIKAARPLTTDQAVIAASVSMMRALLGPLRGVIAGIDALDQQIAACYEQHPDRQIFDSLPGAGPALAPRLLAAFGADRERYHSAQEMQCFSGIAPVVKRSGKTTFVQRRIACPKFVRQSFHEFAKSSICRSSWARAYYDQQRQRGNKFHEAVRALAYKWIRIIYQCWRQRAPYNEAVYLARLELHGSLLAKLVSSDGCKSQELS

SEQ ID NO: 383917 - protein, 400 aa, unidentified
MISVGIDVSKGKSTVCLLKPYGEIVCKSFEVQHTEKDLEELANLLQKLDGEIKIVMEATGIYHLPILTFLLEEGFFISVINPFMMKRFARDNSLRGAKNDRLDSVMIASYGIEKWHKLKKYEVNDGIYPELRFLGRQYHRFMQTHVKHVQELTHLLDHTAPGLKAMFNSWNEHSNRDKLSDFVERFWHFDLITSLSREEFVEQYLLWAKEKKYHQSRSKAEKIYDLASNGIPTLSSRTPSTQMIIQEAINVLRIVNNSLYRILSRMKELAKSLPEYATVRSMGGVGDALAPQLIAEIGDVRRLHNGHALVALAGIDPPPYESGQFVGTHRKISKRGSPILRKIGFEVMRVLKSHKEPEDNAVYNYILKKEAEGKNKKLAKIAGVNKFLRIYYARVMEVYR

SEQ ID NO: 383918 - protein, 431 aa, unidentified
MNEHELIRIKQFRQFKKMVRGSKQHLIIGLDIAKEKHVAFMGTSQGKALRRRVIITNDKQGFDKLLEETTAVQKQHGFEKRVFGMEPTGNYHKPLAQWLMDQEHMVVLVAGKSVKENRQLLDGRWDKNDTKDSANIADLVSQGKCQFFANPSKVITCLRDLLSLRKRLKRQEHSLRMRIRNSLLSKHFPEMDRYWGSCLRENLAIVRWCLDPRKIAAMPLKEFIRMVTSTDRGLRQVNRLQSIYQAAADSVGLPVTEATRFEARLLVDELEQVCERAVQLQEQIKILCNGSPHYKLLQTIPGVGPFIASVVLAVIGNPHRFTNRSQVIRLAGLDLSANRSGKNSDMAVPVLSKKGDANLRYALYQASLIATYHNEGFKQLFRRMLEGRERERGIRTKMRVKLASKILIIAWTMMKNNSPFNPNLLRINMAA

SEQ ID NO: 383919 - protein, 362 aa, unidentified
MRDTTIDDAEGRLTVGLDMGDTYTQACVLDEAGEVIEESRVATTPKAFRRRFATMPPARVVLEAGTHSHWASRLLDELGHEVIVANPRMLRFIYGSDSKNDKADAAYLARVGKLDPALLHPVVHRSEQCQADRALLRSRQALVRTRASLITHARGMVKIFGAKLPRCSTDAFARKASDHVPDVLRAALDPVLEIITSVSAQIRELDRQVESLAQEQYPETRLLSQVPGVGSLTALAYVLTVEDPTRFERARAIGSYLGLRPRQADSGVLKPQLRITKAGDEMLRGLLVECTQHMLGSLGPDSDLKRWGLKLAERGGKASKKRAVVAMARKLSVLLLRLWVTGEVYEPLRNARVRGELVPTTS

SEQ ID NO: 383920 - protein, 376 aa, unidentified
MKKLGVAFVGIDTAKVRNAVAVAESGRNGEVCCLGAFDNTPDGVSKLIRKLASRHEALHVCCEAGPTGYGLYRQVLARGHECTVVAPSLIPRRPGDRVKTNRRDAQSLARLLRAGELTAVWVPDETHEAVRDLVRTRVMAIEDYRRKRQHVTSFLLRHGRAYEGKANWKGHHLRWLDGQNFSHPAQRLAFQEMLNAVRAAAERIERLEAALEEIVPSWTMAPVVAAFQAMRGVKFLTATTMVAEAGDLRRFDHPRQLMAFLGLVPSERSTGDTRRQGGITKIGITRARKALVEAAWTYRHSAGLGRHHQDRQRGLPQRVRDIAWKAQTRLCARYRRLMAKGKRNTVAVTAVGREIAAFLWAIAREVEPMSLMAAKG

SEQ ID NO: 383921 - protein, 348 aa, unidentified
MTLVGCDLHSRKQQVAVLDTTTGEVLEQELAHDGDTVERFYRALRPPVTIGIETTGYTQWFHTLMHRLGHTVLVGEAGKIRAMVVRKTKTDRRDARHLLDLLKHDRFPTVWIPDPGIRDLRALVAHRVRLVRMRTMVKNGLQAIALNQRLALRSKLWTQQGLAQLRALPLLAHTTRRRDDSLELLVWLTTRIDQLDELIATVAAANPCARLLLTHPGVGPLTALTTVLVLGPLPRFPDSKHVVSYIGLAPAINASADKHHLGKITKQGNALLRWVLGQAAPLAARADEDLRRHYFAVLHRRGRPKAKVALARKLLVRLYVMLRDQIDYVEFRRRGRVALARHAAMPMS

SEQ ID NO: 383922 - protein, 411 aa, unidentified
MLWGKRRDSCKIVASINLQLTELLMQKPHDNSKASPAAFMQDNTLIAVIELGLSNWLVAGLIPGVSREPLKKLEPNPEDLLKLLHGWRDEAIKAGRPITRIAVAYETGRDSFWLARWLRERGIDAHVIHATSVTVSREHRRAKTDRLDTAMLKRGFLGWLRGERGHCTVAIVPTMEEEDAKRPHREREGLVHEQTRVVNRMKSALIQFGVRNFNPKLCKARVKLETVRTPEGKSLPPNTIAALRRDMERLKIIKEQIKAIEQARLQQFEQKPEALANRMVYLLVRIYGLGLETADLLAHELLSRTLRDRKAVARYAGLTGSPDESGSKRREKGLSRSGNARVRKIMIQLAWRMVKFQPDSALVQWFKQRTENTKGSRKPMIVALARKLIIALWRYANDGVIPEGFRQHSAA

SEQ ID NO: 383923 - protein, 355 aa, unidentified
MESVKYVGLDVHQSTISVAVLNAEGKLMMQSVVATKATAIVDLLKGLRGVLQVTFEEGTHSAWLYDVVVRRVPRVVVCNPRKNALLKSGNKNDQIDARKLAELLRAGMLSPVYHGEQSTRTLQQLVASYTALTEDTGRTMRRIKALYRSQAIACSGKKPLGKRHRGQWLEKLTDSGQRQRAAWLYEELDSVQALRRQARQAVMAECHKYQAAKLLRSMPFFGPLRTAVLMARVQTPHRFRTKRQFWTYCGLGLETRTSADYMVKDGEVMRRRKPVYIRGLNWNYSHELKNVFKSAATVASTMEGPLRQFYEARVANGMLPAMARLTLARKMAAIALILWKKGETFEAKHLNLQAA

SEQ ID NO: 383924 - protein, 433 aa, unidentified
MKVLYERVAGIDVHKDMIKVAIRSPGDKPWTRKTEILEFRTFYGVLQAMARELRRRDVTHVVMEASGVYTEPVYYALREQDFTEVAVINPAHAKALKGHKTDARDCARLAELFECGLLHGSYIPAPELKEVRDLTRYRMKTVQARTSEIQRLGKALESAGIKLGSVASSITGASATAMIEALIDGERRGGVLADLARGRMRDAGKLADLSMALTGRFTEHHALLCRLHQDRIAGFDAAVAGLDERIAGKAARWQREAGLLTSVPGFGDVVAQAWLGEIGPAPHRHFATCEKLASWVTLCPGNNISARKRKHGRTGDAGTYIKPMLVQAAWNAIRVRGRLQARYNRLVRRFGGDKNPGAKKKAIIAIAHTLLKIAYQVLKSGLPYTDLGADFYTRRESPEHKQAWLERQLQKLHPGCTITITVSPPEAALAPGA

SEQ ID NO: 383925 - protein, 395 aa, unidentified
MQVMHPVCCGIDVHQKSIVCCILDGPLTSNEPKKYQTTFGTTTKELKAALDWLLEHQVTHVFFESTGQYWIPLFNIFSDSDLELVLANPQHIKNVPGRKTDVKDAEWIAQLGRCGLINQSYIPSQEVMQLRYLTRYRISVKQRLTQIKNHIHVILQRGNIKITSYLSDIFSKTGQALLTLFINGEVINEDNVESCIHGRIKASTRQLIEAMDGKLSTIDRFLIKECMEEYQLQKKISDELNKEIKEYILEHFSEEYQLLLTIPGVSDNCCATILAEIGPNVEAFKTDKNLASWAGMCPGSNESAGVKKSSHTTQGNKYLKQALVMSVLSVQRAKEETFSLFYQRISSRGSKMKAIIACGHKMLRIIYKILQSHQPYNSQKALGLRQQTNALSLTI

SEQ ID NO: 383926 - protein, 441 aa, unidentified
MAMRKRDDDLVFPNAAGIDVGGSSHWVAVPRQACDEPVREFGAMTDDLHAMADWLLACGVDTVALESTGVYWIPVFEVLEQRGLTVFWVDARQMKYVPGRKSDVQDCQWLQKLMSLGFLRAAFRPTDEVCVVRAVARQRDVLLAEQASWVQRMQKALVQMNIQLTEVLTDVMGLTGQAIIRAIVAGERDPKTLARYRNARVKASETEIAKALTGNWRDEHLFVLRQALAMYDDIARHLGECDAKLQGLLSQLGAAKVDLGKTPRAGSKLRAQFDARQILANWAGVDLTRINGLGLAAVMKILSELGPNLSRFANVKHFCSWLGLCPGTKISGGKVLSAKTRRSANRVRQALKMAAMSLSHSDSALGAFYRRLSGRMDKPRANTATAHKLARMVYFMLTRGEAFVDQGQQRYEDQQRERSIVALKRRAAALGFQIHPNPVPA

SEQ ID NO: 383927 - protein, 410 aa, unidentified
MQTLVERGCGMDVHQATVVACLLVVLKNGKVQKQIRTFGTTTRELLSLREWLLSEGCTHVAMESTGVYWKPIYAILEGAFEIVVANAQHVKKVPGRKTDVKDAEWIADLLCHGLLRSSFVPPQPIRELRELTRYRRKLVESRSAERNRLLKLLETANIKLASVATDVFGVSGRLMLQALVQATATSQQMADLAKGLLRKKIPELELALEGKVEEHHRFLLSVQLRRLQAVEEDLGLLEQRLQEKLKPYAMQLALLQEIPGVDWTLGAVIISELGVDMSVFGNVSQLASWAGICPGNNESAGKRRSSRIPKGNVYLKTALVEAANAAAKAKGTYLRDKFYRLKARRGYKRAAVAVAHKILVAIYHMFSHQVCYNELGDLYLDTLNKHHLTRNLVHRLERLGYAVTLEQKAA

SEQ ID NO: 383928 - protein, 444 aa, unidentified
MKVMYTRCAGLDVHKKTVVACRMRTGERGDVDQETKTFGTKTGELLEMSDWIMDWEVSHVAMESTGEYWKPIYNLLEGNVEVLLVNAKHVKYVPGRKTDVQDAEWLADLLRHGLLRGSFVPPQAQRDFRDLTRYRTRVVRERTRQVNRIQNVLEGANIKLSSVAADLLGKSGRAMLDALAAGETDAAKMADLARGLLRKKLPDLEQALTGRVRPHHQFLLRQHLKHLDFLDEQIATLSQELERQMAAACSERRPPDSVEDGNQAPPSGNSPTQEPLSAPAAVVLLDTIPGVNQRTAEVIVAELGTDMRRFPSEKQAAAWAGVAPGNYESAGKRLKGKTRDGDQALQDALCEAAWAASRTKNTYLAALYRRLMGRRGKKRAIVAVAHSILVSAYHMMSRHEPYRDLGATYFDERKKESVVNRLLHRLENLGVHVTIEPIAVPVMG

SEQ ID NO: 383929 - protein, 364 aa, unidentified
MYDSTMTVAVGLDVHARSIRLAAVRADELLEERTLPYDEEQVERLLRRWPSVRCCYEAGPTCFGLYRHLVDRGVDCTVVAPGLVPQRPGDRVKTDPRDARKLARLLAGGLLEPIHVPSPEHEAARDLVRAREDARLDRMRDRHRLSKFCLRHGRILPTSSWTVVRRKWLGEQRFEFVAEQLTFDSYLHALDLVDARIEQLERAIRETAEQEPWRQLVARLRCLRGIDTLTALALVAEIGDFNRFRSAAEFMAFVGLVPSEHSSGEKRRQGSITKVGNSHVRRLLVESAWHARRRPKVGYDLARRQRGQDAVVLERAWRCQQRLYQRWQRMAGRGKPQQKIVVACARELAGFVWAIATEQPLRTT

SEQ ID NO: 383930 - protein, 377 aa, unidentified
MVNPAAAAIDIGSTMHMAAVNPEACETPVRAFGTFTQDLQDLADWFKACGVTSIAMESTGVYWIPAFEVLEARGFNVILVNARYAKNVPGRKTDVSDAGWLRQLHSYGLLRGSFRPEAEIATLRAYLRQRERLVEYAAAHIQHMQKALMEMNLQLHHVVSDITGATGMRIIRAIVAGERDPEVLAAFRDIRCHSSIEVIKAALVGNDRDEHIFALTQSLDLYDFYQSKIEDCDRKLEAAVAALTVKADGDIPALPKARIKRKQVNAPSFDVRAALYGVLGTDLTQIHGLGPSLALKLVAECGTDLQAWKSAKHFTSWLCLAPGNKVSAVSCCRRAHDVPPAGLQHSCAWLPRRLGAATLLWARFIDACRSGLASKRQ

SEQ ID NO: 383931 - protein, 350 aa, unidentified
MNVNHYIGFDVHKKSISYCVKTADGTILEEGKLPAKRAILRAWARKRTEPWHGAVEATLFSGWIYDTLKPFAAELQMGHPAMMQAIGASKKKNDQLDARKIADLVRCHLLPVCYVAPAELRELRRRLRYRNLVVAQAVQMKNKMSGLLMEVGAEYNKQQLHGAKYFTELLEDLEEVPESVKDLLRLSRGALETFQTTQQQLLARLEQHPRLAERVKRLKSIPGVGQVTALTWALEVAEPQRFGSIARAVSYCGFTSALGSSAGQEHRGPISKQRNAHLQTALVEAAKLAPRWNPQLAAVHEQEVQRGDRNRATLAVARKLVAYLLAVDKSGKPFQIRTPATAEQEVGTAA

SEQ ID NO: 383932 - protein, 343 aa, unidentified
MELHAIGIDLGKTVFHLVGLDSSGKVVVRKRCSRTQLLAYTANVRVQVIGMEACSGSHFLGRALRVQGHDVRLMPAQYVKPYIKTNKSDYIDAEAIAEAVQRPTMRFVPIQTEEHLDLQAVHRVRERWVMRRTAVVNQIRGLLLERGLTLPKGRSHVDHALPEILTDPALRLSGSLRVLLGQLQLELEQLTARIEQMDAVIQQTARENEACQRLTAIPGIGPVTATALVAAIGNGAGFRRGKDLAAWVGMVPREYSTGGKQKLLGISKRGNSYLRRLFVQGARVVMQYRTKQAPGLSVWLSQLMARTHQNVAVVALANTLLRMAWAVLCKNERYRVPLLATAP

SEQ ID NO: 383933 - protein, 434 aa, unidentified
MEVLHPRCCGLDVHKETVVACVRLVINGKPVKEVRTFSTTTVSLIELSEWLTETKCTHVAMEATGVYWKPVWHILADDGFQLVLANAAHIKNVPGRKSDVKDSDWISDLLSHGLIRPSFVPDGSTQEMRTFLRTRKQFVHEKGSHILRIQKTLEDANIKLDSVITDIIGVSGRNMIEALIAGERDPAKLAALADRRLKASQQTLRQVLRGRVTAQHRFLLRLHLDQIDALDAAIARIDREVEASIAPFRTAVEQVRTVPGIKSLAAQTILSEIGIDMTRFPSSGHLISWACICPRSDESAGKRRSTRIRKGSPWLKTTLVQCAWAATRKKGSYLQAQYYRIRARRGPKKAIVAVAASILTAIYHMLKDGTMYQDLGPNHFDANAKERQKNRLLKRLADLGYDVELTPFPTGVAPAEALAAEALAAEALAAEALA

SEQ ID NO: 383934 - protein, 345 aa, unidentified
MQIKSIGIDLGKTTFHLVALGAHSQVVIRKKFSRQQLLTYAANLPSCLMGMEAGVGSHFLGRALREQGHEVRLIPAQFVRPFVKSNKNDYSDAEAIAEAVERENMRFVPIKTEDQLDLQALHRVRERLVSRRTSVINQIRAFLLERGISFRKGPASLRRQMPEILENADERLTARMRRLLDFLWQEWKHLQLQIESLSEDLEKIANSDAACVRLQQIPGVGPLVATAMVSAIGNGAAFHKGRQYAAWLGLVPRQWSTGGKPKLLGISKRGNPYLRKMFIHGARAAVLRVKREGSCLGQWMSGLETRAARNVVIVATANKLARISWAVLSSGNDYRPMHRALRCSS

SEQ ID NO: 383935 - protein, 333 aa, unidentified
MHYVGIDVSKRSLDVCLLAEGSKGSRKTKTLSNGQDSAQNLAKWLILQKCELSQPHVIMEATGIYHEYLACGLHQMGILTSVINPCRSREFAKAMGIFTKTDAVDAYVLAFYGCLKQPEAWTPPEEEVRKLRALLQHRDSLLNDKLRIDNRLNTLKSTEAVQEVMDSLSLVNQYLKSEVARIERLISSHIAQHPGLKRDLKLLMSVDGIGKQIGWNMLAVLRGNNFKSAEQLAAYLGVVPVERRSGTSVHGRARLSKIGSSNIRAKLYMGALTAISKNSHIKALYERLLAKGKMKMSALGAAMRKLVHLCYGVLHTQQPYDEKYKAKIINFSS

SEQ ID NO: 383936 - protein, 339 aa, unidentified
MSLYAGLDLHSSNTYIGVLDPQFNRIFKKRVCNDLDLILQTLEPFRDRLRGLVVESTYNWYWLVDGIMDAGYSCVHLANPSAIKQYEGLKHSDDQHDAFFLAQLLILGILPQGYIYPKEARPVRDLARKRMFLVQQRTAHILSLQSLLARCCGQKVSSSQLRKVTGQDLKRWLKEEHLVLSAQANLDNIVFLKQQIGRIEAAIQKQVKLSEAFNCLLKVPGIGKILAMTIMLEAGVIRRFANVGNFASYCRCVSTQRLSDAKSKGSGNRKNGNRYLSWAFTEAAQMARRFNSRFRSYYDRKAAQTNSILATRALSNKLARVCYYIMRDRVEFREELASH

SEQ ID NO: 383937 - protein, 338 aa, unidentified
MSSYYLGIDLHKRRSYAVLMDHQGEIIEECGLPNEQVVDFLRQKVPADTTGILEATWNWQFMYDWMNQHCQEVKLAHPQKVKLIAEATVKTDKIDAHTLAHLARTGFLPTAYAAPEAIRQLRQIVRHRLSLIADRTQHKNRIHAAIIRYNLISPVSDLFGCKGREFLEDILENDLPKPSQQIVNDNLAMIDFINERLLVVDQMLKEIADQDKNVALLKTLPGVGLITAITIRAELGEIERFRSARQVARWAGLTPKVHASDEVVQHGSISRQGSPYLRAVMVGAALRAPRFSPALRRFYQRIARRRGNGMARVALARKMLIIAFTMLRNGQPYREADQ

SEQ ID NO: 383938 - protein, 420 aa, unidentified
MERMVERCAGLDVHQATVVACVLINERGRRPRKELRTFGTMTHELEALRDWLVAERVTHVAMESTGVYWRPIHAVLEEHFTVIVGNARHIRNVPGRKTDVKDAEWIAELVCCGLIRPSFVPAKPLRELRELLRYRRKLTEAQAAERNRLQKQLEIANIKLGSVATDVFGVSGRAILRALIEGASSPVEMAGLARGRLRRKRDELAHALKGRLDDTQRFLLSMQLRRVEDIEILIKELDQHITGKLGPYQTELALLMQIPGVDWVVAAALIAEIGVDMSVFVSVHHLAAWAGLCPGSHQSAGKRKNTTARKGNVHLRTMLVGAARPAARTKGSYFKDKYYRLKARRGSMRAALAIAHKILVAAYHMLARRVDYRELGEAYLDRIDQTRTAINLKRRLERLGYVVSILPQTTPSDAQATRPA

SEQ ID NO: 383939 - protein, 344 aa, unidentified
MDEYDGRQFVGIDLHRQRSVIVRQSESGEQLSAVRIVNDPVALQLELERAGADPEVVLEATYGWYWAVDALQACGARVHLAHPLGVKGFRYRRVKNDVRDAGDLADLLRMGRLPEAWIAPPTTRELRELVRYRAKLVAIRSGLKAQVHAVLAKAGVLIAVSDLFGVGGRQRLAKVPLGSAYAERVRSLLGLIDVLDDHEARFAALIAERLDTHRGYQALQQVPGIGPVLAAVFVAEIGDVHRFAGPTCLCSWAGLTPRHRESDTVVHRGHITKQGSKLVRWAAIEAVQRHQTTAKIAADKDRIQARRGKNIAKIAAARKLLTLVYYGLRDGHIRALDRPRWLVF

SEQ ID NO: 383940 - protein, 410 aa, unidentified
MRYYLGVDWADQTHAVWVVEEDGTKIAARTVPHTAEGLSEWGRELDEWRAQGIELWAAIERREGRVVDFLLDHGVVVYPVNPKALDRARDRFRQSGAKSDPFDARVLADFLRTDHAHLQALQPSSEAAQELKLLTEDYQRQIRQQTRLVNQLTHTLKAYYPRALEIAELTTALTREFLHAYPTPQAVTALTPRQWQRWARAHHLSEARTRDLWTVLQSPQLPVPAHVVRAKARLMLTLVAQLMPVVAAVGHYREAIEDFFARMPEAQWARTLPIGNHGITAPTLWARLGDAPGRWESFRHLQAHAGTVPVTKRSGKQQRVVHFRFACDKALRSVVDQVAYLSLLSSVWARAYYDQQRARGHAHRHALRALGAKWLKIIFVMWQRQVPYDEQYHLATMTRQQLRQRQERIA

SEQ ID NO: 383941 - protein, 343 aa, unidentified
MEIHTIGIDLGKSLFHLVGVDSSGSVVVRKRCSRSQLLAYTANLRVQRIGMEACSGSHFLGRALRDQGHDVRLMPAQYVKPYVKTNKSDYIDAEAIAEAVQRPTMRFVPIKTEDQLDLQAVHRVRERWVMRRTAVVNQIRGLLLERGLTLPKGRCYVDQALPDILEDATLRLSDSFRLLLAQLKLELDQLTARIEQMDAVLQHTAKDNEACQRLTTIPGIGPVTATALIAAIGNGSGFRRGRDLAAWVGMVPREYTTGGKQKLLGISRRGNSYLRKLFVQGARAVMQRRHNQAPELSAWLAQLLVRTHQNVAIVALANKLLRMAWAVLCKNETYRPPALVPSS

SEQ ID NO: 383942 - protein, 391 aa, unidentified
MIYVGIDVAKDKHDCFITNSDGEVLFKAFTITNNLDGFNELHQKIASVMDDVTKVKVGLEATGHYSYNLLGYLIDKSLPTYVINPLHTNLYRKSLSLRQTKTDKVDARTIASMLMSDVNLKSYSDTSYHNEELKSLTRYRFDKVQERAKLKTSISRLVNILFPELEKLVPSLHMVSIYALLAEFPSSAQIASCHLTRLTNLLANASKGHYNKEKAIEIRNAAKHSIGSNMPAKSLELKHTIRLIQELTSEIDEIECSIKSIMDEIRSPILSIPGINYRMGAMIIAEIGDFNRFSSPDKILAYAGLSPSTYQSGQLDGCYSHMEKRGSRYLRYALFNATKFVCIWDNQFSAYLAKKRSEGKHYNVAISHAAKKLVRVIYQLEKSGQLYHRAA

SEQ ID NO: 383943 - protein, 324 aa, unidentified
MIDGILGIDVSKNTLDVSICSSTKVRTKRFANSFDGWRHLLDWLIAQKVQRVHACLESTGRYSLGIACALYEAGHVVSIINPAQLRDFVRTKLGRNKTDGVDASHIREYCELFKPSPWAPPSEAHRRLGELQTIRAGIIAGLTEWKNRKNSGIADAEAQALAEATISHFMSQLGAVDKAIALTIDNDSELRSKRDLLLSISGVGETLAGVVLAELPGPDVLGSSAEVVAYAGLNPRQHQSGASVDRATRISKIGNAVLRAALYMPALSAMRYNPAIVALATRLKSRGRLKPKQIVVAAMRKLLVLCFGVLKTGKPFDAAIAMGC

SEQ ID NO: 383944 - protein, 343 aa, unidentified
MKLSRVGIDLAKNVYQLHGVDRSGKTVWKRRLKRHQWFKVLLDKAGPGCVIGMEACAGAHHWARQLQSRGYTVKLIPPQFVKPYVKSNKNDAKDAEAICEAMSRPNMRFVTVKSVEQQDIQATHRIRAELITQRTAKANQIRGLVAEYGLIAPKHLSSLRAAIPCWLEDAENGLSGDFRSLLHGVWEDLRALDDRVGEMDQLIKRLATNNEDCVRLQQLRGVGPMISTAMVATVGDARQYHKGRQMAAAIGITPKQHSSGGKDRLLGISKRGDVYLRTLMIHGARAVVTRAKHKDDRLSRWVTGIATRRHPNVAAVALANKTARMAWAMLRNETDYDPDFAIR

SEQ ID NO: 383945 - protein, 468 aa, unidentified
MMLPGFFYLNRMKGVTMNYYLGIDVSKGYADFVFINDKKKVIVNNFQLDDTFEGHSCFCNRLSQFVDQYPNSTIYAAVESTGGYENNWFNLLQKCQQSFPIQAARLNPLGVNANSKANLQRITTDKISAKNVAEYLIAHPEKVKYQSPDNHFVNAQKQWRFIKTLTKQKAQLLNQLESHVYSANPELLSYCKDGFPLWVLFLLQKFPTAKKLSKAKVNSVKNIQYLKDKKVESLINNANKSVASDNSQSIENIIKVTVDQILSMRKVIKEQHKILVTNFSSPEALLLDDIPSIGIESAVGLMIEIQYIERFQSVKKLAAFFGLHPVFKESGDGGSGYRMSKQGRKAPRCILYMVTLSAIQRNPIIKEIYEERVSKGMNKMAAIGLCMHKMCRIIYGMLKNKSQFNAEIDRQNRKDKKVMQSIKRIDSNRRFQPYDAKAPTSRRQANKRKEQMQTPSHSFVKLNSGSKS

SEQ ID NO: 383946 - protein, 284 aa, unidentified
MPMLEGRVDAVIGVDTHRDSHAAALLDPNGGVRATLEVPSDRAGHARLLQLAAAQAPGRRVWALEGTGCYGAGLTGFLVDHGERVVEIDRPKRPRGRNGAKSDALDAIRAGREALAREHLASPRQRGHREAIRVLHTTRSAIVEAGANARRQLKALIVTAPEPLRDTLRGRTWLQQARASAALVAAPSDPVDHRATVQALRMTAQRVLTARAEAKELEVQLRMLITAVAPVLLAQRGIGPISAAQVLISWSHPGRFRSEAAFAMLAGAAPVEASSGQVVRHRLM

SEQ ID NO: 383947 - protein, 425 aa, unidentified
MHEQVEIGDKNEYIHPICSGIDVHKKKLFAAIHIYDKKNNQVRYITACFTTFPKGLQEMVNWHIVHGCSEICMESTGQYWHPPFDAFEKAGLHPVIAHPKYTKPLKGKKSDPADAKWIAKSYAGGHVVPSFIPPKKFRLIRSVIRYCLKIHNSITGEKNRILNCLTGEGIKLDDVFTDPFGTSSMDILEYMIQHPGEAFDVTPFIRKGCKTPIPIIQEAVEKAASIDLSALSKLRVALDRMEETVGHEMTLKEDISKKMKPYTHQLELIRTVPGFDKDSFTAERVLAEIGPDMSVFPSAKHLCSWAGVCPSHDSSARKVKGRKISRAGTYLKPLLVNIARAVVRSKKHPEITLRFNRIKNRRGYMKAIIAICKMFLTAIWHILHKDEPYKADGYMTAKKPKKTKKVITRAQLAEYLASQGITVVD

SEQ ID NO: 383948 - protein, 400 aa, unidentified
MISVGIDVSKGKSTVCILKPYGEIVSKPFNITHTHKDLSELSSMLFRLNDEVKIVMEATGIYHLPVLTYLQEKGFFVSVINPYLMKSYRNESLRKAKTDKIDSRIIANYGIDHWFKMKEFQISGVIYEELKLLGQQYRHYMKLHLLSLAELTHLLDLTMPGIKNLLASWNETNRKDKRSDFVERFWHYDIITSMSEQEFTEEYILWAKEKKYVPSQEKAKVIYTLAQESIPTLPSETSSVKMLVTEAVRVLKEVDATLGLILSRMQEIAKTLPEYSVVREMGGVGNTLAPKLIAEIGDVRRFRNGKALVAFAGIDPPPYESGQFVGCNRKISKRGSASLRKVGYETMRSLKMRSRPEDPVYRYVVKKESEGKSKKSAKIAGLNKFLRIYYARVTELYKNI

SEQ ID NO: 383949 - protein, 314 aa, unidentified
MQDSPLFMGVDVSKAGLVIATSAAQRLRSIANDALSIGRWLRQVPSHALLAMESTGRYHALLAHLASQAGFKVYVLNARDVYFYARALGTRAKTDGVDALVIARYLAEHHARLHPWQAGSALEQQLQQLLSRRAQLGVSQARLKQLLADTELDARALLGAFESLLQALDAKVQALIAGDVPLSQGYQRLRTITGIGPQTAALLATLLSRFEFANADALVAYCGLDPRANDSGTKRGHRRLSKKGPPLLRRQIYMAGFAASSSKALKPLYRALRAKGFAATEAFIILGRKLLRVAFAIWKGTASFDPARLLPTTA

SEQ ID NO: 383950 - protein, 336 aa, unidentified
MKKYQLFIGIDVSKHKLDVCIMQPENNAFIHRVFENTRKGIVEIIRFIRQQTKAESSGWMVCLEHTGVYAMPLCCYLSEEQIPFALVPAIQIQRSLGVKRGKSDKADSKAIARYVFLHQQEITCYRLPEKKLLKLKLLLSHRERLMKSKKMFEVPSTENELYLEKSLVAEMLKDSRSIVRTLKRKIKQADAQIHQLIQEDDELRKTFQLIVSVPGIGIQTACHLLVTTRCFTAFETARQLACYAGVAPFEYSSGISIKGRSKVSPLANKKLKSLLSMGALNAVRLDKELNYYYQRKKSEGKNAMLVLNAVRNKLISRVFATVKRGTPYVQMMNYAA

SEQ ID NO: 383951 - protein, 387 aa, unidentified
MFYCGIDIAKRKHAVSLLNDQGQTLKAVFTIANTRPGFDHLLAELQTLQGSVTVGLEATGHYWLALYDELTRTGYPVIVLNPLQVAAYRKSGIRKIKSDATDAVWIADYIRIANLPPTEQSLPVMLQLRELSRFRFRLTEQVGNSKRKLLTILDRVFPEYEHLFSSVFLKASRAILKEAVSAQEFADFDLQELTDLLAQASRGRFSQDQAEKIQEQARQSVGVGFLTNAVHLEMHCLLAQLDLLDEQRSQVDQTIAALMQQVPQYITSIPGIGPVTGAAILAEIGDIQRFETVDKLVAYAGIDATVYQTGQFEASEAHMSKRGSPYLRHALWCAATAALLHDPSLQQYYQKKRNEGKHHGTALGAVCHKLLARIFVVLKEQRAYVIR

SEQ ID NO: 383952 - protein, 314 aa, unidentified
MSPLVFVGIDVSQARLDIAIRPGASFSFTHEESAIATVVEQLCALSPTLIVLEATGGMETPLTSALATAGLPVVVVNPRQGRDFAKASGHLAKTDALDAQVLAQFAEVMRPQPRPLPDAEARALAALLTRRRQLVEMLTAEKNRLLSAPSPIRTRLRTHITWLERELQSTNTALAEAIRQSPVWREKDELLQSVPGVGPVLTSTLLASLPELGTLTHKQIAALVGVAPLNRDSGTLRGRRTVWGGRAQVRAVLYMGAIVAARFNPVIRVFYQRLQRAGKAKKVALTACMRKLLTILNAMLKHRTPWREVEAHHA

SEQ ID NO: 383953 - protein, 371 aa, unidentified
MPTLTGIDKQNVLVPVGVDTHADVHVAAALDQLGRLLGTYSAATTPAGYASLVGWAEQFGTLVRVGIEGTGSYGAGLARWLHARGHVVVEVERPKRQTRRRTGKSDPIDAEAAARAVQAGTATGLPKTGDGPIEMIRSLQAVRRSALKARTQAANQLHALVITAPDALRGELRRSSLPQLVAKAGAFRTSLPLTTPTAATQLALKVLARRYQQLCAEVEALDTQLGQLVAQAAPELLAVKGVSTITAACLLVTAGDNPERLRSEAAFAHLCGVAPIPASSGKTTRHRLNRGGDREANKALYLLAVRRMGWDPATRAYVARRTTEGLSKLEIIRCLKRYLARELFPLLAANQLLATTAALPAAPMIDRGNQR

SEQ ID NO: 383954 - protein, 342 aa, unidentified
MKNIKVLGIDLAKNVFQLHGTDAKGKCVLKKRLNREKLIEFMAQLPPCLVGIEACGGSHYWARTFIKMGHNVKMMAPQFVKPYIQSNKNDKNDAAGINEAVTRPNMKFVPIKQIEQQDVLLVHRCRELAVKQRTALANQIRGLLLEYGVIIPQGVKQIKHLPEILDNNKSKLTEKAFTAFIGLHEQFKKYDDQVNGYDKEIARQANQDVRCKEIQKIKGIGPITASAMVATIGDVSVFKNGREVSAWLGLVPKQHSSANKIRLGGISKRGDRYLRTLLIHGGRTVVNRCDKKTDKLNMWVANKKNRCGKNKAAVAVANKNARVIWAILKTGEAYRNQDATNI

SEQ ID NO: 383955 - protein, 351 aa, unidentified
MPHKTAATVAHTIGIDTGKNTLHLIGLDDKGAIVLREKIARGRITARLANVPRCLIGIEAGMATHYVARELGALGHDVKQVPPAYSKPFRQGHKNDFRDAHAIAEAVQRPSTRCVPVKTDDQLDLQALHRVRSRLVGQRTAVINQIRGFLLEHGIAVRQGLRFLRQQLPDILAKRSDVLSPRMIRIMEDLSGDWRRLDERIEHITKEIEVLAGTDVNCGQLMTVPGIGPIVASATVAAIGNGAAFARGRDFAAWLGLVPKQMSTGDRTILGRITKRGNRYLRMLFVQGARAILLRPKSWVKHSFGPWLTTAARRLHRNILTIALANKLARIALSVLIQGRSYETRIVPAAA

SEQ ID NO: 383956 - protein, 354 aa, unidentified
MSNKSIATIATMGIDIGKNSFHVVGLDQRGAIVLRQKWSRGQIEARLANMPPCLIGMEACVGAHHLSRKLQAHGHDARLMPAKYVRAYSKGQKNDFRDAEAIAEAVQRPTMKFVATKTANQLDLQALHRVRERLVSQRTSIINQIRAFMLERGIAVRQGIRFLRTELPIILASRTDMLSLRMLHVIEDLAGDWRRLDERIETLSREIETIARQDAGCDRLMSVPGIGPIISSAVIAAIGSGDVFSKGRDFAAWLGLVPKQISTGDRTILGKISKRGNRYLRVLFVQAAWVVLVKPVSWERHGLKSWIEAAKKRLHHNVLAIALANKLARIAWAVLAKGRGFEATRTIDGSTKPA

SEQ ID NO: 383957 - protein, 370 aa, unidentified
MSQMHAVAGIDPHKNSATVAVIDSCGCQRGGRSFTIDAAGIEDLLSFLIDSELVIDRVGIGGSAFLGRPLVLALSAAGYDTREVQANRTAERRSRRRRAKTDNEDAEAIARETLAHVDLPPAGKRDTPDADWDALGAIRNWRESLVLQRVRLLTESEAVLVILPVAVRSALPATSRVLPQLKALGDGGIDLDGLDLADQIKVERLLASLTDIITLTTRIKDLDKKIPAVLDRLGCTLTTIHGIGAINAMDLLVEIGDPCRFTTEAQFARWCGAAPVALSSGEGDGLPRRHRLDLGGNRAVNSILHSIHVTQVRCHPPAKAYMARQLDKHKPKRSARRSHKRHLANVIIRQMWKDAGRLPATTNQALPAAA

SEQ ID NO: 383958 - protein, 345 aa, unidentified
MIIGCDFHPSWQQIAWLDTETGETGEQRLVHAGGDAERFYRQLAVPALIGMEATGNSHWLVDLLSELGHELWVGDAGQIRASYVRQQKTDKRDAAHLLKLLVEGRFPRIWMPSSEVRDLRQLLLHRYKLVIIRARVKNELQHLCLNKGVQRKHKLWTKAGQQVLRELPLKPWARRRRDDLLGLMAMLDQQIEPLDQAVKEEAQRDKMALLLQTQPGVGPITALAYVLTMGDIRRFPRGKQVASYLGLIPREHSSGGRQHLGAISKQGNRMLRMLLVEAAQTAVRLDPQLRKEYLHRCHQKPKAVAKVAAARKLAVRLYWMLRTQQGYPEVVRIESSPRVGLVGEN

SEQ ID NO: 383959 - protein, 346 aa, unidentified
MTIVEVDRRITGGVDTHLDVNVAAALDEIGGLLGVESFATTAAGNDDLIGWLDAFGTVDLVGVEGTGSYGASLARALARRGVPVVEVDQPNRQRRRQAGKSDPIDAVEAARAALGGRARGHAKSRTGNVEAIRALNVARRSARSVRVKTMNQIRHLGFTAPDDLRERLHGVHRNHLGATAASLRPQPGSDPVMFATKTSMRILGRRILHLDAELKVLDEQLAELVAATAPDLLAVYGVGIDTASLLLVAAGDNPERLRSEAAWAHLCGASPIQASSGKVTRHRLNRSGDRQANHALWRIALTRMGSDERTQRYVERRLEEGKTKREIMRILKRYIAREVYKALPRA

SEQ ID NO: 383960 - protein, 387 aa, unidentified
MPADRAEAPTTIRTDLAAVFVSLELSRSIWLVTSASPGSGGKMSKHSVRAGDVAALLARFSELKQKALARTGTSFAIVAIQEAGLDGFWLHRALEREGIESHVVDPASIATSRRRRRAKTDRIDGEALLRTLLAYKRGEPRVCTMVRAPTPEDEDRRRLCRERKTLIAERVEHVNRIKGLLFSQGVSSYEPLRRDRRRRLEDLRTGDGRSLPTHLKTQISRELDRLELLLDQIKLAEAERDALLAEDQAAAPEPPGRMLLEFRGIGAEFAATLWLEGLFRRFDNRRQLASYAGLAPTPWQSGSVDREQGVSKGGNPRLRATLIELAWLWLRHQPQSALALCFKERVKRNGGRMKKTITVALARKLLVALWKYVTAGVVIEGAVMKVA

SEQ ID NO: 383961 - protein, 339 aa, unidentified
MRLYAAFDLHSSNSYLGISDEKGKRIFKKKLPNDPARIKEALKPFKADIEGIVVESTYNWYFLVDLLKEEGYRVHLANVMKTQQYAGLKYSDDKHDAFWLTEMLRLNILPEGYIYPKEERPIRDLLRKRGHLVRLRTSLIASLQNIIARNLGSRLKANDVKILTTDRVMPLFQGNEDLALAGKVSKEAIDFMTRQIKTIEATIGDRLYLSNPYDRLLSIPGVGKILAFTIQLETGSIDRFQKVGNYVSYCRKVPSGRFSNDKKKGAGNRKNGNKYLAWAFSEASDHARLFDAESRTYYQRKLQKTNAPIAHNALAHKLARAAYYIMKDGVVFMPEKAFA

SEQ ID NO: 383962 - protein, 366 aa, unidentified
MRSVPHDVEAVYVGLDVHKDSITAGVLGPARETPEVERFFHDELSIRRFLDRLGDRNRLRVCYEAGPTGFELARLLEALRVDCVVVAPSLIPRAPGDRVKTDRRDARRLTRLFQGGQLTPIHVPTRQEEAVRDLCRTRTDMLIDLHRARHRLSKFLLRHGLPYRAGTEWTDRHARWLTGIRFQDPALRATFAHYRGVVTTRAAELRAVEADLTPCCDREPFTDAVHRLGAYRGITHLGALSIAAEVADWRRFPRAGTFMGFCGLVPSEYSSGTHTTRGRITGTGNTNLRTHFVESAWSYRHKPAIGLAIARRQEGVPPQTLARAWHTQLRLCAKFTRLSHRKNAAKLVAVAIARELAGFTWAEMTA

SEQ ID NO: 383963 - protein, 349 aa, unidentified
MPNYNQAHQFYAGVDLHARSLFVHVLNAKGKTVFERDLPADPDAFLDAVGPFRKNLVVGCECMFAWYWLADLCEAKRIPFVLGHALAMKHIHQGKSKSDKIDAGKLAAMLRGGLFPLAYVYPKAKRQTRDLLRRRSFFVRQRSQLIAHIVNTNSQFNLPPFAKKLSYAGNRSDAIAQRFPDPSTKLMIATDLAMIDAYDEQIAEVERHLLKSAKVDDPVTFGFLRTVPGIGPILGLILLYEIDRIGRFPEAGNFLSYSRLVRCAHESAGTVKGFGGKKIGNAHLKWAFSEAACLMLRTCAPVKAWLARQEKKRGKRKALSVLEAKIGRTVYHLWRQQRAFDLQRFLRNG

SEQ ID NO: 383964 - protein, 387 aa, unidentified
MIFVGIDAAKDKHDCFIVNSDGEVLFDVFTISNTLDGFKRLLSKVKSVTNDFDKTKVGLEATGHYSYNLLGFLLDNGLTTYVLNPLHTNLCRKSLSLRKTKTDKVDARTIAQMLMSCVDLMPYTRALYHNQELKSLTRYRFDKVSERAKLKSSVSRLVTILFPELEKLAPSIHMVSMYALLSEFPSARHIAGANLTRLTNLLYTAYNRDTAVRFREAARQSIGSVMPAKSLELKHTIKLIGELTAEINEIEVEIKHIVDSLETTILTIPGIGYTTAASILAEIGDFSNFATPDKILAFAGMSPSTYQSGQLTNCYAHMEKRGSKYLRFALYNATKHVCKWDNKFAAYLAKKRSEGKHYNVAISHATKKLVRLIFALEKSHKSYSPAA

SEQ ID NO: 383965 - protein, 405 aa, unidentified
MLFVGDDWAEDHHDVELMDVAGRRLAKARLPEGVAGMARLHAMIGEQLGEDTEVEVLVGIETDRGPWVAALIAAGYTVYGINPLQVARYRERHCVSGAKSDAADAHTLADMVRTDSHQLRPVAGDTPRAEAVKVVTRAHKTLIWERTRHTQRLRHALRDYFPAALEAFEDLDAADTLELLATAPDPASASRLTIAQISAALTRARRRNVAEKAARIQAVLRAEHLSQPEVVTQAYAATTRAAVAVLRTLDEQVKTLQGQVDAHFGQHPDAEIILSQPGLGPVLGARVLAEFGDDPDRYTDAKSRKNYAGTSPITRASGKKKVVAARYVHNDRLIDALMTQAFSALNASPGARACYDQLKARGTEHNAALRQLANRLVGILHGCLKTHTCYDEATAWSHRAETAAA

SEQ ID NO: 383966 - protein, 526 aa, unidentified
MTTSTRQPSAPRLRGLGHLGKPHGVLSPRVQAVGPEHFGVVSVDCAKASSKWMLTDFYARLLIPPTVLDHRRDAFDHAIAQIRQAMVDHQLHDLVVAVERTGRYHLPVKRAFTAAGFEVRVVHPMISRHFRCAAHADEKTDDTDLEGIFQAACNGYGLVDPLWEPVYSQLQLWARHRRDLVQKSTLLSCQVLEHLESCLPGYSKCFDNVLNSRIALLVPGTYGTPQAIVEAGLAGLADLASRQGVRFHEATLIRILAWAHDAPQPDREAALHQRLLGELNRDRIAKEEDIEAIERELVTLLVQTPYVRLLALPGVNVVLASELAGELGPMAHYATGRVITGRAGLFPRRHQSGPVDYRRGRLARQGNRRLRQVLLLAAETLCRCNNHFRVLQERWLVQGKDPRDVYVRVAGRLARITFQMVAGSEACRHPACQGPPEVLSKLMEFHNEHNINLTVTRTNLRHAAAQLPGAEQAREREAWQAKRAEIRGKRGRGPKRLAAILPAVLKQLVGGERADVLESSESGESS

SEQ ID NO: 383967 - protein, 346 aa, unidentified
MNPSTIGLDIAKSVFHLHGVDASGAVVLRKRLRRRELVAFLGKLEPCLIGLEACGGGHYWARELAGLGHEVRLLSPADVKPYVRRNKNDAIDAAAICEAVSRPSMRFVPVKSTAQQAALVPHRVRDLLVRQRTMLINTLRSLMAEFGVVAPRGRGHLGALAARLEEPEAASTSNPAIPAAAQPLLRELVAAIAALSERIARAEKAIVAAVRKDPLARQLMTVPGVGPITASAVLATVGDPGRFRNGRHFAAWLGLVAKQSSTGGRPKLGRISKMGDRYLRRLLVLGATARLACVGREQSPLAAWTRALLARRPARLVTVALANKTARILWAVMARGEPYRPEAAAA

SEQ ID NO: 383968 - protein, 320 aa, unidentified
MRNTVGLDISKLTFDASAMVGNAEYSAKFDNDSKGLNQFSDRLKSLGCQNLHICMEATGNYYEEVADYFAQYYSVYVVNPLKISKYAESRFKRTKTDKQDAKLIAQYCRSAQESELVKRQKPTDEQYRLSRMTAAYAQIKSECAAMKNRYHAAKDEEAAKAYAEIIKAMNEQLEVLKEKIKEQTEKPKCKEGVKCLETIPGIGRMTAAVLFHHLTSSKFETSNKFAAFAGLSPQQKESGTSVRGKGKLTKFGNRKLRAVLFMPAMVAYRIRAFPDFIKRLEEKKKPKKVIIAALMRKLAVIAYHVHKKGGDYDPSRYKSA

SEQ ID NO: 383969 - protein, 347 aa, unidentified
MRHSTMPPLFVGIDYHKNQLQVCLLDRQGRVLANRSVANDWCEVAALARRVGHVNRVAIEACPGASDLAEQLTELAGWHVELAHAGYVAKLKGSPDKTDWGDARLLGDLTRVGYLPKVWLAPRWVRQLRGLVRYRQQQVNASRNEKLRIGALLRELRIQQPLFRRWTKGWLAWLESEAVQQMPQASQWILRRHLRKLRWLDQEIKQVRKQLQAYTRDDELTQRLQCESGIGEVTSWVLRAEVGQFDRFNSGQSLSRFCGLTPRNASSGSRQADGGLIKAGNGLLRATLIEMAHRLARHDQRWRAFKMRLKARGKAGSVIAAAIANRYMRGLYHRMQMPVLDLDGPAL

SEQ ID NO: 383970 - protein, 377 aa, unidentified
MKAPSTRPTAVLGLDVGKSSHWACLIDRDGEVLASAPVRNREAELDALFASAPAGTLVVVDQFRNIGSLAVRRARAAGLGVAYLPGLAASRAAGLFAGEAKTDERDAAVIARTALGVPDSLSGVPGRGEALEAARALSSQRDHVVACATRDKNRLRAVLLESCPALEAAVDLSDRRWLELLAGFGGAWGIARSGAEGPRAEVAGEAAAASTAPPPALVEAENRQVRFLAARILEALDEAGALEAETAALLEGDETYACLLTVPGIGPRTAAQLAVSVDIGRFPDHDHLASYCGIAPRVRSSGTSVRSVRASRRGDARLKSLLIFSCNSLVRSSGRYGEYYRACRARGMGHGRALKAVARKRLRAIYAVMRDRVPYRE

SEQ ID NO: 383971 - protein, 304 aa, unidentified
MFARFIGVDVAKAKVDVFVSDTGEVLQVRNDEHSLSRLVRKLDCKDALAVIDLTGGYEALCVKTFHAAGVKVHRAEGRKVKAFMRATGRLAKTDAIDARALADYGQRLQDRLALYAPDENAVKPYVARLADLKQILRDEKNRLKAPVTTPQIRDRIERHIGFLTAEIESLSKELQETVRQNPRLFQKQRALITQTGVGETSANALLAYLPELGTLSRRKIAAIAGLAPYARDSGTLKNARHVTGGRRDVKRTLFICTLVAIKNDPEMRAFYEKLIKSGKRKMVAIVAVMRKMIIILSTKCKNID

SEQ ID NO: 383972 - protein, 337 aa, unidentified
MSKITLIGIDTAKNVFHLVGIDKRGSYTYRKKLSRRQLLPTLARLEPCEVVLEACAVSHHWARCIAQFGHQVRMISPQHVKPFRRGQKNDYRDAEAIISAALSPGIYFVGVKSVEQQAEQALHRVRSRLLSHRNAAVSELRGLLGEYGLAFGQGIKPLREGAVRFADSDQAQALGMVELVWDVLEELDQLQHRLDEYTHRIEQRVRNDPTSQRLRDELLGVGPLSASALRVKVADARDFVNGRNFAAYLGTAPGHRGTGGKVKIGKIRRGHDRYLRQLLIHGARSVVQHLGDKQDPQSRWLRGVLERRGFNIAVVAQAHKNARQAWAILAREQALSG

SEQ ID NO: 383973 - protein, 308 aa, unidentified
MIMQNYVGCDISKQWLDFFDEASSRCQRIDNHVDAITAYVAGLQPSRDFVVMEATGVHDRLLRHALAKAGVAFSRHNPAHTHHYAKSTARRAKTDPLDARMLSGYGRRYHPEAEPAPREEGEHLQSLARHRDQLVDIRARLKKLRSEAFDEIVIAELEELIASFNTRIKALESRIAETIRQVEDTARDNALMVSVPGVSKITALSLLAHLPELGQRSPKSIAALAGLAPFDNKSGKLNRRSQIQGGRPRVRRALYMAALGAIRACDRFRAFYSAIAARSASKKKAIIAVARKLLVVLNAIIRDKKAFA

SEQ ID NO: 383974 - protein, 440 aa, unidentified
MTVRKREDEVFPNAAGIDVGGSSHWVAVPTRSSDDPVREFGAMTEDLNAMASWLIACGVDTVALESTGVYWIPVFEVLEQRGLKVWLVDARQMKYVPGRKSDVQDCQWLQKLMSLGFLRAAFRPDVEVCELRAVSRQRDILLTEQASWVQRMQKSLVQMNIQLTEVLSDVMGLTGELIIRDIVAGERDPKALARHRHSRVKASTEDIIKALTGNWREEHLFVLGLSLGMYDDIARHLTECDARLNAGLKDLGQKNVELGKPPRSGSKQRKEYDTRQILANWAGVDLTRINGLGLAAVTKILTEIGPDLSCFPTVKHFCSWLGLCPGTKISGGKVLSAKTKRSVNRVRQVLKMAAMSLAHCDSALGAFYRRLCARMDKPSANTAVAHKLARMVYFMLTRGEEFVDQGQQRYEQQQLERSVAALKRRATALGFTITPVASWA

SEQ ID NO: 383975 - protein, 396 aa, unidentified
MVGSNTMMEQFMAQSEDMSKPPTALAQNDTLICVVEMGLKSWLVAGLVPGIERQPLKKLEADESALHRLVLRWKAEAEKAGRPISRITLAFEAGRDGFWLARWLGSRGIEAWVIHPTSIAVSRDHRRPKTDRLDTQMLMRAFLGWLRGEPGHCRMAAIPTLEQEDAKRPTREHETLVGERTRIINRSKSALIRLGIRGFKPGLRKASERLASLRTPEGVPIPPNTLAEMHRDMARLAVIQSQIAEIAVARLERLEHATDAPHAMIRLLARVIGVGVETAEMLVTEVLSRNLRDRRAVARYAGLTGAPYESGSKRHEKGLAKTGNARVRHGMIQFAWRFLLFQKESALARWYRARTENAKGSRKRMIVALARKLLIVLWRFVTTGEPPEGVALRVAA

SEQ ID NO: 383976 - protein, 368 aa, unidentified
MDYRVYCGVDFHARQQTICSLTTEDGVVSTHELKHQDKAELRAFYSQFSGPVLVGLEASGYSPWFEQLLEELGHEVWLGDAIEISRRGRRRQKTDRRDAELILELLIHDEFPRIHRPTPQSREILRMLRYRQKLVKMRTIIKNSLQALALQSGLSRRSQLFTKAGLEQLGTATMSPVMQYQRDQWLAALEPLNQRIAETVTWLKQQAKSDPRIRRLRTHPGLGLLTALVIVHTLEPVERFSNQRQVAAYGGFDPREHSSGEKKRYLGISKAGSRLLRFFMIEAAHTAVRYDDDLQRFYRRLHQRRGKPTAKVAVARKLLIRSYILLRDEIDYPEFSRRAVAAGLARVLHRPEVPEVLIGRPASTVQSQ

SEQ ID NO: 383977 - protein, 340 aa, unidentified
MYPFYLGIDLHLKRTYAVLMDSTGQVIDERQISNLDITKYLEKEVPRQTCAVLEATRNWDFMYDLLSEHVAQVELAHPKELKAIASAAVKTDQIDAKVLANLARLNFLPTSYAAPKEIRDLRLYIRHRMWLVRQRTQAKNRIHAVIARYNLVSPKKDLFGVGGREFLERSLAHVRPMAKRVIEDQLRVIDHLTTQIEALEADLKLNEEDNKIIKLLKTMPGVGQLSALTILAEIGDIRRFNSPKALCHWAGLTPRVRKSDLVVRHGRITKEGSPYLRATMTRAATIASRVSKRWNHVHRKMLPRCGRTGAKVAVARRLLTVVYFMLTRQEPYQENYASDR

SEQ ID NO: 383978 - protein, 344 aa, unidentified
MDKFDVAGVEVSAKILVVALKVNGQLRTPEFANTAAGHQQLIGFLLKHSRRVRVCLESTGLYGLDVALALHAEPEIEVRVANPRSVRHFAQAMMQRSKNDPLDALLLAEYAQRMPFQAWQPPSLPGRQLCALTRSIHQLTEMCTMQKNRLHAAAATATTPKFLIRELQRSLAQLQKSVQRLIQKALQLVRSHAQLRQQLELLDSLPGVGELSALYLLGELVLLSPDFSVREWVAYAGLDPRQYKSGDSVEKKIRISKVGNTHLRRALYMPVLVAARHDPHFRAHYRHLLAKGKLGMVALVALMRKLLHGIFGVLKSLQPYDGSKLFTLPLILDSKPTMKEKIAC

SEQ ID NO: 383979 - protein, 293 aa, unidentified
MLIIGCDFHSRFQQIAMVDTETGELIERRLDHSNGEAKKFYAELQKPVRVGMEATGYAQWFERMLAKLGYELWIGDAAEIRAAMVGKQKTDARDAQHILDLLLTNRFPRIWIPSPGERDLRQLLRHRHKMVCLRTSVRNQLQALAMGQGVYRKRKLWAAGGRTELEGLALDPWASRRRQELLDILDRLDPCLAELDRAVAKEAEQRPAARCLMEQPGVGPVTALMLVLTIGPVERFRRSKQIVSYLGMNPRESSSGGRQRLGAIRKQGNSMARFLLVEAAQTASRYDDELRRD

SEQ ID NO: 383980 - protein, 385 aa, unidentified
MMKLNDFSRSLTAFDQERALVAVIEMSQSSWMVGAIIPGIERQPLKKLAPDERALFKLLHRWRDEALKAGQEITRLVVAYEAGRDGFWLARWLRARGIEAEIIHATSIAVSREHRRAKTDRLDTGLLKRAFLGWLRGEPGHCSMILVPTLEEEDNKRPSRERAALVAERTRIVNRTKSTLARLGIRGINPKLQKTAERLAELRTPEGTSLPPHTLAELQRDLGRLALIRDQIRQIELSREQRVAAAPNRGVHAMVRLLARVVGISTETADMLVQEILGRPWRDRRALARYAGLTGAPDESGSRRREKGLARVGNTRVRHGMIQLAWRFLRLQKESALVKWYQSRTEGSPKLRKPMVVALARKLLLALWRLVMTGDVPDGVILRPA

SEQ ID NO: 383981 - protein, 369 aa, unidentified
MTGRFTLGIPIPRLSMGRHVFSLMNPNGCRGPSGARIDKAGRQSLMKQAHSELFIGIDVCKDRLDIADDSGSPIWSVANDDAGVSTLTARLKSLKPALIVMEATGGLETLPYAALTAAGLPSVVINPRQARDFAKAVGKLAKTDAIDARVLARFGAAVKPAVRPIKDDKAQELAALVTRRRQLIAMLTAEKTRLKQAPKWIRKDIKAHIQTLEQRLLKLGAGIAKNIKNTPGWKEKDDLLKSVPGVGDVLSMNLLANLGELGTLNRREIATLVGVAPLNRDSGRCRGRRMIWGGRAEVRAALYMAALSASRYNPVIKAFYQRLILKGKKPKVALTACMRKLLVILNTMVKNKTTWNPGQFYILDLNHGC

SEQ ID NO: 383982 - protein, 438 aa, unidentified
MADRYAGIDWVADKHDVLVADETGTEVLAATYAHDENGLSALCRVLVRLEVVLVAIERPDGLLVERLLDAGLQVLPLHPNKVAAARDRFRVSGGKSDRFDAFVLCELARTDHHRFRVLEPDSDQTKAIRALTRAREDLVAARTGIVNQLRAELERFWPGPLRLFSHMDAEILLAFLERYPSPADAHGLGVARMQAFLERERYSGGQHPTALMAKLRSAPRARIGELELAARRQLVLSFVAMIRTLNAQIKDLEREIRAQVRAHPDGPIFLSLFKSPNSVITAAELLAEIGDCRERYPTRDALAADAGQAAVAVESGKWKTAGFRRACNKRLRVAFCRLANSSRHWHPWAQDLYAQARRRGHEHPRAIRTVGRAWSRVVWQCWRNHTPYDPEQHRALQRHITVIIPSSSGPVPDLAATQRMAGAAVTHRAARTGRAQST

SEQ ID NO: 383983 - protein, 381 aa, unidentified
METLHSHCAGLDVHQKEIVVCIYIGNSETELTKEIRTFPTFTKHLFEMLQWLEELHITHLAMESTGIYWKPVFNILEDYFDITLANAQRIKNVPGRKTDVADAEWIAKLLRYGLIEKSFVPPSDIRELRDLTRLRKKMIGNMTAEKNRIQKTLECSNIKLGSIISDVFGVSGRKLLTRLVEQGYVNSHEVEENIHGSMIPKASQITESLFGTLNPHQIFLIRQSWNHILFLEESIEQLEEKIDELLSPYSEQVELLLTIPGVKKHATASIIAEIGVEMRQFPSAQHLASWAGLSPGNHESAGKKKSSRTTKGNPHIQSMLCEVAWAISRTRHTWLSGKYWSLAARRGKKKALIAIAHKVIKIIYHILDQRSGFIEYSKVLS

SEQ ID NO: 383984 - protein, 475 aa, unidentified
MKPSKTKTAKKKSKKSGPKRSLLNLPVAESPTVSAAPLGVVHPHAAAIDVHSDNHVVCVGPNQVETFGAYTVDLQAIVAYLKQHEVTSVVLESTGVYWIPLFELLEAEGFETFLIEPSQAGHCGARPKTDVLDCQWLQRLHTFGLLRPSFRPPESVLTLRGYWRQRQLLVRYAASHVQHMQKALEQMNVKLTEVASDITGVTGRRIIEAILAGERDAQKLAKLRDGRCAQSEQDYAKALAGTWRPEHLFALKQAYELYCFHHKQISACDEQIRVELVGLPNRAGDKEFQAQERQRGRKSNDLRFAATQSLFQALGVDLTLIDGIDVSTALVILAEIGVDVSRFPTEKHFTSWLRLCPHLDESNGRRKKGKKQKGKSRLAQALRMAAQAVSRMKIPLGQFYHRIKARLGGAGAITATARKLAVLVYRLLKYGAEYVRQSMEDYAAKMREQMERSLRRKAAQLGFELVAKEAEANPS

SEQ ID NO: 383985 - protein, 412 aa, unidentified
MTAINQFAAHVGLDWADKKHDVCVQFKNGERVFHVIEHTAEALDVWLTELHQKVKGRIAVALELKKGPVVYALQKYPFITVFPVHALSLARYRQAFSPSGAKDDPQDAELALELMLRYPQKIKAIEPDNADIRLLQQLVEQRRELVEDKRRFVNRIINTLKQYYLQPLEWFSHRGSLLLCELIIRWPSLQQLKRARHETIRNFLNAKGGRAMALTEQRVVSIDNAIPLTTDPSVIEANALMATALATQIKVVSEIIKTYDERIETLFDTLPDATLFKSLPGMGPCMAPRMLAALGDNRDRFNSAEEIQNYAGIAPVTERSGQKSWVHWRWQCAKFVRQTFVEWAAKTVNSSYWAKLYYQGLREKGKSHQSAIRALTFKWIRIIYRCWKTRTQYDEAKYLLALEARHSPLLKQ

SEQ ID NO: 383986 - protein, 379 aa, unidentified
MYRILKIGMDVHSTNYTLCAVEPRFGTEDRVLANIDIGPDYKLIVDFIKKIKLKMDPGNKDEIDVECGYEAGCLGYSLYYQLKGCKVRCTILAPTTMLTEKGSGIKTDHRDARNIAFCLSNGGFHPVHIPTPEENAVKEYIRMRDDHRDALKKIKQQIGALCLRFGQCYNGSYWTGKHVAWLRALKLSAMIRETLDEYLSTYDDLTARINRYDERIQEIAGQKEYNEKVRKLECFLGIKTHTALSLIVETGDFNRFAKGNIYAAYLGLAPGEHSSGESTGRLGITKAGNSHLRRLLIEAAEGICKGHIGQKSKSLVARQKGNPGDVISYADKANIRLRSKYYRLTNHGKKRNIAVTAVARELACFVWGMMTDHIHGKEA

SEQ ID NO: 383987 - protein, 469 aa, unidentified
MPPKTQKNKSKKKIAAKTKPPQDPTAGLQVMNPRAGAIDVGCAEHWVAVAPGSTENPVRRFGCCTADLESLLDWLVACGTDTVVLEATGNYWVVLYDLLEARHLRPVVVNPRYAKNMSGKKGDIPDCQWMQKLHSYGLFANSFRPSEPLRALRSYLRQRESLVAGAGQSIQHMQKALTEMNVQLANVISDISGETGLRIIDAILGGERDPRQLARLKDGRIRASLTELARSLEGHWKQEQLFNLEQARLTYAHFQEQILQCEQRIEQQMGAIQSRLPQGPSGSPCNPEPHGNQVPSQRLKPHPKYHLSTELRRITGVDLTAIDGIGALTAQVVLSEVGTDMNAWPTEKHFASWLGLCPDHRISGGRILGRSTRPVVNRARNALRMSAYTLEHSKSALGAKYRRLKRRLGAPRAIVAMAHHLARLIYRMLKYGQDYIDKGTEAYEAKYREQRVRWLEKQAKELNLKVVAA

SEQ ID NO: 383988 - protein, 353 aa, unidentified
MLVGELDNTSGATDMTSLTVHAGIDYHDDTIRVCVLNDEGEVLVNRDVNNNPGAVRDLVARYGIPKAIAIEACSGAAEFAEELRKQSQWSLRLAHPGYVRKLKQGPDKTDHGDAWLLADLVRVNYLPEVWLADEQTRQLRRLTHYRQGLAAERKNIKLRIRALLREERVKCPLNCRAWTKAWMEWLRIAALGRESRWIMNQEMKRLQRIENDMQEAEDRMQQATADDDLTRRLLEQDGIGLITAVTLRAEIGTFDRFRTGKQLAKFCGLTPCNASSGKREADAGLIRTGNRALRAVIIQAAQRLPRHVVKWKTMKDRLRQRKPANVATAAVANRWMRWLFHQMQPKEKQALVC

SEQ ID NO: 383989 - protein, 390 aa, unidentified
MIYVGIDVAKDKHDCHIISSNGEILCDNFQFQNSLDGFNSLMDLLTQTVGENLINVKVGLESTGHYSTNLVNYLKRQNLSVFALNPLSVNRFRKSLTLRATKTDKSDARYIAEKMITEDSSSYLDISYHIQSLKSLTRYRYRLIKMVQPLKNRFRRVLHLVFPEFEKIFNVSLLSSYELLEMFPGPSSICGARRSSLEKHLKNISHGRLVHKLDSLIDAAKNSIGSNLDGDIFELKHISSQIIFLSKELEDIESKLKEIMSLINSPITSIPGIGVTMGATILAEIGDINNFDYPEKLQAFAGLAPQIYESGKFKANITPMDKKGSVYLRNALFQVTTSAYVTSHFMRSYVDRKRAQGKHFYTAMSHGMKKMVRIIFAVLKKNSNFVEPII

SEQ ID NO: 383990 - protein, 406 aa, unidentified
MIFVGDDWAEDHHDVHVMDEAGARLASRRLPEGLAGIRAFHELTAGLAGQAGAGVVGIETDRGLWVDALTGAGYQVYAINPLAVARYRDRHHLSGAKSDAADAKVLADLVRTDRHNHRPIAADSAQAEAVKVFARGHQNLIWARNRHTNALRSALREYYPAALEAFDDLHDRDTLAILGRAPEPAAGAALTLAAIRSALQRGGRRRNVEARARQIHAALHTGQLAAPGPVAAAFAATTRAAIGIIAELNRQIADLETQLAQDFEQHPDAGIYLSLPGLGDVLGARVLGEFGDSPDRYTTAKSRKNYAGTSPLTVASGRKRTVLARHIRNRRLYDAIDQWAFCALRASPGCRAFYDQRRAAGDLHHQALRALGNRLVGILHGCLHHRTLYDEHTAWAHRQQNQQTAA

SEQ ID NO: 383991 - protein, 412 aa, unidentified
MTVCCGIDWAESHHDVALVNQDGQLLAKRRISDDLAGYRLLLDLLAEHGDSPETPIPVAIETAGGLLVAVLRTGKRKIYAVNPLAAARYRDRHGVSRKKSDPGDALVLANILRTDMHAHRPLPDDSDLARAITVLARAQQDAVWSRQQIANQVRSLLREYYPVALDAFSSKQGGLTRPEARAVLALAPTPSAAARLTLPQLRAALKRAGRSRGIDAEADRLKTALRAEQAHQPALVEEAMGQQLLALLTQLDASCKAVDDLTEAVESLFRQHPDAEILLSFPGLGVQLGARVLAEIGDDRARFADARALKAYAGSAPITRASGKKRFVGRRYIKNNRLTNAGHQWAFAALTASPGAAAHYRRRRDHGDWHAQAQRHLFNRMIGQLYHCLQTRQLFDEQHAFTSSPAGLAMAA

SEQ ID NO: 383992 - protein, 444 aa, unidentified
MAVRKQVFELMHPNAAGIDIGSASHFVAVPADRDDEAVREFKSFTEDLMAMADWLERCGIETIAMESTGVFWIPVFELLESRGFTVFLVNARHVKNVSGRKSDVLDCQWLQQLMSFGLLSGAFRPGEDICVLRALSRQRDMLIDCQARHVQHMQKALTQMNLQLANVITDIVGKTGQQIIRAIVAGERDPVKLAAFRDHRIHASEAEIAKSLRGTWRDEHLFALSQALRLFDTYQERIGECDERLAQALAKLARHDEVPEPNKRKGRAKNAPNFDIRTALFQACGVDLTRIDAIDVSTALKVIAEVGTDLSKFKTVKHFCSWLGLCPGTKISGGKRLSGASKRCANRLTQALKLAATGLLRSRSALGAYFRRLAGRMDKPKAIKAAAHKLARLIYTMLTKGTEYVDQGQDYYEQRYRIRVLANLSKKAASLGFQLQPVVTPEAA

SEQ ID NO: 383993 - protein, 413 aa, unidentified
MDVFCGIDWAEDHHDIAIVDRDGQLLARRRISDDAAGLTQLVALLAEHGDTAEDPVPVAIETPRGLLTACLRGTGRQVYPINPMAVARYRDRHSVAGRKSDHGDAVVLANILRTDSHAHRPLPADTELAQAVAVLARAQQDAVWARTGAHNKLRSHLREYYPAFLAAFADLRGGIMRAEARTILAAAPDPATATRLSLAQLKALLRKAGRSRGIDAEAARLREAFRAPQMRQLPLVEHAMGRQALALLRQLDAACIAADDLEQDVTESFNQHPDAGIITSFPGLGPLTGARVLAETGDDRSRFADAKGLKAYAGAAPVTRASGKTTTVLHRRVKNQRLAAAGYSWAFSAITASPGARSHYDKRRADGDRHAAAQRNLFGRLLGCLHHCLATGQHYDENTAFPPPAPAAAAIAA

SEQ ID NO: 383994 - protein, 368 aa, unidentified
MDRKSSKLFVGMDVHKESIDLATGEAQGEVRHYGAIGGDLGSLARVVRKLESQGRELVFVYEAGPCGFGIYRWLRSRGHECWVVAPSMTPRQASDRIKTDRRDCLKLCRLARAGELSPVYVPDAADEAMRDLVRTREDAVVMQRQARQRLAALLLRNDVRYNGKTAWTPAHRRWIAELKLPHAAQHIAFEEYVQAVDEAGQRVERLTQAIEAQSCDWRWAPVAQALQAFRGIRAIHGTRILAELGDLRRFARPRALMGYLGMVPSENSSGERRRQGSITKAGNSSARRALVEAAWAYRYSARVSVGIARRQSDLPKPITDLAWKAQLRLCARFRKLCARGLHRNKVVVAVARELAGFVWALGQQVAPR

SEQ ID NO: 383995 - protein, 402 aa, unidentified
MNAVGIDVSKGKSMVAIMRPFGEIVSAPFEIKHTASDIHSLVELINSVKGESRIVMEHTGRYYEVLAHQLSEANLFVSAINPKLIKDFDNDSLRKVKSDKADAVKIARYALDKWQNLKQYNVMDELRNQLKTMNRQFGFYMKHKTAMKNNLIGILDQTYPGVNTYFDSPARSDGSQKWVDFASTYWHVDCVRKMSLNAFIDHYQNWCKRKKYNFSQSKAEEIYGKAKELVPVLPKDAITKLIIKQAVDQLNSASTTVESLRTLMNETASKLPEYPVVMAMKGVGTSLGSQLMAEIGDVSRFTHKSAITAFAGVDPGVNESGSYEQKSVPTSKRGSSDLRKTLFQVMDVLIKTHPQDDPVYQFLDKKRTQGKPYYVYMTAGANKFLRIYYGRVKEYLSSLPES

SEQ ID NO: 383996 - protein, 346 aa, unidentified
MNKITRIGLDIAKNIFVLHAVNAHGKSVKRQTLSRSKVLSFFAQTEPCLVGIESCASSQHWAREIRQFGHTVKLMNPKFVVPYRKSGKNDTNDAEAICEAVGRPNMRFVSVKSVEQQAVCSLHTGRQFLVGQRTALINHCRGLLTEFGIIMPLGVDKVRRLFSEILDNENSSVPLLLKDLLQQHLQDLARLEHRIESIDKQLAEWAKTNQQAMTLLQMLGVGVITATAFAAGVCDPKLFENGRQFSAWIGLVPRQYSSGGKNKLGSITKTGDVYLRTMLAQGARSIVFNAKKKNDPFSLWIQRLLERAGMNKTVIAVAAKQARIMWAIMAKNQDYQPERICSPFSA

SEQ ID NO: 383997 - protein, 345 aa, unidentified
MQSMYYVGLDVHKKTISYCVKDVSGTIQSEGSLHATRFDLDHWMGTLPQPWTAAMEATVFTGWIYDHLKPHAAALKVAHPLMLRAIAAAKKKNDRIDASKICDCLRCDFLPECYMASTAIRERRRTLRYRNLLVRQVVQLKNKIAVLLMEAGVSYNKQKLHKVGYFRELLATNPEINDGLRSLLRLCRDTMVRLAKTESALVRSLERGALLAERVERLMTIPAVGPVTALTWALEVGDVERFSSIKKAVSYCGLCGAEKSSANVVQRTPLSKQRNKHLQCVLIEAAKMAPRISPQLALFYDREKRKGNANRATLAVARKLVAYLVAVDRRQKDFLVMERENQTAA

SEQ ID NO: 383998 - protein, 351 aa, unidentified
MKVTTIGIDLAKAVFQVHGVNERGQAVLKKKLKRAQMAEYFAQLPPCLIGMEACGSAHFWARKLRGYGHDVRLMAPQFVKPYVKTNKNDAADAEAICEAVARPNMRFVAIKDVEQQALLALHRVRQGCVKARTAQANQIRGLLAEFGVIVPKGLAHIALRVPELLEDASNELPGAFRVLVQDLLEQLKGLSKQVSELELRIKAAHQGSATSLRLQQVPGIGPITASAVLATVGNAKNFANGRQLAAFLGLVPAQHSSGGKQTLLGISKRGDTYLRTLLIHGARSVIRAVNNKAQANETGWLHKLLARRNPNVAAVALANKNARIIWAMLAHDQEFRPDGTRAGAQASSAAA

SEQ ID NO: 383999 - protein, 419 aa, unidentified
MSFKILKFNCCGLDVHKTWIYACIGITDSNNRTEYKQARFSSFTKGLNELCNWLAKYNCKDVCMESTGKYWIPVFNILEQHNLWVTLSHPKYTKPMKGNKTDRKDAKWICDLYMCGMVKPSFIPPADIRELRDLVRYRFKLTCMITGEKNRAQNCLTVSNLKLDDVFSDVFGKSSRSITEQILKHPGETFDVTPFVDGRCKTPIEKIQAAVDGAISKEQAVKLRQCLDHIDELNKHISEVEQEILRLSDKYEIALNLIRTVPGFNKNPLTAIQVLSEIGGDMSVFPTAKHLVSWAGCCPRNDQSNQKIKSTRISRAGSYFKPVLVQVANALIKSKKHLEFTNRYKRIKARRGHKKAIIAICRMILTAIWHILSDLKPYTPEGFLESRPVKEEKVLSISQALNLLKQRGYIIKEEPLSVS

SEQ ID NO: 384000 - protein, 416 aa, unidentified
MELVHPRCAGLDVSKRDAKVCVRIAGPGRAVARSTVTTWGAVTSQVLALREHLITEQVTVVVMEATGDYWKPFYYLLEDAPFEVLLVNARYVKNLPGRKSDVSDAAWLAQLGAHGLVRGSFVPPEPIRQLRDLTRTRTAIVRQRAREIQRLDKLLEDAGIKLSSVAADISGVSGRAMLEALIGGQRDPAELAELAKRRMRSKIPALTEALTGRFTEHHAFLARLHLDLIDQHAHAVEELTARIEVVLEPFRGIRDLIATIPGISFGVADVIIAETGADMGRFPSAGHLASWAGTCPSNNESAGRVKSTKTRPGNPYLKAALGVAALSAARSRDTYLAAKYRRIASRRGPVKAIVAVEHAMLIAIWNMLINGEFYGEPGGDFYTRRNPDKTKQRALAQLKKLGYDVTLTPVETAVAG

SEQ ID NO: 384001 - protein, 420 aa, unidentified
MKHLIGRELPAKTLVVAIDCGKASHRVMLASGEQGVIGEPVSLPTLREGVEELARLILAAGSEDRPVIAVEATGSLHHAWVAELERRFAGSLRLFAPSETQAARTGLGSRRTKTDDRDCAALITLARQGLGRPPEGATVAAMLGAVRHRRALVGVRKVTQQRLHDQLNALCPGLSAPVGHGRVLALEDTSGQAVLACAVEFAGRAPAPRSLIARAPGRLTKANASYWSARWKALLPPPADAELRARRLSGDLERWRSLARDIAAVEEQVAELLAAGPGQVLTSLPGVAQTRAAAFAAHALPIERFPSPEHLYSATGLAPSTYESATLRRRGRISRAGLAELRDALMGIAWGLSQNSPAFAARDRELRERGMAPIQARVALARHACRLCFALLQTQQPFDEERYVRMRHGASGDGVSGYAA

SEQ ID NO: 384002 - protein, 388 aa, unidentified
MELLSMEVLIKNCAGMDVHQETIVVCALNTDDAGEIQSEVRTFGTLTKDLFHLLGWLESKSITHVAMESTGVYWKPVYNVLEGYFDITLANAQRIKNVPGRKTDICDAEWIAKLLRVGLIEPSFVPSEDLRELRDLCRLRKKWVGNLTAEKNRIQKYLESCNVKLGTVISDVFGVSGRNLLRKLVNQGYVDAADIDESVKGSIKNKKSQVADSLFGTITPHQMELIRDCWEHIEFLEKSIASLERRIDEHLQPYKEEYELLQTIPGVSKTTSAALIAEIGVDMNQFPSAEHLSSWAGVAPGNNESAGKKKSTKSVKGNTHAKVALCEAAWAIARSRNTELSTKFWKIASRRGKKKACIAIARKILIISYHMLKNKQAYIEGGPITKAS

SEQ ID NO: 384003 - protein, 389 aa, unidentified
MNKPFPAIIPPATIRTDLGAIFITLELSRSRWVVTSLSPGGAEKMSKYSVPGGDLAGLMERFRLLVAKAKARTGRDFPIVTIQEAGLDGVWIHRALVKEGIESHVVDPASIATSRRRRRAKTDRIDGEALVRTLLAFKRGEPRVCAMVRTPSPVEEDARRIMRERKTLTGERVAHVNRIKGLLFAQGVSGYEPLRRDRRKRLEELRTGDGRELPRHLTAQILRELDRLELLLAQIKAVEVERDAELAQARETALPASAARLLEIRGIGPEFAMLLWSEGLYRHFDNRRQVAAYAGLAPTPWQSGAVDQEQGVSKVGNPRLRTTMIQLAWLWLQHQPTSALTQWFRIRVAHQGGRSRKPAIVALARKLLVALWKYVATGVVIEGAAMKPA

SEQ ID NO: 384004 - protein, 368 aa, unidentified
MKENISSNQTARNRALKETKEVFAFCIGIDLGDKHSDVCVLDSEGEIRKQFRLKMKGPDLQAYFSSIPRSRVAVEAGGQSRWVAELVEQCGHEVLVSNTRKVPYIYQSHDKDDPGDAYKLAELLYWKPRLLHPILHRSQETQADLSWIRARGALVESRTQLINTVRGISKSFGERLAKCSTESFTAKRADQIPAAIRGAVAPLLEMLDHLNEKIAYYDEMMKHIARTRYPKYCLLDQVAGVGVHTALTYMLTIGDPERFPKSRLVGCYLGMRPRKQDSGENRPQLGITKAGDVYLRKTLVNCAHHILGPRGQDSDLRRFGLRICERGGKNAKKRAVVAVARKLSVLLHRLWVTGEVYEPLRNSQRAAA

SEQ ID NO: 384005 - protein, 338 aa, unidentified
MEQITTIGLDLAKHVFQVHGIDGAGKVLVRKQLRRAEVVRFFAGLPACLVGMEACGTAHHWARELTRLGHTVRLMPPAYVKPYVKRGKTDAADAAAIAEAVTRPTMRFVAVKTVDQQSVLMLHKVRELLVRQRTMLINALRGHLAEFGIVAARGPGGVTAAIAALHEAQDGLPDLARQVLHSLIDQMRAIGGEIAQAEKHIMAWHRASEASQRLATIPGIGPITASAIAAAVPDAALFRSGRQFAAWLGLTPRAHSSGGKQRLGGISKQGDGYIRRLLVIGATAVIRFARQGNASKSWAAKLLERKPARLVSVALANKTARIAWAVLARNQSYTAPAM

SEQ ID NO: 384006 - protein, 344 aa, unidentified
MKITTIGIDLAKNVFQAHGVNEHGKTEKKKQLKRGQVAEFFANPPPCLIGMEAGGSAHYWARKLEGFGHTVKLIAPQFVKPYVKTNKNDAADAEAICEAVARPNMRFVPIKNVEQQAVLSLHRVRQGFVKARTAQANQIRGLLGEFGIIIPQGITNIAKRVPELIEDASNDLPGSFRLLVQRLMDHLNELDKQLDELEAQIKAWHRESAASCKLEKIPGIGPITASALVASIGNAKNFDDGRQLAAWLGLVPKQHSTGGKSKLLGISKRGDSYLRTLLIHGARSVILSASKKVDKSRWLRKLMERRNTNVAAVALANKNVRIVWVLLVNEREFRSDYTPALAVA

SEQ ID NO: 384007 - protein, 346 aa, unidentified
MSKDLYIGVDVSKSWLDLAYYDGVAVDWKYGHIRVDNKESGYNQISKWLRKLGVNRERVLFCMEHTGLYCQNFRLWLERKGYVYGMVQPRKMHRFEPDLGENERALDRIKTDEMDSFRIAIYCKEHCRKIKASPSKLPGEAYFKLKRLMAERKQYTRQTVIYKQHLHDISVYDTEGSRERKKVGLNILTEQIRQTNREIQRIIESDSALKRNYELLCSIKGVGLVVAVETIILTENFTSITNPRKYACYIGIAPAKKESGVSVRGGEHISRKGFTQAKADLSQISLVAIRYDPGIRTYWERKKAEGKHSGVVLNAVKFKLILRMFAVIKRQKPYIEMQAYINKRRT

SEQ ID NO: 384008 - protein, 347 aa, unidentified
MQDTTIAVDLAKSVFEIAVSTQPGKVAKRHRLSRVQFSRFLAEQAPATVLMEACGTSHYWGRQAQARGHRVELLPPHAVRPYVLRDKTDGTDAKALLEARRNEAIHPVPVKSVNQHALTVLHRLRSNWMRTRTARLNALRGYLREHGIVIPVGARQVVPHVWAVISEVDSGLPDCLRPALAEAAREIGELEARIKAIERQLEQLARDSDVIARLRTVPGVGLLTATALVASVGDIERFPSGRHFESYLGLTPRESSSGLRRRLGRISKRGDPYLRMLLVHGARSVLWHAKKAQGEPDSLRRWGLERQAARGHHKATVAVANKLARIVWAVWRNERDYHGTTTEVNPR

SEQ ID NO: 384009 - protein, 363 aa, unidentified
MRFYKNQHQFYIGIDLHARTMYICVINNIGETVFHKNMECSRDNLELVTNTFGKDIVVGVECIFTWYWVADFCAENGIDFALGHAYYMKSIHGGKTKSDKIDSEKIANMLRGGMFPIAYAYPKEKRAVRDLLRRRLFFVRQRAELSVHLQNTNHQYNVNEPLTSSRMRSEVYRNTIPQKFSDPATLKMVNADLAMFQSYHDIITKLEFQIEDSMEVQDPVSYSIINSVPGLGFILSLTILYEIDDIHRFSDVGKFISYCRLVKCSHESAGKKEKGGHNKIGNVHLKWAFSEGAVLFLRNNERGQRWHDKLVQRYGKAKAMSIIAQKLGRTVYYMLKRKEAFNPDKFYGDKKIENKDSGGEHLA

SEQ ID NO: 384010 - protein, 316 aa, unidentified
MNKENPTEINIGIDTSQSQLDIYVRPIGVYFSVDNTPKGANEAVKRIQTYQPTRILIESTGRLEVCFVCAAHKAKLPVVVCNAGQVRQFAKAAGRLAKTDRLDAQDIAHFGEAMRPALSALKPEKLRQISDLIAVRSQCLDMSTMQKNRLQRMQTSVHKPIQRILKAIQKEVERIDQQIDKLVEAIPQWRSQRDLMMSAKGVGKVVAYTLMSELPKLGKLNRKEIAALVGVAPINRDSGSFRGKRRIYGGRRKVRTVLYVSMLSATQYDPKIKAMYQRLLATGKPKKVALIACVRKQLTILNAMMKNGTPWNENLA

SEQ ID NO: 384011 - protein, 463 aa, unidentified
MKHHPKHERASKKEPVSPSLLERIQPDAAGIDCGQNSHFVAVPPDRDPQPVHEFRTFTAELERLAEWLAHCRIKTVAMESTGVYWIPLYEILEQRGFAVVLMNARDVHNVPGRKSDVKDCEWLRELHSVGLLRASFRPAAAIVPLRAFLRQRQTLVEEAATRIQRMQKALTEMNLKLHTVLTDITGHTGLKIVRSIVAGERDPERLAAYRDPRCHASHGEIVAALTGNYRAEHLFALKQNLAAYEFLLQQIAECDREIEALLTQLADQQPPPAALLPQARRNQVSKQAPPFDIRHPLHRLTGGADLSQIDSIGPYAALQLVAEIGPDMHRWNSAKHFTSWLSLAPNNKISGGRLLSSLTPPSANRAAAILRRCAMSLTRTSTALGAFYRRLAARAGKAKAITATARKLALLVYRVMSGNLIYDDPGATAYHQLHRARELKALCGRARILGFHLVDQATGAVTA

SEQ ID NO: 384012 - protein, 323 aa, unidentified
MNKGIKYFGLDISHLVFDVIDSDGNYYQFKNNEFGFKKFTKLLNTESHCVMEATGYYHYQLAYHLLESGIKVSVENPLAVKRFIQMKLSKIKTDKSDSKLICEYAGQVELKLWQGNSMTEIECLQIVRALSVYTKQSTMLKNKLHGEAVLGNPSKAVVSSLNRSLKQVKKELETLESKLLTLVKQLHQDLLTRLKTIPGIGPKTAIMLVVLTGGFDRFSSASELCSYAGLTPVIRQSGSSVSGRPRISKIGNQKLRNLLFMCSFNACKYNKACRDLYERLVAKGKSKKLALIAVCNKLLKQAFAITKSGLIYDDTYRSVLVKN

SEQ ID NO: 384013 - protein, 341 aa, unidentified
MMIIGCDFHPRFQQVAFIDQETGEYGGLRLSHPEEAERFYRSLVGGQVRIGAEATGNFRWFRQLMQELGHEFLLGDPSAIRAASPRRQKTDKRDARHILNMLVEDRFPAVWQPPVENEDLRQLLLHRCRLVRFRARIKNQLDSMAKNEGLLSKRVWCAMRRKQIEELPLSGWNVERRKDLLFLLEELNRRIEPLDEAVLKAAEENPEARRLMTHPGVGPVVSLFYVLTIGDWQRFPRGKHVASYLGLIPAEESSSDKRRLGHISKQGNTLLRWLLVEAASKAQKYDPSWHRQYVRLSMNKHHGVAKVAIAHKLAVRLYWMLRSGQDYKQVMERGSHAGQSV

SEQ ID NO: 384014 - protein, 332 aa, unidentified
MSIIGCDLHSRYQVIAMLETETGEVITRRLEHEDGEAKGFYAGLGKSALIGIEATGYTQWFERLAAELGHELWVGDPAEIRARAVRRQKTDTRDAEHLLDLLLTKRFPRVWVPTPEERDFRQLLKHRDKLVKMQTSVRNQLHFLAMSQGVCRKQKLWSARGRQELEGLGLGAWASRRRQELLELLDRLGPRIEELDGAVEAEAARRPEAVRLMGQKGVGPVTALAFVLTVGPVQRFPNSRKLVSYLGLNPREASTGGHQRLGHISKQGNEMMRWLLVEAGHAAAQYDEELRRQYQRLQFRRGGKVAKVAIARRLAVRLYWRLRRYAAGSHVQ

SEQ ID NO: 384015 - protein, 364 aa, unidentified
MENITHIGLDVHKDTIAVATLRPGAASCDEVTIPNSPEAIRRLFSRYPDRTTLRACYEAGPTGYDTQRLLAALGVACEVIAPALVPRRAGMRVKTDRLDARNLARLHRAGELTAVRVPSPEEEALRDLIRTREDLKADRRIARQRIRSFLLRQGRAYPNGAGTWRTRHLRWLAAQQFAEPAAQATWHHLLAAHTVRVSQLEAIDAEIAAAAACEPLAQAVARLRCFRGIDTLSAATIVAETCDFRRFATASSFMAFIGLVPSEHSSGASCRHGSITKTGNRHIRRVLVEAAWSYRHRPAIGRELAGRLEGAPPEVAAYSWAAQCRLHATYRKLAPTRGPNKAVVAVARELSGFAWGLMTERIAA

SEQ ID NO: 384016 - protein, 390 aa, unidentified
MKPDGDKHSSFSVPNNLPGAEALVDRIVEVLQKLFIPKVVIGMESTSVYGDNLMYFLRETGKLSGFEKKLHMLNPKQVKKFKDSYSDLPKNDFVDAFIIADHLRFGRINKEVYMSDYRFEALKALTRARHQTVQSLTREKQRFLNQLFMKFSGFTQENIFSNKFGAAASAILEEFESVDELAYMDPNELAAFIQKHGKGRFENVDEIVSVLQKAAKNSYRPPTVIADSVNQILAISMSTIRLLQGQIKEYDKAIEKQFSTIPNTLTSVKGIGPVYAAGIIAEVGDISRFPSQASLAKYAGLTWTQNQSGGFEAEDTKLIKSGNHHLRYYFCEAANSLRKCDPEFRRFYNLKFREVTKHQHRRALALTARKLVRLVYALLKTNRLYIPPEE

SEQ ID NO: 384017 - protein, 373 aa, unidentified
MKYSTVYVGMDVHKESFSLCCYTNEKEQAEYPQKVDGHYSKVINYIEAMRFHYGDDALFICGYEAGCLGFTLYHQLTDHNVKCVILAPTTMLQQKGKKKVKTDKRDAALIARCLAHHDYSPVHIPTEQDEQTKEYIRMRDDHKLALKKVKQQILSFCLRHNYRFDGTTNHWTQAHLKWLRALKPDGLYAEILKEYLLAYDNLADKLERLDKRIEELAADEAYQENVQKLSCFIGVKTVTALAVFTEVGDFKRFSSAQHFASCIGLTPGEDSSGEDQKHLGITKAGNRHVRCLLVEAAQSYSRGQIGFKSKALKARQNGNAPEVIAYADKANERLRRKYYRMVLKNNKKTNVAKTAVARELACFMWGMITGNVA

SEQ ID NO: 384018 - protein, 369 aa, unidentified
MAKSITYVGLDVHKDTIAVALADAGLRGEVRQHGKILNTPAALKALAVKLIRKGRDLQFCYEAGPCGYGIQRQLTGMGHDCAVVAPSLIPRKPGVRIKTDRRDATNLAKLHRAGELTPVWVPDQAHEAIRDLVRARQAAVRTLRQARQQLSGFLLRQGYHYHRPAWTQLHRRWLASLKFEQAVHHIVLEDSIAAVEAATARRDRLEAHIEAALPEWSLASVVQALQALRGVGLVAAATLVAELGDITRFTNPRQLMAFLGLVPSEHSSGGTRRQGGITKAGNGAARRMLIEAAWSYRFPARISREQLLRQERLAKPIREIAWKAQERLCRRYRKLARAGKQPTVITAAIARELAGFIWAIAKQVQPMAT

SEQ ID NO: 384019 - protein, 360 aa, unidentified
MFTERTSVGLDVHARSVAAAAIDGVTGELFQAKLTPSYDHITSWLKDKPGPVAVAYEAGPTGFGLYRHLSAAGIRCEVAAPSKIQKPAGDRVKTDAKDAIHLARLLRLDELTSVAIPTVDQEAARDLVRAREDCRADMMRARHRLSKLLLRHGIVYYGGTAWTGRHDVWLRHQRFENPTTQVTFESDYDAVLVTTARRDRLDRQIETMAADSEFTPVVRRLWCLRGISTLTAFALAVEIGDWHRFTGRTIGSFVGLVPSEYSSGSSRAQGSITKTGNGHARRLLVEAAWHHRPRYQPGKTIRDRWDLASPAARARGDLGNRRLHARWVKYIDRKKKATVANTAIARELAGWCWSLALLEE

SEQ ID NO: 384020 - protein, 363 aa, unidentified
MFIERTSVGLDVHARSVVAAAIDGATGEVFQRRLAPVFAEIGAWIEQLPGPVAVAYEAGPTGFDLFRQLSAAGIRCVVVAPSKLQRPSGDRVKTDARDAMHLARLLRLDEVTAVAVPSLAQESARDLVRAREDCRGDLTRARHRLSKLLLRYGLVYTAGAAWTQAHDAWLRKFALPQLEGAATQMAFDAAYETVLMVKARREKLDAAIEAMAADSEFTPIVRRLGCLRGIGMLTGFALAVEIGDWHRFTGNTIGSFIGLTPSEHSSGASRVQGSITKIGNSHLRRLLVEAAWHHRPVYKIGSALLSRWQLAPAEAKARGDAGNQRLHQRWVRFIQRRKRNTVANVAVARELAGWCWSLAVVDQ

SEQ ID NO: 384021 - protein, 416 aa, unidentified
MQIKNETLVVGIDIGKKFQFARAFDNRGLELGKLLRFENSAQGFANLDAWLQGIMQKHEMTEVIVGFEPTGHYWFNLGDHLVACGHKLAIVNPFHVKCARELDDNSPSKSDRKDPKTIAMLVKDGRYRDVYIPVGAYQELRELVCERERLQERLSALKNQIVRWQDIYFPEFTTVFKDWSKQAAWLVLRHLSTPQKVIDAGAQEILRTWREEMKRPSLKRAERLWLVASQSVGRKEGTMAAISSLQFVMTEYELITMRLEQLKEEMAECLSQIPNAYRLLSIKGMGVVAAAIIISEIGDISRFTDPRQLIKYAGLNLRENSSGKHKGKTTISKRGRRRLRLGLFQAMIPILATNAEFRALHKRNTTRSQNPLTKMQSLIDLCGKLLRVTFALLTKGIAYDPEKLALETTTDTVRAA

SEQ ID NO: 384022 - protein, 362 aa, unidentified
MLKSTTIIAFDQHAATTMAAVLLPAHRTPALHPLKSDPPTILRFVARLQRQGAVTCCYEAGPCGFELQRALTAKGISCDVIAPALIPRRPGDRIKTDRRDAGQLAVLYRAGALTAIHIPTEQEEAARDLLRCREDIRADLLRARHRLSKFLLRHGRRFTATKKAWSKRHDAWLRAHTWPLPALDQTHRAYLRAVDEVLARLRDVETDLQALLALEPLRPRVQRLRCFRGIDDLTALTIAAELGDPRRFATAPSTMAFVGLVPSEHSSGSKRAQGGITKTGNAHLRRVLVEAAWHYRHHPFVSATLRARQRGAPAQVIARAWTAQQRLHRRYQRLAARGKPKQHVVTAVARELTGFVWAALTQ

SEQ ID NO: 384023 - protein, 321 aa, unidentified
MQNETCVGIDVSKEKLDVAVGSSGEAWQVANDEAGHGELLARLNKVRPRVVVLEASGGYEAIVAGTLWEAGLQVAVVNPRQVRDFARGMGKLAKTDQIDARALALFGEKVPIEVRTPLDAEAKELQGMVLRRRQLVEMLTMEKNRRGLVAAGRARKSLDKHIAWLEEAIRRANDDINQTVRKSPLWREQEDLLRSFKGIGPVSARTILVELPELGRLNRRKIAALVGVAPFNRDSGKFRGRRMIAGGRSHVRTVLYMAAVTAARSNPVIRALYQRLLSAGKAPKVALIACLRKILTILSAMMRDNVHFAAAAHLPRVEKVS

SEQ ID NO: 384024 - protein, 345 aa, unidentified
MLYVGMDVHKRTLQVCALDESGAKTIECRIGNDKESLTGLFGRFTQPVSVALEATHNWGMIYDLLVWMGHDVHICHAREARLIGMSRVKTDRNDALRLAMLLKGDLLPEAYVPSTDCRALRELVRSRASLRRMSTRIKNRIHAILTSNWIKHGYTDLFGKKGRQFLQALEVNDTAKTIIISNLELLESIERQIAHLEEKIKHRAHVDLRAMLLTTIPGIAEFTALVVLAEIGDISRFYCSGSLVSYSGLHPSEDSSGETVRRGRITKEGSRWLRWILVEAAQHAIRQDGKVRDLYMRLLPKKGHNKAIVAAARELLVAIYFMLVRMEPYRPDGKSIRKALTGQAR

SEQ ID NO: 384025 - protein, 346 aa, unidentified
MALAKDIDYVIGVDTHKDSHTAAVVNVTGGVISALDVTATEVGYRRLLALANRHAIGRRAWAVEGTGSYGSGLAAFLAARGERVLEVERPRRPRQKPGKSDQLDAIAAAREALADDKLAMPRMRGAREALRVLLATREGALKARTQALCQLHALVVGAPELLRSRLRRLSTEALVTRCAQLRRQPDQCLELQITTQALRSVARRAQALEIEAANCEKELGRLVDELAPALVNQPGIGPFCAAQIICAWSHHGGLRSEAAFAALAGVAPIPASSGQVIRHRLNRGGDRQLNRALHTVVMWRMNFHAESKAYTLRRRAEGKSDREIRRCLKRHLARRIFRLLKDLDSL

SEQ ID NO: 384026 - protein, 348 aa, unidentified
MQSKSQIRSIGIDLGKTTFHLVGLGNRCQVVVRKKFSRQQLLLYTANLPSSLIGMEACVGSHFLGRALREQGHEVRLIPAQFVRPFVKSNKNDYRDAEAIAEAVERENMRFVPIKTEDQLDVQALHRVRERLVSRRTSVINQIRAFLLERGISFAKGPASLRRQMPEILENADEKLTTRMRRLLDFLWQEWKHLQLQIESLSEDLELIASSDEACARLQQIPGVGPLVATAVVSAIGNGAAFHKGREFAAWLGLVPGQWSTGGKTKLLGISKRGNPYLRKMFIHGARAVVLRAKREGSYLGQWMKSLEGRAARNVVIVATANKLARISWAVLSSGENYHPMPAVAVAS

SEQ ID NO: 384027 - protein, 337 aa, unidentified
MMYSGIDLHSNNSVVAIIDDADRIVAQKRLPNDITKIVGFLARWQDDLAGVVVESTYNWYWLVDGLQDAGLHVHLANTAAIKQYDGLKHSGDETDAQHLAHLLRLGILPTGTILPREHRVVRDLARKRMQLVNCRTTHVLAVENIMARQLGERMTSNQIKQLTADTIDSLPLAADVGLAIKANVAVIATLQSQIEVLEKRLQERVKPRPQYGLLTSVPGIGQTLATVIFLETGPIDRFADVGNFASYARCVDSVHTSNRKKKGEGNVKNGNRYLAWAFVEAANFARRFCPEAKRFHERKKAKTNNIVATKALAHKLARASYHILKEGKPFDATRCFA

SEQ ID NO: 384028 - protein, 343 aa, unidentified
MQTITTIGLDIAKSVFQVHGVGAGGQVMVRRQLKRRYVLTFFQKLPPCLVGIEACGSAHHWSRELQALGHAVRLIPPAYVKPYVKRQKNDASDAEAICEAVTRANMRFVPTKTPEQQSGLVLHRARHLFIRQQTAVINAIRAHLAEFGIVAPVGRHGVEELLTVVADPNDRRVPEIARACLLAFGAQLRRIKEQILEFDRLIRAWHRSNEMSMRLEEAPGVGPVLATALVAAVADPKSFRSGRNFSAWIGMVPKQHSSGGKNRLGNISKQGDRYLRGLFVAGALSIIRYAKIHGTNHRPWLTALLARRPTKVAAIALANKIARMVWAMMARGERYKEPAALAR

SEQ ID NO: 384029 - protein, 438 aa, unidentified
MSNKVIFNLDELFISVGIDVGADFSWMSIALPNQQFVGKPYKILHNSIDSLTTAVSKIKEAEELYSLESRIFLESTGIYHYPLFCYLRDKGFNCSVINPIITKNSTNINIRKVHNDRFDSKKAALVGLKPDLKVSLMPSDLALNCRNLCREYYDLMDNRSAYVNKLQGELRMAFPQYLGIFSKVTINTSLTLLGTYTSPSAFLEADKQEIIDIIKSTARFGLTYAQNKYNAIIQAATDANQFGYIIDSNIKRIRLYISFIRKYDEEINSILESLHELVDANEDSDFVKQIHLIETFKGAGFLSAVSIMGEIGDFSAFSKPKQLFAYFGLDPAVKQSGKFEGTKVQMSKRGSAIARRVIHTLTLQSISISRNREAKNPVLREYYLKKCDSKPKLVAMGAVSHKVCNMIFAILRDNKPFKIIAPQEHIQQYNAAKCDIAA

SEQ ID NO: 384030 - protein, 350 aa, unidentified
MTVIKQVIGVDIAKDTFEVRFGSITDHQEERFLGSATFPNEKRGFRKLLEWVKNQLVSQDAPVWFVMEATGAYYEHLAYFLTGYHKQVVVLLPNKMKHFAGTLDAKSKTDRLDARSICQFGLERPLSPWQPPSPQMKLLKELTREYNTIQEMATQVKNQLHAKDHSYHPSVETTKRLRVQLRLFQKQLKSIEQQLRSVVNDDDNLRTRIANITSAKGIGFMTVDTAVAETNGFALITSEKQITSYAGLDIVVRESGKRQGKPALSKKGNKHLRRAVFMPALAACRFNPLLKAFYLRLVRTKANKKVALLAVARKILCLIYTLWKKNVPYDPNYRHSNIRPLSNNSILQTT

SEQ ID NO: 384031 - protein, 356 aa, unidentified
MAEGSWVGVDLHARSAVASVVDGVSGELWTMRVPAASGALVDWLLGLPAPVRVAYEAGPTGFELARACGRVGVECVVAAPGKIPRAAAERVKTDRRDAERLARLLRLGELTAVRVPDELEEAARDLVRAREDARADLMRVRHRLSKLLLRHGLLWERSAWTGEHERWLMGLRFAGPLAVCFDESYGAVLEAKARRDRLDRAIVELAAEPPFAEVVARLSCLRGVSTLTAFALTVELGDWRRFKPGSLGAFLGLVPSEQSTGGQRRQGPITKTGNAHARRLLVEAAWHQRRPLRPSIALNSRRAGQPAAVRAEADQIARRLHRRWHELERRGKRRTVIAVAVARELAGHCWKLATMP

SEQ ID NO: 384032 - protein, 368 aa, unidentified
MKQVTTYVGVDAHKKDLFIAMLVGDRTIPVTWQVANEPQAVRRLVRKLEREAPGPVRVCYEAGPCGYALQRQMTTTRVGCQVIAPALIPRKPGERIKTNRRDARKLVELHRAGLLTEVRPPTPEAEAVRDLCRARDDAREDLQRSRHRLGTLLLRRGLHFNGRNWTKAHRRWIESLAWTHAPERVVVDDYLLAIDHLEARLIELDTQLTVLAQTDPYREPVGWLRCFRGIDTLTAILILAELHDFRRFPSPRALMAYLGLVPGEDSSGEKHRRGRITRTGNALVRRLLVETAWHYQHRPGVGVGLTRRRKGQPTRVIAIADKAQQRLCRRFRRLAEQHKPAPKIAVAIARELAGFLWAALQPAPRPAR

SEQ ID NO: 384033 - protein, 409 aa, unidentified
MIYCGIDWAERTHDVALVDDSGQLLAKRHIADDAAGYRILLDLLAQYGDTEDNPIPVAIETSRGLLVAVLRTGKRQVFAINPMAAARYRDRHSVSRKKSDPGDALVLANILRTDMHAHRTLPQDSDLAQALAVLARAQQDATWNKQQSANQLRSLLREYYPAALDAFAKWNNGLCRPEARELLKTAPTPTRAARLTRTQIQATLKRAGRKRGIEAEAERLREVFRAEWAHQQPLVEDALGKQMLALLVQLEAACTAADDLTEAVEEAFPQHPDAGVILSFPGLGVQLGARVLAEIGDDRQRFADARGLKAYAGPSPITRASGKKSSITRRWVKNDRLNHAGYLWAFPAITASPGAKAHYRRRRDDHGAWHAAAQRNLFNRMIGQLYHCLQNHTLFDESTAFPTELAAAA

SEQ ID NO: 384034 - protein, 419 aa, unidentified
MAFKIFRKNCCGLDVHKTWIYACIGITDTHGRTEYKQARFSSFSKGLRELADWLAKYSCTEVCMESSGKYWIPVFNVLEQSCYVVLAHPKYTKPQKGNKTDRKDAKWICDLFMCDMVKPSFIPPPDIRHLRDLLRFRLKLTYQITSMKNRALNCLTVSNLKLDDVFSDVFGKSSRSIIQQILEHPGETFDVTPFVHPRCKHPIEEIQAAVDGAVSPEQATKLKICLDFIDEQQKRIAELDAEIFRLAEPHTAVLEFIRTVPGLSKDPLTAIRILSELGADMSVFPTSKHLVSWAGCCPRNDQSAQKVKSTRISRAGSYLKPLLVQIANALLKSKQHPEFKERYRRIKARRGHKKAIIAVCRMLLTAIWNVLSKLEPYSAKGYLADKLTEHSVVISKSEGLALLRKRGYIFRDELTDSTS

SEQ ID NO: 384035 - protein, 345 aa, unidentified
MKITTVGIDLAKDVFQVHGVDAHGKAVLRKQLKRKDVVSFFANLEPCLIGMEACGSSHYWARKLAALGHTVRLMAPQFVKPYVKTNKSDRNDAEAICEAVARPNMRFVPVKTGEQQAVLSVHRARQGFVKARTAQANQIRGLLAEFGIVIAKGMGHIAKRLPEILEDGENGVPGMMRELLQRLGENLKEMDKQVGELERQIKLWHRENEQSRKLEAIAGIGPITASAYVASVGDAKSFKNARQVAAWLGMVPRHEGSGGKVKPGRISKRGDVYLRTLLIHGARSVIRQFERKPDQAEGWLKELLARRHKNIAAVALAAKNARIAWALLAHGRSYQHDYVATRKAA

SEQ ID NO: 384036 - protein, 420 aa, unidentified
MAGVQAHDEVLYLRAAGVDVGKRFVMVCVRTPDARRAGRWVLETQRFDTTAGAIRGLRDWLVQRSVEVVALEATSDYWRAVYYPLQDAGLNLMLVNPAHLRGIKGRKTDPSDAAFLARAAASGMVMASFVPERAVRELRELTRRRTEIGADRGREIQRLEKELEDSGLKLTSVLCDVTGVSARRILAALITGERDPARLAELTVGTARAKIPALTQALDGTFTDHHAFMCSHFLAQIDHLASLITQLDERIAELLRDHDQDLTNLDTIPGIGRTAAEIIISETGGDMAPFATAAHLASWIGVCPGTNESAGINKSGHTRHGNANLKRVLGTAAMAAIHQKDSYYAVYYRRIAARRGRDRALVAVMHKLVIAIWHVLADKVAHRDLGVDHFTRRNPQRTMRQIIKQANAIGLAVRFDPVTA

SEQ ID NO: 384037 - protein, 347 aa, unidentified
MRFYTKAHKHYCGIDLHARTMYVCVLSSEGVVLLHQDLPCNAERFLAVIAPYRDDLVVAVECIFTWYWISDLCSREGIAFVLGHALYMKAIHGAKAKNDRIDSNKIAGLLRGGLMPQAYVYPAEMRATRDLMRRRLHFVRQRGSLLAHIQMTHHQYNLPSPGKRITYRANRDGLGEGFDDISVRDGIAADLGLVDHYELIIGNLELAVVRQARHHDPNAFQLLRSIPGVGKVLSLTILYEIHDIARFERVQDFASYSRLVKCQKSSAGKVIGSGGAKIGNAYLKWAFSEAAVLFLAKCPAGKTLLTRIERKHGKAKALSILAHKIGRAVYFMLTRKTAFDLDRFLKS

SEQ ID NO: 384038 - protein, 353 aa, unidentified
MEKVAEFTLGVDLGDRQSVVCIIDGSGEIVQSLKINTTMKAFRKFFSNYSGQLVAIENGTHSPWVSRLLQGMDCRVLVGNARKLPSIWRNPIKTDFRDAEMLARIARFDPNLLYPIFHRDEQAQADLAIIKARDMLVQSRSGLVNHVRGAVKSMGGRIPACNADSMHKKAVDHIPEILKPALLPVIEQLEKLTKTIKEYNRQIENLSKEKYVETQVLRQVPGVGPVTALAFILTLEDPARFRKSREVGPILGLVPRKDQSGEMDKQLRITKCGNVYLRQLLVNCAHYILGPFGPDCELKRFGERLSQRGGKIAKKRAIIAVARKLAVLLHRLWVTGEVYEPFYNQQAPMQKTA

SEQ ID NO: 384039 - protein, 407 aa, unidentified
MNAVGIDVSKGKSMMAALRPMGEVVLQPKEYPHTEVGLERMSLDILALGEDTRALMEATGRYHEPVAAALHEYGIRVTVINPLFIKQSGGGSIRKVKTDKADAMKIAKYALDNWVDLREYTPMEAIREQLKLCSRQYDLYMKNVVALQNNLISLTDKVFPGVNELFTSPERTDGSQKWIDFVIAFWHCECICLVSQAAFTERYRKWCKRKRYHFNERKAAELYMDSMGHITTLPKNSNTKLLITTAAKELASAKATLAVLRSEMTRLAQQLPEYETVRAMYGVGETTAVQLMAEIGDVRRFPRRSSIVSFAGVDPAVDDSGKHISKSNPTTKRGSPHLRKTLYQIVCTYLRKAPADEPVYQFLDKKRAEGKPYFVYMTAAQNKFLRIYYARVKECLIAADTKELSAD

SEQ ID NO: 384040 - protein, 350 aa, unidentified
MELATMKTEYVCGVDLHSRSMYICVMNQKGDIHLHRNIRNDFQFFKSLIKDYERNISVGCESMHSYYWLADGCIENKIPFYLGHAYYMKTIHGGKKKNDKLDSKKIADLMRANHLPVGNVYPKKYRATRDLLRRRIRFMTIRAEAYAHIQTTFRQNCLIISPKDVKDKKTRRELIDKIDTIDIQKSIELDLDVIDNFDNLLKPIEAKIRAQAKLHDRTSLNLLLTIPGIGDMMSLVILYEIGDIHRFKSPQNFSSYCRLVICERESGGKKSRGGFQKIGNPYLKWAICEIIIHAPSTSPVIKNYYEKLINKSGKKRAQRIMTHKFGVAIYYMLKNKQGFDEQKFIRSDMK

SEQ ID NO: 384041 - protein, 472 aa, unidentified
MEEAAMKHNQQRARSGRKSRGSISLLERIQPDAAGIDCGQNSHFVAVPPDRDPQPVREFRTFTADLHRLADWLAQCEVKTVALESTGVYWIPLYEILEQRGFEVLLVNARDVHNVRGRKSDVKDCEWLRELHSVGLLRASFRPAATIVPLRSLMRQRQTLVEEAATRIQRMQKALTEMNLKLHTVLSDLTGQTGLKIVRSILNGQRDPEQLATHRDHHCHASHQEIVAALTGNYRAEHLFALRQNFAAYEFHLQQIAECDTAIEKLLAKLAEQQPPPSGPLSTPRRKRGSKHAPTFDIRTSLHRLTGGADLSQIHSIGPHAALQIVAEIGTDMRRWPTEKHFTSWLTLAPNNKVSGGRLLTSRTPPSANRAAVILRRCAMSLGRTSTALGAFYRRLAARTGKAKAITATARKLAVLVYRVLSGDLIYNDPGAAAYHQLNRARELKSLRKRAKLLGYQLVNHSTGEVLSIPVS

SEQ ID NO: 384042 - protein, 285 aa, unidentified
MITIGIDPHKDTHTAAAVADGTGQLLAELTIPGTAEGHERLLAWAHELAGEGGELRFALEDCRHVNGRLERFLLGAEQLVLRVGTRLTARERNTARTYGKSDSIDALAVARAALREPNLPRATHDPKLRELKLLVDHREDLVGERTAICSRLRWLMHDLDSGLEPFARTLNRPDTRRGLSQRLGRYGEGVQVRICRELLARVGELTRAIDALRAEIAVLVRPMAPGLLALSGVGDLIAARLLVEVGGPRRFHSDAALARHAGCAPIEVSSGRYARHRLSRMATAS

SEQ ID NO: 384043 - protein, 373 aa, unidentified
MNNSITYVAMDTHKKQHRVAIAYPNDEVIVEFSVKNTPPEIRKMVRKIKRNAPGEIRFCYEAGVCGFTLQRRIEALGCKCSVIAPSLTPRKPGERKKTDRRDAKKLLGLFMADMLTEVYPPNEQQEAARELTRCREAAQENLKRIRHQLQKMLVRHGYVFTDGQHWTQKHYRWLEAIQFDQPLLQEVFDCYFTEMRHCLQRVQTLDKELEKLAQSEDYREVVGILCCFYGIKTLTAISIIAEVFDFSRFASARDFMSYLGLTPSESSSGEKEHKGPITKTGNKRVRRLLTEVAWHHRHAYGVSNVLRKRREGQPQWAIDIAERAGIRLRRRYRRLIHRGKLPCKAVTAVARELAGFIWSALIEYEARKKRKAA

SEQ ID NO: 384044 - protein, 324 aa, unidentified
MLYAGLDIHKSFTQAILMSETGEVIKKGKVETSNEGLRNFFGGYTDVKIAIESTGIWQPVYEILESLGYDVRLSHPLKTKAIAYAKIKTDKIDAKVLADLLRAKLLPESYVPSSDVRALRNICRERKSLVCDRTRWKNKLRAELYKMRVEGIRDDLYTRAGKKWLLSLKLPKINRMLSIIEFLDEKIEEIDKTLKEICIPDVKLLTSIPGVGNYSAVLIYSEIGDVNRFSHSEKLSFYAGLVPSTHQSSLHTRHGKITKEGSRYLRWVLTECVQIHVSRYDTQLTRFYRRLVKRVGKQKAVIATARKLTKIIYWMLKNKEPFKG

SEQ ID NO: 384045 - protein, 352 aa, unidentified
MLYTGIDYHKRYSVVCTLDAEGQRVQSARIDQNEPAAFAAYFQRLPAPSRTVVEACWNWGWLYDLLGELPGVAAVVLAHPGKTRLIAEAQIKTDRLDAEKLATLLRGNLVAEAHASPPAVRARKYVLRQRVYWVRMRTRLRNRVHALLARQRQIEPPACSDLFGKKGLQWLRTLALPAPDGLLLQQSLAGFEQLTAQIKALEAAILAENQRDPAAARLQTLPGVGAILAAVIATEIDGQARFCRPEKLCAYAGLVPTTHASGGKVHHGRLLPFCNEWLRWAFIEAAWSAASGFSSLGALYRRHRAQGKPGAKAITIVARRLCRIAWHLLHEQRNYTPNPPRPVLSPAAPAIY

SEQ ID NO: 384046 - protein, 346 aa, unidentified
MKKIFIGIDFSKEKFDATLIKAEGVEERAERLHEVFDNKVSGFRRLLRWVKSVADEPDAGLWLFCGENTGGYSKALCNHLYGSGYDMWLENALSIKRSSALQRVKSDKADSGVIAEYAMRNYDQMRLYKPLGKNLERLREVFLYRHNLVKMKASMTVRKGEKKLTQEKSDISRFMAQSSKHLISEFNKKIAECDMRIDKIISEDKELRRNFEIITSVPGVGTQNAVCLMVYTDNFSRFDYNSRKIACYYGVAPFGRQSGTSVNTPPHVSPFANKLIKALLTQAALASINFCPQMAVYYRRLVEAGKKKPVAVNNVKNKLLHVITAMVRNGAMYNPDHDYYAALKVA

SEQ ID NO: 384047 - protein, 407 aa, unidentified
MEVLYSRCAGLDVHAGSVTACVRIAVDATVTYEHRTVSANTRGLLDLSQWLTAHGCTHVAMEATGVYWKPVWHVLESDFTLILANAMHIRNIPGRKSDMNDATWIADLLAHGLIRSSFVPPAPIQELRDLTRTRKQLMREIGRHTLRIQKTLEDANLKITRVVSDILGASGRAILTALVAGETDPERLADLTRGRLKAPHAELVDALHGRVTTHHRFMIQLHLTQVDALSAAVHDVDARVGDALGPFRAAVSLLTTMPGLSDTAARVLVAEIGTDMTRFPSAAHLISWAGLCPRLDESAGKRRSTRIRQGAPWLKTTLVSAAWAATRKKDSYLRAQFLRIKSRRGAKKAILAVANSMLTAAYHMLRDGVEYHDLGSQHFAHRDKDQVTKRLIQRLRDLGVVVEVKAA

SEQ ID NO: 384048 - protein, 375 aa, unidentified
MNNTIFVGLDVHKETIAIAYAKGNNRGVESLGIIMNEYMAITKLVKKMESKGATLLFCYEAGPCGYGLQRQISSLGHTCVVVAPGLVPSKPGDRIKTDRRDAEKLARHFRNGDLTPVWVPDIDHEAMQDLVRGRQSAKEDLHRNRQRLLKFLLRLGVRSPKGARNWGSKHKGWLQGLKLDNETQQIVLTEHLNAIRECEGRVERFEKEIQVQSSEGETHQAIIAALQGLRGIALVSAATIIAEVGDLTRFDKPQQLMSYAGLVPSEDSSGGTTKRGSITKCGNSHLRRVIVEAAWHYRHRPAVGVNLGKRQNHVSEEVKQISWKAQHRLNLKYRRMVGRGKTKQKAITAVGRELLGFIWAIGQEVKYGKQSDGVA

SEQ ID NO: 384049 - protein, 349 aa, unidentified
MTPETQMKHIGMDVHSTTTRISVFSDRGREIKNTRVSTEEADLVGFLLKIPGPKQVALEESQMADFVTRMIQPHVVKVIRCLPQHNRLISESEKKCDREDAKALAELLYLGKLKSVHHSPWEYRQLREGVRAYWKASRDLASAKSRLKAFYLFNGVHCAGEKVYSKRYREKWIQQLVRRSGNARLLERRYAQMDFFRDNKGEHGKILKELAKPVERHVQCLKSHPGIGFIGACSLAAYLEDGWRLKNKRKLWQYCGVGMRFHTSNEKGHCGATRKGNRLVKNVVFTAAAAIASRRNADNALTRMWRAGVEAGIKPDRLKRNLARKVAVLAQRALRFKEEYDDDRVVTTQ

SEQ ID NO: 384050 - protein, 359 aa, unidentified
MDTAGKTSRITGGVDTHKDTHTAAALDATGRVLGNATFPASGVGYAELLTWLRSFGELDRVGVEGTGSYGSGLTRHLRESGVPVVEVNRPNRQTRRQHGKSDPADAEAAARATLSRAARGVPKSQDGAVEVIRMLRLERRSAIHARTQAANQLHAVVSTAPEPLRTNLRDLSLVALLDHARKLRDVLPTDTVSATQQVLRGLTARWRHLDREVDHLDAQLETLVKTAAADLVALRGVGIDVAGALLVAAGDNPERLAHEASFAALCGVSPVDASSGRQHRHRLNRGGNRDANRALWVVALVRMRCDPRTRAYVERRTGEGLAKREVLRCLKRYIAREIFKLLRAFSVADGGGSKLARVA

SEQ ID NO: 384051 - protein, 314 aa, unidentified
MGEKFKTKAFPNTPSGHRALLEWLARYDADHVHACMEATGSYWEALATFLHDEGHRVSVVNPAQIHAFAKGLLTRTKTDRQDARLIARFCEAMKPGFWQPRPREERELFALIRRLDALKGMRDQERARLQEAHEAVADEIEGHIEGLERAIRELEARIRDHIERHPGLRDKRDLLASIPGVGETTVHQILSRLSVLSLLGSAKQWAAYAGLSPGERSSGQRQAASSGMVRLGDARLRKALYFPAMVAKQHNPVFRRFAQRLRSNGKRPKQIVVACMRKLLHIMYGVLKSGQCFDPSCYGMPAHTISEMRVARTS

SEQ ID NO: 384052 - protein, 410 aa, unidentified
MGHTRQKDPMRAADVVCLRLPRRQLRGAETMASMHDSARSKTTVYAAIELSKKSWVVAIARPDRDRPSIHRIAGGNLADLIGRLRKAAGEKQRIVVCYEAGYDGFWLARSLAKIGIDCRVLDPASIQVNRRARRVKTDRIDSLALLRALIAIDRGERHVCAVVRVPTVEEEDARRSHRERQRLVRERTGHINRIKGLLYAQGIRGIEPKRRRTRIDFGKLTTAEGRPLAERLRRELEREYQRLELIETQIRIVEKERDTADAQDPAVEQKRELLCALQGVGGASAAILAREVFARPFASRRQLGSYLGLTPSAYDSGSTTRCQGISKAGNSWARRVLIEVAWLWRKYQPGSPLSHWYARKTADQSPRIRRIMLIALARKLAISLWRYVETGLVPDGAVMAKTTPHMAAAA

SEQ ID NO: 384053 - protein, 441 aa, unidentified
MDDAEVLELEQRVEQVARVAAIDVAKASGMVCTRLPSEANAARRVQRTWAVAATTEEIIALGDHLVCQGVELVVMEATGVFWKPWFYLLEDRGLRVWLVNPRDVKNVPGRPKTDKLDAIWLAKLAERGMLRASFVPPEPVRRLRDLTRLRRTLVEERTRYRQRVGDVLQDACLKIADPKQGLTDLFGVSGRAILGALIAGQRDPKALVALAHPRLKSKAAYLETALTGRFTAHHAYLTGKLLDLHDRLDTDIAELAGRIEALITEIDPSPPPDGRQPDRVPLLDRLDEIPGVSRETAAEILGEIGFDMSCFPTPGHLASWAKLTPRTIQSGNKNTHGKTGKGNRWIKGPLGQAAVAAGRTNTFLGARFKRIVKHAPKKKAQVAIARNILEIAWILINDPDTRYTDLGPDWHTRHTNQARKTRQAVRDLEHLGYTVTLTKAA

SEQ ID NO: 384054 - protein, 337 aa, unidentified
MKFSGIDLHSNNSVVVISEETDRIVYQKRLPNNLEQILAALAPHREELVGVVIESTFNWYWLVDGLMDAGYRVHLAHPSAIKKYEGLKYSGDFADAGYLAQLLRLGLLAEGYIYPREARGARDLSRKRMQLVRYRTAQILAIENMLARQTGARLSGEAVKRLTAEQVEGLGFVPDVALAVEANRAVSQTLGQQIEALEKRLKERVRLRGEFKLLKTTPGIGETLATTIMLETGTVARFAKVGNFSSYCRCVDSLRESNDKKKGEGNTKNGNKYLAWAFVEAANFARRYCPQAKSFYERKKRKSNGVLATKALAHKLARACYYMLREQKPFDVSRCFG

SEQ ID NO: 384055 - protein, 410 aa, unidentified
MEVMHQHCAGLDVHKKTVVACVRLASEGKVVTEVKTFATTTQGLLTLSDWLSENGCTHVAMEATGVYWKPVWHVLSDGEVELVLANAAHVKNVPGRKTDVSDAAWLAELLAHGLIRASFVPDGQTQELRALLRTRKQLVRERTRHVQRIHKTLEDANIKLDAELSDVLGKSGRAILNALVAGETDPVRLAALAYPNVKSPQAQLREALRGRLTSHHRFLLQLHLGQIDSLDAAIGTIDREVEDSLAPFRAAVDLVRTIPGVSTLGAEVIVSEIGLDMSRFPTVGHLLSWAGLCPRNDESAGKRRSSRLRKGAQWLKTTLVQCSWAAKNKKGSYLQAQYLRLKSRRGPQKAICAVAASILTAAYHMLKDGTVYQDLGPDHFNRRSKITQTQRLVRRLEHMGFTVDIKPIAA

SEQ ID NO: 384056 - protein, 343 aa, unidentified
MESYVGLDVSLAKTAICIVDGRGAVIKEGEVRSDPDEIAGFVHTYAPSVQRIGLESGPTSTWLWRELDRKSLPVICIDARHAKAALSMQINKSDRNDAVGIARIMQTGWFRKIQVKSERSHAIRGLLNSRALLVRMLRDVENQIRGLLKNLGGVIGQAKQGVFTRRVRELLKERPDMALIIEPLLAARDDLTRHLCDVDRVTKRLARLDDQVRAFMTVPGVGPITALAFLAAVDDPARFKRSRTVGAYLGLTPKRHASGEIDWSGRISKCGDKLARSYLFAAANVLLTRIDKWCKLKAWGMRVAKRSGGKKARVAVARKLAVLMHRMWRDGTTFQWNEEKQAI

SEQ ID NO: 384057 - protein, 355 aa, unidentified
MNSVKYIGMDVHTATISVAVLDVGGKLTMESVIETKASTILQLIQGLRGDLHVTFEEGTWAAWLYDLLKLHVTKIVVCDPRRNALLKDGNKSDRIDARKLAELLRANLLRSVYHGEKSLRTVKELVRSYLTFGKDLTRVMNRVKAIFRSWGIPCGGKSVYNPRHRDEWLSKIAEVGVRRRAELYYEQLDALVSLRQQARRKLLAESQKHSAWKLLRSIPALGPIRVALLMGIVQTPHRFRSKRPLWKYSGFGVLTHTSADHRYVEGQLERSKKPVSVRGLDPNHNHHLKDLFKGAAIQAANREGPFRGFYEALVAKGMRPEMARLTLARKIAAITLTVWRKGVAFDAKYLKPQTA

SEQ ID NO: 384058 - protein, 337 aa, unidentified
MTVYTGIDFHKRTSTICYLKDDGTKEIETVLSSNLVSHLSNKKDLSVAIEATCGVNHVVDLLKAHQIKVTIINPNQFRGIGIGGKKTDERDALALANCLKTGFVPSVHHKSLASRRVKSMIRIREQYVQSRVNTTNHIRGILREYGISINVGAEEFEIGIADALEKLDYPLLKEKLRDLVYEERRLKTKEKEISKDIENLLQGEVHFKNLQTIPGIGSITAAALLAVGDDFDRFPNAKSFASYLGLVPSESSSGDKLRRGAITKAGQEILRRYLIHGARSVLRYTNEYSKEPIRIWAFKVKGKRGMNKATVALAHRLAKICFCVIKNERAYLKEIKN

SEQ ID NO: 384059 - protein, 356 aa, unidentified
MSYDVKYIGMDVHKEAIVIAVLNESGKLVMESVIETKASSILQFLHGLRGELHVTWEEGTWAAWLYDLLQPQVQHIVVCNPRRNALLKEGSKSDKVDARKLAELLRTGMLRPVYHGENGLRTLRELGRSYQTISKDLTRVMNRLKALYRGWGIACAGTQVYAARSREEWLNKIPHAGVRRRAELLYQQLDGLQALRRNLRPEFLAESRKHKAAKLLRQIPCIGPIRAACLIALMQTPHRFRSKRQLWTYSGLGIETHDSAQFRFVSGQLQRSKKPQQIRGLNRNHNHEMKEIFKSAATRASCGRGPLHDCYAGLLAKGMKPEMARLTLARKIAAITLTLWKKEERFDAEQLKTQAA

SEQ ID NO: 384060 - protein, 345 aa, unidentified
MRSMYYIGLDVHKKTISYCVKDGSGQIHSQGAIPATRLDLDRWMKTLPQPWTAAMEATIFTAWIYDHLLPHAAALKVAYPLMLRAIAAAKKKNDRIDAHKIADCLRCDFLPECYMASTEIRERRRTLRYRNLLVRQAVQMKNKIAVLLMEAGVSYNKQKLHKVGYFRELLATNKDIDDGLRPLLRLCRETLVRLGKTESALVRSLGRDPLLVERVERLMTIPAVGPITALTWVLGVGDVRRFSSIKKAISYCGLCGAEKSSAEAIKRTPLSKQRNKHLQSVLIEAAKLAPRRSPDLALVYDQEKQKGNANRATLAVARKLVAYLVAVDRRQKEFLPVQRENRTAA

SEQ ID NO: 384061 - protein, 340 aa, unidentified
MFTNFVGIDVSKSKFDLALIKGQDKYLVIQGVFDNTQKGIKSMSKFLEKEHHVQLSETIFCMEFTGVYCYPLTDFFVKHECHVWIEMPVNIIRSLGLQRGKNDRVDAHRIALYAYKNRDDIKLWKPQREAILKLRDLLALRERLISAQKSLQMPINEKISMGDKKGAEMVRKGCQKSMSSLENEIGQIDKNLDDIIKEDPQLKELFQLATSVPGVGKLTALFMICFTNEFSMYANPKQLACYCGVAPFEHSSGSSIRGRTRVSHMANKVLKRMLHMGAMSVISRDTELREYYQRKVAQGKNKMLVINAVRNKIIHRLCAVIKRGYAYQSENIFKERLVLS

SEQ ID NO: 384062 - protein, 419 aa, unidentified
MTAQQCTPPQAALVAIDIAKNRHEVLIDPGPGMRRRRLTVLNTRAEHDRLVATLAGLGKPVIVGFEPTGNYHRGLVHGLIAAGFEARLISSMALARTREALHNGWDKNDPKDAQVILHMLRIGASTVYSDPGCGRLNDLQELSKTHDMVSRAKTELWHRLLTHYLPLYFPEVERFQGNSRSDWFLALLEQFPTPAIITALSKEAFVEAAWEVVGRKVSKARLLADIYETARSSMALPVRPDSPAIAMFRLVLAEGRNLIRQRDHIEAQAEALLARDADAARLRQLPGIGPIIALTILAEAGDLRRFGHHRQFLKFCGFDLATHQSGMFRGQTRLSKFGNARLRRSFWLAAQVAIRQRENSFQARYSRYIAKDSDNKHLRRKAITAVAAKMARVAHAIVCSGTDYRPFYERPVPSGRTSL

SEQ ID NO: 384063 - protein, 356 aa, unidentified
MLAEIVDGVIGVDTHRDFHQVEIARPSSAVIATRTFTNDSTGHAEALAWIFGHAPGPRLVLSIEGTRSYGTGLARAAATAGLAVIEAEQPTRKHRRGKDKSDRIDAHLAVLYALGLDADKLPTPRADGDREALRILLCARQELTTTTTAQTNRLRALLRDGEDTDRRLARARLTDTVLASLARRRLPAHASRQHAVRHGEIRRLALALRQAARALVTNRAELAAIINDLAPGLLDQPGIGPVSAAQAIVSFSHAGRCRSDAAFAKLAGTSPIEASSGQTTRHRLNRGGDRALNKALHTIATTRMRDDPATQAYLARRRTEGKSDREIRRCLKRYIARQLFRALTAAMTPTTAAAST

SEQ ID NO: 384064 - protein, 371 aa, unidentified
MSNPSTFVGFDVHKNSIVVALLRPGQNASLEWKISNEAGAIHRLIRKLERESEGGLQCCYEAGPTGYVLKRQMDRAGIACMVIAPSLTPVKPGCPIKTDRRDARKLAELLRAGMLTEVAPPTEEEEAVRDLTRSRDDAQRDLTRARNRLSKFLLRRGCVYAVDRKPTWSQKYRSWLRGLTFERTADQVIFEDYLLAVEQVEGRLDALTDQIERLAEQAPWRDRVQALRCFHGINTVTALALVAEIHDPRRFAHPRRLMSYLGLVPRESSSGMRERRGGITGAGNRHVRRLMVEAAWHYRHKPVVGRALRLRRREQDPKAIAFADRALRRLTLRQRRMLHQGKHPNLVNIAVARELVGFVWNVLHARTSAQV

SEQ ID NO: 384065 - protein, 309 aa, unidentified
MTTSSYVGIDVSKDRLDVMVLGEERGWQVDNTQAGIAKLVQQMQELQPELIVVEATGGYQRCVVESLFQAGLCVAVVNPTRVRQFARACGLLAKTDKLDAQVLAVFGQRVQPRHYEGKTEAEKQLSALLVRRKQVEEMLKAEQNRLRTISPALRGSVERMIAILKEEKKRLDEQIQDAMREQKAWQEQTEILSSAPGVGPVTTATLLAELPELGKMDRKKIAALVGVAPMNYDSGKKRGYRKTKGGRTDVRSVLYMSTLVATRYNPVIQAQYQHLLKRGKEKKVALTACMRKFLTILNAMMRDQQPFRM

SEQ ID NO: 384066 - protein, 387 aa, unidentified
MQKLHDNSKASPAAFMQDSTLIAVIELSLSSWLVAGLIPGVSREPLKKLEPNPEDLLKLLHGWRDEAIKAGRLITRIAVAYETGRDSFWLARWLQERGIDAHVIHANSVTVSREHRRAKTDRLDTAMLKRGFLGWLRGERGHCTVAIVPTMEEEDAKRPHREREGLVHEQTRVVNRMKSALIQFGVRNFNPKLRKASVKLETVRTPEGKSLPPNTIAALRRDMERLRIIKEQIKAIEQARLQQFAQKPEALANRMIYLLVRIYGLGLETADLLVHELLSRTLRDRKAVARYAGLTGSPDESGSKRREKGLSRSGNARVRKIMIQLAWRMVKFQPDSALVQWFKQRTENAKRSRKPMIVALARKLIIALWRYANDGVIPEGFRLHSAA

SEQ ID NO: 384067 - protein, 342 aa, unidentified
MQVSTIGLDLAKNVFQVHGIDANEKVVVRKQLRRSQVIAFFEALPPCLVGLEACATAHHWARELRKLGHEVRLMPAKDVKAYVKRNKNDAADAEAICEAVRRPTMRFVTVKTMEQQGQLLPHRVRDQLMRQRTQLINALRSHMAEFGIVAAQGREGLKELLAIIANASDSRLSLDARASLMVLAAQLQACQTLIGTLEKRIIRQHKSSDRSRRLETVPGIGVIGATAIDATMTDPKAFRSGRDFAAWIGLVPRQDSTGGKPKLGRISKQGDQYLRRILVVGAHAVLRRARQHPQKYPWLTALLARRPFKVVAVALANKMARIAWALLVKGGTYRRPQLAATV

SEQ ID NO: 384068 - protein, 349 aa, unidentified
MRFYTNSHMHYCGIDLHAKTMYLCILDREGQILLHQNVRSRPEAFLAAMAPYREDLVVAVECMFTWYWLADLCRREGIAFVLGHALYMKAIHGAKAKNDKVDAFKIASLLRGGNLPQAYVYPPEMRATRDLLRRRLHLVRRRGNLLAHVQNTHHQYNLPAPTAKVAYRANRAGVAEAFAEPDARKSLEVDLQLIEHYDQILRELELHLVRQAKEHDPQAFHRLRSVPGIGKILALTILYEIHQIERFPRVQDFLSYARLVKCDHTSAGKRLGTGGAKIGNVHLKWAFSEAAALFLRNNPEGQKHLRRLAGRHGKAKALSILAAKLGRAVYFMLSKERAFDRERFLARSQ

SEQ ID NO: 384069 - protein, 345 aa, unidentified
MKIVGCDLHTRYQQIAMLDEETGELVERRLEHGNGEAKEFYTSLLGPVRVGIEATGHTRWFEQLLSQLGHELWMGDAARIRAAEVRKQKTDARDAALLLDLLLSGRFPRLWRPAREERDLRHLLWHRQKLVWMRNAIGNQLHALAMGEGLCRKKQLFTKKGRCELEALGLDKWASRQRQELLRLLDQLDASLAQFDQAVNEQAAANGDAVRLMTHPGVGPVTSLAFVLIVGPAARFGRSKQLVSYLGLNPSEHSSGGKQKLGAISKQGNPMLRGLLVEAGHTAARMDPELRQDYQRLRLRRGGSVAKVAIARKLAVRMYWMLRREVNYTQLVRTQGSSRATLVQQ

SEQ ID NO: 384070 - protein, 338 aa, unidentified
MNKITTIGMDLAKDVFHVVCCDARGKIVRKRMLKRGQVLEYFGNRERCLVGMEACASAHYWGRELEALGHEVKLIPAQYVKAFVRGNKNDYNDALAIAEAVVRPEMRFVTIKTPEQQDIQALHRLRKGSVGMRTALCNQIRGLVGEYGLVAPKGVATLRRRIPEWLEDGDNGLSDLFRRLLSESYIRLQELDTHIAFYTEEVERQSKQDEACQRLQTIPGFGPIVSSVFHSQIGNGEAYRRGRDASAALGLVPRQHRSAGKDTLLGISKRGDSYLRSLLVHGARAVVSRAEHKDDRLSLWINKIRAERGFNKAVVALANKMARTGWAVLANKTVYQAA

SEQ ID NO: 384071 - protein, 398 aa, unidentified
MLSIGIDVSKGKSTVCGMKPGGEIVYTPFEVQHTREGMSELVSLLRGSGEEVRVVLESTGSYHCPVVAALLENGIFVSVVNSLRMKRFCSQSIRRVKTDQIDAMQIALYGLAYWQELQPTRLPENTYRELQLLARQYYQMTSMLIKAKGDCNALCDQVLPGMQELMSDHAGRHKLSDFVLRYHHTAHILKMGETRFRKDYCKWAEKKGYRNHERMAALIFATAQNGIPVLPDAPSTQIVITEAIRVLHTVEASRDAILTQMQALAKTLPEYSLVREMPCIGDTLAPRLIAEIGDVRRFHSKRALIAYAGIDAPPYQSGKFSANNRHISKRGNRYLRKTGYEVMQSYVMHKPANDPIFTFIEKKRSEGKSGKLAMVAGLNKFLRVYYGKVTELYRSLPQ

SEQ ID NO: 384072 - protein, 341 aa, unidentified
MNEHIAVVGVDLAKNVFQICGASHSGKRLLNKKISRAKLLSFFANLPCCLVGMEACSSAHYWAREIRKLGHDVKLIPPQFVKPYVKSNKNDAADADAICEAVTRPTMRFVTIKSEEQQALLLLHRDRKGLVGERSAIANRLRASLAEFGLIIPVGMHKLQAWLRHDYGSYENLLPVMMRLHLQRLASRLAQVDRQIREIEQAIKQYNPDIEMTKRLQEVPGIGPLTASALVATIKDGSSFKSGREFAAWLGLVPRQHSSGGKDRLLGISKRGDTYLRTLFIHGARAVLKHMNPKRAMTPWLKELIGRRHRNVVIVALANKLSRIAWALMSKGERYEEQYNF

SEQ ID NO: 384073 - protein, 355 aa, unidentified
MNSIKYIGLDVHQSTISVAVLNADGQLVMQSVIATHAATILDFLHGLRGTLHVTFEEGTHSAWLYDLLVRRVTQLVVCNPRQNALLKAGNKSDTIDARKLAELLRAGLLSPVYHGQNSTAAVKHLGLSYAALTEDTTRTMGRLKALYRSQAIACAGQKPYGARHREEWLAQLTESGLQRRARRLYQQLDLLQELRREARRELILECRQHSESKLLRTIPWLGPIRVALLIGRVQTPHRFRSKRQFWAYCGLALETRSSADYQMVNGQLERRKKPVFIRGLNLNHNHDLKNLFKSAATSASGSHGPFRPFYENLLGKGMKVEMARLTLARKIAAITLHVWKKGEPFDPDYLKSPAA

SEQ ID NO: 384074 - protein, 365 aa, unidentified
MKTKTTPSPVSTSTPAVISGFTLGLDLGDRQHHVCVLDAAGNIVREASLPNTRPALAGLLAEFPRATVALEAGTHSPWISRHLTGLGAQVLVANPRKLHAISRNERKCDRRDARMLARLARVDPALLHPIQHGTAQAQHDLLGLKLRDALVRTRVNLINAVRFTLKSLGHPVRNPSSESFHKNVLQDIPADCLPVVQPLLTVLAQVTEQIKAMERDLVRRSKTDYPATQRLQQIAGVGPLTALCFVLKIGDPQRFSRGRDVGAYLGLCPRRDQSGGTDKQLRISKCGDGLLRRLLVSAAHYVLGPFGPACALREHGRRLTGTGSAREKKRAVVGVARKLAVLLLSLWKHGTDYEPRVTALVMTPA

SEQ ID NO: 384075 - protein, 342 aa, unidentified
MAIVGAFDVHRRQVTFDVLDTETGQVRRGLVRPACRATLRRFLAGYAGVGEVEFTVEGCTGWRFIVEELERAGITTHLAEPAATADARGSKRRAKTDRTDARHLRQLLVEGRLPESWIPPEHVREVRARLALYHDLREEHTAWIQRIHATLFHQAVPVFDDALSSAAGRARLESGEGLSSAGVQVVAAALRVLDALDEELHTLHQQLAAFARRQPGCRALQTLYGVGTITSVAIWAFMGDTRRFSSSAQAVRHTGLDVTVYSSDGKRAPGHLARQGPPVLRWALYEAGCNASRTGSPDHDFYHDTKQRIDHKRAAISVARKIARRSHHILRNLGDQAWAPAT

SEQ ID NO: 384076 - protein, 412 aa, unidentified
MQIVYERCAGLDVHKKSVMACLITPTPTGEYRKERQTFSTMTPDLLRLREWLQAQQCSQVAMESTGVFWKPIFNILEGHLGVMVVNAHHIKTVPGRKTDIKDAEWIADLLQHGLLRPSFIPPSWQRIVRELTRSRTSLSQERARVIARLQKGLEDANIKLASVASDLMGQSAQDMLHALLDGEQTPEEMASAARGRMRPKRDLLVQALTGHFQAHHRFLLAEHLKHLAQLQESIDRLSAEIAKHLHPYESQLKRLETLPGVGRRLAEILLAEIGPDMSRFPSAAHLASWAGMCPGNHESGGKRLSGKTRKGSQWLRTALVEAAHAASHCKECYLSAQYHQIAFRRGKKRAAVALGHTLLIIIYHVLAETKEYQELGADYLDQLERRGKEKRLVRQLEKLGFEVALTPLASQG

SEQ ID NO: 384077 - protein, 421 aa, unidentified
MALCPHHWKIGETICNDPQVCRIVDLPVYYELETNNGNRDYRIQIGGHYMNYNTVYVGMDVHKESFTLCSCKYEDEKASHYQRTPASYKNVLRYLAFLRTIYGEDTRFVCGYEAGCLGYSLYHQLENFNVECVILAPTTMLEQRSKRRIKTDKRDAEIIARSLAQHNYSPVHIPTETDNQTKEFIRMRDDHKAELKKIKQQILSFCLRQGYQYDGSGNWTAKHVKWLRSLKPAGLYKEILDEYLLTYTILTDKLNRLDQRIEELASKEEYTESVSKLTCFLGIKTHTALSVIVEVGDFQRFVSARKFAGYLGLVPGQHSSGDDRNGLGITKAGNTHVRRLLVESAQSYTRGKIGYKSRVLRSRQAGNSPQVINYADRANERLRRRYYKMVLKDGKKYNIAKTAIARELACFIWGMMTDNIY

SEQ ID NO: 384078 - protein, 432 aa, unidentified
MKTTNDHTNDHPDDPKPLEYAAFLAIDWADQKHAWSLQVAGQAKKETGTLEQKPEIIGPWVAKLRERFGGRPIAVAVEQSRGALIHALLTYDFLVLYPLHPTMVAKFREAFKSSGAKSDPLDTDQILEILTKHRDLLKPLNPDTEETRLLARLVEDRRKAVNQRTAFVQALIASLKEYFPQALEALSGNLTSHLAGDFLDRWPTLEDFQQAKPCTLKKFYYGHNLRSPKLIQEVLHLATTAQALTTDPAIVQSGRHLSQLYAQLIQTLNPLIADYDRHIKEVFEAHTEAYLFSHLPGAGPALGPRLLAFFGTDRTRYESAESVQSFTGIAPVTKSSGKTKVVYKRQACPKFDRQTFHEFARLSLPKCQWARNYVAYYTEVKDKKYHTVIRALAFKWIRILFRCWKEKTPYDEAQYMASLKKQGSIFATFHRA

SEQ ID NO: 384079 - protein, 418 aa, unidentified
MDVIVERCAGLDVHRDNVVATTRVPGSGRRRFEQQTRTFKATLPGLCELAGWLAEAGVTLVGMEATGVYWKTVFQALEDRFECWLLNAHHLHNVPGRKTDVKDSEWICQLVQHGLVRPSFVPPPEIRRLRDLTRLRKAQSNERARTIQRLEKVMQDAGIKLSSVATTTYSKSARAMLEALLSGVTDAAQLAELSKGKMRAKIPQLQEALQSRFTIEHHGVMVAQLLAHIDTLDQALQNLTERIELALAPHAHVVELLCTIPGVQAHAAQVLIAECGLDMTVFPTVGHFASWAGACPGNHESAGRRKSGRTRPGPAWLTSQLTECARAAVRTKDTYLASHYAQLRGRRGEQKAIGAIRHDLLVAYYHVVRDRVPYRDLGPEWQRKRYSPEHRARRLRRQLEALGYVVTLEQTPPAEQAA

SEQ ID NO: 384080 - protein, 346 aa, unidentified
MKFYTKEHKNYCGIDLHAKSMYLCILDNKGTVLLHRNIKTDREIFLKTIRKYRDDLVVAVECTFTWYWIADLCEKEGIAFVLGHALYMKAIYGGKAKNDRIDAQKIAMLIRGGMFPVAYVYPPKMRSTRDLLRRRMYLSRKRAELLTHIQNTAYQYNLPDIENNVCRKSQRVGVAQLFPDKSVQKSIQLDLDLLDFYDTILPKLEKEISAIAKEHDADSYFRIRSIPGIGRILGLAILYEIHDIKRFPKVQAFASYCRLVKPAKESAGKKSGSSGAKIGNVHLKWAFSEAVVLFLRRNEKAKLYRARLEKKHGKAKSLTIMAHKIARATYYILTRNTVFKMEEFFK

SEQ ID NO: 384081 - protein, 362 aa, unidentified
MKNNKLDFIGQTIYLGLDVHKKNWAVTICFQGIILKTLSMVPKPVQLVKYLHKNYPNATYLSVYEAGFCGYWIDRKLRSLGVKNIIANPADIPTKQKERRHKTDKVDSKKLARELSNNNLEGIYIPSEENESIRALSRLRRQTTKDQTRLKCRIKSLLHYVGIELPESSELSHWSGKFIKYLSELEFSERSFGKDKAMKLTLERLLESLGQQRQILVNIIKNLRQVVKETDRVKKTVKLLQTVPGIGFITAVTLCAEIMDITRFRKFDHLSCYIGFSPATDSSGEKETVVGLSNQQNKYLRSMLIESAWTAVRKDPALTQVYGKLVMRMGKQKAIVRIAKKLLNRIMYVWKNDKEYICAVVS

SEQ ID NO: 384082 - protein, 408 aa, unidentified
MNAVGIDVSKGKSMVAALRPMGEVALLPQEFLHTEVGLEQMAYAIIALGEDTRVIMEATGRYHEPVAAALHEYGIYVCVLNPLFIKQSGGGSIRKVKTDKADAMKIAKYDLDNWVDLREYTPMDTVRQQLKLCSRQYNLYMKTVVSLQNNLISLTDKTFPGVNELFSSPERADGHQKWVDFVMTFWHCDCICRVSEKAFTERYQKWCKRKGYHYSAEKALDIYAGSCGHFTTLPKNDNTKLLITTAAQQLLAGKMTLAALRAEMARLARQLPEYDTVHAMYGVGEITAAQLMAEIGDVRRFPRRSSIVGFAGVDPAVNQSGKHAAQSTPTTKRGSPHLRKTLYQIVCTYLRKAPEDEPVYQFLDKKRAEGKPYFVYMTAAQNKFLRIYYARVKECLEDFDAQQNSAQS

SEQ ID NO: 384083 - protein, 409 aa, unidentified
MEVVHEVCCGLDVHKKSVTACVLWASGRRRQTRAFGTFTRELLELGDWLRACGVTHVAMESTGVYWKPVWNLLEGQFEVLLVNAQHIKAVPGRKTDQKDSEWIADLLQHGLLRASFVPPTPIRELRDLTRYRASLAQEINRIANRIQKVLEDANIKLASVATDTLGASGRAMLEAIIQGEQDSQHLAEMAHGKLRNKIPELQEALQGRVTAHHRFLLRELLDHFYFVESKMQRIEQEVAERLGPFQSEVARLCTIPGVDRVTAWGLLAEIGMSMKQFPDAQHLASWAGLCPGSHESAGKRKSGKIRKGSLWLRRCLCQGAWAVSTKKNNYLSALYRRLAVRRGSKRATIAVAHKLLVISYYILRDGTCYSDLGADYFDRLNPEGLRRRLTKRLEGLGFKVTLEPSAQVA

SEQ ID NO: 384084 - protein, 360 aa, unidentified
MMHDNDSSAVVVGIDTHADSHHVAVITNYGRPLVDVMVPATASGYREALALVGEYSQVDKVGIECTGSYGAGITRKFLDAGYAVVEVNQPNRFDRHRRGKTDQFDAYAAAEAVLSGRATALPKGNDGLVESLRVLRTTRSSAVRDRTATINQIRAMLVSAPEPLRQKYRGLSTSKLVAALAATRPPAQPVTAAESTAVCLRHLARRYKFLDEQVADLLRQITRLLDDHAPALMGVYGAGPDSAAQLLITAGDNPERMRSERHFAALAGASPIPASSGKTNRYRLNRGGDRQANSALHHIVLVRMHYETRTREYVERRIAEGKTKREIMRCLKRYVAREVFPVLRSTLEPNLGTQTLDTAI

SEQ ID NO: 384085 - protein, 345 aa, unidentified
MVTTIGIDPHKATHTAVAIDESETVLGEITLRADRDQTKKLMDWAAGLNGDGRLWAVESAGGLGYLLSQQLIARGEHVIDVPAVLASRVRVLSSGRSDKNDPNDARSVAIAALRQPALAVVRREDHAAVLRMLAKRHLELTSLRTQAVCRLHATLVLLKPGGIQRRLSAKAASRMLQGIRSLDPVGEQRRRVAKAHLGDIRRLDRDIKANKTLIRHAVTVSETTVTDVYGVGPIVAAFLIGYTGDPTRFATSDRYAAYNGTAPIEVSSGGKKRHRLSLRGNRRLNHAIHMAAVTQIRFPTPGRVYYDKKQAEGKTKKEALRALKRRISDVVYRCLITDQQHATTS

SEQ ID NO: 384086 - protein, 331 aa, unidentified
MYYAGIDLHRQDIVVAIENQTGPVGKPQRFLCMDVDGIHSFFDKLRPFRAVIEATSSYRWLYDLLAPLGEVVLAHPYRLRAIVAGRAKTDKLDSALLAKLLRADLIPRAYVPPEPYAQLRDLTRARSRIVRHQVQTKNELHALLARHNVHPPFKTTFGKRWIKWVAQADLGMAGTILRDEMLRRIAHYQQEIQRLDVVLEEIAPAFPQIEALLSIRGVGRYTALLLVAEIGEPWRFANGKQVGAYAGLTARVNQSGGHCYHGHITRQGSGWIRWALVQVAMKVTPGDAKLQAMYTRIRKRSSAHIARVAVARKLASICWLRLMRWHFAQAA

SEQ ID NO: 384087 - protein, 346 aa, unidentified
MTIVKTRAITGGVDTHADVHVAAALDPIGGLLGVQEFPATAAGYAGLLGWLGGFGTIALVGIEGTGSYGAGLARHVTAAGIRVVEVDRPDRQDRRRQGKSDPLDAVSAARAAQSGRARGAPKGRDGAVEAIRALMVARRSAAGERTQTINQARALILTGPDDLRARFSKHGTAALVTATASLRPRPGDAAGYATRVALRELGRRAVFLDGQLERLNKLIVPLVTARAPGLLALYGIGPSTAALLLIAAGDHPGRLRSEAAWAHLCAAAPIPASSGKVTRHRLNPGGDRQASHALWRIVFTRMGSDPATRAYVERRTKEGKSKAEIIRCLKRYVARQVYPHLRPAAD

SEQ ID NO: 384088 - protein, 347 aa, unidentified
MLIIGCDFHPGFQQIAIFDNRTGEMEEKRLQHRAEAEQFYRSLAGQEVRVGMEACGHYPWFERLLQELGFELWFGDAAQVRASVVRRQKTDRRDAEHLMHLLIEDRFPRIWVPSLEVRDVRQLLVHRHKQVQARTRTKNQLQAMALSHGVQKKYKLWTQAGRAELEQLPLLPYAAQRRQKLLAELDAGEAEIGELDRRVAEEARQRPEAVRLMTHPGVGPVTALAMVLTLGPAERFESAKQVGSYFGLIPSEESSGGKQRLGKISKQGSSFLRFLLVEAGQTAARYDPQLKRFYRRLASRKNRGVAKVAVARKLATRMYLMLREGWTYAQLNQAVMSVSPSHSVAGE

SEQ ID NO: 384089 - protein, 333 aa, unidentified
MNYIGVDFHKSTSYITRIDGKGKLISQSQIFNTPEAINSWAKTLEPGDRVAVEAVGHWMYLYEQLEDSPCEFFLSHPQATKAIAHARLKNDRVDSEMLAQLLRTGLLPEAYVPSREIRDLRELLRLRAFLVRMRTRVKNRIRSVLLKTGNTYDHTDILGKGGILFCQGLEVRESYRRVLNHLAALGRHYNSQINALEKVLEKISNETPHARLLMTMPGIGIYSALLILSEIGEIERFRKADQLVSWAGLAPKNDRSANKIYRGPISKRGSKYVRWVLIEDAHHAIRLSKRFKSKYDSVFKSRGRNKAKTAVAASMLRSIHWMLTHDEPFCDID

SEQ ID NO: 384090 - protein, 365 aa, unidentified
MNKEAISSDSISAASLVNHVNRVLNLGLDVHYRQVTVAMQEDGGRIKAAGKMGHVDFLNWVQKKLQEGWQIYSCYEAGASGYWLHRDLVKLGVKNLVVVPKAMGQGGKKQKTDKRDAGELCDCLDRYLRGQDKALSVVAVPTEEQEEKRALIRYHRQIMADRGRCEARGKGLLCAQGVEVHGRWWQGGAWLEVQSDPRLKDWMKEQLIGWRNKLLSTEEEQGGLRERIAALAPAILPKGVGAYSAAVLEYEMRGFERFTNRRQVGSMTGLCPGIHQSDGRGKEGSINRCGIGIVRWTLVEMVWRLMIWQPQYPPVRRLAAGLVKGKRARKRLVVQAARRLAIDLWRLSTGQTTPEKLGLIMYSTK

SEQ ID NO: 384091 - protein, 359 aa, unidentified
MEAQRKALSFKGQNIYIGIDVHLKSWSVTLMSEATQLKRFSQSPDPDALYAHLVRNYPEAEYHSVYEACFCGFWIHYRLVGLGIHNIVVNPADVPTTTSEKLMKTDAVDSAKLARSLRSGELKGIYVPGSESLETRSLIRLRDSITKDQTRLKNRIKSHLRYLGIEIPEEFSGPGRCWNRRFVVWLKGAETGTAYGRQTLDFLVRQYEALRGQRLEMLRAVRALSRTERFEKPLENLMTVPGIGQLTGMSLLSEIDDIRRFKSADQLAAFIGMIPMCHSSGEREGVGDITVRRSARLRSVLVEASWVAVRQDPALSMAYGNYCKRMAPGKAIIKIARKLVNRIYFVMKRNQPYVKCVVA

SEQ ID NO: 384092 - protein, 365 aa, unidentified
MKKVSRGVGRMEKPRITIGIDLGDRFSHYCMLNEDGDAIESGRIQSTEEAMRRHFEGEPTMRFAIECGTHSPWISRLLEQLGHQVIVANTRKIRAITASESKNDKNDAEKLARFAFCDPRLLSPIRHRSPARQQDLNLIQARATLVRARTMIVNALRGLVKSAGGRLPACSPQGFEARVEASIPPSLADAARPLLNQIVALNAGVQQMDRAIEQLSNRYPEIPVLRTVPGIGPLIAAAYVLTLDRPDAVQHSRQAGAFLGLRPRQSQSGDSDPQHRISKTGNVYLRSLLVQAAHYVLGRFGPDSELRRWGLKLAASGGKRGKKRAIVAVARKLAVILHRIWQTGNSWQAFPQSRNNTASKDVCMA

SEQ ID NO: 384093 - protein, 345 aa, unidentified
MELHTIGIDLGKTVFHLVGLNQRGEVVVRKKFSRKQLLLFTANLQVHLIGMEACGGSHFLGRALREQGHEVRLMPAQYVKPYVKTNKSDYIDAEAIAEAVERPKMRFVPIKSDDQLDLQSLHRVRERWVMRRTAAINQIRGLLLERGITLRQGRRHVDAALPGILEDATAKLSGAVRVLLAQLKLELDHLQMRIDEVDAMINKAAAENEVCRRLVAIPGIGPVTATAIIAAIGNGAAFKRGRGFSAWLGIVPGEYTTGGKQKLLGISKRGNSYLRRLLVQGARAVLQQSAKQSPGLSAWLGQLTTRTHSNVAAVALANKLARMAWAVLAKNEPYRPPMLASVATA

SEQ ID NO: 384094 - protein, 385 aa, unidentified
MVKNSTRADLYVGLDVHAASIAVAVAEAEGGEVRSLGVIPNRAESVRRLVKKLSGLGGSWRACYEAGPTGYALYWQLTELGIECDVVAPTLVPVKAGDRVKTDRRDAQRLAQGLRAGDLTAVWVPDAAHEALRDLVRAREAAKGDQLRARHRLGKFLLRHGRRAPAKTTAWTLRYMDWVRSQKFEQVAQQATLEDYLGEVDHMSGRIKRLESAIEEAIEAAPEAMRAVVEALQALRGVAKMTAVTIVSEVGRLSRFSSARQLMGYSGAVSSEHSSGAQIRRGAITKTGNAHLRRVLVEAAWSQRFAPHLSRVMRKRQEGLSPEVIEIATKARHRLHARYRRLLARGKTKQQVVTAVARELLGFVWAIGVHVESKMESIADAKAVA

SEQ ID NO: 384095 - protein, 367 aa, unidentified
MKNTIVHHEGAASLKVAVNKIGLSGSVIKIGLDVHARLYVAVAQYDQLLPKPARRLAPTEFLPWVTQLLQAGHTVHVVYEACGFGFGLYRELKALGVHCYVIAPRKLDEGCTRVKTDPRDATTLCQRLSRYVEGNTRELAVIRVPSEAEEQARHVSRQREQLVRHRQKLEAQGRSLLINHSLPAPAHWWKNQTWSRLSKLLPAWICLRLEVHRPALLTLEQQISALSAELEAAAPADVPAGVGKLTTVVMTREICSWERFSNRRAISSYTGLCPGEHSSGSKRVPGSVTKHGNPRLRAALVECAWRMVRFQPNYPPVKKRLSVLAKGARATGAQRKKAIVAVARHLAVDLWRIHTGRCSAVQLGLAI

SEQ ID NO: 384096 - protein, 265 aa, unidentified
MVHITTITAGIDTSKAKLDIAIHGQSEVCPVENNLLGWQKLAVRMREAEVQRIGIEATGGYERGVTRHLEAQGFTVTVLQPLQVKAFARLHLKRAKNDQLDAILIAACTHFQDASSKMAPDARFDELSDHLTYIEQIEEVMVRLQTRMEHITDKRRRSAVKADLARLDTRGSELLLLTKNLRLHVDLSRRLDLVLSVRGIGLCTALAIVVRMHELGQVSREQAAALAGLAPFVRQSGQHQGETHIGGGRERLRRSLYAAALAGAF

SEQ ID NO: 384097 - protein, 368 aa, unidentified
MKHDHFIGIDVHCQFCEIAVVTAAGQVVQRERCATTVAALREVIDQVSRPRQLVIEEGPLAGWLWRELHTEVERMVVSDPRRNRLIAKDGDKDDDLDAEKLAQLLRGGFVKEVHQVESLERAVFKQQVALYHHRVRQRVRESLRLTSLFRQHGVMIREKDYVAAEDRPALLERLPVTPVERLPVTPVLRDLVTALWTSYDALVEQEEAWRKRLVRSAQADDVVRRFAELPGVSWIRAATLLAYLDTPWRFRSKSALWKYLGIGLERQHSGNGPEHLGVPRRAHRLLKSTILGAALSAVTQGTTRLPTCIGGGANKAYRRSWRGGMWPARWRRRCGACGKTAARTARNGWAWPRPLWQRSRCLGEDGCS

SEQ ID NO: 384098 - protein, 352 aa, unidentified
MPIQSNELDFSGQNFYCGIDIHKKSWSVTIETDDMPLKTFNQEADPRQLVKFLRRSYPGGKYIIGYESGYFGFNLYRYLLNQKIDCKVIHPADIPTTHKEKDQKRDPLDSRKIARVLRTGEVDSIWVPPSNLEQDRQLLRLRRTLAKDITRVKNRIKSLLQIHGIKYPGTFEKNGSHWSKRFIAWLEDIQLSEETGTEALQVAVRYLNYLREEQLTVSQKIKSLALTERYNTAYTELIKLPGIGVLIAMIILTEIGQISRFKNVNNFRSFIGLIPRSHSSGEKDYQGRITNRSNTHLRALIIEATWSAIKKDPYYLNVYYNYKNRMQHNKALIRTARKLANNIYYTLKQVDY

SEQ ID NO: 384099 - protein, 340 aa, unidentified
MNIVFLGIDLAKNVFQLCGLNQAGKPVYSKRTGRKELLQMVANIPACLIGIEASTGAFYWQREFAKLGHNVKVISPQYVKPFVRGQKNDGNDAQAIAVALMQPTMQFVPPKNLEQQDIQALHRARQRIVNHRTATVCQIRGLLLDRGITIGAAVSRVRRAVPLILEDAENGLSVRMRRTIAELYDLFNDLGRRINFFDKEIEAVFRQSEACQRIAKVKGIGPKTATAVVAAIGKGTEFKNGRHFAAWLGLVPRQHSSGNKQVLMNMTKKGDKHLRTLFIHGARAVVRVATNNNDGSLHQWVNQLKERRGFNKTTVAVANKNARIIWSMLRNDTEYQAVGS

SEQ ID NO: 384100 - protein, 355 aa, unidentified
MTSAKYIGLDVDQATIAAAVLDANGKLVMEAIVETRASSILDFIGGIRGELNIRFEEGVCAEWLYGVLKSHAHKIVVCDPRKNALLKAGNKNDRIDARKLAELLRVGQLKQVYPGKRGARTLKELAHSCLVLTQAVTRVMNRIKAVYRSVAIRCPGQRVYNQRCREQWLEQLAEPGLERRAERLYQQLDLLQPLRQQARRELIAESRKYAARQLLEQIPSIGPIRAALLIAIMQTPHRFRTKRLLWAYSGLGLEIRSSSDHDFKNGRLQRRPKQISIRGLNRNHNPELKNLFKSTVLSASLQPGPWQECYQRMLARGIKPAMARLTLARKIAAVVLALWKRGESFDPEKLTMQAA

SEQ ID NO: 384101 - protein, 406 aa, unidentified
MLFIGDDWAEAHHDLELVDEAGTVLARRRLPEGIEGIAALHGLVGDHLGVQDEPDRVVVGIETDRGPWVQALIAAGYTVYAINPLQVARYRERHGTAGAKSDPGDAHVLAEIVRLDRAHHRPVAGDSGLAEHIKVAARAHQTMIWTRQRNTNTMRSMLREYYPAALVAFGDLACRDALAVLAAAPTPQQGAALTPARIQRLLARAGRQRNVAARAEQIATALRGQQLPTRPEVVDAYAASLSALVAVTAEMVRQIAALEEQVKAGFGRHPDAEIYLSQPGLGPILAARVLAEFGDDPHRYPDARARKNYSGMSPITKASGTRRVVLARHARNRRLADALYLQAFAALSTSPGARAFYDRHRDRGATHHQALRTLANRLVGILHGCLTHGTSYNEATAWPTQEAIAA

SEQ ID NO: 384102 - protein, 336 aa, unidentified
MEVKFVHFAGVDVSKSKIDVCVIANNHRSEIVHNCFEQSKKGFNALKKWLQQVTNQQAEKLLICVENTGLYDDALLHYLWSHSLAASLENAANIKRSIRDNRGKTDKLDARNIALYALKHCDELTLWEKPRDQVVELQQMLSERSRLVNALKMLKQVQQERKEFSWSKVVQAKSYQSGIKGLQEDIKQIEKDIWELVKSDKELLQMFVLITSIPSIGKVTACHFICYTNEFKLVKSGKQLASYCGVVPFERSSGSSLKKRARLSHQANKILKTLLHLCAITAIKMKGVFAAYYRRKIEEGKSGLIAINGIRNKLALTIAAVIRNNEPYNKNYIYHH

SEQ ID NO: 384103 - protein, 421 aa, unidentified
MQAKLFWFVGIDWATEEHQVCLIDGDGVVAGERAFTHSGSGLAELCEWLIDTTGAEPDGIWVCIEIPHGAVVDTLLERGFVVHAINPKQLDRFRDRFTVAGAKDDRRDAYVLADSLRTDSHCFRRLEVSEPTIIELREWSRMLGDLQHDRVRMSNRLREQLRRYYPQALKLTDDVAASWFMDVWELVPTPKKARRAREASIARILKMHRIRRIDAGVVRRVLQEQPVTVAPGTVEAARAHIASLIARLRLVNTQIKEGEKRIDALCNELAKSSPEQEQSPGQIPEQRDVEILRSLPGIGRIVLATLLAEASQPLRDRDYHALRTLSGVAPVTRRSGKRCVVVMRKACHGRLRDAVYHWARVAMQHDTISRARYLALRSRGHSHGRALRTVADRLLGVACAMLRNQQLFDFARVMPQNEVAA

SEQ ID NO: 384104 - protein, 375 aa, unidentified
MRQDRAGEVIASYYGIDLHKDQITWHCIHKTGNGETARENGRISTDRILEELVPMLSVNDSYLIVEASGSSFFFYSLVESHCKKALVVNPVAFRELYMTGKKTDRIDAKKLAERLKYHIECGDTESGFPEVFVPDAEIVKIRKMVTAYELVVKQGTQIKNQAKSIFRSKLMSVAVDIMEKGLDEALNDKRIDEADRSILIMLKRIYDTLMEEKEEIKKQILLLGSFRFREEVKLLMSIPGISLMSATVFMADICTVDRFKSEKKMTSYLASVGTVDSSGGITRNGGLSRRGRRTSYRYILQGLEHIVNGNKDFQKFKERHALTRSNKVRAAIVRKTFVSMYFMLKNKEAYRYLNEAIYTRKIRDLKKYGIDFKCA

SEQ ID NO: 384105 - protein, 312 aa, unidentified
MEGFIGIDVSKTCLDVHILPAGEVFQVGRNADGIDDLARRLRVHRPRIVAIEATGGFETVVAAGLAAAKLPVVVVNPAQVRAFAAALGKRAKTDPIDAWVIARFAEATRPEVRPLADEQTRQLADLVARRRQIVQMLTAERNREQRAASRKTVKSCQRLIKALERELADVDEEIDEAVRGSPAWREKETLLRSVPGVGPVASRTLLAELPELGTLDRRRIAALCGLAPWTRQSGRWRGKSFIGGGRSTVRTALYMAALVASRHNPVLRRFYERLIAKGKPKLVALVAVARRLLVILNAVLRKGEKWDEAKHA

SEQ ID NO: 384106 - protein, 408 aa, unidentified
MNAVGIDVSKGKSMVAALRPMGEVALLPQEFLHTEVGLEQMAYAIVALGEDTRVIMEATGRYHEPIAAALHEYGIYVCVLNPLFIKQSGGGSIRKVKTDKADAMKIAKYGLDNWVELREYTPMDTVRQQLKLCSRQYNLYMKTVVSLQNNLISLTDKTFPGVNELFSSPERADGHQKWVDFVMTFWHCDCICRVSEKAFTERYQKWCKRKGYHYSAEKALDIYAGSCGHFTTLPKNDNTKLLITTAAQQLLAGKMTLAALRAEMARLARQLPEYDTVHAMYGVGEITAAQLMAEIGDVRRFPRRSSIVGFAGVDPAVNQSGKHAAQSTPTTKRGSPHLRKTLYQIVCTYLRKAPEDEPVYQFLDKKRAEGKPYFVYMTAAQNKFLRIYYARVKECLEDFDAQQNSAQS

SEQ ID NO: 384107 - protein, 310 aa, unidentified
MERIFVGLDVSKNRLDVHVRPAGESFTLAYDEAGLVTLVTRLSALRPALIVLEATGGYEAAVAAALANAGLPVAVVNPRQIRDFARATGQLAKTDALDARVTARFAETVQPAARPLATEQAQVLGELVARRRQLVEMVGAEMNRRRQVRDRGLQTRITAHVTWLTRAIEELEGDIQRLIRSSPVWRETEDLLTSAPGIGDITAHALIAELPELGQLNRRRIAALVGIAPFNRDSGLWRGRRMIRGGRPAVRRALYMATMVAIRHNPPITDVYRRLTRAGRPKKVAIIAAMRKLVTILNAMLRDQRRWRPA

SEQ ID NO: 384108 - protein, 350 aa, unidentified
MKKLSKTQRQMDVETIGIDLGDKISHYAVVDRDGEVVEEGSFRNQASSIEKHFGGERRRIALEAGAQSAWIARELEKLGHEVIVANARQVKWITASDQKNDRIDAKKLALLARADVRLLSPVEHRSAEQQAELCVIRARDAMVRARTLLVNAARGIAKGFGQRLPATVTATFGKRAVAVVPQMLSAALEGILTQIDELGRQIQEYEKRIAEVGALHPELERVVSIPGVGTLTALTFVLTLGRAERFAHSRDVAGYLGLRPKRRQSGGQDPQLGISKSGDKYLRKLLVQCAHHTLGHWGLDSALRQWGLAKTGGAKGATKRAIVAVARKLAVLLHRLWVTGEFYKPFPNMA

SEQ ID NO: 384109 - protein, 342 aa, unidentified
MHRVYVGLDLGSSSFQQIGLNQAGLVRVKREYQTSEANLIKAFADLEGEIHVHLEAGELAPWAVSVIAPLVPRVVCSHPQANAWIAKDADKCDRIDAFKLADLLRLNRFKEVHYPAAQSRRDFKVLVQHYDEMTSQQARLKTKLKARLRMQGVIVRGKRGFSVTGRKAVLAAVRSLAVRSSINQLYNLLDQSVASQTEARMLMLRAAQALPEIKIMKTAPGVGPIGACRFSAYIHAPQRFSSTRKLWKYCRLSVSHRSSNGKPLRRPRLDRNGCGRLKDVSRKAFEAAMRSSQDNGFKRAYQRALETTHDATHARLTVQRKIVSTLRAMWITQTPYGEELMR

SEQ ID NO: 384110 - protein, 355 aa, unidentified
MQTSKLDFSGHNIYAGIDVHKKSWSVHIVSDVIEHGAFTQAPDPKKLVRYLTKHFPGATYHSVYEAGFCGFWIHDALVNEGVNNIVVNAADIPTTNKEKTQKRDKVDCKKLARSLRNSQLRPIYIPSRELLEERMLVRGRYKLIRNRTRCKNRIKASFNFHGISIPAELDTNKWSVKLKEWMKEVAMSHSWGGVALNLYLRELEGLDVLIKENTRQINLLSKTEKYRKNVELLCTIPGIGLIVAMTILTELGDINRFRSLDELNSYIGMVPNVYASGDSENVGHLTHRGKDILKCQLIESAWMAIRRDPALMLQYQELTKRMKPNKAIIRIVRKLVNRIRYVLKNQQAYELGVVA

SEQ ID NO: 384111 - protein, 448 aa, unidentified
MGSRYAGVDWAAEKHDVVVQDQAGEELLAATFAHDEDGLRSLCRQLLRLKVELVAIERPDGLLVERLLDAGLRLLPLHPNQVAATRARFRAAGGKSDRFDAFVLCELARTDHHRFRVLVPDSDQTKALRALTRAREDLVGARVALCNQLRAELERFWPGPIGLFKNLDSSISLAFLARYPSPRDARALGPQRMQGFLAGQGYSGKKPASQLVAKLRSAPDGRAGETEVIARRQVVLALVATLTPLVAQIRELERQIATAVRAHPDGEIFLSLFKGSTTTAAEMLAEIGDCRARYPTRDALAGDAGQAAVAIESGKRKAACFRWACNKRLRDAFTTLANTSRHWHPWAADHYARAIARGHDHPRAIRTLGRAWCRVVWSCWQNHTPYDPARHRGLQQHVLVTIPGASGSLPDTAATQRMLGAAVTGPAGRRPERNALDGKPISANALGG

SEQ ID NO: 384112 - protein, 364 aa, unidentified
MHYVDNTTELSSPEETRCQFNGSKADIKLGIDVHQDFYVVVEQVGGSNPKPAQRFRKEAFLPWAAKRKGQGNQVHAVYEACGFGFGLQRQLSALEIQCYVVCPQKLDERNRRVKTDGLDAKALCLRLDRFVQGNRAALALVRVPSEAEEQLRAIHRQREQLVKARKQLEAQGRSLMVNHGIEPVQGWWKPRTFAALQVPQWMKALLSNSQPILVALQEKIRALTVQLQAAARAKQPCGLGALTSVVIDREIGNWNRFRNRRQVASYTGLCPGEYSSGNTRLQTRVTKHGNPRLRAALVEAAWRLVRFQPNYKPIIKWRATLSRGALATRAARKKAIVAAARQLAVDLWRIRTGRVSAQELGLIN

SEQ ID NO: 384113 - protein, 369 aa, unidentified
MERNIRGDAMKTTPLKEVAVEGRLTVGCDLGDRTTRVCVLDAAGKVVARETIPTRPAQVREWFERCPRSRVVLEVGTHSRWFSETVGQLGHEVIIANPRQLPLIYRSRSKTDELDAERLARIGRADPELLCPIKHRSKEAQADLALLRARDVVVRERTRLVNHIRGIVKPLGHRLPGCSAAGFADRIREELPRSLWQAVGPLLAILRQFDRQIAQYENRIAERAKASYPEVERMTQVHGVGLLTALTLTLIVEDKGRFTRSRDIGPFLGLVPRKSQTGESDPELRITKAGDVMARRLLVQCAHHILGPFGPDTDLRRYGQRVAGQGGKNAKKRAVVAVARKLAVLLHRLWVTGATYKPLGHGTAARKAA

SEQ ID NO: 384114 - protein, 421 aa, unidentified
MSVTDEPREVDPPRPTPARPTAGIDWADRDHAISVLDPDGTQIARYTLTHTSAGLRELTRRLLDHGVVEVGIERPDGPVVEHLRTAGLVVYVIPPGQLKNLRSRYQSAGNKDDRFDAYVLADTVRSDRRRLRPLITDTPATTALRHTVRARRDLVAHRVAVANQLRAHLQLCLPGVVGLFAHIDSQISLQFLHRFPTQDHADRLTPRRLGTWLASVGYSGRTDPAVLHSRLTSAPRGHTGPDATVSAAVTTAYIAVLATLNTQIAELATQISTQLEHHPDAAIFTSLPRSGRVRAARLLAEIGDARGRFPTADSLACLAGVAPSTRQSGKVKAVAFRWGADRELRDAICDFAADSRHANPWAADLYQRARARNHDHPHAVRVLARAWVGVIWACWTTHNPYQPDRHRALQRVLNQDQPTAA

SEQ ID NO: 384115 - protein, 352 aa, unidentified
MAEQLIKYVVGIDLSKDKFDVCFCEIAINQQVKIKASRQFSNNLKGFKEFEIWLQKQQKLKLSLVLAMEATGIYYEKLAFFLYKKAFSISVILPNKAKKYMQALGLKSKNDKIDAKGLARMTAEQKLDLWQPMGDYFYKLRQLTRHHEQLQASKTIFRNQLHALENGAFEVKEVIKHQNKLINLIDKQLKENLITIQKHINSNSEVLQKVENICKIKGIGMLSVATVLGETNGFELFKNIKQLVSFTGYDIVENQSGKHVGKSKISKKGNSHIRRILHMPAFSVITYNQKPFIDLFNRVHQKTAIKMKGYVAVQKKLLIYIYTLWKKNESFQLQQNKISVNDELNPSSMFVS

SEQ ID NO: 384116 - protein, 345 aa, unidentified
MNHVAIDLGSKESQVCVRLPNGDIELEKKHPTRRLPELLRNLTHSRVILETSSEAFRIADAAIAAGHEVRVVPSTLSKQLGVGERGVKTDLRDARALSEVSRRIDLPSVHIPSEAARFARSVLCSRQIMVESRTKLINHVRGWMRTQIWKLRGRGTATLPKRLRDQATEDSTRALPEHIEAVLTTIETLTAQMRRSDQQIKQLARSNTVCVRLMTMPGIGPVTSLAYFAALDDHKRFAHAYRVASYLGITPGEDSSSDRQRRTGITKAGPSWVRRTLVQAAWTALRTRPNDPMVRWALKIAERRPLPVAVVALARKMSGIMFALGRDGSTYTPEKGAQMMEQPTS

SEQ ID NO: 384117 - protein, 423 aa, unidentified
MLDQKTNVPQRFIGLDVHKHYLIALGVDAELRVVLPAQRVEFTRLENWMNKTLTPQDAVVLEMTTNTWQLYDELTPRVHSVTVVHPPHVALITRSQVTPALTARCGVTDKIAASILARLLAKGLLVGIWVPPQEVRELRALIAQRSKITRLATQAKNRLHAVLQRHHTLPPAGNLFHPDQLDWWSALPLGPLEKINLQSDWESLHFAETQLTRLTTRMNELAVQEERVLRLIHLPGFGGVTALTVVAAIGDITRFPDAAHLVGYAGLGTRVHDSGLTTRTGRITKAGRKDLRSVLVEAAQIAANTHPHWKAELKRLEPRLGRNKAIVAIARKLLVTVWYVLTEETTDRFAEPERVARKLMHFAYQVGKSHFPLEQSPAQFVRQQLDLLLLAPDLHKIAWGKKAFVSLPPSVRLEKKVSDVPHT

SEQ ID NO: 384118 - protein, 330 aa, unidentified
MPHVSASVRISAPTSATDVLFVGVDVSKARLDIFIHPTAQRFSVENTPRGRAALIRQLKRLPVDRLVVESTGGYERDLLLDLLKAKIPVAHVNPRVVRDFAKSYNLLAKTDSLDADLLARFARERKPRTLGPVDTIRLMLQELIAARRQLVEQCTRLRNQMEHARLKTVTQSIRRSVKHVRAELAVIETEIQRLIDESPLLSSRQKNLLEVEGVGPTVSRILVSELPELGLLDRRQLAALVGIAPFNDDSGTHQGRRTIRGGRHTVRTALYMATLTAVRRNAVLKAHYQQLVGRGKPKKVALTACMRKLLTYLNARLARLQTEISPESPQ

SEQ ID NO: 384119 - protein, 368 aa, unidentified
MIVIAADTHKSTHSFSAVDEQTGRLAGEKTFGADPRGMLQTMRWAQGLEDQERVWALEDCRHVSGRLERALVAAGERVIRVAPKLMGQARRAERDAGKSDVIDARAIARAVLRDGVESFPAAFLDEAAMEIRLLADHRADLVAERTRMQSRLRWHLVELDDQLEASIPAGALSHLTWIDRVDRRLKRLAQTARVRVARDELRRVREYTRTAKDLERQIKHLIAGYRPELLDLKGCGVLSAATLIGRTAGAERFKTDGHFARQAGAAPIPASSGRKNRQRLNRGGDRQLNAALHRIAVAQGQHHQPAKAYLARKQAEGKSRIEALRCLKRHLARTVWQLLRDHPDQINSLSITNINNNANAPVPALALT

SEQ ID NO: 384120 - protein, 412 aa, unidentified
MNIVYERCAGIDVHKRNVVVCAITPDVQGQRQKEQRTFSTMMPDLLRMRQWFQSLNVTHVAMESTGSFWKPIFNVLEGHMEVLVVNAQHLKAVPGRKTDLKDAEWIADLLQHGLLRPSFVPPAFQRELRELTRYRTSVIEERSRTINRLQKILEDTNIKLSAVASDLMGQSAREMLAALVAGEADPAVLAQLARGKMRAKHDLLVQALQGQFKSHHRFLISEQLAHIATLDEEIERLSAEIAQRLRPYEAQLKRLETIPGIKRRLAEVILAEIGPDMQRFPSARHLASWAGMCPGNRESAGKRLSGKTRKGSPWLRTALVEAAHAATHCKESYLSAQYHRLVLRRGGKKATIAVGHTLLVIVYHVLADEKDYQELGGNFFDEHDRQAVQKRLVHRLEKLGYEVTLVPTSPAA

SEQ ID NO: 384121 - protein, 343 aa, unidentified
MELYVGMDVSLKETSICVVDGSGEIVSEGTVISEPSAIAEFVKAKAAGAVRIGLETGPTTTWLWHELRALGLPVICIDARHAKAALSLQINKSDRNDAVGLARIMQCGWYKEVQVKSVACHEIRSVLNSRALLVRIKRDLGNQIRGLLKNLGLVIGKAQGNVFTRRVEELVAENPYLQQAVRPLLAVREKVSREIADLDRKLLSLTRGHQDSRRLMTVPGIGPITALAFCAAIDDPARFRRSRSVGAYFGLTPRRHASGEVDWSGRISKCGDTMVRSYLFEAAGVLLTRVPQWCALKAWGLRLAKRIGFKKAKVAVARKLAVILHRMWRDGTDFIWSTKEAAA

SEQ ID NO: 384122 - protein, 337 aa, unidentified
MQHLAIDLGGRESQICLRDAKEKILEERKYPTKRLGEYLAKQPPSRVILETSAEAFAVADLARAAGHDVRVVPATLAPSLGVGARRIKTDQRDAQVLSQVSCRVDLRSVHIPSEQARAWRTLCNSRDGLVSSRTKLSNTVKSQLRSRLVLTHRRRSTATPDQIRALWTEVAGSVPEHVERMLTVITMLDVQITAADKEIRQLVKANETCRRLMTVPGIGPVTAMRFVATLDDVTRFETAHDVQAYLGLTPGENSSSSRKQRTHLTKAGSPQMRWLLVQAAWTVLRCAKKHPMSIWAMQVAERRGKRIAVVALARKLAGIAFAMWRDGTTYNHQRGAD

SEQ ID NO: 384123 - protein, 400 aa, unidentified
MAFAGWDWATTTHDFTVIDDAGSRIERAAIPHTEDGITRALARLARHGDPAQLPVAIETTRGLVVDRLLAAGHPVIPIHPNAFHAARPRWGAARAKNDPGDSFKLADYARTDHHRLPVLTPTLPQTLELQALTRQRGDHLEIRIAAVNQLAALLDEHWPGGKTVFAQLHSMIALEFLDRYPTPQAAANLTAARLEAFCRRRHYSGRRTGVELLARLRSAPTAASRLGEPVLAQLIAAQVAVVRSIQASLDAVDAVITDTVAAHPYARLLADLPRIGTLNLAQIIGEVGPILERATSFDQLAAETGIAPVTRASGKTCTVAFRHATNRRARQALVTWIDNSRRAAPWAEQRYTAARARGQRHPHAIRTLGRAWLRVLWACWRTKTAYNPAAHGTAGQPIAA

SEQ ID NO: 384124 - protein, 356 aa, unidentified
MSREVKYIGMDVHKEAIVIAVQNENGKLVMETIVETKASSILQFLHGLRGELHVTWEEGTWAAWLYDLLQPQVQHIVVCNPRRNALLKEGSKSDKVDAQKLADLLRTGMLRPVYHGEHGLRTLRELGRSYQTISKDLTRVMNRLKALYRGWGIPCAGTQVYAARAREEWLDKLPQAGVRRRAELLYQQLDGLQALRREVRPELLAESRKYKAAKLLRQIPCIGPIRAARLIALMQTPHRFRSKRQLWTYSGLGIETHDSAQYRFVRGQLQLSKKPQQLRGLNRNHNHEMKEIFKSAATRASCGRGPFHDFYAALLAKGMKPEMARLTLARKIAAITLTLWKKEERFDAEQLKTQAA

SEQ ID NO: 384125 - protein, 343 aa, unidentified
MQSITTIGLDIAKSVFQVHGVDAAGQVVMRRQLKRRRVLAFFEKLPPCLVGIEAWASSHHWSRELRALGHNVRLMPPAYVKPYVKRQKNDMADAEAICEAVTRTNMRFVPIKTTEQQSVLMLHRTRHLFIRQQTSVTNAIRAHLAEFGIVAPVGRRGVEELLNVVADPSDKRVPDVVRTCVAALGGQLLSFKKQILDFDRMIMVWHRSNATSKRLNCIPGVGPLLATALVANVADPKTFRSGRNFSAWIGLVPKQHSSGGRDRLGSISKQGDRYLRSLFVAGALAVIRYAKIRGTKYGPWVAALLARRPTKVAAIALANKLARMAWAMMSTGQRYNYPASLRV

SEQ ID NO: 384126 - protein, 391 aa, unidentified
MTTALSFQEKSPLFVGVDLAKSVFQVAYQNPKSSRFCNRQLTRKEFRRFLTEHQGSLCVGMEACGSAHYWGRECVKMGHEVRILPAITVKYINQGNKDDRNDAHCIWQAMHLPSIKTVKIRDESNQALMSLLKLRDLIIKQKTQLQNNLRGCFYEQGVICGSGSESLIETAEAQVKELREENKEWSELIAKVSICAIGLIKGQAKQLQTIDEYITKYTQENESCRKLMTIPYVGPVTAAALYAVMFDPGNFKNARQFAAYAGFAPTHTGTGGRITMGGIPLKGNPVLKRVLYQVCLSLYSRNKRMKNQAGQNENTWLARLSRRLPVKKTVCAAADKICRIAWALLHNGECYADEKSTLGIARIKSKRIMRRHMYDSIITLSEEAEDNKYNR

SEQ ID NO: 384127 - protein, 346 aa, unidentified
MKFYTRQHKYYCGIDLHTKKMYVCILDSTGEILLHRNIKTDRDVFLKIIEPYQEDVVVSVECMFTWYWIADLCVKEGIPFVLGHALYMKAIHGGKAKNDKIDSNKIAVLLRGGMLPQAYVYPVKMRATRDLLRRRNHLMRKRAELFAHIQNTRSQYNLPDLGCIAKPQNREGVVERFDDSSVQKMVATDLAVINAYDPIIAKMERDIIKNAQHHDPVSHALLNTIPGIGRILSLVILYEIESIKRFPRVQDFVSYSRLVKCSKESNGKKYGSSGKKIGNAHLKWAFSEAAVLFLKGNEPGKKYLERLTRKHGKGKALSILAHKLGRAVYFMLKNKRPFDKNKFLGL

SEQ ID NO: 384128 - protein, 354 aa, unidentified
MRKMQDYVVRGKRVFVGLEDAKRTWRLCVRSEKMIVHELSMPGQAANLSEYLRSRYPECEVMVMYEAGFHGFWLHDELVAAGYQCVVTPPHLVREAKVSKVKTDKGDARRLAQMLESGDYQACHVPSRERREDRQLSRTLSGVQEDIVRTKNRVRRLLEFHGLDQGLKAGAWNKSDYEQVWSLLPTLSEPLRVSLEMYQRGLVSLEASQKELLAQLKTKASERYRLPVELKASCPGVGWLSAIRFTLEWGDLSRFESGKPLAHYLGLTPGEHSSGETKATGHITGQGSPQVRAWLIQCAWRAIRLDPVLLAKFGAVWRSSGSKKKANVAVAHKLALRLRAVELSGQPYEIGVIQ

SEQ ID NO: 384129 - protein, 330 aa, unidentified
MNVAGIDVAHKTLGVVLSAEEKAGKAQEFANTASGHQALVKALKAARVERVCLEATGSYHLDLALALEASGLALMVANPKAAKRFAEALLTRTKTDAVDAAVLAQFAQRMPFEPWQRPDNQALALRACARRLEALNRAKTEAKNQLHALTQTQTTPAVVLADVRLTITQCEAQIKDLRTWAEGQIQADAHLKEVFDLLTTVKGIATASAIQLMGEILVLPADMRAKQWVALAGLDPRQSISGTSVHKKPCLSKAGNRYLRLALFMPALSAARHDRHVNGYYRHLIEDRGLKKIQAVCAVMRKLLHAIHGMLKSRQPFDGSRFYTLAETPT

SEQ ID NO: 384130 - protein, 347 aa, unidentified
MRFYTKQHRYSCGIDLHARTMYVCILDQEGAIVVHKNLPTTPEVFLKAIAPYRDDLVVAVECMFTWYWLADLCAHEQIPFVLGHALYMKAIHGGKAKNDKIDAHKIAVLLRGGMLPMAYVYPADMRATRDLLRRRCHLMRKRSELLTHIQNTNSQYCLPPFGKKIAYKTNRHGLPDRFPDPSVQKSMELDVALINHYDTLLTEVELYITNTAKVHDVNAFYRLRSVPGIGKILALVILYEIHDIARFPTVQDFASYARLVKCSKESAGKRHGSSGAKIGNVHLKWAFSEAAVLFLRQNPPAQRYLDQLASKHGKAKALSILAHKLGRAVYYMLQRREAFDMNKFLSS

SEQ ID NO: 384131 - protein, 436 aa, unidentified
MAKFLEICAGIDIGKREISAALLKGPADAEPDVEIRTFGTTVRDLMDCGEWLREAGCRTAVLESTGAYWVPVFNVLEAYLAIIVANPAHVKARRGEKTDAEDSRRLAERLRNGDVRGSFVPPENVAILRDLTRRRKKLLSASSAERNRVQKLLERANVKFGNVVSDVFGISGQRFLNALLNDPAASPEQIAEFARTKLRNKKAEIAEALRGHRLNDHLRWMIRHSLAHLVFLESQLHEIQEQITATLVPFEQEFQLLQTIPGVGADTAAIIIAETGGNMAQFPSARHLTSWAGVCPGNNRSAGKQKSSAIKRGNPWLMAALVQAGWAAVRSRGTIFKKRFYRLMQHRGRKKAVVAAARSLLSVIWIILSRKEPYRETVGDYQPYEQSKKIRHHLRKLAQLGIDISHIELPPPTPQEMRLPDRQRPSALGTLGIHAR

SEQ ID NO: 384132 - protein, 339 aa, unidentified
MGLEGSKKTWKIAVRCDKMLIHRVSMPAKHQIVVQYLRNKFPECTIHLIYEAGFRGFNLFDRLTEEGIDCMVIPPHLVTEPKVSRVKTDKRDANRLAMIRENHDFKEPCCVPDKERREDRQISRTLWGMQKDIVRTRNRIRKFLDFNGIEVSFPERWGEEEFRALKELPLGDSLKKSLTALITLLEQLWAHKEALHAALRTLCSKERYKKAFGIAMSLPGIGWFTAIRLILELGEDLSRFTSGKKIASFVGLTCSEYSTGETERKGRITGMGSGLIRAALIENSWMAIRKDSVLLAKFTRIWKGKGSKKKAIVAVARMLIVRLRACVISGTPYAIGTVK

SEQ ID NO: 384133 - protein, 399 aa, unidentified
MNNTTFVGMDVHKNEHVVAVYTPGTEEPEVFSVSHRPAEIRKLAQRLLGLAPGPIVACYEAGVLGFSLKRQLEGWKIPCRVIAPSLIPVQPGQRVQTDYRDARKLGWYLRAGMLTEVQAPDEAQEGVRDLCRWRHSAQRDLIRVRHQVTKFLLRRGLVYHDGSHWTGKHHQWLRVQKVADPVGQEVYEAMLVELDHRQEQVKALDVRMEDVARQNPYREPVGWLCCLRGFKTISALSIVSELYGIERFGTAGGLMSYLGLTPSVMSSGLSTVHGGITKAGNVRVRRLLVEASWHQIHSPTTSRALAKRREGQPAWAVKVAQKAQMRLHRRYWSLVHKGKSPGKAVTAVARELVGFVWALLRLKDQAVSGEEAASPRTRKGRTSRGAAAVGTKKETAVVQ

SEQ ID NO: 384134 - protein, 347 aa, unidentified
MNFYTTEHNHYCGIDLHARSMYVCILNQKGETLVHKNMRTEPDAFLKAIAPFREDIVVCVECMFTWYWLADLCSQEHIPFVLGHALYMKAIHGGKTKNDRIDSRKIAGLLRSGMIPQAYVYPAEMRATRDLLRRRNYIMRRRADLLAHVQNTNSQYNLPEFGKKIAYKANRQGVPERFTDPNVSISIKTDLELIDHHDQLLNKLELYVLQNARHHDPNTLYLLRTVPGIGKVLSLVILYEIHDINRFPRVQDFASYARLVKCPRESAGKRHGTSGNKIGNMHLKWAFSEAAVLFLRNNPEAMKFKKRLEKKHGKSKALSILAHKLGRAVYYVLKQQKAFDMKKFLAT

SEQ ID NO: 384135 - protein, 411 aa, unidentified
MTKEDFIYVGIDLHKETHTAVMIDCYNNKLGEITFANRPADFPKLVTKVKKCNTDGKTVVYGLENAYGYGRPLAVWLIDKGYLVKDVNTAISHRQAKHRGAMYRKSDSDDAEAIALATLNMLDKLPDACPNDAYWSLGQLVHRRDNIMKQRTRLVNQLHEQLCIAYPSYKSFFNDISRPTALYFWEHYPSRKYLKGKSVDDLREELVPVSHNKCSTKTCEKILDAVASDKVKNNDFQDARDMVTLSIVSDLQHYDKQLAEVDKMLEKMYDMLHCTLTTIPGVNVITAVKILSEIGDIKRFSNANKLAQFAGIAPLHLSSSGKGKDFATKQGNRRLQATIYFLAIQMVQVSSKGTPRNPVVRAYYEKRKAEGKSSQQALICISRRLISIIYGMLKNGTEYRMPVVENAGETV

SEQ ID NO: 384136 - protein, 573 aa, unidentified
MMHSVGIDLHRSRSHVAVIDDRGDVLLSRRIINDPETFLTLLAEIEGECRVALEATYGWEWLADVLQDAGYELHLAHPLRTKAIASARVKTDAVDAKTLAHLLRTDLLPEAYIAPRELRDLLRHRVALTRMRAALKNRVGAILAKHGIARPYSDMFGPGGTRFLAELELHEAPRRRLDSTLALIGDFTREIEQTTREIETRAKHDPYVEVLCQIRGVGRYIAMLVIAEVGDISRFTTARRLCAWSGMTPTVRSSDMRTRLGHISHQGSPALRWALVEAAQHAATGGGPLRRERASEANQLQKTLEDAGIKLSSVATDVLGVSCRLMLDALVSDTRDPEVLAELAKGTLRKKIPALERALAGEFKPHHTLIVSHILAHLDYLDEAIATLSVEVERRLTPFAHKAELLSTITGVAERNSQVILAELGPDMSRFPSDRHAASWVAICAGNDESAGKRRSGKTRRGNPYLRAALIESAHAAARSKNTYLRAQYEQVKRRRGHKKAIVAVAHSILIAAYHILNDEGPYQDLGGDYFTRRADPDRIAKRLVAQLERLGHTVTLETSTAEVARCSLSVIF

SEQ ID NO: 384137 - protein, 342 aa, unidentified
MIASTIGLDLAKHNFHVHAVDAAGSVIKTAALRRSEMIKFFQNAKPCLVGMEACATAHHWARELMKLGHEVKLIPPSYVKPFVRRGAKNDAADAAAICEAVRRPDMRFVPVKSESNQAFLMLHRARGLLVRQRTMTVCAIRAHLAEFGIIFGQGRQRIETIMPSIEEVAASLPEHARFALDSLIRVVGELNTQIEGIETKLAEVGRSDPVSNLLSSIPGVGPITSTAIAATIPDARMFRSGREFAAWLGLTPRQNSSGGITRLGGITKQGDAYLRHLLVIGARNIVRYPKARAKVGGAWIDALLQRRRPMIVAVAVANKLARIIWAMMTSGEMFREAHAKTM

SEQ ID NO: 384138 - protein, 354 aa, unidentified
MQIVGALDVHRRQITTKTLDLESGEVRRGRISPAAREPLREWLERFAGREAHFALEGTTGWRFVVEEIERAGLVAHLADPAETAAKRGRKRRAKTDKADCDLMLDLLAHARLPESWIPPQQILELRLLLRLRKALVDERTAWQQRLHAQLFHQGIPAGINLRRRLGGAALAHVPLSPAGRRLAGVGLRMLERLDGELAPLDRELSAFARRQPGCRALIARLFGVGPVTSTAILAELGDCRRFASSDDSVRHSGLDVTVYSSDRRRAPGHLSHEGPELLRWALFEAAQSAARPQSPDHAYYLVVKQRIDHNRACLSVARKLCRRAFHILRELGEEALAPVDRLLPAGEEEVPAAA

SEQ ID NO: 384139 - protein, 371 aa, unidentified
MTKNTMKTAVGETGKPTMGLDLGDQYSYYYTLDEAGQNVESGRVKTSREALEKRFGGGEPMRVVIEAGTHSPWVSRVLAGLGHEVIVANPRKVRLISDNEGKDDRVDAELLARLGRVDVKLLSPIQHRGEGAQADLALIRARDALVGARTQLVNHVRGAVKSLGSRLEKSSARSFGGKMGEQVPEALRAALEPVLEVIAEITHQISGYDQQIRRCCQQKYPETQLLTAVPGVGALTALGYVLTLEDPHRFAHSRSVGSFLGLRPGKDKSGQQDPELRITKAGSPLLRRLLVGSAQYLLGPFGPDTDLRRWGLKLAGRGRKNAKKRAVVAVARKLAVLLHRLWVDGEVYEPLYQSERTAARSAQACSVPSGV

SEQ ID NO: 384140 - protein, 401 aa, unidentified
MKRLSGGIDVGSEFHHITILDEEDKVLYNQKVAHKLDEFAESIKLFKQIEKKEGGKISFALEGKNGYSAPFDRILLEQGFTLYNVDNLKLKRFRQAFAGEWRDDQRDALMLSKMLKLKEHLNSEREKVFIKIEKPSPVTESLKLLSRHQQTLIDERIRFINRLRKKLLEVSPQILKLGKLKNKKIIAILAKYPDFSKYKRITLKSLLKIKGIGKKQAPFLLKRLNHLEYMPGLTSIYQTVIFSYAKRILQLEEEIKDLDKKLDEIGEKNKEVNHLKTIPGVATKLASRLIGEIGDVHRFPSEKQLAIYCGIACVNNDSGKVTKARVVYKANKICKQTLIMMAGCSIHFNPQCKVYYLKKQAEGKNHNHILRCLARQLIKVIYKMLTEDRDYIIRKELKKVA

SEQ ID NO: 384141 - protein, 412 aa, unidentified
MLVGIDWADAEHVYCLMDDTGATLATGTIDHTAEGLERFMTLVRARAQDPQDILVALETSQGPLVGALLDQQFTVYAINPKAVDRHRDRFGVAGAKSDLRDAWVLANLLRTDRMLYRPLLPDSEVAQELRALTRDRAELVQTRTMLSNQLTSCLKAYFPEFLTLFADPDRPVALALLQAFPTREALQAVSPTRLEAFLRRRHCPHSHDRAVEIHTQMQARGFHIAPPLVRAKVRLAGTLVSQLQALAEHLDAYDREIQRVLRLHPDGELYHSLPGAGDFLAARMVGELGDNRDRYRDASSAQCEAGTAPVTRKSATVRTVHVRRACSHPLRSTMWQFAFASKRHCEWAQAYYLRARKRGKKHAEAVRMLGNVWLRIIIAMRRNRRPYDEALFLSRSSHPSLALCPSMRVKVA

SEQ ID NO: 384142 - protein, 407 aa, unidentified
MFYVGIDIAKNNHEASIINAKGESLSESIAFTNSRVGCEKLIKLMERLGAAAQNTIIGMEATGHYWLSVYTYFLELGYDLKVINPIQSEAFRKMYIRQTKNDAIDSHVIAQVIRFGQYSVSSFSDEKHMALRQLCRYRLYLVDECSDYKRKVITLLDQVFPEYSSLFSDTFGVSSKEVLQTYPTPEDMLAISCDTLAELLRKSSRGRFSIDKAKEILAAAQNSFGVKFAKDAFAFQIRQMISQITFIENQLCELEAEISQLLHEVNQVITSIIGIGETLGAIIVSEIGDISRFSSAPKLVAFAGLDVKVNQSGQFLGTQNKISKRGSPYLRRAIWTAANRAAFADPVLSEYYKSLRARGKHHMTAVGAVARKLTNIIFAVMRDNKPYVPAFPKPLSITTITDADLSE

SEQ ID NO: 384143 - protein, 347 aa, unidentified
MKNTVIGIDISKKSTDWCLMQGTEVVSYHHVDNEIVAIESQLQELMDMYLIDRCELMVCAEYTGHYIYPLAVACQNKQVDLWLESGYNIKCEARKERGKNDKEDSRRIAEYGYKNRLDARYYNIPAQEFTILNSLLAEREDYVLARGKYEGQLKDQKSYSDPILYKAKAKRLGKLIRQYDKLIYETEQELEKLMKENETMGHQAALLETIPGVGRLTAMKMIAATKGFTLFENGRQFCCYAGTAPFAYTSGTSIHSRHKVSQRADKSLKAMLHICAVTVARRCKSNHFTEYYQRKVDEGKNPMTVLNAIRSKLVLTMFAVIRTDQPYSSEIVHNYVEKFSLKPIATS

SEQ ID NO: 384144 - protein, 403 aa, unidentified
MKRIKRIKRIIAVGIDVSKDKLDVSIYDGKNHITKIYTNKEEGIENLIRDSKEASKKIIDSELHFVMEATGTYHTKVLFTLTNNNYPVYVLNPLISKRYSEEQLGRTSTDKIASKLLAEYAYSSISSHLLGIQNERYNILVSSKFDKSNEDRLNLKILLRTLEGLKKTKTRILNQLEALNQYPDQLGIDAIKSLKSILEEIDKEIKNLENKISEIVKKEENRNLYEKLKTIPGIGDRAASAIIAYFGSFSSFDSPKQAPSYAGLTPLIKKSGKSVGAKEIYHISKIGSPYLRQILFMASLSAARYNDQCHILYERLLKEGKAKKLIYVAISCKLLRQTFGIIKNGRVYDPNFGLMDVEKGNNSNNNDNESIKDNKVNIPFPKNPCLYNPLINKQGTSRCVAGF

SEQ ID NO: 384145 - protein, 399 aa, unidentified
MSRRCIGLDVHRDFCEVAIWDQGEVRSAGRIDSRPKTLAEFAATLGPGDEVALEATSGARQVAEILRPCVARVVIANTHRLAAISEAKCKTDRNDARTLAQLLAAGVLEGSWLPDEQTRALRRRVSRRHNLVVARTRAKNEAMSVLHRNLSQRPPMSDPFGVKGRKWLGALELPDDEVETLSASLRLIDFHGAEIETIERELARFAASSAEARRLITVPGVAMVTAVTFLAHVGEIGRFAAPKQLVGYLGLDPRVRQSGNGTAFTGRISKEGSVLVRHVMVEASHSAIRTPGPLLAFYQRVRSRRGHAVAIVATARKMVVLFWHLLTHGEDYRHSIELVTNKKLRKVELLAGAPRRRGGGRCEGPNRDQRREIDRDRAQRAADDYRRVAERQTDRAPTR

SEQ ID NO: 384146 - protein, 343 aa, unidentified
MSKISIVGLDLAKNVFQVHGVDASGGVVLRRQLRRGAVEKFFAQLPPCTVGVEACGSAHHWARVIGRYGHQVRLMPPAYVKPYVKRNKNDGRDAEAICEAVSRPTMRFVPVKSVEQQATMAVHTTRALLVRQRTMVANSLRAALSELGIVAAQGIKGLRELMAKLEAPHEEVPEIMRGALLLLARHWQSLEADERVLEQQIAKAARSDREARRLMEVPGVGPIIASTVLAKVPDATVFRSGRNFAAWIGLTGRDHGTGGKHRPGRISKQGDRMLRALLISGASAYLRHQRTRGVSDPWLRDLLARRPYKVVMVALAAKTARIIWAMLVKGEPYRDRASAPAAA

SEQ ID NO: 384147 - protein, 407 aa, unidentified
MVLFVGDDWAEDHHDVEIVDAEGRRLARRRLDEGAVGIAALHALVADHLDPDAEADQVVVGIETDRGPWVQALIAAGYVVYAVNPLQAARYRERLGASGAKSDRGDAHVLAELVRLDRAHHRPVAGDSAVAEHVKVVARAHQSMIWSRQRQTNTLRSMLREYYPGALAAFDDLAGRDALAVLALAPTPAQGRRLRVTQVEKALRAAGRQRYLTATATRIVQTLRGEQLEAHPAVIDAYAASAKALVAVIGELARQSEVLRGEVEAGFGRHPDAEIYRSQPGLGDVLGARVLAEFGDDPQRYADARARKNYSGMAPVTRASGKTRVVLARHARNRRLVDALYFQAFAALSTSPGARAYYDDHRARGNTHHQALRALANRLVGILHGCLTRHVPYNEALAWPTTDQLAA

SEQ ID NO: 384148 - protein, 338 aa, unidentified
MLYSGIDLHKRSVVIATVDERGHVVREESVPASRSAVARYFRWLPEPTIATVEATSSWYWLRDLLEQEHVPLTLAHAKFVKAIAYAKVKTDAVDALTLAQLHRADLIPRAHMVSPELRPLRDLLRTRLHLVEKRTSAKNSVERLLEKFNVPEPDQLPDEATLQASLYAEQIELLIDQIARIEKQLQPRLIPNPDIQRLLWIPGIGKLVAFTLYLEIDGIERFDSVKNFFSYCRVVPGAANSAGKRRHTHRKDGNRYLKLALSHAAIRAIQHFPDIKRFYQRKARQKNPAIARTLVQKELARAAYIVLHEQVDFNHTFKGQPLSKRKAQQWPRKASPDA

SEQ ID NO: 384149 - protein, 455 aa, unidentified
MSSKKGFSEFPVVHPNAAGIDIGATFHVVAVSPNCDSTPVRQFQSFTTDLHKLSQWLREVGVKSVAMESTGIYWIPVFEILEADGFEVILVNAREVKQVPGRKTDYNDAQWLQKLHQFGLLRASFRPSEHIASLRAYLRHRERLIEYSAAHIQHMQKALMQMNLQLHHVVSDITGVTGMKIIRDIINGERCAARLATHRDIRCLKSEETIAAALTGNYRDEHIFALKQAVELYDFYQERISECDKQLEQAMAKLNQKKVTPDAPLPKARHRTKQHNEPDFAVRSALYTLTGLDLTQINGLGPYTALRLIGECGDDMSKWPTEKHFVSWLSLSPGNKVSGGKILSSKTRRTKNRATTLLRIAAVNVGKTETALGAFYRRLAGRVGKAKAVTATARKLAVLFYSIMKHGKTYVEPGAEYYETQYRNRVLLNLKKRAKRLGYELIANPAPKTLCAEVS

SEQ ID NO: 384150 - protein, 370 aa, unidentified
MIIIGVDFHPEFQQIALLNTTTGEVEEKRLAHPDEAEKYYRALASAGETVRIGMEASGHARWFERLAAELQFDLWIGDAAEIRAKRGRKQKTDRQDAQHILKLMRKDDFPKIWVPSWENRDLRQLLWHRHRMVQARTRVMNQLQAVALNEGLHCKKKLWREHGRQQLESFALAPWASRRRRDLLDLVDRLNPAIADLTQAIEREVENYPAAQRLRTHPGVGVLTSLAFVLILGDAERFRCGKQVASYLGLVPLEDSSGNRRRLGHITKQGSSIVRFLPVEAAQVTVRSLPEWRSKYFHLVLRRGRKIAKVAMARRLAVQLFWMMRKQWDYEQLKKFGSHAGQPGHRDGVQSNTELLIGRPAPLAEKRSSK

SEQ ID NO: 384151 - protein, 347 aa, unidentified
MNYCGIDVAMKSSYLYITDGRGVKKTSGEIPTTYMALRRRLRPFVRGRLKIAIEAGNQTAWIHECLVELGAEVVVVNPAKVKLIAQSRRKTDKIDAKILCELLRLDGLPHPVHMPGRPTRELRGLLVARRQLVAARTKVCNVVRGLLRQEGIRLPSRYLLTFQGWRTLLENEGYTCEHIRPILAAYFPTFESLTRSVQAMDKELARREKADKRAARLKTMPKVGRIASLTFLAAVDDVRRFGSSRKLVSYSGLCPTVRSSGERTEYGSISRQGRAELRVVWVQIAHLVVRDTRRDSARLRAWYAKVARKRGTKTAIVALARKLLTIAYRLLMDETEYRSSFVSRRAA

SEQ ID NO: 384152 - protein, 371 aa, unidentified
MEQSSKTLSVGLDVHKDSIAVAYAPEDRGAEVVSLGTIGTRQCDIDKLIRRLQSKGARLVFGYEAGPCGYWLYRYLTGKGFACHVVAPSLIPRKPGDRVKTDRRDAITLARLMRSGDLSSIYVPGIEDEALRDLSRGREDAMQDLKRSKRRLKSFLLRQDIRYEGRASWNPAHLRWLSEVVCPTPPQQIVFQEYVRAVTEQQERLQRMERELREAVTSWRLSPVVEAIQALRGVEFTGAVIVMTELGDITRFETPRQLMSSLGLTPSEYSSGERRRQGGITKAGNSHARRALVEGAWAYRYPAKVSRHLQLRLEKLPAEVQAISWKAQVRLCKRYRQLTARGKHVNQVVVAIAREMAAFAWAIARLVPLAS

SEQ ID NO: 384153 - protein, 413 aa, unidentified
MNEAYRVAGVDVHKSMLAVVVTDVSGGGEFQFERRKFGTGDSELKALSTWLAECAVREAVMESTAQYWKAVWRQLEGQCQLYLAQAQSNRAPRGRKRDFVDAERLVRRHVAGELILSFVPDQEQRLWRTITRTKYQLTRDRTRLQNQLESLLEDAHLKLGTCVSDLLGVSSRRMLRALAKGETDPRVLADMAEDSLRATPEQLADALSAAPTLGKLHRQILKLFLDRLDLIERQQQTLNRQIASALRAHQQAVFRLAAVPGFGVDSAQQVIAEVGPTAATFPSPQQLASWVGVCPGREESAEVSKSDRSAKGNRMMRRLLNQVANAAVKSKGSIFQLHYRRLLPRMGHNKAIWAIAHRLCRLTWLILHQGAEYIEFGVERSVKALQKRTARQLRELRALGYQIIAPAPTQQLA

SEQ ID NO: 384154 - protein, 457 aa, unidentified
MLTHHVSSIRFSPFQSLRATPGPSRLSIPEDQMTDPETKKTATLIIGIDWADRQHVVCLFHEGRPVTTETLDQEPDAIHEWALRIKSRFPEHAVCVAIEQSRGALVQALRQFSEWTIYPINPKQLARYREAIHPSGSKDDPQDAELLAAFLHYHQHKLRPWRPDSPETRRIARLAELRRKLVDHRKSLRQQLIASLKGYFPLALSLFARRLTTDFGLQLLNRWPSLTELRKAHPRTLRKFFADHGIRNTTQQTQWIEAIRKATPLTTDHAVIQPQALLVQCLVRQIAELNRGIDNFEEQLREAVDSHPDAGIFRALPGAGNALVPRLIAAFGSDRDRYDNAAQLQAYSGIAPITRRSGKAVSVARRHACPKFLRQTFHEFADHARKWSPWSTAFYTMKRLAGMKHHAAVRALAFKWQRIMFRLWKNKQIYSENQYLESLRKQNSPLLKFLEEQQTTA

SEQ ID NO: 384155 - protein, 534 aa, unidentified
MARRRRRHGTGGRVRLRKPSRRVAERVREVGARRFGILAVDSAKRRFAVLLTDFLGNVFWGVHEVENTGPALAAFVEALKQVVRAHKLKDLVVGLERTGRYHVPMGQVLKPHWSVEIVDPFATKQLRQAANPGEKTEETDLFAIVAAIQVGLGTTEADLPPAWVDWRLESRSREDHVGIRALVRQHIQEKLEALLPGFAGLFRDVWQAPTALRVAEHYGSAAALVAAGVDGVLAWLSGEGHRARRQTVERIVAWARTASPADPGASVRHALLCRDLEHERFLESAILASEGKLAGYLVDTPFVLLLSAQGINVVNSASYGAELGPIEHYINPQKISGRAGLYPSRYQSDEVDYPNGPLVGHRNARLRDAIHEVAYCLLTCNPYFKAWGEVRRKRGWPEKKIHIAVAKTFIRISYRMLAGRQVFDHPCTAGRNPILRKLYEFAQGHGLTPEITRDLLVRAAAQIPQHVLPEEARELEAKLPRTARRHRTRGPEHISTILPDVLRHLACGLPLREERTERNTLEVTGGLLTGRSGH

SEQ ID NO: 384156 - protein, 391 aa, unidentified
MFLLGIDIAKLNHVASCIDSSTNEVVFSNFKFKNDFKGFSALLDKIKSFDAKNLIIGLESTSHYGENLINFLFIHDFKVALINPLQTSHLRKANIRDAKNDNLDSLNIAKSLVFTKLNFVSKKNIECFSLKKLTRFRSNLIKQRSKAKIQLTSLLDLLFPELQYLFKSKIHSKAIYSLLKKYPSAEEIAALKDDEISNLLYASSKGHFKKEKSIELKSLAKTTVGIKDTSISLHLIQLIELIELYTKQIKDIEIKITDIVNNLDTTLLSVPGISVIACAIILGETNNFENFSSSKKLLAFAGLDPKIRQSGNFNASSCRMSKKGSPYLRYALIFTAWNIVRHSEKFNKYYSLKRSQGKSHYNALGHVAHKLVRILFTLIKKNISYQEEKLE

SEQ ID NO: 384157 - protein, 417 aa, unidentified
MPMAMSCGIDWSEDHHDVAVVDTNGHLVAKRRIGDDAAGFGRLLELLAEAGDRPETPIPVAIETARGLLVACLRATGRPVYAINPLAVARYRERHAVSGKKSDHADAVVLANILRTDRAAHRPLPADSELVRAIAVLARAQQDAVWDRTQAHHKLRSLLREYYPGFLAAFGDLRGGILRPEARALLAATPTPADAARLTPPELVGLLRQAGRQRRLATHAARLHQVFAAPCLRQPPLVERAMGRHALALLGALNTACANADELATATRQAFDQHPDANIITSFAGLGQLTGARVLAELGDDRSRFAAAKAVKAYAGAAPVTRASGKSLHVSHRRVKNQRLATAGYQWAFAALTASPGAHAHYQRRRAAGDAHPAALRNLFNRLLGCLHHCLQTRQPYQEHAAFIHLNGTNGRPRLDA

SEQ ID NO: 384158 - protein, 421 aa, unidentified
MSKHSDAGMQVLYARVCGLDVHKKVVVGCVRILDAQGVVHSTVRRFGTMTADLMELGEWLAQAEVTHVAMESTGVYWQPVFNLLERYFEVWLINAQHIKKVPGRKTDVKDAEWIAQLLQCGLLRPSLVPDRKQRELRDLTRQRTKLVQQRNAVNNRIQKVLESANIKLDSVASDVLGASGRSMIEALIDGETDATVLAELAQRKLRDKIPQLQRALAGEVTEHHRFLLRELLDQYDFLEHKITRMSERLREVTPSPFRAAVEQLDPIPGVAERGAEALLAETGTDMSRFPTHKHFASWAGRCPGNQESAGKRQSGKTPAANRHLDAVLTEIAHAAVRKKGSYFQAQYHRVAARRGKKRAIGAVKHSLLIAVYYMLRDNQPYRDLGADHFSRVNPQQHIRYHVRKLQELGQKVELSPMADAA

SEQ ID NO: 384159 - protein, 434 aa, unidentified
MEPQFAALIAIDWADQKHVWAMEIPGQTKPQMGSLSHTPEAVDAWAAELARRFGGQSIAVALEQSRGPLVFMLTKYPHLIIYPVHCSTLANYRKSFRPSGAKDDPIDAQLILDILARHRDKLRPLRTDTVETRTIQFLVEERRKLVDQKTACTNRLTAHLKMYFPQALEWFGELGSPIAVAFLERWPTLSDVQKSRPATIRKFYTSHNSRTGGDYLDKRIDEIQTAISATHDEAVIAGYSVAVLAWTGLLKQFLLAIKDYDQRIDLLASKHPDYALMKSFPGVGPVSAPRLIAALGSQRDRYESAYQIQCYSGIAPVVSSSGKKHHVHCRWACPAFLRQTFHEWAQHSMAGSQWAREYYEHQRKVGKGHHTALRALAFKWIRILFRCWKNNVNYSELVYTNAAALKKPKPKSASPVEIKWETKMGMSKFTRLAT

SEQ ID NO: 384160 - protein, 425 aa, unidentified
MKVMHDRVAAIDVHKDMVKVAVRVPGAKRGTRKTDVLEFRAFYGVLQEMGRELRRRGVTHVVMEASGVYTDPVYYALTELDFTEVMVINPSHARALKGHKTDAKDAIRLLDLYECGLLSGSYIPAPDLREVRDLARYRMKTVQARTSEIQRLQKTLETAGINLSSVVSDVTGVSATAMIEALIDGERRGAVLAGLAQGRLRSRQKKADLSMALAGRFTDHHAMMCRLHLDRVRALGEEVAGLDARIAPLVARHAREAELLKTLPGFGDVVVAGWLGAIGPAPHEFFATAERLASWATVCPGNYMSAKKSKGGRTGDGGAYIKPLLVQAAWAAIRVPGRLQAKFHRLVRKFGGPRNKGAQKRAIIAIAHALLKIAYSVLKTGTPYQDLGADFYTSRESAEARQDYLIRQLQKLHPGCVITITPEAA

SEQ ID NO: 384161 - protein, 341 aa, unidentified
MNASKTVVGIDIAKRVFQLHSIDMETGEIVSLQLKREKFLEHFANRQPCLIGMEACGGAQHWARRLTVMGHQVKLLPGKAVKGFVTGNKNDRQDARAIWTAVQQPHVKAVAVKTEEQQAILALHRMRSQLVKFRTAQINGLRGLLTEYGEVMPQGKAGVRKGISEALARLQDRLPAMVIETLREQWARIGKMDEEIATVEQRIKRWLKQDDACRRIAEIPGVGPLTATAAVAMMGDAKAFNSGREFAAFVGLVPRQIGTGGRVKLLGISKRGDAYLRTLLIHGARSVLTHAKDPGPWVTELRQRRPLNVAVVALANKMARTIWAVLAHDRTYQKGFVSRPV

SEQ ID NO: 384162 - protein, 335 aa, unidentified
MQIYGIDLAKEKFDVSFFDLTSKKVSNQPSHKVVTNNLKGIGKFFKGLPSDAVLVAEHTGVYGDTLLKCCMDSNVKIAFVGGYVIHRYRATPDRAKTDVLDCALLRDFGERYPDKLKYKTFPEEALYELRQLARHREMLVEQRKQLMTADKSEDCRPIRSLAVKRSMDRIKEMLDTEIAETEKEMLKVINGHESIHHNYELVKSVDGVGLITAVELLVKTENFTKITTARQYAAYAGTAPYEKSSGKMDKGAHISKIGNRRSKTLLYICAESARLHNKEIKLYYERRTLIDKKPRHYVLNAIANKLLRIIFTLVEKGEYYDANFIRQDPRVVKHN

SEQ ID NO: 384163 - protein, 413 aa, unidentified
MNFINQEVFQMNAVGIDVSKGKSTVAILRPMGEVVQTPVDVPHDAVSLERLAYQILSLGENTRVVMEATGRYHEPVAMELHDRGIFVSVVNPLAIHGYCSGGTVRKVKNDQKDSLKIAKFALDHWGDLREYTPMDAVRQQLKIFSRQYNLYMKSRVALQSNLISLTDKVFPGVNEIFTSPERSDGHLKWVDFITTFWHCECISLVSENAFTERYKKWCKRMGYKFSAAKASDIYIDSLGHIVTLPKNNNTKLLIQTAAKELTAMNELLAVVKAEMIRLAKELPEYETVHAMFGVGELLAAQLMAEIGDIRNYPRRRSLVGFAGVDPEVNQSGKMNSESNPSTKRGSPHLRKTLFQLMTVYLRLSPADEAVYQFLDKKRSEGKPYYVYMTAGANKFLRIYYASVKAYLETLERF

SEQ ID NO: 384164 - protein, 477 aa, unidentified
MSKTTGQQEIRSGQGPVPAKRKRSKQPDRSGQPDGTEFEPNAAGIDIGAREIFVAVPPDRDPDPVRKCETFTSDLHQMAEWLVSCRITTVAMESTGVYWIPVYNVLEQHGIKPCLVNPRNMKNVPGKRTDFHECQWIQHLHSLGLLHSAFRPDAEVCAVRSLMRHRNDLVTMASEHIQHMQKALTQMNVQFQHVISDITGLTGLAILDAIVAGERDPAVLAQLRDPRIQADEETIRKSLEGNWRAEHILALKQRLSLYRSHRDLIDECDKEIEKLVSAFDPRVDPDERPMPEDRKQKQRKRKKKSGSPGFDMRAEAYKLFGVDLTQIPGLMALVFMLFSEVGRDMSRWPTAGHFVSWLGLCPDNDISGGKVLWRGARRTKSRAGTLFRLAAHALHRDQTPMGDYLRRMKAKLGPAAATTATAHKIAVIFYTMVSKQVEYDASLWAKRDEMREKRIEARLQKQAAQRGYKLVPLEQAA

SEQ ID NO: 384165 - protein, 579 aa, unidentified
MATQQRNTAQRTRKSKSKPPTKCVLGKPRGVIAPRVAKVGVEKFAIVCVDPAKKRSWWMMADFLGQILIDTAAVEHDRPHLDAMLARVRAVVQERGILDVLVVIERTGNYHRATRRTFAKAGFDTRLLHPFATKQYRLPADPGVKTDAHDLAAIHRAAAQGFGLTEQALEEPYLALRMLARHRRDLVEKVTGLQCQIREHLDVAMPGYAACFANLWNSSVALCLARATGTPAKLLVPGRLGLTQILKREQRKFQSPTLDKLLAWARQAAATDEDAAWRQRVWTELDETRQHLERQITRLELDIAELLVKTPYLWLLLLPGINVVSAADLAGEMGPIEHYANANAITGRAGLFPARWQSDEGDVTGSLVRCANRRLRAALMNIADNLTKCNPFFIGQSLVWEKADVDPRAIRVRVAKHFTRLGFALVAGRQELRHECLTGRDSLLRKLLKFYQDHHSTSDQMRSQLETAAEQLTQPAREREGELLHAALSGSASRRGPSSLADLLPLILLKYNVRITRRSGSAPRATSSPTAPSLSAPSATVAASDSSIPAVVPGANSDVTNSMSSSLVGTAASSGSIPA

SEQ ID NO: 384166 - protein, 353 aa, unidentified
MSNILAIDLGKNNSAVCIFDRSSLKCRYKTLRTRKQVMHDLFVDYQDQIEIVLFETGSQMGWVADILWALNIPFEVANTNHAAWKWKNNPNKSDRKDAQRLAMMYHTGFFPTVHVPRRAVRQKRSLINYRDDVVKRITKIKNSIRAILGREDIPLSSGKKGWTIKSLKSIREMAIPVKEVEDLEQIWKGQLHSELNQLDSTIQELNAVESKLNAVGESDEKIKLLRTIPGVGPRLSEAVVAIIDDPHRFKNGRHVSSYLGMVPRRWQSGAVDITGRISKCGNKLLRTLLVEVSWLGLREPWMREIYNKVKHGDKKRAKVAIVALARKLLVICWAMLKNGTTFDADYAKRFVKC

SEQ ID NO: 384167 - protein, 399 aa, unidentified
MTEHFDVYCGLDVGKSEHHATALTPSGERLFDKPLPQDETQLRELFTGLGRHGRVLMIVDQPNTIGALPIAVARDCGCEVAYLPGLAMRKAADLYPGRSKTDARDAFIIADTARTMPHTLRAVDRDSEVLAALKVLSGFDADLTHECTRAINRLRSLLLQIFPSLERVFVGTILTRTLALDLLIKYAGPTGLRAAGRGNVLRWARNHARKDPTKLVDEIFTALGEQTVTVIGTEAVELVIPRVAAQIKELKHQRATVAAEVEKLLDDFPLSIVLMSMPGVGIKTAATILLTIGDASTFTTAGHLAAYAGIAPVTRRSGTSIRGEYPARSGNKQLKNALFRSAWIASCHDPLSKAYYEKKRGQGKKHNAAIICLARRRCDVIYAMLKTKTLYETKTPKAA

SEQ ID NO: 384168 - protein, 349 aa, unidentified
MLYVGLDLSRKRLDFHAAGEDGEPVAVGAAPPDADGLRHLVRRLGDAEVVAVIETMNGSRFVHDQLELLGWDVRVADARKARALAPLACKTDRIDAWVLAELARRDLVPEVWLPDPTVRAERERARFRLHLVRHRSSLKNRIHATLIAFGHPCPVSDLFGVGGRQLLARLALPEAWRETLETSLYLVDELDEEIQECDRELKRLGADHPYVPLLTTIPGMAWTLGYTIAAEIGDISRFASPVKLIGYTGLCPRVYQSGESDRRGPLRKNGPRYLRWALIEAAQHAARSPAYPYRPLYERTRARIGRNRGGKVAKVVIARKLAEAIWHMLNRNQPFNPCSGKRLVSLTAN

SEQ ID NO: 384169 - protein, 356 aa, unidentified
MDKVIREGAVRVGVDLAKRVIQVHAVDVGGRVLTSRALPRARFIEWCIRLPAGCVVAMEASSSAHHWARKLVALGLDARIISAQLVEPYRMEGASGKNDANDAAAICEAASRPKMRFIPVKSIEQQSMLCVHRLREGLKEDRTACINRIRGLLAEFGLVFPQGPRELQAVLSNVLEDAGNELGTLARLTLQRAQAQWRELDEHLAWCDERIDAHGRDNPEVRQAATLMGIGPVTASAAVATVGDFKQFKNGAQFGAWIGLTPRQRSSGGKNNLGGITKRGDTYLRTLLVQGAKSALMTAHKRQDKISSWVLALRERSGWQKAVVALANKNARILWAVMTRGDLFDPNHLSLKPTGT

SEQ ID NO: 384170 - protein, 355 aa, unidentified
MSTQITTSPKVYIGLDIHKKTWTVSIQTDLFFHKTYSMPSKSSDLEEYINKNFPSYEVFLVYEAGCCGFSVARYFLNLAWNVLVINPADVKIGDKERYQKTDNLDAKNLSKQLKSGTLKGINIPTETEDQFTSLARHRTQVTKKFKTTKLQIKSLLLFHGIEIPQEYDNPNWPIAFIEWLENLKFSNVCGDLALQGKIRMFKFIKSEYLAIATQMRAYCRKEHKEDYNLLKSIPGIGGFLACVIIAECGDLRRFNTEGQFASFIGIVPGMHNSGGSEKCLGITPRSRSQLRSYLIEAAWIAVRKDPEMQEYFRKHQGKNVKNIIVKVAHKMTRRILSVIKTQKPYQINKNLILEM

SEQ ID NO: 384171 - protein, 354 aa, unidentified
MKRCNFIGLDTHGSFCEMAVVSSDGKLVQRGNCKTTIAVLREMIGKVPAPRHLVFEEGPLANWLYRNLVEHVEALTVAEPRRNRLIACEGDKDDPIDAEKLADLMRGGYIKSVHQTKTLDETLFKQLVAQYQTRVRRRVAAGQQVTAILKQHGVMARAKHFDGEEDRAELLQQLPGERLLLEMVTASWKEYDALVAHEEAWRKRLVRQAKKDEVVVRFTELPGIRWVRAATLRAYLDTPWRFRSAKALWKYLGIGLDRRHSGNGPELLGVPKQTNRLLKSTILGAARSAIAQGENPFAGQYEGWISRGVSAKMAKRNVARSLSATLWGLWKSGTAYHPEWVGVNLAATQGIETF

SEQ ID NO: 384172 - protein, 360 aa, unidentified
MLADQVDYVLGGDTHRDEHTIAAVLAATGGVIATRTIATHERGYLAALRFAQRHAPGRRVWALEGTGSYGAGLTRFLLAQGERVIEVDRPIKHDQRTAAKDDELDAIRAARTALARSQHAIPRHDPAADALTALVTTRSGAVNARTAAINQLRALVVVAPEPLRTKLRDRSADDLVTHCLRLRTPAGLPTNQRGVIIAMRTLATRIRALTHEERTLAGEITRIVTDTAPFLLAEPGVGPISAAQLLISWSHPGRFATEARFARVAGAAPIPASSGLTPRYRLDRGGDRQLNRALHTIILSRSIRHPPTRAYLDRRISEGKTRREAVRLLKRYLARHFWRLLEHTPDQHTTNDHDRPLLLT

SEQ ID NO: 384173 - protein, 357 aa, unidentified
MHSMNDQGRRVIGGVDAHADTHHAAALDSRGGLLGSKSFAVSAAGYRELLAWLESFGEIDRVGVESTGSYAAGLTRHLVAQGVRVLEVNQPHAHTRRRRGKTDAIDAEMAARHALGLATAIKPKETTGIVEAVRQLRVARDSAVKSRSVAMLQLGDLILTAPTGLREQLATPKTLKGQGALCRRLRPDTDHLREPVNAAKAALRSLARRIALLDEEIAELDTHLQPLVATAAPRTTALLGISTGHAGQLLITAGQNIERLHGEGAFAALCGASPIPVASGKRGRYRLNPGGDRQANRALHMIAVCRLRYCPRTRAYAARRTTEGKTQKEIMRCLKRYIAREVYATLRDDLRSLSPSP

SEQ ID NO: 384174 - protein, 346 aa, unidentified
MNQIIRIGMDTSKHFFQLHGVDAAEHPVLRRKLRRKEMLAFFAKLPPTVIGMEACGASHYWARELGQLGHTAKLIAPQHVKPYIKRNKNDGRDAEGLCEAMSRPTMQFVPAKTAEQQAALMLAGMRERLVGQRTQLSNAIRGYAAEFGLIAAKGLDKIEPLLADIAADEALPVLARELFAMHGREYAQLQAELKNIDARLKAWHRANADSRRLAQIPGIGPIVATALIMKVPDPRLFPSGRHFAAWIGLTPKDHSTAGKTRLGKITRAGDERLRSVLVAGATAVIQQAKHGRGHPLPWLLALLKRKPPKLAAVALANKIARIAWKLMTTGESYDGMRMPGASAFAA

SEQ ID NO: 384175 - protein, 352 aa, unidentified
MKITTIGLDLAKSVFQVHGVDARGKVVVRKQLKRAQVLPFFANLPACLIGMEACAGAHYWARKLQALGHTVKLMPPQYVKPYVKSNKHDAADAEAICEAVGRPNMRFVAIKNGAQQAILAVHRARQAMVKARTAQANQIRGLLGEFGIVIPQGISSIGKRLPDILADGENELPGSFRELLVRLQDHLGQLQRQVDELEGTIARWHRDSEASRRVAQIPGIGVLGASALVASVGDAHCFARGRQLSAWLGMVPKQASSGGKTTLLGMSKRGDTYLRTLLIHGARSVVAQAVRQPARADPWLRALLARRPKNVVAVALANKNARTAWALLRYARDYDRTYPAAGRQSSAGATVQ

SEQ ID NO: 384176 - protein, 311 aa, unidentified
MDQIYIGVDVAKEWLDIYHLARGAKQIENTPASVRSVARAAAREGSWVIFEASGGYDRVLRDGLEAAQASFSRVNPRQARDFARAMGVIGKTDRVDARMLATFGQKLQPPQTPPVSPTRQALLAQITRRRQLVEMRKQEVTRLQQTADCDSRSDIKSLILILERRIEKVEIKIAETICSSPDLAETDRRLQSVPGVGTIVAATLIAELPEIGKTDRRKIAALAGLAPIARDSGQRNGRRVIGGGRATVRTALYLAALHASRHSATFRAFRQKLQEAGKPVKAALTATARKLLSVLNSMVADGTYFREVQPT

SEQ ID NO: 384177 - protein, 420 aa, unidentified
MSEQYELFVGIDWASESHEVCVMDAERRVIERRTIEHSGTGVAQLCELLSKLSNHQPSRVAVAIETPRGAVVETLVERQFAVYAINPKQMDRFRDRHTVAGAKDDRKDAFVLADSLRTDLHLFHRVQLDEAQVIRIRELSRVEEDIVQEQVRAGNQLRELLRRYYPQMLSLCPGMNEIWFWGLIEAAPKPEAVPKLTRSQIEQLLKEHRIRRLSADEVLAALKAPPLQLAPGAVEAASEHVLLQLPRLRLLQQQRNEVAGRIQSILDELSKPGQNGQHRDVAIILSLPGVGRIITATMLAEASQALAQRDYHALRSYAGSAPITRQSGKKKVVLMRRSCNGRMRNALYHWARVSIQHDNHSREHYAQLRKVGHKHGRALRGVADRLLPVLIAMLKGGTLYDPQRRTNQLTPTVASQPAQS

SEQ ID NO: 384178 - protein, 353 aa, unidentified
MADQPGQVILGVDTHAEVHVAVLLDQLGRLQGRLTIPTTRAGYQQLVGWAGRRGQLVRAGVEGTGSYGAGLTRFLTQAGVTVVEVDRPNRQRRRRRGKSDPTDAEAAARAVLAGEATATPKTRSGIVEAIRVLRVARSGAIKARTQAANQLRELLVTAPEELNAELSPLSTAKRVAHLVAQQPDGGTDPASATRRALCHLAHRHQALTAELDALNHDLAALTRQAAPRLLARYGVGVETAGQLLVTAGDNPDRLRSEAALAALCGASPVEASSGKTVRHRLNRGGDRQANNALWVIALTRLRDDPRTRAYAQRRTTQGKTTKDILRCLKRALARELFPLLKADLQDASELALT

SEQ ID NO: 384179 - protein, 349 aa, unidentified
MLADELDYVVGVDTHLEEHVLAVVAAATGAVLARQVLRANKRGYQAALRFAGEAAHGARAWAVEGTGSYGAGLARYLAGRGETVLESSRTPRTERRLRGKDDALDAARTARAALASEALALPRNGERREALRLLLVARRSAVGVRRETLGQLRGVIVTAPDRLREELRVLPTGRLLERCSRLRRSSTAGADELATRLVLRSLARRIDAATAEAAELEREILAHVRALAPALLDEPGIGPIVAAQLLVAWSHRGRLRSEAAFARLAGVAPLPASSGQTVRHRLSRGGDRQLNRALHTVVLHRRQHDPATKDYIARRIAEGKSRRDASRLLKRYLARHLYRLLQNQEPLLA

SEQ ID NO: 384180 - protein, 426 aa, unidentified
MKVTYQTCCGVDVHKSFLVATIIKTTGGIEPFYQKKRFSTFNNSILAFKQWLLNNDCHDVCMESTGKYWVPVFNLLEDEINVTIANPKWVKAVKGNKDDTKDSKWIGDLFRLGLVKGSYIPCKKIRILREYTRYRYKLISCRSSEKNRYQNALTVCNVALDSVVSDIFGKSSTSIIDYLLEQSGTSINHEEIASKLLKSLKSKEDAVIESIEGYQMTDAQKYRMRLVRAHMDYITAEINDVDSMIESLISSDSDSDYENAIQFLITIPGVKRDSAITIISEIGIDMSQFCNSKRLCCWAGLTPGSNQSAGKKKSVRITRAGVYLKPALVQCAHAAVKSDKSPYYKKKYESLVKRRGKKRAIIAIARMILTAIYQMLSTGEVWNPSDLYKIDMPAPLIEKQKAKAIKQAMKLLQKEGLLPPNEPLAS

SEQ ID NO: 384181 - protein, 309 aa, unidentified
MEHFVGIDVAKDRLDVHLRPSQETFAVARDGEGLAQLVGRLQTLAPQLVVMEATGGYETIVASAVVAARLPLAVVNPRQIRDFARATGKLAKTDRIDAAAIAHFAEAVWPTARPVADAEAQALGELVARRRQVIEMMVAERNRRRRVTQSRVRRAIDRHLELLQTELSELEHDIDGAIRKSPAWQADADLLASVPGVGKATLRTLIAELPELGRLDRRKIAALVGVAPINRDSGTMRGRRTIAGGRPTVRTALFMAALVASRANPIIAPYYVKLRAAGKTAKQALTACMRKLIVILNAILRDRKPWQPA

SEQ ID NO: 384182 - protein, 427 aa, unidentified
MAYRIAGIDVHKRVLAVVIADVTVEGEYEFERRRIGTRPSELRAMAEWLVIEEVEEVVMESTAQYWRPVWAALETIWRPKRRSGDGAGPQSGTLHLAQAQSNRGAAGRKKDFPDAERLVRRLAAHELTLSFVPDGEQRLWRTVTRTKYQLTCNRTQLRNRLECLLEEVQIKLSSWVSDLLGLSARRMLHALASGETNPNALAALGSPRLRATPEQLADSLGACTHMHPTHRTLLKMMLEQLRLLDEEISQLDQEMAKLLNAHDEAVKRLAEIPGLGVDSAQQIMAELGPHAAAFPSPKQLASWVGACPGAEESAGVNYSHRSPKGNRQMCRLLNQAANAAVKTKGSIFEWVYRRLVVRLGHAQAIGAIAHRLCRLVCMILHKSVRYQERGPEVTRSRAQRRAAKMIRDLRKLGYQVQVLHAPSEIRA

SEQ ID NO: 384183 - protein, 341 aa, unidentified
MAIIRIGVDLAKNVFALHGVDESGRVKMARMVRREQLLEVLGAVPPCVVAMEACSGAHDLARRVTALGHSARIMAAKFVAPYRMSGKRGKNDANDAAAICEAAGRPNMRFVPVKSAEQQALLAVHRVRQGFVEERTATINRLRGLLAEFGVVLPLKAATIRRQTAQHLDALPVWAQRALTDLLAHLSHLDGRIQEYDTHLKLSARADPRARRLMTLRGLGPVSASAIVATVGAAHEFKSGRQFAAWLGMVPGQFSSGGKQRLGGITKAGDGYLRALLIMGARAVLAAAPGRTDRISRWALALQARRGYMRALVAIANKNARLAWAVLRHGEDFRMHEIATP

SEQ ID NO: 384184 - protein, 408 aa, unidentified
MNAVGIDVSKGKSMVAALRPMGEVALLPQEFLHTEVGLEQMAYTIIALGEDTRVVMEATGRYHEPVAAALHEYGIYVCVLNPLFIKQSGGGSIRKVKTDKADAMKIAKYGLDNWVDLREYTPMDTVRQQLKLCSRQYDLYMKTVVSLQNNLISLTDKTFPGVNELFSSPERADGHQKWVDFVMTFWHCDCICRVSEKAFTERYQKWCKRKGYHFCTEKALDIYAESCGHFTTLPKNDNTKLLITTAAQQLLAGKMTLAALRTEMTHLAMQLPEYDTVCAMYGVGETTAAQLMAEIGDVRRFPRRSSIVGFAGVDPAVDQSGKHEAQSTPTTKRGSPHLRKTLYQIVCTYLRKAPAGEPVYQFLDKKRAEGKPYFVYMTAAQNKFLRIYYARVKECLEAFDARQDTTQS

SEQ ID NO: 384185 - protein, 344 aa, unidentified
MDHFAGLDVSVKETSVCIVDDTGKIVREVKVASEPEALLAVLKNPFYHFRRIGLEAGPLSQWLYSALAEAELPVVCVETRHMQALLKAQINKTDRNDARGMAQMMRVGLYRPVHVKTLRSQKLRMLLTHRKLLQSKAIAIENDLRGTLRNFGLKVGMAGTVKFETRIKELVGNSPELAALVEPLLVVRRVLREQLVILHRRLLAIVRDDEVCQRLMTTPGVGPVVALTYRATVDVPARFRKSKSVGAVFGLTCSKYQSGEIDRSGRISRCGDEMMRVMLYEAAQSMLYSKKWSWLKAWAMQIARRRGMKKAIVALARRLAVIMHRIWVDGTEFRWTRGQTAAAA

SEQ ID NO: 384186 - protein, 346 aa, unidentified
MLHAGLDLSRRRLDVCLLSDHAEVVEQTAAPPDANGLRGLVARVARYRQPVRAVIESMNGARFVHDTLEELGWEVLVADAQKVKGLAPLTCKTDKIDAQVLAVLSQRDLVPAIWLPDPSIRRERELARFRLHLVRHRTTLKNRIHATLITFGHPCPVSDLFGLAGRDLLDRLQIPDPWRRNVDVALEVIDDLELQIARLTVELKRQGADHRYIPLLVTVPGFGWINAYTVASEIGDIERFASPAKLCGYTGLCPRVFQSGSTDRRGPISKHGPRYLRWGLFEAAMNACKHPLYAERYQRTKRRLGRQRGPKVAQIELSRKLTEAIWHMLTRNQPFAPAGAGFRLAA

SEQ ID NO: 384187 - protein, 469 aa, unidentified
MKRKSRRAKGQKVFPLSGDLKLIEPDAAAVDVGSRSHWVAVNPERDPNPVREFGTFSADLMSLADWFAQCEVKSVVMEATGVYWVNLYDLLEERGFKVYVVDAHTVRHLPGRSKSDVKDCQWLRRLHSYGLLRSSFRPPAQIRQLRNYHRSRSNIVDAAAQQQLRMQKALTLMNIHLHHVNSDISGLTGLSIVRAIVGGERDPKQLARLRDPRIRASKETIQKSLEGNWQEELLFDLKIALESYDHFQGQISAYDEQIRQALKEVPSKVDLLQEALPPGRLRVCRKRPGMSHQDQINLREELYRISGVDLTRIDGISLQTAQKVFFEIGTDVGAWDEEKRFTSWLGLSPNHCISGGKVLKRSSRKVVNPLSVALRLAARTLNNSHSALGANFRRLTAKIGMPKAITAMARKLAVLVYRMLKYGTQYVDKGMQHYQSKYQATKVHYLRAQAAKLGMILLPKQPAGAGAAA

SEQ ID NO: 384188 - protein, 359 aa, unidentified
MLSQVAQVVVGADVHKRTHTFVAVDGVGRELGHKTFEATTQGHQAAVRWARERFAAEGAQVRWAIEDCRHLSARLERDLLTAGQSVVRVPPKMMAEQRRIARTRGKSDPIDAAAVARAALRDPDLPVASHDEGSRELKLLVDRRDDLVKHRTATINRLLWRVHELDPAWAPKPRSLDMAKHQQLLAGRLTGAPGIVAELARDELADVIGLTARINDLQRRISALVTKAAPSLLAMPGVGALTAAKIVGEAAGVTRFKSEAAFARHAGIAPIPVWSGNTKGRVRLTRSGNRQLNAAIHRIAVTQIRLDGPGKTYNQKKKAEGMSTTEALRCLKRRLARIVYNHLTTDHQAHAATCQPTAA

SEQ ID NO: 384189 - protein, 413 aa, unidentified
MDKIYDICCGIDVHKKLIVACLNHKRKKELREFGATTRELMELAEWLQKNECEIVAMESTGSYWKPLYNIMESYGLHAIVVNPAHMKAVPGRKTDVKDAEWIAELLQHGLLQPSYIPSKDQRELRELVQYRKSLVGERTRELNRLQKMLEGANIKLSGTVTNINGKSARKILEYILSGNEIDEKKYDEMYEEKLIAHNLKASKEQILDDLKGFMSPLQRRMLKELLQHLDELNVHIENLNDEIDNFMKPEEKQASQVIQDVTGIGNTSAQAIIAVIGTDMERFPSDRHISSWAGLCPGDNVSAKKRKGGKIRKGNALLKSTLVLCAHAAVRHKSSYFHAQFKRISTHRGKKRAYVAVAHSILIAIYHILKDGVKYQDLGAEYYNQFNAERKIHAYLKKLKALGWEPPKEAVPA

SEQ ID NO: 384190 - protein, 307 aa, unidentified
MESVKYLGFDVHQSTISVAVVNADGKLVMQSVIATHAATILDFIHGLRGTLHLTFEEGTHSAWLYDLLARRVARVVVCNPRQNALLKAGNKSDTSDARKLAELLRAGLLAPVYHGEGSTRTLQELVRSYAALTEDTTRVMGRVKALYRSQAIACAGKKPYGRRHRREWLSKLSEAGLHRRAERLYEELDALQGLRRAAKRELVLESRKHAAAKLLRTVPLLGAIRAALLIGRVQTPHRFRSKRQFWAYCGLALETRSSADYRFEDGQLVRAKKPVFIRGLNRNHNHDLKNLFKSAATTGQRPPRSFP

SEQ ID NO: 384191 - protein, 461 aa, unidentified
MIENYDSVDVFIGVDVGKGEHHAVALDRAGKQLFDKALPNDEAKLRELIGQLKRHGQVLFVVDQPATIGALPIAVAQAEDVLVGYLPGLAMRRIADLHAGEAKTDARDAAIIAQAARSLPHALRSLQLADEQVTELSMLCGFDDDVVGQITATSNRIRGLLTQIHPALERVLGPHLDHPAVLDLLQRYPTPAAMKAAGPTRLGNRLLKLAPRMGRRLADEITQALAEQTVVVTGTNATSIVLPKLAEQLAALRRQRDEIAVEVERLVEAHPLHPVLISMPGVGIGTAARLLTEVSGKDFASAGHLAAYAGLAPVTRRSGSSIRGEHPSRRGNKILKRALFLSAFAALATRSHGPTTTARSPKASATTKPSSPSPDDAATSSMPCSATAPSIKPTINSPLDKNIGAPPRQARGPGLLCWHGDEHMAGGVRAHRDQPVRRGLCRARAGERGLRRRLPRPRGQR

SEQ ID NO: 384192 - protein, 425 aa, unidentified
MPLGLNLLLTTKGTRVQITRGIDWAEQHHDVAVLDADGSVLARARIDTGATGFSRLMSLLGEHVDDADQLASVPIGIETDKNLLVVALQAAGMTVFAINPRAVARYRERHGQSGKKSDPGDAFVLADLSRTDRHQHRPLPSISVHALAIKTLARQHQDAIWSLNQTVSRLRSLLLEFYPQALRAFPNVKHKAALAVLSAAPTPEAGLRLTARRLATLLRRCRRRNDPSLAEHVLSALHSPALRQPTAVEAAYGVTAQTLTAIVVAMQTAVEELEQALAAEFDQHPLATILRSAPGLGPVLAARVLAEIGDDPTRFTTATGLRAFAGTAPVTRASGRSCYVKARKVRNKRLGDACHWWAFVTITKSAGARAHYDRRRAAGDHHNAALRNLANKLIGWLWWCLQHDETWNENTAWNIDIATPDPRTA

SEQ ID NO: 384193 - protein, 357 aa, unidentified
MGYVGVDIGKDACVATIITNTGRVRGRLEFANRPDGFAELVARLKVRDKLVMEAGTYMYPLHDHLRRRGYKVLVGHPRAIRQITESDKKTDQHDSEVLAQLARVGYFPPAYVPHPDILRNREVLRSRLDMAYQTTRVKTRIRSFLARQGLEPPEDVFLGGRAWLRQAHWHDSRDLVLGVMADELDSLDQRREKVDAVLATLATDSAEVKLLMTIPGINYYLALLIVCEVGDITRFPTRETFRTYAGCAPRMRQSAGRNPAQGTNSNADPRLKRAFGLAAQTAVKLDGPIQDAFNKRERKTKSKLRAYAVARRKMCDLVYAILRSGEPCRWATAAAIERKQSELEVKKDRAERLPLPA

SEQ ID NO: 384194 - protein, 364 aa, unidentified
MSSLSQRSLIHLGMDVHKDSISIGILRPDDSMDVERIFHDEESVRRFIARMGEPRQLTACYEAGPTGYGLERLLRRLQVRCDVVAPSLIPKAPGDRVKTDRRDCRRLARLHRAGELTPIRVPTPEEEAVRDLCRARGDVVEDLDRARRRLGALLLRNGQVWRGGSNWTQRHEQWLLGLRFDDPALASTYNHYRSIVEERRLRLVALEADLLVYCDKEPYAEGIHRLCCYRGVNTIGALTLVSEVCDWRRFAKASSFMGFVGLVPSEYSSGERTQRGHITKAGNEHLRTQLVESAWAYQRGPYVGYRIRGALEQAPPATAERAWKAQVRLCGRFRRLAARKNVKTVVAAAVARELAGFLWGEMTA

SEQ ID NO: 384195 - protein, 300 aa, unidentified
MKQYVGLDVSQKETSVCVVDEVGQVLFKGKAKSDPGALAALLRKRAPQAERIGFETGAMASWLWHELRRVDLPVVCIDARHAHAALSVRMNKSDQNDRSRSGELVRVGFYREVKVKSEESQKLRAILVARCRLVSMRRDIENQVRSLIKEHGLLFPRAIGHQFRNHVSELLGDSHPLLSVISPLLLIHEHICQQQHKFDDEVRQLAKADETTHRLMTVPGVGVVTALTFRHTIDDPLRFRSALTVGAYLGLTRRRNQSGETDINGKISRGATGFSEPTCLRPPPYFSIGQKSGLHSRPGA

SEQ ID NO: 384196 - protein, 343 aa, unidentified
MTQYVGLDVSMKETKLHVLDEAGKRVWRGRCASEPAAIAAAIRRYAPAAVRVGLETGPLTTWLWTELTAEGLPMVCLDARHAKKALDMKVNKTDANDAEGLAHLVRAGWYREVRVKGRGAMLTKALLGARSHLLSISLSLENQIRGLLKTFGRIVPKGAGGLFEKNVRALITDDAEIAAVIMPLVQARQMTRSKCAALDRRLIAAVRGNATYRMLMTMPGIGPITAVAYVAALERPDTFKRSRAVGAWLGLTPRRFQSGEIDYDGHISRRGDGQLRALLYEAAAVLLTRVRMESGLRRWGLMLRKRLGFKRAATALARNMAVILHAMWKSDTPFNPTLGAATS

SEQ ID NO: 384197 - protein, 462 aa, unidentified
MCLLIIMEGYRMNYKKKRLSNLLEQVNLYAAGIDIGSTEHFVAVPEGLDEESVRSFSSFTGDLNCLADWLVRIGVQTVVMESTGIYWIPLFEILEERGLEVLLVNARHVKNVTGRKSDVLDCQWLQQLHTYGLLRGAFRPPEQVLALRSYMRQRDNLVRYCASHIQHMQKALRQMNLLLDNVVSHITGKTGMAIVRTIIEGERDPMVLAQNRDGRCKRSIEEIAKSLEGNYREEHLFSLKQSVALYDFYQQQISECEQAIEQQFKLFDAKEGLPEIPSPSGRKSPQAPAFDVRTDLYEMVGVDLTQIDGISELVALKLISETGPSMERWPSAKHFASWLGLSPDNKISGGKILSSGTVPTANRAAAALRMAAYGLSNSKSYLGGYYRKMRARHGAPKAITAAAHKLARLVYSMIKHGAEYVDQGEAFYEQEHKERIIKNLKRRAKEMGLSLVSEDGATTVTV

SEQ ID NO: 384198 - protein, 341 aa, unidentified
MKKFIRIGVDLAKNYFQIHALVSDVGPAVTRKLRRSKMHEFFSQIEPSLIGMEACGSAHYWARELKAMGHEVLLMPPAYTKPYVKRGKNDAVDADACCEAMSRPGMRFVPVKSAEQQATLMLHKTRDLLVKQRTMSVNALRGHLSEFGIIAAKGIGRVDELLDLVESDTTLPNAARASAKVLAQALEGLDKAIDDLEDEITNAQAQNEMTRLLYKVPGIGKIIASVIAASVPDPSVFKSGRDFTAWLGLTPRQNSSGGKQALGAITKQGNRYIRKLLVLGATSLLNVVGKRKGALRDWIVGLLAKKPARLVTVALANKLARILWAMMKTGESFRAEIFAKA

SEQ ID NO: 384199 - protein, 389 aa, unidentified
MAQVRSWAGLDVHAAKVLAATMDSRSGELTVRRLPGATAEVVRFCAGLPGPVRVAYEAGPTGFELSRALRAAGVECIVAAPGKIERPASDRVKTDRRDAERVLRLLMIGGLHPVRVPTLTEEALRDLVRAREDVRGDLMRARHRLSKLLLRHDVRFEGAGGAWTDRHRRWLAGVEPGQRGAQVTLLDYIGAIDALLVRRDTLEAAIAELIPNSPWAETVARLRCLRGIDSLSAVGLCAEVGDFGRFARAGHVMSFLGLVPSEHSSGQTRRQGQITKSGSGHGRRLLVEAAWHYRRPPRKGDALKRRQAGQPPTCWRSPGALSSDCIERGNALTPSAASAARSSPSPSPASWPASAGPRPTPTEPSCTTSVKEAAGTTRHSRARTSALLL

SEQ ID NO: 384200 - protein, 425 aa, unidentified
MQPSDSLSSPVETADFAYVVGIDIGSQRAVYCVCQPDKSQVIKPSEMANGRTGFEALEQRLRQLAVPPQRILIGLEATGHYSENLYHFLQERGYQLCLLHPRQTHQFAQQRGLRAKTDRLDATTIARLLLSGEARVGYVPDELISTYRELERLHSQLTTDSARYQNEIQALLVVLFPEFVQVFADPCRPTALGVLKRYPGAQAIVAAGVEALTTTLRELAPRHYGRPTAQELVRLASQSIATPLASSGRALSLKVLCDQLEHTLANLAQVERELDQLLERDTGASGLKSTPEFGRKTVAVLRAELGDVTRFQRVDQIVAYVGLDLQVRQSGKWKGQVKLSKRGSGRVRQVLYMAALRSLTLPASAFGAYYRRLVARGLKARDALTALMRKMLIVASHLLRSNELYDPAKVCVLPGPAAHTPSLDS

SEQ ID NO: 384201 - protein, 351 aa, unidentified
MIIIGVDYHPSDQYIAFVDTETGEGDERRLNHSDGEAEKFYRELAARGVSVRVGIETTGYSRWFERLLAELGIELWIGDAAKIKSKRVRKQKTDRNDAQLLLKLLLDNNFPKIWVPNPENRDLRQLLWHRHRLVQMRTRIMNQLQAIARNEGQRRKKKLWSEAGRAQLEKLALAPWASRRRQDLLELRDRMNPRIQELSGAAEQEAKKRPEVLRLMTHPGVGPLTALAFVLIIGTVERFQCGKQIGSYVGLIPCEDSSAGHQRLGHITKQGSSLLRFLLGEAAQAAARCDADWRRRYMHLALRRQRNIAKVAMARRLGVRLYWMWRKGWEYSDWIKFGSHAGQLGTGHGVQ

SEQ ID NO: 384202 - protein, 344 aa, unidentified
MEITTVGLDLAKNVFQVHAINSASEVVVKKTLRRVQMRRFFEQLDPCLVGIEACGTSHYWAREITKLGHEVRLMPPAYVKPYVKRGKTDAGDAEAICEAVRRPTMRYVAIKAPDQQAALALHRTRDLFVKQRTQLVNMIRSLLAEFGIEIRRGIEQALMLAKRIAAHEVPDIPPLAVKVIAALAGQVLDLQARLGEIERELQAWHRSNDIAKRLATIPGIGTVCATALAASVTDPHQFRSGRQFAAWLGLTPLQHSSGGRERLGRISKMGDKYLRRLLVVGMTSLIRRAKYKPEAVDPWLADLLSRKPARLVTVALANKAARVVWAIMVRGGVYRMQAGVPTPV

SEQ ID NO: 384203 - protein, 424 aa, unidentified
MNNTQNQKIAQVTDKTLIVGVDIGSENHYARAILARGFEVSKKPFPFTNTEEGFESFVNWTRNLATAHKLTKIMVAMEPTGHYWFAFVAFLKKYDVQVVLVAPQHVKHSKEMDDNTQEKDDRKDPIVIARLVPEGRYLIPYIPEDAFAELRVAFNHRCELVEEQVRIANRMIRWFDIYFPEYRKIYGRIDAKTGIMILKRAPLPADILDIGVDGICQIWKDAKLRGYGSKKAKQIYSAAEHSVGMKGGASVRWKLWQLLEEYELIERQLHDILQLIEGLLYQIPGADKLLKIPGAGLVTVSGFLSEVGDTKRFSDPKQIQKLAGLAVVENSSGKRKGLSGISKRGRSRLRWVLFQLARSMVMFNPEMKAYHKYYTTRKENPLKKLQSLVAISARIARIFYGILKNGTDYDPTMVMKDFNKAVAA

SEQ ID NO: 384204 - protein, 350 aa, unidentified
MACQKKEELEMSLYGGVDLHGDNGYYAIVDQDNKRVYGKRLPNELDVVLEELKPYRSELKGIAVESTFNWYWLVDGLMEKQHSVQLTNPAAMKQYEGIKDTNDETDAFFIADQMRLGILKCGYIYPKEERAVRDVLRRRMLFVQQRTAQALSLQGLYSRQTGGEIGMNRIRMLTASELEKTFAAEPVRLMGTASLETIRFLKERVDEMEKYVMDRCRLKPEYEKLLGVPGIGKVLAMTIMLETGDIRRFAEAGNYTSYCRCVKAERESNFKKKGKNNRKNGNKYLCWAYIEAANFMIRHSEEAKRWYQRKVVRCGGKKVVAIKSLAAKISKACYYILRDQVDFDVKKIFG

SEQ ID NO: 384205 - protein, 343 aa, unidentified
MDNFAGLDVSVKETSVCIVDDTGRIVREMKVASEPEALLAVLKNPAYRFKRIGLEAGPLSQWLFSAIAEASLPVICVETRHMRAALQAQINKTDRNDARGIAQMMRAGLYRPVHVKTLRSQKLRMLLTHRKLLQSKAIAIENDLRATLRNFGLKVGMVGTLKFEARIKELVEGLPDLATLVEPLLVVRRALREQIGILHRRLLAVVRDDEVCRRLMTIPGVGPVVALTYRASVDVPSRFRNSKAVGAVFGLTPSKYKSGEIDRTGAISRCGDEMMRVMLYEAAHTMLVRSVKWSWLKAWAMKIARHRGLKKAIVALARRLAVIMHRIWVDGTEFRWTREITAA

SEQ ID NO: 384206 - protein, 360 aa, unidentified
MAQKKMRDFIVKGKRVYVGLEDSKRKWVLCVRSERRVIHETAMPAEYESLRNYLRNKFPECRITVIYEAGFAGFNLHDQLAADGFHCIVTPPHTVSVECGSRNKNDRIDARRLAKNGENDDCKACHVPGKLHRADRQVVRTLNQVQADIIRTKNRIRRTLDFHGLRPFGLVKQWSERHYKDLPAWFDRQQQMEPSLRMSFDVLLEILAHLRTARLTLLKKLRELARMEQYRGYVKILRSVPGIGPLTAIRLALEWGDMHRFKTKERFAKFTGLTPSEHSTGETERLGHITKQGNGRVRSWLVETAWILIRFDPVMLEKFNRVCAATGSTKMAAVAVARKLAIRLRTLLLTNQQYVLGVVE

SEQ ID NO: 384207 - protein, 338 aa, unidentified
MNIVFLGIDLAKNVFQLCGLNQAGKPVYTKRTGRKELLQTLANIPACLIGIEASTGAFYWQREFEKLGHKVKVISPQYVKPFVRGQKNDGNDAQAIAVALMQPTMQFVPPKSPEQQDIQALHRARQRIVNHRTATVCQIRGLLLDRGIPIGSAVSRARRAIPLILEDAENGLSSRMRRTIAELYDLFNDPERRIHFFDKEIETVFRQSEACQRIAKVKDIGPETATAVVAAIGKGTEFKNGRHFAAWLGLVPRQHSSGDRQVLMNMTKKGDKHLRTLFIHGARAVVRVATNNNDGHMNQWVNQLKERRGFNKMTVAVANKNARIIWSMLRNETEYQVV

SEQ ID NO: 384208 - protein, 401 aa, unidentified
MNAVGIDVSKGKSMVAILKPFGEVVYKPFEIKHTTSDINSLVKLINSVEGESRIVMEHKGCYYEALAHQLSEANLFVSAINPKLIKDFNNDTLRKVKSDKADAIKIARYALDKWHNLKPYSIMDKLRNQLKIMNRQFCFYIKHKTAMKNNLIAILDQTYPGVNTYFSSPARSDGNQKWVDFASTYYHVDCIRKMSKNAFVGHYQNWCKHKKYIFSKSKAEEIYEKSKGLVPVLPKDDITRLIVKQAVDQLNVASQTIESLRILMNKTASKLPKYPVVMDMTGVGSSLGPQLMSEIGDVSRFTHKSAITAFAGVDPGVNRSGSYEQKNVPISKRGDSNLRKALFQIMCILLKLMPLDDPVYQFLDKKRAQGKPYYVYMTAGANKFLRIYYGRVKEYLSTLSE

SEQ ID NO: 384209 - protein, 359 aa, unidentified
MQKRSYKLDFTGKDIFSGIDVHLKSWKITIMVDGIVYKTFSQEPRASLLNDYLNVNFPGGNYYSAYEAGFCGFSPHRDLDKFGIKNIVVNPADIPTTDKEKKQKEDARDSRKIARSLQNNELNAIYVPSMNIEGLRSLIRYRKTLVKEINRYKYRTKSFLYYNGIRLPIELESGSKHWSKRYSIWLKSLELETEDGRMTLDSIIDTVEHLRGKLLEISRRLRQLEKQGNYSDTIKLLRTVPGVGLIMSMTIITELENIERFGTLDKLSSYVGLVPRTNASGDNENVGNITTRSNRQLRSMLIESAWIAIRQDPALMMRYGELRQRMEPNKAIVKIAKKLLSRIKHVLKNNEPYEKGIVK

SEQ ID NO: 384210 - protein, 345 aa, unidentified
MEHYVGLDVSLKLTAICIVDRTGKIEREGVVASDPETIAAFVKLHAPHVARVGLETGATSTWLWTELSKLGLPIICIDARHAKAALKMQINKSDRNDAVGIARIMQCGWYKEVRVKDLDSHAIKALLVSRALLVKIKRDLENQIRGLLKNLGLVIGRAKMNVFAVRAAELTEDRPELAGAVEPLLKAREAIGRQIADLDGKVMRLARNDAQVRRFMTAPGVGAITALCFLATIDDPTRFKRSRSVGAYVGLTTRRYASGEVDWTGRISKCGDKMLRCYLYEAANVLLTRVAKWSALKAWGIRLAKRSGLRKAKVAVARKLAVILHRMWIEGSEFKWSSKEANQPA

SEQ ID NO: 384211 - protein, 359 aa, unidentified
MNTTTVGVDLTKLAFSVCVVDEPGRVLHRHDFRRDGFAKWLGQLPAGTVVAMEACSGAHHWARRCLAYRLQPRIIAAQFVKPFRKSSRNKNDHNDAEAIATAARQGNMRFVPIKDVDQQVRLSWHRVREGYKVESLAIGNRIRGLLAEFGVIVAQSDVALRRLLADLEAQSGLPVEFKELLRDLADHWSQLRTHLEACDARIEAHAREDERCVRLRVIIGIGAITADAAVATVGNAREFKQGRQMSAWLGLVPTQHSSGGHARLGEISCRGDAYLRTLLIQGARSSLQRAKAVAIEKATPEQVWIRSLDGRMPFGKVIVAIANKHARQIWAMLAHDVDYDPHARLNHPMHRQIQAAQAA

SEQ ID NO: 384212 - protein, 487 aa, unidentified
MSLKETTLIRSVGIDLSRTSSHQVRCLDEQAKTCDSFSFSSTLEGLERLEVRIFSKGGTPTIVFEPTGLSWIPMAVFLRDRHPECLLVKARLQKVAALRRYLRSRTKSDRIDGMTLAKMPFIDAEQLDEAYLPPAKYHSLQRLTRQRERLMKSITARKNRIGSIIDGYLPGLRKAFSDEWSGRARAFYRQRLNPFTVVRDGQDSLEAFLLGVKARGVRAESHDVYHACLKLTEFYKRSEAAGMINEDFFDDLQEEIACELRLMETDEVEVERVSGRIEELYIQIHPTNLLRTIPGVGVRTAQVFLAVIGDPHRFRSQAAFANWTGIVPGANQSADTESKGLRMTKAGSFMMKRALYQAGEIARRFDPQLAYLYYREMVNHGKNHKQAMGAVMSHLGARILAVLRENRPYELRDIHDQPISNKDAVRLIQSEYQVHEPIRQARRRRNSNEGRSIGRRMREAAEAPQSGLFIPPQSPVYGDEHLQSIAG

SEQ ID NO: 384213 - protein, 402 aa, unidentified
MNCVGIDVSKGKSMIAVMRPFGEVVVSPFEVLHTDSELSELARLLKSLDGETRVVMEATGNYHAPVAWLLHDAGLYVSVVNAMLVHDYGNNSLRRAKTDKKDAVKLANYGLDHWLTLPRYVPEEDTRLMLKTCYRQYQQYSKVQTMLKNNLISLLDTTFPDANRLFASPPRADGSEKWVDFVDAFWHCECVCGLSEKTFITRYQKWCRKHGYNFNENKALDIYASACGHFGVMPKTDTTKLLVEQAISQLRATSAALAALKQEMQSLAASLPEYPVVMGMFGVGPSLGPQLMAEIGDVRRFHSKKALVAFAGIDAPPYQSGQMDVRSRSISKRGSASLRRTLFLVMSVILQRAPMDEPVYQFMSKKHSEGKPYRVYMMASANKFLRIYYASVKAYLDSMEYD

SEQ ID NO: 384214 - protein, 363 aa, unidentified
MEQFIGCDAHKKYSVFVAVNERGEASPAIRVGHDREQYRQFLERLPAGSQIALEAGGHYYWMVDEMEAAGHQPRLVHPLEAKKRMGKTGKKTDKVDANGLGILLRNGTLPEVWIPPAGLRDQRESLRLRMFLVQQRTRLKNRIQGALARYNIQIAGVSDMFGVEGRLRLGQRLGELPEHTRQSVEQELVTLDFLEVQLADIEKRLEALMKVTADADLLKTLPYVGRILSMVMTLEIGKVERFATAAHLASYAGLVPRVHASGGHTRLGQICGDVNQYLKWAFIEAGNLVVIHQQHLAGQHVVRLYQRVKRKKNHQKAVVAVARHLAEAAYWILKKQEVYRDPQPKPKAPAQAQAAPALSSTPG

SEQ ID NO: 384215 - protein, 372 aa, unidentified
MSAEHITWVGMDAHKDSIKVAAFFPERPEPVEWTETTTVEAIRRLARKLQREAPGEVHCCYEAGPTGYALQRQLRAAGIGCTVIAPSLTPVKPGVRIKTDRRDARKLAELFRAGLLTEVHPPSETDEALRDLCRCRDDVRVDLLRARHRLSKFLLRRHFIYRQTKNHWGSRHWAWLEQLRFDDPISQATFDSYQLAVQQLEERQRQLDTQLAEFGGREPYREPVAWLRCFRGIDTVTAVCLVAELHDFRRFRSPRQLMAYVGLVPSECSSGERERRGAITKAGNRHVRRLLVEAAWHQRFRPALSAPLRRRREGQPARVLAIADRAQERLYARCLRMSALGKTSPKIIVAMARELTGYLWAVLHPAAAATRV

SEQ ID NO: 384216 - protein, 348 aa, unidentified
MEQEQFVGFDVSQAETSVCVVDESGKVVWQGKCASTPEAMAATVKRRAPQVARIALETGPMSAWHYRSLISLGLPMVCVDARHAKAALAMQLNKTDANDAVGLAQIVRTGWYREVAVKSEHSHRTRGLLAARATLVGMRKEVANQLRGLLKVFGHVIGAAGGEKFDARARELTAGDTTLTITAEALLAARAALAAQVARLDKLLLAQARQDPACQRLMTVPGVGAITATAFVATIDDPARFKHSASVGAYLGLTPRRYQSGTMDVSGRISKAGDALLRCYLFEAATTLLSRVQKTSALKEWGVRLAKRIGHKKARVAIARKLAVILHRMWADKAEFRAVPAVAAAATA

SEQ ID NO: 384217 - protein, 424 aa, unidentified
MTPQPEAEFAAFVGIDWADTKHDICLRPADSDKAEFAVLPHRSDAIEQWACSLRRRFQGRPVAVCLEIAKGPLVYALQKYDFLVLFPLNPATLAKYREAFTPSHAKADPSDAEIALELLLCHRDKLKALNPQSASMRTLERLVEQRRRLVGDRNRITNRLTAALKQYYPEVLNCFEEKDTLLFCDFLAHWPTPSDAKRARQATLAAFFRHHHVRSAGLIEERLRVMKSATPLTEDVAVITPNRLLVQALVEQLRVALHAIARFDAEISTVSQTLPDYPLFSALPGAGAVLAPRLLVAFGEQRQRYASAAEFQKYTGIAPVTESSGKKHWVHWRLRCSTFMRQTFVEWAAETIPRSFWAGAYYRQQRAKGSSRQAALRALAFKWIRILYRCWQTRTPYDESTYLNALKRRGSPLLTSIGGTAKNT

SEQ ID NO: 384218 - protein, 411 aa, unidentified
MQRVIGMDIHRTFAEVVFWEAGRLRSGGRVDMTRSGLEGFGRSLSKEDEVVVEATGNAMAVVRVLSPYVARVIVANPLQVKAIAHAHVKTDKIDAGVLASLRAAGFLPEVWVPDADTECLRRLVSRRNQVVRHRTRIKNEVHAILQAHLIPPCPHADLFGRLGRSWLGRQELPVDERAAIERHLRELDRLGEDLELLDREIAERVIEDPSVKRLLTITGVNIIVAAGLIAAIGDIRRFSSPQKLVSYVGLNPRVRQSGLGLAQHGRISKRGRSHARAMLVEAAWAASKAPGPLRSFFLRIRARRGHQVAAVAVARKLAVLCWHLLTKDADYQWARPALVANKIRAMQLQAGQPARKGNKRGAAYAYNIKELRNREIDVARHAEHAYEQFVRRWQPRGPGKRRTGAANEERR

SEQ ID NO: 384219 - protein, 420 aa, unidentified
MARLKIVYPICCGMDVHRDFVVACIASTNAQGVTDYSSKRFSTYSGGLRDLRDWLASNTCRDVCMESTGKYWFPVHNILESTCRVVVSHPKFVKAIKGKKTDKKDAMWIADLFKHDLVRGSFIPPEDIRQLRDLCRYWVKLTSYTTGEKNRAQNCLTVSNYKLDSVFSNVFGKSASAIISHMLENPGEQFDVTPFVDRRCKTPRNDIQAAVDGSFNPFQAEKLKIIRRHMDDLGKLKALLETQIFALALPYAHQVELLLTVPGISEPMTAIRIIAEIGVDMTVFESAKHCCSWAGLTPQNNESAGKKKTTRIGKAGQYIKPLLIQCALAASNPRSTKHPEIRSKFQQLKKRRGAKKARVAIARRLLTAIFQMLLKDEPYSPYVAPATQSAPEKRVLTPKQALALLRSKGFVILDDSIELA

SEQ ID NO: 384220 - protein, 380 aa, unidentified
MGSCETRIGVDLPERRRRRSGNRGPVTVDPLVASTAGELGSRPVSIVGPNSRLACKSAVFARTGAMDERAGRIVGIDISKDRLDVHVLPEGEHFTLGRDEAGLKALTKRLAKQALQVVAMEATGGLEAPVAAELHAAGLPVRVVNPRQVRDVARGLGILAKTDAIDAAMIARFAEAAKLTGAPVPDAQAQHLGALVARRRQLIGMRTAERTRLQQTTDKRIRRSIERLLRSIEAELEGVDRDTDGAIKGSPLWCALAELLDEQPGLGNTTARVLVAELPELGRVSGKKITSLVGLAPYPRDSGVLRGKRAIWGGRASVRTALYMATLSAVRCDAVLKEFHQRLIARGKLPKVALVACMRKLLVHLNALVAKYYAKIEQTA

SEQ ID NO: 384221 - protein, 310 aa, unidentified
MAKESFDWAVHGEASRHTLPNDDKGFEGLLVALKAYRVGLVVLEATGGWEKRLARFLLGYGLPVAVVNPRAAREFARSMGHLAKTDAIDAMALAHLAQTLAAKADQAGVAFAPPPAEVERLQLLVTRRAQLIDMRTAETNRLSGAGRALQRSITAVVKTLDKEIARVEGDIDAHLKSHFEEQSRRFDAIKGIGPITCAVMLAFMPELGRVSNARAAKLAGLAPLNRDSGKERGQRHIFGGRSIVRSTLYMAMCSAVRFNPVMKIFHDRLIAAGKPKKVVLTACAHKMLRILNAMARKGQPWNEDLHPVAP

SEQ ID NO: 384222 - protein, 379 aa, unidentified
MDHAITDTPAETILHGALELSKNSWLLALQFPDRAQPSLYPISGGDTVGLMAKLTAARDRWAKMSGKAPSIVLCYEAGYDAFWLARFLKARGIECLVVDAASMQVNRRARRAKTDRIDVGMLLRALIAWGQGDRHVWSVVRVPNVDEEDLRRSHRERDRLVRERTAHINRIKGLLFGQGIRGINVKSKYKTLQIDKLVTGDGRPLPPRLASEITREIARLALIQEQIATLERERDQAPTPCKTTEKKRLQLVSLNGIGPAIAAVMTREVYYGQFDNRRQVAGFLGLATSPHDSGDVERSQGISRAGRGQVRGTMIQAAWLWLKHQPKSAITRWFVQRTAGQSGRIRRIMIIAVARKLAIALWRFLEQGLVPQGAMLANR

SEQ ID NO: 384223 - protein, 374 aa, unidentified
MDRIYIGVDFHARQQTLCYLKTETGELVTSELKHQDKQKLRAFYQQFPGPVVVGLEASGYSPWFERLLEELGCEVWLGHATEIRRRARWRQKNDRRDAELILDLMLHHEFPRLHRPAAASREVLRMLRYRQKLIKLRTMSKNSLQAIALQSGLAKGSQLFTKAGQQELSRAEMSPVMQWQREHWLQLLEPLNQQLLETMVWFKAQSKGDVCLTRLRTHPGIGLLTSLCIQHTLQPVSRFRNTRKVAAYAGFDPVERSSGERQCFLGISKAGSRLLRYLLVEAAQTAVRKDEDLKRFYKRLAERRGRPKAKVAAARKLLIRAYIMLRDEIDYAEFRRRAVAARLARRGHGPNVPEVLIGQPASADCQGELTSANK

SEQ ID NO: 384224 - protein, 426 aa, unidentified
MQPHYHCVCGVDVHKEFLQVCILKQDESPTIMRVFNNFRGLNELKERIEEEGCECIACESTGVYWYRLYLAFEGQIRVIVGNAYQIKSIPGRKTDVRDAQWIAELAMNGLINPSRVFPKNDRELRELTRSRESAVHSKTQIKNRIHRIFDSAGIAIGKGVKDIFGKSGIHLIWGLLNREDPETIITALPSERVKKKADVLREILSGSLSDLQIILIKKNLDMMAHINEYIDSLDELIIARITEQNRFHDIEIACSIPGVSKTSAAIILAEIGDYHDFTSAEKLASWAGLVPSVYQSAGKNCSGKITKHGSKHLRWILVQSAKAAGRTVNTSFRKFFDRISYRSGGNTASVALARKILCILWHLLCNKELYVEPMKNAKQPKRPVIQKVTRDSKMDIQTAIDFIVEHGFKVIHPDSVLEQNLREGSR

SEQ ID NO: 384225 - protein, 394 aa, unidentified
MEVMVETCCGIDVHQKSIVCCILDGPLDTNRPKKIEKTFGTRTYELRQARDWLNDHHVSDVFMESTGQYWLPIFNIFSDAPFRMILANPQHIKNVPGRKTDTKDAEWIAQLGRCGLIQASYIPDHDVMELRLMTRRRQSYMQKRTQAKNELHNILQRSNIKLTGYLSDIFSKTGQALLQLFIDGEKLSIDRVKACMHKHVKASAEDILTAMDGKISGVNRRLLEDSLEEYRFYSRKIKQMEDDIEGYILDHFPEEYGLLMEIPGVKKQSAAVILGEIGPHVEAFKTAGHLASWAGVSPGSNESAGKKKSSHTTQGNKYLKTVLFSSGGIAGRSKDPAFSSLYYRICARGSKMKAVVACGHKLLRIIYKILAEGVHYDREKALGLRQQSKDLISI

SEQ ID NO: 384226 - protein, 425 aa, unidentified
MNSNINHKINQVSEKTLVIGIDIAKQKHFACAVDDRGRVLEKSFPFYQSEDGFEQLVKKIESLQSCHQKSEVIVGFEPTGHYWMNLAAYLVEQDIRYVMVNPMHVNRTKELDDNLQTKNDKKDARVIASLIRDGRFTFSRILTGVEAELRNGASLRSKLQEDITAIKNRMIRWIDLYFPEFQHLFKSFGKNACAVLEMTPLPMDFDGKSEEELIQLYKNVEGLKCLSVSKIQKLKVLTTKSIGLKEGLEMARFEIETLLTQFKALSKQLEVLSLRLTELAQQLIDYEYILSIPGLGENTAVELLSETGSLSQYEHPRQLIKLAGLTLRENSSGKHKGHKKISKRGRRKLRAILYRVILPLIQHNIAFKSLYQYYTTRTVNPLKKKEAMVVLSGKLLKILYALCVKHVHFNASLMMTDLHCLQEAA

SEQ ID NO: 384227 - protein, 315 aa, unidentified
MKRFVGIDVSKDSLDAHLRPDNTRKRFDNSAEGVAELLSWLRPLTPERILFESTGPYQKLAVGALLADGLPAVVVNARQVRDFAKALGTLAKTDAVDAAIIAHFAELIPTVVRPLPSKELQELRDLYDRRGQLVRFLAAEKNHRHAAAHASPKVLKNIDKSIDFLRKQILDLEQRMDNLVEASDAFKAQNELLQSITGIGPQVSRTLIAYLPELGQRSRQSITALVGLAPFNDDSGNHAGQRHIRGGRAKVRLGLYQAAVAAIRHSKPMRDFFASLRQRGKAAKVALVAVARKLLVLANALLRDKAPFKYPANSV

SEQ ID NO: 384228 - protein, 357 aa, unidentified
MTQSKELNFKGQNIYIGLDVHLKSWTVTVLSEVSVLKTFSQDPSPDKLYKYLTNNYPGAEYHSVYEAGFCGFWIHHRLTELGVNNIVVNPADVPTMGSEKLRKTDAVDSKKLAVGLRAKQLRGIYIPDDEAIEIRSLVRLRGMITKDTTRQKNRIKSYLRYIGIEIPKEFTGPSFHWPQRFLDWISTVSVKTSSGRQTLDMHIKRLKDLHTQNLEVIRALRALSKTERFNEMLTLLTSVPGIGRIASLTLMAEIIDVNRFRNSEQFAAYIGIIPMCHSSGEHNGNGNITVRRQAALRSIVIESSWAAVRVDPALQLYYANNCKRMPAGKAIIKVARKLVNRIYCVLKNHHPYVYAVA

SEQ ID NO: 384229 - protein, 387 aa, unidentified
MYFIGIDISKFKHDCAIIDEAGDTVTASWSFANNCEGFSLLKQLLDALDGQKKIGFESTGHYGHNLKLFLEANNFSFMEFNPLLVSKFVRSKSLRNTKTDSLDAVSIAQYLMTVEYKPYPPSFYHMDQLKSLTRFRDSLVRQHSRQLVELTNILDKVFPEFKPFFDGRFSATALYILTHYQSPEKIANMNANSYEALRKKSRGKFSMVKFAQLKTLAKNTVGRSDAFLLKQMEITIDIENQLDAKIDEIESQILECIRALNPPILTIPGIGELTAAIILSEYGNINKFENPAQLLSFAGLEPGYYQSGLAEHQGHMVKHGSSHLRYALMNACLPLVTYEPVFAEYYAKKRAEGKPHRVALTHVAKKLLRVIFTLQTKNISYNPTLIR

SEQ ID NO: 384230 - protein, 356 aa, unidentified
MKNSKLDFRGQTISVGIDTHKKNMVITPRCQGMQLKTISMDPEPAQLVRYLHKNYPNARYESVYEAGFSGYWMDRKLREAGIKNIIVNPADVPIKQKEKRKKTDKIDSRKLARELSAGNLEGIYIPSEEHEAIRALSRLRKQITKDQTRQKCRIKSLLNFVGITLPENSELKHWSGKFIKYLSEIEFKHKAMKITLERLLESLINGRQILLGIVKNLREIVKEDTEMKKITEYLQSVPGIGFITAITLYTEIMEIKRFGKFDELSSYVGFSPATDSSGEKDKVIGLSKQQNRYLRNMLIESSWLAIRKDPALLQAYGNLVKRMSKQKAIIRIAKKLLSRIMYVWRNEKHYVCAVVS

SEQ ID NO: 384231 - protein, 334 aa, unidentified
MKKTVFVGIDIGSEVFVSSILQSKTIITEEFSNSEIGFESFVCWLKKNGASSSKSILVMETTGVYCEKLSHYLYSKKYDLCIENALKVKRAFDLSPKKNDAIDSKRIAEYAMRFYDQLRLWYPPNHILEEIGSLLSLREQIVGQRTANKNVLNTLKKKVNENIFAKEILELTISDLKEKLKAIDKKLKTLVLSDKEIASKYLALISIPGVALLLAAELLVLTDGFKKTINHKEIASYLGICPHENSSGKMKKRSRSCGYGHPRIRKLIYLASCSIREHNQSFSDYFERKVKQGKSPRMLINNIANKLIKVICGIIKSGKSFIPDFRSLHPVLQS

SEQ ID NO: 384232 - protein, 346 aa, unidentified
MKMLIGVDPHKESVAVAVVDEVVGEFVERATFPQNRAGLRSLKRWAKRFPERRWAVENAGGLGRHLAGRLSAAGESVVDVPPKLSARVRVLSTGNARKNDGLDALATALAASRNERLAAVDPEAASEVLRLLSERRQDLVTERTRALNRLHGLLRDLVPGGVAGTLSAHRAARILRGIRPQGASARLRRRLASEVLRDIRTLDRKIADLNGRIEAEVKTSGTTLTEIFGVGPILAAKIIGMVGNAARFPTKTHFASYSGAAPVEASSGEVVRHRLSLAGNRKLNNALHMVAVCQARSDARGGTYYRKKMAEGKSRKEALRCLKRRVSDAVFKSLMADLQAPSRSAA

SEQ ID NO: 384233 - protein, 368 aa, unidentified
MSVSAVPVVRANPLPIGREKGMAMTMVSAGLITGGVDTHLDVHVAAALDRIGGLLGVAEFDTTQAGYEALLAWLLSFGSLERVGVEGTSSYGAGLARFLMGHDLEVIEVDRPNRQERSRHGKSDPIDAIEAARAALSGRATGLAKTKDGPVEAIRALLVARRSARNQRISALVQMRHLVFTAPQPLRERFFGLSKTQLVNQTAALRPRDNGDVVTYATKVALKTLAQRVQLLDAQISQIRHMLPPLINAAAPNLLNVYGVGVDNAAILLVAAGDNPERLKSEAAFAHLCGVAPLPASSGKVIRHRLNRGGNRQANHALYQVVISRLASDPDTTRYVERRSKEGKSIGETVRMLKRYVAREVFKHLPAA

SEQ ID NO: 384234 - protein, 348 aa, unidentified
MKKVLKQALGVDVAQDELVVTLGRIHDDFSIELYAHYVFKNSDAGIIALIKWVQKLIISDVNVRFVMEATGIYHQKFAYYLDEHGFEVSIVLPNKISNYMRTLELKTITDKTCSEAIARFGLERNLDQWKRPKEVYRQLQQLTRERDQVVADRSVAKNQLHAEQKEAYPNKNSVKRIKARIKFLNQQEKEIKLEIDAIVNSNQELKNEIDNICTIPGVGRLTATIVLAETNGFELVRNKRQLVSYAGLDIKEKTSGTSVKGKPRISKKGNRNLRKAMHLPALGAIKHSPVHRTIYERLVSKGGIKMKGVVAVQRKLLELIYILHKNKTVYQTDYEEMKREQLQLANSL

SEQ ID NO: 384235 - protein, 343 aa, unidentified
MKDSIYDHYIAIDWSIKNMAIARMTKKTNKIIVIDVPSNIVELQTYLKNLRGSKILAIEETTTSQWLYTELEDYVERVLICDPHRNKLLSEGAKTDKIDASKLVQLLKAGLMKEVYHSADKFIYLRRVVSGYEDMVKAGVRLKNQRYALLRACGKSGKEKKDINLGAQGEQFVLQCLDRQIQAYEEERSGYEKEFVRLARKHPEIRHQKSLPGIGSINAVKIVSRVVSPYRFTDKGNYLSYAGLIKLERISGGRSYGKRNPRYCRQLKSVYKTGVLAAIGGNNPINDYYEYLIREKNYPEHNARNKACRRLAVLSLGVLRSGKKYHPYRRDRVKGNKGITSAL

SEQ ID NO: 384236 - protein, 343 aa, unidentified
MAKTPIAVLGIDLGKNSCSLAGLDAAGAVIMRRRMTREGTIKFVATLPACVVAMEACCGAHFLGRTFACQGHTVRLMSPEYVAPYVKAQKTDNRDAEAIAEAATRPTMRLVTLKSEAQLDLQVLHRARERLVAGRTRLTNQLRAMLLERGVILPKRRAPLIKRLDELIAGELPISQRARQLLLDLRDEWMDQDRRIKAYDDELMALTREDGAARRLATIPGIGVINATALLAAVGDASAFAKGRDLAAWLGLTPRQHSTGGKTKLLGISKRGNKYLRTQLIHGARAAIVHFAKKATPVGTWVRQLLTRAHPNVVVVALAAKLARIAWAVLRHGSNYDHRTATV

SEQ ID NO: 384237 - protein, 373 aa, unidentified
MPKYSTAFGMDVHLRSTTVCALDADTGEAVTRRFPGNPWGEIAGWMDGFPGPSLAAYESGYLGFAPQRELAGLGVECVVAAVSKIPRSAADSASKNDRNDAARMAKAILAHDISPAWVPSPEVEGIRDLAGAYDGATARLATAKQRLLAFLARRGFVYGGTTPAGNPRKYWTYDFLRWLDKVRPEDDGGVRALAALRNEVEAAAEARADLLSEYRAAVDAGPIAAEVAALQSIKGCAFALAAAFSAEVGDFTRFRSGRQVTAYFGLAPSQRSSGDSVRLGGVSGAGNALVRKLAVEGSWCYAAARHQPKLMPRDTGVPLEIRVHGRKGSERLLRRREEMLARGMPAAKANAATAAELVRWLWALGMMCREAGE

SEQ ID NO: 384238 - protein, 470 aa, unidentified
MKHNRRRSLGKPRVSPTVLDRINPNVAGIDCGSAEHFVAVPPDRDATPVRSFQTFTGDLVRLAEWLTVCRVQSVAMEATGVYWIPIYEILEARGFEVLLVNARHLKNVPGRKSDVSDCEWIRELHSVGLLRGSFRPPDALVALRAYLRHRQTLIESAGTYVQRMQKALIQMNVQLAVVISDITGVTGLRILRDIVEGQRNPEHLAQHRDPRCRASEAEIVAALTGHYRPEHLFVLRQNLELFDTCQAQLAACDLAIEGHVRTLLADVATPGTPLPAPRVTRKPRDNEPRFEIRTPLHHLTGGVDLTQIDGITPYTALKLISEIGIDMARWPTEKHFTSWLTLAPKNKISGGRLLSSRTQPSANRAAAILRMTVMSLGRTDTVLGAFYRRLASRIGKPQAITAAARKLAILVYRTLRGDLVYQRLGADAYEAQQRTRTLRRLRHRAASLGFALVNRATGEILSPSVSYSAP

SEQ ID NO: 384239 - protein, 400 aa, unidentified
MRVVFGIDVSKASSEVAILVNGEKVHNYTMSNDAIGFSRLLGDLKTVHKPEIIFEATGVYSRRLQAFLDEHGYAYTRLNPLEAKKQLDSLRVRKTNQIDAEKLAQSQFVLNRKPTYVQEEVYQNLRDLSRFYQNLTEDIVRAKNRLHKVLQVTFPELENILSTPSGEQYWNLVIAFPCKDFVLELSNDELSKSIRLSTSKRISDKRVAYLAEKLIALANQSYCAVKKTSPILEEVRYYTKELLRLSEQRQAVLDEMVELAQPLPEYDILLSIPGIAETTATSIIGELGDIRRFQSANQINAFIGIDLRHYESGNFLAKEHITKRGNPYARKILFKCIHNIASASHTNPCHIADFYEKRKRQSQTTSTKPHTIASIHRLIRTMYYLIMHNKLYDYASTQNR

SEQ ID NO: 384240 - protein, 404 aa, unidentified
MKGPIVSIDVSKGKSDYQAFKDLNVKYTSSRSIKHNKEGFDEIVNLVREMEKKLETEVCVVYEATGVYHRVLKKVLEDNNIKQFIINPLLSAKTRKNDSLRSPKTDKLDPKSIAKTYYSHSLHNSHKQETIYHELRELSRYYEDILVHIRKDKVAFRAQLDIVFPGYDTLYDDLYGPVALAIIEKYPHPEMLQKKKINTVSKVIQNKTCHRQAVSDTMADKAIEYSKTIYSGCDKDDIEVLILQRFIKKLNEDMAEAERTIGEMIKLAQELPDFNIIKSIPGIGDNLAARIIAELGDMTRFKKKNELVAFAGLDPRISESGQNDGDHMHITKKGNKRLRCLLYLAVTCSIRLKRDDNSIKDFYIKKKQQSNPMCSKAAKTACASKLVRIIYSMCKTGELYQYNK

SEQ ID NO: 384241 - protein, 325 aa, unidentified
MTYIGIDISKATFVAAFPHVKGYRTETFPNDAKGIRRFISKLDPTIHHCVMEATGNYCFLLLYLLDKAGIRASLINPKKIKNYARVMMSVTKTDSQDACLIADFGERFKPAPYKFPSEHIMILKQKKTVLRQLQKQLTATKNLLSSLEPLPVKDKKCVYSLKQTVTFLEKQIKYMQQEMEAVVTDVFEKQLKLLTSVKGIGVTLATALIIATGGFTYFDNAKQFSRFIGISPTIEQSGTSINIRGHINRNGDETLRSMLYVAAWSASQHNKACSECYQRLRGKGKSGKVAMIAVANKLVRQAFAVVTSNKSYIDGFVSTKPDTAV

SEQ ID NO: 384242 - protein, 436 aa, unidentified
MTLINFVAANQKYYAFNLLSVFIMVFWSVQYLLQHLLVQTQVSHQLLQPLILILQLPQTPQFRHARPGKFFLPVNGMDYFLPLRLTVRNVLTRIITMNIVFLGIDLAKNVFQLCGLNQAGKPVYTKRTGRKELLQTLANIPACLIGIEASTGAFYWQREFEKLGHKVKVISPQYVRPFVRGQKNDGNDAQAIAVALMQPTMQFVPPKSPEQQDIQALHRARQRIVNHRTATVCQIRGLLLDRGIPIGSAVSRARRAIPLILEDAENGLSSRMRRTIAELYDLFNDLGRRIHFFDKEIETVFRQSEACPRIAKVKGIGPKTATAVVAAIGKGTEFKNGRHFAAWLGLVPRQHSSGDRQVLMNMTKKGDKHLRTLFIHGARAVVRVATNNNDGHMNQWVNQLKERRGFNKTTVAVANKNARIIWSMLRNDTGYQVVCN

SEQ ID NO: 384243 - protein, 482 aa, unidentified
MKKSSIYPNRSQELDALFEKAGNPLKLICVPIDYAKKDHLVMFCNGNGEVLRKPFSVKNSVGGVKYLLGQVTRSCRHRHIQSDHVFFGGEDVNSYAENFANTIRSKGWLVANVNAHDAKKQRENLQASTDRLDLMGIATMLLSRRANCCPAQTGVYRNLRTLVRHRKKLVKMKTEVRNRIHTIVDRLFPGFLNEKKSGILPFSNSSLYLMQERFSAPQIRRRQRSALIRNLEKRGTKKAEKAAARLQEYASQVLTTPDEYTATLQVSLTNHVTHYRCLFDGAQQLVNEMAQLLAQTQGAFLTSIKGIGIVLASGVAAEIGDPLVQRSTDQVASYAGIVPKVKQSGGSQGPSITSHVSKRSNHILKDFVVQSAFHIGRYGPKDLKDDYSRREAAGQHADFGIARRFVRMAMCMMRTSQIYLPPDMRSTHIKPERRADYYLAMWPYLRDKWSKAGTLNVAFAMDKPLGQWRYIVQEVYGKKLKM

SEQ ID NO: 384244 - protein, 389 aa, unidentified
MKIFVGIDIAKLNHFAAAISSDGEIILEPFKFTNDADGFQLLVSKLESFDKNSIIIGLESTAHYGDNLVRYLVAEFYQVCVLNPIKTCQMRKNNVRKTKTDKVDTFVIAKTLMMQDDLRFITFFDLDMMDFKALGRFRQKTIKQRTRLKIQLTTYVDQVFPEIQYFFKSGLHQNAVYALLKEAPSPKEIASMHMTHLANLLKVNSHGHFTKEQAKELRVLAQKSVGANDSAISIQITQTIQQIELLDSQLEKIEAEMTDIMKFNDSVIMTIPGIGYINGGMILGEIGDIHRFSNPNKLLAFAGLDPSVYQSGNFQAKTTRMSKRGSRVLRYALVNAAWNVVRNNATFKAYYDAKRAEGRSHYNALGHCAGKLVRVIWKMLTDEVEFNLE

SEQ ID NO: 384245 - protein, 383 aa, unidentified
MQKLNDLSRCLTALELDVTLIAVIEMSLSSWLVAGVVPGVERQPLKKLAVDESALLKLLHRWREQAGRRIERIVVAFEAGRDGFWLARWLNARGIEAHVIHASSVAVSREHRRAKTDRLDTELLKRCFLGWLRGERDHCKMVAIPTIKDEDAKRPNRERDSLVGERSRIVNRMKAALVRLGIRGFNPKLKKAAERLDGLRTPEGEPIPPNTLAELRRDMERRRLVNNQIRQIEEARLERLEQTPSDGPHAMVRLLARVIGVGIETADMLVHEVLSRNMRDRRAVARYAGLTGSPDESGRKRREKGLARSGNARVRRGMVQLAWRFLMYQKDSALAQWYRARTENARGTRKPLIVALARKLLIALWRLVRQGVVPDGVVLRPAQ

SEQ ID NO: 384246 - protein, 370 aa, unidentified
MGESTTFVGLDAHKKTIQVAMLLPGKQDPVEWQVVNEGAAVRRMAKKIQKEAPGQVRLCYEAGPCGYSLQRTLRELGMECVVVAPSLIPVKPGDRIKTDKRDARKLAEMHRAGLLTEVHPPTAGEESVRDLCRCREDAKADQLRARHRILTMLLRRGIAWEGGKSHWTKAHREWLRGLSFDHPADRIAFNDYLLALDHLDERVRGLDAAIQTVAQEEPYKEPVAALRCFQGIDTVTAMTVVAELHDFRRFQSPRELMAYLGLVPSEHSSSESRRLGSITKAGNSHVRRVLIESAWHYRHPPRLGPKLILRRQGQSTAVIAIADKAAQRLYRRFTRLQARGKPLPKIAVAIARELVGFLWSVIYPVSARTA

SEQ ID NO: 384247 - protein, 378 aa, unidentified
MHAAKVVAVSADRESGELRSRRLPGRTGEVVEFCAGLPGPVRVAYEAGPTGFTLARALGDVGIECVVAAPGKIERPSQDRVKTDRRDAERLMRLLMVDGLHPVRVPGTEEETLRDLVRAREDVRGDLMRARHRLGKLLLRHDIAFAGPGANWSVAHRQWLGRLELPERGAQVTLLDYLGAIDALLVRRGALEATIGELVLLSPWAQTVARLRCLRGIDTLSAVGLCAEIGDWERFERAGQLMSFLGVVPSENSSGEQRRQGAITKSGSRHARRLLVEAAWHYRRMPAKGLALRRRQEGQSQHVIALSWKAQQRLNRTWRRLDSERGKRRTIVAVAVARELAGFCWAIANPTDPSSTKSVKEAAGRTWPPRARAPAISL

SEQ ID NO: 384248 - protein, 454 aa, unidentified
MRWKKANTKADIDSAFPLLRPNAAGLDVGSREHYVAVPAGRDTRPVRSFGCTTSELKQMAEWLKACGVDTVAIEATGVYWVPIYEVLEDAGIEAFLFDGRQTRHVSGRKTDVLDCQWSQKLHSHGLLTRAFRPDKEIATLRAYWRQRGGIVECCARQIHLMHKALEEMNIQLHKAVTDITGVTGMRILRAIVAGERDVHALAALRRGRIKATTEEIARALEGTYRQEHMFALAQALEAYDFFQRQLAECSQALERHLAQMRSGSDTPPQTPPPKQRKNQPNFDLRNELARIAGVDVCLIEGIDAMTAQTLISECGTDMTAFPTEKKFASWLGICPNNRKTGGRIRSRRSRRVKNRAATALRMAAQTLQKSDSALGSYFRRMKARLGAGKATTATAHKLARLYYRLIKHGEAYLTRSQAEYEALQRQRTLTSLQRRARHLGLQLLDASTGELLGA

SEQ ID NO: 384249 - protein, 429 aa, unidentified
MNYTQNEKIMQVKNSTLVVGVDIAKNKHAARAFNFRGIEYDKAIFFENNEAGFKKLLHWIKKVSEKENKTNVIVGMEPTGHYWLPLEEYLRRKTDFLRVVVNPAHVKKSKSLDDNSPTKTDRKDAKVIAKLVIDGRYSVPHMPEKEYADLRVAMTHRERLVKDIVNLSNKIQQLIDKYFPEYSTVFKKWDGKASAAVLKELFLPELILEKTEEEIVEIFRKGANRAVGIKRARKLKKAALSSIGIKEGGEFARLELNNLIEQYELLTKQKELLEEKVEKLLENMEEAKYMESVKGVGLITVAGFIAEVGDIKDYNHPKQIQKLAGLNLKEHSSGKHLGQTRITKRGRPKLRALLYRVMLPILANNQEFKQLHEYYTTRRDNPLKPKQSMIALACKLIRIFFALGQKHVMYDGEKLMNDIERNLDLQEAA

SEQ ID NO: 384250 - protein, 342 aa, unidentified
MKFYCGIDLSARDCHVCVIDEQLKIVVQQKLRNELPKICRLLEPYKAKLKIVVESTFNWYWLIDGMQAEGFEVVLAHTLGLYLITGAKVKTDRRDAYSLAKLLLVGAVPAAYIYPVETRPVRDLLRRRAHLVQVRAGEYGSLRRLLLRQGILSSKQQEIKTATEAELEQWFEHPLVRLHASQELQRIELYSQQIAELEKTLLLLAKTEQSYQLLLQLPGVGQTIALTILYEAGELTRFANVKVFSSYCRVVPGIAQSGNVSRRGRASKQGNHYLKAAFSQAAVHAVRCYPKVRRYYERQLKRHQGRGRQMICYNIIAHKLAQAAFHVLKEQTEYREELLFGR

SEQ ID NO: 384251 - protein, 344 aa, unidentified
MQMSEELYIGVDVSKKWLDLAYYDGVDVDWKQGHIRVDNNQTGFNQIGKWLKKLGMTVNRVLFCMEYTGLYCQELREWLEREGIVYGMVNPRKMHRFEPDLGSDERALDRIKTDEMDSFRIAMYCEKHSRKIKSQPSHLPAPAYFKLKRLLVERRQYVTCSALYKGQLHDCCAYDSDGSVMRKKETLKSLKEHIRHTEEEMLHVIAEDGAIKRNFDLLRSITGIGIVVATETIILTENFTAITNPRRYACYVGIAPAKRESGDSVRGGNHVSRKGFTQAKADLSVVSLHCINRDPNIKAYWQRKKAEGKHSGVVLNAIKFKIVLRMFAVIKRQKPFEEIDAFRK

SEQ ID NO: 384252 - protein, 498 aa, unidentified
MKAKKSPAPEANAEKKPKRPTKKSAAATQSRRSTKGLREIHRHAAGIDVGAEEHYVAVAPRSVPEGQSAVRSFSAFTGGLDALVEWLKQCGVTTAAMESTGVYWIPLFQKLAEAGIECVLANAAHVRNVPGRKSDVRDCQWLQELHSYGLVSGSFRPDDDICKVRSLQRHRANIVSSASAEIQHMQKALQQMNLHLHHVVSDINGKTGLRILDAILAGERDPKVLVQLRDPRITKSTVSEMEEGLKGDYRTEHLFVLQQSLETYRFHFAQLERCDRQIEIILAELAAKAQAACASKELSSNDGPEQPPPGQALRKQKRSPKPVRHAPPVSFRAYWQAICGVDLTAVIGLNILSVSILISEIGADMSRWRNAKAFCSWLGLCPGNKISGGKVLSSRSPRVVNRAATILRIAASTLHRSDCCIGHFYRRKKAHLGPAKATTATARKLACIVYHMLKHKHEYREPDPVAYQAKVHKGRLASLKKQASMLGFNLVATASPTA

SEQ ID NO: 384253 - protein, 375 aa, unidentified
MKEKLRFLGMDVHAETIATAIAEPDGEVRSLGTIPNRMESVRKLIKKLGPVEKLRVCYEAGPTGYVLYWQLAELGVRCEVIAPSLVPVKAGDRVKTDRRDAEKLARSYRSGDLTAVWVPDEGSEALRDLVRAREAAKQDELRARHRLGKFLLRSGQRPPSGVRAWTHLHLIWVAQIRFTQAAQESTRLDYLHEVEHMRERVLRLEQAIVEAVKLASPALQEVITDLQALRGIAHISAVTIAAELGQVSRFAGARELMGYCGAVPSENSSGKRTRRGGITKTGNAHLRRIVVEAAWSYYRPPAIWAGLRKRQQSASEEAKEIAWKAQHRLHKRYARLAATGKDKRKIVTAVGRELLGFIWAIGTKAEATVMQRIPA

SEQ ID NO: 384254 - protein, 440 aa, unidentified
MAKVIIGVDPHKLSATIEVVDRRERLLGSGRFSTDQAGYTAMRTFAKAWPERVWAVEGSNGAGRPLAQRLLEAGEHVVDVPAKLAARVRLFDTGHNRKTDARDAHSIAVVAVRTRTLRVLAADGELEGLRMLCDRREELTRLRVQTVNRLQRLLAELIPGQGQKDLTALQAKAILATVRPRDIAGKTRRRIAVEELADLVAVEAKMKKATAELKTIVLARGSRLMDIHGVGPVVAARILADVGDITRFADRNRFASWTGTAPLDASSGEQNRHRLSRAGNRRMNHMLHIAAVTQIRLDTEGRAYYSRKRAAGKKPLEAMRCLKRRLSDVVYRQLVADAERAAMTASSGEAGTGPGGHCGATQESSAVDLPPHIDTSDQPLPGPAHPTLPATKPHANPCAASAPRRSRRRAGAVKVERPTGRTTLTAPSAGAHSAAPKPTS

SEQ ID NO: 384255 - protein, 367 aa, unidentified
MKKSSTVAAKQGRNFTQQKLTIGLDLGDRGSWYCVLEESGAVLWEQRVSTTPKAMREAFSTVARSRIALETGTHSPWVSRLLAECGHEVIVAHARNVRLIGESRKKDDRLDAQTLARLARIDPQLLCAVKHRSAKAQADLTVIRARAGLVRARTALVNTARGLAKSYGERLRSCNVRNMNPEKAEGLSPELQTALEPLLLAMESLSEQIREYNERIENMAQQSYPQVALLKQVKGVGTLIAMTFLLTLEDPQRFAKSRDVGCYLGLQPGRRNSGQSEPQMHISKEGDPYLRTLLVQGAQHILGPLGADCDLRRWGLKLAERGGKRGKKRAIIATARKLAVLLHHLWVSGEVYEPLYNSKQNAMATAA

SEQ ID NO: 384256 - protein, 430 aa, unidentified
MSVDRSGEQEPQFAAFVGIDWADRKHVWCLQPSGSQKRESGELEHAPEAVEVWVAQLCQRFAQGPIAVALEQSRGALVFMLSKYERLHLFPVPSTMAGKMRDALYPSGVKDDPRDADLLLDLLLQHRDKLRRLSPDTEATRRVQNLVEERRKLVDEKTEQINRLTSHLKIYFPQMLDWFDRLDREAACALLERWPTLEELQKVPPAKLRTFFCKHHCRDQEVIERRIVGIRQAVLAIRDRAVIEAKSAVVKVIAQLIRILVQGIVELDRKIEQEAAAHPDFFIFDSLPGAGPALAPRLLSAFGSQRARYGSAQEVQAYSGIAPVIERSGKKKWTHFRWAAPKFLRQSFHEWAGRSITQSQWARAYYEQQRQRGKGHHAAVRALAFKWIRIAFRCWQNGVAYEESRYLATLLRRASPLSTSMIASTLARTL

SEQ ID NO: 384257 - protein, 375 aa, unidentified
MSKGTVFVGMDVHAETIAVAVAEGRDQVRSVGTIANRPEAVRRLVGKLGKPAKLKVCYEAGPTGYALYWELTRLGVQCEVIAPSLVPTKTGERIKTDRRDAEKLARSYRSGDLTPVWVPDARHEALRDLVRAREAAKEDQLRAKHRLGKYLLRNGQRPAEGCRAWTVAWWQWVRALELPYADQNTTLLDYIMQVDHQAQRIELLDGAIDRAVAAAPAELRAIVDALQALRGVAKVTAVTLATEFGSFSRFERAAQVMSYTGVVPSEHSSGPRTRRGGITKTGNSHLRRVLVEAAWHYRHKPRICQRQHALQQTLSPKVAAIAWRAQERLHRRYWALAQKSKPAGKIVTALARELVGFVWAIGIETEQQLQRPKAA

SEQ ID NO: 384258 - protein, 457 aa, unidentified
MGRAAGRCSTRSKIASAPDRKECSTPRKRVSVDAAKRESVARQHAAGSGDRSRSRTVGYAEGRTSGQSYTRKEPAMTKDTTTDKGPATIKYVGLDVHKDTIAIAVADDSKPDGLVLGIYPNDEARLRSVLSKIGPAPGLRVCYEAGPCGYVIQRLLTRLKIDCVVVAPSLIPRKPGDRVKTDRRDARKLAVLLRTGQLTPTWIPDREHEALRDLVRAREDAVVDRTRCRQRLGKFLLRLGVLTPDGVNAWTVRHREWLTRLTMDQAAQQVVLEEYRQTLDESGRRVERLEREIESAVTTSAHVATVAALQAMRGVALVTAATIVAEVGDIRRFRTPRQLMSYAGLVPSEHSSGGRTRRGSVTKTGNAHLRRVVIESAWHNRRKPMVSEVLRKRQREAPAAAVAIAWTAQVRLNKRYHRLTERGKLPQTTVVAMARELLGFIWAVAHTAEPQTRRAAA

SEQ ID NO: 384259 - protein, 368 aa, unidentified
MMGWMAPLRHLGAKVLVDRKPPANREPSMNEITTVGLDLAKHVFQVHGVDAEGTTVLRKQLRRGQVLAFFSRLPRCLVGMEACATAHYWARELRALGHEVRLMPAQYVKAYVKRNKNDAADAEAICEAVGRPTMRFVPVKTAEQQAAVLLHRGRERLVRQRTMLVNALRAHLAEFGVIAPQGLRNVGRLIAIIRDDDDARLPGLARQVLQVLAVQIEQLEAAIAALEKRLMGWHKSNPVSQRLATIPGIGPIIATAIAAMVAEPSGFRSGREFAAWLGLVPRQNSTGGKNWLGGISKRGNQYLRRLLINGASANLLRSKATNADPWVIGLRRRRPSLVVAVALANKTARIAWAVMHRQENYQRMATAA

SEQ ID NO: 384260 - protein, 435 aa, unidentified
MLLFFFIKVVILMMKLKYPICCGLDVHKNVIVATIVITNRDGVSEYRQKSFSTINSDIQKFHNWLIENNCYHVCMESTGKYWIPIFNYLENDIDVCLTHPKYVKAIKGKKTDKKDSKWIADLYKFDLVRCSFIPPKDFRQLREIARYRFKLVCMKSSEKNRIQNCMTVSNVGIASVLSDPFGKTATEIMSYLLEHTADSIDEKAVRKLIKKGAKAKSDEIIEAIKGYNIETDQAKKLELALGHLEYLDGMITQAEVELYVRIKPYYEFVEFVSTMPGMTELSSTIVLAETGVDMNIFDDAKHLCSWCGLSPSNNESAGKKKSVRIAKAGAYLKPMMVQCALAAIKNKKQPYFAIKYGRIKKRRGHKKAIIAIARMMMVCIYHMVSEKKPFTPADYEELMKPQNHVERVVLNENNVFAYLESLGYDSSKLVKRNDN

SEQ ID NO: 384261 - protein, 411 aa, unidentified
MQRRENYLYVGMDLHKESHTAVLVNCWNEKLDVIVIENKPSEFIKLEKRVNKKASQLSLSPIYGLENAYGYGRALAVWLIEKGYVVKDINPALAYDQRKSNPTFQKNDEYDAFAVATVLINQLHNLPDAKLEDNHWTLSQLVNRRDILVKDGIRLKNGLHEQVSIAYPSYHKFFCEIDTKTALYFWKTYPSPTCLQNKTVDDLYSEFREIATQTSKSKAELILDCIRNDGDTLRDYQESRDFITQSLARCLEQQKDEIALVEAEIKRMLQFFDYKLTTIPGVNIATASKLIAEIGDIRRFPNADKLARFAGAAPIKFSSAGKGKEQSSKQGNQQLHGLFYFLAVSMVTVPKSGKPNQPIFYSYYQRKISEGKTKSQALVCIMRRLVNIIYGMMKNKTEYRPFVVEEQATEE

SEQ ID NO: 384262 - protein, 411 aa, unidentified
MDVYCGIDWAEDHHDIAVVDRDGKLVARRRISDDPAGLAGLLDLLAEHGDSADDPVPVAIETPRGLLVACLRATGRPVYPVNPMAVARYRDRHSVTGKKSDHGDSVVLANVLRTDMGMHRSLAADSELAQAIAVLARAQQDAVWDRTTAHNKLRSHLREYFPGFLAAFAAARGGITRPEARAILAAAPTPAAAAALTLAQLRSLLKKAGRSRGIDTEATRLRDAFRIPQMRQLPLIEQAMGQQTLALLRQLDAACASADDLEQAAAASFNQHPDAGIITSFPGLGPLTGARVLAEIGDDRSRFQDAKGLKAYAGAAPITRASGKTKSVTRRKVKNNRLAAAGYTWAFSAISASPGARAHYDRRRDAGDKHAGALRNLFGRLTGCLHHCLITGQHYDEATAFCATTKQPAAA

SEQ ID NO: 384263 - protein, 347 aa, unidentified
MTKLMAGMDLHSNNVMIGIVDLEGQRVVHRKVECDLAKVAAFLKPYKARLEKVAVESTYNWYWLVDGLGGLGYAMVLANPAKIQQYSGLKHGDDKGDAYHLADLLRLGILPEAYIYDKELRPVRDLLRRRMGLVQQRTSLMLSFKSLYTRTTGQAMTLSELKGMAVKKAAELYHHPANRLIAQVQKQHIEQLTESIEKLEKVILKSAKELPYYEKLKTLPGVGVILGQTITLEVGDIGRFAEAGHFASYCRTVDARHLSNGKKKAENNQKCGNKYLAWAFVEAANFARRSDEKCRRWFDRKAAKTSNVIATKALACKLAKAAWHVMAKEVSYDETRVFPELAGKKTS

SEQ ID NO: 384264 - protein, 343 aa, unidentified
MERYVGLDVSLKQTSICVVNPTGAVVREGVVDSDPEAIAAFVRSNAPNVVRIGLETGPTTTWLWTELKRLGLPVICIDARHARAVLKMQINKSDRNDAAGIARIMQSGWFKEVRVKDFNSHSVRALLTSRALLVKIKRDLENQIRGLLKNLGLVIGRAKFNVFAVRAEELIENRPELIAAVGPLLAARKAIEQQVGDLDRKVHKLARHDLQVRRFMTVPGVGPITALCFKATIGDPTRFKRSRSVGAYIGLTTRRHASGEVDWSGRISKCGDSMLRMYLFEAAGVLLTRVPKWSALKSWGTRLAKRNGLRKAKVAVARKLAVMLHRMWIDGTEFKWSTKKAAA

SEQ ID NO: 384265 - protein, 435 aa, unidentified
MEEVEDEPLFCDRVAGIDIGKATVMVTIRVPSEARAKGRQQETREFGTTRRELLALADWLRGWQVERAGMEATSDYWKPVLFTLEQEGFDCLLYQASQVKALPGRPKTDKLDSVWLARITEQGSLAGSFVPPEEIRRLRTHTRCRRKLVQMRTAQKERCEKLLEDAHLKLSSVISDIHGVSGRDMLRAIAAGERNPKVLAQMARGVMRSKIARLEQALDCSFFTGEHAFILTMMLDSIDSLTAQAGVLDARIADMCQPYQRQLEQLDEIPGFGTTTAQDLIAEIGTDMNVFPTAGHLASYARQAPRVKESAGKRKGKNATGRGNPYIGGALGEASISAGRTQTFIGEKYRRLTRRMPKRKAQVAIMRSQLVIAHALLSDPDARYQDLGPDYYERKADIRRRARNHARALERLGYKVTLEAIDPGTGELHLVATAG

SEQ ID NO: 384266 - protein, 369 aa, unidentified
MMPMIINQGVIDRRSRGRLRPGDSMGRHALHLQSPNSCVGPRARILQGRARQEDLMSAPIFVGIDVSQAQLDIAVRPGTRFSAANDEQGIVTVVEQMRTLAPILIVLEATGGLEVPLTGALAAVGLPVVVVNPRHVRDFAKATGKLAKTDALDAQILAQFAEVIRPATRPLPDEQTQALAALLTRRRQLVEMLTAEKNRLSTAPKPIRKSVRAHITWLERELMHTDTDLAQTIRESPVWRDKDELLRSVPGVGPVLTTTLLANLPELGTLTGKQIAALVGVAPLNRDSGTLRGKRTVWGGRAQVRTTLYMAAIVAARFNPVIRTFYQRLRTAGKAKKVALTACMRKLLTILNAMLKHRTPWHPEVAQHA

SEQ ID NO: 384267 - protein, 411 aa, unidentified
MRTNTCGKLSQLLNIFERWFSHMYSYFVGIDIAKNTHWASCLSSDGEIILEPFSFSNDNSGFQKFISKLESLDKTKILIGLESTAHYGENIISYLFNLDYNIGLINPIQTANLRRSNIRKTKNDKVDTKIIIKALTLGNYSLITSRDINNLKLKGLCRSRRNLVTMRSKAKIQLVSYLDQIFPELAQFFKGNLHLNVSYQLLKEYSSPKQISSLHLPKLSNILHDNSHGRYNKQDAIRLRELAKNSVGIDNPSLSLQIKHSILQIELYNEQIAEVEALYKQILDEMNTPILSIPGMSYNQAAVIIGCIGDINRFEHSCQLLAYAGLDPSVIQSGNFQARSTRMSKRGSGMLRYSLVYSAHNVVKNNKTFRDYYELKRSQGKSHYCALGHVAHKLVRIIFKMLKDNVAFNLD

SEQ ID NO: 384268 - protein, 356 aa, unidentified
MLYLGVDLHKRSCWVTVLDADGQVRESRKLGTEKWELLEFFGKVAKPAAVAVEATFNWYYFLNVVEPLGLELHLVHPWKTRAIASARIKHDRLDSRVLAELLRTGFLAEAWIAPRAVREQRQLLRYRVHTVQWATRAKNCIHAILNRNGIRTPLRSPFGPQGREFLTAVELPGTDRWEVDGQLARLDLLGEQLAALDREIRRRGRRSPVAQALERIPGIGPFIASLLMAEIGDIQRFPTAKHLASYTGLVPSLYASGEHRWGGAITKQGSTVLRWALVQAAHRAALSPQFQAFYQRQRARHGAGKATVALARKLAVIAYYRWRQAWSRPSVADQAEQVRECSCAGAWSEDRPLSSD

SEQ ID NO: 384269 - protein, 344 aa, unidentified
MNYYAALDVSLRSVNICIIDDQGKIKAEAKLDSEVEDIAGYLQSLDCPVSRIGLEAGTLTQYLTYGLQSAGFEVICMESRQVKAALSAMRNKTDKNDARGIAQVLRSGWYSRVHVKSLASHHIRLLLSARKAVLSKCVDLENEIRGLFKVFGIKLPPKLGHGSFDKAVRETIEADSALAHALLPLLEARLVLYHTFRVLDNRTRKMALRDPVCQRLMSTPGVGFVTALTFKAAVDDPHRFKRSRTVAAHFGLTPRRFQSGEVDNSGHISRSGDRDVRRTLYTAANAMMTRSAKWSSLKAWGMQLAKTRGHRRAVVAVARKLAVILHRMWLDETQFRWGTEGARS

SEQ ID NO: 384270 - protein, 346 aa, unidentified
MLYAGLDLSRKRLDFHLLDGEGATVEFGAAPPDADRLLGLTRRLARHGQPIRAAIESMNGARFVHDQLERAGWQVEIADAQKVKGLAPLACKTDRIDAWVLAELARRELVPAIWLPDPVVRGERERARWRLHLVRHRSSLKQRVHAVLLAHGKPCPVSDLFGVSGRLLLERLQLSEPGAGNLRASLRLIDELDRAISGCEAELRRLGANHRYVPLLRTVPGIGWVLAYTIAAEIGDLARFSSPGKLAGYSGLCPRVYQSGESDRRGPLAKQGPKYLRWALVEAAVHARSHPAYHERYQRTKTRLGKQRGAKVAQVDLARRLAEAIWHMLTREQPFAPAGAAKPVAA

SEQ ID NO: 384271 - protein, 346 aa, unidentified
MNQIIRIGMDTSKHFFQLHGVDTAERPMLRRKLRRNEVLGFFAKLAPTVIGMEACGAGHYWARELRKLGHEVKLMAPQHVKAYVKRNKNDGRDAEGLCEAMSRPTMQFVPVKTEEQQAALMLAGVRQQLIARRTQLSNAIRGYATEFGLITAKGLDKIEPLLGRIAQDERLPELGREMFAMQGRDYARLQIELKAIEARLLAWHRANADSRRLAKIPGVGPIGATALVMKAPDPRLFPSGRHFAAWIGLTPKDHSTAGKTRIGKITRAGDEMLRSVLVAGATAVIQQARNGRGRQSPWLLALLARKSPKLAAVALANKIARIAWKLLTTGESYDGARMPGASALAA

SEQ ID NO: 384272 - protein, 351 aa, unidentified
MLIIGCDFHTRYQQIAMANDETGELLLERRLDHESGEARAFYRSLPEPVRVGIEATGPIHWFERLLAELGHELWIGDSAKIRASEVRKQKTDERDAALILDLLLAKRFPRIWVPTPAERDLRQLLWHRHKLVSMRTMLGNQLQALAMSQGLCRKKKLFTRKGRVELVSLGLGPWASRRRAELLKLLDQLDPPIAELDCAVLEEAKRREDAVRLMTHPGIGPVTALAFVLAIGPVTRFHRSKKIASYLGLNPSEESSGGRRRLGAISKQGNTMVRWLLIETVHHAVRQDPELRQDYQRLKFRRGHAVAKVAIARKLAVRMYWMLRSGADYAQLVRRQGSPGGTLMNASSSLA

SEQ ID NO: 384273 - protein, 351 aa, unidentified
MYHMGKESTVKPTTTIAVDIAKNVFQVAVSKRPGRVAEEHRLSRTRFLRFFAQRQPATVLLEACGTAHHWARKLRQLGHSPVLLPVRHVAPYRTTNKTDRNDARALLEASRNEKIVPVPVKSIDQQSLTALHRLRSQWLADRTARINTLRGLLRELGHFIPQGARHVIPAVWELIEDADSDLPSTLRPPLAEACLEIQELGERIRAVEAQLRELAKSMPAVRRLRTVPGVGLLTSTAMVAFVGDPKRFPTSRHFAAFLGLTPRERSTGERRILGRISKRGDRYLRMLLVHGARAVLLAAKRAAKPDRLRQWGLAVERRTNHNKATCALANKLARIVWAVWSREQEYRPIAA

SEQ ID NO: 384274 - protein, 351 aa, unidentified
MSRQSTPSPIATIGIDIGKNTFHLVGLDHPGAIVLQLKTSREQLERRLANLPRCLIGMEACSGAHHIGRQLAALGHDVKLVPAQYVKPFLKGHKNDYRDAEAIAEAVQRPTMSFVTIKTPAQMDLLALHRVRSRLVSLRTGVINQIRGFLIERGIAVRQRPAPLRKALYDLLSSNPPSLSPRMVRLIADLFEDWRRSDDRIATVSAEVEALVEEDEPCQRLMTVPGIGPIISSAVVAAIGDGAGFKQGRDFGAWLGLVPRQESTGDRTILGKISKRGNKYLRTLFVQAAHVILARRPSAAMRGLWPWIAQTSKRLHRNMLAIALANKLARIAWAVLARGREYQPSITPHAA

SEQ ID NO: 384275 - protein, 363 aa, unidentified
MKQETHEEFAAFVGLDWADAKHDVCLQAAGSATREHLILEHTPEAIEAWVGSLRQRFAGKPIAICLERNKGPLVCALRKYDFLVLFPVNPLTLARDREAFTPSRAKDDPTDAALQLELLCTHRDKLQPLTPQSPTMRALEQLVEHRRRVVGDNVRLTNRLTSTLKNYFPQALQWFQDQDTLLFCDFLSRWPTLKAVQLARRSTLETFFREHHVRSADVMTQRIDAIKAATPLTTDEGIIAPHTLLVQTLVSQLRVTLHAIQDFDHAIAQRAQSHPDFPLFQTLPGAGPVFAPRLLVAFGEPRERDASAAELQQFAGIAPVTERSGKKSWVHWRLQCPTCLRQTFVEWAAESIRHAFWARVYYQ

SEQ ID NO: 384276 - protein, 279 aa, unidentified
MEHFAGLDVSVKDTNVCIVDDTGRLVREVKVASEPAALLPVLTNPAYHFKRIGLEAGPLSQWLFSALAEAGLPVICVETRHMRAVLKAQINKTDRNDARGIAQMMRAGLYRPVHVKTLRSQKLRMLLTHRKLLQSKAIAVENDLRATLRNFGLKVGMVGTVKFEARIRELVENLSDLAVLVEPLLVVRRVLHEQIGVLHRRLLAVVRDDEVCRRLMTVPGVGPVVALTYRATVDVPARFKNSKAVGAVFGLTPSRYQSGESDRTGGISRCGDEMMRMML

SEQ ID NO: 384277 - protein, 426 aa, unidentified
MQYALPLVLPDVPAGGVCAGIDWATADHVACVVDLAGRVTDRFSAAHDKAGIAAMIARLRRNKVTEVAIERGDGPLVDALLTAGLTVVVITSRQVKNLRSRFGAAGAKDDRFDAFVLADTLRTDRARLRPLVPDTPATISLRMAVRARRDLVRHRVAVCNQLRAHLAVAFPAGITLFHDLDSPISLAFLARFGSQDAAAELDEQAIGAWLATIAVRGRPAPASVLHARLQAAPPGATGADGAAQAGVTAALTATLTALSVQIKALETQIAGQLAAHPDGHIFTSLPRPGTVRAARLLAEIGDCRSRFPDAESLAGLAGVAPVTRRSGTRIAHGFRWSVNRQLRDALCDFAADSRHASPWAAAIYDDARARGKDHPLAVRITARAWSYVIWRCWHDGTAYDPAKHNALQAVLARQAAQTAGARQQDQ

SEQ ID NO: 384278 - protein, 445 aa, unidentified
MIKQKKPLKKKLVRLPKHLEHINAYAAGIDVGSKSHFVAIPVGVDEEPVREFSTFTDDLERLADWLIACGIATVAMESTGIYWIPIFEILESRGLEVKLVNARHVKNVPGRKTDVLDCQWLQQLHTYGLLRGAFRPAEQVCALRAYVRQRATLVRVSASHTQHMQKALAQMNLQLHNVVSDITGLTGMRIIKAILSGERNPKVLAAFRDKRCKNDEQTIARSLRGNYRPEHLFSLQQAVDLHEFYQSKINECDRQILEQLGLFDAAESDKNPPGGKPPASLDEALLRMSGVDLASIDGIDTTTALKIIAEIGVDMSRWKSDKHFASWLGLCPGAKISGGKVISSATKRIANRAALAFRMAAFSLIRSKSALGAYIRRQRARLGASKAITATAHKLARLVYSMLKNGTTYADLGQDYYEERYRSRVVQNLKRKAQQLGFELITIQG

SEQ ID NO: 384279 - protein, 355 aa, unidentified
MSLPIEEREVILGVDTHLDVHVAVLIDVVGRVVATHSVPTTAIGYEQLIEWAGSFGRVIRAGVEGTGTYGAGLARHMRERGIQVLEINRPDRSRRRLRGKSDPTDAENAARAVLAGEAHAIPKAQSGVVEAMRAVSMARRSAVKAKTQAINQLRALLVTAPAAIRATLWKVKPEQCVARCARLAPIGDTPLLKALTNTLRLLARRWMSLAKELRQLDAALDELTKRTGHRLLAQFGVGPQTAATLLVTAGDNPDRLRSEAALAALCGVSPLEASSGKTTRHRLNRGGDRAANNALWTISMVRMRSDPRTRAYVARRTAEGLSTKEIQRCLKRYIVRELYPLILADLADAARPNLT

SEQ ID NO: 384280 - protein, 341 aa, unidentified
MKNKSFIGIDISKNVIDASIFCKGAPIKDFPHAVFNNSHKGFGEMCTWLKKNHVVLLNSLFGMEFTGSYSMELEKFLNAKKYQFCMLSTHVVKHYPMGPKDKSDKIDSAKIADFLYRYDGTECVKPYKMPDKTMQRLKALTKERKFLVEQRTCFMNRRQLCTTKEAAQLYDGYIKEFSHDIENIELKMQNLLEADDSLSTTYKNLLTIPGIGFVNAMNVIVITRNFTAFETARQYASYIGVAPHFHTSGTSVRWRPRPSARCDGQAKADLSMAASVAVQCDAELQSFYNHKLGDKQDSDTKRKALNAVKFKLVLRMFAIGKQNRKWEPLDSKSSNEKLAIS

SEQ ID NO: 384281 - protein, 341 aa, unidentified
MSIIVIGIDLAKSVFAVHGVNEEGKAELVKPRVSRDQLLPLIAQLPPCLIGMEACTGAHHWARLFRQHGHAIKLIAPKFVTPYRLSGKRGKNDAADAAAICEAVTRPHMRFVPIKEEHQQITLCLHRTRQGFVEERTATYNRLRGLIAEFGIVLPQKVTCLRQSIGPHLEDLPGYANRCIGDLLAHADQLDARIADYDKLIAQAAREDTRSKRLMQRPGIGPITASALLASIGNGHDFRNGRQVAAWIGLVPGQHSSGGRARLGHITKAGDPYLRSLLVLGARAVLNSVGGKQDSFSRWARSLVERRGYWRAVVAIAAKNARLAWAVLHYGEDFKLKPSAA

SEQ ID NO: 384282 - protein, 374 aa, unidentified
MKDHSEAFVAFDTSKLRNAVAIAEAGRSGEVRFLGEIDNTPVATAKLVAKLAKQYDRLSFCYEAGPTGYGLHRQITDLGHGCIVVAPSLIPKKAGDRVKTNRRDAIDLATQLRAGQLTAVWVPDQRHEAMRDLTRARWSAVEDLRRKRQHISSFLLRLGLHYTGKKTWTKTHMKWLASLKLEHPEQRIAFEEMLLAVREAEQRIARLEEAIRTAVPDWSLAPVVEALMAMRGIDLISATGFLAEIGDLSRFRSPRELMAFLGLVPSERSTGDKVKRGGITKTGNGRARCILVECSWAYRHPPRVGKDKQARVEAAPYGVREIAWKAQHRLYKRYRDLTRKGKLKTVVITAIARELAGFIWAINREVCAAGAVAA

SEQ ID NO: 384283 - protein, 358 aa, unidentified
MRIIGCDLHARQQTIAMLDSDTGELEEKTLEHQGETVREFYSALPGPILVGIEATGSMQWFLELMEELGIECRVGHPQKIRKAETRKQKHDRRDARLLLTLLTENRFPTIWMPSTEQRDLRTLLRHRHQWVRLRSRVQHTLQSMALNHGLRRGRSLWSQAGQHALRALPLAPHASERRKALMTLYPRLQESIEELDRQVSEQTQQRPDARRLMTHPGVGPITALATEVFLGDPLRFIDGKAVASYIGMIPSEHSSGDRQRLGAMSKQGNALLRYLWCEAAMHAVERDPELKRFYRRKLVQKGLGKARVAAARKLGIRLWIMMRDQIDYQEFCRRGKAWQESGSVHAGMPDRDSGPAAQ

SEQ ID NO: 384284 - protein, 387 aa, unidentified
MLKKTGKVAMMANHHLLECFPGAFAPVGRPARTGSGEIVLTQGQSPVCSLIRRCPQDSIRTVAGATKPAWQGRMNPMEHYVGIDIAKNTFDVHVLPEKAARHFEYTEEGIQACRQWLVAFHPSLILMEATGGYEKQLARELFAAQFPVAVINPRQVRDFARAKGRLAKTDKIDAFIIAEYAQTMQPPAQEAMDELSEKIRALIARRRQLVNMCTQEKNRREHAFDDYISGSLSCFIASFEKALQEIDELIENHINGAPALKKKADLLVTAPGMGKSTAMFLVAELPELGKVNRREIAALIGTAPVNRDSGTFRGKRMTGGGRRHIRTQLYMPTLAAIRYNSVIRTYYQHLLKNGKVKMVAVVACMRKIITILNSMLMSNQPWNPDFA

SEQ ID NO: 384285 - protein, 369 aa, unidentified
MGDDTMSRSSLWVGLDVGADEMTVCETDDQGKVIVEQSIPTKATALHALLKRERRRIKLIGLESGTFGIALARSLRKLRYPVAVFEARQASKFLAIRQNKTDKNDARGLADIARLGRDSVSEIRVKSPECQRLRSMLVTRQKIVQIRTTVEGTMRSLFRLNGGKLRSASSVATLRRNAAEEIKRLRRFEKIDLTEDIEPLLALSVATRTYVESLDKKLGKRAEDDPVCRRFLEIPGVGPITALSFYCAVEDPARFRRNADVGAFLGLVPMVRQSGQNVARLHISKMGDRMTRTYLTTAAQQHLRHGKSSLTAWGAGLSERLRKGAVQVAVARKLAVTMLAMWKSGERYDPYRGASPADVAVKAEPSVVT

SEQ ID NO: 384286 - protein, 343 aa, unidentified
MDHFAGLDVSVKETSVCIVDDTGRIVREVKVASEPEALLAVLTNPACHFKRIGLEAGPLSQWLFSALAEAGLPVICVETRHMRAVLKAQINKTDRNDARGIAQMMRVGLYRPVHVKTLRSQKQRMLLTHRKLIQSKAIAIENDLRATLRNFGLKVGVVGTVKFEARIKELVENLPDLVVLVEPLLIVRRVLREQIGILHRRLLAIVRDDDVCRRLMTVPGVGPVVALTYRATVDVPSRFRNSKAVGAVFGLTPSKHQSGESNRTGGISRCGDEMMRMMLYEAAHIMLVRSAKWSWLKAWAMKIARHRGLKKAIVALARRLAVIMHRIWVDGTEFRWTREVAAA

SEQ ID NO: 384287 - protein, 340 aa, unidentified
MTITTVGIDLAKNVFAVHCVDQNGKTVLVKSRVTRAALPGLIAGLPPCVIGMEACSGAHYWARLFRQYGHEPRLMAAKFVSPYRMAGKSGKNDAADAQAICEAVRRPHMRFVPVKDESQQAMQCLHRTRQGFIEEKTATYNRLRGLISEFGVIAPQSTDALRHIVFEQKNSLPLQVQQYVDDLLEHVARIADNIAEYDRILSRMAKTDHRSQRLMELKGVGPTTACALVASIGNAHDFKNGRQLAAWLGLTPSQYSSGGKSKLGRITKAGDSYLRTLLVQGARSVLIGAEKRTDLFSRWVCSLVERRGYWRAVVAIAAKNARLCWASLHYGDDFRLYSAS

SEQ ID NO: 384288 - protein, 340 aa, unidentified
MNTMTLLGIDIGKHSFHLHGQDAKGHQVLRKKTNRGQLLSTLAQLPACTVVMESCGGAHWLARQIGTLGHEVKLIAPQYVKPFVKGNKNDFIDAEAICEAASRPAMRFCSIKTAEQQTLSALHRVRDSLIGHRTVAINQIHGFLLEFGISLPIGTAALHHVPMLLDNPQHSVPLRLKGLVMRLYRQIQQLDQEIKDIESDLKQQLKEDDAGSRLQSIPGIGPITASALLADIGDVSNYRSARDFSASLGLVPKQHSTGGKTVLLGITKRGDKHIRRLLVQGARAIMQHIDGRDDALGPWVRELLTRRHSNIVACALANKLARIVWAVLAKGGQYDPHPNA

SEQ ID NO: 384289 - protein, 344 aa, unidentified
MPIVGGLDIHRKQLTFDYADTVTGEVKRGQIVPADREHLRAWLARFAGRDDVGFAVEGCTGWRYVAEELAAAGVAAHVGEPADTAAARGRKRHAKTDKTDCRHLRQLLAEGRLPGCWVPPPHILKCRALLETCHDLRAEHTAWLQRIHAVFFHQGAPPLGEGFLRTEQGVAALRAASAAHLSPAGQFQIDTALEVIAALGTRLQDVRRQLREAAANLAGARALAARIYGVGPIAALAMTAWLAGAGRFSSSRKAVRFTGLDITVYSSDGKRATGRLSRPGPPVLRWAVYEAGKAHARASAPDHRSYAAVRDRKNSKRAALSEARKIVRQACRILAELGHDALAA

SEQ ID NO: 384290 - protein, 400 aa, unidentified
MVSDFMKGRYNLMIYVGIDIAKLNHFASAISSDGEIIIEPFKFTNDNDGFQLLISKLESFDKNSLIIGLESTAHYGDNLVRYLVAGNYKVCVLNPIKTSTMRKNNVRKTKTDKVDTYIICKTLMMQDSLRFVTFYDLDLMDLKALGRFRQKTIKQRTRLKIQLTSYVDEVFPELQYFFKSGLHQKSVYALLKEAPTPEAIASMHMTHLTHLLKVNSHGHFDKEMAQQLRVLAQKSVGASDSALSIQITHTIAQIELLDSQLERVEAEMTDIMKFNDSVIMTIPGIGYINGGMILGEIGDIHRFSSSNKLLAYAGLDPSVYQSGNFQAKKTRMSKRGSKVLRYALINAAHNVVKNNATFKAYYDAKMAEGRTHYNALGHCAGKLVRVIWKMLTDEVEFNLE

SEQ ID NO: 384291 - protein, 314 aa, unidentified
MSSETVVGIDVSKRWLEVQVHGAATSQKVANAPQGFCALIELMQVAQPQLIAFEATGGYEREAAKALDAAGFTVVVVNPTRVRRFAQSMGILAKTDKIDAKVIAYFAEVSKATLHPNCPRTPQEEHLAACLERREQLLITLSAEKNRLATCAQCVRDDIKAHIAWLEAAIDRLDAEIDAGIAQHAEWQERARIIASVPGIGRVTASTIVAELPELGRINRRVAAALVGVAPFNKDSGPKRGRRRITGGRARVRRVLYMAALSASKCNPVIRTFYQSLLARGKEKKVALVACMRKLLVMVNAMVRDGQVWRNAPA

SEQ ID NO: 384292 - protein, 404 aa, unidentified
MRVLYERCCGLDVHKKTVVACVMSPEGQETRTFNTMTQGLLEMADWLVQRQVTHVAMESSGVFWKPIYNLLEGLDLTLLVVNARHIKAVPGRKTDVKDAEWIADLLRHGLLRGSYIPDRSQRELREVVRYRRNLVGERARTINRIQQVLEGANIKLSSVATDIIGVSGRAMLEQLARGSEDAEAMAALAKGRMRNKRLELEQALRGLMGSHQRMLLQSQLRHLDFLGQEIAQLDDEVAARMGPFEEAIQQLDGVTGVGARTAQEVLAEIGLDMSRFPSAGHLSSWAHLCPGNHESAGKRKSGATGHGNRWLRSALVEAARSASRSKGTYLATQYHRLAARRGDKRAILAVAHTILVTIYHLLRDGTIFHDLGGNYFDQRDQQATLRRAVRRIERLGYKVALEAA

SEQ ID NO: 384293 - protein, 359 aa, unidentified
MSPMAGVLKKSARADPAVQTNANSNQSTPSQSRMNSTCSSLAILGLDVAKASVQAELQSTSGSKVRFAFANNPTGFKKLARVLEQHPPAMLHAGLEATGPYSQALARWLHEQGYRVSLLNPRRVKDYARSAGLRNKTDALDAGVIADFVRAHRGRLPGWRPAVAEVQQLQELVRRRHQIEVMLLAEKNRLEASADTVRCSIERLISMLRAEKASLERALAQQIDSHAQLARNHQLLRTIKGIGPLSATVLLAEMAGPDQVQRARQAAARAGLSPRRQQSGTSVRRNKGIGKEGSRYLRKALYMPALVAIKHNAPLRHFARKLQAAGKPKMAIVCAVMRKLIHISFGVLKHQQPFNPSLA

SEQ ID NO: 384294 - protein, 359 aa, unidentified
MPSIAEPRGSVTGGVDTHSENHVAAVVDQVGRVLGSVTFAVAAAGYRVALRWMRAHGRLEKVGVEGTGSYGTGLARYLSSQGVAVVEVIRPNRQARRRRGKSDIADAVAAALAALNGEASGTPKSHDGAVESIRSLRVARRGAVKASTQAGNQLRDLIVTAPEPPRAKLASLSSTARVDLAARFRPGHPSGPVEATKQALASLARRYQRPQAEIADLDTALETLVVRAAPAAFLSARGVGLQVAATPLSTLGDNPDRLPNDASFAALCGASPVDASSGKQRRHRLHRGGDRQANSALWRIVFVRMSHDPRTKAYMAKRTAEGKTTKEIMRCLKRYVAREIYKTLIRPSAPVELASAAAA

SEQ ID NO: 384295 - protein, 384 aa, unidentified
MKKNISRFVEMKSTVIERKAGVQNPPGRTIPQRPDYQAVVGLDVGDRQTHYCVLDLDGELAVEGAVATREASLRVQFEGKARMRIALEAGAHSAWISRLLVALGHDVIVANPRKVRLISSSDSKNDPADARTLARLAHVGPELLSPIQVRSEKTQVDLALVRARDVAVQSRTKIINAVRGIVKSTGRRLPKSSTLTFARKAKDACPEALLPALLPLLRVIEELTREIELYEKLVSKKAETEYPETNAIRTIHGVGPLTALAFVLLLNNDRSRFRRSRDIGCYIGLRPKQRESGQRAPQLGITKAGDPLLRRLATQCAQYILGPFGKDSALRRWGLSLALRGGKNAKKRAVIAVARKLVILMHRIWITQEVYEPLRGVASKSTAA

SEQ ID NO: 384296 - protein, 423 aa, unidentified
MKNSAARKRKQVPEGYLIIGVDPHKKKHAAVAITQDFTLRDRFKFDNTREGLEFLLRRVRTGMVKSDCRGVMFAIETGGHYWRNVAYYLDGQGIPFRFINQFTLKRRREGKDLNRRKNDYRDSEVAAQLLCTGEFTESKLPQGVYAELRTAHSAYRRLVKERTRITNLVKGLLDALFPEFTQVFKDPCALTALSVLSICPIPRVIAGMTEDEFMATIEAQHKGRLMRKKLRALHYSARASIGIDAGARSVSSEISFLVDKLELIRQHIRLIERPLVSLVDETEEGKYLLSIRGLNYIAVAGLLAELGCFKSYRSAKQMIKMAGSNPTESESAGKKRSRTPMSKQGRPVLRYCAWTSVIPMLRLNPDFRAWAKQRRERPAHANPLNGREVVGAALNRLLRLAFAMVKSQTYYQVSKPELTLVAV

SEQ ID NO: 384297 - protein, 323 aa, unidentified
MTDSPSIVVAGIDVGKSKLDVHILGVGLDRQFDNTKTGRRALRNWLLKLGVYRTVFEPTGRYHRNLHQCLFDSGLQTVLVNPLRSRRFAEAIGQLAKNDRVDASMLARFGLLDGLESTPPQPDILCRLSDLLALRRKLVEHLGALRKLCAELDPEAAACPSATLDALQADIADCDRRMRDCIAADTVLSRRDAIIQSIPGFGPVNAACLCAGMPELGSLGRRQAASLLGLAPFDRDSGQHRGARSIRGGRAQPRHLLYMAALSAIRCEPSSQLCYQRLTANGKPHKVALVAVMRRLVGLLDTLLREDRLWQPRPPARQLEAAA

SEQ ID NO: 384298 - protein, 396 aa, unidentified
MFGPIIAIDVSKDSSHAQLFESFKKPMGKPFVFDHDKQGFDLLSEKLKMLEEFTGEKVSVVLEYTGHYSIPVVRWCLQNDVKVYAISPLLSAKFRKKDLRGTKTDKKDCANIAGVYFSQDNLRVARPTDPLQELSRRYQRTNKRIVGLKCQFMKCLDQVFPMFEKKIGDPYTDKSINVLINYSHPEKILKAGRGNLGKFIAKVTSHTGKVSEKYADELIRFAKDCVSGCSIDSCVTEELSEYGQAIIDLTEKCESIIARIKEIEGERQIESVRKVCNFKSSKLIVLILAEIGDISRFKAKENLVSYAGMDPVVYQSGEQTGKGLSITRKGNSLLRKYTYLAVCCIIREDPSSPITQYFQKKIKEGNPAKVARIACCVKLLRLIHASLTLQDNFKLV

SEQ ID NO: 384299 - protein, 335 aa, unidentified
MIGLDIAKNVFEVHGRDAAGEVVLRRSLKRGQVEKFFARLPRAVIGLEACGSAHHWARVLGKLGHEVRLMPPVYVKPYVKRNKSDAIDAAACCEAMSRPAMRFVPVKTTQQQAALSLHRSRELLVRQRIQLGNALRALLSEFGIVAGKGRAGITHLIEALRGGTLDLPADAEVAAAALADQHTALGAAADALERQIVAQAKADPRARLLQSAPGVGPLTAHAVLATMPDPSIFVRSRDFAAWLGLTPRLSGTGGKIHTGPITKKGDHTLRRLLVLGATAWLRQVQARPDKASPWLRGLLARRPKKVVATAQAARTARILWAMLIHDQPYRASAAG

SEQ ID NO: 384300 - protein, 361 aa, unidentified
MIVIGTDPHKQTHTAAALDAQTAERLDELTAQARDAGHDRLLAWARALDEERVWAIEDCRHVSGGLERFLLRSGERVVRVAPKLMAGARKSARDFGKSDALDAEAVALAAIRVSIEELPEARLSGPERDIALLLDHREDLVAERTRIQSRLRWLLHDIDPAIEIPPRALDRAPTLKPLASRLRRMQQTTQVRICHELVHRCSELSQRANELERELAALVKRQAPQLLALPGCGTLTAAKLIAEIAGVERFASDAKLAKLAGVAPLDASSGKQQRHRLNRKGNRQLNLALHRIAITQARIHVPAKDYLARREAEGKTAKEALRALKRHLARRVHRLLSTSPAQHDRRTRIQLNAAISVPCLT

SEQ ID NO: 384301 - protein, 329 aa, unidentified
MKKMHIIGVDISRNTIDFHCYGHSVTADPVANNLKGFGQFQKWIRQQVSKTKEEVMIVMEHTGIYTYNIERFLHAKGWSYVKRPALDIKRSVGIQRGKSDRADARMISKYGWMNKESLAPMEPVNDNRVNLQQLMSYREKLVTDRTAHQVRIKELQGQMGNKLCDQIRRSTQRMIKLLTIEIEKMEEAVKACLAKEASLQKNYELLITVSGIGFVTAVSLLITTENFTRFDNHRKFACYCGVAPFTHRSGTSIRGKTRISQLANKPIKSLLTMSALSAVRNDTELKAKYEQKCKEGKAKMSVLNIIRAKLIERVFSVINRQTPYLKAAA

SEQ ID NO: 384302 - protein, 433 aa, unidentified
MPFGQPKRDTRGAYMRYFVGIDVSKEFHVVNVIDEDEKRVLKNFKFLNSKDGFDFFKVKLSLLSKDKDSFVLGLEATGVYGENLYDFLSLNGYNIKLLNPFQTSRYRQNYTMKSVKNDNIDSLYIALLLKDDRFSSGYVASEEYMALRVLYRNRSSCLKESKEIQKRILSILTVTFPEFEKFINPFSVSGLTLLKKYPTAAHYKGVSANSILKLFRHIKGNNFSKEKATKLLELAKNSVYSGKAKKERAIALNSLIRLYEKYQEEIDTLDKEIDSLLNSDSLSSDDKTAIKEAKQRAESIIKNLHTIPGVSTKTISAILSECGDLSRFPTISKLLGFIGLHPTQDSSGKKESFGHLSKRGNSTVKHALYLSSVSCIRHNSELRKLYNDKRAAGKSKKEALIIVSRKLITIIYAIFKNNEPYNPSRVFAMVRQW

SEQ ID NO: 384303 - protein, 398 aa, unidentified
MICVGIDIAKGKSTVCFLKPGGEVLKPPYDIEHTAEEITKLIRDIRSYDEEVRVVLEATGHYHLPVVAQLLEANVFVCVVNALRMKKFCSQDIRKAKTDKIDAAKIAAFGLTYWQDLQAAKPADEVYRELRLLSRQYFQLTSMLVKAKISLGNLLDNVMPGITDLLYDREQNHKLTDFVLRYLHFDKISAMGERKFTTDYCNRAKKQGYRMYERQAEEIFALVQNSIPALPMTASTTIVVKEAIKVVRELENSRASILAQMQTFAKSLSEYSLIREMACVGDTLTPLVIAEIGDVRNFHSKHALIAYAGIDAPPYQSGGFCGTERHISKRGNGYLRHVGFEIMQCKLRLKPEGDAVYDFIQKKRSEGKCGKEAMVAGINKFLRIYYGKVTELYRELEA

SEQ ID NO: 384304 - protein, 377 aa, unidentified
MKAPSTRPAAVLGLDVGKSSHWACLIDRDGEVLASAPVRNREAELDALFASAPAGTLVVVDQFRNIGSLAVRRARAAGLGVAYLPGLAASRAAGLFAGEAKTDERDAAVIARTALGVPDSLSGVPGRGEALEAARALSSQRDHVVACATRDKNRLRAVLLESCPALEAAVDLSDRRWLELLAGFGGAWGIARSGAEGPRAEAAVEAAAASTAPPPALVEAENRQVRFLAARISEALDEAGALEAETAALLEGDETYACLLTVPGIGPRTAAQLAVSVDIGRFPDHDHLASYCGIAPRVRSSGTSVRSVRASRRGDARLKSLLVFSCNSLVRSSGRYGEYYRACRARGMGHGRALKAVARKRLRAIYAVMRDRVPYRE

SEQ ID NO: 384305 - protein, 336 aa, unidentified
MLYVGLDVHSKQSSLCILNSGGGTVNQIQFKGPRSMVVDHLRQLKEPFAICYEASCGYGQLYERLTPIAHHVAVAHPGKLRLIYGSKRKNDRIDAQKLAKLLLLDMVPPVHVPSIDVRAWRSLIMLRQRVLALIVRCKNQIRGVLREHDIVGAKWLWSKKQLAWLEALELHPIAKLRLELAVEEFKTHRAKIKRIERELQKYADRLPTVKLLMRIPGVGIRTAETFVAWVDDITRFRNNRRIGSYFGLVPCQDASADKNRLGHITRDGPPVMRKLICEATWTAIKKCPAFKQFFERVMGGKSERKKLALVATMHRMIRVMGAMLRSGEAYDANYKR

SEQ ID NO: 384306 - protein, 459 aa, unidentified
MIRRLVGVDLGIASAHTVRVLAEDGREVCRRRCEPTVDSLGRVEAAALAGAPAGTVLEVVMEPTGPAWLPVAVFFTARGHRVFRVSSAKAADLRRFLSRHAKSNGIDADTLARLPLVDPTGLHPLELPGAEAAALDRRVRATDRLTVLAAQHKVRIKDLTRQLLPCSPLTGELGVADLAVLERWADPRALLAAGPARLTALIVKASHGKLGADRAQQWRAAAAAAVELYADHPAIAWTDLAAEVGTEVRLLRATQAELAAHAQERETAYRYTDLGGLARSLPGVADVGGPVLVAGMGRAGRFPNGAAFKSYTGLAPRASETGNTDRKGQPMSKAGSSLLRTTLIRAADNARRQDPQLARIYYTQMVERGAEHLKAVCVVAGALAERAWAVMNRQMPYVICDIDGTPVTPEQAKRIIAQDFTVPDEVRRRRRSSKTPGRKPQQDPTANGGRPLSKPHTAA

SEQ ID NO: 384307 - protein, 360 aa, unidentified
MPEWLFLFNHLNFGGESMSNITSLAVDLAKNTFQLHGTDAKGKIVLKKKISREKLLEFIVSLKPCNIHMEACGTANYWGRKFKEHGHKVKLINPRYVTPYVKRNKNDVNDAAGIAAAARDPDMRFCDVKTEEQQDMQSVHRIRSLLIQQRTALANQMRGLLAEYGVVIPQGISYIRSELPRIFGNNPNDMGGLILGCLMELYDHFGYLDNKIAAYDKKIEAIFKNNEGCQRLEEIPGIGVLGATILVSVLGNGGAFKNGRHFAAFLGLTPRQHSSGGKERILGISKGGDTYIRTLLVHGARSVLLRSNKKTDKQSKWINSLMSRSGYNKTAVALANKIARTAWAIVRNGENYSVNYKPVF

SEQ ID NO: 384308 - protein, 388 aa, unidentified
MPQSNDLSRSLVALKQDSTVISVIELSLSSWLVAGFVPGIERHPLKKLRADEQALLRLLHRWRDEATKVGRNINRIAVAYEAGRDGFWLARWLQAHGVEAYVIHASSIAVSREHRRAKTDRLDTDHLKRAFIGWLRGEPDHCHMAAIPTLEQEDAKRPTRERENLVGEQTRLINRIKSCLVRFGIRGFKSKLRKAAERLEALRTPDGVALAPNTLAELRRDLARLRFVRDQIKTIEVARLQRLKNKAPKEGSHAMVCLLVRVIGIGVETADMLVHEVLSRNLRDRRAVARYAGLTGSPDESGKRRREKGLARAGNARVRRGMIQLAWRFLQFQKDSTLAQWYRAQTADARGGTRKTMIVALARKLLIALWRLVTSGEIPNGVILRPAV

SEQ ID NO: 384309 - protein, 319 aa, unidentified
MEKTGQWVGIDISKANLDVYLRPLGKTFQVANKETAISGLIEELQTYSLNLIVLEATGGLEAELLIQLQAAQLPVALINPRQGRDFAKATGKLAKTDAIDAQVLAHFGEALKPQVVAMESDLARQLKELISRRRQVVEIQTAEKNRRDRSRGKALTDIEQHLEYLEQSLKKLNQEIEELTQSNQEWIDKVNLLKTIPGIGQVISTTLVSYLPELGQLTAKQISRLVGVAPINHDSGQHKGKRMINGGRAPVRASLYLGAVVAIRHNPIIKDFYERLLSRGKPKKLAITACVRKMLVILNAMVRDQKRWQVSENLQPTSI

SEQ ID NO: 384310 - protein, 340 aa, unidentified
MNNKSNIPVYVGIDYHDSEIQVCVMDAGEKILFNRPCKNNWQEITRRVRRYGQVKRAGIEACCGAADLAEELVNCAGWNVDLAHSGFVSRMKQSRDKTDWGDARILADLERVGYLPQVWLAPEETRELRRLVRYRQQLVNERRNIKLRIWALLRENRLRNTLFRPWTKGWLNWLSNFDELGEQSRWILDRHLLHLASFSEEIHAVEDRLKLVTGDDVVVERLLELAGVGFVTAWMLRAEIGRFDRFRSGKQLSHFCGLSPRNASSGKRQADAGLIKACNPSLRAVLIQAAHRLMNHDRRWGGLAARMESAGKPKSVITAAVANRWIRWLYHQMQPNKLVA

SEQ ID NO: 384311 - protein, 383 aa, unidentified
MENSSSNCCPKTSVIVSVELSKRNWLVASLSPGAAKPSLRTIPAGNSAALISHLRNLECKAADRIGEPVTIRLCFEIGYDGFWLARLLRSNDIDTYVLDPASFLVSRRGRRAKTDRIDAEAMIGILKAFLAGDKSVCRVVAVPSPEEEDARRVMRERGDLVHERTRIVSRIRGLLALQGIRSVKAIKGGDWSSQLDDMRTGDGRPLPPNLRRQIERCFGRLALLNDQIKDIERDRAEVVLHDESTFPCRDKAVRLEQLKGIGPNSAAMLVAEVFCRKFESRRHVAAFLGLAPAPFASGDVSRDQGISKAGNRSTRVQMVELAWCWLKYQPSSELTVWYRSRFKGNGARAAKVGIVALARKLLIALWRFVETGLVPQGAELRAA

SEQ ID NO: 384312 - protein, 408 aa, unidentified
MNAVGIDVSKGKSMVAALRPMGEVALLPQEFLHTEVGLEQMAYAIIALGEDTRVIMEATGRYHEPVAAALHEYGIYVCVLNPLFIKQSGGGSIRKVKTDKADAMKIAKYGLDNWVDLREYTPMDTVRQQLKLCSRQYNLYMKTVVSLQNNLISLTDKTFPGVNELFSSPERADGHQKWVDFVMTFYHCDCICRVSENAFADRYQKWCKRKGYHFSAEKAQDVYLGSCGHFTTLPKNDNTKLLITTAAQQLLAGKMTLAALRTEMTRLAKQLPEYDIVRAMYGVGETTAVQLMAEIGDVRRFPRRSSIVGFAGVDPAVDQSGKHSAKSVPTTKRGSPHLRKTLYQIVCTYLKKSPVDEPVYQFLDKKRSEGKPYFVYMTAAQNKFLRIYYARVKECLEAFDAQQDTSQR

SEQ ID NO: 384313 - protein, 374 aa, unidentified
MSIVMGLDQHRAQVTAEWIDLVSGEISRSRVCPADRVGVRRFLGRFAGQELEVALEATTGWRFVVEELRAIGAVVHLAEPAETAALRGRKKRAKTDRADARHHRELLMAGRLPESWIPPDHILDLRAQVRLRHTLMHQHTEWQQRIQAVLYHHGCPSRRKLMRGDGRDWLDAQPLGDAAREQLTVALALTDALDVQIAPQDRALRSYARRQTGCKALIEKYYGVGELVAVTVLAELGDCRRFSNSRDAVRYAGLDITVYQSDRHRAPGHLSRQGPPALRWALYEAAQRARFPTSPDRDYYLQTAARLGGNRACLALARKLLKRCYHTLRELGDAALTPPTDQPAGSAAARRASSGSPHPTRAPVSRERPDALAA

SEQ ID NO: 384314 - protein, 349 aa, unidentified
MIARSDAACFVGIDLHKDTLTACTIAAKDREVSYRKIACVAREKVREFLAGLPRPSVVAIETVGFYRWLWTEAEPLVDQVVLADARGCRALAGRRIKTDREDALNVAELLMTGRLPMAWAPPVYIQRVRNLTRHRVGLSRDHAKTLHRVKSIMNRLNRPGPARMDAAGLQRYLLASVERIEADDLTVLWQHQRRLVEIEQDRSAIDRRIIELMGAEEFRRLRTILESIPGVGLVTAATAIAEIGDFSRFPDGKAIGRYAGLTPTGYASADKNRLGRICKTGSPDLRWTLQQAAWTAIRCDAGFKKTWLKISKTAGKKAAAVAIARKILVLMWSLVRKDELYKAREPIAA

SEQ ID NO: 384315 - protein, 383 aa, unidentified
MTTMNYIGLDVHKKTISYCVKDVSGRIQQEGKVGSTRRELDCWMTTLPQPWTVAMEATIFSGWIYDHLLPHATQIKVAHPLMLRAIAAAKKKNDQIDASKLADCLRCDFLPECHMMPRAIRDRRRTLRYRHLLVRQMVQMKNRVSGLLMETGVEYNKQRLHKVSYFRELLSANGEVPPSIRPLLKLSRETIERCQKTEYALVSSLQRDPVLADRIKRLRTVPGVGPITALTWALEIGDVSRFGSIKKAISYCGLCGDERSSADKAMRMPLSKQRNKHIQRALVEAAKLAPRQSHELAVIYDQERQKGNQQDEQNAQTARSCMLPTERRRSPSRGSLRIVSGLAENTHSIFGEGPSRPETANGCLVPPSAGTDAERHTVAPRTS

SEQ ID NO: 384316 - protein, 403 aa, unidentified
MSMTGQRVAGIDWASDNHALCVIDAGGQPVQRLVVPHTKTGIGRLVTVLRKHQVTGVGIERPDGPLVAGLLAAGVEVLVIPPSQVKSLRGRYRSAGHKDDRFDAYVLADTVRTDRRRLTPLQPDTQATTTLRTLVRARTDLVVHRVAVANQLRAHLQTVLPAAVGLFTKPHSPISLAFLSAFATQDAIDALTIDTWTSWLRTHRYRKTRPEILLQRLRDAPAGVTGPAAQALAAVTAAYLTALTTLVDQIQALQAQIAAALAAHPDGPIFTSLPRCGTVRAARLLAEIGDARGRHPTPQSLTGLAGVTPSTRQSGQVRIVAFRWAADKQLRGAVCDFADDSRHANPWAADLYAKARARGHRHPHAVRILARAWLAIIWKLWTTHTPYDPARHNALQKLLTQTA

SEQ ID NO: 384317 - protein, 401 aa, unidentified
MTKQLMAGIDLHSNNLFCGLVDAQGKRVFEKKLPCEMNQILQALSPFKARLDTLAVESTYNWYWLVDGLQEAGYHTVLANPAGMEQYSGLKHTDDKSDAFFIAELLRLKILPTGHICERQLRSVRDLLRRRLLLVRKRTSLILSLQSLHVRTLGRPLRPGEAKRMSVEQAQQGFTHPADRLISGLEVQLIDQLNRSIKQIEKLVLGMTRSLPCYQVLHSLPGVGTILALTITLETAEVKRFATAGDYASYCRCVDTRRISNGKNKGQNNGKCGNKYLAWAFIEAANFAKRYDLQCRRFHDRKAARTNKIVATKALACKLAKAAWHMMSTQTPYDPARMFPESEPGPSARGFIALKSDPAGEQAGRGGVRVPAYGRKLTPGKENLRTVIGSPVKGLASSPED

SEQ ID NO: 384318 - protein, 340 aa, unidentified
MKKTMKFYLGMDVSKRWVDIAVLCVLNQIKQPMVTERFDNTATGMKAMDKWLKKQQVSFDDKSLLVIENTGVYHRLVWEYCSNEGLPLYIGNATHIKWSFGIARGKNDKIDSQRLCAYALKNADELKATAQLNAVFLRLKDMMTARSRLLAQKNSMKVYLGELKLSNSKETQLIMEQAHKAALDGIIESIKSVEQQIHQMIQHDEAIRNNYDLLLSVPGIGHLTAVYIICCTNNFIGKISGKELASYAGVAPFSNTSGTSIKGRNKVHKMANKELKKLLHMGAISAITHYPEFKDYYERKVKEGKHEQSVINAVRSKIAVRAVAVINNQVKYVNKYKKAA

SEQ ID NO: 384319 - protein, 384 aa, unidentified
MIKHNILFIGLDTHKEFVEVAYIEDHYGAQSVHYGRVSSAKASITKLAKQFQSKYPDATLHFVYEAGPCGYWIYRLLTSLGHCCYVIAPSLIPKKPGEKVKTDKRDALKLAKLLKSEDLTPIYVPEPEDEAIRDLSRARETAMKDLKDAKYQLKALLLRNNINYKGTANWSLQHLRWLTELILPHPSQQIVLQEYLQTVMERIARLKRLDNELEHHVRNWRYYPVVKAIQALRGVRLLVATGVIAELGDLTRFDHPRKLMSYLGLVPAEHSSGGKRHLGAITKCGNTRARRLLVEGAHTYRYPANISTDLQLRQEGLPKQVVDMAWQAQLRLCRRYQRLMQKGKHYNVVVTAIAREMIAYIWAIAREIVLVQINPKLRLARVPA

SEQ ID NO: 384320 - protein, 507 aa, unidentified
MCQKTQAQQDQTTQEEAGRESPAPVDPKMIGAAKTAKTTGAVKVSELPESPPVLGKCCGLDVHKKSCTAAIISDDKLPIVLEGLENNGQGIHQLYQRLVEEGCSTVVMESTGPYWMGAYDYLDVGGINTILICRRSMKAIRGKKTDEHDAVWLAHLYRLGLVEPSYVPPRHIRELRSLTRRLEKIVHMMAGIKNSVHRQISTFSTGMANSYRVPFGQNATKIIQALAQNIDQNKGIDTDTIMARLREEGIPEYKLENVEKTLRLSFDPTSSGWLIEQGLETLHALGEQRDQILDRIARHIQQHKDLSRTVHTLLSVSGINMVSATTIASELGDPTRFENGKSVASYFGLVPSVEQSGPNTILGRISRRGSPHMRRILCQVALVISARGSPHLRRWYEQVKKRRGTQKAIVALSRKILVIVWAMLRDNTQFHDPDQDEGKARRREALYRHKLREMKERAQRSTRTVSVWEALHLLATDTKLRTELGLRRIIATPRPTPVSTTRHKAPA

SEQ ID NO: 384321 - protein, 336 aa, unidentified
MLYAGLDIHKNFSQAVVCRENGNVLKEGRVPTTKESISEFFSEFKEELKIAIEAGINSEYIFDFLEEQGHKVTLAHPLKTRMIAESRVKTDKIDANILAYLLRTNLLPTSYMPPKDIREIRQLVRQRIFLGRFSAKLKNRIHAELIRKGIRYERKGIIFTSDGKNWLHSLNIPFMESYLIMLGSIEDQIKKHNKKINQRGRKYEEVKLLTSIPGIGVYSALVIFSEIGNIERFNTEEKLFSYSGLIPSVNQSGNHRYYGRITKQGSKNLRWILTENVRVHLNWARANDVETKLLKYYLRLCKKGKPKNKAVIATARKLLQVIYWMLKNKTEYCVKG

SEQ ID NO: 384322 - protein, 464 aa, unidentified
MNEDSKAASEQKGGKNEEGIAALGRRVAGVDVGSQGHWACAPVREGEGREVQVFGATTAQLEKMADWFLERKVESVALESTGVYWIPIHEVLEGRGLEVVLVDTRVLGRVPGRPKTDRRDCQWMQRLHSCGLLQGAFLPPEQICMLRTLVRDKGNLVAEQGDWVRRMQKSLEQMNVRVHRAVADLTGATGMALVRAIVKGERDPRQLAKLRDPRCHKSEEEIAEQLTGHWREDHLFSLGQALKMYEAIQERIEDYERAILEKLKAMEREECRGQEPPELKNQQKAKTILKRGQEPLRQALYRVSGADLTAIDGIGVEAVQAVTSEYGTDLSAFPKEKQFVKHVLLAPNQPTSGGKPVKKKKKAYSASSRVAAALRMAALSVRHSQTALGAYYRQIARHKGGDVAVFATARKLAVLIYRMLRWGKNYVDEGVEAYEKRYREARLRSLTSTARQLGYQLTPLTAQP

SEQ ID NO: 384323 - protein, 346 aa, unidentified
MEHYAGLDVSLKEISICVIDGDGKTVARGACPADPEGVAGWFRNRDLTPRRIVHESGMLAIWLQRGLASLGLPATCIDARKAHKSLSARLNKSDAADAEGLAQLARTGWFTPVHIRSEEADRLRSLVGARERLIRLRKDLEGHIRGVLKTFGIRMIGIGQGRQRQAFRDQLAAAGETDPVLRAIADAFIATHAKLCQVADDLDKAVRKTAKVHPVARRLMTIPGVGPVNALSFIALVDDPGRFNRTSDVGAFLGLTPKRHQSGEMDWSGRVSKCGDGAMRGLLFEAASSVIHQVKRFSQLKSWAVRLAGRRGFRKAAVATARKIAVLMLTLWKNGTDYQWTKEATA

SEQ ID NO: 384324 - protein, 254 aa, unidentified
MNSEAYVGVDVSKVSLDVKVLPTNETLQISNNNGGINELIKRLTQIDPTLIVFESTGGLEMLAVSNLIENQLPVVVVNPRQVRDFAKATGRLAKTDAIDADTIARFARDIRPEIRPIKDEHTQLLSALNARRRQIVDMLVAEKNRLSRAPKPNKKSIQKHIQWLEKSLTDINKDIDKTIKKSPIWRENDRILQSFKGVGPVVSATLLCDLPELGALNRKKIANLVGVAPLNCDSGHFRGRRRIKGGRANVRRKL

SEQ ID NO: 384325 - protein, 344 aa, unidentified
MMRCKTVGIDLAKNSFYFITLNEHGKQVAKKKLSRNKVIPFFANHEQCTIAMEACGSSHYWGREFQKLGHEVQLLPAQHVKAYLRGQKNDYNDALAIAEASQHGSIRQVAVKSLGQQDEQSILQTRRLLSVEQTRLINHIRGLLSEYGIVIEKSVPAFKRELPLVLEDATNGLTDTFRMLLNRQHQRLLELCEELQWYHDYIKSVAKEDDTCQRLVTMPGIGPIVGMTLKSWMGDGQQFKRGRDASAALGLVPRQHSTGGKPLLLGISKRGDSYTRSQLINGARAVVARSKNKNDMLSSWINRLVEKRGFNRAVIAYANKMLRMAWVIVAKKQRYIPAEKLIAL

SEQ ID NO: 384326 - protein, 412 aa, unidentified
MEVLYARCCGIDVHAKMLVACLIVNGRKETRTFSTMTDDLLKLLDWLVANECTHVAIESTGIYWRPVFNILEGAVEVMLVNAREAKGLKARKTDVIDAEWLADLLRHGLLRPSFIPPRHIRELRELTRYRESLVREQTSLANRIQKLVESGNIKLGQVATNALGVSGLQMLRALAAGETNPDKMSGMARGRLKRKQGELKRALSGQLTEAQRWVLSQLLDQYDRVKEAIAKVEQKIREEVTAAPDPFVSEAVKLMDTIPGVGETVAQIIAAEIGVEMSQFPSDRNLSSWAGMCPGNHESAGKRKSGKTTKGSRYLRVALIEAAWAAARTKNTYLSAQYRRFVKRMGKKKALVAVGHSILVIAYHVLNNKCTYQELGGDYFDKRYAEKRRTKLIKQLQSLGLKVTVEEIPQAA

SEQ ID NO: 384327 - protein, 376 aa, unidentified
MSGTIDYYVGLDVSQKQTSICVIDGEGKVFVEGKSLTRPMDIFGWLKNRVDPDNTLKVAMEAGNMSSFLHSGLCQHGLNVVVLETFQAHRFLATYRNKTDKNDARGLAQLLRMGGEDFLKVVTIRSQASQETRTLLAMRDHLMSHKISLENHIAGVLKPYGLIVARGGVCAETFYDRVLTALAEAESSGLRLKEFVLPSLKLYREACAKIKPMTKQIEDIAGSIEMVGRFMDIPGVGPITALSFYAAIDNPERFKRSTDVPAYFGLTPRQYQSGETNYVSGISKRGDPATRRALVNAATVLLYQTNHWCSLKAWGVRLAKRIGFSKARIAVARKLAIIMHKIWLNNDRFRPKAISREERAALRGIGITNTQAAMAA

SEQ ID NO: 384328 - protein, 337 aa, unidentified
MRYVGVDLHKTQFSVCWKEEGGSDKFERYAMSAEGLRRFRERLDGDTEVGVEATANSKYFYDQVVGSVKRVRIINPFQFKIISESVKKTDREDSRVIAEYLSKGLLPEVRVMEKERRELKSLIQTRDKLVKLRSSLKNKIHGILLEHGIQSKREMFSSQKALQKVLEAPVSETARFELEVIVKQIMGLTEGIKELEGKIKDKGKGLKGQGNLQSITGIGELSSTIILCTIGDIADFENKKKLAAYAGLVPRVYESNETVRHGRITKRGDKIFRTTLVQVTLIAIKYNGYLRSFYDRLKRKKGSGKAIIATARKMLEIIYDTLMNEWVFKDFNNFVLA

SEQ ID NO: 384329 - protein, 319 aa, unidentified
MMAQNGQVVAGIDVAKNKVDVCIRSLSQRLTSPGTEQGRRELIAWLGKHGVGKAVMEASGGYERSWAKALREAGMEVRIVDPKRVRRFACSAGRLAKNDTIDAEMIAWFAETFDKAPGQAYDAAREELQKLVRARQGLLDYQTRVQNQDEHEVPAAVQKMHARMLKQVAGEILKLDVAIAAMIEVTPRFAELAKIIESVPGLGRVTAANLISGMPELGRVSDKVAAALLGAAPYDDDSGRRRGPRRIQGGRRKVRNAFYMPCLGAATQHNPVIKEFYQRLLAKGKLKKVAIIACMRKLIVILNTMIARGETWDAERASH

SEQ ID NO: 384330 - protein, 357 aa, unidentified
MDKVLKQCLGVDVSKLSLSLSLGFLTDKLVKEFLVHNDVSNDLSGYKELLKWLKESVDSSTDLLIVMEATGVYHQGIAHYLYELGYSVSVMQSGRVKRYAQSLDQRSKTDALDSKMLSMLGLERELRLWYPPSVELQQLKMLSRERSSLLKDKTTETNRQSAIVSAVYSDKRALKRHKQRLKLLKDQIVSIEEEMRELISNNEFLKKKLYLLESIPGISFISAATVIGETLGFESIANAKQLTSYAGYDVVLRESGNFKGKTRISKKGNSHIRAALHMPSMTCVRCNPTLKQFYNRLKPKKAKPLVALIAVQRKLLILMFTLWKNEEVYNSDFEKKKQQKHNTLAAQDNKLINQLVS

SEQ ID NO: 384331 - protein, 348 aa, unidentified
MLIIGCDYHPGFQQIAFVDTETGELRERRLGHCEETEQFYTGLKGQSVRVGMEASGHSRWFERLLGELQFELWIGNAAEIRTKRVRKQKTDRQDAQLLLRLLIEDRFPRIWVPDSENRELRQLLWHRRRLVQMRTRVMNQLHVVALNEGLRRKKALWRPAGRQELESFVLAPWASRRRQDLLDLLDQLTPKIQELTRALQAEVEKRPVTRRLMTHPGVGPLTALGFELVIGTPQRFHCGKQVASYVGLVPSEESSGDRRRLGHISKQGNALLRFLLVEAAQVTVRSQAQWRSRFFHLAMRRGRKIAKVAMARKLAVHLYWMWRQGWDYGQLQKLGSHAGEPGHLDGVQ

SEQ ID NO: 384332 - protein, 343 aa, unidentified
MQAVTTIGLDIAKSVFQVHGVDAAGQVLIRRQLKRRVVLAFFQKLPVCLVGIEACASSHYWSRELQALGHSVRLMPPAYVKPYVKRQKNDMADAEAICEAVARANMRFVPTKTPEQQSCLMLHRTRHLFIRQQTAVINSIRAHLAEFGIVAPVGRKGVTELLHIVADPSDKRVPEVARVCLAALGNQLLSLKEQIVEFDRMIMVWHRSNETSKRLHYIPGVGPMLATALVASVADPRTFRSGRNFSAWIGLVPKQHSSGGKDRLGSISKQGDRYLRSLFVAGALAVIRYAKIHGTKHRPWLTALLARRPTKVAAIALANKLARMAWAMMAKGERYRQPVALAA

SEQ ID NO: 384333 - protein, 349 aa, unidentified
MAHQPRERTIPAGALETLQQEITRAKQRFRLPEDACVVSCYEAGRDGFWLHRSLAAHGVTHHVIDSASIEVNRRQRRAKTDRLDVHKLLTMLLRHMAGERKVWSVVRVPSVEEEDRRQLHRELTTAKCDRTRLSNRIKGLLAGHGLQLVLQGDVDAQLDQLHQWDGSPLPPALLSRLKRAWQQVCFLTAHIQTLEAQRRAVLRRREDAGVDQVRQLFTLRGIGVNSAWLYVMEFFAWRDFQTPKQVGALAGLTPTPSQSGQSRRELGIAKAGNRHMRAMAIEIAWAWRRFQPTSALSQWDEQRFGHGSARLRKIGIVALARKLLIALWRFLKTGVLPEGAVLKAETLGQ

SEQ ID NO: 384334 - protein, 310 aa, unidentified
MMINPGFVGIDISKAHLDVFESSCGTYKRVPNTPAAIAGLIDGWRNEDVLVVFEATGHYDRQLRHALADHGIRFTRVNPARARDFARSAGFLAKTDAIDARMLATMAQCLAPEPQGAASPVRERLALAHKRRDQLVHARQKERTRRSECVDQDIAADIDAHLAWLDARIATWDREIRRIVRQSEELDQICRRLRSIPGIGPVAAITLIARMPELGRLASKAAAAMAGLAPFNVDSGQFRGSRRIKGGRKRVRDALYMAALAASRCSPRFKAFYRQLRASGKPAKLALIALARKLLVTANAILRDKTVYQS

SEQ ID NO: 384335 - protein, 348 aa, unidentified
MSLALQSLIPYPNSCEGASPHQQGRDTKMLSFCGIDVSKDRLDVMVLPDEYSSSVPNDPAGWAILVEQLRGFSITAIGIEASGGYERGAVRSLQAAGMPVRQVNPFKLRQFAKASGVLAKNDPLDARMIASFVGIMPTRPAQRTTPAAEQLVEMLAVRRQLSAEKTAAENASRLLEDLMLQRLSRRRIARLAADIELLDKRLVEIVATDATLAHRYRLLTSMPGVGPVLACTLIALLPELGGMSRKQVAALVGVAPYAFESGTLKGRRCIWGGRANVRQVLYMAAMSASNWNPVLKLFHDRLKGAGKLPKVVIVAVMRKMITTLNAMVRDDIAWADRLSGRHSVTTAR

SEQ ID NO: 384336 - protein, 429 aa, unidentified
MSEQEGRGLVEEITEDAEIVARVAGLDIGKATLTACVRVPHEDKPGRRLQEVRTYATTTPALLELRDWLVCQGVTLCVMEATSTYWKPPFYLLEDALECWVVNARDVKNVPGRAKTDRLDAVWLAKLAERGMLRPSFVPPPWQRELRDLCRYRRTLVQERTREKQRAEKLLEDTQIKLSAVISDIFGASGRAMLEALIAGQRDPYALAELAQGRMRGKKSVLQEALTGQFRDHHGWLLRMMLDRIDALSAQIDQLTGRIDEAIAPFARQVAQLDEIPGVGKTGAQELIAEIGVDMSRFPTAGHLASWARFAPRARQSAGKAKPGTTGKGNPWIAGALGEAVTGAARTKTFLSSRYHRLARKRGKQRAIVATGRSILVIAYQLLSDPEARFADLGPDWHDRIAPLRRKRQLIAELERLSGKKVTLQEAAA

SEQ ID NO: 384337 - protein, 350 aa, unidentified
MSIIGCDLHSRYQVVAGVDTEDGEVVTRRLEHENGEAQAFYAGLGKPSLIGIEATGYTQWLERMVADLGHELWVGDPAEIWARSVRRQVTDTRAAEHLLDLLLTKRFPRIWVPTPGERDLRQLLKHRDKLVRMQTSVKNQLHFLAMSQGVCRKRKLWSERGRAELEALSLGPWASQRRAELLELLDSLGRRLRELNQAVEVQAEQRADCRELMKVKGVGPVTSLAYVLTLGPVERFPNSRKVVSYLGLNPSEHSSGGRQRLGHISKQGNEMMRWLLVEAGQSAAQFDPELRRKYLRLKFRRGAKVAKVAIARQLAVRLYWTLRQGETAPSPVRTPGSPARTLVEATPSIL

SEQ ID NO: 384338 - protein, 374 aa, unidentified
MDTSITKIALDTHKKQHTVAWVNCQTGETDVFTVLNTNKDITKMVKKLRKKTDTKLHFCYEAGVCGFALKRLLEKQGCMCDVIAPSLVPVKPGDRIKNDRRDAKKLLEHFIVSQLTTIYAPDIKQEAVREITRCRQAAKENLNRIRHQILKLLTRHGYRFTEGKNNWTLKHMVWLRALKFDSADLTKVFDYMLTELMHCEQRLDHLNKEVEALGDRPELKEIVGVLRCFRGVDTLTAIIIVTELFDLGRFSSPRALMAYLGLIPSEYSSGDKQCKGHITKAGNSRIRRILIESAWHSRHRICLGRALKIRRKDQPQWAIDIADKAMARLHKRYKNLNDRGKMHCKITVAIARELAGFIWAMCREYSVRQSLKAS

SEQ ID NO: 384339 - protein, 333 aa, unidentified
MQNFYFIGIDVSKKKLDICVMSNSKVLKEEQVSNHPQAIATVIAGIKEELSMSNDCFIICAEHTGQYTYPLICACKSVGSKLWLENASQIKYCSGVTRGKNDKVDARRIAEYAMRFFDKAKPYQRPIEELMRLKQLEAERSLYLTDLAKYKAQLSDQEGFMEDKIFKRKAKRLKEMIKSLEKTLKEIAQEMADVIYSSEELSRQMRLLKSVEGVGPVVTMNMIIATEAFTRFDNPRQFNCYVGVAPFAYTSGSSQHSRNRVSQRAVKYIKCLLHMAAVAIAHKKTGDLKTYFERKVAEGKNKMTVLNAVRAKLVARMFAVIRNNRVYQPILSV

SEQ ID NO: 384340 - protein, 339 aa, unidentified
MVQATTIGLDIAKQVFQVHGADRAGKAVLRRKLKRNEVARFFSGQPPCLVGIEASGSAHYWARVISGFGHTVRLMAPQFVKPYVKSQKNDANDAEAIAEAVTRPNMRYVPRKTVEQQDLQCIHRVRSRLVACRTQLINQIRGLLAEYGIVLPQHPGQVRRGLPTVLEDAENQLTGPGRELFQSLYEELTELDEKIAAADDRIQVAFQNTPNCQRIAAVEGVGPLIATAVIAAISNGHAFANGRQFSAWLGLVPRQNSSGGKSRLLGISKRGDPYLRTLLIHGARSVVYRAKAKTDKRSLWIADKQRRLGTTKTCVAVANKNARVIWSLIAREQEYRRAA

SEQ ID NO: 384341 - protein, 365 aa, unidentified
MQKISTMRTSGENIFEGQLTIGVDLGDRSSAYCVLNEAGKIVLEQKLATTPEAMKQVFGSLPRCRIAMETGTHSPWISRLLTALGHEVIVAHAQKVRLITKSRRKDDRLDARTLARLTRIDPELLSPVKHRSAQAQLHLTEIRARAVLVSSRTALVNAARGLVKSYGERLPKCGTQQFRRETTSGLSAGLREALELLLREVESLNERIQEYDRRITTMAKQTYPETALLKQVKGVGDLIATAYVLTIEDPHRFRKSRDAGCFVGLQPGRRNSGESEPQMRISKEGDEYLRTLLVQGAHYILGPFGEDSDMRRWGQKLSARGGKNAKKRAVVAVARKLAVLLHRLWVSGEVYEPLRNSQKEMSAAA

SEQ ID NO: 384342 - protein, 456 aa, unidentified
MNSSINLNPYLLPMPMAHPFDVVFGLDRSDRKADLHLIDIDSGQARSQTIATAPEALHDWLLQLRQQYPQARIAICLEQPAASLILFLETYAWITLYAINPVTLQKFREAFVTSRAKNDAKDAQYLAELLLTHHDKLQPWQPDDAQTRLLQQLVSHRRAVVDERTGLTNRLQALLKQYFPQALELCGEDLWRPLATAFLLKWSTLQALQKAQPATVKKFYYLHGSRSQQLIEQRLERIAHAVALTEEAAVLESHTLRVQLIGRQLQALQRTLAQFEQRLAAVFRTHPDREIFESLPGAGPVLAPRLLASLGSERERYEDAASQSSFSGIAPVTKQSGGKQHVHRRYRCPVFMKQSFHEYAKESIRHSRWAAAHYRQQRDQGSGHHAAVRSLAFKWQRVIWRCWQSRTPYREETYEAALRKSGSPLVPLLDQIELGKSPAKTRSTKTKKPLVGSPQR

SEQ ID NO: 384343 - protein, 315 aa, unidentified
MTQTNITTAGIDTSKAKLDVAVHGRTERWQVANALPGWRALAANLAKAGVTRIGIEATGGYERGVVEHLRSAGFTVLLLQPLQVKAFAKVHLRRAKNDALDAVLIAACAAALDPPEIAPDPRLRELADYLTFLEQIEEDIRRFKTRLEHIDEPALRRIVDSDIARLKARKAAQIRDIAKRLRAYDDLAKRLKLVLSVPGIGERTALAIVIRMPELGRVSREQAAALAGLAPFDADSGQQRGQRKIAGGRSRLRRSLFAAALPAAFRWNKALIALYARLMAKGKVHNAALVACARKLLIYANTVVQRGTPWTEKAA

SEQ ID NO: 384344 - protein, 343 aa, unidentified
MQAVTTIGLDIAKSVFQVHGVDAEGNVLIRRQLKRRYVLAFFEKLQPCLVGIEACASSHHWSRELKALGHAVRLMPPAYVKPYVKRQKNDAADAEAICEAVTRANMRFVETKTPEQQSCLMLHRTRQLFIRQQTSVINAIRAHMAEFGIAAPVGRKGVEQLLEVAADASDQRVPEVARACLAALGAQLRMLKAQILEFDRRIMAWHRSNETSKRLDAIPGIGPALATALVASVADPMAFRSGRNFSAWIGLVPKQRSSGGKDKLGSISKQGDRYLRSLFTAGALAVIRYAKIHGTQHRPWLTALLARRPTKVAAIALANKIARMAWAVMAKGERYKEPAALAA

SEQ ID NO: 384345 - protein, 345 aa, unidentified
MKQTIIGVDLAKDVIQVCIYSNKKVHSNTEMTPKEFTLWLTNQTASIVVFEACGTSNYWKQKATSLGHDARLISPNLVTAIRQNQKTDRNDALAIVQASQLPEVKFIAGKSNKQQQLQSIMRMRELCVKQRTAMKNQLIALLAEFNIKPSTKNGGLNAVVSSVLEDGDNGLTFEFRIALDTAWNTYKSSILAIERYDECLRSAVEAHPECKKLMKLEGVGVLNAVNLYIALGCSEIGVFKKGKDAAACIGLTPIQYSSGGKTQIGSIGKYVKNTMLRSLLITGAMSVINQVMRRDPKTKKEQWLQSLVERRGKRCAAVALANKTVRTAFALLTQGTEYKAELLSA

SEQ ID NO: 384346 - protein, 455 aa, unidentified
MAELLHRAASPPHECPWTREPHPGGQGPARPGWLMRHEETPMLPAEIQYVVGIDSAKRFHVVCALDARTGKMHLRPRSVAATAAGYADVRALLRPWSEPGAILRGLEATGCLWEPLYEDLTQAGYTVLVLNPRQTVAWAAGLGLRAKTDGIDAQTMARGLLAGYAQGSTVPSETSQEVRALTRARRDLVQSQTAAKQRLRDELVVLFPELPDHTPEHRALMDPAVLRLVEAYGSAQAFAQAAPDELAALLKEVSAGVWTREQADALQRVARQSAARSRAEAARAVVVRTMVRPLLDLYARLAELEEAIAAVLAHAEDSQRLQTLPGVGPVIAATVRAALGDVTRFQGVDQVIAYAGLDPRTHQSGAFVGQKHLSKRGPGAWRHALYLATLNAVRNRPEWRDRYQRLLDRGRSTKEALTILSRAYLKVVYHVLRTGVSYDPLALTAPKPCPARGRA

SEQ ID NO: 384347 - protein, 322 aa, unidentified
MQGKVLPERSATAVYAGIDVCKAWLDVYLHPLGHALRVANSREGLKQLKRELAPLKPALVVMEATGKYHREAHRTLSAAGFAVAVINPLRSRLFAEAAGQLAKTDRIDARMLALLAEGLAPKATPPSPEHLEELAELVQARSAATADLTALTNQHGESKTKVLKRELARRIEATKASIARLEAEIARRIASDATLARRFLILRSIKGVGPVTAAVLLTGLTELGHCSGKQAALLAGLAPIACDTGKTHGERHIKGGRAHVRTALYMAAVAAARSNPDLRAFYRRLRDKGKKFKVAITAVMRKIVVLASALIRQDRIWQPIHP

SEQ ID NO: 384348 - protein, 402 aa, unidentified
MNCVGIDISKGKSMIAVMRPFGEVVVSPFEVLHTDSELSKLARLLKSLDGETRVVMESTGNYHAPVAWLLHGAGFYVSVVNAMLVHDYGNNSLRRAKTDKKDAVKLANYGLDHWLTLPRYVPDEDTRLMLKTCYRQYQQYSKVRTMLKNNLISLLDTAFPDANRLFTSPPRADGSEKWVDFVAAFWHCECVCGRSEKAFTTQYQKWCRKHGYNFSEDKALDIYASACGHFGVMPKTDTTKLLVEQAISQLRATSAALAALKQEMQSLAASLPEYPVVMEMFGVGPALGPQLMAEIGDVRRFHSKKALVAFAGIDAPPYQSGQMDVRSRSISKRGSASLRRTLFLVMGVLLQCAPMDEPVYQFMNKKRSEGKPYRVYMMASANKFLRIYYASVKAYLDSLEHD

SEQ ID NO: 384349 - protein, 314 aa, unidentified
MTNVSYNVAGIDIAKASADVCLLRDGSAHSASFADPRSLCRELAARKVTLAVVEPTGGYERPVIAALDEVGIPVAVVNARLIRDFARASGLLAKTDRLDARVLAEYAHRMRPEPRPRKTPARQRLSALVRRRRQLVGMRKAERTRRQQTQELDLLEDIQNAIAFLTSEIKAVEKRIQCHIDEHGELSTAAGLMRSMPGIGAVAAASLLAELPELGILSRRKIAALVGLAPFSRDSGSFRGRRTVWGGRADLRSTLHMGVISAIRADTQFKHIYTAMRERGKPHKVATTAILRKMIVQLNAMLRDQTTYSQQHSC

SEQ ID NO: 384350 - protein, 355 aa, unidentified
MIVIGVDPHKATHTAAAVDDGIGELLAERTVQARRTGHEQLLGWARGLADERVWALEDCRHVSVSFERFLLASGEQVVRVAPKLMAGARRSSRIRGKSDAIDALAVARAALREPQLPAARLEGVEREIRLLVDHREDLVAERTRIQQRLRWHVHELQPELELPAGCLDRRVWRERLARRLARTEQTAQVRICRELVGRCRELSRRAAELERELAMLVSAHAPALLEVPGCGVLTAAKLVGETAGAERFSGEAKLAMHAGTAPLQASSGARRRHRLNRSGNRQLNCALHRIAVTQGRCYPPAQAYLARKESEGRSRKEALRCLKRHLARVVYRTLRALEEEKMTSTNRPELVPALT

SEQ ID NO: 384351 - protein, 392 aa, unidentified
MVCVGIDVAKDKHDCFILSSEDEVLADIFTIENNRDGFDTLLQRIRSCTSPTDKIKVGLEATGHYSYNILGFLLEKGMPPYLINPLHTNLYRKSLSLRQTKTDRIDARTIATMLMSDVDLKSYTNTAYHNEELKSLTRYRFDKVSERAKLKQSVSRLVNILFPELEKLVPTLHMVSVYAMLSEFPGAKQIAEAHLTHFKTVLLETSKGRYDREKAVAIRDAARRSVGSVMPAKSLELRHTIRLIQELDKEIEEVEAEIFAILDTMQSPITTIPGMGPRMGAMILAEVGDFSRFDSADKLLAYAGLSPSTYQSGKLNATGAYAHMEKRGSRYLRYAIFNATKYVCIWDPPFKAYLARKRAEGKHYNVAISHAAKKLVRLIYAMQKSGRPYQPA

SEQ ID NO: 384352 - protein, 412 aa, unidentified
MEVVHPRCCGLDVHKRSISACVVIREHGRMEKLERRFGTFTRDLEDLAEWLEEHHVTHLVMEATGVYWKPVWNVLEGRFDLMLVNPQHIKALTGKKYDRRDAAHLADLLQHGLLQGSFIPSAEIRQLRDLTRNRARTVQEAARIKSRIQKVLEEANIKLGSVATDVLGVSGRLMLKGLIAGEQDGAKLADLAIGVLRKKHDQLVQALSGKVADHHRLMLHKLLRALQTREAEIAEDETDIRRQIEPFRKAVLAWMQIPGIDEVTAWSLVAEMGPDMAPFETAEQAASWSCVCPGNHESGGKQGNGRTRKGNPWLRSAICEAAWGASRTKRSYFHAQYARICARRGPKRALMAVAHSMIVVGFFLVKHNLKFNDLGADFFDRRNREHAARRAVRRLTALGYKVHLEEAVSSPA

SEQ ID NO: 384353 - protein, 345 aa, unidentified
MDITTVGIDLAKNVFQVHAVDARGRVVLRKQLRRGQVAEFFVNLPPCLIGMEACASSHHWGRTLQRFGHTVRLMAPQFVKPYGKTNKNDAADAEAICEAVVRPNMRFVPIKSIEQQAILSVHRVRQGFVKARTAQANQIRSLLGEFGLIIPQGIHHLARRVPALLEDASNELPLAFRQLIERLTEHLKVLDEQVRDFERQIVEWHRGSEVSRELEKIPGIGPLTATALLASIADARSFDSGRQVSAWLGLVPRQNSSGGKSTLLGISKRGNVYLRTLLIHGARSAILAAKRQSKCKNPWLDNLLNRRHANIAAVALANKNVRTVWALLAHGRTFRADYVPIRIAA

SEQ ID NO: 384354 - protein, 382 aa, unidentified
MDVLHACCAGLDVHKRTVVACVRRVDPAGKVTKNVKTFATMTGDLLNLSDWLTAQGVKVVAMESTGSYWKPVFNLLEPGFEVILVNAHHIKQVPGRKTDVKDGEWIAQLLQHGLLRPSFIPPRPTRELRDLTRQRTRLIQEKTAVVNRIQKTLEDANIKLGSVASNALGVSGRLMIEAIIRGEFDPVKLADLARRRLRAKIPQLQRALRGSVTEHHRFLLRTQMDHLDYLERLIRQYSERIDEVLTPFAATLARLVTIPGVDIRVAEIILAEIGQDMSRFPTAGHLSSWAGLASGNHESAGKRRTGRTTPGNVWLKTALVQAAWAAYRAKGTHLAKKFRRIAGSRGTKRAAVAVAHAILVIIYSLLKEGTTYQEIAGESEAA

SEQ ID NO: 384355 - protein, 254 aa, unidentified
MNYYTGIDVSKQTLKMFDGSKECEVPNEKGLKTFKKLLKKSYGKEWKDVGLIYEPTGPYSNYLREFASESKLKVYEVNPKKSANFAKALGNRSKTDTIDAKMLYRFHVLLKEGDLSIPGIDEITEQLGSFIGSYEIIQKTRTMLSNHLHSMEYKSGVDTKLKESIKKEVKHLTQMEENLEKEIEVFVENNQETREDLKNLLSIKGIGVISAINLLYLFRKYPDANRNEITALAGLDPIKRQSGSSLNGGRKITC

SEQ ID NO: 384356 - protein, 357 aa, unidentified
MKIKKEIFIGKSFVGIDAHKNSWKVCVLGDHGFRKEFSCDPNPEVLRSSLLNLLPNFYFECAYEAGFCGFWIYDAINEMEGFSCIVVNAADIPTSDKERAQKEDRRDARKIALHLKSGILSGIYVPPKESVALRELQRLHFTTTKDLTKSKNRIKSFLFRHGIEICKEQFKKPQTHWSNKFIQWLKDLELTPLLRFTLDEMLEVLIRLRDQKKKLLTAIKEEIKSNKKLNIIYERLITIYGIGLVSCITVITEVGDIRRFRTYEKFHSFIGLIPSTNSSADVEKIRGITNRANKRLRSVLVEVAWFSIRRDPELLCYYTELKQRMSSNKAIIRVAKKVANKIRYELLNDGELNKLAA

SEQ ID NO: 384357 - protein, 370 aa, unidentified
MSQSRTLFIGMDVHKDSIAVAYVAQDHGAEVTYLGARGTRQCDIDQLVRKMQSKAKHLLFVYEAGPCGYWLYRYLPRKGSDCWVVAPSLIPHKPGDRVNTDRRDARQLARLARSGDLTVVYVPKVEDEAIRDLSRAREDAISDLKDAKFRLKAFLLRQDIRYVGRAHWGPAHLRWLSEVVCPTPAQQIVFQEYVRAVQEHTERLQRLEQELQEQVNAWRLHPVVEALQALRGVQFTVAVTMVAEIGDLTRFDTPRELMQFLGLIPSAYSSGEQRRQGSITKAGNTHARKAVVEGAWAYRYPAKVSRHLQLRLEKPPKMIQDLSWKAQVRLCTRYRRLVSRGKHATVVTVAMARELVGFMGAIATQVPLTA

SEQ ID NO: 384358 - protein, 331 aa, unidentified
MNYSHFVGLDVGKKTFDASLMSAAEKELSHKSFDNTPEGIQSLLDWIAGYHLSLSKLLFCAENMGSYVTELSVSSVSMGFSLALVCPLTIKKSIGLQRGKNDRIDAKRIANYAVLHYRKLELYKLPDKDLVRLRGWIIIRDNLVKQKVSNIKLLETFSQMAKLADVTESISFLEEQLKSIKERILEVEEDMEQLIAASTSLYTNYLLLRSIKGIGIINAIVLLCVTDNFQRFDNPRKFACYCGVAPFEHTSGISIRGKTQTSSLANKEVKVYLTRAAITAISWDPQMKAYYKRKIAEGKHKASVINAVRAKIIARSFAVIRRQTPFVTLAV

SEQ ID NO: 384359 - protein, 349 aa, unidentified
MRFYSQQHRFYCGVDLHARTLSLCILDATGAAVHHDTIAATGRDFLSAVAPFREGLAVACECMFAWYWLADLCAAESIPFVLGHALYMKAIHGGKAKTDKIDAKKIAVLLRGGMLPQAYVYPKGMRETRDLLRRRTFVVRRRAEALAHLVNTNSQYNLPPLTKKLAYAANRVELDLPARFSDPSVRTNVEVDLALIDGYDEQIHRLESYLVKAARVDDAQAYARLQSIPGVGKVLALVLLYEIHDVRRFPEVGQFLSYARLVRCAHESAGKKQGTGGNKIGNAHLKWAFSEATCLLVRASERAKKWLARREKKHGKRRALGALAARLGRAVYHLLRKGEVFEEERFFAS

SEQ ID NO: 384360 - protein, 344 aa, unidentified
MMLIGCDFHPSWQQVCWVDTDTGETEECKLVHAPGEAEKFYRRFPAPALIGMEATGNCQWFVEMLAALGHEVWIGDAAKIRASEVRQQKHDRRDAALLLRLLIEGRFPRIWTPSSEQKDMRQLLIHRYKLVRLRAQAKNGLQHLAMNQGLQKKNRLWSKKGQKLLRELALQPWASRRREDLLHVLTMLDGQIESLDLAVKQAAEQNENAKLLMTQPGVGPVTSLAFVLTMGDVSRFPRGKHVASYLGLIPREYSSGGHQRLGSISKQGNRFMRMLLVEAAQVAVRCDPQFRSEYLHRCHEKPKGVAKVAAARKLAIRLYWMLRTQKRYPEIVHVESSSRVALGG

SEQ ID NO: 384361 - protein, 345 aa, unidentified
MMDIHMLGIDIAKNIFQLHGADHSGKSIFKKRVARDQLANTVANLPLCEIVMEACSGSNYWARIFQESGHTVKLISPQFVTPFVKTNKNDANDAEAIVEAASRPSMNFVPVKQIAQQDIQLIHRVRSRLSKNRTALINEIRGLNVEYGIIVTPGAAKVRKSLCSIISDEKNELTDLSRACMQELYDELVEVEKRLKQQDKKIKNICKNNDTCRRLLTVPGVGELTATAMIASVSNANEFNNGRHLSAWLGLVPRQSSSGNKQVLLGISKRGDRYLRMLLIHGARAVLTRYKNTENDYGRWVLGKKSTLNLNKAAVALANKNARIIYSVLKTGCEFESNHCHKVAA

SEQ ID NO: 384362 - protein, 372 aa, unidentified
MKTKNKTNLTPSVVSTSAAPVPAGGFTLGLDLGDRSHYVCVLDATGQIIHEGPLLNERVALALLLAKYPAATVALEAGTHSPWISRYLTELGATVIVANPRKLHAITRHERKCDRRDAVMLARLARADVALLHPLQHGSAQAQHDLLGLKLRDSLVRTRVNLINTVRFTLKSLGHAVANPSSEAFHKSIVTAVPADCLPVVQPVLAVLALITDQIKTLERDLVARSKKDYPVTQRLQQIAGVGPLTALCFVLKIGEPTRFGRSRDVGAYLGLCPRRDQSGGTDKQLRISKCGDGLLRRLLVSAAHYILGPFGPACALRAYGQHLVGTSVREKKRAVVAVARKLAVLLLSLWKHGTDYEPRVPAAPALVMIPA

SEQ ID NO: 384363 - protein, 348 aa, unidentified
MIESKLTVIKYFIGIDVSKATFNYCLRYDGGNVLNGRVANNVESIKEFVLKLREISGFKLGYAIFGMEVTGVYGLMLLNTLTKMKAKIVVEPSIRIKNSLGIIRGKNDKLDAARIARYLIKNLQELKLWVPRRKIIDELSSLSTLRERMVKVGVIITTPLNEDTNFIDPAISAANINLCNPSIVQIEDLITNIDIKIKALYTNDDHCNRLMKIMLSVMGIGEVTALQILIHTNEFKTITTARTFASYCGVAPFEYDSGTSVKKKARVSHLANKRIKSLLHNGVRTCIGHDPSIKAYYRRRVDVDKKNKMSVMNAIKFKLICRVFACVRVDRFYEKGYVSLKPVTNKLR

SEQ ID NO: 384364 - protein, 400 aa, unidentified
MHYCGIDIAKRKHEASVIGESGKLLSRSFSIDNSADGAAKLFSFFSDNGIEKDKVVIGMEATGHYWLALYSFLTEEGYDVKVINPIQSDAFRKMYIRNTKNDSKDSFIIAQIMRFGEYHTTELAEESMVALRQLSRYRLCLVESAGNCKRRIIALLDQVFPEYASLFSDIFGATSRELLETYPLPDDIMGIPTEQLADFLAKVSKGRFKEAKARELKAVAGGSFGVGFAKDAFCFQIKQLVAQLQFLDEQISDLEEEIDLLMQSTDSPITTITGIGSVLGAAILSEIGDIHRFDSPAKLVAFAGLDVKVVQSGEFTGTQGKLTKRGSPFLRRALWLAANVAAFKDPTMSEYYRSLRQRGKHHYVGISAVARKMCHIIFAILSENKPYDPYYPKNVQAVSE

SEQ ID NO: 384365 - protein, 353 aa, unidentified
MMIIGCDFHPSFQQIAYVDQETGEYGERRLSHRGEAVAFYRSLAGRAVRIGLEATGNDRWFHKLMSELGHELLVGDASAIHASAPREQRTDKRDARQILQLLVENRFPAVWQPSAANQEQRQLLLHRCRLVRMRTRIKNQLDSIAKNEGLTGSRSWSAKRRQQIEDLPLTSWYAQRRADLLELLDALETRIKPLDEAVLAAAEQNAEAHLLMTHPGVGPVVSLAYVLILGDWRRFSRGKQVGSYLGLIPAEASSGKHQQRMGHVTKQGNTLLRWLLVEAAAKAQSKDPNWHRQYLRLSMNKHHGVAKVAIAHKLAVRLYWMLRSGQNYTQIMERGSHAGQSDLAGGCGLRPIN

SEQ ID NO: 384366 - protein, 387 aa, unidentified
MYYIGIDISKFKHDCAVIDDSGEIVTPSWSFTNDAEGFSQLKLLLNSLDTETRIGLESTGHYGMNLKLFLESNNFSFMEFNPLLINRFVKSKSLRKTKSDSIDCMMIAHYLMTVEYKPYPSSFYHTEKLKSLTRFRDSLIRLRSRQLVELTNILDKVFPEFKPFFGSRFSVTALYILSNYSSPEKIANMNSKSYEALRKLSRGRFSTVDFAKLKQLAKNTIGTTEDYLLLQMQIVLDIYRQLDSKVDETEVSIKECVSDMNPPMLSVPGIGIESAAVILAEFGDFSKFKNASQMLSFAGLEPGYFQSGTSETTGKMVKHGSSYLRYALMNCAQTVVNYEPTFAMFYSKKRAEGKPHRVALSHVVKKLLRVIYTLQTKNIAYDADFVR

SEQ ID NO: 384367 - protein, 369 aa, unidentified
MTFFIGVDLHKTQFTVHVRTEEKVEFLAQIKQYPTTTAGYAEFLSRIETYKATGAAVKIGVESTGNTRFFKNQVEKAGAEVTVINTLKFKVINESTKKTDKHDASTISEFLSKDMLPESYLCGKETENIRRLLKSRERLVRSTVGQKNEIHALLVSLGLSDELRSLQSKKGRQRVLDTLESNNDYVLEAQSVKLMFEIIERIEESVKIIEKQISELTKDDEMVSRLMTIRGCGKITAWTVRAYTEDISRFATAKKYAAFCGLVPWVQDSNETIHHGKITKRGPQELRTCFVQLVMGIRRCKDTSEWRMMQRYEYMKKNKGSGKSIVAAARKMAEIVWAMLNDKQDFDSAKMIGKYKLMILADEALTAMN

SEQ ID NO: 384368 - protein, 355 aa, unidentified
MAADEIAVIGGIDTHTDVHQAAVIDTVGRHLATEAFPTTPDGYQQLLDWLRPHGELLAVGLEGTGAYGAEIARFLTANGITVVEVDRPDRKVRRDNGKSDPVDAYAAATAVLSGRASGTPKTRNGIVEAIRTLRVARSSAVKARTQTINQIRNLIVTAPAVVREKLRALTTSELIGTLARSRPVGDLSDPEHAARVTLRRLARRYQRLCEEIADADADLGPLVTRAAPRLVALPGVGPETAGQLLTTAGDNPDRLRSEASFAHLCAASPIPASSGRTHRHRLNRGGDRQANRALHTIVLVRMRYDQRTRDYVARRTTEGMTKKDIVRCLKRFVAREVYRHLPRPQITTEQLAQAA

SEQ ID NO: 384369 - protein, 428 aa, unidentified
MNDLELSRIEAYRQLKNEIRGSKEYLIVGIDVAKSKHNAFFGTATGKSLLRRVAFENDMEGFERLLLHVDAVKVEHALDQVVFGLEPTADYHKPLAEYLIKGGYRVVLVGGEAVKKNRVLLDGRWDKHDMKDSANVADLISQGKCLHYDFPSIELRDLRNLLSLKRRLKKQEHGWKVRIRNHLLAQYFPEMDRYYGQSETQGLPIIRWCLNPDVVARLDFDSFIGLVAPQCRMVQHRERLRMIWEKAGGSIGCEVGESVEFEARLSVEGLTQAQDAVRECKKKIEEICRGFPEYPCLLSIPGFGPDVSAKVLGAIGNPFRFHNGQQVLKLSGMDLSASRSGKRSDRAVPVISKKGKAELRYALYQAALIASVKNRHFKIYFTNRLRGREREKGIKTKMRIKLAAKMLLIAWHLMKKQETFDPQYLNLH

SEQ ID NO: 384370 - protein, 347 aa, unidentified
MNDHRVYVIGIDLGKNWFHLVANDERGTELFRKKLNRGQLAEFAVTAPRCLIAMEACPGSQFWGRRFQQAGHELRIIPAQFVKPYLKSNKNDFNDAQAIAEAASRGSMRCVPLKTTDQIELQALHRVRQRFIVERTAVVNQMRALLLEHGIVIPVGRALFARRLPAVLADPQSGLSPRLSQIISRLRQRWLALDEEIDTASAEIAQIARESELCRRVCTVPGVGPVVSTALIAAVGNGAAFKRARDMSAWLGLVPKQYSTGGKSNLGGISKRGNAYLRMMVIQGARALMIHMKRDQSRMGLWLREVEQRSHPHVALIALANKIVRICWKVLTSQQSYRPFVEVPAAA

SEQ ID NO: 384371 - protein, 349 aa, unidentified
MKYFAGLDVSLDETAICVVDESGALVKEARAPSEPEALAMALHAFGLRLDRVGLEACSLTAWLHDELRAAGLPAICIETRQAKAAMGAMPNKTDRNDARALAQIMRTGWYRAVHVKSKASRIWRSLLVARRTVLNEMRSIENVVRALLRETGVKLGTPSRKDFVEKARELTANDPVLTRMTEPLLAILTTMQRELARLTKQVLDIVRDEPVCRLLMSVPGVGPLTALAFRATIDQPDRFAKSRDVGAHLGLTPRRYQSGETDVQGAVSRCGDEMARTALYEAAHSLLIRSKKWSALRAWGMNIAKRRGMARARVAVARKLAVVLHRIWIDGVPFQFGREAAPTAAISQA

SEQ ID NO: 384372 - protein, 346 aa, unidentified
MGVDTHLDFHVAVAVDELGRRLGQSTTPTTTEGYESLLWWAEGFGPVRSAGLEGTGSYGAGLTRHLKERGVEVLEVERPKRRHLRRKGKSDPIDAEAAARAVLAGEAAGVPKSGDGRAESIRTLRAVRRSAVKARTQAANQLRDLVLTAPDGLRQRLRGLSTKALASTASRFRPGDSPNNPEEATRFAMRSAARRYRSLSEEISELDAQLARLAAEVAPDLLALPGVGTDHAATLLVVAGDNPERLRSEASFASLCGVSPVEASSGGVVRHRLNRGGNRDANRALHLICVVRMRIDERTRRYVARRTAEGKSRREIMRCLKRYIAREVYRVLVTATSPPQIGASTT

SEQ ID NO: 384373 - protein, 420 aa, unidentified
MDVVVQRCAGLDVHRDDVVATVRVPGTGRRRWDQQTRTFPATLAGLATLGDWLAEFDVALVGMEATGVYWKTVFQALEDRFECWLLNAHHLRNVPGRKTDVKDSEWICQLVQHGLVRPSFVPPPEIRRLRDLTRLRKAQTNERARTIQRLEKVLQDAGIKLSSVASTTYSKSARAMLEALLSGVSDPEQLAELSKARMRLKIPQLREALQSRFQIEHHGVMVAQLLAHIDTLDAALQSLTERIELVLVPHAQTIELLCTIPGVQAHAAQVLIAECGLDMTLFPTVGHFASWAGACPGHHESAGRRRSGRTRPGPRWLTDQLTECARAAVRTKGTYLAAHFAQLRGRRGEPKAIGAIRHDILVAYYHIVRDQVPFRELGPDWQRKRYSPEHRARRLQRQLEALGYAVTLDQVEQPEIEQAA

SEQ ID NO: 384374 - protein, 344 aa, unidentified
MDISVLGIDLGKNVCSVVGLDASGAVVMRRRMRRETLIGLAERLPACIVGMEACCGSHHLGRVFASHGHDVRLMSPEYVRPYVKAQKNDDRDAEGIAEAATRPTMRFVELKSPDQLDMQTLHRSRDRLVGERTALINQLRAILLERGLVAPQGKWKLKEFLNVLMDKQGGASLSPRMILLVEDARAQWAELDRRIAAFDAEFVRWAKENEEARRLTTIPGIGAIVASALVAAVGRAESFNHGRDLAAWLGLVPRQFTTGGKPKLLGISKRGNKYLRKQLIHGARAALPHIAERDTPLGRWAKELMRRAHLNVAVVALANKLARIAWAVLQRRKAFDANAVSVAA

SEQ ID NO: 384375 - protein, 376 aa, unidentified
MQAAQVKGYEVNRVLYMAMELSNSKWKLGFGNGSKLRRKSIDARDRRGLVDEVALAKSKLKLPEDAPVVCCFEAGRDGHWIHRWLEREGFEVLEIDSSSIETARGRKHVKTDRVDVEKLLDLLIRHHCFGLRKAFRVVRVPSVAAEAGQRLHREDEYLLKQRTRISNRIKGLLVAQGVDEVPLRGDFAAWLDRVQLWSGAGLSAELRRELQRSHAQYAVFDSQLRELQKVYAAELIANTPVAEYRRRLERLKSLGPKSSRVLSAEVFGWRKFDNTKQVGAFAGLTPTPSQSGDSETEQGISKAGNRRVRRVMIELAWLWLRWQPDSALSQWFTQRWAHGGKRQRRIGIVALARKLLIALWRYVEHGVIPEGALLKA

SEQ ID NO: 384376 - protein, 326 aa, unidentified
MQRNKKTFKGQNIYIGIDVHKKNWQVAVITESGYTERLSTAADAKALFKFLKSHYPDGNYRAVYESGFSGFATHYALSDLGVSCVVAHAADIPSSQYELTMKSDRIDAEKLARALRAGLIRGIYVRPKDNLDDRGVLRIRKTIQIQVGGYKTRIKHLLHSNGVELPERFSRSGTHWSRAFIAWLREDVRLLSDTRRSLELLLLQVETLRANLLEATRRVRALSMTDRYREDCALLMGIPGIGLTVAMTILTEVCDIGRFGNERQFASYLGLVPTSHSSGERVSHGEMTFRGNKHIGPLLVEASWVLIVRDRELGRMYTERFNFIES

SEQ ID NO: 384377 - protein, 355 aa, unidentified
MIIIGVDYHPEFQQIALLDKDTGEFQEKRLSHPEEAEQFYRALRAAGEKVRVGMEASGHARWFERLLAELQLELWIGDAAEIQSKRARKQKTDGQDAQLILKLMLKDEFRQIWVPSWENRDLRQLLWHRHRMVQTRTRIMNQLQAVAINEGLRCKKRLWRGGGRQQLESFRLAPWASRRRHDLLDLLDRLNPTIAGLNQAIEQEAEKRPEARRLMTHPGVGALTALAFVLIIGNAERFRCGKQVAAYLGLVPLEKSSGNRRRLGHITKQGNSLLRFLLVEAAQVTVRSLPEWRSQYFHLLMRRGRKTAKVAMARRLAIRLFWMWREGGDYEQQRSSVRTQDSPEQAMVCSRTPSN

SEQ ID NO: 384378 - protein, 312 aa, unidentified
MDERYVGIDVSKAWLDCATEPASAARRFANDSAGIAALVQALVVEAPQLVVLEATGGWETAAASALVAAGVTTVVVNPKQVREFAKAMRLLAKTDRLDAQVLALFGARIRPELRSWPSSEQRELAELLDRRSQLVAMRAQERTRLATALPVAKPSVQEHIQWLAARIDELEIDLTARLRSSPTWQVKADLLQGVPGIGQVTRFTLLARLPELGQLNRASIAALVGVAPFADDSGKRCGPRFIQGGRAEVRNVLYMATLTAVRHNPPIKAFFDRLTAAGKPFKVAMTACMRKLLTILNAMLKTNQPLQPAARP

SEQ ID NO: 384379 - protein, 364 aa, unidentified
MNEIIKQCVGIDISKDTFTVCVCRRDLSGKEYLSETVDFKNLKTGFNQLVKWSRKITDPSIETLFVMEATGIYYENLAHHLHRLNLPVSVLLPNKVKHFAKSLNVKTKTDQVDARIIARLGAERKLLLWKPPPEIFKLLKDLTREYAELIRERTAFKNRLHAMSSGYKPHPAIIRSNKAIIKKLTENAEKIKEEIEKLIYSEEWLGSKVNKVLTAKGVGLMTVVTILAETQGFEFVSNIRQLCSYAGYDVVQRESGTSVMGKTRISKKGNGRIRAALHFPALQSARHSPRMKSIYDKINQNKPSKMVGATAIQRKMLVLIYTLWKKDEEYVEDYENKAGRGLSNLPAQDELPTSSQKLSFVCEI

SEQ ID NO: 384380 - protein, 429 aa, unidentified
MTSNSSTTSSAVRVAIDVAKLTHQVLLELPSGQRRAMRIANTKTEIDRFVAMLCAFRLPCEIAFEPTGDYHRPLGYLLGQAGFHLSLVSSIAVARTREALYNSWDKNDPKDAQVILHLLKNGTTQRYLDPVVTGHQDLQEMANTYQQVSLRKVRLQHSLITHHLPLYFPEAERYLHSSRAEWFTQLLLFAPCPAAVRQYTKAAFVAAAREEIAGRKVDKARWLADFYETSCTSVGLPVAATSETIRMFRVVLEEYRALCQLRKRLETEIATQLATLPDFVRLQTIPGIGPILAMIILAEARDLRRFGCVRQFLKYCGFDLCTEQSGQFRGTTHLSKRGNARLRYAFWMAGTVAIRMQQNSFRRKFEDYIRPDPKSADRRRKGYTAVAAKMARVAYAVVTTGTEYRRFPEATRPGGRIPSPGAVEAHATS

SEQ ID NO: 384381 - protein, 398 aa, unidentified
MTESSDYESVQVFIGVDVGKDTHHAVAINRSGKRLFDKALPNDENKLRSLISDLKQHGQILLVVDQPATIGALPVAVARSEGVLVGYLPGLAMRRIADLHAGEAKTDARDAAIIAEAARTLPHALRTLKLADEQIAELSMLCGFDDDLAAQTTQASNRIRGLLTQIHPALERVLGPRLEHPAVLDLLQRYPSPEKLASLGEKKLAAQLCKLAPRLGKRLAADIAQALAEQTVVVPGTNAAAVVLPRLALQLITLRKQRDEVALEVEQRVLAHPLYPVLTSMPGVGVRPAARLLTEVACRAFASAAHLAAYAGLAPVTRRSGSSIRGEHPSRRGNKALKRALFLSAFAALRDPLSRAYYTRKMSQGKRHNQALIALARRRCDVLFAMMRDGTFYTPQGS

SEQ ID NO: 384382 - protein, 352 aa, unidentified
MIIIGVDYHPEFQQIAWVATNSGEFQEKRLAHPEEAEQFYRGWAGQEVRVGMEASGHARWFERLLAEVRLELWIGDAAEIRTKRVRKQKTDRQDAQLILQLLLENRFPKIWVPSGENRDLRQLLWHRHRMVQARTRIMNQLQALALNEGLRCKKRLWREHGRQQLEAFRLAPWASRRRRDLLELMDRLNPTIAELTRAIEQEAENNSAAQCLMTHPGVGALTALAFVLILGDSERFHCGKQVASYLGLVPLEDSSGKRRRLGHITKQGSSILRFLLVEAAQVTVRGLPEWRSKYVHLTLRRGRKIAKVAMARRLAIGLYWMWRKGWNYEQVKKFGSHAGQPGNRHGVQQNTE

SEQ ID NO: 384383 - protein, 516 aa, unidentified
MVATVVRRPRRVFQVHKPNGQLSPRVQAVGPERFGIIAVDPAKKRSRLLLANFYGTVLVPPITVEHERGPIEAALAALRGAIREHNLGDVVVALERTGTYHRPLQRAFQDARFETRLVHPFTSKQFRLPADPDHKTDDTDLAGIVRAVTQGFGLLEPVWPELYASIQMLRRHRRDLVDKAALLQNQIRETLHSAMPGFEAAFTHLWQSPAPLAIARQFSSAADILQAGADGLRAALKDAGVRPRHDTIAKVLDWARNAPQGHPLNALQRRIFTALDDDRREKTRLINAIEVDLARLVVQTPYAILLAIPGINIVTVADLAGEMGPMEFYLNANHITGRAGLVPCRYQSDQVDRSGPLVKRANRRLRAVLMQTASNLINCNNTYNARAAAWRRQGKDERWIRVKVAKSFSRLLFAMVAGRRIFPHPALQPRHYVLGKLLEFHMEHKVAPEQMRADLEALCDQLPTHARAAEIPPLQERLDELTRRRAHGPRPLAEILPIVLVRLQGVQSTPRSEDPS

SEQ ID NO: 384384 - protein, 388 aa, unidentified
MPRQLNDLSRSLVALEQDATLIAVIEMGQSSWLVAGIVPGIERQPLKKLAPDQHALLQLLHRWQKEANEAGQVIKRITVAYEAGRDGFWLARWLRAREIEAYVIHPSSVPVSREHRRAKTDRLDTELLKRAFLGWLRGEPKHCSMAAIPTIADEDARRPSRERENLVKEATRLVNRMKANLARLGIRGFRPHLARAARQLQTLQTPEGAALPANTLAELRRDMDRLRFAKQQIKQIEAARIERLEREPAEQRHAMVRLLGRVVGVGVETADMLVHEVFARRLRDRRAVARYAGLTGAPDESGTKRRERGLAKAGNARVRRGMIQLAWRHLLHQRDSALAQWYRARTADARSRTRKIMIVALARKLLIALWRLLTTGEAPAGLLIRPAA

SEQ ID NO: 384385 - protein, 316 aa, unidentified
MKNYIGIDISKSSIDVYDGRKSYKLENNKDGFQKVVGLSKNIKETVFIFEPTGVYSYPLTEFCDKNNIGCVIVSPKVSRDFARSLKVRSKTDKIDAKVLYKYQSHVESNMVKIPKINHHAIQIQEMLNTYELLKSTIQQHKNHLESLSKGNKNSIRLSQKMIKFNETEADKLFDKIEKLLFKDESIKRKYEAMLTIPSIGKKSALYLISFFIKYPTANAKELTALMGLDPVMRDSGTYRGKQRISKHGGQQLRNLLFLPTLSALRWNDRIIEFYTRLTSKAKPKKLAVIAAMRKLILMAFSIFKSEQKYQPLYVEN

SEQ ID NO: 384386 - protein, 316 aa, unidentified
MNDKRVIGVDIGKSWLDVAWEQAGRVQRYSNDAAGIAALTEKFDPARDIVVFERCGGWERNLEAAVAHKTVCWAIVHSRRVKAFREAQGIKAKTDRIDARLLRDYGCDRFNAGKLRPGRLEDVTLDGLVARQRQLKAMRHAENCRLATAALEAVRASIGRMITHLDEELAAIEAELVRYEHGHAEQVFKQEMLCRQIGVAKATARALLAELPELGRLDRKEITALGGMAPRVHQSGTTRKRRGLAHGRAAVKVILFNPARSAMRCDPQIREFCSRMRARGKPGKVIMVAVMRKMLVRLNALLRDAMLQAPAAAAAG

SEQ ID NO: 384387 - protein, 355 aa, unidentified
MGEVSTIGVDIAKSVFQIHGVDVNGAVVIRKRVSRAKVLEFFAKLPPCLVGMEACATAHQWARELKKFGHDARLMPPTYVKAYVKRSKNDANDAAAICEAVTRPSMRFVPIKSVEQQSALMLHRTRDLLIRQRTQLINALRAHLAELGLVAAKGHEGLRQLVMAVTESSDERLPNQARFACEAIVAQLHAVQTQINGLDKRIIQTHRANADSKRLEGAPGFGVILSTAVVATMTDPKAFRTGREFAAWIGLVPRQNSTGGKERLGSISKQGDRYLRRLLVVGAISIVRTARMWPDKYPWVIELLGRRPAKVVAVALANKMARVAWAVLAKGETYRAPTRLSSAAISGGLKGWHWD

SEQ ID NO: 384388 - protein, 343 aa, unidentified
MESIYYIGLDVHKKSIAYCIKTVTGKIVCQGMVKAERRALHQWLVDLPGPWVGAMEATMFTGWIYDFLKPYAVELKVAHPAMLKAITAAKKKNDRADAEKLADLLRVNLLPECTMMSEELRELRRILRYRNMIVRTASKMKNKISGLLMEVGAIYDKRKLHGKRYFGQLLERVEDVPESVKDLLKLSRSNMELFEAVQKKLLKTLREDSLISKRVELLRSISGVGEVMALTWVLEIGDPKRFSNSRQAISYCGLCSAQHESAGKEHRGPISKKRNKYLQSMLIEAANLAPRWNPQLAMLHEKELTRGNRNRATLAVARKLVIYMLAVDRRGKPFMTEKESLVA

SEQ ID NO: 384389 - protein, 396 aa, unidentified
MPVRFIGLDIHKGYMVAAGVDADQNEILSPHRATWNQFDTWMERHLTPQDEVVIEMTTNTWDVYDALLPHVRSVCVVHPPNVKAVVNPQVMTDKIAARILAKLLAAKLLVSVWVPPVEVRQLRALVAEYHDMSIMGAQAKQRLHAILQRHRIVPEDGIEIFHPDERPWWNLLHLSDAEKACMNADLNTLAFAQSQKKILELELGKWAAQDNRVPLLVQLPGVGLLTAVTLLSAIGDIRRFPDENHLVGYAGLGASVHDSGGTRNTGHITKHGRRDIRRVIVQSANMAVQDHPIWKKELQRLEPRLGRSRAIVRIARLLLVAVWHVLTSEVADKHAEARNVACSLFNTAYRMKVRNLHGLSAKEWVRLEMDRLGIGREINAFRWGTKTVKLPPSSLR

SEQ ID NO: 384390 - protein, 344 aa, unidentified
MNEVITIGVDLAKNVFQVHGVDAEGDVVIGRQLRRSRVLPFFKKLPPCLIGMEACATAHHWARQLIGFGHEVRLMPPHYVKPYVKRGKNDAADAAAICEAVTRPTMRFVSVKGMEQQSVLMLHRTRELLVRQRTMVINAIRAHMAEFGIVAPVGVPQVKKLLGIIADTDDARLPSLTRTCLESLARQFLSRHDEINTAEKRIHAWHRSNEVSRRLETIPGIGPITASALAASITDPEVFKNGRELAAWIGLVPRQTSTGGKQRLGKISKQGDQYLRWLLVAGAMSVIRHAKRRGTTNLPWLAGMIARKPTKVAAVALANKTARIAWGVLMRGGTYQKPVAVQAA

SEQ ID NO: 384391 - protein, 385 aa, unidentified
MSQFSGSSQAAVDYNSTIIGAVELSEKKWVLAVQLPGVGRHSRHALDACGDGLVSFVERLKAKCAAAGRKIARVILTHEAGRDGFWLARFLARRGIEVRVMQPSSLPVDRRARRAKTDMIDVEMLLRTLMAWLRGEPRVCSMVPIPSEADEEARRAHREREDLTRERRSIVNKIDGILATLGVKGYKALRRDRREQLNCARQPGGEPIPQKARARIERLLDRLDLVLKLIDQVESVRDAILRKDAPADEAERMIRSLTTLRSISPDIATLLVREAFVRQFRNRRALAGYVGLGGTPFSSGGSEREQGIGKDGNRRVRAAMVELAWMWLRWQPDSALSVWFRTRVGAMGGRIRKIMIVALARKLLVALWRYVNDGVVPSGAKLKAA

SEQ ID NO: 384392 - protein, 439 aa, unidentified
MTPKLDTKEDSLMNYTQNHKLTQITPSTLIVGIDVAKDKHVARAQDDRGFEFGKRLIFENRIHGFQTLLDWAKKHMKDNQKSHVIFGMEPTGHYWLNLAYFLKARGHDFVLVNPMHVKKSKELDDNSPTKNDTKDAKVIAQLIKDGRYSVPNLLDGIYAELREGVKVRDQLIRQLMMTEGRIQNVIQRYFPEFFDVFGDWEGKAALCTLKMFPFPSQIIQMTPKEILAKWKPFVTRGVGIRRATKLVEAAKKSIGIKTGTTFAQTEISYLLDQYELYHTQIEQLDQEIEDLLGHIPGAPEMIAIQGLGATTVAKILAEVGDIRNYHHPQQLVNLAGLSLREHSSGKYKGQTRINKRGRSGLRNALYRAIRPLVAHNPTFKALHKYYTNRPERPLKKQQSLIALCCKLLRVVFVIGQRQCAFDGSKLLQGIPQTKQLEAA

SEQ ID NO: 384393 - protein, 339 aa, unidentified
MEITYTHAAGLDVHKKTIVACCLTPGPKGAPQKEIRTFGTMTQDLLALADWLLTKGITHVAVESTGEFWKSVYQILETSFTVLVVNAQHIKTVPGRKTDVKDAEWIADLLRHGLLKASFIPPLPQRDLRDLTRQRTNLVQDRARVVNQLQKVLEWANLKLTSVVTDIMGVSARAMLAAIVEGEVDQGVLADLAKGRLRSKQTELEQALVGYVRDHHRFLLARHLIHIDFLEEEIARFDQEIETFITTQTTAEPPPPPTREPSGTTHATTTDAPPASTTPTMLPWAEAVALLDTAPGIGRTAAELILAEIGTDMSRFPTEGHLASWAKVCPGNRQSGGKR

SEQ ID NO: 384394 - protein, 346 aa, unidentified
MASVTIGIDLGDKNHEVCVLDSAGDVIERFEVDNTKIELQKAFAKYAGAVVAMETGTHSPWVSRTLEALGCKVLVGNARKLRAIWGSSQKSDVRDAEMLARIARLDPKLLYPIHHRNQKARVDLEQIKARDLLVGLRTALINHVRGVVKSLGFRLSKYSAPAFHKKALKELPDELRTTLIPLLEQIGSLTRQIRAYEKQLELLAETVYPETACLRQVQGVGLITTLAFILTLESPDRFDKSRAVGPHLGLTPRKDQSGDSDKRLRISKQGNVYLRCLLVNCSQFILGPFGPDCDLRRYGERLIARGGGSAKRKAVIAVARKLAILLHHLWSTGEVYQPLHKGKPAA

SEQ ID NO: 384395 - protein, 475 aa, unidentified
MNFKGKQRRNQATTVNIFEQQELMARAEVIRNNLKASIWHELETKGKFDKNEKLSFISDDMLIIGCDIGSETHFARAIDSRGRELSKSAFSFSNSLEGFQSVMEWAVKLAATHNKNQIVMGLEPTGHYWFDIATWMISNGISIVQVNPYAVKQTKEIEDNSQLKDDRKDPKLIANLVKDGNFGMPYLPEGLYADLRRLSMFRDQLCEDRIRNLNRLHREMKIYFPEYKDALGKVDGAFCLELLKAAPFPESLISLGADGIRQIWHDAKLRGRGYSKADEILKYARESVGMKDGTDASRQAVKWFAEKITELDTQIAEVELQLSQRCMEIPHAQNILEISGIGERVLTGILAEMGDVSRFDDVKEIQKLSGLGLVACSSGKHKGETKISHRGRKRLRYWLFQAAKSAVVHSEEFKELHVYYTTRPDNPLKKMQSLIVIACKLLRVIYTILTKGVVYDPQKMLKDIKHPIKEEALVA

SEQ ID NO: 384396 - protein, 356 aa, unidentified
MTPYFFYNAEQYDVYIGNDVDKRSFVLNIRERYRQLMTKTIPAEPEQLYNFVRRQFSDRRVVIGYEAGPTGFGLYDYLIGHDMSCVLIPTASVRKPASDPVKTNRLDARKLSTMLAEGDFHPVRVPEGAYRELRNFVQIRERYAQLQRATKQRIKSLLLANSLHTACRDVEEHWSNPFLKRLKSIECTPAVRFRLDRLLEDLDYARRQLFRAIRELRLFCRDTADIKDHIHNLQTIPGVGIVTSTTLLARIGDPRHLQNLRELGAFCGLVAREKSTGNKVRRGSITHAGNGILRCLLVEASWRAIKKDTELSQFYGRIANRHHVLHAKQKAIVAVAHKMTLRVYRVLVERREYIVR

SEQ ID NO: 384397 - protein, 283 aa, unidentified
MDQISRIGMDTSKHIFQLHGVNAAEAPVLRKKLRRKEMVTFFEKLAPTVIGIEACSASHQWARLLQSFGHSVKLIAPQLVKPYVKRGKNDAADAEALCEAMSRPTMRFVPVKTAEQQAALMLVGVRDRLIRNRTQLTNAIRGYAGEFGLTAAKGKAHLDPLLERIQADESLPALARELFVAQAKEYAQLQAQIDEVEARLMAWHRADECSRRLAKIPGVGPIGAVLLKMKTPEPELFRSGRQFAAWVGLTPKDHSTAGKVRLGVITRAGDEGLRSVLVAWDTI

SEQ ID NO: 384398 - protein, 403 aa, unidentified
MNAVGIDVSKGKSMVAVMRPLGELVVKPFEVHHTANELKDLSDLLRGLDGEVRIIMEFTGRYYQPIARYLVEAGFFVGVVHAKLIHDFGNNSIRKVKTDRADAIKIANYGLSNWISLKRYTPEDETRLLLKTCNRQYNQYMKLKVSLKNNLIAILDQTFSGLNEMFTSPVRADGHEKWVDFAEKFWHCEIVSSMSRAKFTTQYSKWCQKHGYNRSDSKASALYELALNQVATLPPTTQTKALIVQAISQLNFVSVSLAELRRQMQQLAASLPEYPVVLAMSGVGETLGPQLIAEIGDIRRFSHKGALVAFAGVDAPPFQSGVFESASRSISKRGSPALRKALFQVMKSILKNSPSDDAVYQFLDRKRAEGKHYYVYMVAGCNKFLRIYYARVKEYLITLENIS

SEQ ID NO: 384399 - protein, 445 aa, unidentified
MAAPSPGTPWPLIEICCEPSLFRDLPAGLSTGLASTYERADRVRVPDVVWVGIDAGKTSHHAAAIDADGRQLWSVKVANDQRQIEGLVLRAGKAGGEVRWAVDLVSPMASLLLAVLLTSSQNVVYVPGRMVAGMTGVFGGEGKTDAKDARIIADIARMRRDLTPITADDELVVELARLTSHRADLMADWVRGVNRLRALLGSIFPALERSFDYSTRSALILVTGYCTPAGIRQAGAGGLAAYLREQGAWRKGIDAMAAAALEAAAQQTVALPGEATTAVLIKQIARKLLDLDREIKDTGKLITSRFRDHPQAQIIESLPGMGPILGAEFLVATGGDARAAFGNPGRLASYAGLVPVPKDSGRITGNWRRPRRYNRALRRVFYMAALSSLRADGPSKTFYQRKRAEHRIHTQALLALARRLVDVLWALLRDNRTFSPAPPITAAAA

SEQ ID NO: 384400 - protein, 323 aa, unidentified
MTVYIGIDIARKKFDAAELCDGAYRCKTFENTPAGFTALYNLLKAGSIPDIHVCLEATGNYGTALATFLYEKNLKVSVVNPVRIKGFAASELTRTKTDKADSRLIARFCKAAQPDPWRPVPAPVRKLQALVRRIGALNGMLRMECNRRENADIDAQESVERMINHLKMELESVRRAIKEHISNVPELKKQNDLLLSIPGIGTVSASLILSFMASKEFTKAKEVTAFLGLNPRHHQSGTSVRGKTRMSKMGDAKLRCALYMPALVALKHNPDIRAFGLRLLTAGKPRMLVVGAVMRKLIHIIFGVLKSGTGFSSRVAVNAGMNQ

SEQ ID NO: 384401 - protein, 336 aa, unidentified
MNRYIGIDIHQDECHATVQDEDGNTVKQGYFQNSPSGFKRFFDGVEEAKTAIEAGDAWQPVYDWLDEKDFDVKLAHPNKTRIIAEVKIKTDCHDSEALADLVRADLIPEVYVPCEEKRELRKTVKQRGKLVMESNKYKNRIKAELRARGIDYEGRNLWTHSSKQWLKDLEVDAVDDFLEVLKTLNERILKLERGIKEIAGNMKKAQLLMTIPGVSYYTALTIIAEIATIERFPTSAHLCSYAGLVPSIKQSGSKEVHGPISGGRPLLRWILCQAVHNHVRNAPNSHIAKFYQRLKQKKPKKVAKIAAARKLTKVIFWMLKLEEEFHPEGYDPRTSR

SEQ ID NO: 384402 - protein, 391 aa, unidentified
MIFVGIDVAKDKHDCFILNSEGTVLADVFTIANNRIGFETLLSRIQSCSQGESKIKVGLEATGHYSYNLLGFLLDSGLATYVINPLHTNLYRKSLSLRRTKTDRIDARTIAMMLMSDVDLKSYSNTAYHNEELKSLTRYRFDKVKERAKLKSSVARLVNILFPELEKLVSSLHIAVVYALLSNYPGASYIANANTEELAETLCTASKGRYTKSKTAEIQVAAGVSIGSKMPAKSMELKHTIALIRELDKEISEVESAIDKITSQMDSPIFTIPGIGRHMGAMILAEVGAFSNFASADKLLAYAGLSPSTYQSGQLQNCYAHMEKRGSRYLRYALFNAAKYVCLWCPTFSAYLEKKRSEGKHYNVAISHAAKKLVRLIFAMQRSGKAFLADY

SEQ ID NO: 384403 - protein, 379 aa, unidentified
MKNLRFVGLDVHAKTIAVAVAETGGEVGSLGVIPNRPESVSKLMKKLGKPEQLRVCYEAGPTGYVLYWQLTKLGVRCEVVAPTLVPVKPGDRVKTDRRDAEKLARCYRSGDLTPVWVPDAQHEALRDLVRAREAAKYDQLRARHRLGKFLLRHGRRAPEGTSAWTGKYMNWIKEQVHFEQLAQEETLSDYLHEVEHADERIQRLEKSIDTAIETVPQRMRAVMQGLQSLRGIAKVSAVTLVAELGEISRFATARQLMGYSGVVSSEYSTGEDVRRGPITKAGNAHLRRIAVEAAWAYRHRPRIGTALARRQEGNSAQVKEIAWKAQHRLYNRYSKLSARGKTKQKAITAVARELLGFIWAIGVHVEQSMTVSSTHRRAA

SEQ ID NO: 384404 - protein, 343 aa, unidentified
MQTVRTIGFDIAKSVFQVHGVDAGGQVIIRRQLKRRQVLAFFQKLPPCLVGIEACASSHHWSRELQALGHTVRLMPPAYVKPYVKRQKNDMADAEAICEAVTRANMRFVPTKTPEQQSCLMLHRTRHMFIRQQTAVVNSIRAHLAEFGIVAPVGRKGVTELLHVVADPNDKRVPEVARACLTALGAQLLSLKEQILEFDRLIMDWYRSNQTSKRLHCIPGVGPMLATALVASVVDPRTFRSGRNFSAWIGLVPKQHSSGGKDRLGSISKQGDRYLRSLFVAGALAVIRYAKIHGTGHRPWLTALLARRPTKVAAIALANKIARMAWAMMAKGECYKQPVALAA

SEQ ID NO: 384405 - protein, 349 aa, unidentified
MPEIATIGLDIAKNVFQLHGVDRSGKIVLRKALRRSQVPGFFSTLAPCLIGLEACATAHHWARTLMAFGHDVRLIPPAYVKPYLRRQKNDAADAAAICEAVTRPSMRFVPVKSPQQQSTLMLHGARDLLIGQRTALINALRGHFAELGIVVAQGARNTRQLIAFLHEEANPDFPAAARTALQPLAAMLVGIEAQIAKLDKAILAAHRSDPVSLRLATIPGIGPIVASCLAASVPDASLFQGSREFAAYLGLVPRQHSTGGKARLGSISKMGNRHLRKLLVVGAHAALYSMKSGKTRTALADWARGLLAKKPFKVVAVALANKMARIAWAVMARSTAYEPGSHGTAVSAA

SEQ ID NO: 384406 - protein, 337 aa, unidentified
MKITTIGLDIAKRVFHVVCCNKEGRLLKKKMLKRAEVLAFFHSHPECLVAIESCATSSYWAREIQRCGHEVKLIPPQHVKAFLVGNKNDYNDALAIAIAARQPHIRAVGIKSVEQQDNQAQHKARALAVGQRTALCNQIRGLVAEYGICVPQGVHTLRKHISIWLEDGNQQLSIQFKALLLQLNKQLHTLDSSIEVYDKAIMQYAKNNAICQRLLSVPGIGPMISSAYFNEVGNGRAYRKGRDVSASLGLVPKQHSSGGKDVLLGISKKGNRYLRCLLVQGAKAVVSRAKSKDDKLSLWINHLVFTRGHNRACVAYANKMARMAWAITVSGEEYSPV

SEQ ID NO: 384407 - protein, 354 aa, unidentified
MEKLTANTAIATIGIDLAKNVFQLHAIDAAGKVMLRRTLKRRELLAFAAQLPRCVIGMEACATSHHWARELVRLGHEVKLIPPAYVKAYVRRQKNDAADAAAICEAVTRPAMRFVPVKSAAQQGVLMLHRVRELLVGQRMALSNAQRGHLAEFGVVAPQGKRHVAELVAVVADAADGRLPEIARGALAPLVRQMQRLDQEIDGLDKRILAWHRADEASRRLATIPGIGPVTATAIVASVTDPSMFGSGREFAAFFGLVPRQSSSGGKERLGRISKMGDRYIRKLLVVGATAVLRYAKKGGSPSRAWAEALLQRKPFKVVAVALANKTARIAWAVLVRGGTYQAGKAGAAATAAA

SEQ ID NO: 384408 - protein, 387 aa, unidentified
MLLDHPSDGPAAIRTQFGAIFVSLELSRSTWLVTSLSPGKGEKMSKYMITAGDVAELLKLFAELKRKAQSRTGESYPIITIQEAGLDGFWLHRVLRQEGIESHVVDPASIATPRRRRRPKTDRLDGETLLRTLLAYKRGEPRVCAMVVAPTPEEEDRRRVCRERQMLIAERTRHLNRIKGLLFAQGVSDYAPLRRNRRTRLEALRTGDGRLLPAHVKAQIGRELDRLELLLEQIKQVEAEQDALVAAKADAGALATPEPVAMLLALKGIGANFAAVLWLEAFYRHFANRRQVAAYAGLAATPWRSGTIEREQGVSKAGNPRLRTTMIQLAWLWLRHQPQSALARWFKAHSQRGRKSAIVALARKLLVALWKYVTQGVVIEGAVMKRA

SEQ ID NO: 384409 - protein, 417 aa, unidentified
MNRHWTEQPYFAALDWAKEHHDIIVVDRVGTIVADFQFNHTVEGWSQFDQQMKAFGQCPMAIETSCGMVVDQLLQRQYPLYPVNPKAARRYRERKVPSGTKTDRYDAWGLADALRNDGHAWLMLRPQDEATATLRLLCRDEMMLIEQRTALVNQLQAALAEYYPLALESFDDWTKPFAWAFVQAFPTAAALVQAGQRRREKFLHVHRLWRPETAAQRLEAWAHGQQLNASSATVSAKSLLALSLAAVLQSLEHQIDEYRRRITQAFERHPDHPIFGSLPGAKEKLGPRLLGEIGADRQIFPEADGLLCLAGASPVSYQSGQLRKAHIRWACNRVLRHTVHLWVDQSRRRCPWAQAYYRAKRGAGHSHASALRCLGKRWLKILWRLWQDHAVYDESKHLQSLQEHGSFVWQSLQSQGA

SEQ ID NO: 384410 - protein, 349 aa, unidentified
MVMLGIDVHKRTHTVVAVDDLGRQLGVCTTTATTTEDHLELLRWAARFGPERVWAVEDCRHLSRRLERDLLGVGERIVRVPPKLMAHSRDAARTYGKSDPIDALAVARAALRHPDLPAAQLDGPARELRLLVDHREDLVNERTRCLNRLRWHLHELDPTWDPPARSLARVKNLDAVAARLAAMEGMTARIATEIVVHARNLTVAERALEREITSRVRVLAPTLLEIPGVGALTAAKIVAEVADIRRFKSKDAFARHNGTAPLPVWSGNHERHRLSRTGNRQLNTAIHRIAVTQKRCHDDAKAYLQRRTTLGNSNREALRALKRRLSDIIFRALIEDANASTTTCLAQAA

SEQ ID NO: 384411 - protein, 488 aa, unidentified
MGKRKLSTFERLTQGKMNRKQRKEFARKLYSDDPGLEVVHRHVAGIDVGNESHFVAVSPGKDPQSVQEFGSWTADLQRMVEWLRQHGVEHVVMQSTGVYWIAVYDVLEQAGFKVCLSNARDTKNLPGRKSDVQESQWLLKLHTYGLLRNSFRPTEQIRQLRTVWRLRDRHVQEAARAIQHMQKALTTMNIQLANTISDISGVTGQFIIRAILKGERNPYELAKLRDERIHASEEEIARSLEGNWQEDVLFELQQAVDAYDFYQEQIRDCDKHLQKYLAAVPTREQAGPKAEVTTASGSAVEQADEKSKEKKAVRSPRKNQPRFDFEEELKRICGVNLQTIDGVGAMTIFTVISEVGTDVTPWRTEGQFVSWLKLCPQRQVSGGKLIRHERSRVKNRAADALRMAASTLIRSQSYLGARFRSLRSRLGPSKAIKAMAAQLARIIYRMLKYGQEWVDRGAQQHESKHQEREAYALQRRAASMGFRLVPVP

SEQ ID NO: 384412 - protein, 354 aa, unidentified
MKYYTSTTQFNCGIDLHARQMYVCVMDRDGKKLVHTNIRNNDFAYFLKLVAPYRHDLTVCAECMFGWYWLADACQDAGLNFVLAHALYLKAIHGGKNKNDRIDSEKITHLLRTNLIPPAYVYPAAKRPLRALLRQRILYVWRRSELLARIQSHQLAYNRPTLPQTRSNRDRWEEKLLTQEDNPIRQLALQNDLALIRHYDTQITALEAQLQRLTKAAAWRDYTLLQTVPGIGEHLGLTLLYEIGDIHRFPTVKDFLSYCRLVKGTVASAGKLKGLRGAKLGNAYLRWVFGEAAVIAKRDHTVIGPLAQRLEAKLGNKFKANTVLAIKLARAVYFMLRDHTVFDPERLVAALTHK

SEQ ID NO: 384413 - protein, 431 aa, unidentified
MKVIYSVACGIDVHKSFIVAVICDSTTLTPTYTKKRFSTFYKDLTKFRDWLLEHDCHNVCMESTGKYWIPVFNILEGYISNVVLTNPKWVKAVKGKKDDNKDAKWICDLFKLGLVQGSFIPEKQIRILRELTRNLFKVTNMRSSEKNRFQNALTVGNCNIDQVFSDVFGKSASAIINLILADKPFTLQDISASLHGHCKATAEEVSDAIIGFSLEHVQKQRITLIQAHMEYLDSMIYHFQSLIDSIVSPYEPFITLLSSIPGVKRQSAITIISEIGIDMSPFGSHHRLASWAGLTPGSNESAGKKKSVKISRAGVYLKPCLLQVAHAAIKDNKNLYYANKFNKIAKRRGKKRAYIAIARKILVAIYHMIDTGEFFNPRDLADTETTIKKRIQYTKNNLRNDINSLLNSGLSQEDLSILINSILPDNPQLST

SEQ ID NO: 384414 - protein, 344 aa, unidentified
MNSMTFIGLDIHKKTISYCAKSESGKVLLEGVIPATRIHLDDWMRTLPQPWTVAMEATMFTGWIYDHLLPHAAAVKVAHPLMLRAIAAAKKKNDHMDASKIADCLRCNFLPECYMASTQVRERRRTLRYRKLLVRQNVQIRNKVSQMLMESGVLYNKQKLHKVGYFKELMATNPDISSGLRPLLGICRETIVRLGKTESALVRALARDPLLSKRVERLMTIPAVGPITALTWALEVDDVTRFRSIKNAVSYCGLCGAERSSADVIKRMPISKQRNKHLQSVLIEAAKLGPRLNPDLALVYDREKQKGHANRATLAVARKLVAYLMAVDRSGRDFVVARERTLAA

SEQ ID NO: 384415 - protein, 388 aa, unidentified
MQTVADRPEAPTAIRTDLGAIFVSLELSRSTWLITSLWPGGGEKMSKQVVRGGDVAELLERFARLREKARARTGKVFPFVVIQEAGLDGFWIDRALQNEGIESHVVDPASIATSRRRRRAKTDGIDGEALVRALLAYKRGEPRVCAMVKAPTPEEEDRRRLCRERTVLIGERVQHVNRVKGLLFSQGISGYEPLRRDRRERLDTVQTGDGRLLPDHLKAQVCRELDRLELLLEQIKAVEAERDVLLAAQQVAAPAPAAMLLDIKGIGPEFAAILWSEGLFRHFDNRRQVASYAGLAPTPWQSGSVDREQGVSKTGNPRLRTTLIQLAWLWLRHQPQSALTLWFEERVRRNGGRLKKTTIVALARKLLVALWKYVTAGVVIEGAVMKRT

SEQ ID NO: 384416 - protein, 322 aa, unidentified
MSVSNQRCAGKDVSKGTLDIAISNIASQFTVPNRTDGFTQVLRELKRNETRLILMEATGGLESCVACYLQSEGFDVVVINPRQARDFARAMGYLAKTDRIDARVLLQMSEVINQHPERERYIRPLPDAHRQILAAMVVRRRQLTIMLTAERNRLHPSHPLSHASIKSIISALKGELARIEGEMAIHIKEHFSELSELLNAVKGVGSATVAVLLAEVPELGSLSRREISALIGVAPVNRDSGTMRGRRTVFGGRASVRTALYMSALVGTRHNPVIKEFYTRLVAAGKPKKVALTACIRKLLTILNAMLKKNEAWDPMYHQHAS

SEQ ID NO: 384417 - protein, 354 aa, unidentified
MNSTQVFEKRKIAVTIGIDLAKDHCDVVAYNADNKICFTKANMTYPKLMEWLANTPPAVVLMEACKGSMVHARDIADLGHDARLVKGADVKALRNVAQKNDIRDADFIARLFYVPGTKYVFVKNQRQQSLQFLQNEYKSLQELRIRVGNQIHAGLEEFGCPARKSKTFIQTRLMDHLEKNAELIPEDVMASFQRRREMWLSLFEQEEEAQKRMEEIAKADNDARRIMSVPGVGAQTAVRLLVHIGGDIGRFKNSGQFAASIGLVPKQNSTGGNTTLNGITKCGPKRLRANLVQCAQVILMHADKLKGNFGDWVRKMQDSGKKRGVIACAIASKIARIVYRLMKDKVDYTPVPSR

SEQ ID NO: 384418 - protein, 359 aa, unidentified
MICIGIDIAKRSHVASAVDEDGGTVVESFKFDNTANGFAKMLKRLRKADATPENSLVGMEATGRYWVALFDFLISHGYEAAVINPIQTDAFRGVWTVRKVKTDALDAAMIADLVRYKRYEPSALGDEATEELRNLARYRLSLVERSTALKNRATAILDRTFPELAGLFSNAYCPTHRELLQHCATPDQVLGTDVGTLERILREASRGRCGRAKAERLKALAKESVGVGFGSKTLAFEARLLMEELDFVQDQVKEVERELARLLERTQGKWLVTIPGIDVALASVIAGEIGDPNAFDDPHRLMGYAGMDPTRSESGETVKSDGRMSKRGPGALRWAFMQAADCARKNDPYFGDYYDRPAI

SEQ ID NO: 384419 - protein, 386 aa, unidentified
MNHSTNILPCSVDYDQTLVVAIELSNKSWVLAAQVPGLSQTKAKRTIEPDKSDLLAAINGYRTRAAAAGRPVKRVIASYEAGWCGFWLARWLMAHDIEVHVIQPSSVPVDRRMRRAKSDGIDAELLLRTLLAWLRGEPRVCSMVPIPDEAHEDARRCVRERSELVSERVGLVNRIGAILATLGTDDYNPLLQSRRRRLTELRTALGNPIPPNALAKIARLLTRLELVLAQIAELEVERDAVAKADAPDQAGKMIQQLIRLRGIGVQSATVLVREAFVRRFANGKALGSYAGLTSTPYSSGGIDRERGIGKAGNRRLRTVMVELAWLWQRYQPGAAQVVWFRERVGSTGRRVRKVMVVALARKLLIALWRFVIDGVMLEGAIMKPSI

SEQ ID NO: 384420 - protein, 489 aa, unidentified
MEHKYRRCCGIDVHKKSVTVCVLAPAGKPEAEIRRRSFRTFTRDLKQLRAWLKNCKVTEIAMESTGQYWRAVWNILEDHFEKLILVNPQHIKGLNGHKTDPKDAQWIAGLLDSGKLKGSWVPPRPIRELRDLTRQRVHLLEDLNRIKNRIEQLCQTGNIKVSSVATDLFGASGRKMLHAIVEAKHDAGWIADYARSSLRSKKRELELALEGSFTENQRWLLDKELRQLEWLEIQVQLLEQEIERRVVGFEEPIRRLMTIPGVDRKTAWMIVAEIGVEMEVYGDARHLASWAGLCPGNRESGGKRMSGRTRKANRYVRRAMCQAAWAATRTKKTYLSAFFRRIQLRKGAPKAVMALAHHMIVIVYNVLARKEEYVELGPDYYDRRNKPKTVSRLVARLMKLGYHVDLKPVEPDLPNDVAPPDAVAPPAPVVAKPATNAVESNRQSDTAVVRTRKRGRPCKCAERGRICTHGASIQVNSLIRNTSSTGTFS

SEQ ID NO: 384421 - protein, 359 aa, unidentified
MDKNTQVPAVRVGVDLSKRVIQVHAVDTGGRALCNRALARDKFLAWCATLPAGCMVVMEVSSSAHHWARQLLLMGLDARIVSAHLAAPYRSEGHVGKNDANDAAAICEAASRPHMRFVPLKSVEQQSLLCVHRLREGIKADRTACINRIRGLLLEFGVAVPAGVRALRLVLDDVLEDAANEMNGLARMTLRRAQQQWRELDEHLAWCDDRLAAHERDNADVRRASALMGIGPVGASAAIATVGDFKQFKSGAQFGAWIGLTPKQHSSGGKSNLGTITKRGDAYLRTLLIQGAKSLVNSAHTRSDPISRWALALKERSGWQKAVVALANKNARILWAVMTRGERFDPHHISVKPGSTAAV

SEQ ID NO: 384422 - protein, 317 aa, unidentified
MEQLQSTTKIAGVDVGKACLDAAVHGLDDLTQVENAPAGISRLIGWLKAREVGRVGLEATGGYERGVRAALEAAGFEVVVHQPIEVRLFAQLKRWRAKNDRLDAQLIAAATAQVDAVRAAQDPRLVDLAQRLTAYEQVTDQAAELKTFLESVTLKDIANLVRAQIRSLERLKAKLLADILSRIKGQPDLLARLRLLTSLPGVGPVVAATLVVRMPELGAMRRGQAASLIGVAPFDRDSGQWKGLRFIGGGRSRPRRMLYLAALQAKRCSPPLKAFAQKMVDRGKPAKLVTVAVMRKLIEAANLVLLRGQPWLKQLQT

SEQ ID NO: 384423 - protein, 354 aa, unidentified
MDIKYIGMDVHKEAISIAVMNGEGRLVMESIIETKAITILQFIQGVRGDLHVTFEEGTWAAWLYDLLKPHVTKLVVCDPRKNALLKEGNKSDKIDARKLADLLRGGYLRSVYHGENGLRTLKELARSYLTISKDLSRVMNRVKALYRSWGILCGGQQVYAPRHRSEWLNKIGEAGVRRRAEFFYQQLDALRALRQAVRRDLLAESRKHGATKLVRQIPYIGPIRAALLIALIQTPHRFRTKRQLWTYSGLAIETRDSAQHRYVAGQLQRSKKPQQVRGLNQNHNHDMKAIFKSAATMASSREGPFHDFYQGLLTKGMKPAMARLTLARKIAAITLILWKKGAHFDAEQLKPQAA

SEQ ID NO: 384424 - protein, 388 aa, unidentified
MNRIIKIGMDVHSTNYTLCAMEPVLGAEDRIYGEIQVAPDYKAIVAFIASIKMKLGLSDKCSFECGYEAGCLGYTLYNQLTSAGIKCVILAPTTMLTQRGKRIKTDRRDARLIAQCLCYGGYNPVYIPTGEDDAVKEYLRMRDDHKLTLKKLKQQIGAFALRHGHQYTGTKWTDKHIAWLRKLELDPIYQETLNEYMASYDEQEAKIERFNKRIEEIAAQSRYKENVGKLCCFLGIRTHTALSLIVETGDFTRFAKGNTYGAYLGLAPGEHSSADDVNRLGISKAGNTHLRRLLIEAANSICKGRIGHKSKELCARQKGQSAEVIAYADKANIRLRSRYYKMIRHGKKKNVAIAAVARELACFIWGMMTGNISVVSRAGSSVPAASQG

SEQ ID NO: 384425 - protein, 361 aa, unidentified
MKVTTVGLDLAKNVFQVHGADERGHKVFNRQLKHAQMMEFFVKLPPCVVAMEACGSAHHWARKLSSLGHTVKLIAPQHVKPFVKTNKNDAADAQAICEAMNRPQMKFVAAKSPEQQGVGALHALRAGAMKARNATSSRLRGLLLEFGIRIPEGISCISKHVPDALEDASNEIPTVLRIALFDEYEHFKALEVRVARLQQQIDQWHRTSAASQALAKIPGVGLLTATSMVAQAGDPSAFANGRQVSAWLGIVPKQNSSGGKTTLLGISKHGDSYLRTLLIHGARSIVSLLKRRLASGADPAKFSPTERWLVELLKRRNANVACVALANKNARTAWAILKHGRPYEPGHVSLSPRARAALAAA

SEQ ID NO: 384426 - protein, 337 aa, unidentified
MSCLGRFAVRLMPADNQKHAERAAVTQTANPSHFIGCDVGKSSIVVFDSRDGRTRTIPNHPDDLAGLAERLDDTCLAICEATGGHEAALLSALIHIGRAVHRADARKVKAFIRSFGTLGKTDAIDARALARYGQERHAQLIRWQAPDHERDRLQALVLTRRDFVDQRIACKNRLSAPGAEAVRRYLERQLACLETEIANIEADTQALVSAHQGLHAATRTVSSQIGIGFLTAVSLLALMPELGTLNRRQAAALAGLAPHPRQSGATDAYRRTKGGRPEVKKVLFMAALTAAKRDPKMRAFYERLIANGKKPIVAITAVMRKLVIICNAMLRPTAAAA

SEQ ID NO: 384427 - protein, 343 aa, unidentified
MQKMTTIGLDIAKSVFQVHGVDAGGQVIVRRQLKRRYVLTFFQKLSPCLVGIEACGSAHHWSRELQTLGHTVRLMPPAYVKPYVKRQKNDATDAEAICEAVTRVNMRFVPTKTAEQQSGLVLHRARHLFVRQQTSVINAIRAHLAEFGIVAPVGRHGVEELLDVVTDPNDKRVPDIARACLSALGDQLQSIKKHVLEFDRLIRAWHRSNEMSMRLEAAPGVGPVLATALVAAVADPKSFRSGRNFSAWIGMVPKQHSSGGKNRLGNISKQGDRYLRGLFVAGALSVIRYAKVHGTKHRPWLTALLTRRPTKVAAIALANKIARMVWAMMATGERYKEPVALAR

SEQ ID NO: 384428 - protein, 344 aa, unidentified
MESVPIFVGLDYHSGSVQACVVDAAGKVLLNSKRASSVPDVVSVVQSLGHVQRVAIEACCGAADFGDHLAHATGWRVSLSHPGLVSKMRSSIDKSDRSDARVLADLCRTGYLPGVWLPPEPIRELRTLTRRRHQLTDAIRRAKTRIGALLRDKRVATPPEIVTKWTLRHVAWLKALTLPPCARIVLDDLLAETHYHAQRRDTIDAQLEQATAGDAMIARLRQVKGIGPVTAWTLRAVIGRFDRFRNGKQLSRSCGLTPKNASSGERVADAGLVRAGDPTLKTVLIQVAQRVVRCAGEWNSLYLGLLERGKPACVAIAAVANRWTRRLWHDLKGMGDGGGMSAAA

SEQ ID NO: 384429 - protein, 391 aa, unidentified
METLQKVSHIGCDLHKKFTIATARDAQNRLLWRQRLEHADRPRLQAQLDTWPKGTPVIFEASFGWGWFADAVQAAQLEPHLASSRKVAAWREARGLPKSNRVDADLLSELWGQQPRWWEVWLAPPEVRDQREWLRYRMALVRIQTGLKNRIHAVLHRHGLVHEFADLFGRDGRRFLSLLVGPRDVTLPDSARATLKGQLPRRAGAGPGAAADRPGHTRVSPNGATGPGGRAFAAAAPARRGIAYVLAYTLLAEIGRIERFPNYKHLASYSLLAPRAYDSGEPAEEPPQGRHVGHVGRRTLKWAFIEAARGAVRHGGRWRQMYDRRTDGGQRNRNRGYIAVARELAHLVDIVWRKDVAYMEEPPPRPGSRRRTKRSRPGTGQPVAAMVGVAE

SEQ ID NO: 384430 - protein, 313 aa, unidentified
MSIIYSNYVGIDIGKFELVLNIHGTKQVFTYKNNLDGLNKLYSELQKELKDSLVVLEVTGGYERLATNYLQEQNIAVHRANGRQIKSFIRSYGIIGKTDKIDAIAISLYASERHKTLDLYQKNTHELLRELNERRDDLVKIRVQEKNRAQAPTNIRFHQSFAAILEVLNVQISAIEKQIAEIIAGDSQLKTKLKVLKTIPGIGDVTASSILAYMPEIGNLNQKQAASLAGVAPHPQQSGKKEKRGRTIGGRRQMRPILFISAMSASRTKTKIGDFYKNLLANGKSKMCALVAVMRKIIVIANAKIKEDLAKAM

SEQ ID NO: 384431 - protein, 395 aa, unidentified
MIARRARTKQRQLEDLACVHPNAAGLDIGSEMIVAAVPPDRDEQPVRAFATFTPDLHALVAWLVACGITTVAMESTGVYWIAIYELLEQAGITCYLVNAQHVKTVPGRKSDWNDAQWLQKLHMLGLLRASFRPDAEIRCLRLLARHRAERRGHRAPHILHMQQALKLMNIQLSEVLSDITGLTGQAIVRAIVAGERDPAKLAELRHVGCKHTEAEIIKALTGTWQEAQIFILEQNLQLYDFYTAQLSTCDSEMERSYQAMESRHEKDAPLPDLPKAKPGSRSKNEPNFNVRAQLARIVGVDLVGVMGLSASSAQTIITEIGTDMTRFPTVKHFCAWLGLAPRNDISGGKVLRSRTLKVRSRANQAFRQAAESVARSQSSFGRYFRAMRGSLPIVC

SEQ ID NO: 384432 - protein, 397 aa, unidentified
MYIVGIDIAKRKHEAAVIDGEGTVIIKPFSFTNNCSGYNRLLAMLAKAKLPLDEVSFAMEATGHYWLALFTRLQKEGFRVQVINPVQTNSIRNFYIRQAKTDPRDALLIAEVIRFGHFSESTLHPENIYELRELCRGRHAIVSMQADVKRKVVALLDQVFPEYETAFTNLFGDTSMAILQTCPTPKELSEMPFEELCHLIEVSSHKRFRMAKAQELQALARGSFGFAMAGDVFSTMIRLYAKHLDFLKQQVREMDCKIAEIMETLDTPITTITGIGPTLGAYILSEIGDISRFSSAAKLAAYAGIDPTMRQSGEYNGVRNRMSKRGSPYLRHAIWLAASSAVLHDPALKLYFQKKRDEGKPYMASVGHACRKMVSIIYAVMRDNKAYTPCIPNEISA

SEQ ID NO: 384433 - protein, 349 aa, unidentified
MLIIGCDLHTRYQVIAMLETETGEIVRRRLEHENGEARAFYASLPKPALMGIEATGYTQWFERMVAELGHELWVGDPAEIRARAVRRQKTDTRDAEHLLELLLSKRFPRIWVPTPEERDARQLLKHRDKLVRMQTSVKNQLHFLAMSQGVCRKGKLWSQRGRAELEGLALGPWASRRRKELLRWLDSLKPQIEELDEAVKVEAERRPEAVRLLAQKGVGPVTALAFVLTVGPVERFPTSRQLVSYLGLNPRETSSGGHQRLGHISKQGNEMLRWLLVEAGHGVAQFDPQLRRKYQRLTFRRGRNVAKVAMARQLAVRLYWKLRQASDPRPVRTSRSPESREVDATPSRV

SEQ ID NO: 384434 - protein, 340 aa, unidentified
MNHYAGIDVSLKESHVCVVDASGKIIREGKVASEPEDLIGWFGALGLAVTRIGLEAGPLSQWLYAALRDAGLAIELLETRHVRNALKIMPVKTDRKDAQGIAELMRLGWFRPVHCKSMEAQETRAILTARKLVQKMLHEVEMSLRGILRGFGLKVGKVTPTQFEARIEQLVAGHPSLEVIAASMLAVRATLRREFNGFERRLRTLARSDTRARLLMSTPGVGTIVALTYAAAIDDPSRFKSSKTVGAHFGLTPTKYQSGETDRTGRISKIGDGAVRAALYESAHIILTKPIKGCTDLKSWAMRIAKRAGMNKAKVALARKLAVIMHRMLANGTTFTTQSA

SEQ ID NO: 384435 - protein, 347 aa, unidentified
MNTATVGLDIAKTLFQVHGMDERGKPTVCRQLKRADVLRFFANLPPCLIGMEACATAHFWARKLVPLGHAVKLIAPQFVKPYVKTNKNDARDAEAICEAVSRPSMRFVPIKTVEQQAVIALHRVRQGFVEARTAQANQLRGLLAEFGIILPKGISHLRDRVPGILEEAENDLPGTARELFARLFANLGELGCHIAELERQIRAVHRIDEASQRLEAIPGIGPLSASALVASIGDARAFKNGRQLAAWMGLVPRQNSSGGNTRLLGISKRGDTYLRTLLIHGARSVLRHHKRKATSSSEDWLSRLAGRRHPNIAAVALANKNARIVWALLAHDRQYQAGHRTACLSAA

SEQ ID NO: 384436 - protein, 425 aa, unidentified
MHRKQYSKQQEKRKRIGDQTLVIGMDIGSEFNAACFMDKEGNVLGRYPTIYNSRKGFEYFQTMVMKTKRKHKLTDVLVGMEPTGHYWRKIAFFAQEQGYEVRFVRTTAVKHQRELDESSPAKSDSKDAYTIANIVREGKYIDTIIEESVFRQLRTLAHARERILRYIVGSTHGLQAHLNDYFPELRHLFWSMKAKGLWALLETYPFPEDVRNAGLATVTALLAKGTGKKRHVREQAEQVYQAAAESVGLTAIGKADRARLTMYLEEIKRSDARRKLLEHEMQELLKEIPLAQYILSLPAMGKVSCAVFLGELGNPDYFKNPRQIIKYSGYDPKENDSGSRIGRKIISKKGRWLLRKCLFFMVLRLVHRSSFFKAYYEHKKKGLLRPLEKTEALCAVILKLIRVLFALMRDRRMFTEEMPRCEKAA

SEQ ID NO: 384437 - protein, 376 aa, unidentified
MTKIIRIGVDTSKSVFVLHGVDAAERVVLRKRLRRRQVLELFAQLEPTKVGLEACGAAHYWARELQGLGHEVVLLPPQYVKPYVKRNKNDAADAEAICEAMSRPTMRFVPVKTAEQQAALMLVGTRDALVRRRTQLTNAIRGYAAEFGLIAAKGLDKIEPLLARIAAHAPLPGLAQELFAAHAKEYVRLQAQIREIEAKLRAWHKHNELSRRLAEVPGIGPIGATLAVMKVPNPKAFRCGRDFSAWIGLTPKDHSTAGKTRLGVITRAGDEALRSALVAGATAVIQHVRQGKGHPSPWLIELVRRKPAKLAAVALANKNARIAWKLMVSTERYNPAHSRAVAASGGRGPALRGGSAPRPPLAPHDKSREITATTRA

SEQ ID NO: 384438 - protein, 437 aa, unidentified
MNREVSTMKSNTQNAKIEAITEKTLVLGIDVGSEMHYARAFDYRGIEYSKKPFKFSNTEAGFATFKEWILDLKERHEKDKVVPGMEPTGHYWFNLGKFLQDNEMKPVLVNPHHVKKSKELDDNNPTKNDRKDPKVIAGLVREGRYMIPYLPEGVYADLRTASNIRFQLQAELTRIQNRISRWFNIYFPEYKTVYGKPDAKSGMLILKAAPLPEDILTLGIDGVNQIWRDAKLRAVGKARAKTLIEAAEHSVGSKEGAVSARMEIRMLLEDYESRNIRLQEVMALIEGLVKQIPMAEKLLEIKGVGIRTVSGFLAEVGDISRFNNPKELQKLAGLALVENSSGKHKGETTISRRGRKRLRYLLFEVAMSLVAKNPEFRELHNYYTTRRLNPLKKMQSLMAIAAKLIRVFYAMLTKGVDYDPKKMVSDIKRPAVYIQAA

SEQ ID NO: 384439 - protein, 448 aa, unidentified
MRYQPNAPKAEASLPLVHAHAAGLDIGSAEIWAAVPADCDPEPVRKFGTFTPDLLALADWLQACGIQTVAMESTGVYWIPIFEILEARSLDAQVVNAHHLKHVPGRKSDWRDCQWIQRLHSWGLLTGSFRPADEICALRTYLRQRANLIEHRAPHILHMQKALQQMNLQLPLVVSDITGETGQAILRAIVAGERDPQQLAQFRQPNCKHSAAEMAKALTGHYRPEQVFALKQALALYDAYTAQLQECDAEIEKQFQVIKPVTEDEPPPSNKPNSHSKNGPSYDARTLLYRITGVDLCAIDGMNESTVQTALTETGTDLSAFATDKQFGAWLGLAPRHEISGGKVLRRHTLKNGNRAGQAFRLAAQSVSRSDSALGAFYRRLRAKAGPKVAIVATAYKIARIYYHVLKERQPYQEQSAAAYDQKTKDRELRQLQKRAAKLGMKLVTVPA

SEQ ID NO: 384440 - protein, 343 aa, unidentified
MQTITTIGLDIAKSVFQVHGVDAGGQVIIRRQLKRRQVVAFFQKLPPCLIGIEACASSHHWSRELQALGHTVRLMPPAYVKPYVKRQKNDMADAEAICEAVTRANMRFVPTKTPEQQSGLMLHRTRHMFIRQQTAVINSIRAHLAEFGIVAPVGRKGVTELLRIVADPNDKRMPEVARACLAAQGTQLLALKEQILEFDRMILAWHRSNQTSKRLHYIPGVGPMLATALVASVADPRTFRSGRNFSAWIGLVPKQHSSGGKERLGGISKQGDRYLRSLFVAGALAVIRYAKIHGAGHRPWLTALLGRRPTKVAAIALANKIARMAWAVMANGERYKQPAALAR

SEQ ID NO: 384441 - protein, 409 aa, unidentified
MVLQVIYPNCCGIDVHKTFVFACIAITDNKGIPSYYRKRFSTFTHGLRDLAEWLEYYSCFDVCMESTGKYWIPVWNVLETAGIHQTLAHPKYVRAIRRKKTDKKDAKWIADLFRHDLVVGSFMPPALIRQLRDLIRYRWKLGNNMVSEKNRFQNSLTVSNIQLASVVSDTFGVSAQKIIKSILDKKLGDTEQLEDLIHGSLKKKLPELELAVDGAITSDQEAKLRVIMDHYKSLVLARTTIETEVEMRAQPLAQEIALVRTVPGLDKPFTAISVLAETGVDMSQFPDAKHLCSWAGLTPTNNESAGKKHSVRISKAGAYLKPLLVQVANGLIKSDKYPEIKQRYQILKKRRGHKKTIIAIARQLLTAVYHILANHEVYNPKQFVDRPERSMSVREAVEFAKARGFDVLS

SEQ ID NO: 384442 - protein, 355 aa, unidentified
MNSEKYIGLDVHQATICVAVMDAKGKVVMECILETKATTILEFFAGLRGTLSVTFEEGTWAAWLYDLLKPHVANLVVCNPRKNALLKHGNKSDKIDARKLADLLRLNDLEPVYHGETGVRMLRELARSYLTIVKDVSRVMNRLKAIYRSWAIPCAGRDVYYTRHRRAWLGKIPEAGTRRRAEQLYQQLDMLQPLRQQARRELLAESRKHTITAKLRQIPSLGPIRSALAVALIQTPHRFRTKRQLWSYSGLGLETRDSGEYHYVQGQVRRRKKQVFIRGLNKDHNHDLKGLFKAAATRASVQPGPFQDFYQRSLAKGIKPTMVRLTLARKIAAITLTLWKKGENFDAEKLKAQAA

SEQ ID NO: 384443 - protein, 369 aa, unidentified
MGDRITYVGLDVHKEGIVVAVAEGGVRGEVREYGRIANTAAALDRLVRKLGGTGARLRFCYEAGPCGYGIQRHLSARGHECVVVAPSLIPKRAGDRVKTDRRDAVGLARLHRAGELTAVWVPDVGHEAMRDLVRARLDAVHALRRARQQLSGFLLRQGCHYGRPAWTKLHRRWLAGLKFEQEVHHIVLEDYIATVEAAKARRDRLTAQIEAMLPDWTLAPVVAALQTMRGMALVNAATLIAELGDLSRFANPRQLMAYLGLVPSEHSSGASVRRGGLTKAGNSAARRLLIEAAWCYRFPARVSRELLLRQEEQPKPIREIAWKAQLRLCTRYRKLARSGKPANVVTAAIARELAGFIWAIARRVPPAAG

SEQ ID NO: 384444 - protein, 351 aa, unidentified
MMIIGCDFHPRFQQISFLWEETGECGERRLMHTAEAELYYRSLCESKVRIGIEATGSYGWFRRLLSELGHELLVGDATQIRASNPRRQKTDKRDAEHILRLLVEDRFPAIWQPPAENEQLRQLLLHRSRLVRLRTRVTNQLDGMAKNEGLLVPGGWSGKRRKGIEALPLPGWYGERRTDLLGLLDRLEERIAPLNKAVSQAAANNVEACLLMTHPGVGPIVSLAYVLTIGNWQRFPRGKQVGSYLGLIPSEDSSSDKRRLGHISKQGNTLLRWLLVEAAATAQRYDPSWHRQYLRLSMTKHHGVAKAAIAHKLAVRLYWMLRSGEDYQHVRERGSHARQSECPGGRSRAAD

SEQ ID NO: 384445 - protein, 339 aa, unidentified
MRVYCGVDLHSNNSVVGMIDETGRRLLKRRVPNELSLVKALLEPHREQLAAVVVESTYNWYWLVDGLLEDGYPVRLAHPAGNAPYGGLKHTDDGDDALWLAELDRVNSLREGYIYPRALRGVRDLLRQRTRLVRQKTGHVLSIKNIIAREGGRSLRVAQVEALDRAGIREAVRDPHAQVAVGILGELVGELKGQIRTIERTVLSQVRPDPRWQRLKTIWGVGEVLSLVIHLETGEMSRFAGVGNYASYARCVDSRRLSNGKPKGQNNKRNGNGYLEWAFVEAGHFAQANYPRAQAFFARKKAQTNAILARKALAAKLCRAAFYIMRDEVNFDPDLLFRI

SEQ ID NO: 384446 - protein, 330 aa, unidentified
MNTMKKNTAPVYVGMDVAKATLQVHLNGHQFEFKNNSKGHTQLFKKLAKLTLPHVVCEATGGYERPVVEACHKAKILVSVLNPAHTLAASQAQGKRAKSDPCDAAALTDYGQRFHPEPTLAVPPATREITELTLWLKQLIDNRAVVKTQAEHHANSFVGQQHQALLDHYQSQIKTVEQKIKKLVHAHAPFQQRVDSLTQIQGVGFRTALLTLVFMPELGSMNRGGTAALAGLAPWTRDSGKMKGKRCIGGGRAQVRPVLYMAALSASRCNPVLAPFYRGLKKRGKLSKVALTAVMRKLLIHMNSELKKLAVKPGIEKPGTSAKTKKILAK

SEQ ID NO: 384447 - protein, 423 aa, unidentified
MNSSTLCLGADIHLDQITLRAVDKSDSHEVIERFHVTNNLPGAESAVSTIAQVATQLRYTHIEVGWEATGMLWIPFHRILTTSPLLQPFELKLVCFNPQLVANFKKGIVLRRPKSDLRDAFDVAARIRLGELPHSYVPNDFWQGLRRLTRYRFRLSRNLSQEKMRFQSYAFLKCSDWKRVKPFADTFGTTSAALLTEFTAAELRAMSHDQLADLICHRGHGRFHDPAATARGVRQALHTSYPIDPQLDELVTISLATSWEHIRFMKRLMRRLDQQIARYIDPIPNPIITVKGLGPVITAGILAEIADISRFPEHKHLAQYSGLTWEKRSSGNFVSQNTRMSKVGNTYLRYYFIQGADKLRPFNLEYKAFYWRKYQEVSKYQHKRALALTARKLVRLVHALLTKNVPYVRPQMLGNFQESALLQ

SEQ ID NO: 384448 - protein, 381 aa, unidentified
MGDDIAAFVAFDTSKLRNAVAIAEEGRAGEVRFFGEIDNTAEATAKLVKKLAAKYERVAFCYEAGPTGYGLQRQITDLGQECIVVAPSLIPKRPGDRVKTNRRDALDLAKLLRAGQLTAVWVPDSRHEAMRELTRARGAAVQDARQKGQQVSAFLLRLGRHYDTGKTTWTKAHLGWLASQKFEHAEQRIAFEELLLAVHQARDRVTRLEEAIRVAVPDWSLAEVVQALIAMRGIDMVTATAFLAEIGDLSRFRTPRQLMAYLGLVPSEQSTGDTIVRGPITKAGNRRARRLLIESAWAYRHPPRVGKDKQAKVAAAPRTVREIAWKAQHRLYARYRALTRKGKLKTVAITAMARELAAFIWAVSREVATTGRAAAQQGIRG

SEQ ID NO: 384449 - protein, 358 aa, unidentified
MSHVKSSRLDFTGQPIYVGLDVHKKSWSVSIFSKYGEYKTFNQPPEVDKLLHYLRHHFPGGDYRSVYEAGYCGFWIHDQLREKGIQCLVVNPADVPTKNKERRAKRDPIDCRKLARSLRNGEIEGVYVACRSKLEDRTLIRTRQSMVRKQTRCKNQIKGMLLFYGVVIPEEREMGHWSRRFIQWIEGIRMERASGDIALKAHLEELSHLRHLIASLNRAILRLARTEEDWPLVRLLKTVPGISTLTAIILLTELGEITRFPSLDELSCYVGLVPDTQTSAEKEYVGGLTQRRHAQLRWLLIEASWTAIRKDPPLLMAFEEYCKRMRKTKAIVKIARKLLNRIRYVLKNQAEYVPCVIQ

SEQ ID NO: 384450 - protein, 387 aa, unidentified
MVLIGVDPHKASHTAVAVDDAERELARMTVRADRRQLERLLEFATVFPDRTWAIESAGGLGFLLAQQLVGAGECVVDVPATLAARVRLLGSGRGSKNDPNDALSTAIAALRDQQLRIVVAEDHAMVCRLLADRHQDLTALRTQAVCRLHALLVAMVPGGVQKRLAANASAVLLRRVHPVTAVEVERKRLAGELVADIRRLDKAIAAVRARAIVAVAASGTSVTEVNGVGPIAAALILGHTGDVRRFATADQFASYTGTAPIEASSGDVVRHRLSRAGDRQLNYCLHVAAITQLRHDCPGRDYYLRKRACGKGHKEALRCLKRRLSDVVYRQLLRDAQAAQAAGPRGQLGATTNSRAAGSTPHTSSSGKSLPGPAGTDPTTPDEDRLD

SEQ ID NO: 384451 - protein, 317 aa, unidentified
MTTPSEAYVGIDVGKAWLDVAVWGEDEVWRVSNDEAGVEELLDRVEKLEPQLIVVEATGGYEQLAVQTMLLKSLPVAVANPTRVRALSKATGKLAKTDVIDARLIAEYAFKIQPAAQAPKEANEIRLKALVTRREQLVEMRTAEQNRLGTAPNCMRTDIRDHIEWMGGRITELEAQINELLDRLPEWKTQTERLDSIPGVGLITAVTVLAEMPELGQLDRQKMAALAGLAPFNRDSGQKRGKRRIFGGRKGIRRVLYMACMSAKKYNPVIRPLFERLIKKGKVFKVAITACMRKMLVIMNAMTRDQVNWRSPEPISD

SEQ ID NO: 384452 - protein, 426 aa, unidentified
MQPHYQCVCGVDVHKEFLQVCILRRDENPKIFRVFNNFSGVQELKQRVEDEGCECIACESTGVYWYRLYLAFENQTRVIVGNAYQIKSIPGRKTDVRDAQWIAELAMSGLINPSRVFPKKDRELRELTRTRESTVNSRTQIKNRIHRTLDSAGIALGKGVNDIFGKSGIHLLWGLLNRERVEDIITTIPSARVKKRVDTLREILSGSLSDLQIMLIKKNLDLMAHINEHIQVLDEQIIARMGEQERIRDIDIACSIPGVSVTTAVTALAEIGDYHDFENAEKLASWAGLVPSVYQSAGKNCSGKITKHGSVHLRWILVQAAKAAGRTVNTTFRKFFNRIAYRKGANTATVALARKILCILWHLLVKNELYEDPIKNAKQIKHQLAIRFSKNSPADVQKAIDFILDSGFKVIFPDATLDKNLRGVGR

SEQ ID NO: 384453 - protein, 348 aa, unidentified
MTMIGGFDVHRQQITFDCVDDDGLVHWGQIRPATRTRLRDWLAKHCPDGNGEFGLEGCTGWRYVSEELLAAGARVHMGDPAEVAALRGPKKRAKTDRSDARLLRTLLLEGRFPESWIPPAQVMEVRTLGRLYCALMDERRSWQQRIHAQLFHQGCPPITALLSHAGREALAGAELSAAGRQYVGTTMRCIDQLNAEIVPLRAQLVDFARHQPGCQALQARHYGVGWLSAAIMWAEIGDARRFHSSDQLVRFAGLDITVYSSDAKRAPGHLAPQGSPELRWAAVEAAKCAARPGSPDYAYYHQVAARKDGKRPTLAVERKILRRCYHTLRELGDTALAVPSTKINHIAA

SEQ ID NO: 384454 - protein, 353 aa, unidentified
MHHRNRVVVGVDTHAAVHCAAALDDNGRLLGTQEFVASAAGYRRLVSWARSFGEVGKVGVEGSGAYGAGLARHLVTENIEVFEVLRPDRRLRRSRGKSDPIDAEAAARAVLAGTASVAPKLADGPIEAIRALRIAKLGAIKAKTAATNTLRAMIVTAPEPLRAQLPSTGLPNKVINACLRLRPDLTQLSDPVQATKAALRSLALRAKNLREEVKALDHQLGELVAAVAPTTLGTFAMGVDTTSALLVTIGDNPDRLRSEAAFARLCGVAPIPASSGKINRHRLHRGGDRSANRALHIATVVRMRYSERTRAYVARRTANGLSKPEIIRCLKRYLAREIFRTLRADYAALAQPT

SEQ ID NO: 384455 - protein, 344 aa, unidentified
MKKSMYYVGLDVHKKTIAYCMKLVDGQIVDEGVIKASRKELWKWVRDIDGPWVGALEATLFTGWIYDFLKPHCRELKVAHPKMLKAIAGSKKKNDRVDAEKIADLLRCNFLPECYMAPENIRELRRVLRYRNLMVRESVKFQNKMGGLLMEVGAQYNKKRLRGRKYFNELLETIEDVPASVIEMLKISRAGKEMFEAVQRKLLAALKNHPDLKRRVGLLMTIRGVGEVTALTWALEIGDPTRFSSRKHAVSYCGLCSAQRESAGKTMRGPISKQRNKHLQPVLVQAAKLAPLWNEELAVVHERELTRGNRNRATLAVARKLVGYMLAVDVRQTAFEPGSGSLVA

SEQ ID NO: 384456 - protein, 408 aa, unidentified
MEVLYPKCAGLDVHKEVIVASVRVVESGRVQRWLNRFATTTRGILALVDWLRDYGCTQVGMEATGVYWKPVWHLLEGEFGLTLANAAAVRNVPGRKSDVNDATWLSDLLAHGLIRDSFVPPAPIQQLRDLTRTRKQLVREVCQHTQRLQKTLEDGNVKITGVISDLLGVSGRAILRGLIEGETDPERLLQLAGGRLKAPRQRLLDGLQGAVTDHHRFLLRLHLNHIEGLEQLIREVEAQIESLLDPFRDAYQRLQTIPGVSRVVAQTLLAEIGADMSHFPSSAHLVSWAGLCPRLDESAGKGRSKRLRHGDGWLKPVLVQAAWAASRSKDTYLHSQFVRLRSRRGPKKAVVAVAASILTAAYFILRDGVVYKDLGPHYLEHLDKTKTAKRLAQRLQNLGYQVELRPAA

SEQ ID NO: 384457 - protein, 384 aa, unidentified
MKVVCGLDVHKDSVFCCILCANGEKIQHKFGVLTEELVTLRDLMVSEGVEECAMESTSIYWIPIWRVLEGSVKLHLVNPYFIKQLPGKKSDVNDAEWIATCLSKELIASSFVPDDKIQRLRQYDRRIFDLNVSISRNLVKLDQCIQRCNIRISNYISTTDSKGYRSIVKLISQGVTDAEVLVKELHGRTINRHGRETLVKALTGVVSETDIDIIKQLVEEIELQQRHKDEAQEKMTALCMEWFPQEVENLQTIPGVKERSSTSIIAEIGTDMTHFQTPKKLVSWVGLRPRNEESAGKIKARGITHGNRFVRKTMIECSWGAARMKDSFFAEFSYRQCIERRKNKMKVQVAIARKILVAVWYVLSQGTQYIKPTDHYTATDMTAV

SEQ ID NO: 384458 - protein, 346 aa, unidentified
MKVKTIGIDLAKETFGLHGVDGRGRVVVHKRVTRKHLVGFLVKVEPCLVGMEACGAAHYWAREIEKLGHTVKLMSPQFVVPYRKGNKNDPNDAAAICEAVTRPSMRFVPIKCEEQQDLQALHRVRKQLIKNRTALANQIRGLLRERGIVVAQAIGRLRTALPVILEDQSNRLSALMRELLGEMAERLRMLDDCLRPYDRRIERLCQQDERCRRLVKVEGVGPLVATALVAAIGNARQFKSGRELSAWLGLVPRQHSSGQRTVLLGTSQRRDRYLRTLLIHGARAAARVAERKRDARSIWLSRLKLRGGPNVAAVALANKNARVMWALLARGDSYRVQTSMHSEAAA

SEQ ID NO: 384459 - protein, 352 aa, unidentified
MNYVGIDWAYGRAAWCAMGQSGEIEGEGLIPADEDGLARLVLELGTEVKGCVEMMSGAVWVRDQLTLAGWQMEVAHARKVRDVAPLACKTDKVDARVLAELCRRGLVPALWVPSEEDRAIRELLRRRAHLVKSRTSHRNRIFGLLTQFGLRISLKRLREPDASELLIRRGVPAVWRVSIASHLEEIDHLDRLVASIDREIGPIASADPRAKLLATIPGVGPLIGLTLASEIGEVSRFSSPSKLVGYAGLAPRVSQSGERSATGRLSKAGSRTLRWAAVEAANQAWRSSNPFHEHYLRIAARHGKNPAKSAVARKLLITSWHMLSRGQVFQPRRPSGAENTTAPASSLRFLAA

SEQ ID NO: 384460 - protein, 347 aa, unidentified
MRFYTRQRQYYCGIDLHTRWMYVCILSRDGEIVYHKNLPAGPEPLLEAIAPFRGDLVIGAECTFTWYWLADLCAREGIEFVLGHALYMRAIHGAKVKNDRIDSRKIAALLRGGTFPLAYVYPREMRATRDLLRRRTRLVRHRAELLAHIQNTAAQYNLPPFGDHEVCPKNGPEIIQYFDDPAVQRSIGTDLELIDYLDGTIAYLESQIERAARGHDPQALMLLRTVKGIGKILGLVILYEMHTIERFETVGQFCSYARLVRSPHESAGKRSGRSRNKIGNQHLKWAFSEAATLFLRGNPEGMAYKKRLEKKYGKPKAMAILSHRLGRAVYFMLKRNRAFDMNTFLAN

SEQ ID NO: 384461 - protein, 454 aa, unidentified
MRRTQSKAIAWEAVPVINPNAAGLDIGSEEIWACVPVNRAAQPVRKFGTYTPDLHALADWLQSCGVETVAMESTGVYWIPIYEILEVRGFEVYLVNARHLKHVPGRKSDWQDCQWIQRLHSLGLLNGSFRPEGEMCALRAYRRHRATLIEHRAAHIQHMQKALHEMNVQLTQVLSDITGVTGMAILRAIVAGERDPLLLAQLRNPCCAKPEAELVKALTGNYRAEHVFALKQALALYDAYTEQIRECDREIERQYSVLKPVHDDDLPPLDTSDKPNTHSKNGPSYDARTLLYQLLGVDLIAITGLNASTVEDIVSEIGTDIDCWPTDKHFCSWLGLAPHNDISGGKVLRSHTLKTHNRAGQAFRLAAQSVSRTQTALGAYFRRMRARCGPQKAIVATAHKLARIFYFMLKHRTPFHDIGADEYDKRERKREIARLQKKAAKLGFTLTQLSAQPA

SEQ ID NO: 384462 - protein, 420 aa, unidentified
MKLSNIEFTAFVGLDWADSKHDICMQAAGCEVREFDRFPHKVAAIDEWAHSMHQRFGGQIAVALELAKGPIVYALQKYDFFVLFPINPSMLAKYRQAFKPSRAKDDPTDAELALDLLLRHRERFQPLKPQSVPMRKLCMLVEQRRRLVGDKTRYTNRLGNALKQYYPQALQWFEQRDTVVFCDFLTRWPTLIQVKRARKATLTTFFKVHNVRFERVIEARLCAIKSASPLTHDMAVITAYQLQAEALVEQLRVTLKAIARFDAEIATTAAKLPDYALLFKPLPGAGPALAPRLLAGFGEDRQRYAGAEQIQQYTGVAPVTERSGNKTWVHWRWQCPTFLRQSMIEWAGQTINKSFWAGAYYRQQRDKGASHQTAIRALAFKWLRILYRCWQSRTPYDESKYLEALRRRGSPLLKHLGETM

SEQ ID NO: 384463 - protein, 345 aa, unidentified
MKHFAGLDVSLEETAICVVDETGTMVREARVSSEPEALVAFFRGLGLVVERIGLEACSLSAWLHESLVAASLPAVCIETRRAKAAMGAMPNKTDRNDARGLAQIIRTGWYRAVHVKSPTCRSWRALLTARRLVLNKMRDLENGLRALLREAGLKLGTPARKEFAARVRELTAADPVLSIMTEPLLTIIAAMTRELAQLTKRVLDIVRDESVCRRLMGVPGVGPLTALTFRATIDRPERFRRSRDVGAHLGLTPKRYQSGETDVQGGISRCGDELARTALYEAAHSLLIRSRKWSTLRAWGMQVAKRRGMARARIAVARKLAAILHRMWADGTEFRWGEADAAVAT

SEQ ID NO: 384464 - protein, 290 aa, unidentified
MKYYTSTTEFNCGIDLHARQMYACVMDRQGKKLVHTNITGNDFEYFLKRVEPYRHDLTVVSECTFNWYWLADACFEADIEFVLAHALYLKHIHGGKNKNDCIDSEKLAHLLRANLIPPSYIYPSERRPIRALLRQRMSYVWDRATLKTHLSMNQTAEGLVPARKGGHDRDIWEERILEQYTNPLHKFAASCDMNMIRAYDVEIEHLEAEIIRQAKTGLGRNYHLLLSVPGIGRVLAMAILFETDAIERFPTVKDYVSYCRLVKGSVASAGKVKGLTGGKMGHAYLRWAFG

SEQ ID NO: 384465 - protein, 381 aa, unidentified
MKQMTYAKAENPPPTLYLAFELSDQEWKLGFTVGLGQPPRQRKVKAGDTAALKQELVLAKQRFSLPAAAPVMSCYEAGRDGFWLHRFLESEHVTNLIVDSASIEVSRRGKNAKTDRLDVEKLLTMLLRYHAGESRVWSVVQVPSLAAEDQRHLHRQLVALKGERTRYVNRIKGLLVGQGIHLSVDGEFLTHLPELRLWDGAPLPAGLLARLKREFTCWQFVHQQILELEAERRTAIRESQEPCMAQVRQLLQLKGIGENSAWLYVMEFFGWRDFHNRREIGALAGLTPTPFQSGGEDHEQGISKAGNTLIRAMAIEIAWGWLRHQPDSTLSQWYQERFGAGSTRLHKIGIVALARKLLIALWHYLESGELPEGATLKPATA

SEQ ID NO: 384466 - protein, 422 aa, unidentified
MHPHEKRQLAQSAAVVVGVDAGKFHHALVVRPRGRADSKPLSIATTRLGFEQALTFIHQHVAERDGPVVVGIEFAGSYGFTFAHFLRTADARIQVVSVLPAHTKRWKEVTHHQPLKTDAKDAIGICDLAAHGHFVSFPFLTPTYAELRYLLSAREKLSTLRRGVITRIRTALDVVFPEFPSLFASPVKHTARALLRAFPGPEALRRAPKRAVLAVLKRESRNHLTLEAYERLIEAATHTVALPSAQGAMQAELPLLIARLELYEAQMQTLEQLMADRLAELPAARALLTIPNVAPVSAAVFLGSIGDPHAYDSSRQILALAGLTLVERSSGIRTGQKRISKRGRPVLRKHAHMFAVRSVHRDGIYRREYEALLARNGHRPFAALTAIARKGLRLFYAIARSERVWTPEAPGSPGAGASGEIV

SEQ ID NO: 384467 - protein, 416 aa, unidentified
MSRRVRANGQATVHSRYQITGGCDTDKNIIVAAVFQAETGSLEAREFKQHKADALRCAEWFRSLNTEMVIIESTANYHLLYYDTLIAAGINIAVINPIVVKSLLRVEGKSDKGDAMTLARLAASFDLKTSNIPDSQQRELRLLFKRVDAWKTQRTQITNRTNSILTGYGFTVFRLVSVNSPSGFKMLQAVIDRRAPAEIAALHRNKAKRPEIEKCASVDLPEYLGNYLQEVLSDVRLLNLRIETGETKVLEKISECGLSEQIQLMCTVPGISQMLAMRIIAEMGANYHQRYCSAQAFAKGIGVVPSNEVSGGKLLKRKASHGNTRVKAHLIFAAKAFAIHGSGPLKSWFDSYRARKNYMKAISAMARRMSEALWWVMVKNEPYKYWQGEVAPLGRDTVDIGGHVVDPATGEILDPD

SEQ ID NO: 384468 - protein, 411 aa, unidentified
MHNRQNYLYVGVDLHKEHHTAVIINCWQEKLGEIQFENKPSAFSKFLLEVETYVRDGITVVFGLEDVGGYGRALAKYLVDHERVVKEVNPALSFLERKSQVMIQKNDSWDAECVARILVNKFNQLPDAKPNDLFWSIQQLVSRRNALVKAQAALKNQLHIQLNHHYPSYKKFFSEVDGKTALAFWKQYPSPSCLEGVNIKRLTAFLLDVSNNTCSVKKASDILKLVKEDGHTMKEYQDTRDFLVRSIVREIEFKKKEMKYIKRELKQLVNLLDYQLETMPGIELVTASALIAEIGDVRRFPNANKLARFAGVAPVYFGSGGKGKTHKSKQGNRVLHALFYNLAVQQVQVAKGSKLPRNPVFHAYYHKKLKEGKTKGQALVCIMRRLVNIVYGMMKHKTAYELPVVQEKEVV

SEQ ID NO: 384469 - protein, 326 aa, unidentified
MTLSHSTDNTFVGIDVGGAGLDVAWHRGDSAHYANRPDAIATLVERLRTGPEVTRIVLEPTGGYEKALVKALRQAQLPVEIIHTTRFNAYRALVGVKAKSDTSDAKLLASYAAAPDEVRGRKAGHVELPEDAVREELSELASRRDQLKHMIHAETCRLGTVRKDELRQMITTHLEALRAEDKQVHRMMLELVRQRDDLRRDQRLLKTIKGIGVKSALVLLASVPELGRIDNKAAAALIGVAPFVRKSGTMNAPARIHGGRAPVRSILYMAAVTASKHNPLLSPFYDRLIAKGKPPKVALIAVLRRLVVFANAVLRSGQPWKGASAT

SEQ ID NO: 384470 - protein, 443 aa, unidentified
MRSIGLDVGKHVAEVAISEPGRGTRSAGRISASPESLRAFATTLRPDDQVVLEATTNTWAIVELLERHAGRVVVSNPLRTRAIADAKVKTDTIDAATLAELLAADYLPTVWQPDPATRALRRRVASRAVLVAERTRLRNRISAVLTRNLVVCPWSDTFGRGGRAWLTTVELPTDEREVVDLTLRLLDGLAAEIEVAEAGIARTVVDDARIRRLLSIPGIGLQTAVGLIAVIGDAGRFTRPNKLVGYLGLDPIVRQSGGRPAYTGHISHAGQGHVRGLLVEAALGAARVPGPLHAFYGRVAARRGHAIAIVAVARKLAVLAWHLLTDDVDYRWAPARLTATKIRAVELAAGAPSQRGRVSGSGETRDRAKRERELERAVLAQAEAAYVAFVEARRTTDAVATKRGATELSQGQSPARLRGGVESPTSALRHGVDRVRAEDTPTA

SEQ ID NO: 384471 - protein, 361 aa, unidentified
MKTVRSNELNFEGQKIYVGIDVHLKSWSVAILSEHSVLKRFSQSPEPEALHKYLVSHYPGANYFSVYEAGFCGFWIHEKLTHLGINNIVVNPSDVPTMNKEKLRKTDAVDCNKLARELRSGSLEGIYVPGTETLEMRSLIRLRNLIVKDSTRAKNRIKSLLRFHGVEIPEEFTRCSTGCWSKRFLNWLHSLELSTEYGKKTLELHLEQFLRLRRMLLQETRAIRNISRAEPFEKPIRLLTSVPGIGITTAATLMVEIDDITRFANAEHLAAFIGLVPMCHTSSETERIGGITVRRHFMLRCLLVEAAWIAIRKDPAMTLAYGEYRKRMNPQKSIVKIARRLVNRVYFVLKHKKEYVPCVVK

SEQ ID NO: 384472 - protein, 399 aa, unidentified
MFVGWDWASTAHDVTVIDSAGELVHRMAIPHTEDGIARAVAKLADYGDPGELPVAIEATRGLVVDRLLGVGHPVIAVHPNAFHAVRPRWGAARAKNDPGDSFKLADYARTDIHRLPVLAPTLPETLELQALTRQRDCQLALRIAAVSQLAALLDQYWPGGKTIFAQLHSPIALDFLDRYPTPRAAASLTPARIEAFCHRRGYSGRRSGAELLDRLRSAPISASRLGEPVVAQMIRGQVAVVRALQAGIDALDIVIAEKVTAHPYAGLLAVLPRIGTLNLAQIIGEVGPILERATSFDQLAAETGLAPVTRSSGKTHTVAFRYATNRRARQALHTWLDNSRRSSDWAAQRYAAARARGQRHPHALRTIGRAWLRIIWACWRTKTAYDPARDERAKQPTAA

SEQ ID NO: 384473 - protein, 315 aa, unidentified
MQKLLNIGVDVAKDAVVVGCDAQGSAVRSIPNQRTALVAWLASLPNGSRIGMEATGCYHELLADLAHEHGHTVFVLNPKDTRHYAQAVGLRAKTDRVDALLIARLVAHEHACLHPYCPATHEQRQLGRLLRRRAQLVRLKGALKQSMRGMPGLARDTRALVERMDALIAKLEQGMDALIASMPGTQEDRRKLESINGVGAVVSAALIEPLTRVPFRSSDAFVAFVGLDPRPRDSGRKAGKRRLSKRGPAELRRLLFNAAMAATRTAVWKPIYEHYRAHGLPTTAALVIIARKIARIAWSIHRYHTSFDPLRLRIT

SEQ ID NO: 384474 - protein, 357 aa, unidentified
MLAELLDAIVGVDTHRDTHEVEIALPNGIPIATCQISNDTAGYAELLAWIIDHAPGPRLAVSIEGTRSYGVGLARAATAAGLLVVECEQPNRKARRGKGKSDPIDAHLAVLAALRLDADRLPIPRADGDREALRILLGARQELTAISTAQTNRLRALLRDGDDTDLALARGLLNDAVLAAIARRREPRDASRQQSVRHAEIRRLALALRESGRTLRTNRAQLQVISNDLAPGLTDRRGLGPVTAAQAIVSFSHPGRCRSDAAFAALSGTSPLQASSGRTVRHRLNRGGDRALNSTIHTIAMVRMRSCSRTQAYVTRRTAEGKTPREIRRCLKRYIARELYRTLTATMTTTAGTPNAA

SEQ ID NO: 384475 - protein, 457 aa, unidentified
MTRRKHSRPARDIAPVHPHAAAVDIGATLHVAAVRPGSDPEPVRTFGTFTTDLHRLADWFEQCGVETVAMESTGVYWIPLYEILDQRGFEVVIVNARDAKNVPGRKTDVSDAAWLQRLHEYGLLRASFRPKGEIATLRSYLRQRERLLDQAAAHIQHMQKALTEMNLQLHHVVADVTGVTGLRILRALVAGERDPDTLAAYSDPRCKAPAETLRAALVGNDREEHVFALAQALELYDIYQAKVAACDQRIEAVLERLKAANPPPAAALPPARPRRRQANEPGFAVREALHAILGADPTQIDGIGPSLALTLVGECGTDLSAWPSAKHFTSWLSLAPHNKISGGKVLSARTRRSGSRAAALLRLAAVAVGRTATALGAFYRRLAARVGKAKAVTATARKIAVLFYNMLRHGMDYADPGASAYEARYRQRVLSNLRRRAKSLGYVLQRANPASAAIAVS

SEQ ID NO: 384476 - protein, 423 aa, unidentified
MMKLKYSICCGLDVHKNVIVATIVTTNKDGISEYLQKSFSTINSDIQRFHNWLIENNCYHVCMESTGKYWIPIFNYLENDIDVCLTHPKYVKAIKGKKTDKKDSKWIADLYKFDLVRCSFIPPKDFRQLRELSRYRFKLVCMKSSEKNRIQNCMTISNVGIASVLSDPFGKTATEIISYLLEHTADSMDEKAVRKLIKKGAKSKSDEIIEAIKGYTIETDQAKKLELAWGHLEYLDDMITQTEVELYVRIKPYYEFVEFVSTMPGMTELSSTIVLAETGVDMDIFDDAKHLCSWCGLSPANNESAGKKKSVRIAKAGDYLKPMMVQCALAAIKSKKQPYFAIKYGRIKKRRGHKKAIIAIARMMMVCIYHMVSEKKPFTPTDYEELTDPQNHVESVVLNENNVFAYLESLGYDSSKLVKRNDN

SEQ ID NO: 384477 - protein, 317 aa, unidentified
MTFAGIDVSKPHLDLALVSNSPKPTRLRFPNTPEGRKALLAALAHLRPAWVALEPTGAYHLPLLKLLAENRLQVALVNPYHLAAFRKAKGERQKTDRHDALLLARYAQVYHGELRAYTLPPEALRELKALVGYREDLAGRERAILNQMEAVEWAGSGEVLALLQKELACVKGLLGEVEARIQALLATLPEAEALMALPGVGPQVAAAVLALLPPELWGRAKRAASYAGLTPEREESGKRVERSRLSKKGPPLLRRKLYMGALVAVRHDPEMRAFYHRLLSRGKRKKQALVAVAHKLLRRMMGRLREYYATQLDQGVA

SEQ ID NO: 384478 - protein, 350 aa, unidentified
MFIIGCDLHTRYQQIAMLDTVTGEVVTRRLEHENGEARAFYASLAKPALVGIEATGCTQWFERMLAELGHELWVGDPAEIRARAVRRQKTDTRDAEHMLDLLASNRFPRIWIPSLQERDARQLLKHRDKLVRMRTSVKNQLHYLAMSQGVCRKQKLWTERGRRELEGLPLGTWASRRRQELLELLDRLQPRIEELDEAVKVEAQARPEVLRLMRQKGVGPVVGLAFVLTLGPVERFPRSKQVVSYLGLNPREASSGGHQRLGSISKQGNEMLRWLLVEAGQSASQADPELRRKYQRLKLRRGTKVAKVALARILAVRLYWALREASPQRSPVRMPGSPAQTLVDASPSRL

SEQ ID NO: 384479 - protein, 343 aa, unidentified
MEQYVGLDVSQEQTSVCVVDGGGKVIWEGKCTSTPEAIAATIRTRAPEVVRIGLESGPLSAWHWHELHKLGLPVVCLDARHVKAALALQLNKSDRNDARGLAQIVRTGWYREVVVKSVDSHLVRSLLTTRAQLVRRRVDLANQIRGTLKPFGLIAGKGGGRSFAERVRALVAGGPLQEVAGALLAAWQAIGEQIAVLGRRLVAVARQDEAVRRLMTAPGVGVLVALAYVSVVDAPERFAKSSSVGAYIGLTPRRYQSGEADYTGHISRCGDKLLRTYLYEAAGIILHRVSRWSVLKAWGTRLARRIGTRKATVAVARKLSVILHRMLRDSSEFRWSAKEVSAA

SEQ ID NO: 384480 - protein, 414 aa, unidentified
MMASMKECCCGVDVHKSFIVAVIAEFKGREVVFSKYTRFSTFTQGLREFKEWLREHKCFDICLESTGKYYVPVYRIVSDENFHVDVVHPKYVKAPRGKKNDKRDAKRIADMYMRDHIAEYSLIPPADILAIRDITRYRRKTVNSITAEKNRMSNCLTVSCIKLDEVLSDTYGKTGQAIINQIIETGGCDFDPKPYIDKRVKASLEDFKMALDGNVTPATLTKMKMIQQRIDFLGKQEAELESTMESLSKDYSRQLEIVDSAPGVDSLSAISIISEIGVDMKQFGSVKRFLSWVGVVPQNNESAGKKKSTRIGKGNTWLKPVIVQCANAAINDKKHPEIREKYLAIKKRRGHGKALIAISKRLMTAIYFMLLRDEMYNPRIGNDAAPKRGKISLEKLIAHYRLKGYTIVTDNEIA

SEQ ID NO: 384481 - protein, 399 aa, unidentified
MVLDREPFREKFVRLDLPLFINAVIRTVGVDGPTASLCQNWGCKQPRPEPSMTQYKRIAIDTSKSVFTIHCIDAQDRPVLRTNLRRGQLLPFFRKLAATEIAIESCSGSHHWGRELTALGHTPRLVPPQYVKPYVKRGKNDRNDAEAICEAAGRPGMHFVPVKSRTQQAQGMVLKVRDTLISQRTVLGNTIRGHAAEFGIVAGKGISTIAPLLSAIEQEATVPPEAKEMFVLLGQQIAEIGARIKEIDAKLNAAHKASEVSTRLATIPGVGRVIALTLSTEIDPSAFESGRHLAAWVGLTPKEHSTGGKQRMGKISRAGNERLRALFVSGATSIINAAMKPSSRQMTEWLRALLLRKPRKLAAVALANKNARTAWAMMTSGETYRRPTPPPGATGALAA

SEQ ID NO: 384482 - protein, 354 aa, unidentified
MLYMGIDLHKRFMFATVIDEAGKEVERARVENKKSSILTYIEQIKKIDEEISAVVEATSNSSKLYDELEEELKSISLANPLKTKAIASTRIKTDKIDSRILALLLRSDLIPKAHMPAKATREIRELTRYRYHVSLTRVMTSLKNRVHAILAKYDIDSPILSSVSDIFGKIGTKELRSLTLSPNHSISLNGYLDLIEFIKNLLPMVKKEIAGIANEDETCTLLKSIPGIGDFLAVLIKHEIDDIKRFPSHHKLASYTGLIPSTYQSGDRTRHGRITKQGNSNLRWALIEATQVAIVNSPYFRNHYEQIKRRADVKSAIVATSRRLLEIIYLVWTQKRNYYEINKNRALAVALTIL

SEQ ID NO: 384483 - protein, 440 aa, unidentified
MQTLPLLDDRACGVDVGSEQLHVSIAGDTPKIFGTTTGQLHALRDWLKEQSVKSVAMEATGVYWLCAYEVLETAGLEVLVVNGKHVKNLPGRKTDLKDCQWLATLHAHGLLRSGFVPPEHIRRLQDYLRLRADHVTLAASHIQHLQKALERMNIKLHDVISSVVGVSGLKIIRAILAGQRDAGELLKLCDGQIQRKKSEAIKESLRGTWKAEHLFALKQGLEAWEFYQQKIAECDREIERVLQELAGGETPPQSKSKPGGPNTPQIVNLHGLLMRLCGDRDITVLPGLGDHTLLSLIGEVGTDLSRWKTEKHFTAWCGLPPGSRQSGKRRGTTSRQRNRAGRLFCVMARSVGRTVDKALGGFYRRLKARRGGLVANQALARKLAALFWRLMVHGQDYVEQGLKKYERQVEETQKSWLRKLAKKHGLVLVSPLPSPAGVHG

SEQ ID NO: 384484 - protein, 321 aa, unidentified
MVVERAVGIDVSKAWLDVAVRPSGTVERFPNTGEGHAALVARLRAIPTDQQPQVVVMEATGGLQRGVADALEAAGLPVAVMNPRQIRDFAKCLNQRAKTDRIDAQVLARYGETMEPEPRARPDAQAQEAQSLVARRRQLVEMLTMEKNRLQQAPPRTQPSLRRHLEFLEAELAEVERQLTTEIAANPDWQELSTRLQTVKGIGPVTATLLILELPELGTLDRKAIAALVGVAPFNHDSGTHRGKRFCSGGRAPVRTGLYMATRAAIRSNPAIHAFYQRLIAAGKLDKVALIACLRRLLAILNVMVRTRTDWDPTRFQHATT

SEQ ID NO: 384485 - protein, 413 aa, unidentified
MNLNVGIDVSKAKLDYCGLDSDHNICFQDEAANQPIGVSTIKQAILQAAEVRSYDHIIIGMEATSMYNILPSYTFEHDLELNSLDVKVVTLNPKMTHKFSQVYDEDKTDKVDAMNIAEFIGLGRYTVPVPRDEAHFALQRLTRERFHLIKQINDCKSHFLNNLYYKLNTIDAELPTSVFGNTMMTVLADERYSLDELAELPLEQLISELNEMGRGRFGDPEVVAKALKAAVRSSYRIGQTILNSVNMVLGMYANEIRMFSQQKKKLDQSIGKLLEAFPEAQCLRSVPGIGPVYTAGILAEIGQTERFPNEASLAKYSGLVWRRRQSGNSETQATPRVRAGDQYLRYYLVEAADSVRRHDPTFTAYYDKKYREVPKYQHRRADLLTARKLVRLVFALLTNHELYQPTVPQIKSV

SEQ ID NO: 384486 - protein, 447 aa, unidentified
MSKPAGQKGGLSLECIEPDAAGIDVGANEIYVAVPPDRDPEPVRRFKTFTGELRQMAAWLVQCRIRTVAMESTGVYWIPPYEILEEAGLRVCLVNSRYVRHVPGRKSDVSDCRWLQYLHSVGLLKPSFRPEGAVCALRSLSRHRGGLVDSAAVHIQHMQKALTQMNLQIHHVLSDITGLSGMAILEAIVAGERDPARLAGLCHAMVRSDQQTVIASLTGNYRPEHMFTLKQSLAAYQHYQQLLEECDREIEKFIAQMPSSNDPPPPPPRSQQKRRKNQFHFDMRSELVRLFGVDLTEVPGISALTAHVLLSEIGPDLSRFPSAAAFANWLALCPGNKKSGGKVLSSKTRPTNSRASHALRLAAQTLARCHSHLGSYYRAMRARLGAPQAITATAHKLARILYHLISTRTPYDETVFAKEQNKQNLRLHKRLCKQAQRLGFQLVPLTA

SEQ ID NO: 384487 - protein, 432 aa, unidentified
MIEQVYPNCCGLDVHKKFVVACRVTVDAKDQTRKELRTFSTMTDELEALANWLEAGAVTHVAMESTGVYWQPIYNILEGRFEIFLVNAQAIKRMPGRKTDMKDAEWIATLMQHGLLQRSFIPNREQRELRDLSRYRLSLVQERSRFANRLQKVLETTNIKLSSVASDIQGVSAQAILRALLAGQTDPKVLADLAQKKLRQKRPELERALVGKISAHQRFMLANLLTQLDFLDEQIGEVDVRMEALLAQLPPFQEAVRLLDTIPGVSRQLAILIVAEIGVDMSRFPSDRQITAWAGVAPGNNETGGKQRSGKARQGNKHLQRGLVLAAHAAAKSKHNYLRAMYHRLSARRGKARAAVAVGRTILQAAYYMLKRGEAYHDLGENYLDQLDRTHTTKRLVKRLQALGYTVTLQETIPITATPQPDAGAIPLPLAV

SEQ ID NO: 384488 - protein, 420 aa, unidentified
MSRDVSDVVNPVACGLDVHSAVIAACLVRSGPNGGPNYEERSFATSLCGLHELRDWLTKAECQAVGMEATGVYWIPVYSVLEGHFSLVVGNPNHMRNLRGHKTDRKDAKWIAGLLRHGLIRPSFVPPAEFRDVRELTRTRRHLVNARSTTRNEVTRLLAHQGIPLGAEGCLSDIFGVSGMAILETLAEGGQVQERLPKLLHRSLKPKQNLISAALEAGLGEIPRQLLALLLARLEAVEEDILALERLILTQLAPHKDKLDLLSSIPGVSLISACVILAEVGVDMTAWPTHRHLSAWGGVAPGCKQSGGKSKKEKTRKGNPYLCSMMVECAGAAIQTKNCQFSGTYRHLSFRTGSKMKARMAIARKLLVIVYTVLSNLTPYQEPKPNEQSSQAKHWAIQRHLRGLQRLGLNVQITPVPSNA

SEQ ID NO: 384489 - protein, 447 aa, unidentified
MVDGTGLSRGDRNRNGRLGGLRELLPAGNAVVGIDLAQVKQAAVVCDHDSRVLARRRVSARAWELGSLLDWAVERATAAGFASVTVACEPTGHRWRVLDQLAAERGLPLVCVQPLLVWRAREAEDLTWDKSDPKDAVVIARLAAQLRCYEPERADATWARLRQLGARRARLVTDATAGVAQLRDLLECVWPAVLAGSGSPFRSASWRACLAVVLDRAAGDLSRVHRLGLARFTVAVRRELPRWGATRPCLRIVRAVFDALVDPAGVAVHRPGALERADLVLGDWRDTRRRLAEVETRMVAVLDELDLTGLVTSIDGLSAVGAAAILAETGDLTRFGSPRAVVKHAGLCPRDNASGSHQGKTSISGKGRPGLRLAAWRAVWAALPNNRVLAARFRYLTTREHHRLARQQARAACAAALLRWLHVVVTQRVAWDPAIAAGQKPPLHRAA

SEQ ID NO: 384490 - protein, 344 aa, unidentified
MLIIGCDFHSGFQQIAIFDNQTGEIQEKKLLHAAEAAKFYRGLSGPVRVGMEAGVPCQWFRRLLADCGHELWVGDAARIRAAEVRKQKTDRRDAELILKLMQEDRFPRIWLPSEEERDVRQLLMDRHHRVRARTQVKNQLQALALNQGLQMGKKLWSEAGRQQLRELPMMEHASRRRNDLLQRVGELDRQIGDLDVLVRRQAEGREDARRLMTHPGVGWQTALAMVLTLGEVSRFENAGKVCSYLGLIPGEYSSGNKQRLGHISKQGSSLMRFLLVEAGQTAVRGDEQLRRAYARLAAKKSRAAAKVMVARRLAVRLYWMLRNEWTYAELARHAGEPGSSCGAK

SEQ ID NO: 384491 - protein, 344 aa, unidentified
MILIGIDPHKSSHTAVAVDAAGHQVAQRRFVVNAGTFRQLTRWCEQWPDRRFAVEGAGGLGRSVAQQLAAAGETVVDVPSTLSARARLLATGGDRKTDAKDALHVAQVALFRHDLRPVVQEDQTTILRLLTERRDDLVHERTRVLNRLHAVLRDLLPGGAPTGLSADKAAALMKAIRPVTATDNCRRDIARDLLADLRRLDRQVKDNETEMREAVAATHTTLTTLPGLGTVLAAKVLGHIGDIRRFPTEHHFASYTGSAPLDASSGNNVRHRLNTGGNRALNSVLHTIAVCQIRDGGRGQDYYLRKISEGKTPSEARRALKRRLSNVVYRIMKRDHRTHLAQAA

SEQ ID NO: 384492 - protein, 405 aa, unidentified
MPYILALDVSMGHSYSVLYKDDTCLFEDEIEHTQRGFHALLEEIQHLPERPLIVFEATGIYSRPVEKFFQDHHFSYCLLNPLEAKKQMEESTLRSWKTDKSDAHRLAQTHLKNQRQPKEVQSNFYLEMRDLARFYQEIEKKITRLRMDLHNCLQLTFPELEQFFSNRLTPYALTLIRLFPHPDFVLASTRTKIKNKLINETRKKISANRAEQKADQIIHYAQCAYPAVEKDSIHCQKTIYYAELLQDLLEQKEALATQMIKKAEGSPCFLLYQTFPGIGALTAALLLGELGDITRFKTHKQLNAFVGIDIRRYQSGKYTGQDRINKRGNPKARKIIFFTIRNMIRQQRAAPNHIVDYYYKLKKQPIPKKEKVATVACMNKLLKCMHAMVRAHTEYDYAYAVSVDH

SEQ ID NO: 384493 - protein, 436 aa, unidentified
MRGCRCSMIMGFTKPIEHSNLTRKEGDFMNPLYVGIDVSSKSNVVYFMLPDGSKHSNFSVANSHVGSTQLVKRIHAAIESMSLDTVLIGLESTSVYGDNLVYFLREDESLAPFNRKIHVLNPKQVKKFKDAYNDLPKNDYVDSFVIADCLRFGRINKEVYIGDYRYKALQNLTRARFFTVCNLTKEKQRFINVLFKKYSTITQEKVFSDTFSTTALAVYDEFESAEALAYMDLQELTAFIIKKGKNRFPDPDAVAKAIQKAARSSYRLPKTVNDSVNQVLSISITSIKALEVQIKEFDKAISAQIQLLPNVLISIPGIGPVYSAGIMAEIGDINRFANQAQLAKYAGLAWTQYQSGNFEAENTRLIKSGNRFLKYYLCEAAFSLVRCDKEYSDFYHLKYKEVNRCQHKRALALTARKFVRLVFTLLKDNRLYRSAK

SEQ ID NO: 384494 - protein, 340 aa, unidentified
MKFIRIGVDLAKNYFQIHALSSEDAPAVKRKLTRRTMREFFLKIEPCRIGMEACGSAHYWARELKAMGHDVSLMPPAYTKPYVKRGKNDAVDAEAICEAVSRPAMRFVPIKSADQQATLMLHKTRELLVKQRTMSVNALRGHLAEFGLVVAKGSGRVDELLGLAEGDATLPDAAVLAAKVLGQQIDALGSALDDLESEIAKAHALSETSRSLEEIPGVGKLVASVITASVPDPSVFHSGRDFAAWLGLTPRQISSGGKPTLGTITKAGNRYIRKLLVLGATSLLNVVEKRRGGLRDWIVGLLAKKPARLVTVALANKLARIIWAMMKTGECFRTEMFAKP

SEQ ID NO: 384495 - protein, 420 aa, unidentified
MGNQRETRMRRVIGIDVHRTFGEVVIWEDGVLRHAGRVDMTRTALEGLGKSLRSTDEVVIEATGNSMAVSRVLTPFVARVIIANPLQVKAIAQAHVKTDKIDAGTLASLQAAGYLPQIWTPDAVTERKRRLTARRYQVVRHRTRIKNEVHSILHAHLIPKCPHADLFGARGRAWLARQPLPDDERAAVERHVRELDRLAEDLAVLDREIAQVAIDDPAVKRLITITGVNLTVATGIVAAIGDISRFKSPQKLVSYFGLNPRVRQSGLGAAHHGRISKVGRSHARAMLVEAAWATAKAPGPLHAFFVRIRAKRGHQIAAVAVARKLTVLCWHLLTRGEDYLWARPALVATKTRAMELQAGHPQQKGSRRGPAYAYNVKALRDQEMLIAAQAERSYERFVAQWKPRRPKEPARGRLKSAGHK

SEQ ID NO: 384496 - protein, 410 aa, unidentified
MQALVERGCGLDVHQATVVACLLIVRKDGKVQKQMRTFGTTTQELLSLREWLLSEGCTHVAMESTGVYWKPVYTILEGALEIVVANAQHVKKVPGRKTDVKDAEWIADLLCHGLLRSSFVPPKPIRELRDLTRYRRKLVESQAAERNRLLKLLETANIKLASVATDVFGMSGRLMLRALVEGKATPQEMAELAKGKLRKKIPELEPALEGKVEEHHRFLLRLQLDRLEAAEKDLAVLEQRIQEKLKPYEAQLTLLDEIPGVDWTLAAGIIAEMGVDMSVFGSVSQLASWAGVCPGNNESAGKRKSSRIPKGNVYLKTALVEAANSAAKAKGTYLRDKFYRLKARRGYKRAAVAVAHKILVAIYYMLSHRVCYNELGDAYLDKRNKHQLTRNLIHRLERLGYSVTLEQIAA

SEQ ID NO: 384497 - protein, 460 aa, unidentified
MAKRKESAVKIPALDIMGQVNPNAAGLDVGAEEIYACVPPERDPRSVRVFPTFTVDLYALADWLEACGIETVAMESTGVYWIPIYEILVSRGFEVCLVNARHLKNVPGRKSDILDCQWIQQLHSYGLLRASFRPPEDICALRALAHHRDNLIRYRAAHIQHMQKALQMMNVKLTMVVSDITGVTGLSIIRAIVAGERDPHELACLRQPGCAKTEEEIAKALEGNYRAEHLFVLKQALAQYDFYLGQIEACDTEMEAMYADLPPCDPDEIGSPPPKPRSRKTRKNQTHFDLSTSLYRVVGVDLTAIDGLDALTVHSIITRIGTDVTSWPTVKHFTSWLCLSPNNDKSGGKVLRSRTQKTQNRANLAFRLAAQSLSRSDSALGAYYRRMRARHGPAKATTATAHKLARIVYSMLKNRTAYADPGADYYEQQHRDRAIRNLKLKAAKLGLELAPVPAQSMTVS

SEQ ID NO: 384498 - protein, 406 aa, unidentified
MVVVATAANEVADPAGEALEFECRRFGASHAERMHLVEWLGEREVLEVVMESTAQYWRPVWLDLEPHFPKLHLAQAHSNRAPKGRKSDYRDGKRLARRLLAGELILSYVPDAEQRQWRTLSRSKQQLVRDRVRLQNQTEALLEEMRIKLSSVVSELFGLSGRRILEALAGGETDPAKLAQLGDFRLRCSEEELADALRGPSTPTQRAVLQLFLKRLQLFDEQIDELDRLVAGELQQYQAAVARVVRVPGFGADSAQQIIAEVGVDASAFPSAGALCSWAGICPGSNISAEQNQSSRSPKGNRFVRRLLTQAAHAAVKTKGCIFQTIFRRFLPRLGYKGAIWAIAHRLGRLLWKILHHGVEYIEMGSEGTPKAKRQRAEKLAKALRRLGYSITLQPLIPEVALAERG

SEQ ID NO: 384499 - protein, 348 aa, unidentified
MTVYVAVDFHARQQTITYCDTADGEIHRPVLRHQHDDVRAFYEQFKGEVIVGLEASGYSAWFEQMLGELGHTIWLGNPAEIRRKAPRRQKNDRRDADLMFDLMIKRDFPRVHNFSPESRTVLRQLRYRHKLVKVRTIAKNSMHAIGINAGLPLKGKLLTEAGLRQLQALQLSPVLAQQRDEWLDLLGLMNRRIAAVEEELQRCAQDDPAITLLRTHPGIGLLTALALRYTLMPVSRFSTTRRVTAYVGLDCIEDQSSEHRRMGSISKAGSRLLRFLLNEAGQTACRRDPELKRFYQRLVQRRDRPKAKVAVARKLLVRSFIMLRDQIDYAEFVRRGVAARAARETHSL

SEQ ID NO: 384500 - protein, 336 aa, unidentified
MHFTHFIGIDVSKDTLDFSVLHTGDFLFHLQVENSSKGISRFVNHFKQIKGKEDKCLFCVEHTGVYNYHLLEYASVNKLDIWVEPASRIKASAGFQRGKNDKVDSLRIAQYAYKNSESAKLWQAPRAVISHLKRLLAMRQRCINLKKQATVPVNENASFSSKVLCKLEASLFKQTLIALDRDLKGIERSIKEVIDNDIELKRLFTLMTSINGIGPVIAAHVLVLTNEFKDFNCAKKFACYAGVVPFDHSSGKSIKGKSRVSHLAHKGIKHLLHMAALRVIQLEGELSDYFIRKAEKGKNKMLILNAIRNKLIHRIFAVVKSGIPYQKNYISPLVLS

SEQ ID NO: 384501 - protein, 342 aa, unidentified
MQVTTIGLDIAKNVFQVHGIDAKEKVVMRKQLRRSQVIAFFSALPPCLIGMEACATAHYWARELRKLGHEVRLMPAKDVKAYLKRNKNDAADAEAICEAVRRPTMRFVQIKSAEQQGQLMQHRTRDVLIRQRTQIINALRAHLAELGIVAAQGDTGVNELRAIVADDRDERLPIDARASVIVLAAQLEALQTLIGSIEKRIKMQHRSNETSQRVETIPGIGVLGATAIVATVADPTIFRSGRDFAAWIGLVPRQDSTGGKQKLGPISKQGDRYLRRILIVGAIAVLRRAQGNPGKYPWLTQLLARRPFKVVAVALANKMARTAWALMAHGGTYRAPELAEAA

SEQ ID NO: 384502 - protein, 340 aa, unidentified
MEKRYIGIDLHRNRFTCCIRLENERTYLTDWELEDLGKFVKKLRPADEVAVEITGNTRLFFDAVAAHVARVVVVNTNQFRVIRQSVKKTDPNDARTLALYLSKNMLPEVRMKDKEHGQLASLTQTRDTLVKLRTALKNKINNILSARGLNLAKEALSSEKKLAEVLELPFDEIVRIELRVIVGQIRSLNQSIAELEKTIGEEGSKLDGHKGLSSIKGIGKITGAILLSVIGDVNDFADERHLASYFGIVPRVSNSNETERSGRIHKRGTKLGRTALVQSALIAANYSPYLKRFYEQVKGRRGAGKAIIALAKKFLGIIYRTLKNKWVFEDFPNFVLAEAS

SEQ ID NO: 384503 - protein, 362 aa, unidentified
MSNSTTWVGMDVHKENIVTVSISGDSGTVMTRWETPNTPKGKERLAGRIAALGKARCVYEAGPCGYDLRRFLDGKGIPCDVIAPSLIPTKPGDRIKTDRRDAEKLARMHRMGELTAICVPTPAQEALRDLVRAREDANEDLVRCRHRLQKFLLRQGRRFEGKSWTREHWRWIRALTFDDANAGTVLAEYVLAVDQQLERVARLDARIEEEAQNPAIAPAVARLKTLRGVRTLTAMTIHSELIDLSRFASPRDLMSFIGLVPSEYSSGGKQRRGSLTRAGNAHLRRVLVEAAWHYRHPPHRTGETIRKRREGQPPDVIETARKAEVRLYRKFTRMVMRGKRTTVAAVAVARELAGFVWAIGRI

SEQ ID NO: 384504 - protein, 486 aa, unidentified
MKISFPTYYARLAAYIVSLILFELDILCTKNPVFMQKQKKNTVIPQSRIQTKKATLEKINLNVAGIDIGSEKLYVAILEQPVKCFSSFTAGVEELILYLKQFGIKSVVMEATGIYWLPLYEMLEAAGFEVCLVNGAHSKNVPGRKTDVLDAEWLRELHTYGLLRPSFIPSDLIRLLRYYVRLRDDHVSMAASHINHMQKNLDAMNLKLHKVLSDIMGVSGMNVIRAIIAGVRDPQKLLELCTQTLQGTKKEEILLSLKGNYRSEYIFGLKQALELWEYYQEKERECDKQIEQILHQLTDHLPTPENLSKPKEIRSNKPEIPDLHLLMTKLCGTDITQIPGFNAYSATKIISEIGTDLSKFPDAKHFTSWLGLSPGISQSGAKRKNKRRKIINRAAQVLRQLALNVGNGKHTALSSFYKRIRSRAGAMVAIKATARKIAVYLFHFIQKGATFVEEGIKRYEERYRKQQEKFLEKRAKELGFNLVPIT

SEQ ID NO: 384505 - protein, 490 aa, unidentified
MTVVLPNPPPPADAQPSRRRQAGGLPILQPDTAGIDIGATQVYVAVPADRDPEPVRCFRTFTADLHALAAWLQQCGIRAVAMEATGVYWIPTYQILAAAGFTVCLVNPRHFKHVSGRKTDVSDCQWLQHLFSVGILQPSFRPADEICALRTLFRHRQHLVAQAAEQIQLQQKALDQMNLHLHHVLADLAGSTGTRIVEAILAGEREPAVLAQLRDPRVRADAETLQAALTGDWRPEHLFTLKQARESFLHYHQQLTACDAEIEQWLERHPVRVTPPADPALPADPALPADPAPAAAPGETPPPPRRHSHRNAPVLSRLDLGSELAQRFGVEVTAIPGIGVSTASLLYAELGADLHAFPTSAAFCSWLGLCPDPRKSGGQVIRHRTRGLKHRVAGIFRQAAQALARCNNSLGSFYRKIRGRCGGPAAVTATAHKLARIFYHLVTTKEAYDAAVFAWEDARQQQRRLKALERQAKSLGYSLAPLPEKTATPA

SEQ ID NO: 384506 - protein, 417 aa, unidentified
MSLTPEPVVPVIAGRVCADLDWASIDHAVCILDGQGAVLERFFVVHDAAGLKTLVRRLLKAGVEEVGIERSDGPVVDALLQAELAVLVIAPGQLKNLRSRYGSAGNKDDRFDAYVLADVARTDRARLRPLVRDSAATTAMRTTVRARRDLVEHRVAAANQLRAHLQLVFPAAAGLFAAIDSAINLTFLERFTTQTHADWLSPTRLASWLSKSAYSGRTSAAVLHTRLLAAPRGTTGTDAEVHALTTKAYIALLRTLNTQIGALEDNLATQLTSHPDTHIFASLPRVKTLRTARLLAEIGDARGRFPTADSLAALAGVAPSTRQSGKVKTVTFRWGANKQLRDALCDFAGDSRHDNPWAADLYTRAIARGHDHPHAVRILGRAWAHIIWACWHNNLSYDPSQHRALQNILANTTAQAA

SEQ ID NO: 384507 - protein, 424 aa, unidentified
MKNCNKQNEKIELVDEKTLVIGVDVGSYDEYARAFTCRKQELSKKPLHFHNTAEGFKTFKDWAVNIMKANGLEKIIVGMEPTSIYWEALATYCKDNGMILVHVNPAAVHKSKELDDNDPSKNDRKDPKVIAGLVADGRYQFPYMPEEEYAELRELSNLRIRTQESLTQCKNRLARWYSRYFPEFKEAYKNVVSKTAMIIMDMYPLPEDIVTLGVEGILQIWRSKKVRGAGERKARKLYEAARNSIGRKEAASIARIEFKSIKEDLDRYQERLDEIEKKADEILPKIKNVDKLFEIKGVGKATVLTFLSEVGEISRFDNPKEIQKLAGYAIVTNESCKHQGEKRISYRGRKRLRWVLYQTALSVIAKNAEFRQIHVYYTTRTNNPLKGIQSVVAVACKMIRIFYKILTDGVSYDGTKMTQDIVHA

SEQ ID NO: 384508 - protein, 345 aa, unidentified
MSESYAGQQFVGIDLHRRRSVILRMTEGGDPLECVRISNDVEMLSTVMARAGESPEVVLEATYGWYWAVDALRDRGAHVHLAHPLGVKAFEYRRVKNDERDAGDLADLLRMGRLPEAWIAPPATRELRELVRHRAKLVGIRSNCKAQIHAVLAKCGVQVSMTDLFGLAGTQLLDRLELAAPYAARIDSLRRIISILDFEIDAFAGQVRARLALDPGYQAVKTIPGIGPILGAVFVAEVGDVRRFARAEQLTCWAGLTPKHHESDTHVHRGRITKQGSRLVRWAAIESVQILPHTSKVGRIREQVAARRGRNIGVVAAARRQLELVFYALRDHQVRALQGTKPVAA

SEQ ID NO: 384509 - protein, 343 aa, unidentified
MQVTTIGLDLAKHWFQVHGVDASGMVAVRKKLRRSEVLAFFHSLPPCLVGIEACATAHYWARELIALGHEVKLMPPAYVTAYVKRNKYDAADAEAICEAVGRPSMRFVPVKDTEQQSVLLLHRARNLLVRQRTMLVNALRAHMAEFGMIAPQGLRHVELLTRIVAHEQERLPELARQILQLIVDQLHETMARVRAIELRLTQWHRQSQVSRLLATVPGVGIMGASAIAATVADPSLFRSGREFAAWLGMTPRQNSSGGKERLGRTSKRGDKYIRSLLIAGAVAVLRHARNRPTRDGVWVRALLDRKPTKVAAVALANKTARIIWAVMMRGDGYRAKQVLGQPA

SEQ ID NO: 384510 - protein, 338 aa, unidentified
MDVVIERACGMDVHKDNITACIMTPEGKEIQTFSTKTVFLIQLVDWIKLHNCTHVAMESTSVYWKPIVNLLEAEDIEFLVVNAQHMKAVPGRKTDVKDAEWIAKLLRHGLLKASYIPDRNQRELRELVRYRRSIIEERARQHNRIQKVLEGANIKLGSVVSDVMGVSARDMLNAIAEGEEDPEKLANFARRTMKKKKDELMLALKGYINSHQRLMLKTILKHIDFLTEQIEMLDQEVAKRVSFHQEDIDRLDSIPGIATRMAEQILSEIGTDVKNQFPSAAHMCSWAGLVPGQNESAGKRKSAKTKKGNKYLRSALTEAAHSVRGSKNYLGALYRRTA

SEQ ID NO: 384511 - protein, 484 aa, unidentified
MHENHNELFVGVDVCEARFDVAYLDCLGQAVRGDASFPNTPDGIRDIKGSIIACSSLVGKRPGISVGMEATSNFHKGLEQALHAARPRTIKVHVLNPFVLKQFKRMNLKVYKTDKLDAYMIARYLVKMSPKPPVECTLEQETLKQLTRLRRSLQEETTRFKNRLRYLLRIYFPGYKQYLGVKITRRMLVLFSQIASPDKVLEMPISEIAGLKVCHRHRVGDAFAGRLVLLAEKAPQKYLDPGICMVIKWTAARILELLAQTSQLDREISRMLDREFPAHPLRTIPGLGPVSCASILAEIGDINRFATPGEFVGYMGLYPVVWESGQTKVRFQMTIKGNKMLKMTFLVASAAARLYNPAIRQYYDRLRARGKSKKAAGGAIARKLACIVFAILKTGEPWSAQKALAGMEKGSLMAGETGQDIQKGNRQPTGVKPQTVVNATNSTSGLPCPPDNSIQFTTTDGKPQNTTRPAQIKTRRNAYFRITT

SEQ ID NO: 384512 - protein, 395 aa, unidentified
MPSTTVSERVVIAVDPHKASWTAAAVGSALAPLATLRTPVSRQGYRQLRRFAARWPDAEWAIEGATGLGAPLATWLSGDGIEAVDVPAKLATRVRMLSTGHGRKNDDADAVSVGIAALTAPGLRSAAVEDAIITLRAVVEHRDDTVRTRTQTINRLHVLLTGLLPGGAPRQLDADTAARLLRTVRPRATGPATLRRLAAELIGEVRHLDRRIATASTQISDAVTASGTTLTQLRGIGALTAGKIIGRVGDITRFRSPAAFASYTGTAPIEVSSGDVVRHRLSRAGDRQLNYCLHVAAITQLRHDCPGRDYYLRKRACGKGHKEALRCLKRRLSDVVYRQLLRDAQAAQAAGPRGQLGATTNSRAAGSTPHTSSSGKSLPGPAGTDPTTPDEDRLD

SEQ ID NO: 384513 - protein, 373 aa, unidentified
MSEFNKFVGLDVHKSTIAISIASDDGAEVRYFGEIKNTKEALINFANKISQGSLKLSFCYEAGGCGYEVYRHLRNIGHDCMVVAPSLIPKKAGQRVKTDRRDSLNLARLHRAGELTGVWVPDAMNEALRDLTRAREDMKHLQRQAKQRLLAFLLRHGWTYSGKSNWTKDHFNWLETVKFQHAAQQIVFQEYVDTVKYCGKRVESVTQQIEICSRESACWPVIESLMALKGIDLISAATIMAEIGDLTRFDSAPQLMSYLGLVPSEHSSGSSVRRGGITKTGNSHVRRVLVEAAWTYRFPARKTAHTQKRAKVTTEAVQEISWNAQKRLCQRYKELNANGKIKVQTCTAVARELAGFVWAIGQTVPLKPTAYVQ

SEQ ID NO: 384514 - protein, 375 aa, unidentified
MTQEMHVLGIDIAKHVFHAVGMDERGKMVFRKRLSRHDLRPFLAKLPPVLIGLEACGGAHDWARRCRASGHEVQRMAPQCVKPYVKSNKNDSRDAEAIAEAVTRPTRRFVPIKDVDQPDIHALHRVRERLIGERTALGHAVHGLLHAYGMVSPKGVAKCRQAVVGTLASEKDKLTPLSQEMFWKLVEEFAALEKQLAYDQEKLEALATTPPACQRLMTIPGIGLFSATALVAAVSDASAFKNGRQCAAWLGLVPRQHAPGGKERLWGRSKRGASDLRTLLIHGARATLRWVGRQTDRRRQWIRQLSERRGPNRTAVAVAHKHARMVWALLTSPQAYEPATGSSRRRSGRAPALLFAKGGSVMERMDIKHNNGYFT

SEQ ID NO: 384515 - protein, 390 aa, unidentified
MEARTVNNLLPAASHDDAVGCLVAIELSKKSWIVAVNTPLSDKISRHTLKAGDGKELLDLCERIRTRVARETKRRVKIVSCYEAGYDGFWLHRLLEAHGIRNYVIDPASLQVDRRARRAKTDHVDVERLLRSLMAYLRGEPKVWSVVCVPSVAEEDDRRLNRERGRLINERIQHVNRIKGLLAIHGIYDYQPLRRDRMLRLERLRTAADGQTLPPRLKAEILRELQRLELILGMIKTIEAERDAIASPKTETEHTSAKKIQDLAKIKSIGPEFATTLIGEVLYRSFDNRKQLASYVGLTPAHFQSGAMCRDQGISKAGNGKARTVMIELAWLWLRHQPDSPLSVWFRERVGKLKGRIRRITIVAVARKLLIALWRYLETGLVPKGAILKA

SEQ ID NO: 384516 - protein, 428 aa, unidentified
MKYNTQNAKIESITEKTLIVGIDVGSETHYARAFDWRNYEYSKKPLEFSNNEAGFVTFKVWMEELAEKYGKDVVIPGMEPTGHYWFNLGAYLQDNGMKPVHVNPHHVKKSKELDDNNPNKNDRKDPKTIAALVNEGRFSYPYIPTGVYAEIRSLSNLRLQAQEEITRIKNRIARWFSIYFPEIKDVYKNPGAVSGLMILKVAPLPKDIVKLGVDGVNQIWRDAKLRAAGLKRAKNLVTAAEHSIGSQEACDSARIELKILLNDYEIYHQREEELMELIEEKLSEVPYIDKLLEIKGIGMKTVSGFVAEVGDIKRFDNPKQLQKLAGYAIVECSSGKHKGESHISYRGRKRLRYVLYEAAISLIARNTEFKEIHRYYQTRGKNSLKKMQSVIAVACKALRIFYAILTKGVTYDGAKMLQDIKRPQLKVA

SEQ ID NO: 384517 - protein, 417 aa, unidentified
MDVHRDFCEIAVVEADGRVRSAGRVASTLGELELFAGSLAADDVVALEATSGAGLIAEIIEPHVAAVLVANTRKLPQISKAKAKTDRLDARTLARLAGSGFLETVWAPDERTRALRRLCARREALVRARTRAKNEAHAVPARNLCGRPPATDCFGKKGRSWLAELQLPLDERLTLDGCLRQIDFFDTEIAALEAALSVEALGSPEILRLMTVPGVSLHTAAAFMAAVGDIHRFASARQLVGYLGLDPRVRQSGNGEARHGRISKAGSSLARGMLGEAAWSVAQTPGPLRAFFERIRARKGPQVAATATARKLACLFWCLLTRQEDYAYARPSMTRAKVRQLELAAGAPPRKGVRGIAGNKNAKTREAERELARQAESAYRRTIADWTASGPAKTGAGVTPGHASSRPSKGKAARQTL

SEQ ID NO: 384518 - protein, 390 aa, unidentified
MKTLHKRCAGLDVHKAEVVACLRVVNKQNVGHEVRRFPTTTHGLLELAEWLEHAGCTHVAMEATGVYWKPVWHILEGRFALILANAAHVKNVPGRKSDVNDATWIADLLAHGLIRSSFVPPPAIQELRDLTRTRKQLRREIVQHTQRIQAVLEEANVKLCSVITDILGASGRRILTAMIAGETDAQKLAALGSERLGCTRTALVEALTGRVSEHHRFLLDQHVRTIEQLRDAVERLKEVPGLATIATEVVIAEIGPDMSPFPTAGHLLSWAGFVPRLDESAGKRRSTRIKKGAPWLKPVLVQAAWAAARKKDSYFQAQFLRLKARHGAKKAAIAVAASILTTVYHMLRDGTCYQDLGPEYFARRNPAKAAARLANRIRNLGFHVEIKAAA

SEQ ID NO: 384519 - protein, 321 aa, unidentified
MTYVGIDVSKATFVVAYSSAKSSETKTFKNTTKGIREFIRTISPEENHCVLEATGNYSMLLVYLLSKAGFTVSMENPLKIKNFARVMLSVVKTDEIDARLIALYGERMQPAPFKLRSDSLLLLKQKRTVLRQLKKQLTANRNLEGSLKVLPFIDSKCKKVLEKTIKFLEKQIQEMEEELTSLAEIEYKKQMDLLTSIKGIGATLAAALIIATGGFTYFDNAKQLTRYLGLSPTYQQSGTSVNVKGHINRNGDAYLRSQLYIGAMASLRCNTECKACFDRLRSNGKPGKVAIVAVANKLIRQAFAVVTHEKKYIDGYKSVKP

SEQ ID NO: 384520 - protein, 324 aa, unidentified
MSAVVGIDIAKHTFDIATLQVNGKYRTKAKLANDPDGFELLQQWLSKHAEPHAWIVMEATGIYHEALAEWLHKRDYKVCVLNPSQTASYATSQLQRVKTDKVDAKLITEYGLRHQDKLRAWQPEKPSIRRLRALMRRLKDLQELEQMEQNRLDVTSDAKAAESIQSMLAHIRQQIADTLKAIQEHFDDHDDLRGQRDLLKSINGIADKTAALLLAELGDIQRFDSSRAVTAFAGLNPKLQESGKLKGHVCISRMGSALLRCGLYLPAVSSMTHNPAIKAMAERMRDKGKAGKKIVCAAMRKLLCIAYGVLKSGNPFDPKLAVAK

SEQ ID NO: 384521 - protein, 321 aa, unidentified
MVYIGIDISKSSFVAAYPSMNGYRTKTYPNTAAGVRKFIVTLSVAEHHCIMESTGNYGFLLLYLLHQSGIAVSLVNPKQIKHFARMMMTVTKTDEKDACMIAMYGEKMNPPIYKMPSQAIILLKQKKTVICQLRKQLVASKNLRESLIVLPYRDKACVRALDKTIDFLTKQIEQLEAELADIASAEFDKQLKALTSIKGIGITLATALILTTGGFTYFDNAKQLSRFIGICPTYQQSGTSINIKGHINRNGDEHLRSLLYVSSWTALRYNTACRECYLRLKANGKPSKVALIAVANKLVRQAFAIATTDSTYVDGFVSTKK

SEQ ID NO: 384522 - protein, 391 aa, unidentified
MIFVGIDVAKDKHDCFILNSEGTVLADVFTIANNRIGFETLLSRIQSCSQGESKIKVGLEATGHYSYNLLGFLLDSGLATYVINPLHTNLYRKSLSLRKTKTDRIDARTIAMMLMSDVDLKSYSNTAYHNEELKSLTRYRFDKVKERAKLKSSVARLVNILFPELEKLVSSLHIAVVYALLSNYPGASYIANANTEELAETLCTASKGRYTKSKTAEIQVAAGVSIGSKMPAKSMELKHTIALIRELDKEISEVESAIDKITSQVDSPIFTIPGIGRHMGAMILAEVGDFSNFASADKLLAYAGLSPSTYQSGQLQNCYAHMEKRGSRYLRYALFNAAKYVCLWCPTFSAYLEKKRSEGKHYNVAISHAAKKLVRLIFAMQRSGKAFLADY

SEQ ID NO: 384523 - protein, 408 aa, unidentified
MDAILERCAGLDVHQKTVVACVLYGPIDRKPKKAIRTFGTTTNELLALQDWLATYECTHAAMESTGVYWKPVWNVLEDSLELVLGNAQRIRNVPGRKTDVKDAAWIAQLLRCGLIESSFVPPEEIRDLRDLTRYRRKLMGNATAEKNRIHKTLQDANIKLTSFLSDVFGSSGSALLASVANGEKLTYEQVESMVFTKVKHKVPELIEALNGRVRAHHRRMISRHLDHLQYLQNEIEQIENEIDQLLSPYKEEIDLLVTIPGVKEDAAASILAEMGTDMSVFPSEDHLSSWAGVSPGNHESAGIKKNSKSGKGNKGLKTVLCQVAWAAMKKRESRLASFYYRIVKRRGPRKANMALAHLILRMIYPMLSQRVPYKELGWDYLPKKEKSLDYWVRKIQGLGYDVNLKELA

SEQ ID NO: 384524 - protein, 408 aa, unidentified
MRSIALDVHRDFCEVAIKDKDGGEVRSAGRIKTSAEELELFAESLAPDDQVALEATGPALEIKRLIEPHVGRVVIANTRKLRAIAEAKVKTDKVDAGTLCELLAAGFLPEVWGPREELRALRRRLQRRAALVRQRTRAKNELHAVLARNLKGRPPMSDVFGVRGREWLRALDLPADERETVAGCLRQVDFLDREVEGTERALARVALRSAEIRRLMSVPGVNLVSAATFVATVGDVGRFETSRKLVSYVGLDPRVRQSGETPARHGHISKQGSPQARHMLCEAAWIVVRTPGPLRAFYERVRARRGSQIALVATARKLCVLLWHLLTDEQDYAFGRPSLTRHKLRRLELAAGAPSRRGRRSGSAASKREQRHERELSEQFEAAYRRLVEDWQRKPKEKGAGATRGRAS

SEQ ID NO: 384525 - protein, 419 aa, unidentified
MSQSTLSKRLASVKPGTLYVGVDLALDHHVTVVLDERAKQLTRFRFSNDREGYKYFRRRLHKLQEKHGAPEVLVGMEPTNYYWKLLAADLEQREIRYRLVNPFTVKKHREGNQLDRSKDDRRDAFTIAELLRTGKYTETRLLHGAYAELRQLVTVHERLRRDIRRQKTLVVNIAGQLFPELCFAFKDLTCQTALGMLRGHASAHQISKLPLLEFIAQVRATFQGRRLYVSKLKQAHALASTSVGLQDGVHGLQLALKQHIDTLEHFQKQYEETREVLTALFLALPQAQYLLSVHGLGLFTAATILAEIGDPSHYVRINQMVKLAGTQPVPNASGRKSSSKTPMSHKGRPRLRTALYFAVMRLIRLDDSFALEYRRLQTRSKNPLCKMQALGVLMNKLLRILWALMRKQTFYVPSFQCTG

SEQ ID NO: 384526 - protein, 424 aa, unidentified
MKVTYPTCCGVDVHKSFLVATIIKTTGGIEPSYQKKRFSTFNNSILDFKSWLLENECHDVCMESTGKYWVPVFNLLEDQINVTIANPKWVKAVKGNKDDTKDSKWIGDLFRLGLVKSSYIPCRLIRILREYTRYRYKLVSCRSSEKNRYQNALTVCNVALDSVVSDIFGKSSSSIIDYLLEQSGTTINHEEIASKLLKRLKSKEDVVIESIEGYQMTDSQKYRMRLVRAHIDYITAEINDVDKQIESLISSVPDYVKAIRFLTTIPGVKHDSAITIISEIGIDMSQFCNSKRLCCWAGLTPGNNESAGKKKSVRITRAGIYLKPALVQCAHAAVKSDKSPYYKKKYESLVKRRGKKRAIIAIARMILTAIYRMLSTGEVWNPSDLYKIDMPAPLVERQKAKAIKQAKKLLQKEGLLPPDEPLAS

SEQ ID NO: 384527 - protein, 335 aa, unidentified
MYCVGLDVHYRTSTYCILNADGRELKCETIRGHWPKLLDRLAALKEPWTVCFEATCGYGYLHRELSRMASSVIVAHPAQLRLIFRAKRKNDRIDARKLAKLLYLDEVPQVYVPGQEVQSWRELIEHRRRVVSRRASRKNALRSLLRNHGVVAPKGLWSKKGLMWLRQLKMPTAASRLKRNLLLEELAEAERGVRILTQALDKIGRRHPGVALLRTIPGVGPRTAETIVAYIDEPKRFRRGSQVAAYFGLVPCQDASAGVNRLGHITKQGPGTARRYLVEAAWQGVYRSPTIRAYFERILRGKKERRKIALVATAHYLLRCMHAMLVSGELWHEAA

SEQ ID NO: 384528 - protein, 391 aa, unidentified
MSMYFIGIDISKYKHDCCIISAADQKVVSKVTIKNNKAGFEELITTFNSLSSPEDIRIGFESTAHYALNLELFLENSLLTFMEVNPVLISEYKKSKTLRRTKTDSVDCESIARWLMTVEYKPHSKGFYHAYSLKSLTRLRDKLIRQRSFYLIKITNVLDHTFPEFKPFFNERLSKTALYLLENYGSAEKMARMNSASYEKLRSLSRGKFSPQQFLRLKELAANTVGVNNSIFDVELNSLLSLYKSLVKEINTIEKEINKLIEEVHPHYMSVPGIGPLSAAVIYSEYGDISNFTNPGQMLAFAGIEPGINESGTESHGGKMVKRGSSQLRYTLINCCLPLIRFDMTFATYYAKKRGEGKPHRVAITHVAKKLIRVIYALERQDIDFNAQKLR

SEQ ID NO: 384529 - protein, 441 aa, unidentified
MAVVNPHAAGIDVGDTLHAVAVPNDRDEQPVRTFGTMSADLELIVRWLIKCGIVTIAMESTGVYWKPLFNYLIRHGFEVYLVNARHVRNVTGRKTDQSDAQWLQQLHSCGLLKSSYLPDNEQESLRTLVRYRRTLTEESSRFVLRMQKALELMNIKVHTVISDLTGKTGTAIVEAIIRGERNAANFLPLINGRIKADHQVILKSLEGNWRQEQLFTLEENYTCYQFFQERIAKCDRSIEAQLQQYTAIQNDGEIPLTKTNGESEQAPVKKKNKKAPKFDTRSFLTSILGVDVMAIYGLSEVSALEILAETGTDMSKWNNEKHFVSWLNLCPNNKISGGKLINSRLPRKKANAASQAFRFAANSLQRSNHWLGDYFRRMKAKGGNKYAIVATANKLATIYYKMVRNQVSFNPLDLQQYQEKRQQAKIAYLEKKLKQLKKEAA

SEQ ID NO: 384530 - protein, 398 aa, unidentified
MHQAKISACAVAEQADGKVTVETREFGGFKRDRRALAEWAKSFGPEVVVMESTGIYWKSPYAALESVGIAAWVVNARHVKTVPGRKTDVADAQWLATLARAGLLRASFIPQADIRYLRLIARQRQKLGGMLSSEKNRLHKLLADAGIRLNVVVSDIHGQAARAMVKALIEGQTIAQILDLAGRLRASRADLFEALQPEELSGAHLFVLTEIMAHIEELEARMGRFEQALLAGLSAWQPQLILLQTIPGIDIMGAAMLLVEISADMHSFGSAERLASWVGICPGNNESAGKRKSGKTRKGNAWVRRLLCEFAQAAARSRCALKDKFAALSIRKGHKKSIVALAHKMLRIVFAVLKSSQPYHDRAVDYEALSVQRNAPRWMKMLIKHGFLEAGASPVTAA

SEQ ID NO: 384531 - protein, 406 aa, unidentified
MMNAVGIDVSKSKSTVTIRRPGDEVILPPRDVRHTRSSIDALINKIKSLEGETKVCMECTGRYYEPMATWLSDAGLFVSTVNPVLIKDFGDDSLRAPKTDKADSKKIARYTLDRWMKLKQYGLMDETRNQLKTMNRQFGFYMDQKTAMKNNLIALLDQTFPGANDFFDSPARSDGSQKWVDFVYTYWHVDCVAGRTLDAFTEHYRNWCSRKGYNFSVAKAKTIYDVSKDLIAVFPKDDVTKMIIHQAVDLLNAASKTVETLRAKMDETASTLPEYPIVMDMNGVGPTLGPQLMAEIGDVMRFEKRGSLTAFAGVDPGKNDSGQHVQKSVHTSKKGSPHLRKTLFQIMDGLIQRSPVGDAVYDFMDKKRAQGKPYYVYMTAGANKFLRIYYGRVKEYLESLENNESE

SEQ ID NO: 384532 - protein, 386 aa, unidentified
MQAPSVSTPITDPISTIFVAIELSQKTWLVTMHSPDRDKISRHKVQGGDHASLLALIDRVRDRAVRRLGAVPAVVSCYEAGYDGFWLHRLLMTAGITNYVFDPSSIAVDQRARRVKTDRIDGEKILRTLMAYLRGEPRVVRIVRVPTPEQEDARRDTREHDRLTKEQTAHTSRIKALLRLHGFAVGHPRRRDWLTWLAAQRDWQGQGVPPRVLSEIENEHARLMLVRKQLDALARTPGAADPAPAVAEMVRRSELLQRLKSLGPAFAKTLTQEVFYKDFRNRREVASYFGLAPSPWQSGGTDRDQGISKAGNPRARCSAVELSWLWLRHQPGSELSQWFRQRTLNAGTRIRRIAIVALARKLMVALWRYLTTGLVPAGAVLKSVEA

SEQ ID NO: 384533 - protein, 351 aa, unidentified
MIMVGCDFHTRFQQVAMLDPTTGEVIERRLEHETGEARRFYASLCEPARVGIEATVNAQWFEKVLREYHHELWVGDAAEIRAMRVRKQKTDSRDALHILDLLLTDRFPRIWIPSPAERDVRQLVRHRHKLVRLRTSVMNQLHALAIGQGLCRKQKLWSKVGRLELEALVLDRWASRRRHELLQLLDQLNPWIADLDRAVMQEVRSRPEALHLMREPGVGPVTALAFVLTIGPVGRFQRSKQVVSYLGLNPSEESSGGRQRLGSISKQGNSMLRHLLVEAAQAASKFDPELRRDYQRLKFRRGNSGVAKVAIARKLAVRLYWKLREAAQPNTAARMQGSPANPVADESLSPK

SEQ ID NO: 384534 - protein, 403 aa, unidentified
METFAGIDWASEEHALCVVDEGGVTLEGEMHTHEETGLRELIARMRALGVVRVAIERPDGLLVDRLLEAGFTVLPIHPNKLKATRPRYEASGGKSDGFDAFCLAELARTDSHRHRALCPDSDETKALRALTRTREDLVGARVRLANELRAQLDAFWPGAARIFADVDSAIALAFLERYPAPVDARGLGEKRLAGFLARNGYCRRRSPAELLERLRSAPEGRAGALEAEARRGAVLGLVAALRPIVAQIRDLTSQIAHAVRSHSDGEVFLPLFKDPKSVITAARLVAEIGDDRSRYPSAEVLAADAGMAPVARESGKRKVAGFRWACDKRLRDAVSCLADSTRHHHPWARSVYLGARARGLDHPHAIRVLGRAWLRVLWRCWQDEVPYEPAKHGNLRRLQPTGG

SEQ ID NO: 384535 - protein, 391 aa, unidentified
MVNNSLIGKAGVGEASVASRADTSRRREFGRVQASEAVTEREPRRTRETSPNSRLNRRRPARTASSHLQVREITMSEPVYVGIDVAKETFHVATCPNILKTCLPNTPEGHRQLCQTLKNQTIALIVLEATGGYERPIAAELLNVSLPVVVVNPRQVRDFANGMGQYAKTDPIDAQLLATFAQIVKPASKTHSTPQTDELSEFVRRRRQLNDLRTQESNRLLMIHHPKVKKSIQKMVKTLDFQINEIDRLIREYIDTDDDFKNKDHILQSTPGVGPQTSAMLIANLPELGQLNRQEIAALAGLAPWDRSSGKYDGKAHIWGGRKDVRSVLYMAAFTACRFNPVIHALAHRLKQKGKAYKVILTACMRKLLIILNTMVRNQTLWSPKISIKNP

SEQ ID NO: 384536 - protein, 345 aa, unidentified
MDEAYDGRQVVGMDLHRRRSVLVRMSMDGRKLETVRITNSPGALRAVLARCGRRPLVVLEATYGWYWAADVLAAAGAEVRLAHPLGVRAFSYRRVKNDERDAADLADLLRAGLLPEAWIAPPEVRALREVVRYRHKLVGQRTSCKDQVHAVLAKLGVPVTHSDVFGTGGGLWLDQLVLPEPYAAKVASLRALIGVLDGEIARLGQRAAGVLGADPGYAALRELPGIGPVLAAVIIAEIGDVTRFRRAGQLCSWAGLTPRHYESDTKVIRGHVSKQGSKMLRWALVEAIQHQPAGTRPRQARDAIIARRGKEARNIAKTAAARVLLTQVFYALRDGHVRSAGRPAA

SEQ ID NO: 384537 - protein, 407 aa, unidentified
MGIDIAKRTHYACIVDDRGRVLQKSFSVPQAGNGFELFYQRVLAAMKEHEKSEVIVGIEPTGHYWLNLAYFLEERGIPLVMVNPMHVKRSKELDDNLPTKHDRKDALVIARLVKDGRFSYPRILKGMEAELRVGSTFRSKLTEELGAVKNMIIRWLDRYFPEFVQVFPSFGKMALAALECTPFPSDLYQKQPDEVLSLFRKVEGLKSPQRPKTVRLIEVAAGSIGVTEGLEMARIEIATLVRRYHQLEQDIESITGQLIELVKISAEYEWLSTVPGLGDTTIVDLLAGIGSFSHYQDPRQLIKLAGLTLRENSSGLHKGQKRISKRGRRKLRALLFRVMMPMIRHNEAFRKLHEYYTNRQVNPLRKKQSIVVLCGKLLKVLHGISTKHKPFDAQRMMRDIPGLAEAE

SEQ ID NO: 384538 - protein, 334 aa, unidentified
MTDQTSKAWIGIDVSKDKLDACLLRENEKTSNLIVENNPKGFAKLLAWVKRNVPQASLHFALEATGAYGNAIAEFLVEAEEFVSVLNPAPVKYAGMSYGFTNRTDKTASQVIALFCKKENPALWRMATTEMRLLVALVRRTEAIQGQLTQEKNRLSNPGLPKEILVSLKKHVRFLEKERLLLEKQIGAHIKNTPSLQADKELLVSIPGIGDTTAHLLLAELPDVNEFEDAAAAAAYAGLAPSERSSGSSVKGKTHLSKRGKSQIRHGLYMPALAAIRCNPFVKALYERLLKSGHCRMSAVGAAMRKLIMLAYGVLKTRTKFDKDWLLVKTVVEA

SEQ ID NO: 384539 - protein, 414 aa, unidentified
MGSFIRAQPGTIIKTSSGIEPSYQKRRFSTFNNSILEFKKWLLENECLYVCMESTGKYWIPVFNILEDEINVTIANPKWVKAVKGNKDDTKDSKWIGDLFRLGLVRGSYIPCKKIRILREFTRYRYKLVSCRSSEKNRYQNALTVCNVALDSVVSDIFGKSSTSIIDYLLEQSGTSIDHEVIASKLLKRLKAKEDAVIESIEGYQMTDSQKYRMHLVRAHMDYITAAINDVDSEIESLIASDPDYENAVELLCTIPGVKYDSAITIISEIGIDMSQFCSSKRLCCWAGLTPGSNESAGKKKSVRITRAGVYLKPALVQCAHAAVKSDKSPYYKKKYESLVKRRGKKRAIIAIARMILTAIYQMLSTGEQWNPSDLYKVDMPEALLEKQKQKAIKQAQKLLIREGLLPPTEPIAS

SEQ ID NO: 384540 - protein, 367 aa, unidentified
MSSMHGTVAGIDVHKKMLVVVILRSANPEVDYATGRFGTTHYALEQLAAFLRQHGVTEVAMESTAQYWRGVWMALEGEFQLTLAQARSTRAVRGRKRDLADARRIARRLLSDDLTVSYVPPPEQREWRLLSRARVAMQESVSRLHSQIEVLLEQAQIKLSSVVSDILGLSGRRILHAIVDGISDPEQLAALAHHRLRASKEELSDALWGRMTSSQRLVLKLYLEQIEQTEKHMAELEKSLAAALSAEQDTIVRLCGHPGISTLSAQQIIAEVGPHAAAFASAGKLASWVGICPGSHESAGVSTSDRCPKGNRMLRRVLSQVAWAAIAAKGSEPQRRYRRWLSQHFDPSRATWAVAPLHIAGHLAHAP

SEQ ID NO: 384541 - protein, 367 aa, unidentified
MTVTIVDAARPATGGADTHLDLSIAPRPVTGGVDTHLDLNVAAALDPVGGLLGVAEFPATLAGHRRLLGWLAGFGPVTRAGVEGTGSYGAGLARFLRGAGVEVVEVDRPNRQARRRSGKSDPLDAIEAARAALSGRARGAAKSRDGNVEAIRALVVAKRSARSAKIQALNQIRHLSFTAPDELRQQLAGVSRQQLAARAAALRPATREGADPVIAATKTALRILGRRVLALDEEKARIDALLTTLVTKTAPQLLAVFGVGVDTAAALLVTAGDNPGRLRSEAAWAHLCGTAPIPASSGKVTRYRLNRGGDRQANRALWGIVITRLGNDPRTRAYMARRLGEGRSKPEVIRILKRYVAREIYHRLPRP

SEQ ID NO: 384542 - protein, 340 aa, unidentified
MEELHIIGVDLAKRVFQVHGADIRGRVQFRKKLSRPQFMKFLSEIPRCTIAMEACSTAHHWGREAGELGHTVRLIPPVYVKPFVKRHKNDAVDAEAIVEAALRPYMSFVAVKTKEQQAQAALFRSRDLYLRQRTQLINAMHGHLAEYGVLLPSSRASVARMVAASREHSESLPAPVFEMAMLMAENIEELTSKISTIDRALKKMAQASPEARRLRTMPGVGPITAVAIQAFCPAAKDFDRGRGFAAWLGLVPRQNSTGGKDRFGRITKMGQRDVRRLLVTGAMSVISASERKGRCDDPWLENMLRKKPRLVAAVALANRMARQLWAMMVTEKNYEIRAAA

SEQ ID NO: 384543 - protein, 408 aa, unidentified
MNPLYVGIDVSSKSNVVYFMLPDGNKHSSFSVANSLDGSTQLVKRILSTMESKSLDAVLIGLESTSVYGENLVYFLREDASLASFNRKIHVLNPKQVKKFKDAYNDLPKNDYVDSFVIADCLRFGRINKEVYIGDYHYKALQNLTRARYFTVCNLTKEKQRFINVLFKKYSTMTQEKVFSDTFSTTALAVYDEFESAEALAYMDLQELTAFIIEKGKNRFPDPDAVAKAIQKAARSSYRLPKTVNDSVNQVLSISITSIKALEAQIKEFDKAISAQMELLSNVLISIPGIGPVYSAGIMAEIGDINRFDNQAQLAKYAGLAWTQYQSGNFEAENTRLIKSGNRFLKYYLCEAAFSLVRCDKEYKAFYHQKYKEVNRYQHKRALALTARKFVRLVFTLLKDNRLYRPAE

SEQ ID NO: 384544 - protein, 421 aa, unidentified
MPNNLIAAIDIGSVNNSVAFMDTNGDVITELKKLSNNLPGINKLWDEATKLLREYNLDCVDFVMESTGPYWFGPYWWLKDKCSPFKPSSVTALNSQIVSGFKGKFSHKKQKTDPKDAKAVGNRFRFGQFDPVYVPQGNLLKLRLYTRYRLHVVQSLVAAKSFFLCYLFLKMSEYSRYCKKKGGDDKLFANTFGATSSLVITNYPSAEELANAPFDELSSLISSASKGLIKDPVSRAAIAKGMASDCYPLPEEAKEAVSFILNQTLSLTSFLEERLKIVDDKIGPVLCEIDDPVKTIPGIGTVFAAGIIAEVGDLSRFKAHPHLASYLGIIPSMDDTGQFQSTLNHMTKTGNSYGRYYFIEAANSLRRNNPTFKDYFQRKLAENPKKFKRALGLTARKLIRVYFAIKTKNQQFKTSPMSLEA

SEQ ID NO: 384545 - protein, 412 aa, unidentified
MHVLYVRCSGLDLHKKTVVACVIISHPNGKVDKSIRIFPTTTTGLLALCAWLESLQVRQVAMESTGIYWRPLYNLLEDRFELILANAHEIKALPGRKTDVKDCEWIAELLRHGLIRPSFIPAKGVRTVRDLMRYRKSLVYQRTQQINRLHKVLETANIKLTSVVTDVLGKSGRSMLQALMEGESDPQTLAKLARGSLRSKLPQLQEALEGRVEAHHRLLLQQIWSHLHFLEAAMEQLLLDIEGHMAPFEEVLAILRTHPGVQRLAAMSFVAEVGVDLSPFPTANHFASWIGVCPGNHASAGKRKHGHTTGGNVYLRALLAEIVWCISHTKDNYLSAQYHRLARRIGKAKAVVAVSHTVAVNFYHMITKKQPYRELGADYFDRVDRDRLTKQTVKRLEALGYEVSLTPKEVRA

SEQ ID NO: 384546 - protein, 337 aa, unidentified
MNVTLIGIDLAKSVFQVCAVNQAGKPVFNRQVKRQRLLALLLGYPKAIVAMEACSGSNYWGRTLQRHGMDVRLIPPQHVKPFVKGNKNDRNDAFAITEAAQRPHLRCVTPRTLAQTDLIQTHRVRERQVNQRTALTNQIRGLLNEYGIVLPQGRRRLQSALPGLLEDPDNELTPEARVLLEELLVEWHQRDAAIDRLDRRIDRQAKGSDAAQRLMTVKGIAEKTATALVAHAGDGRAYRNGRELAANLGLVPREHSSGGKQNLGGLTRRGNTYLRRMLIQGAWSVLRNAHRNHDRLSCWARQVAERRGKHKAVGAIANKMARISWALMYYQQSYRSA

SEQ ID NO: 384547 - protein, 343 aa, unidentified
MKKLMAGIDLHSNNLVIGMVDSAGQRVGHRKLDCDLKAVLRFLAPYKERLEKVAVESTYNWYWLVDGLSAANYSVALANPAKIEQYSGLKHGDDTSDAYFLAELLRLGILPTGYIYDAQLRPVRDLLRRRMSLVHQRTALMLSFKSLFTRTTGQEMSLSRLKGLNEAEVKELYQHPANDLIAQLQHQHIAALTKSIDHIEKAVLKVARELPNYRRLTTLPGVGVILGLTIAMETGPISRFGGPGDYASYGRTVDARRLSNEKKKGDNNQKCGNKYLAWAWVEAANFAKRYEEACRKWFDRKARKKGTIIATKALACKLAKAGWYVMAKDCEYEAERMFPELKK

SEQ ID NO: 384548 - protein, 351 aa, unidentified
MKKIAYLGIDVHARHCVLGHMDFDGTFIGNKTFTTCERNIIEALKAVKARDKYLALEESNLAYWTAQVAKPYVTEVISSDPKENALIFRSSNKRDKVDTKKLCRLLRLGELKRVYHPEDDDRALFKAAVQHYMDFRDQQVVLKNKIKAKYRHWGIIDVAGEAVYGIKKRHDYLKRVKHLHVRSQLRRLYFLMDQTESMQKRALKSMKQLGRKYPEIKEFKEIPGIGEILAHTFDAFIQTPDRFANKRQLWRYCRLGITDRSSDGKPLGFKRLDRSGVSELKSLTYHAWLSAMKSDNEVKRFYSQSFRRTVSRVHARLNTQRKIIAVMYGMWKRGQAYRPQLFLDSPQTGVV

SEQ ID NO: 384549 - protein, 345 aa, unidentified
MDHIGIDLGGRESQVCIRTSDGVLTYEGRVATTSLPEFLRRAAGRVVLETCAEAFAIADAALDLGHEVRVVPATLVRVLGVGARGLKTDRRDAQALSEASCRIDLPSVHVPSRWSREVKSMCGMRESLVQARTRLVNTIRGWLRGQLKGSGLRLGGPVAIPKKMRAYFESQQLEVPAFVLRQLETIDLLSEQIKEANQELEALAKGSDLCQRLMTVPGVGPLTSLRFVSAIDRIDRFKNAHQLESYLGLTPGEDSSSDRRRITSITKAGNASARWILVQAAWCALRTRARHPMCEWAREVARRRGTFKAIAALARKIAGILYALWRDGTRYEPFYRLEPTVAASA

SEQ ID NO: 384550 - protein, 337 aa, unidentified
MNNYIGIDVAKATLQIYIPKNDLAIEIINSERGLKILYSKLKKQYKKEIGDIVFVYESTGSYSTYLEQFSESKSIKCFKVGAYQSASFSKVVKNRNKTDIVDARMLSKMHIIANDEDIKIPSRDVKAHQIRSYIKYYQSLIKEEIRSKNYLEAATFNLEDKFVLNQVKKKIKNIQTEQVDIINKTMKIINSNEKYKKAYENITSIKGVGEKSGIILLYLFLRYPNASRQHITALCGLDPIQRSSGTSVQHKERISKQGLSLVRAILFMPTMTAILYNREMKLIYDRLVDRGKPKSLAQIAVMRKIILLAHSLYKNDERYDEDRYLNFTQIKVDEDME

SEQ ID NO: 384551 - protein, 352 aa, unidentified
MTAKKRQVTGGVDTHGKTHHAAAVDQAGRVLGDQQFPATAAGYQQLLLWLRAFGRVVKVGVEGTGAYGAGLARHLSASGITVVEIDRPDRKTRRSKGKSDPIDALAAARTALSGQATGVPKTRTGPVEAIRVLRVARRGAVKARTAALNQLHGLITSAPDALREDLAGLTGAALVQRCVDLRVEESTLTDPVHATNAALAAIATRITALNAEIAHADRRLRPAVARTAPALSRLFGAGPEVAGQLLTTAGDNPDRLRSEAALAHLCGAAPIPASSGRTDRHRLNRGGDRAANNALHTIVLSRMRYDPRTRAYVDKRTKQGLGKKEIMRCLKRYVIREVHTALLADFAALHTP

SEQ ID NO: 384552 - protein, 353 aa, unidentified
MDKITRIGVDLAKNIIQVHGVDSMERVVVRKAISRQKFLEWFANLAPCLVAMEACSAAHYWARKLRALGHEVRLIAPQFAVPYRKGGKHVKNDRLDAEAICEAAGRPHMRFVAVKTADQQNVLVLHRMRDGFVEERTALVNRLRGELVEFGVFLPQGIDAFRAHFVGALEDGATELNGVARTALARGWEHVQALDQQIAWCDAQVATHVKHDSDAQRVMAVIGIGPLTASAAVATVGDARLFRNGRQFAAWLGTVPKQKSSGGKTRLGRITKQGNTYLRTLLFQGARSAVTSAHRRTDRLSRWIVQLQTRVGWYRTLVAVANKHARILWAILAKGEHFDPSHVSNPPTPGQSR

SEQ ID NO: 384553 - protein, 420 aa, unidentified
MPNIEIGVDFMVKENFIYVGIDLHKETHTAVMIDCYNQKLGEITFPNRPADFPKLVIKVKKCNTDAKEVVYGLENAYGYGRPLAVWLIDKGYFVKDVNTAISHRQAKHRGAMYRKSDSDDAEAIALATLNMLDKLPDACPNDAYWSLGQLVHRRDNIMKQRTRLVNQLHEQLCIAYPSYKQFFNDISRPTALYFWEHYPSRKYLKGKSVEDLRTELVPVSHNRCSTKNCEKILDAVASDKVKNNAYQDARDMVTLSIVSDLQHYDSQLAEVDKMLEQMYKMLGCTLTTIPGVNVITAVKILAEIGDIKRFSNANKLAQFAGIAPLHLSSSGKGKNVATKQGNRRLQATIYFLAIQMVQVSSKGTPRNSVVRAYYEKRKAEGKTSQQALICISRRLISSIYGMLKHGTEYRMPVVESAGEK

SEQ ID NO: 384554 - protein, 454 aa, unidentified
MNNNGFLGLDISKGYADLYVINSDKIPVEAAFRLYDVQDGHQRIEELIDKWFEKQSFETLYCGVESTGGYENNWINLLQELAIKRPLKIARLNAKGVKSLSDAALKRTITDSVSAENIAMYLVDFRHKIKWIDDPQSFKKYTDGRRHNTFIRMLKKQRIQLSNQLEKLLYQELSPILTYCRHGAPGWLLNLLLKHSSVAAINKAGVKGLSKIKGITTEKAEAILNKTRESKHCTSAHISSVIKGTIKQMLHLDETIKEEKNKLIAEYSDSEEVKLLTSISGLGNQSAVEILIEIENIHRFEDAKKLSAYFGLHPVFKQSGDGKWGNHMSKKGRSEIRAVLFMSSLTAIRYSDLFKNIYSNARAKGKNHFNAMGVVMHKLLRVIYGVLKNKIAFSQAIDAKNVENAELKQQAEKEKSKEQKREQVQKLERYNRAELDHSPISKRHAKKRKVLQVT

SEQ ID NO: 384555 - protein, 325 aa, unidentified
METKTLCCGIDVSHATLDVCYQNNLGELFHLQVGNNIKGFAKIIEHTGINYHFVMEATGVYYIRFAFYLHQHGCKLSVVNAISIKRYIQMHLERNKSDKKDAQWICRYAIEQRPPYWQMPDSAYFECKQLYNTIREYTEQIKCFNNQLHSLRLLPVPSKDTIKSLEKVIVCMEKEIKQLEQKLQLLLEQWQPEQLKNVSSIKGIGKRAAAMLIVFTQGFKHTANHRQLISFAGLAPTQYSSGTSIQGKPRIYKRGGKNLRNVLYMCSMNAMKTNVACKILYERLRANGKTGKQALIAVCNKLLKQVFAVVKNNALYQPNYCSAKP

SEQ ID NO: 384556 - protein, 343 aa, unidentified
MQTIKTIGFDIAKSVLQVHGVDAAGEVVICRQLKRRSVLAFFQKLPPCLVGIEACASSHYWSRELQALGHTVRLMPPAYVKPYVKRQKNDAADAEAICEAVTRANMRFVPTKTPEQQSCLMLHRTRHLFIRQQTAVINSIRAHLAEFGIVAPVGRKGVTELLRVVADPNDRRVPEVARACLAALGTQLLSLKEQILEFDRMIMAWHRANQTSKRLHYIPGVGPMLATALVASVADPKTFRSARNFSAWIGLVPKQHSSGGKDRLGSISKQGDRYLRSLFVAGALAVIRYAKIHGTKHRPWLTALLGRRPTKVAAIALANKIARMAWAMMAKGERYKQPVALAA

SEQ ID NO: 384557 - protein, 502 aa, unidentified
MTEYSTCTVGIDLGDRKSVACIYSPGVVVDWFEFAMTPDGVRAAFAGKGYRTVAMEAGAQSGWVTRLLQDLGYKRLVASPRKLKAISANERKSDRNDALILAKLVTADASLLHPIEHRSQARELGMTVLRSRDTLVRTRTKLISTVRAMCKGVGARLKSGGADGFASREAEVPEVLAPATAGLFAALRVLNEQIAVYDTQLEVILETQFPEGRLVRQVRGVGPVTALAFVLTIEDPKRFPDGRTAAAYLGLVPRRDQSGAVDKQLGISKTGNTFVRRLLTQCAQYILGPLGHDCDLRRWGHTLMERGGKSAKKRAITATARKLVVLLFRLWKRDEVWIPLYNADSSSAPPADADRPKPAVLADCACAFDDTGDRGRRRIDCSATDGSDPSMHQPQAGQPKSANRSVGNGTTSSAKKAPKKNPARHAGLPAPHPATANGDRGGPKPGDGVAPSPGPTTPSSAAGSHGGPQNKDRGPVRPATCVGPQPPRGTLTPRSEKDHPHP

SEQ ID NO: 384558 - protein, 387 aa, unidentified
MKKIARFVGLDVHADTIAVAVAEADGGEVRSLGVVPNRPECVQRLIRKTLKLTPEASKSAAVCYEAGPCGYVLYWQLVGLGVECMVVAPTLIPVKAGDRVKTDRRDAEKLARLFRAGELTAAWVPDAEHEALRDLVRAREAAKKDQLRARHRLQKFLLRRGQRPPTDVKPWTQRHLQWAKALRMPHPAQEEVRLDYVNEVEHAVARIERLEKAIDEAIARAPAQIQAVVHALQALRGIKRISAATIAAEAGSISRFERPKQLMGYAGITSAEDSSGTRIHRGAITKAGNSHLRRIVGEAAWAYRHCPGLSKDLRKRQEGLSPEICEIAMKAQHRLHKRYAHLMAKGKEKQKVVTAIGRELLGFVWDIGRRAEAEVAEKASRTKNTTM

SEQ ID NO: 384559 - protein, 342 aa, unidentified
MKIMTGIDLHSNNALCGLMDENGKRILHKKLPCDLPAILKVLEPYKTQIAQVAVESTYNWYWLVDGLEDHGYPVVLANPARMHQYDGLKHTDDVSDAYFLCELMRLGILPTSHLYHRQTRPVRDLLRRRMLLVQLRTSLILSFKSLNERTLGQRVPLARVKAMSIEEAQARFTAPADQLLSGEQIGLMGHLQESITKIEKHIVEATKEWKIFQRVQDVPGIGKILGLTIALETGDPQRFADAGHFASYCRCVKSIRQSNSKKKGENNRKCGNRYLAWAYVEAAHFACQHDAPCRRYYDRKKQKTNPVIATKALACKLAKASWHVMHDDAPYDARRVFGGGPA

SEQ ID NO: 384560 - protein, 339 aa, unidentified
MALYTGFDLHSTNSYVGIIDEDGGRVWKKKLSNDPNLISAILKPFKKDIEGIVVESTYNWYWLVDLLMEEGYRVHLANPSKIQQYSGLKHGDDEYDSFWLAEMLRLKILPEGFIYPREQRPLRDVLRKRGHLVRLRTSLIVSLQNILARNTGTKMKTNHIKVLKEDRVTPLLASDDDLSLAGSVSKDAIDSLTKQIKAIEVALEKKINLQRPYDLLLSLPGVGRVLGLTIMLETGPINRFADVGNYVSYCRKVPAGRFSNDKKKGTNNRKNGNKYLSWAFAEAGELARRFDPEARAYYDRKRKKTNAPIAHSALSNKLARAAYYVMRDGVPFMPKKAFG

SEQ ID NO: 384561 - protein, 376 aa, unidentified
MNRIIYVGMDVHKDTYSLCSFDSKQSYVFSELTVKAETSSVLSYLKNVEKHFVNDDVLFVCGYEAGPTGFSLCRDLQKKDISCVVMAPSSLATSPDAKKRKTDKIDARQFALHLAHNSYKAVHVITPEMEAIKELTRTRASALKAQKRAKQNLLSFLLRKGMVYPFGGRARYWTQQFFSWLKTLEFSNPVERYSFEEYLSEVNHQISRIKRLDDKIAELAEDPLIKDDVKKLCCFSGISTLTAVSFISEIGDFNRFQKAVYFSNYLGLCPGIHKSGLSSQSLGITKTGNKNLRRLLIESAQSMSHSLICGKKSLRLLARQKDMDPLIVAYADKAVERIKRKRSSMIFRGVHINKATTAAAREMACFIWGMMTNNIT

SEQ ID NO: 384562 - protein, 383 aa, unidentified
MALSIVETRAITGGAGTHADVHVAAALDPVGGLLGVREFPASPAGYAGLLGWPGGFGTVCLVGIEGTGSYGAGLSRHVTTAGVRVVEVDRSDRQDRRRQGKSDPLDAVSAARAAQSGRARGAPKGRDGAVEAIRALMVARRSAASERTQTINQARALIVTGPDDVRARFTGHTVAALVAGLASLRPRPGSTVGYATRIALRELGRRAEFLDAQLERLDELIVALVTAHAPGLLALYGVGPHTAALLLIAAGDHPERLRSEAAWAHMCAAAPIPASSGKTVRHRLNPGGNRQANHALWRIVFTRMSSHPATRAYVERRTAEGKSKAEIIRCLKRYVAREVYPHLRAPRADAPSRGRPGPLIGCRILAGLQTIRRPSPGHLTCWA

SEQ ID NO: 384563 - protein, 413 aa, unidentified
MDVFCGIDWAEDHHDIALADRDGKLLARRRISDDAAGLALLLGLLTEHGDSADDPVPVAIETPRGLLTACLRATGRKVYPINPMAVARYRDRHSAAGRKSDHGDAIVLANILRTDRHVHRPLPADTELAQAIAVLARAQQDAVWARTGAHNKLRSHLREYYPAFLAAFADARGGITRPQARAILAVAPAPAAGAALTLTQLRALLRKAGRRRSIDAEAARLRETLRAPQMRQLPLVEDAMGRQALALLRQLDAACAAADDLEQAVIESFNQHPDAGIITSFPGLGPLTGARVLAETGDDRSRFADAKGLKAYAGAAPITRASGKTTAVLHRRVKNQRLAATGYIWAFAALTASPGARAHYDRRRNDGDRHAAAQRNLFGRLLGCLHHCLATRQAYDEKTAFPAPTPTANANAA

SEQ ID NO: 384564 - protein, 320 aa, unidentified
MMAQNDRVVVGIDVAKDKVDACIRSLSLRQTCPSTAQGRRKLVTWLGKHQVNKAVMEASGGYERVWARVLREAGIEVRIVDPKRVRGFALSAGRLAKNDTIDAEMIAWFAETFSEAPSQTHDAAHEELQTLVKARLGLIDFRMRLVSQSEHAARGLVQKAHARVLKSLASEIARLEAAICAKIKSMPDFAERAEIIQSVPGFAATSSANLVAGMPELGQVSNEIAAALIGVAPYDDDSGKRRGERHIKGGRRWVRNAIYMPCVGAATLNNPVLKAYYQRLIAKGKKPKVAIIACMRKLIVILNTMIARRQKWDPGRYALS

SEQ ID NO: 384565 - protein, 426 aa, unidentified
MSKILNLGIDISLQTATCSFLSQDGRFHGKVFDIENNIPGFETLKKKIADLCLLEGYTDVNIGLEASSNYGFHLLSYFSTVYLNRVKLHLYQINAKYINRFKKAFSEKEHTDILDARAIAEYLRFGRLPAEFKPDSPYLPLQRLVRYRYHLVKTIEREKKLYLANLFLKFPGWVQTKPVKSLGKTALDLTTEFTLDELVEMPLEELALFIAKAGKNRCPDPTSIAESIKKAARESYRIRPELSSSVTFILACLNRTIVALKASLKEVDKAILEESKGFINPLISIKGIGNVYATGILACVGDVKRFPSHNQLARLAGLVWKRKQSGKFESDETRLVRECDKYLRYYLVEAANSLRVHNEEYQIYYQKKYQEVPDHKHKRALVLSARKLVRLVFALLSNNQLYDPLRDSQSPGLDELNCQRAVRQVP

SEQ ID NO: 384566 - protein, 428 aa, unidentified
MNCNTQNAKIASITEKTLIVGIDVGSETHYARAFDWRNYEYTKKPLEFSNTEAGFQTFKAWMEDMAEKHGKTAVIPGMEPTGHYWFALGKFLQDNGMKPVHVNPHHVKKSKELDDNNPNKNDRKDPKTIAALVNEGRFSYPYIPTGIYAEIRSLSNLRFQTQEELTRIKNRLARWFAIYFPEYKEVYGDLKAVSGRMVLKKAPLPEDIRKLGAEGVNQIWRDAKLRGAGMKRAKALVSAAEHSVGSKEAPEAARIELRNLLNDMDVYVLRLEELLHGIEEKLKEISYVDKLMGIKGIGLATVSGFIAEVGDIGRFDNPKQLQKLAGYAIVSNDSGKHNGESRISCRGRKRLRYVLYEAAISLIGKNREFKEIHEYYRTREKNPLKKMQSVIAVACKIIRVFYTILTKGVEYDGNKLLGDIRRPQVQAA

SEQ ID NO: 384567 - protein, 455 aa, unidentified
MTRTTTCDRPELKPVNVGAAAIDIGSTMHMAAVDPACADTPVRAFGTFTQDLHELADWFKVCGVTSVAMESTGVYWIPAYEILEQHGFEVILVNARYAKNVPGRKTDVSDAAWLCQLHSYGLLRGSFRPDAEIATLRAYLRQRERLVEYAAAHIQHMQKALMEMNLQLHHVVSDITGATGMRIIRAIVAGERNPDVLATYRDVRCHSSIETIRAALVGNDRDEHVFALTQSLELYDTYQAKMLDCDRKLESLITALTNKGAKPVGKLFGPRVKTKQVNTPSFDVRAALYGVLGVDLTEIHGLGPSLALKLIGECGTDLRAWPSAKHFTSWLCLAPGNKISGGKVLSSRTRRSSSRAAALLRLAATSIGRSDTALGAFYRRLSSRVGKAKAVTATARKIAVHFYNTLRHGMTYRDPGADHYEEQYRSRVLANLKRRAKSLGFVLQAVPCDAEVAVS

SEQ ID NO: 384568 - protein, 419 aa, unidentified
MTKKVDSTIVSIIHPVCCGLDVHKKKISACLITVNDLGEEQFEILEFGTFTEELIHLRDWLTMHDCPIVAMESTGVYWRPVHNVLEGFMEVILVNARHIKNVPGRKTDISDSKWLAGLLRHGLLRGSFIPPKDVRQWRELTRLRRVYTESLADNKRRVHKLFETANIKIDSVASDLFGMTGRNLISQLCAKESELSMKDVQMSAKGRLKPKVKELYSSVQGFFEDHHRFQLISMMSIISGLETEIAAISQRLDQLLASHQDLLERLDAVPGINKKSAQSILSEVGITLDEFICTAALASWAGLCPGNNESAGKRKSGRSSVHGHPLKTILIEVAWAAIKKKDSYYRDKYYRLKVRRGPKKAIVAIAHRISKAIFHIIKHGESYKERGQQWLDHITKKRITYRLKRQAKQLGYDLVPCAD

SEQ ID NO: 384569 - protein, 315 aa, unidentified
MSENQVEVFVGIDVSKSRLDVQIEPPGEAFQVANDDAGITGLCTRLSELAPTLIVMEATGGLETRAAGELAARGLCLAVVNPRQVRDFAKASGQLAKTDRIDAHVLCGFGRAIRPAARPVKEALIQELDDLVSRRRQLVDMRVQESLRLQGASKAQAKSVKAHIVWLDKRIKSIETDLGTRLRSCDAWRVKDDLLLSIPGVGEITSRSMLSRCPEIGRLSRREIAKLVGIAPLNNDSGKYRGQRHIWGGRADVRSVLYMAAVSAIRCNPVIKAFAAKLKSAGKAPKVVIVACMHKLLTIMNAMIKSNTPWTPKTA

SEQ ID NO: 384570 - protein, 406 aa, unidentified
MTLYIAIDWSREKHDVVMTNEKEAELDSFTIGHDLDGFQRLDQRRAQLGVPAAACVVGIESVHNILLDFLWEQGYQQLYLVAPHLPAASRGRYSVNKGHTDQTDARVIVGLLATDRHQLHRWQPDALLTQQIRQQVRWHQQQTQEIVRQSNRLREMLGRYYPAALKLFSDLTTQVTLAFIRQYPHPQEAAALDFAAFAAFARAQGYTAPASLPKQYARFQQPVPQATRETILVYQPLAHLLATNLLALVKQQAASQRRLTRLFRQHPDAPIFLSFPGLGKWLAPALLAQFGDDRDRFPTPMRLQALAGTCPVTDQSGKRRRVKFRHACDKAFRQVAQQWAWCSLTTSVWANSYFQRHQARHLSANDALRRLANRWLAIAWKCWQTHTPYDAAYHWQQCRLRRQPRR

SEQ ID NO: 384571 - protein, 344 aa, unidentified
MDNHTQYSGFAGVDLAKKVMQIHFVTGDGEITDKQVKRAEFLDFFRNRTKCLIGMEACGTSQDWARKLEAMGHEVHLMSPKAVKPFVSGQKNDYNDAIGIYKAMFNGVRRVPVKSTEIRDLQTLRRIRSQVTKDKVKEINHVRGLLAEYGIVMGKSITAFNKGISSALESLKERGDVSPLVAEELQTTVESIKTKIERQKRLDREIEQLARGCKNYENFLKTPGVGPFTAAMLCVLLCDPAIFANGRQFAAYIGLAPRSRGSGGKNFIIGIPSKFNCDSESRAVFVECAQALARYKNKSPWVDGILRRKPKKVAVIAIANKLARQVWAMANKGESFKQMTILTA

SEQ ID NO: 384572 - protein, 402 aa, unidentified
MEPILERCCGLDVHQATVTACLLIGAADTNPRKVIRTFSTHTRALVALRDWLVSEGCTHVGMESTGISWQPVYAILEGVCELSVGNAQHIKHVPGRKTDVKDSEWLAELGRQGLMAKSFVPPQPFRELRELLRYRRKLIESRTTSRNRVLRLLETANVKLASIASNVFGVSGMHMLRALVRGGTSPQELAQLAKGALRKKTVALALALEGHVEDHHRFVLDLQLRQLDHLESLLAELDQRIEEKLQPVQPAHQRLMQIPGVDRIVAAVLLSELGTDMQVFKSAHHAAAWAGVCPGNNESAGHQREGRVRKGNLHLKTMLVQAAHAAVRHRPSYLHAKFLRLRTRRGPQRAAMAIAHKILIAAYHLRSTGQPYRDLGETYLDQLNKARLAKQLVRRLTHLGYD

SEQ ID NO: 384573 - protein, 418 aa, unidentified
MIKLSGKYSVYIGIDWANDKHDVCIQVTHLSTRKFKVIKHSANAINDWITNLHKQYKGQIAVAVELSKGPIVYALQKFDFVTIHPVNPSMLATYRKAFSPSGAKDDPTDAELALDLMLNYPNKIKPLKMESESVRKLMYLVEQRRRLVEDRRRFSNRLINTLKQYYPHLLDWFSHRGSGLFCDFIARWPNLQKLKRARPETLRKFFASHKGRSSTYTEQRIQSISEAEHLTLDRAVIDSHQLLAVALAKQMLVAVEMIKVFDREISDLFETLPDAELYKSLPGTGPCLAPRLLVAMGENRSRFNSASEIQMCSGIAPVTERSGQKSWVHWRYQCSKFNRQSFIEWAAKSVHQSYWAGLYYQQQRGKGNTHQSSVRSLAFKWIRILYRCWKKKVPYSEAKYLKALKERNSPLLFKEKAC

SEQ ID NO: 384574 - protein, 322 aa, unidentified
MEQIYYCGIDIAKSKFDCAIRLNNGKYKDKVFKNESEGFSTFINWLAHHGFSHVHICMEATGIYWEAFAEYLADKGLTVSVINPAQIKAFSISLLVRSKTDRGDARVISDFCFERKPAAWLAPSASEQSLRALVLRLESLQKMRTQENNRLHVARENVTKSLTDHIAWLNNEIEILQGDMLLLINGNAEMKQKKTLLESIPGLGVQTAAVLLSFGIHPGRFVNARQAAAYAGVDPRLNESGSSVKGRPRLSKTGHAFLRKSLYMPAMTTLFRTAWGKHFYARLTAAGKAPKLIIGAMMRKLIHVAFGVLKTEKSFDQSLHGV

SEQ ID NO: 384575 - protein, 311 aa, unidentified
MEHTCFVGIDVSKAHLDVHVRPTGDSFRVSHDDTGFATLLERVRPLSPTVVVLEATGGYEIPLAATLAGAGLPVAIVNPRQIRHFARATGQLAKTDLLDARVIALFAEAIRPAPRLIPDEQAQALGEVIARRRQLVEMLGAELNRRRLLRDRRLQHHLDAHIAWLEAALRRLDHDLTTLIRSTPMWREADDLLRSVPGIGPVTAGTLIADLPELGRLDRRRIAALVGLAPIARDSGTFRGRRMIFGGRGHIRRVLYMATLTAIKHNPAIRAFHQRLVAAGRPGKVALTAAMRKLLTILNAMLRDHRPWQPA

SEQ ID NO: 384576 - protein, 358 aa, unidentified
MAGKVTETAVVGGVDTHKNLHVAAVVDQNNKVLGTQFFSTTRQGYRQMLAWMTSFGALKRIGVECTGTYGSGLLRYLQNAGLEVLEVTAPDRMERRKRGKSDTIDAECAAHAAFSGIRTVTPKTRNGMIESLRVLKTCRKTAISARRVALQIIHSNIISAPDELREQLRNMTRMQLIRTLGAWRPDASEYRNVTNVYRISLKSLARRYLELHDEIADLDVMIAAIVDELAPELIKRNAVGYESASQLLITAGDNPQRLRSESGFAALCGVSPVPVSSGKTNRYRLNRGGDRAANSALHIIAIGRLRTDDKTKEYVARRVAEGHTKMEAIRCLKRYISREVYTLLRNQNRQINSIPITA

SEQ ID NO: 384577 - protein, 364 aa, unidentified
MTTYCGVDFHARQQLVKWCNTADGEIHERQLWHQSKDEVLTFYGQFEGAVIVGFETSGFSSWFETMLEQLGHEVWIGHVTEIRRRARSRQKTDRRDAELILDLLLKDEFPRIHRLSAESREVLRQLRYRHRLVQLRTKSYNSLQAMALSAGVSLRARLRTRKGKERLLGLSMTKAGNSQREEWLLLISHLNSCIEWVEQELELVAASDARVQLLRTHPGIGLLTGLALVHALAPVSRFANSRKVAAYVGLEPREYSSGERQNFGGISKAGSRLLRFLLVEAAQKAVNKDEHLKKLYHRLVHRRERAKAKVAVARQLLVRTYIMLRDEIDYAEFVRRGVAVRSARVSYRPQVPGKLIERLASEQP

SEQ ID NO: 384578 - protein, 469 aa, unidentified
MNIKARRTKKQVNVENQAINLLSKEELDKKIEVVEKELRSYTWRELEANGKFAKNDKLSFITDDMLIVGCDIGSETHYIRAIDVRGRELSRGAFEFSNTSEGFANAKAWVLALAAKHDKKQIVLGLEPTGHYWFALAAWMISNGISVVQVNPYAVKQSKEIEDNSQLKDDRKDPKLIANLVKDGNYGMPYLPEKVYADMRRLSMFRDQLTEDRIRNINRLHRELKIYFPEYMDAFGKIDGAFTLEILKVSAIPSDIIALGAEGMKNIWHNAKLRGRGYSRANEIVSYAEKSVGLTDGTDAGREAVKWYAEQILRLDEQLVEIESALHEKCREIPYAENILAINGVGENILAGILAEMGDISRFDDVKEIQKLSGMGLVACSSGKHKGQTKISHRGRKRLRYWLFQAAKSAVSHADEFKQLHEYYTTRSNNPLKKMQSLVVIACKILRVIYTILKTGTTYDPQNLFDVRI

SEQ ID NO: 384579 - protein, 408 aa, unidentified
MLKIVHPVCCGIDVHNKFVVACIASTDERGITTYKVSRFSTFTSGLVKLSEWLLSNCCRNVCMESTGKYWIPVYNILEDVCRVTLAHPKYLKAIRGKKTDKKDARWIADLFKHDLVAASFMPPADIRQLRDLARYRAKLTAFAASEKNRLQNCLTVSNIQIANVVSDTFGVSSMKIIQNLLDRSGNADIEGFLHGSMAKKAPELRLAVSGIVTDEQKSKMNVILSHYNAVKECKASLESVILTLCKPYERELSLVLTVPGISNPFSAIAILSEIGADMSVFATAKHLCSWAGLVPQNDESAGKKHSVRISRAGIYIKPLLVQCANAVVRSDKHPEIKGRYLSIKKRRGHKRAIIAIARMLLTAVYHILLKDEPYNPELYIKADTLPRTRNITVDQAISFVRRFGYSVN

SEQ ID NO: 384580 - protein, 369 aa, unidentified
MTELTLFIGLDVHKKTISVALVEGTAGAAVRFYGTIANTPETVRTLCRKLSRDGQQLYFCYEAGPCGYGVQRRLTRLGHRCDVVAPALIPRKIGDRVKTDRRDAMMLAQTLRAGQLTAVWVPDEAHEAMRDLVRLRSQAMRDLRKARQQLLSFLLRHGRNSPYGHWTKMHRRWLGELVFAHPAQHLALEEMLQRIERAETLCERLKGAILELVPQWSLAPVVQAIQALRGVSLIVAAAIVAEVGCFGRFENPRALMAYLGLNPSEHSSGATIRRGAITKTGNTLARTCLVEAAWTYRFPARVSQIIRDRLKELPEPIRAVAWKAQVRLSARYRKLTAAGKPAPKVVVAIARELVGFIWAIARMVEPKFA

SEQ ID NO: 384581 - protein, 442 aa, unidentified
MVKTMNALPVIDPRAAAIDVGSEQMHVSIAGGEPKVFGSTTAQLHALRDYLLGQGVRSVAMEATGIYWLCPYEVLEKGGLEVIMVNGKYVKNLPGRKTDMKDCQWQATLHAHGLLKGGFVPAEQIRRIQDYQRLRADHIAAAASCEQHMQKALERMNIKFHDVISDLTGVSGLRVVRAILAGERDPAVLLGFCDEQIQKKKASRVLESLVGTWKTEHLFALRQALEAWEFYRRQISECDKALEQVLQECTADKPEPPDRLPTWGRRKKPNTPEINQLRQMLWKLCDGKDPTALPGVTDYTLLQLVSETGTDLGKHWKTEKQFTAWMGLAPGAKQSGKRQGNQKRSRNRAGRILCVVARSVGKAADRALGGFYRRLRARRGGLVANVALARKLAQMYWRVMVHGVAYVEHGLEKYQDRVAETEQRWLRKLAKKHGMTLQPKAA

SEQ ID NO: 384582 - protein, 416 aa, unidentified
MNAVGIDVSSRKSTVAVLRPLGEVVCLPFDVTHDIAGLASLVEKLKALDGETRVVMEHTGRYYEAVEKALHEAGLFVCAVNPLLIKEYGANSLRRVKTDKADAVKIARYALDNWADLRDFTPMDAIRYDLKTLNRQFQLASKQRTASANNLIALLEQSFPGIRKCFDSPVRSDGTQKWVDFAHSFWHVDCVRKQPFAAFCERYRKWCKRHAYFFKLSNAEEVYALAKRAVVLTPKSKVVKVLVQEAANQLSSISRSVEVYRAEMDRLAAMLPEYPVVMAMYGVGKSYGPQLMAEIGDVRRFERKQALVAFAGIDPMPNQSGDKNVRSNKSSKRGSPYLRKTLFNVIRTYLQCAPQDEPVFQFLNRKRAEGKPFYVYMLAAANKFLRRYYAKLRDYFASLDTLQPVAPIPTILKATL

SEQ ID NO: 384583 - protein, 319 aa, unidentified
MAQNDQIVVGIDVAKGKVDACIRSLSLRQTFPSTAQGHRKLVAWLRKHKVNKAAMEASGGYERDWAKVLRQAGIEVRIVDPKRVRSFALSAGRLAKNDAIDAEMIAWFAETFDEAPSQTHDAAHEELAALVKARKGLIDLKTRLQSQDEHVAPGPVQKAHARVLKSLAAEIAKLEAAISAKVKATPEFAERAEIIESVPGFAETTSATLIAGMPELGKVSKEIAAALLGAAPYDDDSGKRRGERHIKGGRRWVRNAIYMPCLGAATQNNPVLKAFYHRLIAKGKEPKVALVACMRKLIVILNTLIARRQKWDPSRYALS

SEQ ID NO: 384584 - protein, 367 aa, unidentified
MKKIIAEKTTRRIKQADGKLTIGLDLGDRSSSYCVVNKDGEVIKRGSVATTKKDLNRIFGALRHSRLALEAGTHSPWVSRHLKELGHEVIVANPRRVRLITASSNKNDRLDAEMLARLARVDPKMLSPIRHRGETAQADLTVIRTRASLVEARTRLINTVRGLTKSFGERMRKCDARYVNEEMAQGLPGPLKEAMGPLLKQIGQLSGRIKEFDEAIQKMARERYPEVELLTAIAGIGVLIALTFILTLEDPHRFQRSRDVGAYLGLRPRRRQSSQSDPQLGISKEGDVYLRKLLVQGAHVILGRSGEDSDLRRFGQKLAARGGKGAKKKARVAVARKLAVLMHHLWVTGEVYESLRKTQAPGEPVAA

SEQ ID NO: 384585 - protein, 377 aa, unidentified
MKAPSTRPAAVLGLDVGKSSHWACLIDRDGEVLDSAPVRNREAELDALFASAPAGTLVVVDQFRNIGSLAVRRARAAGLGVAHLPGLAASRAAGLFAGEAKTDERDAAVIARTALGVPDSLSGVPGRGEALEAARALSSQRDHVVACATRDKNRLRAVLLESCPALEAAVDLSDRRWLELLAGFGGAWGIARSGAGGPRAEAAGEAAAASTAPPPALVEAENRQVRFLAARISEALDEAGALEAETAALLEGDETYACLLTVPGIGPRTAAQLAVSVDIGRFPDHDHLASYCGIAPRVRSSGTSVRSVRASRRGDARLKSLLIFSCNSLVRSSGRYGEYYRACRARGMGHGRALKAVARKRLRAIYAVMRDRVPYRE

SEQ ID NO: 384586 - protein, 364 aa, unidentified
MPAILKTQMVIAIDPHKASWTAAAVDASSRPVAAIRVPVSRDGYRALRRFARQWPDSTWAIEGASGLGAPLTAWLRTDGIDVVDIPAKLAARVRTLSTGHGRKNDDADAVSVGIAALSARSLTSVVVDGTVIALRAIVDHRDDLVKTRTQTVNRLHVVLANLIPGGAKRDLTAERAVELLRKVRPRDAAGKTLRSLAADLITEVRHLDRRITKAAADIKTAVSASGTTLTELCGIGELTAAKILARVGTIDRFCSAAAFASYNGTAPIDVSSGDVIRHRLSRAGDRQLNCCLHIMALTQIRQDTPSKAYYLRKRTGGKSHKEAIRCLKRRLSDIVYRQLLRDATRRKAGPGGQSGAALISSAAS

SEQ ID NO: 384587 - protein, 348 aa, unidentified
MQYFAGLDVSVKETAICIVDETGKVVRERKVATEPAALLAAFTESAVHCTRIGLEAGPLSQWLYSALAEAELPAVCVETRYMKAVLKAHSQINKTDRNDARGIAQMMRAGLFRPVHVKTLRGQRLRMLLTHRKLLQAKAIDIENDLRGTLRNFGLKVGPVSTPKFEARIRELVEGLSDIAGFVEPMLIARRVLREQFAALDRQVMAIARENVVCRRLMTVPGVGPVVAMSYVATIDVPARFGKSRSVGAVLGLTPVQNQSGETNRIGRISLCGDAMMRTLLFEAAMSLLTRVKKWSWLKAWAMNIAKRRGVNKAAVALARRLAVVLHRMWSDGTEFCWTREELQKAAA

SEQ ID NO: 384588 - protein, 466 aa, unidentified
MSRKGIRRRGVRRRRRGLPKSLKRVNLDAAGIDIGSKSHYVAVPEDRDEEPVKEFRSFTNDLHRLADWLEECAIDTVAMESTGVYWIPLYEILEERGFEVLLVNARDFKNVPGRKTDVLDCQWLQELHTYGLLRGSFRPDADITTMRAYVRHRDTLVKDAARHVLHMQKAMSLMNIQLHNVISDITGATGMRIIRSVISGNHNPQALAEFRDPRCRASKGTIVESLTGNYRPEHVFALRQAVELYDFYQRQIGSVDEQIERLLCELEDSSPIRENLGPSKRKPPKGNEPDFDIRTRLYALTGTDLTEITAIGPYSALKIISEIGTDMTRWPNADHFASWATLAPKNKITGGRLISSRTRSSANRFAEVLRMAAMTIGRTNTYLGAFYRRKAAHIGKAKAITATARKLAVIIYHMISRAVPFHDPGIQLHDEQHRNRVLKNLTRRAKSLGLQLVPATDQTNNPVGVT

SEQ ID NO: 384589 - protein, 354 aa, unidentified
MSNKSNATIATMGIDIGKNSFHIVGLDRRGAIVLRQKWSRGQVEARLANIPPCLIGMEACVGAHHPSRKLQSLGHDARLMPARYVRAYLKGQKNDFRDGEAIAEAVQRPTMKFVATKTAEQLDLQALHRVRARLVGQRTGIVNQIRAFLLDRGVAVRKGPRFLRTELARILATRCDVLSPRMVHVIEELAGDWHRLDERIKSVSSEIEALADQDPACERLMTVPGIGPIISSATVAAIGNGAAFSKGRDFGAWLGLVPRQISTGDRTILGKISKQGNRYLRVLFVQAARVVLLKPNSWERYGLKSWIEAAKKRLHHNVLAIALANKLARIAWAVLNKERKFECVRTSAMAPRSA

SEQ ID NO: 384590 - protein, 365 aa, unidentified
MNKCHSNTELSSHEGTRCQFNGGKAVIKLGIDVHQDFYVVVEQVGGSNPKPPQRFQKEAFLFWAARLKQKSGAQVYALYEACGFGFSLQRKLSALSIKCYVVCPQKLDEQNRRVKTDGLDAKALCLKLDRFVQGNRDALAIVRVPSEEEEQARAIHRQREQLVKARKQLEAQGRSLMVNHGLEPVQNWWKPRTFTALPMPQWMKELLANSQPILVALQQKIMALTVQLQSAASPEQPCGLGKMTSVVIDREIGDWNRFSNRRQIASYTGLCPGEYSSGNTRLRSCVTKHGNPRLRAALVELAWRLVRFQPKYKPIVKWRATLAKGALATGAARKKAIVAVARQLAVDLWRIKTGRLHAEELGLIN

SEQ ID NO: 384591 - protein, 607 aa, unidentified
MSTIASLDRIGVGIDTARYGHRVSFLRPDRKPAAKPLTVMENRAGYQALQDRLNQLHEQHPTAHFHVRIDAAGQYAVNLELFLRGLKLPMTISVGEPKRNKDYQKAHFPKRTTDDTESQAMARFAVIELPNATPAPSTPMILLREVAGRLQSKVKQTTQAINRLHNLLARVFPELATLTEDISVGWVLKLLDKYPTAERIAQAQIASLEKIPYLSVEQAHAVDQAAKQSVASLRGELAEALVRDLVNQLRLCQKAEQHLHQLLLEAFADLPASPHVQVLTITGIGEATAAALVAKIVDINRFATPNHLVSYFGVFPEESSSGVDKHGKPLPPGTLIMSPKGNDLVRFYVWNAARTAIQHNPAIRALYRRLRAKGKRGDVAFGHCMRKLLHLVYAVWKTDRPFDKEHFPWEGSSDTQPSATTPPSADAGTTPSANEEAVGHKRDLPAEEVVTTADSTLEPASPAVKPASQSAAPRPKVDFACVREHVTMEQVLQHLGYFASLRGRGRQRRGPCPVHSQPTAPERTFSVHLGKNAFQCFHAECAVKGNVLDLWAAIHRLPLYEAALDLAETFQVPRNREEEPVKGTSSPRTATAKTSAPAAATATDGAK

SEQ ID NO: 384592 - protein, 337 aa, unidentified
MDYFAGLDISMDETRICVLDREGAVVYEGKSASTAEAIADELAKAPSCRRTVFETGRMAPILFHSLSQLGLPVVCVESRQAYQALKSLATHKTDRNDARGLAHLARTGFFKPVHVKSLSAHAVRSLIIARKKLVGQRVTLENQIRGLAVVFGVRLPRALTTAFIDQALKASEGVAGLSAAMRGLIAARTAVMTAVAAIDADIRRMTGASEACRRLMTIPGVGQLTALAFVAAIDDPSRIRRSRDVGAYLGLVPKRYQSGEVDYVGGISKRGDRRVRTLLYEAANVMLTRTKGQLKLKDWAFAIARRSSMRKARVALARRLAIIMHAMLRDGTEFVAA

SEQ ID NO: 384593 - protein, 461 aa, unidentified
MKNTSNKKKPQESQSSSSSLPVLFPDTAGIDIGSKSHFVAVPSERDSDPVREFSTFTADLHRMVNWLKNCKIKTIIMESTGVFWIPAFELLESSGFDVKLVNARHVKNVSAHKTDVLDCQWLQQLGTFGLIKGAFRPADAILPLRAYLRQREMLIKSAATHILHMQKALTQMNLHLHNVISDITGTTGMAIIRSIVSGVTDPKFLATFRHERCHNPEEVIEASLVGNYRTEHLFSLKQALELYDFYTQKIAECDLQIKEQSKKLETKCDLEKLNQLKKKSIKKEAKKSKKHEYPFDLRLELIRITGVDLTKIPSIGASTALTVISEIGLDMNRWRSAKSFASWLGLCPGNKVSGGKKLSGKTKPCANRVAVALRNAANTLYRSECAFGAFLRRMKARLGSPKAITALAHKLAKLIYIMLKYGHEYVEKGVEFYEEMYQKRREASLKKKAKEMGYILVPAAA

SEQ ID NO: 384594 - protein, 314 aa, unidentified
MDKIAVGIDVSKDRLDVAVRPSGEVFVVARNAAGLEELVERLCSLGPHLVALEATGGFETVAAAALAAAGLPVVIVNPAQVRAFAKAIGQRAKTDPIDARVIAHFAEATQPEPRPLPDEATRLLADLVARRRQIIDMIGAERQREKRAPARLKKSIVRLVKALEKELTSVDGDIDDAVRGSPAWRETEDLLASVPGVGSTIARTLIAELPELGRLDRKQIAALAGLAPHTRQSGQWKGRSFIGGGRANVRTALFMGAMVAKKHNPVLKAFFDRLVAAGKPKMLALIAVARKLLTILNAIIRDHRPWQGTVVAAS

SEQ ID NO: 384595 - protein, 340 aa, unidentified
MSEITTIGLDLAKHVFQVHGIDAQGTTVLRKRLRRGQVLAFFSRIPRCVVGLEACATGHYWARELGALGHEVRLMPAQYVKAYIKRNKHDAADAEAICEAVQRPTMRFVPVKTAEQQATQLLHRGREQLVRQRTMLVNALRAHLAEFGIVAAQGLRNVGELIAIVRADGDTRLPDVARQVLQVLANQIEQIEAAVTALERQLLAWHKTNPVSQRLASIPGIGPIIATAIATTVADPNVFRSGREFAAWLGLVPRQNSTGGKTRLGGITKRGNRYLRRLLINGASANLLRSKATKTDPWVIGIRRRRPPLVVAVALANKTARIAWAVMLRQREYQPRAVAA

SEQ ID NO: 384596 - protein, 337 aa, unidentified
MDYYAGLDVSLEKTHICVLDREGMVVHEAEAASFPDAIMAELAAAPTCTRVVFETGRMAPMLYHGLVELGVPVICIESRQAYQALKTLATHKTDRNDARGLAQLARTGFFKPVHVKSLPAHAVRALIIARKKLVGQRVTLENQIRGLAVVFGVRLPRGLSPAFVEQVLAMSDSVAGLSGAMRGLVAARDAVLGAISAIDADMRRLVRASDACRRLMTIPGVGQLTALAFTAAIDDPGRFRRSRDLGAYLGLVPRRYQSGEIDYVGGISKVGDRRVRTLLYEAANVMLTRYKGALKLKDWAFAIARRSTMRKARIALARRLAIIMHAMLQHGTEFQPA

SEQ ID NO: 384597 - protein, 425 aa, unidentified
MNYKQNEKINQVKESTLVVGIDIGSTTQYARAFDWRGIELGKVFPFSNSREGFESFKAWMQHLQDKYKKLDAIVGIEPTGHYWFDLGAYLEDEGILLVMVNPYAVKQTKELDDNSQSKNDRKDPKVIAKLVTEGRYSAPYTPDGVYADLRIMVANRKRLIREMTQIKNRFARWFAIYFPEYTDVFGDYEAQSSMLLLKKVCTPEAIVELGAEKINQIWRDAKLRAVGMKRATTLCETAKRSIGLKKGSSAAQYEMKLLLEDYEYKKAQLDAVMEEIEKLCRKIPESEQMLAIKGIGVITVAGFLAEVGDVRHFESPRQIQKLAGLSLRENSSGKHKGQTTISKRGRSKLRAVLFNAAIPLIAKNPEFKSLHEYYTTRANNPLKKKQSVIAISCKLIRVFYAILANGVTYDAQKMLSDIHRQPQAA

SEQ ID NO: 384598 - protein, 412 aa, unidentified
MSYCPVAGIDVSKRFSDMCILSPDNKIFAQEKIYHDETSINRANALLQKAERLFFRKPVIVMESTSHYHLILFQFFSEHGYDVIVVNPLQSNSMKDFSIRKRKTDRVDAFKLAMMYRTKTLRPSQIPQTATRALRQLCRHRAELLNDVSSYKNRLTALLDQTFPGYDKVFSDVGGVTSCAVLVRFPTPTILLVEEESELVEVIAAASKSGYSFAKKKAGLLISAAQKAQTLGIHSCADETLIVCTIQMLRTLSESVLQIEAAIDHLLAQIKEMRNNVSLLQSIPGIGSHSAALLLGEIGDISLFKKPKQLAAYFGLDPTERQSGSFRGTKNKLSKRGSPYARAALHMGVVNSICKRGKDSAANPVLLSYYDCSDTGASKSETPHACIQSASSFCACNAAALRTSGVVSVSRT

SEQ ID NO: 384599 - protein, 331 aa, unidentified
MADAKRFVGIDVAKAQLDVALGPKGERFAVANDERGISALLKLLEPADLMIIEATGGLEVPVASALATAGIGVAVVNPRQVRDFARATGRLAKTDALDAQVLVRFGEAVKRQVRALPDAQAQALEALVNRRRQLVEMLTAEKNRRANSPKVIHKSIDEHIRWLEKRLAGFDDELAGLVRETPIWRERDELLRSVPGVGKVLSTTLLAHLPELGALNRKQIAALAGLAPFSRDSGGLRGSRCIWGGRAQVRRVLYMAAVSAVRSNPVIKNFYAQLRARGKYPKSALTACMRKLLVILNSMLHNKTHWHATALMSSTSALSPLLSAVSEHGCC

SEQ ID NO: 384600 - protein, 398 aa, unidentified
MILVGVDVASEKHDVSIIRNTGEVIRDNFTIPNKESGYKKLLDEIKKAEKLYPSDKVRIGLESTGVYSMSLTEFLATHYEDSVILINPILTSMFELSCHVHYAKTDKTDARGICKFLSKNEDIRPYAIVSYHTRQLRALYRERAKLNKRLNQNINRLKGQLHIAFPELLDKNHATIGLFELEFLSKYPTADSIRNMKPEKLVAAFSKIKYMRINIAKARRLIEAAKTSIGCLTLSEGFVIKETVERIKLYRKQINELSEAMVPLVKEEHGNLLTIPGIGAVTVAGIVGEIGNVSNYHGSDCLVAMAGLNPKVYESGNYAASHTRISKRGSSYLRNALYMATQSMYMHGAEPIYSFVNKKRKEGKRKICALDHAARKLCNIIFSMMKTGSEFIPSSANN

SEQ ID NO: 384601 - protein, 367 aa, unidentified
MLAGGTEDKEHAMLQKLDTSPAVIGIDIGKNSFHIVGQNQRGAIVLRQKWSRGQVEARLANLPPCRIGMEACVGAHHLSRALTALGHDARLMPARYVRPYSKGQKNDYRDAEAIAEAVQRPTMKFVATKTADQLDLQALHRVRERLVGQRTGVINQIRAFLLERGIAVRQGLRSLRFELPGILATRTDVLSPRILHIIEDLAGDWRRLDERIEGLSNEIETLARQDRACERLMTVPGIGPIISSAMVAAIGTGDVFSKGRDFGAWLGLVPKQISTGDRTILGSISRRGNRYLRALFVQAAWVVLVRVKCWERYGLKSWIEAAKKRLHHNVLAIALANKLARIAWAVLNKGRAFECVNAEEETASRPA

SEQ ID NO: 384602 - protein, 356 aa, unidentified
MSEITRIGVDLAKSVIQVHAVDAAGKLLTNRQLSRDKFLTWCAQLPVGCVVAMEGCGGAHHWARKLIALGLNAKIIAAHLVAPYRLQGKGGKNDANDAAAVCEAASRPNMNFVPVKTTVQQGLLCVHRLREGLKEERTACVNRIRGMLTEFGLVVSKSPEKLREKLTDMLEDASNDLSGVARLVIEEAYSHWKEIEERIKWCDQRISAHVKDDAQAKAAKELMGVGPVTASAVVATVGDFNQFKNGAQFGAWLGLTPRQNSSGGKSNLGGITKRGDMYLRMLLIQGAKSAVMTAHKRDDPISKWLHQLREKSGWQKAAVAMANKNARILWAMMTKGCRFDAQHVSVKPAGLAPAMA

SEQ ID NO: 384603 - protein, 433 aa, unidentified
MEEAGDEPLFCERAAGIDIAKQTVMVTVRVPSESRRGGRQQETREYGTTRRQLLDMADWLRSWGVERAGMEATSDYWKPVYFLLEQQGLDCVLYPAARVKAQPGRPKTDRLDSVWLAKVTEQGSVTGSFVPPEDIRRLRTHTRYRRRLVQARTAEKERCEKLLEDAHLKLSSVISDIHGVSGRAMLKAIIAGERNPAVLAELARGRMRGKTARLAEALDCSFFTPEHAFILSMMLRNIDHLTAQITLLDVRIAALCEPYERQLAQLDAIPGFGVTNAQDLIAEIGVDMSVFPTAGHLCSWARVAPRARESGGKAKGRATTGYGNPYIGATLGEAAVTAGRTQTYPGAKYRRLSKRMPKKKAQGAVARTQLVIAHALLSDPEAEYLDLGSGYYEQRTDTSRQARGHVRSLERLGWKVTLEPLDPDTGELTARAG

SEQ ID NO: 384604 - protein, 342 aa, unidentified
MRIIGCDLHAAQQTIAMLDRDTGEIVERTLRHDGATVRDFYASLPPPVIVGIEATGSMGWFLRLMEELGVTCHVGDPAKIRKVETRRQKHDRRDAALILELLTENRFPSIWMPSSELGDLRALLLHRDQWVRMRARVKNTLQGFALAHGVQRGAALWTRGGQATLASLPLAPHAGYRRSELQALNDHLTTQIDELDRQVGEEARERPQARRLMTHPGVGPVTALATEVFLGDPSRFADAKALASYVGMIPSEYSSGDRQRLGKLTKQGNPFLRYLWCEAAIHAVRRDGALGRFYRRKLQQKGLGKARVAVARKLGIRLWILLRDQIDYEEFCRRAPSPAAAR

SEQ ID NO: 384605 - protein, 437 aa, unidentified
MLWVRFAGKSAWQNKKPPKEKGKAMSQKIFVGIDLAKDSSSIAAVDEEGNKTLSTFSITNTIDGMEKLLSKLKGYEKDKILCGMEASSNYWENIYSYLKEKGISCLLLNPYQVKKYRQALGLKIKTDSIDAESIAVLIKDRKYDNLYISDDSVIEIKELVRMKFCFARRAKDLKKSVLSLLTLVFCQYTKIIFHPFSKVSMEILSKYPTSIHMKEKSSVSKLIKIFNKYQGCHFRADKAKELIAAAKNSFYSGKAHRSRGISISMQIEEISSLSAKIEEIENEIMLILNPDDPNGSPSSFEILNSIKGVGIGTIAAFMGTVGNISRFSNSDKLISYIGFYPKIFESGKYKKKNPEIQKAGPRELRYMLYLSSVAAIKHNIFFKKYYNDLVSAGMPAKKALIKVAVKIVRMMYSMIKYRTFYDPSRIFMQYHLDSLAA

SEQ ID NO: 384606 - protein, 352 aa, unidentified
MNEITTVGVDLAKDLIVACAADAAGRTLFYKRFGFHGFAAWAANLPPCTIAMEACSSAHYWARTLSALGHQVKLLAPDLVKPFRKSQAAKNDRNDAQAILITALQPEMRFVSVKSLEQQSILAVHRMREGWKSERTALINRVRGLLAEFGFWLGRSPQTLARRLPQLMQEDQLPARVRALLAQAHGQLLQLQALMQQCELDIQAHARHSEAAQRLSALNGIGPITASAIVATVGNAADFRNGRQMAAWSGLVPKQSSSGGKERLGKITKRGDTYLRGLLTQGARSTLNAALARPLDKRSPLEHWIVTLRQRVGYHKCLVAIANKHARICWALLARGERYQPDAASRHVRAAA

SEQ ID NO: 384607 - protein, 343 aa, unidentified
MQTIATIGLDIAKSVFQVHGVEATGQVVVRRQLKRRHVLEFFAKLPPCLIGIEACASSHYWARELQAIGHIVRLIPPAYVKPYVKRQKNDAADAEAICEAVTRPNMRFVPIKTFEQQGCLVLHRTRHLLVRQQTATINSIRAHLAEFGIVAPVGRRGVEHLLEVIADANDTRVPEVARACVAALGVQLRQLKAQILEFDRRILAWHRSSEASRRLNHIPGVGPLLATALVASIADPKAFRSGRDFSAWIGLVPRQNSSGGKDKLGNISKRGDRYLRTLFTAGALAVIRYAKIHGTKHRPWLVALLVRRPTKVAAIALANKLARIAWALMTKGSRYRQPAALRV

SEQ ID NO: 384608 - protein, 388 aa, unidentified
MAQVNDLSRSLASFEQSGTLVVVLEMSQSSWLAAGVVPGVERRPLKKISPDPAALLRLLERWRDQAVRAGQTVTRAVLAFEAGRDGFWLARWLRARGIETYVVHSTSVAVSREHRRAKTDRLDTEMLIRVFLGWLRGEPRHCKMVAIPTLEEEDAKRPSRERESLVGERTRIINRMKAALIRLGIRGFKPELLKAPERLEAMRTPEGVQIPPNMLDELRRDMARLAWVREQINAIEQARLARLEQAPARGPDAMVRLLARVVGVGVETADMLVQEVLSRNLRDRRAVARYAGVTGSPDESGAKRRERGLAKAGNARVRRGLMQLAWRFLRFQKESALAQWYYARTEGAAGKRKTTMIVALARKLLIALWRMVTTGEIPAGIALRTVAA

SEQ ID NO: 384609 - protein, 370 aa, unidentified
MKKNSTVRQSPKRAAARKEGPITIGMDLGDKTSRYCVLGANGERVSEGSVATTRKAMTQRFAGMRRCRVAMEVGTHSPWLSRWLTSLGFETIVANARQVQLISANSRKNDRMDALLLARLARVDPQLLRPIRHRSEKAQADLLTIRIRAALVEARTSLVNAARGFAKAQGDRLPACDADAMGVEKMEALPAEMRERLRPLLEQVASLTVQIKQLETKIEQIARTQYPETELLRQVSGVGTLIALTFVLTVEDRERFRKSRDVGCYVGLRPKQSESGQSQPQLRITKEGDRYLRQLLVQGAHLILNRRGPDTDLKRWGLKLASRGGKNAKKRAIVAVARKLAVLLHRLWVCGEVYEPLRNSQPARSSKQAA

SEQ ID NO: 384610 - protein, 322 aa, unidentified
MRYIGIDVSKATFVVAYSSDKGGEIRTFNNTTAGIRQFIGTLPKDGSIHCVMEATGNYSALLLYMLNVAGITVSMENPLKVKNFAKAMLSTIKTDKSDARLITLYGEKMNPRPFKVQGEAILRLRQKRTVIRQLTKQITAMSNLRGSLACLPVPDKGATHTVDETIKFLEKKRDRLQSELTDLVEVEFSRQLALLTTIKGIGITLTTALIITTGGFTYFQNAKQVSRYLGICPTYEQSGTSVNIKGHINRNGDAYTRGLLYIAAWPASRFNAQCKETYTRLRQNGKSGKLAMIAVANKLVRQAFAVVAHDKEYVDGFVSNRP

SEQ ID NO: 384611 - protein, 395 aa, unidentified
MFIVGIDVAKRSHEVCMITSDGQTVQRPFSIRNNCTGYNLMLEKIRKHTNIKSQIVFAMESTAHYWLALFTRLRKDGYHVILLNPIQTSAMRDMFIRKIKTDAKDSFIIAELIRFGRYAESNVAQDRLLALKELCRNRFYLVDMAGDLKRKLIALIDRVFPEYEAQFDTIFCKSSVAVLKKYPTPQKLSNAHLDKLTELLWNSSNGHFGEWKARELRELARNSFGVEDCDGAYSTLILLMLDQIQSLSGKADALEKEISRLFQSFDTTVTTIPGVGPIIGAVILSEVGDISRFSSADKLAAYIGVDPSVNQSGEFQAAHAHMSKRGSPYLRRCIWMASQVAVQRDPMFRAYYEKKAAEGLKYMTIIGHVTRKMTAVVFAILRDHKVYEPILPTAA

SEQ ID NO: 384612 - protein, 326 aa, unidentified
MAIIGIDVSKLKLDCLWLRDLSLRKVKSKIHPNTAQGHQALLAWSIQQTGEAVADLHFIMEATGIYHEALAYALHEAGARVSVVNPAQMRDHARSLGTRTKTDKKDSWVIAHYGATQQPRRWQPEPDEVRRLKALIARYEAVKQDIRRELNRLEKAQVTCVSDAVLTSIETVHRHLDAEKIRLQSLIDEHIDQHPQLKRDRALLESIPGVGPIIAQQMVAVIRSRGFTTASQCAAFLGLVPVQHESGSSVHGRSHLSKAGNAQIRAKLYMAAIVAKQCNPDIKRQYDRLLRNGKSRMSAIGAAMRKLVQICFGVLKHQTPYLPQTR

SEQ ID NO: 384613 - protein, 345 aa, unidentified
MGVIIGVDPHKASCTAAVLDERGELVDQQRFASTRTGSRALGRWAKRWPERRWAVEGASGLGRRLAQQLVGDGEPVVDVPAKLAARVRLLSAGHGRKSDAHDAVSVAVAALGTTRLGQVRLEDHAAVLRLLSDRRDDLVRQRTRTLNRLHVLLCDLLPGGAKRSLDADTAAALLRRLRPATAPARTRRQLAVDLVADLRALDRRITAVEERLRHAVTQSATTLIELFGVGPILAAKLLGEVGDVRRFATKHRFAAHNGTAPIEASSGEVVRHRLSRAGNRKLNHALHLIAIVQIRHPTAGQAYYRRKLAEGKSRKEALRCLKRRLSDAVYRQLLADQHQPVQAQA

SEQ ID NO: 384614 - protein, 444 aa, unidentified
MHYQKVLKMPESIPYLSVGFDVGADFTWMSIMLPNGILIGKPFKIIHSDPQSRELAISKIKEAQEMYSLESRCFLESTGIYHIPLLCFLRDKGFDCAVINPIITKNSTNMNVRKLHNDKFDSKKAAKVGLDASLKASIVPDDAIIDLRNLVRDYYYFKDLQSAIVLKLHAELKVSFPAYLNVFSKVTTQTSLKLLEAYPLAADMLAAPKDELVETIRSTARFGETYALARYDAICTAAKDAAVFGRALPSNALRIRLYIKMYREYQAHLDSILEELHQAVGKLEGTPDYDRISFIQTLHGVGFLSAVVLIAEMGSFDLFSSPKKLYAYFGLDPGVNDSGKFHGDRVHMSKRGSSLARRILHMVAINNLKVDKATKTPVNPVIYDYYTRKCAIKKKSVAVGAVMHKICNIIFAMLRDNKPFELITPEEHRERYAAEHPESVNPAA

SEQ ID NO: 384615 - protein, 389 aa, unidentified
MKIFVGIDIAKLNHFAATISSNGEILIEPFKFTNDADGFQLLVSKLESFDKNSIIIGLESTAHYGDNLVRYLVAEFYQVCVLNPIKTCQMRKNNVRKTKTDKVDTFVIAKTLMMQDDLRFITFFDLDMMDLKALGRFRQKTIKQRTRLKIQLTTYVDQVFPEIQYFFKSGLHQNAVYALLKEAPSPKEIASMHMTHLANLLKVNSHGHFTKEQAKELRILAQKSVGANDSAISIQITQTIQQIELLDSQLEKIEAEMTDIMKFNDSVIMTIPGIGYINGGMILGEIGDIHRFSNPNKLLAFAGLDPSVYQSGNFQAKTTRMSKRGSRVLRYALVNAAWNVVRNNATFKAYYDAKRAEGRSHYNALGHCAGKLVRVIWKMLTDEVEFNLE

SEQ ID NO: 384616 - protein, 404 aa, unidentified
MIFVGVDWAEAHHDVCVLDEGGAVLGSRRVLDTLEGVRQLHELVADHAEEPGQVAVGIEKDRGLLVVSLVAAGYAVYAVNPLASSRFRDRHQVSGAKSDRGDARVLADMVRTDRHQLREVAGDSDLAEATKVLARAHQSAIWSRQRHLNQLRNALKDYYPGALEAFGTDLASNDAVAVLTAAPTPAAGRALGTGELEALLRKGGRQRNVAARARQLRDALCRGQLEQPGIVADAYGAVTASELRLIAAATAEVATLEEALSAAFEQHPDAKVVLSLPGLGTVLGARVLGEFGDDPNRYASAKSRRNYAGTSPVTRASGLSRVVLARVSRNRRLVATCDQWAFCALTSSPGARRYYDELRQRGKTHRVAARALGNRLVGIPHGCLEDHVPYDEATAWRHREQLAA

SEQ ID NO: 384617 - protein, 351 aa, unidentified
MSEKFNSEIAVIGIDIGKNSFHIVGQDRRGSIVLRQKWSRGQVEARLANLPPCLIGMEACTGAHHLSRKLQALGHDARLMPAKYVRPYSKGEKNDYRDAEAIAEAAQRPTMKFVATKSADQLDLQALHRVRERLVGQRTGIINQIRAFLLERSIAVRQGLHFLRAELPGILAKRTDVLSPRMLRVIEDLTGDWRRLDERIDALSDEIMTLARQDKGCERLMTVPGIGPIISSAMVAAIGSGDAFSKGRDFGAWLGLVPKQMSTGDRTILGSISKRGNRYLRTLFVQAAWVVLVKIKPEGWERYGLKSWIEAAKQRLHRNVLAIALANKLARIAWAVLHKGRAFECVKTNAS

SEQ ID NO: 384618 - protein, 422 aa, unidentified
MKYALIRVLPDVPPGGVCAGIDWASADHAVCVVDMAGRVKDRFAAAHDRAGIAALITRLRGSGAAEVAIERGDGVLVDALLAAGLTVVVISPRQVKNLRSRYTSSGAKDDRFDSFVLADTLRTDRPRLRPLVPDTPATVSLRAAVRARKDLIAHRVGACNQLRAHLAMAFPGAIGLFHELDSPLSLAFLASFPGQEAAARLDEETLATWLKTIPSRGNTAPAGVLAARLAAAPLGTGDDSAQAAVTAELAAAVAGLAARIKALGAQAAARLDAHPDAHVFTSLPRAGTLRAARLLAEIGDCRARYPDPWALASAAGVAPVTRRSGTFISHDFRWNVSRQLRDALCDFADGSRHASPWAAGICTAARDRGKDHPHAIRITARAWVLVIWRCWQDGTGYDPAKHNALQETLARQATADIPQEEQ

SEQ ID NO: 384619 - protein, 349 aa, unidentified
MKKIVKQVAAIDVAQKELVVCLGRMYDDWSPQLYAHKTFANTVKGFEVLLLWLKKMTDETIAVRFVMEATGIYHESLAYFLDEKGYEISVVLPNKISNYFRTLDVKTITDKTASEAIVLFGLERKLDCWQKPKAIFKKLKQLTRERDQIVEERTMVKNQLHAEQTEAEPNKKSVQRIKERIKMLNSQESEIKAEVDALIKQDEQLTQHVNVICSLTGVGLLIAAIVLGETNGFELIRNKRQLASYAGFDIKEKQSGTSVKGKPRISKKGNKHLRKAMHMPALCAIRYDERFKAVFARLVSRHGIKMKAAVAIQRKMLEMIYTLYKTGNRYNKNYLKKNDSLIEQHENVL

SEQ ID NO: 384620 - protein, 356 aa, unidentified
MSVYVGIDVHRKRSQVAVINEVGEVLANRNVPNGVQPILGVLGGLPAGTPAAFEAAFGWGWLVELLEDYGFDPHLVHPLQCKAIASARLKNDKVDAAILAQLLRADLLPEAWIAPPPVRQLRALLRHRAQLVRLRTLLRNRIHAVLADHGHDRAGGCWSGPGRAWLASLPLPAVSREVIEDDLALIDALQVPIDRLDWEVRQRARAEPAVKILTQLPGVGPFTALVILAEVGDISRFGSARKLAAWAGLTPTVRGSDRTVRHGHISKQGSAWLRWILCEAAQTAKRHPDFATTYQAIARRRGKKIATTAIARRLLTRAYHLLTDAASGVTPTSREGSPAPGELAFLHEPATPRSMT

SEQ ID NO: 384621 - protein, 423 aa, unidentified
MDILHERVAGLDVHKNTVVGCVRVKAGGETPRECRTFATTTEGLLALGAWLKESRVTHVAMEATGVYWMPVWKILCDGDFELTVANAAHIKNVPGRKTDMNDAMWIADLLACGLIKASFVPPEELQELRSLTRTRKQLVREQTRHTQRIQKTLAEANIRLDSVLSDTMGASGRRIIEAMIAGVRQPRKLAELASKQIKATPKELYDALHGRLTDHHRFLLELHLRQWDGLDVAIRKIDIEINQRITQMDAQIGPGTPPFRDLTDLLSTAPGISAVAAPAILSEIGADMNRFPTAGHLVSWVGLCPGHNESAGKRKPSRLRKGAPWLKTMLVQSAWAAKRKKGSYYRAQFFRLQSKRGPQKAICAVAASLLTAIYHMLKYGIPHHDLGSDHFDRRTPELKAKRLVAQLAKLGFSVQLQPAPQAT

SEQ ID NO: 384622 - protein, 342 aa, unidentified
MQAITVGLDIAKSVFQVHGVDCNGQVVIRRQLKRRYVLTFFEKLAPCLIGIEACASSHHWSRQLLALGHDVRLMPPSYVKPYVKRQKNDATDAEAICEAVSRANMRFVPTKTPEQQSGLVLHRTRHLFIRQQTSVINAIRAHCAEFGIVAPVGRQGVEELLNVIADAEDEQIPEIARACLSALGDQLHRIKAQILEFDRMIGAWHRSCEASRRLDEIPGVGPALATALVASIADPRTFRSGRDFSAWIGLVPKQSSSGGKPRLGSISKQGDRYLRGLFTAGALAVIRYAKIHGIGHRPWLTALLARRPIKVAAIALANKIARIAWAMMARGERYREPVALAA

SEQ ID NO: 384623 - protein, 340 aa, unidentified
MKDTVIGVDLAKNIFQVHGASRAGEVMFRKKLRRQQFMQFMATQSPALVVLEACGSAHYWARELAGAGHEVRLIAPQYVKPFVKRQKNDAADAEAIVIAARQPEMRFVEPRTEAQQARGVLFRARQRLVHQRTELVNALRAVLYEFGLVVPQGIAHIRHIEAMLDEAVLPEAVKQECLDLLRQISEQSVRIDVRTKKIRMLAQESENTCRLQSMPGVGPLTALAIEAFAPDLQSFRRGRDFAAWLGLVPRQFSSGGKERLGKISKAGQADIRRLLIMGAMTQVNWASRKAPAPGSWLARMLARKPRMLVAIALANRMARAIWAMATKQEDYRDPALSVAA

SEQ ID NO: 384624 - protein, 413 aa, unidentified
MNEVYRRSCGMDVHKDTVVVCVLPQTGGEGKVVRKTYGTFRNDLIRLRIWLKQLKVTEIAMESTGVYWRPIWNVLEEQGFRLLLVNPAQVKALAGRKSDGRDAQRIAEYLQDGRLDGSFVPPAEIRELRMLLRHRVSLLEQRNQVHNQIRDLFETASLKLSSVASDLMGVTGRRIIEAMIAGEDSPEILSWKVKGKLREKEKLVKESLKGYFNEFHRLMLESYYKQYQFLTGEVAAFEQRIAQRMEPYARQVELLVSIPGVERMVAWHMIAELGSDLSVFSDADHCASWAGLVPGENESAGRKKSTRCRKGNKTLRRVLAQAAWAASHCTRGYLRAYFYRMKSRNGWAKAVIATAHKILVIAFHMLQSDKPYKDLGDDYFDRLNPARTTRKLVARLEALGHQVQLSKAEYSNA

SEQ ID NO: 384625 - protein, 338 aa, unidentified
MEVYAGLDLHSTNTYVAMIDGENNVLYKQRHRNDVLAILSALDPFKKNIQGVVVESTYNWYWLVDGLMDAGYRVHLANVSAIKQYEGLKQIDDRRSSLWLANLLRLNILPTGYIYPKEERPTRDLLRKRLQLIRHRTSHVLSVKNILARNLGIRMKTYDIKKLKAAEVGALFPDKETRLMVMSSIGLIQHLQEEIDGIEAVITKKLKIRKDFMKLLTVPGIGTILGLTIMLEVGDINRFPTVGDYSSYCRCIRSIRTSNGKVTGYGNSRNGNKYLAWAYLEAAHHARRWHEAIRSYYERKISRTNKIVAIKTVSHKLARASYYVMRDGVDYDQARLFA

SEQ ID NO: 384626 - protein, 323 aa, unidentified
MARIICGVDVSSSSLEARISREGAAASFPNHAEGIAELAAFCHAHQVELVAMEATGGYEQQAFAQLSQAGLPSAILNPRAVRQFAQSMGRLEKTDRIDAGMIAWYAEVKQSPPVCLAPQSQQHLRALVTRLRQLTEIRTAQLNQQRLVIDRSVQASFRKLLAFVARQIGDLEQGIAKLIDQDPLWRELNQSFRTIKGVADRTVCRLMAEMPEIGTLSNKTISKLAGVAPLARDSGKYHGKRVVRGGRASVRDILFIVASVVGRYEPDFMAFQQRLRAAGKPPKVVRIALAHKLLVRLNAKAREVRQSMLKLQPGSSSLLLGTR

SEQ ID NO: 384627 - protein, 345 aa, unidentified
MPSIVGGLDIHRKQITFDYADTVTGEVFCGQIAPADRAHLRGWLAGRFEHPEDAAFAVEACTGWRYVTEELTAAGIAVHLAEPADTATQRGKKKRAKTDRADARLQRILLAQGRLPECWIPPGHVLECRALLELYHDLRTEHTAWIQRAHAVLFHQGAPVFCDLSRAEAPAELAAVARGHLSPAGQLQVDACLRMLAVLEAELDAVRRRLLAAARHLRGARTLTESIYGVGPVTGLALTCWLGGAGRFSSARKAVRFAGLDITVYSSDSKRSPGHLSRQGPPVLRWAVYEAGKTHARPAAPDHGYYAAVKDRKDGKRAALSEARKITRRACHILSEIGDDALAMI

SEQ ID NO: 384628 - protein, 345 aa, unidentified
MSIVGGLDIHRKQLTFDYLDTVSGEVRRGQVAPADREHLRAWLARFAGRGEVAFAVEGCTGWRYVAEELAAAGVVTHLAEPADTALARGRKRHAKTDKTDSRHLRTLLAEGRLPECWIPPAQILEYRALLETYHDLRREHTAWVQRIHAVFFHQGAPPLSEGALRTEQGLAALQAAAAAHLSPAGQLQVATALEMIAALEARLHTLRRQLREAAAHLTGAKVLAARLYGVGPVTALAMTCWLAGAGRFSSSRKAVRFTGLDITVWSSDRKGPPGRLSRQGPPVLRWAVYEAGKTHARAAAPDHAYYAAVKDRKNSKRAALSEARKIVRQACHILTELGDDALTAA

SEQ ID NO: 384629 - protein, 353 aa, unidentified
MTPRTTTPKIYCGVDTHADTHHAALVTDTGVLLDSRQFDATAIGYHDLEDWILEHGHPISVGVEGTASYEAGLTRHLLGHGIFVVEVPRPNRKLRRNSGKSDPIDAEAAARAVLAGNQLAAPKRGDGPIESIRALRIARSGAVKAATASMNAVRSMIVTAPESLRTELRGHSATKLLDICAAFEPDLTALHEPAHAIKLSLRSLASRTRELRREAAELKKHLATLVARIAPRTSDVFGLGPDTAAALLITIGDNPDRLRSESSLAHLCGVAPIPASSGKTTRHRLHRGGDRRANQALHTAVVVRLRYRDEARSYAKRRTSEGKSMPEIIRCQKRYLAREVFSALRADYQALIT

SEQ ID NO: 384630 - protein, 377 aa, unidentified
MKRIKFVGLDVHAETIAVAVAEQEGEIRSLGMIPNREESVRKVVKKLGPVEQLRFCYEAGVTGYALYWQLTRLGAKCEVVAPTLVPVKAGDRVKTDRRDALKLARNYRAGELTAVWVPDAEHEALRDLVRAREAAKKDQLRARHRLSKFLLRHGRRPPVGVALWTVKYLEWVKRDVHFAVKAQEATLLDYLHEVEHMAARIVRLDSAIEEAVKVAPAKMRAVIEGLQALRGIAKISAVTIVAELGEVTRFSKARELMGYAGIVASENSSGERQRRGSITKTGNAHLRRVVVEAAWAYRHRPAIGFTLRKRQGNLSEEVKEIAWKAQHRLHARYGKLLAKGKNKGVVVTAVGRELLGFIWAIGVQVEAEQKESLRQAA

SEQ ID NO: 384631 - protein, 369 aa, unidentified
MGQCIIYVGLDVHKDTIAVAVAEAGLWGEVREHGKIANTPAALKALAERVARRGRELRFCYEAGPCGYGIQRQLSAVGHECAVVAPSLIPRKPGERIKTDRRDAINLAKLHRAGELTPVWVPDQAHEAIRDLVRARQAAVRSLRQSRQQLSGFLLRHGHHYHRPAWTLLHRRWVASLKFDQAVHHIVLEDCIAAIEAATARRDRLEADIEAALPEWSLAPVVQALQALRGIGLVAAATLMAELGDITRFTNPRQLMAYLGLVPSEHSSGRTRRQGGITKAGNGAARRMLIEAAWSYRFPARISREQLLRQERLAKPIRDIAWKAQERLCRRYRALARAGKLPTVITAAIARELVGFIWAIAKQIPSAAS

SEQ ID NO: 384632 - protein, 343 aa, unidentified
MKLIRVGVDLAKAVFQVHGVDRNGQVTLRRKLTRANWLKVLLDAVEPGCVIGMEACGGAHHWARALQAHGIAVKLIAPQFVKPYVKSNKNDANDAEAICEAMGRPNMRFVAVKTIEQQDIQAVHRVRFELSNQRKAKGNQIRGLVAEYGLVAPKELWHLRAAIPVWLEDAENGLSARFRRLLNGLWQDLLALDQRMTELDREIALIANADPVAKRLQQLRGVGPMIATALVATVGDAKQFANGRQMAASIGLTPRQNSSGGKERLLGISKRGDTYLRTLLIHGARSIVRTARGKDDRLSQWVTRIAETRHYNVAAVALANKTTRIAWAMMKHGTEYQTDQTAA

SEQ ID NO: 384633 - protein, 411 aa, unidentified
MIKENYVYVGIDLHKETHTAVMIDCYNQKLGEITFPNRPADFPKLVTKVKKCNTDGKEVAYGLENVYGYGRALAVWLIDKGYLVKDVNTAISHRQAKHRGAMYRKSDSDDAKAIALATLNMLDKLPDACPNDAYWSLGQLVHRRDNIMKQRTRLVNQLHEQLCIAYPSYKQFFNDISRPTALYFWEHYPFRKYLKGKSVEDLRTELVPVSHNRCSTKNCEKILDAVASDKVKNIDYQDARDMVTLSIVSDLQHYDSQLAEVDKMLEQMYKMLGCTLTTIPGVNVITAVKILAEIGDIKRFSNANKLAQFAGIAPLHLSSSGKGKDVATKQGNRRLQATIYFLAIQMVQVSSKGTPRNSVVRAYYEKRKAEGKTSQQALICISRRLISIIYGMLKHGTEYRMPVVESAGENR

SEQ ID NO: 384634 - protein, 405 aa, unidentified
MFDTEDVGVFLGLDVGKSAHHGHGLTPAGKKVFDKQLPNSEPKLRAVFDKLAAKFGTVLVIVDQPASIGALPLTVARDAGCQVAYLPGLAMRRIADLYPGEAKTDAKDAAVIADAARTMPHTLRSLELTDEITAELTVLVGFDQDLAAEATRTSNRIRGLLTQFHPSLERVLGPRLDHSAVTWLLERYGSPAALRKAGRRRLVELIRPKAPRMAARLIDEVFDALDEQSVVVPGTGTLDIVIPTLAASLATVHTQRRALEAQINTLLEAHPLSPVLTSMPGVGVRTAAVLLVTVGDGTGFPTAAHLASYAGLAPATKSSGTSIHGEHAPRGGNRQLKRAMFLSAFACMNADPASRAYYDKQRARGKTHTQALLRLARQRISVLFAMLRDGTFYEPRHPEDVELAA

SEQ ID NO: 384635 - protein, 454 aa, unidentified
MAKRSKKSNFKVQSLPEHLRHINLNAAGIDIGSERHMVAVPEGRDEVSVREFGAFTADLQALANWLEQCGVTTVAMEATGVYWIPLFELLDSRGFEVKLVDARHVKNVSGRKSDVLDCQWIQQLHTYGLLAGAFRPTDELCVLRSYLRQREMLSQSSSMHIQHMQKALQQMNLLLHNVVSDITGVTGMKIIKAILAGERDPRRLARNRHKRCHNTSATIAKSLVGNYRAEHLFALQQAVDLYETYQAKIADCEEAIVKQVDKQPDLTADSLPPSEKPIQARERIRSGVDVRELLFKKSGVDLFATPGLAADTLLTLSSEVGFDMSPWKTIKHFTSWLGVCPGTKISGGRVLDKKTKRRPNRAAQAFRMAAATQARSKTALGAFYRRIKSRAGGKQAITATAHKIARIYYTLLTKGTSYVELGQEAYEQKYKERRLHHLMTQAKSFGFQLVPCAT

SEQ ID NO: 384636 - protein, 397 aa, unidentified
MYIVGIDIAKRKHEAAVIDGEGAVIIKPFSFTNNCSGYNRLLAMLTKAKLPLDEVSFAMEATGHYWLALFTRLQKEGFRVQVINPVQTNSIRSFYIRQAKTDPRDALLIAEVIRFGHFSESTLHPENIYELRELCRGRHAIVSMQADVKRKVVALLDQVFPEYETAFTNLFSDTSMAILQTCPTPKELSEMPLEELCHLIEVSSHKRFRMAKAQELQALARNSFGFAMAGDVFSTMIRLYAKHLVFLKQQVQEMDRKIAEIMDTLDTPITTITGIGPTLGAYILSEIGDISRFSSAAKLAAYAGIDPTMRQSGEYNGVRNRMSKRGSPYLRHPIWLAASSAVLHDPALKLYFQKKRDEGKPYMASVGHACRKMVSIIYAVMRDNKAYTPYIPNEISA

SEQ ID NO: 384637 - protein, 315 aa, unidentified
MQRRKTSTKCGGIDVGKHWLDAAVHGHAEAMRVGRDAAGVAALIAWLVSHGVGRVGLEASGGYERMVVEALEAAGLEVVLHQPLEVRLFARLKRLRAKNDRIDAALIAAATAQVDQVKAASDPRLRDLADRLTAYEQISDQLAELKGFLEHAGPRDVLRQLKAQVASLARLKTRLAAGVLERLKAHPDLAARYALLISLPGVGPIVAASLVVRMPELGQMARGQAAALLGVAPFDRDSGQLKGKRFIAGGRRRPRRLVYLAALSAKRCDPHHKAFAQRLAERGKPAKLIIVAVMRRLIEAANLVLARQKPWAPLA

SEQ ID NO: 384638 - protein, 403 aa, unidentified
MTDTTYDVYCGIDVGKTMHHAIALRPDGSRILSREIPQDEDQIRDLVGELGAHGSVIVVVDQPRNIGALPLAVARNCGADLAYLPGLRMRRIADLYAGSAKTDARDAYVIADAARTLPGTLVPIDSRNEVVEGLRILAGFDADLAVEENRLINRLRSLLLSIHPSLERAIGRHLHRPIGPGLLAKFGGPEGLSNARPAAVRKAARQYAPRTGDAVAASITNAMKEQTVVVPGAAKADFVISTLARQLLDVRAARAELESQFETELARHPHGPIITSMPGVGPKTAATILVEISDIRRFDNPGRLAVYAGVAPRTHRSGSSIRGDHHQRGGNTRLKRAMYLAAFASLRRPESRNYYDRKRAEGKTHHAALICLARRRSNVLYAMLKNEATYQTAHDRGAEVCAA

SEQ ID NO: 384639 - protein, 353 aa, unidentified
MGIVVALDVHRRQITYKTLDRDSGEVRRGRIAPAARVDVRAWLAQFAGSEAEFALEGTTGWRFVVEEIERAGHRAHLADPAETAAKRGRKRRAKTDNADCDLQLRLLLAGELPESWIPPAQILELRTRVRMRKTLIDQRTAWQQRIQAQLFHQGVPAGLRLRTQAGRDALAQAELSPAGRELVALGLRMIDALDRELAPLDRELHAFARRQHGCRTLIAGLYGVGPVSATAILAELGDARRFSSSDDAVRHSGLDVTVYQSDSKRAAGRLSHEGPELLRWALFEAAVSAARASSPEHAYYLQVAERLDHTRACLSVARKLCRRAYHILRELGDEALAPVDPDPQAEEAIAAAA

SEQ ID NO: 384640 - protein, 457 aa, unidentified
MEQALAQRSRSVSLKPGKSRAALTITHPNAAGVDIGNTAHFVAVPPDRDDEPVREFPSFTVDLNAIADWLKACGVDTVAMESTGVYWIPLYELLESRGFTVLLVNARHVKNVSGRKSDVLDCQWIQQLMTYGLLSGAFRPADQVCVLRSLWRQRAMLLRSQARHVQHMQKALTQMNVQLANVISDVAGETGQKILRAIVAGERDGQVLGSMKNARIRASVDEIAKSLQGNWRAEHLFALKQALGAFDFVGKQLAECDIEIEQQLKTLQVHEGEPAKGKQRGRARNAPKFDLRTQLFKMCGVDLTRIDGIDVTTALAVISETGVDMSRFKTVGHFTSWLGLCPGTKITGGKVMNGKTKRCANHAAQALRLAAAALRASQSALGAYFRRMCARMDKPKAIAAAAHKLARLIYTMLTKGEEYTDQGQDYYEERYRERVLRQLSQRAHKMGMKLVVAEQVA

SEQ ID NO: 384641 - protein, 486 aa, unidentified
MPSPKPDGTGQPSLTLHRYGVGVDCHSRFFQVCVLIPNGTEIVRFERNVPALWPELRAAQAWILATLRDHDIDVSPSDLRYTCESTGQYHMPLCLAWRGHPAIINPSDTGHLRRKTDRLDARKLAQHSLHGLWRESWMAPDEIQELRVLALQRSKLVAERSRLTNRINSDMLRFGHVVGQLGKINGPVVRALIEDFCQNGSVGLHDDHFSDIRIPPGVVLVFDQRWKRVDVLDQEVKVIEDLCMKQVDTLTWRIGEGRTASGRQLRSSLESIPGVGTQTVITWLAEVGDITRFGSVNKLLAYAGLDPSKDISAGKVTGTKPRKGNARLQGALRNAARAMLGRAPSCKFSMWARGYMGRHSRAGKAKAIHALARRVGKALYYCHLKNEPFDDSGYQALLSESSYPLCPVEEMGLSPGVVRKLKDHGLRTSRQVVDAFYSDLGRRPGCGKVTVQAVATWIDSHRNRSPDRIRKPRGPEASGGRPPAEG

SEQ ID NO: 384642 - protein, 402 aa, unidentified
MAAGQLWAGVDVGKEHHWVCVVDDTGTVVLSRRLINDEQQIRGLISEIDSLGDRVSWTVDLTTVYAALLLTVLADAGKSVRYLAGRAVWQASAVYRGGEAKTDAKDARVIADQSRMRGDDLPRLHPDDDLITELRMLTAHRTDLVADRTRTINRLRQQLVAVCPALERVAQLSSDRGWVVLLARYQRPKAIRQSGVSRLTRILTDARVRNAPSIAAAAVSAAKTQTVRLPGEEVAAALIADLAREVIALDDRIKTTDADIEDRFRRHPLAEVITSIPGMGFRLGAEFLAAVGDPALIGSADQLAAWAGLAPVSRDSGKRTGRLHTPKRYSRRLRRVMYMSALTAIRCDPASRAYYQRKRDQGKRPILATICLARRRTNVLYALIRDNRTWQPEPPLIIESAA

SEQ ID NO: 384643 - protein, 299 aa, unidentified
MFFFWGRPSCKTLRLLVSTSASILSTFTVSDKSGKALLCTKFTRTKLIEFLAGCTPATVVMEACGGARFMARRIADLGHEPKLIYPQFVRPFVKSNKNDFVDAEAICEAASRPSMRFVQPRTEVQQAMRALHRVRESLVRDKVKTTNQMHAFLLEFGISMPIGVTVIKRLSTVLAENELPPYLAQLLMRLHAHYLYLVEQITELETALEQELSRDETEQRLQTIPGVGPITANVLSSQLGDGKQYSCSRDFAASTGLVPRQYSMGGKNTLLGISKRGDKNLRRRLLTNLDDSILQGEGR

SEQ ID NO: 384644 - protein, 381 aa, unidentified
MEYYTTIGVDVSDKTSKICVMTKDGGKRRVLVETTCPTTRGGFSECFSKFDRAWPAVFETGAHCRWMKAHFESMGFKAIVANPAEVKLITESNAKSDRSDARKLARIALADIELLKPVRLRDEKHQHMLRLHEARQLLMRFRSSMICQMRSFAKSCGFRLPDCATEWFHEIDKSKWTDDYEQTVWPVLHVIETVNQKIAAYDTMIEKLANTPVFKAQVERAKEVYGVGTVGATVVVAAIDGDPERFKHARDVGPYFGQVPKTFQSGQSDPQLGMTKAGNDLVRKVLTECAHVVMKSSAKDTDLKLKGLKIAARGGRIAKKKAIGAVARGLAVRIVALLKDPKREYVPLSEEGRRGFERYRAEQEYIAMRNDKRSMTETAQD

SEQ ID NO: 384645 - protein, 400 aa, unidentified
MDSRRIVAGLDVHKDSIYLCIMRQDEAILLQKTYGTLTPELHSMCEEMVSYGVEEAAMESTATYWMPVWGVLVKSMKLKLVNPYFIKQLPGRKSDVKDAQWIAECLLKNLIKASFVPEPVVQDMRKYNHRIFDLNEDMTYNTNKLDAALQRCGFRLSNYVSNVKGKSYQDCIQAISEGTVDPEELVRLVHSRTVNKHGRETIKAALTGEFHEADILLIRHYQETIRMIQRHVEECQRALTAMCNEHFPRQFKRLQTIPAVKERAASVLIAETGGDMKAFKKATHLVGWAGLKPRNDESNRKIKSNRTTYGNRFLRQILIEVAWVASRTRNCFFSNFSYVQCTQKRKNKMKIQVAIARKILVAAWHMLTNEEDFIDVYLKRLEKDAEVQQQILELESTVAS

SEQ ID NO: 384646 - protein, 329 aa, unidentified
MSVHQQGRETVAASRPCAGIDVSKAHLDAAWGERFERVSNDAGQWDALVAKFKADEVDVVVLEASGGYESAAACALQAAGLAVVVVNPRQARDFAKSLGRLEKTDRIDAHILRDFAEVIARHAQRERYIRVLPDAQRAHLAALVMRRRQLLDMRTEETNRLHTAHQAARKSVQAIVKAIDKQLAAVNDDIDRHMQQHYKDLRTWLESASGVAQVTSSTMIALLGELGHLPRRSIAKLVGVAPLARDSGPRRGSRVIWGGRSEVRNVVYMATVSATKHNPVIRAFYERLIAKGKPPKVALVACMRKLLTILNAMARDHAVWDPAKHIKHA

SEQ ID NO: 384647 - protein, 348 aa, unidentified
MKIIGCDFHPSYQQIAMVDTETGELWEGRLEHKEGEARRFYQALHGQRVRVGMEAVGNSQWFEKMLAEMGHELWIGDAAQIRRLVVRQQKTDRRDAQHILNLLRDGRFPRLWVPSAEMRDLRQLLRHRQKLVELRRQVKNQLQHLALNQGVQRKRRLWSREGRAVLEQLPLEGWTARRRAELLAMLDQLEGQVGELDQAVCSEALRRPEVRLLMTHPGVGPVVGLAYVLTIDPAERFPRGKQVASYLGLIPREHSSGGRQRLGSISKQGNTMMRTLLVEAAQTAARFDEELRRDYRRLAARQHRALAKVMVARKLAVRMYWMLRENRPYPQPPVAQMQGRPSHSVVAG

SEQ ID NO: 384648 - protein, 435 aa, unidentified
MSLSLYVGIDIGKFSHVASLLSSQLLFQHHRYEACPTLAFEQSRSGFEKLLSALTEHAPAPACHVLLENTGHYGRAIEQYLQEKGVQVYRISVSTEKRGKQKSDKRDAQALAVLLYNQIERHIIVTDKSQIAHKLVPPSDTARLLHGLVQHRLELVHETTRRKNKLTAICDELFPELTQVYADPNTPSALQLREKYPTPQAVASADLEDLCNTRKHHRPSKAKLAELQDLARSTIGTKDQSRLTCLLIEQRQLMKELTLLNEHIEALNVEISKAVSTSREGRILTSFPMIGPIHAAVLIAAIGTIANFESIAKLRGYCGWSPLQQQTGTSKDSMILQPAGNRLLKHTIYLITLQAIHMDTPFKALYDRLVPIKCHYDERTQRYRGKMKVIGRVAGQIIKLIYVLLRRDHDLIAGTDGGQVPDPELYDPIKHKIKR

SEQ ID NO: 384649 - protein, 338 aa, unidentified
MKLYGAIDLHSNNNVTVLTDEQDHVVYEKRLPNDLALIVEQLAAYRDSLQGIVVESTYNWYWLVDGLMDQGHKIHLANTAAIQQYEGLKYTDDPYDARWLAHLLRLGILPQGYIYPKEHRPVRDLLRKRGQMVRQRTMNLLSIQNLWSRNTGGSMNANRVKRLDTKEIDELVHNADLALAIKANLSMLQCADEQIDILEKAVTERVQLEPEFKLLKTVAGIGLILALTIMLETGDIRRFPTVGDYASYCRCVGSKKISNGKKKGSGNTKNGNKYLAWAYVEAANFAIRYSPRIKSFYQRKKAKTNGIVAIKAVAHKVCRACYCIIKDQIAFDVTKAFA

SEQ ID NO: 384650 - protein, 326 aa, unidentified
MEHELHYIGIDTAKEKLDVDVLRPDGRHRTKKFANTTKGHDELVSWLKGHKIDHAHICIEATGTYMEPVAECLYDAGYIVSVINPALGKAYAQSEGLRNKTDTVDARMLAEFCRQKRPAAWEAPHPLERALRALVVRHQALTDMHTQELNRTETAREVQRPSIDAHLLWLEAELKRLEKQIKDLTDDDPDMKHRRKLLESIPGIGEKTSAVLLAYIGLKDRFAHARQFAAFAGLTPRRYESGSSVRGASRMSKAGHVSLRRALYMPAMVATSKTEWGRAFRDRLAANGKKGKVILGAMMGKLAQVAYGVLKSGVAFDASRHNPVAA

SEQ ID NO: 384651 - protein, 299 aa, unidentified
MNVPGKTVLKPLTFSNNKAGFELLDLSLRQLNQDYLIALEDTGHYAFNLLNFLHEQGYKVYTYNPLLIKKFAKSLLLRKTKTDKKDAHGIALKLLSDPNREQFQHDNRQVELKILARHIHRLKKKQSDWKVQYTRCLDIIFPELDKIVGKHSEYTYQLLTCYPNPQKRLEAGFDNLIEIKRLTASKIQDILSVAPRSIGTTSPAREFEIIENIKHYKRLIDKAEKCVNDLMAELNSVITTVTGIGNRLGAVILAEIQNIHAFDNPAQLQAFAGLDSSIYQSGQIDLAGRMIKRGSPHLR

SEQ ID NO: 384652 - protein, 452 aa, unidentified
MAKRSKKRCEELPILHPYAAGIDVGASELFVAVSADRDPQPVRSFPTFTRDLNALADWLQQCGIRSVAMESTSVYWIPVYQILESRGLEVCLVNAQHVKNVPGRKTDVSDCQWLQYLHSVGLLRASFRPPGFICAIRSLWRHRSSLIQMAAEHVLHMQKALDQMNLQIHRVLNDITGMSGLRILDAILAGERDPVTLARLCHGGVKSSEDTIAKSLEGDYRPEHLFALRQSLAAFHYYQHLVVEVDQEIQGQLGSLGTATTAEPTVPKRTKASAYQRRRYEPKTFDLRGELYRIFGVDLTNVPGISAITAQTILCEIGTDVSRFRNASAFASWLGLCPENKISGGKVLYTKSRRVRSRVATALRMAANSLHHAKDYLGEFFRRITRKLGKPQAITATAHKLARIVYHLLSTREAYNESVFHRCDEEANKRAQYRLRKQAAQLGFQVLPVENS

SEQ ID NO: 384653 - protein, 349 aa, unidentified
MLAGIDTHKDTLALAVIDDAGRPVVVTELANTEAGFDALEQLLTRHTVRRVGIEGSGNYGRGVAVRLVLAGGIDVVEVPPSLTSRERSGRPGAGKTDPVDAVAIARLTAREPGLPPVRLAVGQAADLRALADYRAQLVAERTALASRTHAELHGLRPGYQRQVKRLTGPTFISAAKDLLAGDDSIRAQLTRRRLTRLAQLTAEIQEVTGLISAAVERVKTGLTDVYGLGPVSAATILGEVADIRRYRSRHAFAAANGTAPIPASSGRTTRHRLNRSGNRQLNRVLYTIAITQIRADTEGRAYYQRKRAEGKSGREAIRCLKRRLSDVVYKTLHEDLAAGRAPAPAAAGR

SEQ ID NO: 384654 - protein, 349 aa, unidentified
MGVLIGIDPHKSVNAAAAIDEQGELAGHETFPANREGLRALQRWAKRFPERRWAVEGAAGIGRPVAQRLVMAGEKVVDVPPKLSSKARLLSTGNARKNDRLDATFTAQAALHNERLAPVLSEDGDDAHVEVLRLLTERREDLVAERTRALNRLHVLLRDLLSDTVSKQLSADAASRLLRRVRPRDEPARTRKRLASEVVRDVRALDRRIADLDERIRQEVEASGTTLTEIFGVGPILAAKIVGIVGNVARFPSKAHFASYAGVAPIEASSGEVVRHRLSLGGNRSLNKVMHMIAVCQARSDPRGGVYLRKKLAEGKSRREAMRCLKRRISDAVFKALLADSQLALQTVS

SEQ ID NO: 384655 - protein, 363 aa, unidentified
MSELTTVAVGLDVHAHSIRLAAVRADELLEERTLAYDEEAVERVLRRWPSVRCCYEAGPTGFGLHRFLVGRGIDCAVVAPGLVPQRPGDRVKTDSRDARKLARLLAGGLLEPIHVPSPEFEAARDLVRAREDARLDRMRDRHRLSKFCLRHGLRLPTSSWTVARRTWLSEQRFEFVAQQQTFDSYVHAVDLVDARIEQLEQAIRETAEQEPWRALVGRLRCLRGIDTLTALALVAEIGDFNRFKTAAEFMAFVGLVPSERSSGEQRRQGSITKVGNAHIRRLLVESAWHARRRPTVGYQLARRQRGQDPADIERAWRCQQRLYRRWQRMAGRGKPQQKIVVACARELAGFVWAIATEQPLRNS

SEQ ID NO: 384656 - protein, 338 aa, unidentified
MTVIGIDTHKASLAACAVDERGAALAELTFANTPGGHQAVAAWAASIDPAARFGIEGSATYGAALARFLIGAGWTVHEVPPQLTRRERIRTRRAGKSDPADALAIARVALTEVELPPVRRADATRELQLLVTAREDLVADMTRTRNRLHADLLVLAPGHRGGLVGPRALARLARQLGRCSGLHAELARDRLRALRRLQVEADRLEVAMAARVAGHPLLAIPGIGTLIAAKLIGEVGDVRRFRSPDAFAALAGVAPIPASSGQVQRMRLNRGGNRQLNRALYLVALVQLRHHPPAQAFVARKRAAGKSQREAMRCLKRHLARVVFNALQRGAEQLSAAA

SEQ ID NO: 384657 - protein, 352 aa, unidentified
MHMIAFDSHKHYTVASVQSINGQIIKEARIDHGRGNIVRFLAQWDKGSPVAVETIGNWYWIVEEIEHAQMRPRLVHARKAKLMLGMINKTDKLDARGLNRLQQTGTLPTVWIPPLEIRDKRELPRTRMVFTHQRTKLKNRIHSVIDKYGLQNKFTDISDIFGKRGRQLIQESLRLLPEQTRYAMETLLHHLDEVERQIEEIEKRMKEVFQPDEETRLLMTMPGIGFILAVVISLEVGDVRRFSGPERLASYSGTVPRVHASGEKVRYGRLRPDTNRYLKWAFCEAGSSIAMNRNKWPHRHISKVYARVRHRQGHAKAVGAVARHLAEATYWILTRKEPYRERGVSRVSLAET

SEQ ID NO: 384658 - protein, 420 aa, unidentified
MPRREDVKDDIIHLRSAGVDLGKRFLLACVRTPSGKRAGSWSVETERFGTTSAEIRRLLAWLVDRQVEVVVMEATSDYWRPVYYLLQPHLNLMLVNPAHLKGIRGRKTDPNDAAFLAWAGASGMVMASFVPQRDIRELRDLTRRRTELVRAAGWEAQRLEKELEDTGMKLSAVLSNVAGASGRAILEALIAGERDPGRLADLAVGRARNKIPALTEALDGEFTDHHAFMIRHYLDEIDRWKSVIATFDARIARLLADREQDMANLATIPGIGRLGAEIIIAETGGDMAQFASAHHLASWIGVCPGQNESAGVSRSGRTRPGNSNLKRLLGIAAMVAIKKKDSYLGVFFRRLAARRGGKRALVAVMHKLAIAVWHVLHDKTGYRELGADHFTRRDPERAMRRMLKEANSLGLTVRFEPITT

SEQ ID NO: 384659 - protein, 460 aa, unidentified
MKEHRDTSESPTQVGKASEPLGIVHPDAAGIDIGSQKHYVAVPPDRDPEPVRCFGCLTPDLQALARWLVACGIKTVALEATGVYWIPPMQVLEEYGLEVYLVDARQAKNLPGRKTDVKDCQWLQQLHSHGMLTRAFRPADAICVLRSYWRHRKDLVEMTAMQIQLMHKSLEQMNLQLHKVLSDVTGVTGMRILKAIVAGERDPVVLAQMKHPLVQSSEDTIAQALTGDWRAEHLFTLRQALELYEVYQQKIEACDQEIEKYMQSLDARAEAKDLEPRKGGTRRKNQVHFDLRGQLYELTGTDLTSIDGIDVMTAQTVVSESGIDMSRFATEKHYSSWLGLCPNHQITGGKVRRRRTRKVRNRAAQALRVAAQSLHRSKSALGAYYRRMRGRCGPAKAVTATAHKLAILIYRMLKYGLAYVDQGQQAYEKQYQERTLQMFKRRAKQMGYALVDLRSGEVVS

SEQ ID NO: 384660 - protein, 349 aa, unidentified
MRFYNQPHRFYAGGDLHARTLFLHVLDDQGKTRFERNLPANPQAFLDAVAPFRDGLVVGVECMFAWYWLADLCEDEHIPFVLGHALYMKAIHGGKSKNDRIDAHKIATLLRGGMFPQAYVYPRELRETRDLLRRRTFLVRQRSQFLTHIQNTNSQYNLPPLTKRLSYASNREDPELIARFPFESVRRSIQTDVRMIDALDDEVRELELYLTRHAKVDDPQTYHLLKTIPGIGPILALILLYEIHDVKRFPDVSNFASYARLVRCEHESAGKVKGFGGKKIGNGHLRWALGEAACLMLRCHEPAKRWLQRKEKKVGKPTALGILTAKVGRTVYHLWRKRAAFDGKTFLTS

SEQ ID NO: 384661 - protein, 265 aa, unidentified
MTYVGIDVSKATFVVAYSSAKSSKTKTFKNTTKGVHEFIQTLSADDYHCVLEATGNYSSLLVYLLSQAGITVSLENPLKIKNFARVMLSVTKTDETDARLIALYGEKMHPAPYKLRSDAILILKQKRTVIRQLKKQLIATRNLKGSMEALPFFDSKCKKTIEKTIAFLERQVKDLEEELANLAQGEYRKQMGLLTSVKGIGVTLAAALIMATGGFAYFDNAKQLTRYLGLSPTYQQSGTSVNVKGHINRNGDSSLRSLLYVAAMA

SEQ ID NO: 384662 - protein, 341 aa, unidentified
MNGSKNVVGIDIAKRVFQLHSIDMETGEIVSLQLKREQFLEHFANRQACLIGMEACGGAQHWARKLTAMGHQVKLLPGKAVKGFVTGNKNDRHDARAIWTAVQQPHVKAVAIKTEEQQAILALHRMRSQLVKFRTAQINGLRGLLTEYGEVMPQGKAGVRKGITDALARLADRLPAMVIDTLRDQWARIGKMDEEIATIEQRIKLWLKNDHACKRIAGIPGVGPLTATAAVAIMGDAKAFKSGREFAAFAGLVPRQTGTGGRIKLLGISKRGDTYLRTLLIHGARSVLTHAKDPGPWITELRQRRPLNVAVVALANKMARTIWAILAHERTYQKEFVSQPA

SEQ ID NO: 384663 - protein, 400 aa, unidentified
MKTVLSIDVAKNKSMIMLMNNDGEILIDTKEIKHNLGEFEKVKEEIEEINPENLTVFMESTGTYHLPVERYFKENGFNTLVINSLTTKNNFDTIRKTKTDRKDCYRLAKLFFVNEVEYHEISKKDLYANLKAMTRQYFYLTQVNIRCKNRYKRLINICFPEFEGFFARNRIYEDTALNFIKAFPHAYIVREKRIDALYNNLRKVDARHDYYYKRLARRLKDTAMDSFPGVDKDHADVKNLSDMASILQENNRLIDEIRKNMIELAKQSPYFEIVNSFYGIGEVLAAELLGELGDITRFDNHKQLIAFCGLDPAIVQSGKSINVHGAISKRGDKYARWILFNISQMVVKLGHQYPSHPVYNYYLIKKAEGKHYYESLTACSTKILRMLYSMCKNNKRFLEE

SEQ ID NO: 384664 - protein, 387 aa, unidentified
MFYCGIDIAKRKHAVSLLNDQGQTLKAVFTIANTRPGFDHLLAELQTLQGSVTVGLEATGHYWLALYDELTRTGYPVIVLNPLQVAAYRKSGIRKIKSDATDAVWIADYIRIANLPPTEQNLPVMLQLRELSRFRFRLTEQVGNSKRKLLTILDRVFPEYEHLFSSVFLKASRAILKEAVSAQEFADFDLQELTDLLAQASRGRFSQDQAEKIQEQARQSVGVGFLTNAVHLEMHCLLAQLDLLDEQRSQVDQTIAALMQQVPQYITSIPGIGPVTGAAILAEIGDIQRFETVDKLVAYAGIDATVYQTGQFEASEAHMSKRGSPYLRHALWCAATAALLHDPSLQQYYQKKRNEGKHHGTALGAVCHKLLARIFVILKEQRAYVIR

SEQ ID NO: 384665 - protein, 409 aa, unidentified
MTNTLFVGIDVSKKTNVIRFTDSAGETLSLFNAPNNQDGATKILEKLKDTILQTDFRSVTIGMESTSIYADHLAVFLRNDDFLKKWHVKVHILNAKQVSKFKESYPELPKNDNIDTLIIADYLRFGRIAKEVNLDEKYIALRNLTRARFQMAQNLSREKTRFLETLFYKFSALDSSKVFSNTFGATSIAVISDFFSVDDINDMPLEDLADFVALKSKNKFSVPQKIALELKAAAKSSYRLSKTVNDSLNQLLAVRLVGIRSLQHQIKDLDKAISSYMQLFPDILSSIPGFGPVYSAGILAEIADIHRFNNHAALAKYAGITWSRYQSGGFEAANTKLILSGNKYLKYYFLEAANQVRMHDPEFQRYYQSKFKEVPKHQHKRALALTARKLVRLVYALLHTNRLYIPPTL

SEQ ID NO: 384666 - protein, 351 aa, unidentified
MVIIGCDFHPGFQQIAVLDIGSGEVKDLRLAHKEEARRFYASLQGEEVLVGVEACGYTQWFEQMLEQMGHRYQVGDAAAIRASYVRRQKTDRRDAGHILRLLVEGRFPALWVPTASERDARQLIVHRHKRVQMRTRVKNQLHALALNQGLRLRWQLWSEKGLEQLRALPLLPYAASRRADLLEQLEAMNADIERLDRMVGKEAEARPAAVRLMSHPGVGPVTALAFVLTIGDVRRFEKSRQVASYLGLIPSERSSGGKQRLGHISKQGNSLLRFLLVEAGHTAVRGDAELKRCYQRLQHRHSTGVAKVAIARKLALRLYWMLRNQIDYAQIHGPYAGKPVSFCGAKTRPAA

SEQ ID NO: 384667 - protein, 337 aa, unidentified
MYYIGLDIHKKTISFCVKDATGCVHREGKIGSSRRELDAWVRTLPQPRMMAMEATIFTGWIYDYLLPHAEKLKVAHPLMLRAIAAAKKKNDKIDAAKIADCLRCDFLPECHIAPTEIRDRRRVLRYRNLVVKQMAQMKNRVSGLLMETGVSYNKQRLHKVGYFGEMMSTNVDISDAVRPLLNLSRGMIRRSSKLEYDLVSSLERDPLLRERLRRLRTVPGVGSITALTWALEIGDYTRFSSNRQAISYCGLCADEKSSADKVMRMPLSKQRNKHIQRVLVEAAKLAPRLSPELAMIRARELERGNRNRATLAVARKMVCYMLAVERRQQDFVQIAAA

SEQ ID NO: 384668 - protein, 358 aa, unidentified
MSTLAQLVDGVIGVDSHRDTLAAAALSPVGGLLGQTAARADTAGYRELLDFARGHVPGRRCWAIEGAGSYGAGLAVFLGANGEQLVEAARPKRPPRRSRAKTDAIDAVRAARDALGQEPHELAAPRQRGDREALRVLLTTRRTAMAARTAAVNQLKALLVGAPEELRGELRSLPTRRQIAVCGALRDRPTRSLEHQMTVRVLRRTARRIQALQAEAEELHGQLQRLIAAIAPWLLELFGVGPVSAAQLLVSWSHAGRFRSEAAFAALAGASPIPASSGKVTRHRLNRGGDRQLNQALHTIALVRLRDDLETRAYATRRTTEGKSPRDVKRCLKRIIARQLFRLLERYDQPGVEVLRAA

SEQ ID NO: 384669 - protein, 421 aa, unidentified
MIDHETFTWFAAIDWGTEKHQACVVDVRGGIAGERAFSHDGAGLALLCDWILSIAGNATIVAVAVEVPHGPVVDALLDRGLAVYAINPKQLDRLRDRFSVSGAKDDRRDAYVAADGLRTDRHLFRRLQIADPRLIQLREWSRLAEELQQERVRLSNRLYSQLWRYYPQMLGLSDDLAAGWLLDLWTMAPTPVKAMHLRKTSVAQLLKRNRIRRIDAETVLRALREPAINVADGVAEAATIHIGSLVTRLRVVGRELHDAMRKLDELCACLDEPSATASEHGGSGRQDVKILKSMPGIGKIILAILLAEASGPLSRRDYQALRTLSGVAPVTKQSGKSRMVVRRYAAHVRLRDAVYHWARVAIQHDPRSHSRYVALRQRGHSHGRAIRGVADRLLALACTLLQRQTVFDRDFSKGEKLTAVP

SEQ ID NO: 384670 - protein, 424 aa, unidentified
MVIVDEDERNLSVAVFCGIDWAEDHHDIALVDQDGTLLAKRRIGDDAAGFAALLQLLAEAGDNPNGPIPVAIETSHGLLVASLRTTGRPVFPINPMSVSRYRDRHSVARRKSDAGDALVLANILRTDLAAHRPLPADSELAQAIAVLARAQQNAVWARTDAHNTLRSLLREFYPALLQAFAAKRGGLLRPEARALLAAAPTPRAAARLTVSQLRALLRRAGLQRGLDAEAARLQQVLRGDYLHHPTLVEDAFGQQALALLRQLDTACANAEQLADATAQHFAQHPDAAIITSLPGLAELTGARVLAEIGDDRARFADARGLKAYAGSAPVTRASGKTTAVLHRRVKNQRLASVGYVWAFAALTASPGARAHYDRRKAAGDRHVAAQRNLFNRLLGCLHHCLHTRQTYNEAIAFPAQQTAPARAA

SEQ ID NO: 384671 - protein, 404 aa, unidentified
MDRREARKYEVFCGVDVGKSSNYVVALDRDGDEPLVSRAVGQAEAELREALAEAASHGVALVVVDQPGSFGRLTVAVARDMGLDVAQIPPKRFRQVAETYGEGKSDAKDAFIIADAARSTPRNVELLEGRGDALVAIRVVTSCRDDAVRERTRTYNRLHDLINQACPPLERLFSGQRLHGELATRIFARYGGPHGLRRAGRARASSWAGSLKWHRSDGPAKMAEVFDAIESQTVDMPGTDAIEAQVRRLAARALELESVEMELNAELERLSALVPEVALLRSVPGIGAVYGATIAAEVGDVSRFDGPGRLASYAGVAPVREESGISVSRRRRRKGGNRRLKNAVIRSSECSVMLGGPARDYYDRKRAEGKSHRQAIRSLARRRIDLVYALLRDGTTYDPSTARV

SEQ ID NO: 384672 - protein, 365 aa, unidentified
MPSVSHLAPVHLGLDVHKDTISVAILAPDHEGPVVDRIPHDEASIRRLVGRLGDPRWLRACYEAGPTGYELARLLDSMHVRCEVIAPSLIPKAPGDKVKTDRRDARRLARLHRAGELVAIRVPTVQEEAVRDLCRARADMVGDRTRARHRLGKFLLRHGRAWRGGNAWTLTHERWLLAQRFEEPALAATYAHYRAVLDARDAQLEAIQADLAGWYDRAPFADAVHRLAAYRGITRLGALTLASEVCDWRRFPRAAAFAGFCGLVPSEYSSGTTTRRGHITKTGNAHLRAQLVESAWSYQYRPAVGADLRERQQGLDPQVVARAWTAQLRLCGRFRRLAARKDSKNVVVTAIARELTGFLWAEMAA

SEQ ID NO: 384673 - protein, 372 aa, unidentified
MGEHSEVFIGLDTSKLKISVALADGERNGEVRFYGDISSEAGPVASMVAKLAKGGAKLRFCYEAGPTGYDLHRQIIGLGHECVVVAPSLVPKRPGDRVKTNRRDAVSLARLHRAGELTAVWVPDEAHEAVRDLVRAREAASEALKRARQQLQSFLLRHGRIYTGRKPWTRAHLRWLTCQAFSHPAHQIVLAEYSQAIEDAGVRLERLTRQVTETAATWSMAPVVAAYQAMRGVAFMTAVTFVVEIGDVRRFDNPRQLMAYLGLVPSESSTGERVKRAGITKAGNMRARRVLVEGAWTYRFPARVSPTIQARLEGLPRAVREIAWKGQIRLCARYRKLVMAGKLKTVVVTAIAREMAAFLWAIGQEVVPTAQI

SEQ ID NO: 384674 - protein, 339 aa, unidentified
MQVTTIGLDLAKNVFQVHGITEDGTVAFNRSLRRAQMFAFFEKLEPCLIGMEACGSSHFWARELSKLGHVVKLIAPVYVKPYVKRGKSDAADAEAICEAVTRPTMRFVEVKSSEQQAILSIHRARDLIVRQRTQTINMLRGLLAEFGIIFAQGVGHAIRFAKRVNEGHLPDLPQAACDVVTDLGEQLLTLHARVNWYGRRMAVAAKSEPRIALLETIPGIGPITASAIVATVGSGEQFRSGRDLSAWLGLTPINKSTGGKERLGRISKMGDRYIRRLMVVGMTSRMKQIRENPERFDPWFADILQRKPAKLAAIAMANKTARIIWAVLARNKPYAARTV

SEQ ID NO: 384675 - protein, 320 aa, unidentified
MLSFCGIDVSKDRLDVMVLPDEYSSSVPNDPAGWAILVEQLRGFSITAIGIEASGGYERGAVRSLQAAGMPVRQVNPFKLRQFAKASGVLAKNDPLDARMIASFVGIMPTRPVQRTTPAAEQLVEMLAVRRQLSAEKTAAENASRLLEDLMLQRLSRRRIARLAADIELLDKRLVEIVATDATLAHRYRLLTSMPGVGPVLACTLIALLPELGGMSRKQVAALVGVAPYAFESGTLKGRRCIWGGRANVRQVLYMAAMSASNWNPVLKLFHDRLKGAGKLPKVVIVAVMRKMITTLNAMVRDDLAWADRLSGRHSVTTAR

SEQ ID NO: 384676 - protein, 280 aa, unidentified
MTHPVAASKAELPPASITIGIDVSKDHLDAARHPGGDTVRVANTRKGQTALLRWIGDIKAAARVVFEPTGPYHRTLEERLAAVGIPQVKVNPRQARRFAEATGKLAKTDRVDALMLARYGALLDPVARPVRTDLQNRLAELMAARRSLMRDRTATLNRLRTLTIGLLQRHARHRLRQIEAQVTSLDAATDALEAEDAHLSRRRDVLASIPGLGRVTAHALLADMPELGMMEEGQAAALAGLAPITRQSGTWRGRSFIQGGRATVRQALYMPAIVAMRFNP

SEQ ID NO: 384677 - protein, 433 aa, unidentified
MIHIHPKMRYTYVGADNHKHSHTFVFINFMFEKVGELVVSSTPSDFEPFLKEAQRFLQPHTAFIFAFEDVTHYGRTLVNFLIGKGYTVKHVNANLVSSERKAYNVIQKTDSIDALCAARVLISRFDALPIVKPDEKYYIMNVLVSKRQSLSRQTKRLKGTLHSLLFPQYPNYHDFFSSLNTKSALAFYAAYPSPHTLDGVTEDQLTDFFSVIIDSRRARAKATLILDLVKKSGVATNDFQDSIDHTIRFTVMELKTANQHLEDIEDRLAKLLISFNCPLTSMSGIDTLTACRLIAEVGDISRFKNSASLAQYAGIAPIPHSSGNSDIKRSNKRGNRQLNSIIYGIALILIAPKGGQITNPFFYNFYHQKISEGKTKKQALKVVQRRLINIIYGMMKHGVHYINPPIIYIDETQLNDNQLTHIQKRRSTFKSTT

SEQ ID NO: 384678 - protein, 341 aa, unidentified
MEICTIGIDLGKTVFHFVGVNARGEFVVRKKGSRTQLLRFTSNIRGCLIGMEACGGAHFLGRALREQGHDARLMPAQYVKPYVKTNKNDYIDAEACAEAVTRPMMRFVPIKTDDQLDLQSLHRVRERWVVRRTAVINQIRGMLLERGITIRKGRIHIEESLPGILEDPDNKLSGALRVLLTQLRSEMQYLHGQIEETDKLIARICGELEQCRRLVAIPGIGPITATATVAAIGNGAAFKKGRGFSAWLGVVPGEHSTGGKQKLTGTSRRGNKYLRKLFVQGAHSVMLQSTKQSAGLSTWLSHLTARKRKQVATVALANKMARIAWAVMTRQEDFRPRAVAA

SEQ ID NO: 384679 - protein, 359 aa, unidentified
MAVVAQSYDFVVGIDTHSRTHTLAIISAVTGAEVANETFPSTNAGMNRALRWISRRSTCDKSRVLVSMEGTGSYGAKLRQLATESDFRVIEAPFPERRVGRKRGKSDSIDAARAARAVLEIETDELREPRAGQHHTALRVLTVARTSMVRERTAAINSLIALLRVVDLGIDLRKSLTPKTIETIAAWRTRDEGVGTRVSRSEATRLAKQILALDDQLEQNRADMALLVQQTSHALLDMPGVGPISAAAILTAWSHPGRVRSEAALAALAGTCPIPASSGGTTRYRLNRGGDRQLNKAIHTIAVVRMRWHQETREYVVRRTREGRNKKEIIRSLKRYITRQIFRTLSTAGEVLSGHAPSY

SEQ ID NO: 384680 - protein, 355 aa, unidentified
MKKNAILATTIPATTIGLDLSDRTLQFCELNASGEIVGEGQCKLDRTTLRRYLAAKSAGTRVALETGGHSAWVRELIEEMGHEAVVANARDLEAVTGRSHRTDHHDARQLARLARVDASLLNPVELRRTAEQADLFVIRARAVLVEARTMLINFARGITKTLGHRLPASATHHFAERVRAAVPNALQPALLPVLNVLEEIAGQIEDFDQKIEALAEQRYPQTRWLKQVPGVGTLTALTFVLTLGDPERFAHSRDVGPFLGLVPRRRQSGEQDPHLRISKCGDRYLRRLLVQCAHVVMGRFGPDCALRRWALAHAQRSRTAKKRTVVAVARRLAVLLHRLWHRQEVFRPFPLAVAA

SEQ ID NO: 384681 - protein, 286 aa, unidentified
MTTTISMLAIDLAKGSFQVCAIGADGAVLYNRVLSRTRLMTLLAEQSACVVAMEACATSHHWGRVAQSHGHEVRLVPAAYVKPFVKRQKNDKADAEAIAEAASRPTMRFVAVKSAETQGRAVAFRTHQCLVRQRTQLINALRGHLAEFGLVAPKGPASLKVLENALADEASDLPDPVREMGTIYVEQIARLTEVIERLVDELEAASKTDEELRRLCTIPGIGPVTAGAVAAFAPDLDTFDSGRNFAAWLGLVPRQRSTGGKTRLGSVSKMGQPTEGSMPASPSRSV

SEQ ID NO: 384682 - protein, 350 aa, unidentified
MIIIGCDYHPGFQQIAFVDTETGDYGEQRLEHSEGAEKFYRDLAAQGKKVRVGMEASGHARWFERLLAELNFELWIGDASEIARKRERKQKTDRQDAQHILQLLMENRFPKIWIPSGENRDLRQLLWHRHRMVQMRTRIMNQLQAVALNEGLRCKKRLWRQHGREQLESFRLAPWASRRREDLLQLLDRLNPTIADLTQVIEQEVEKCPEARRLRTHPGVGALTALAFVLIIGRTERFQCGKQIAAYLGLVPLEDSSGNRRRLGHITKQGSSMLRFLLVEAAQVTARSNPEWRNKYFHLAMRRGRKIAKVAMARRLAIALYWMWRKGWDYEQLRKFGSHAGKLGTGDGVQ

SEQ ID NO: 384683 - protein, 414 aa, unidentified
MEPVYRSMAGIDVHKKMVAVVIRQWRGEQVEYQKRKFGSTRTEIQHLQAWLQSQAVSEVVMESTAQYWRPVWYGLEPHFKLHLTHPLKTRAPRGRKSDFRDAQRLADRWSSGDLEESFIPGSEQRAWRWLTRTRVQLKKKLGVIHNHVEGLLEQGGIKLSAVVSDLFGVSGWAMLEHIAQGVTDVEVPAGEARGVLRKKEAELKEALVGRLEPVYRLLLRQHMDQVRLLRRQVEEINQALAEAMKEHVAALHRLSKIPGVDLYAAQELLAEIGPKAAAFASAERFASWVGVCPGSQESAGVNYSRRSAKGNRYLRRLLCQIAWAAIHTKDTFFAGLFARVKPKVEGKGAAWAVAHRIAKVIWLVLHQEVEYQEKGSAPPNERTLVRKFKRLVKEFGSLGLDVRALLDQQLNATA

SEQ ID NO: 384684 - protein, 408 aa, unidentified
MTAIPDATVWVGLDVGKAEHFADVLADDGDRLFAVSVPNDETALERVLDRAATHGPVAVAIDQPGSIAQLVLAVCARRRVPVAYIPGLVMRRAADLYPGESKTDRRDAYVIADTARTRRRQVTWIDASSDELLDELRVLNGYDADLAVDVTRTASRLRDTLTAVSPALERVLGERVAHPAVRALLAAYPTPTALRAAGPDRIEAVLVEHAPRLGHRLAGEIAAALDAQTVTLRAEAPNGRVVAELAVDLGRLHQRRDSLAEEIEQVFLAHPFGRLLVTIPGIGPRTGAVILAEIGDGTAFANGSKLAAYAGLAPVTRQSGTSLNSESRSRRGNHRLKNAMFMAAFCSRRSPDSRAYYDRKRAEGKRHNAAVMCLARRRCDVILAILTTQTPYTLQTPPHSSEDLKEVA

SEQ ID NO: 384685 - protein, 394 aa, unidentified
MRFIGIDIGSEKHFVAIVDEAGKPLRKPTPFAEDDAGYKQLRSLLGDPSDTTLVAMEATGHYWQNLFAFLHTAGFEVALLNPTRTARFAGEDLRRAKTDALDALGIARFAQQKRPAPTPLPDEVTLELRELVRLRDRLVQDLGDRARQVHRTLDLSFPEFTQHVRDVASAKATTLLMACPTGAAFQKADPNVLAELKYDGRHVIGLELAQTLCAAAKITVGRHHGAPYALQMRYACEDIATLRARLKKLDGDIKASLDRHEVGKLLTTIDGIGDNTAARMIASIDFSTFRSAAALAAYVGVAPLVNHSGKRQPLRGPACTMGDAELRAKLWMPTLQAVRRNAWLKPFYERLVAGGKPKKVAIIASMRKLLGAMVSVARTKTPFVPRLAAEAASG

SEQ ID NO: 384686 - protein, 359 aa, unidentified
MRIIGCDLHARQQTVAMLDTTTGEVVNMTLTHEGSNVREFYSALPRPVRVGIEATGSMMWFVNLMEELGIECQVGHPAKIRAAEPRKQKHDRRDADLILTLLVENRFPAIWLPTKEQLDLRALLRHRHQWVRMRTRIQNALQAIALANGLRRGPSLWSHDGQSTIASLPLAPHTAHRRSELQALYVKFESDIEQLNQRVEEQAGERPGARLLMTHPGVGPVTALATDVFLGDPTRFADGKFLASYVGIIPREYSSGGRQRLGGLSKQGNPLLRFLWGEAGAHAVRRDPELQRFYRRKLVQKGLGKARMAVARKLGIRLWIMLRDQIDYQEFCRRGQKNGEACAGMPETRNGATSHRPVD

SEQ ID NO: 384687 - protein, 455 aa, unidentified
MSARRNKSTPGHLSPALTIDANAAGIDIGATEIYIAVPPDRSVQPVRKFATFTEDLIAATDWLVRCEVKTVAMESTGVYWIPLFQILEARGLKVCLVNARYVKNVPGRKSDVCDCQWLQHLHAVGLLRPSFRPEQQVCAVRSLLRHRDSLVQLSAVHLQHMQKALDQMNLQLHHVITDLAGKTGMAIVDAILDGERDPQTLAKLRDPRTHATEQTIAKSLVGDYRREHLFTLRQSLTAYRQHAELIAACDREIEQLLQKFSSGGGPGAEVVPARKLSRKPRHNEMDFDLRGHLHRIFGVDLTAIPGIKTLTAHTLFTEVGRDLSAFRSAAAFASWMGLCPDNRVSGGKILRAKTRSVNNRAATALRLAAQTLSRSSSWLGQSYRRMRAKLGAPKAITATAHKLARIVYHLLTTGQAYDESVFAQQEIENKHRNESRIRQQARKLGFELTLIQTQV

SEQ ID NO: 384688 - protein, 331 aa, unidentified
MDHCAIDLGGRKSQVCVRSPDGQLLFEGPYDTRSLPEFLRLLPRSRVIVETAAEAFRVADAAKEAGHEVRVVPATLVRSLGVGARKTKTDRRDARALSEVSCRIDLPSVHIPSARSREWKAICGMHDALITARTKLINNLRGWLRGQGLRIGTGKAETFAERMMKFKPLPDYVTSQAEALAALTKKIRESDKRIESLAKDELCQRLMTVPGIGPSSAVRFVAAIDEISRFESAHKVESYLGLVPGESSSSERQQRLSITKAGSSSVRWVLGQAAWSLQVRCQNRAARPLQLWAAEIARRRGPRIATVALARKLAGILYALWRDGTKYEQRQ

SEQ ID NO: 384689 - protein, 351 aa, unidentified
MSQNLNGTVAVIGIDIGKNSFHIVGLDERGAITLRQKWSRGQVEARLANMPPCLIGMEACVGAHHLSRKLKALGHDARLMPAKYVRPYSKGQKNDFRDAEAIAEAVQRPTMKFVATKTADQLDLQALHRVRERLVSQRTGIINQIRAFLLERGIAVRQGLRFLRAELPRILATPPNVLSSRMVRVIEGLAEDWRRLDERIDHLSDEITALARQDVGCERLVSVPGIGPIISSAMVAAIGSGDAFTKGRDFAAWLGLVPKQISTGDRTILGKISKRGNRYLRVLFVQAAWVVLIKPQSWERHGLKPWIEAAKKRLHRNVLAIALANKLARIAWSVLARGRSFEARSAIASAV

SEQ ID NO: 384690 - protein, 340 aa, unidentified
MDEIKTIGLDLAKHVFQVHGVDPSGATVLRKRLRRNQVLAFFAGLPRCLVGLEACATAHYWARELQAVGHEVRLMPAQYVKAYVKRNKNDAADAEAVCEAVRRPTMRFVPIKTAEQQAALLLHRGRERLVRQRTTLVNAMRAHLAEFGVVAPAGLRNVNRLITIVRDDSDRRLPDLARPVLRVLATQVELANAAVAKVEKELLAWHRSNPLSQRLATIPGIGPIIATAIAATVVEPSGFTTAREFAAWLGLVPRQHSTGGKARLGGISKRGNRYLRRLLINGASANLLRSKATNADPWVIGLRRRRPSLVVAVALANKTARIAWALMHRQEDYQPIAAAA

SEQ ID NO: 384691 - protein, 257 aa, unidentified
MSTSSPVFVGIDVSKACLDVHVLPSQETFSCANDADGCARLVERLTPIGVSLVVVEATGRYQRRVAADLLSARIPVAVVNPRQARDFARSLGKLAKTDAIDAEVLARFASVGHLRVCEKQPENAAILDDRITRRRQVIAMLNAEGNRLAGMIDKTTIKMIKKVIRLLEQQREQLDRQIAALIESNDDWRGKRDLLQSVPGIGATTASGLVAELPELGKLSREQIAALVGVAPMNCDSGTMRGKRAIRGGRASVRSTL

SEQ ID NO: 384692 - protein, 343 aa, unidentified
MKDTIYNHYISIDWSIENMAIARMTKKSNKISAIDIPSDISEMQVYLKRLKGSKILMVEETTTSQWLYAELRDYVDRMIICDPHRNKLLNDGPKTDKIDATKLVQLLKAGLIKEVYHSTEKFLYLRRFVSGYEDLVKAGVRLQNQRYSLLRACGKRGFEWAGTKLDSQGEQFVLDSLDRQIEAYLKEKEGYEKEFERLAKDYPEIRHQKSLPGIGPIHAVKIVARVVTPYRFADKGHYLSYTGLIKLEKVSGGRSYGRKNSRYCRQLKSVYKTSTWAAIGGNNPINDYYEYLIKEKGYPEHNARHKACRQLAILSLGVFKSGKKYQPYRRDHVKGDQEVKSGL

SEQ ID NO: 384693 - protein, 429 aa, unidentified
MHREFAQVAVWEDGVVRQVGQIALTDEALRIFADSLGPEDEIALEATCNTQAIVRLLEPHVARVVVSNPQKTRAIAEAKVKTDKVDAEVLAQLLAADYLPSVWVADPATQALRRQVARRAHVVRQRTRLKNQVQAILHRNLIPRCPAADLFGIKGRCWLANQPLPPDEALTVEALLRQLDFHGQELRIIDAELGRVALGSPEVKRLMTIPGVDATVALSIVAAVGDFRRFRRPEQLVSYLGLNPRVKQSGGQPASHGRITKQGRAHARGMLVEAAWVATKTPGPLRAFHDRVRSRRGMQIAVVATARKLAVLCWTMIERSEDYAFARPSLTDKKLRALELRAGMPSRRGQKGKAAAYSLKEVRRRERELAEQAERAYRQLVADWQTKRLTQPKPKAGRGRRQWDATEKALSGASCAAGISPRTCTSLGG

SEQ ID NO: 384694 - protein, 395 aa, unidentified
MHSIGIDVGAAQHSVAICRAGNFEAERQVLRIPSTRSGFAELERWIARHGAVERIVLEASGHYWQTLASHLRAAGHPVAVVNPLTAKYFAKRRLQRAKSDPADARTLAALGMVDRPRTAEPLAGAELREAARFTMRLVEEQSRLCNRILRLVDLGFPELAEAFEDPTCKTALALLKVAPTARVAARRSVATLARANRGPGQRALGPTKAAAIHAAARQSIAVRELEQQIAFEMPLLIAQHELLERQIAAAEARVATLLDGELARRLQTIPGVGAASAAALIAEIGDITRFSSFDKLVAFAGVHAAEKSSGKKGADPETSWHMAKTGSPYLRAALFRIAIVGLQHNPVIQAHYARKRAQGKAKMNALGHCMKKALAIVWGVWRGGRDFDPAAPSNG

SEQ ID NO: 384695 - protein, 410 aa, unidentified
MQSYILALDIAKHKTRFALCDDAERFLAQGDLPVTRAGLNQLLVTVHSHVPDPGSLLVVIEATGVLHLNWAAALSKARYAVIIINPLAARRLYRVKNSIRDNKSDPVDARGLCAIGRLHGAELLKLYRYQSELPRLCLQRFQTVRKQLRNSLTNLKKTYLSLLDLSFPELDQLMERDGVGLRQLLAQAPTPAAIARMRLSTLQKNWMLRPKAAALKDLAAHSIADPDLAQANAPALQAILRSLAALEEQLKAIEHEIQKVLHQTIAPETIALVESMPGFASLSAGKVLACLPADLLEHGSNRAAATRLQALMGNDPRLRQSGQWEGHTKMSKRGIELLRTTFFQVAFNASLHDPELRAYYLRKRAKGKVHEVALSHLMRILTRRLIAVLRSKKPYDPTYSSLLKKAACNP

SEQ ID NO: 384696 - protein, 368 aa, unidentified
MVKDNKLSFQGQYIYVGIDTGKKSWTVTILTEQLEHKTFSQQPVPEILVGYLHKNFPEAHYKCAYEAGLFGFWIYEAFEKLGVDCIVVHPADIPTKDKERRNRNDSVDSRKIAKNLRNGDLTPLHIPSRQSQEDRSLVRMRITMVNKQTRCKNQIKGFLSYYGITIPDELSNSHWSNKFICWLESLKENLEESHREGLCLEYDSGKKALGVLLSELRYLRSAIAQLTKDIRHLSGQNPYSDLVGYLNSVPGISTTTAMVFLTELDDITRFKNLDHLASYVGLIPGEDSSGDKELHTGVSKRRNANLRYLLIESSWIAVRKDPALLKSYTELTKRMPKNLAIIRIARKLLSRIQYVLKNRCYYESGVVS

SEQ ID NO: 384697 - protein, 386 aa, unidentified
MPKQNDLSRCLITLEQDATVIAVIEMGQSSWLVAGIVPGLERNPLKKLSPDPDALLQLLHRWQKEAVQAGRAIKRIVVAYEAGRDGFWLARWLRAREIEAYVIHPSSVPVSREHRRAKTDRLDTELLKRSFLGWLRGEPKHCSMAAIPTLADEDAKRPGRERQSLVGERTRIINRLKANLARLGIRDFRPNLAQASSRLEALRTPEDAAVPANTLAELRRDMDRLRFVKQQIKEIETTRGKRLAGALNDQRHTMVRLLARVVGVGIETADMLVQEVFSRNIRDRKALARYAGLTGAPDESGKKRRERGLAKAGNARVRRGMIELAWGHLVHQKASALTAWYRKRTSDARGGTRKTMIVALARKLLIALWRLVTTGETPAGLLLRAA

SEQ ID NO: 384698 - protein, 339 aa, unidentified
MKNTKYYIGLDVHKEKTSYCVRDKLGNILIEAEAATLYSELEPRLKPYLAASMIGLEASISYYTLYQNFLRNNYHIKVANTIQLRQLIAKNDKLDAQRLSEMLRLGTFPCSYIPEEKIQHLRSLIQMRHALMQEKVRCNNRIQAFLDRNGVMMPMCKAFSKKWKHALMQHLGLGNVSTELRYEYNHYVYLEKTNEQADQEIIGYTKTYWNQEYQLLRSITGFGVLLPCYIIAFVHPIERFLSNRKLRRYAGVIPVAKESGGITSKGRIPKTTSKALLRWALVQAANTIGKTNTTLGRYYRRKKNQKKNTGIAKIAVASTLVDIIYKVLTTKKPYISTAC

SEQ ID NO: 384699 - protein, 341 aa, unidentified
MSPIIRFGLDLAKNTFSICGVDVHEQPRLRKTLRRDELLLFFAQQPPALVAMESGSGAHHWARELIKLGHDARIIDPRLVAPYRSQGRTGKNDSNDAAAICEAAGRPLMRFVPIKSPEQQAMLVVHRLRASAVTDHTRTINQIRGLLAEFGIVIPQGVETFKRQWPQIRREQGDALPSSAWASLDALYVELRHLHAKVLTHDRQIKAYVREHEAARRLVQVPGIGAITAAALVATIGNGRDFANGRQFAAWLGLVPRQYSTGGQSKLGRITKRGDVYLRTLLVHGARSELVRSSKRQDRKSRWAEQIKTRKGWNKAAVALANKHARIAWALLAHDQTYQPA

SEQ ID NO: 384700 - protein, 363 aa, unidentified
MAVYCGVDFHSRQQFVMWCDTRDGEIHERQLTHKSLDDVRSFYAQFSGEVIIGIEAGGYSEWFETMLQELGHQVWIGNATEIRRRARSRQKTDRRDAQLLLDLLLKGEFPRISRPSRESLEVLRRLRYRHRLVQLRTAMRNSLQALALGSGVVLKARLRTKQGRQKLGELPLSPALSRQRADWSELSAQVEERIARVERELAELAAGDERVRRLRTHPGIGLLTGLALVHTLCPVSRFANSRKVTAYVGLDPREHSSGERRRMGRISKAGSRVLRFLLVEAGNSAVRSDEALRRLYNRVRHRRDRARAKVAVARHVLVHAYVMLREEIDYAEFRLRGASRRSAARTVHRPEVPDHLVERPAAG

SEQ ID NO: 384701 - protein, 358 aa, unidentified
MRIIGVDLHTRQQAVAMLDTETGELIEKTLKHDGNEVQKFYSALPGQVLVGIEATGSMHWFLEMLEGLGIECKVGHPAKIRAAEPRKQKHDRRDATLLLKLQVENRFPSIWMPSTELRDLRTLLMHRHQWVRMRTRVQNTLQAIALGHGLRRGKTLWSQLGQHTMESLPLPPHAAHRRTELLALYGRLQAQIDELDERVMTHAQQRPGARLLMTHPGVGPVTALATDVFLGDPARFEDGKAVVSYVGMIPSEYSSGGQQRLGGLSKQGNPFLRFLWCEAAVHAARRDPDLQRFYRRKLTQKGLGKARVAVARKLGIRLYIILRDQIDYQEFCRRGQMRQKSGDACAGMPEVGHSPAIQ

SEQ ID NO: 384702 - protein, 329 aa, unidentified
MLEEIKIIKEDGVLEVAPIFVGIDVSKARLDVAVRPSGQSESVSNDQAGIETLVKRLGKIQPTLIVLEATGGIERGLTRALASAELPVVVVNPRQVRDFAKATGQLAKTDGIDAVVLARFAEAVRPALRPLPDEVTLELRALIARRRQITEMIVAERNRLSGVSKAIRKRIDAHIRWLEAELERADNDLDQSIRQSPVWRENEDLLRSVPGIGPVISRTLLAELPELGELNRKQIAALVGIAPLNCDSGTLRGRRVIWGGRASVRAVLYMAALVASRRNAVIRAFYKRLCNAGKAPKVALVACMHKLLTILNSMIKHKTRWSENILQTT

SEQ ID NO: 384703 - protein, 362 aa, unidentified
MTKTTYLGLDVHAATIAIATLEEGQDRPEITEIANDPAAIRRVIKRVGKGRSLRCCYEAGPCGYVLQRQLTSMGIDCQVVAPSLIPQKPGERVKTDRRDAAKLARLLRSGDLTSIAVPTEDQEAVRDLVRAREAARCARTDARHRLTKFLLRHGHRHHACNWTHQFWKWVNGIAFTHPALMKSLHHYTDMVLHLDRQIEALDTDIEEIAMREPFRDMVAKLSCLRGISTLAAMVILSEVYDLRRFATASQFMAFLGVVPSEHSSGQKTRRGGITKTGNGRVRRILVEAAWAYRHYPKVTTRQHKLFAKQPTTITDICRKANLRLTRRFQRLEARGKKSPVAMTAIARELAGFVWAIGRADTA

SEQ ID NO: 384704 - protein, 403 aa, unidentified
MNAVGIDVSKGKSTVAVLRPFGEIVVPPFDVFHNPNELRELVTLLKSLDGETKVVMEYTGNYYLPIAQFLQNNGLFVSVINAILVHDYGNKSLRKAKTDKKDALKLASFALDQWLDLPVFSLPSNTRKILKSYNRQYCQSNKLKVMIRNNLISLLDQTFPGVNSLFSSPARKNDGHEKWLDFALKYPHSECVSKKSLPTFSKSYLSWCRKNGYYFSEGKAKEIYDFTCNSTPTLPLNESVSLLISSAISQLNCVSETLANLATEMNRLASSLPEYDVVMSLFGVGTILGPQLIAEIGDVSRFHNKHALVAFAGIDAPPFQSGSFNAKSRAISKRGSSPLRKTLFQVMTAILQNSPADNAVFQFLDKKRSEGKHFYVYMTAAANKFLRIYYARVTEHLNSSKSA

SEQ ID NO: 384705 - protein, 327 aa, unidentified
MSEAWVGIDVSKATLDVVLIRATDQQHTQVSNDKAGFRTLHHFLEKRCRSDAHVCLEATGLYGDGITAFLHTQGYRVSVVNPARIKAYGDSQLKRNKTDRSDAQVIADFCRTQQPEVWQPPSPEIQELRALLRHLDDLQAMLQQERNRLQAGEQSPTVLTQLQQHVTFLEAQIAQLKEQINDHFDQHPHLKQQRDLLTSIPGIGDLTAGRLLAELRDIHAFSSARQVAAFVGVTPRQVQSGTSCHRRSRLSKRGNASLRAALYMPAVVAKRCNPLIHALAERLRARGHTELSIIGAAMHKLLHLAYGVLKSGQPFDPLYLEKRLASA

SEQ ID NO: 384706 - protein, 378 aa, unidentified
MKKIMRYVGMDVHGETIAIAVVDEEGVGREVGVIPNRPEAVRKCLKKLGRPEELHCCYEAGPTGYVLYWQLVRLGIECVVVAPTLIPTKAGDRVKTDRRDARKLARYLRSGDLTAIWVPDEGHEALRDLVRARQAAKIDEKRARHRLQKFLLRHGQRPPQGVKAWSARHRAWLQTLQLEHATLQVVLGEYCHEVVHSEQRVARLDTAIEQAVEDAPEQIRAVVAALQGLRGVRKVTATAVVAEIGQFSRFAHPRQLMGYSGAVPSEFSTGGPGKHQRGAITKAGNAHLRRLLGEAAWCYRFRPAVRYPLQRRQQGLPAAVTEISWKAQVRLCNRYRRMVVRGKLKQKVVTAISRELLAFMWAIGVAVEKQQQHPRAAA

SEQ ID NO: 384707 - protein, 412 aa, unidentified
MEGETVIAGVDTHKDVHVLCLLDGLGRKIWSGSFGADPEGYDRLAEAIGDPGSCMVVGVEGTASYGAGLTRRLVELGYNVVEVLRPKRDKARPGEGKSDPLDAERAARKAASGRGCSVPKSQDGWVEAVRQLYVARRLAVATSTSCVACAKSMLTTAPSALRERFRGRERPKDLMPLLARGRKAGSALEESVLASLRSVAAVWKEARSQVESLDERIRALLEANAPALLGVEGCGTTTAAALVVAAGDNPGRLKGEAAFSMMCGASPIPASSGKTDRHRLNRGGNRQANWALYEIAIKRMAYDERTRRYVARRTSEGKSRREAVRCLKRYIAREVYHVLMDPNPDGAAPEGPELAKMRKAMRVTQKKAAAELGLSAATLGHLERGKRRSTKLERRYYELLCELERTLPQTAS

SEQ ID NO: 384708 - protein, 424 aa, unidentified
MKVTYQTCCGVDVHKSFLVATIVKTTGGIEPSYQKKRFSTFNSSILEFKQWLLDNDCHDVCMESTGKYWVPVFNLLEDEINVVIANPKWVKAVKGNKDDTKDSKWIGDLFRLGLVKGSYIPCKIVRILREYTRYRYKLVSCRSSEKNRYQNTLTVCNVALDSVVSDIFGKSSMSIIDYLLEQSGTSINHEEIASKLLRSLKSKEDAVIESVEGYQMTDAQKYRVRLVRAHMDYITAEINDVDKMIENMIFSNPDFENAVQFLCTIPGVKRDSAITIISEIGTDMSQFGGSKRLCCWAGLTPGSNESAGKKKSVRITRAGVYLKPALVQCAHAAVKSDKSPYYKKKYESLVKRRGKKRAIIAIARMILTAIYQMLSTGEQWNPSDLYKINISVALVENPKSKAIKQAKKLLQREGLLSLSKPLAS

SEQ ID NO: 384709 - protein, 335 aa, unidentified
MQIYGIDLAKEKFDVSFFDLTSKKVSNQPSHKVVTNNLKGIGKFLKGLPSDAVLVAEHTGVYGDTLLKCCMDSNVKIAFVGGYVIHRYRATPDRAKTDVLDCALLREFGERYPDKLKYKTFPEEALYELRQLARHREMLVEQRKQLITADKSEDCRPVRSLAVKRSMDRIKEMLDTEIGETEKEMLKVINGHDSIHHNYELVKSVDGVGLITAVELLVKTENFTKITTARQYSAYAGTAPYEKSSGKMDKGAHISKIGNRRSKTLLYICAESARLHNKEIKLYYERRTLIDKKPRHYVLNAIANKLLRIIFTLVEKGEYYDANFIRQDPRAVKYN

SEQ ID NO: 384710 - protein, 412 aa, unidentified
MLFVGDDWAEDHHDIEVQDENGRRLGRARLPEGIAGLTRLHELIAEHLTDDDVDAETGFVAQNVLVGIETDRGAWVSALAAAGYQVFALNPVQVARYRERHGAAGAKSDRGDAHVLAEIVRLDRAHHRPIAGDSPAVEGLKLVARSHQAFIWDRTRHFQRLRSALREFFPAALDAFPDLMAGEALELLERAPDPARAARLSRSKITAALTRARRRDPDAKAEAIQAVLRAPALRQDPAIEAAYAVIVASAVRLIAQLNTQIGELQAVVAEGFGRHPDAEIVTSQPGLGPILGARVLAEFGDDRDRYADAKARKNYAGTSPITRASGTRRVVLARYARNKHLADAAHQWAFCALTGSSGARAYYDAIRARGVSHHAALRQLGNRLVGILHGCLKNRTLYDEDTAWPTNNTAAA

SEQ ID NO: 384711 - protein, 325 aa, unidentified
METKKLCCGIDVSHTKLDVCYQNNLGELFHLQVGNNNQGFAKIMEHTGAGYHFVMEATGVYYIRLAFYLHSRGCVLSVVNAIAIKRYIQMHLERNKTDKKDAGWICRYAVEQQPSYWQMPDSAYFESKQLYNTIREYTEQIKRINSQLHSLRLLPVPSKDTIKSLEKVIACMEKEIKQLEQKLQLELLQWQPDQLKSVSSVKGIGKRAAAMLIVFTQGFKHTENHRQLISFAGLAPTQYSSGSSIQGKPRIYKRGGKNLRDVLYMCSMNAMKTNPACKALYERLRANGKTGKQALIAVCNKLLKQVFAVVKNNSLYQPNYCSAKP

SEQ ID NO: 384712 - protein, 341 aa, unidentified
MEKYVGLDVSMEETSVCVVDGGGNIVFEGKTSSQPDALSKLLRAKASGAARIVLETGSLACWLWHELRGRNFPVICLDARHVRAALSMRVNKTDRNDARGLAELARMGWYREANVKSTESRYTHSLLAARAKLVDLRRDVENQMRGLLKGLGLPPGKGGIKALLEKIVVIMREAPHLRTLFNPMMLAHSALVTQVEFYDVQILKLAKGDETTRRLMTAPGVGPATALAFRSTIDDPNRFKSSNDVGAYLGLTPRRYQSGELDRTGRISKRGDRLTRFYLFEAASVLLTVVKRWSVLKAWGVRLAKRVGIKKAKTAVARKLAVILHCIWVDGTEFQWGKEKA

SEQ ID NO: 384713 - protein, 362 aa, unidentified
MSTVTSTDATAVDEEIILGVDTHNDTHVAAVITVLGALLSTRAFPTTTAGYTDLLAWASEHGRLLRAGVEGTSSHGTALTRHLHRNGVQVIEVNRPDRATRRRRGKTDAIDAENAARAVLSGQATGLAKSGDGAVEMIRMFKIAKDSAVKARTQAINQLKAVLVRADPTLRESLDGLGRVALIRACATLPGTTEHSTHAATTTVLRSLARRVLALTDETRALQQQMSSAVAACAPQLLDQYGVGPDTAAALLITAGDNPDRLTNQAAFAALCGVNPIEASSGKTRRHRLNRGGDRRANSALYTIVLTRLGRDPRTRDYATKRAHEGKSTKEIIRCLKRYVAREVFPLITAALPPATTPNPAT

SEQ ID NO: 384714 - protein, 406 aa, unidentified
MKVYIGIDWSKEKHDAIFMNEAGQAIMYCQFSHMQSGFLELDDARRKLGVEPSACIIGIETSYNMIIDALWNWGYDQVYVLPPSAVNRSRGRYKQSKARTDRSDAWLIANLLRTELHNFHPWRPNTALTRQMSAQVNLVFSLTKESQRMANQLQAVLLRYYPVALEIFSGLNTLISLEFICAYPTPRQAAALTLEELRHFAKQQHYNHSECLPNYFVQLQKAYPQADVGTVASHQDIAVQLAKLLSNILRSKRSAITLLQHLFQQHPDCVIYQSLPGAGKLLEPALLVKLGDDRSRYPSASVVQALAGTCPVTDASGKRKKVYFRRACDRQFRQIAQQWARASTKESDWAAVYFQQARDRCRSDSHAYRCLANRWLAILWRLWQDRKPYDENYHLQQRLLHSKPIF

SEQ ID NO: 384715 - protein, 396 aa, unidentified
MKNNFTSFVGIDVSKDKFSYCIINESMEVLKQGELTMNYNGFKSFNNILKKYENSIIALESTGSYHLNLLSFLTSKNYTVALINPALIKRFSQTITLRKTKTDKIDANIIAKFILKNLEYVNYFVPTNMDDIVALARVRENIVRHIAKVKTQLKQHLAIVFPELVAQYNVFTDSILAILKKLPTPKHVLRAPKSYLKGIFNELPSKGRKINLTPEKLIELAKNSIGVSTENFAKIIKHDVQMLEFLQKQLNDLTNDFIDSIRKNKKDDMEIISSIKGISSITSAHFMAEIKSIDRFENAKKLAAYAGIDPSIRKSGKMYSKGRISKKGSKSLRRCLYLMASSLIRFNEYFRKYYDKKRTEGMAHRKAMIALCNKLVRVLFAMLKKREKFNPVFHNL

SEQ ID NO: 384716 - protein, 388 aa, unidentified
MYYCGIDVAKRKHSAMVLNEKAETQQQNFTFKNDRDGFDKLLSLLKPFSGELIAALEATGHYWLSLYECLSTANYPVVVLNPLQVHAYQRSGIRKRKNDRIDSFWIADYARVSNQEATVKQAPELMQLRDLTRFRFRLTENIGNCKRKLLTILDRVFPEYETLFSSVFLTTSKQLLAKAITAQEFADFDLQELTELLSHASRGRFGQDKAEAIVEKARHSIGISTFANSARLQVQCLLAQLNLLEDQCQEIDKETEILMAQLPQHITTIPGVGAITGAAILGEIGDINRFDAPEKLVAYAGIDATVYQSGNFEATETHMSKRGSPFLRVALWQAASMATLYDPQLKEYYQKKKAEGKHHGTVVGAVARKLLARIFIILKENRPYEIRY

SEQ ID NO: 384717 - protein, 392 aa, unidentified
MEDRTMSLPPAASHDDAVRCLLAIELSKKSWIVAVNTPLSDKISRYTLKPCDWKELLKLSERIRTRVAGELKKRVDVVCCYEAGYDGFWLHRLLEAQGIRNYVIDPASVQVDRRARRAKTDRVDVERLLRSLMAYLRGEPKVWSVVRVPSVAEEDDRRLHRERGRLIRERIQHVNRIKGLLAIHGIYDYQPLHRDRMKRLKGLHTADGRQLSPRLKVEIVRELQRLELVLGMIETIEAERDAIASAKTKAKTKIEHSNAKKIQDLVKIKCIGPEFATALVSEVFYRSFDNRKQLAGYVGLTPSHFQSGPMCRDQGISKAGNTMARTTMVELAWMWLQHQPGSLLSVWFHNRVGKLKGRIRRITIVAVARKLLIALWRYLETGLVPDGAILKV

SEQ ID NO: 384718 - protein, 361 aa, unidentified
MNGTMTWVGLDVHARSTHGAAIDVRTGELKRARVGPGSEEVVDWLSELPQPVRAFYEAGPTGFALYRAGRAAGLEIEVIAPGKTARPRADRVKTDRKDAELLARLGLAGQLTPIAVPSEFVESVRHLMRAREQLRGDLLRARHRVSKLLLQQGRVYPEPTTWNKRHRLWLGRQRFEHEATELAFIDLLAAVDGMVARREALDERLSRLATDERLWPTVARLRAFRGVGTLTALALHLELGGDWERFSSPRRLFSWLGLTPSLEQSGESKAQGSITKTGSHYARRLLVESAWHYSRAPAIGVTLQNRQAGQPDHVLQIAWRAQHRLHRLRKRLKARGKPANVATVAVARELSGFLWAAATAP

SEQ ID NO: 384719 - protein, 348 aa, unidentified
MVHFVGLDVSVKATSVCVVDDAGKVILEQKVPTDPADIIGILTSLGVSFGRIGIEAGPLSQWLVNALTAANLPVICVETRHMKALLTAQQISKTDRNDARGIAQMMRVGLFKPVHVKTLVAQEQRMLLTSRKLLQRKLLDVESDLRGTLRNFGLKVGVVGGSRYEARVRELVEGFPRLAAIVEPLLSVRRVMRQQFAVLHKMLLDMVRGDLVCRRLMTAPGVGAVVALTYRATVDQPQRFVHSRAVGAHVGLTPKRYQSGEIDYDGGVSKCGDALLRTMLYEAAHSLLTRSRKWSWLKAWGVRVAQRRGIRRAIVAVARRLAVVLHRMWVDGSEFRWRKDGAAVPAVA

SEQ ID NO: 384720 - protein, 403 aa, unidentified
MSKEPLCVFGGVDTHKDVHVAAVVDERGKILDTASFEVNAKGYGALERWLEGFGTLVRVGVEGTGSYGAGLARHLQESDVEVVEVNRPNRQLRRQRGKSDTVDAESAARSALNGEATVVPKDHDDVVESIRVLRVAFCSARDTRTRLALQIRDLIVTAPAALRESMPAKTADRVAHCAKFRPGNVRSPHEATRLALKTLSRRYQDLTHEMGDLTKLLDELTKEANPALRAAKGVGVDVASILLVAAGSNCQRLRNESAFAAMCGVSPLQASSGQTNRHRLNRSGNRQANNALWRIAMVRMTSDEETKTYLAKRTAEGKTKRDVTRCLKRHIAREVFHLLQHPAYEEVGPQLRSTRTTAQISLQAVSDNLQVTLSKVSRIERGLQHDPEFVERYEAWLTNQIAA

SEQ ID NO: 384721 - protein, 311 aa, unidentified
MKSSVIGIDVGKYELVIYWEGRYFNVKNDEEEVKKWVKKQKREMKRVALIVYEPTGGYERVLQECLDFNHLPYRRVHANRVRDYAKATGVFAKTDKIDAKILSDYGEQMKIEAKEVKSSEPGLKALLTRREQLIGMRLQEKNRLDTCGPLLEKWIEKNIKQLSKQLEEIEEEIRVYEKKHERVEKLLALYSSIPGIGRITGLQLIVDLPELLEASDKTLAALVGLAPWNKDSGTKIGHRRTRGGRVRIRGLLYMAALVASRCNSELKKFYQKLKQKGKATKVALVAVAHKLLAIVRSVARRETPWVPVLVR

SEQ ID NO: 384722 - protein, 429 aa, unidentified
MNSTQNKKIEQVKETTMIVGIDVGSEKHYFRAFNWRGIELTRKPVAFSNSMEGFNSFYNTIVELMQKSELEEALVGIEPTGHYWFDLGQFMGEKDIKFVMVNPHHVHKTKELDDNSPSKNDRKDPRVIAGLVRDGRYFYSYMPTGVYAELRNASNRRFVLVEEQTRAKNRLQKWIAVYFPEYKGIYTHIDAKGGMLVLKKAPTPEEIVRLGVEGIIKIWKDAKLRGNGHKKAMLILAAAMRSIGLKAGLTEARMEIQDLIEDYELQTKRLERVNDLIKGLCQQVRYADKLLEIKGIGITTVAGFIAEVGDITRFDSTKELQKLAGLELVADSSGKHNGKTKISKRGRKRLRYLLFEAAISVVGKNEEFKEIHRYYTTREKNPLKKMQSLIVVACKLIRVFHAILTKGIRYDASKMLKDIRHPGEQLKAA

SEQ ID NO: 384723 - protein, 337 aa, unidentified
MIYVGVDLHTNSFTVCRRTKQGKETIKGYSIVRIDNFIKTLRKDDLLAVEATGNTAWFIEQVASRINKAIAVNPYQFEVIRKSVKKTDKNDAKTLAYFLSKDMLPESRMKTKENAQLHSLAVTRDKLVKQRTALINKIHNVLNSHGLKFKKESLGTEKGLNTIWSWNWDTIVKIELEVLVSQIRTLTENIKRLDKDIAEQGEKLKGHKNLTSIKGIAGRSATVLLSTIGDVNDFADEHKLASYIGIVPRVSDSNEKVSHGRITKRGDKLARTTLVQCSLVATRYSPYLRKYYERIKSHRGSGKAIIATARKFLGIIYNTLKNDWVFEDFPNFVIANT

SEQ ID NO: 384724 - protein, 323 aa, unidentified
MNKFPAISNDQTFIGIDVAKDSLAVFVDSTNHHLSCLNQTKDLTKLAKQFKKLHPTLIVLEASGGYETAAAVVFAEFELPLAIVYPRRVRQFALGVGIIAKTDAIDAAALAYYGRVANIAPKPLPSDRLPHLQALTLRRQQLIEMRLAEQNRLETAHRKMHRNIKKHLDWLVKQIEDLETEIDNQIKADETLQETAQLLQSVPGVGQVLSSTLLTELPELGILSNKKIASLVGVAPFPRESGKWNGKRFCQGGRNSVRRILYMATISATRFNPAIKQFYDNLLEKGKLKKVALIACSRKLLTILNAMVRNNSHWQPKSLPLSA

SEQ ID NO: 384725 - protein, 346 aa, unidentified
MEYFVGLDASLDTVNMCIVDQEGSVLLEQKVDAEPEQIVALLKRFGRPLKRIGLEAGPTSSWLFSELRAAGYPALCLECRHVKAGLSAMRNKTDRNDARGIAHLVRLGWFRLVHVKSEEAQGIRMLLVNRNLLLGKLQDLENSLRGSLKVFGIRLGKVTKRSFETRALELVKAHPKLAAISLPLLRVRRVLLEEFSRLDRMALKIARSDAVCRRLMTVPGVGVIVALTYRTGVDVPERFTRSRDVGAHFGLTPRRYSSGQVDYDGHISRCGDEMVRTALYQAAHVLMHHGRWSGLRGWAMRIAKRSGAKLAKVALARKLAVVLHRMWIDGTAFRWTICESTPAAAA

SEQ ID NO: 384726 - protein, 411 aa, unidentified
MDIIHERAAGIDVSKRDAKVAVRVPGKRKGTFQTSVTTWGSTTSQVLELVEYLAGQQVTTVAMEATSDYWKPFYYLMEDRLPVMLVNAKHARNIPGRKTDVSDAAWLAQLAAHGLLRPSFVPPPPIRELRDLTRARQVVARDRARQVQRLEKQLESSGIKLSSVVSDLTGVSGRAMLDALIDGQRDPAVLADLAQRTLRHKIPQLIDALQGRFTEHHAFMVRQYLTQIDAHQAMIDQLTERIEHNIGPFRPARDALVSIPGVSTTIAEIIIAETGADMTAFPTAAHLASWAGVCPGLNQSAGRVKSSATTHGNAYLKAALGIAAMSASRAKGTYLAARYRRILARRGPARAIVAIEHTILTAVWHMLHNGESYTDLGPDHYAHLNPDRAKHTAIRQLENLGYKVVITPTAA

SEQ ID NO: 384727 - protein, 354 aa, unidentified
MPRKSNRLEAVATLGIDIGKNTFHLIGLDRKGAIVLRQKLSRGQVQARLANIPACLIGMEACVGAHHLSRQLKAHGHEARLMPARYVRPYSKGQKNDFRDAEAIAEAVLRPTMKFVATKTVEQLDLQGLHRVRERLVCQRTSVINQIRAFQLERGIAVRQGLRALRTEMPIVLAMTDKLSPRMIHMLEDLCTDWRYLDERIETVSNEIETLSEQDVGAKRLMTVPGIGPIISTATVAAIGSGDVFSKGRDFGAWLGLVPRQMSTGGRTVLGPISKRGNRYLRMLFVQAARAVLLRPQSWEKHGLKSWIEAAARRLNRFKLAIALANKIARMAWGVLHGGRNFEVRPMKPAPQAA

SEQ ID NO: 384728 - protein, 344 aa, unidentified
MIVIGVDVHKQSVTAVAIDEVGRMLDEKTVVVGSDELVGWASAHGSERRWAVEDCRQLTRWLERQLLGRGEDVVRVPPKLMAPERRAGRARGKSDPIDALAVARAALREPDLSRPRPDEAVFRDLKLLVDHRDDLVDERRRTQQRLRWHLHQLDPTLAVPLRMLGRASHLERVGRWLARQEQELQVRLARELVTRIRSLTRAITELDRELEQRTVQIAPALLELPGCAGVTAAKLLAEIGPIDRFKSDAQLARHSGVAPLEASSGRIQRHRLDRGGNRQLNSALYRIAITQARYHPGARAYLERKQAEGKSRRDKLSLTMATGRAVSVSRQSNSRPARRCIPIK

SEQ ID NO: 384729 - protein, 388 aa, unidentified
MQDVADQSVTPTTMGADLCAIFVSLELSRSTWLATSLSPGRGEKMSKHSVSAGDIAALLARFSELRRKACARTGKSFPIVVIQEAGLDGFWIHRVLLSEGIESHVVDAASIATSRRRRRAKTDRIDGETLLRALLAHKRGEPRVCSMVRAPTPEDEDRRRICRERKVLIMERVQHVNRIKGLLFSQGASGYEPLRRDRRARLEALQTGDGRRLPPHLKAQVCRELDRLELLLEQIKAVEAERDALLDAEQTKASAPPPMLLGVHGVGPEFASVLWSEGLSRHFDNRRQVAAYAGLAPTPWQSGSVNREQGISQSGNRRLRTTMIQLAWLWLRHQPRSALTLWFQDRMERNGGRRRKTTIVALARKLLVALWKYVSAGVVIEGAMIRPA

SEQ ID NO: 384730 - protein, 388 aa, unidentified
MTPTPVSLPHPAAPDHNNTLVLAIELSNKSWVLAAQVPGLTRVKAKQTIEPTAEALLAALQGYRERAKAAGRHVERVIAIYEAGWSGFWLARLLATHGVEPYVVQPSSVLVDRRARRAKSDGIDAELLLRTLLAWLRGEPRVCSMVPIPAESDEDARRSVRERTELVAERVALVNRIGAVLATMGCGDYDPLLRNRRQRLGELRTALGTSLPPHAHAKINRMLDRLDLVRTQIAELEQDRDAVLQEEIPDKAGEMIQQLAKLRGIGVQSATVLVREAFVREFANGKALGSYAGLCATPYSSGGTDREQGISKAGNRRLRTVMIELAWLWQRYQPGSAEVNWFRARVSGAGARMRKVMVVALARKLLIALWRFATQGVIPEGAVMKPAS

SEQ ID NO: 384731 - protein, 320 aa, unidentified
MAEILQKIFVGIDVSKKWLDVAVIPSGEVWREENSETGIRTLIQKLESAHGELVRVIVEATGGYEALLVSMLYASHLPVARVNPGRVREFARSVGQLAKTDSLDAKILARFGEAVQPPLTRLPSEQEQALSAFLERRKQLLDIQTAEKNRLNTAPSGIQDSLKSHLLWLKQEIHKLDTEIEQFIDTQPEFKHKDELLQSVPGVGRVTASKLIADVPELGECNKKEIAALIGTAPFNHDSGYKRGKRSIHGGRADVRHVLYMATLAATRFNPIIKAFYQRLLRAGKKKKVALVACMHKLLTILNAIIAHQTPWQPAVSLDN

SEQ ID NO: 384732 - protein, 427 aa, unidentified
MTDRIERITGKTLIVGIDIAKHIHWAQFTDSRGVPLRKPLKVENALFGFEKLTAEIAALAATKGFDNVFIGFEPSGHYWRTLAWYYKTSEQITLVGVNPYHVKQTKELDDNTQTKSDTKDALVIARLIRDGRFFDIYLPENQYADLRVLRRHRDQMSTDRKRIMNNLISILDEYFPEYESIGFQISAKSTYAILRSTPFPSDIVGLTAQELKEKWKSENPCSRLRISLHLAELFISTAERSIAVTTGLEATRLRINNMLNQMELLDLQIEECDQKMDELMSELDIADYLTSVPGVGNVTAASFIAETGDLSRFDDWKQVRKLAGLNLVEQSSGQHKGKTKISKRGRPDLRRIIYIIGDKGMLVSPEMMTFYQYLRHRPTNQLSHHQSVLAVGLKLMRIMFHVVKYREYYDPGRALGPERIAQLNGVA

SEQ ID NO: 384733 - protein, 352 aa, unidentified
MRIIGCDLHARQQTLAMLDTATGAVEKQTLMHEGSNTREFYSSLPRPVRVGIEATGTMQWFLNLMEELGIECQVGHPAKIRAAEPRKQKHDRRDADLILELLVENRFPSIWLPSKELLDLRALLLHRHQWVRVRTRIQNALQAIALANGLRRGPSLWSQAGQCAIASLPLAPHTAHRRSELQAMYAKFETDIEKLNQRVEEQAGERPGARLLMTHPGVGPITALATDVFLGDPTRFADGKALASYVGIIPSEYSSGGRQRLGGLSKQGNPLLRFLWCEAAAHAVRRDPELQRFYRRKLIQKGLGKAKVAAARKLGIRLWIMLRDEIDYNEFCRRGQMQQRSGDACAGMPGTR

SEQ ID NO: 384734 - protein, 343 aa, unidentified
MQTITTIGLDIAKSVFQVHGVDAQGQVIIRRQLKRRYVLAFFQKLAPCLVGIEACASSHHWSRELRALGHTVRLMPPAYVKPYVKRQKNDAADAEAICEAVTRVNMRFVATKTPEQQSCLMLHRTRHLFIRQQTSVINVIRAHLAELGIVAPVGRKGVEELLDVVADASDKRVPEVARACLAALGAQLRRLKEQILEFDRIILAWHRSSETSRRLDAIPGVGPMLATALVASIADPKAFRSGRNFSAWIGLVPKQHSSGGKDRLGSISKQGDRYLRSLFMAGALAVIRYAKINGIKHRPWLTALLARRPVKVAAIALANKIARMVWAMMARGERYKEPIALAA

SEQ ID NO: 384735 - protein, 344 aa, unidentified
MITIGIDPHKASLTAVAVDPSGRPLGHRRLLVNAGTLSQLVAWAAGWPARRFAVEGAYGLGRPIAQQLAAAGEPVLDVPATLAARTRLLSTGGGRKTDTADAASVAQVALHCPILRTVAAEDQTTILRLLTERRDDLTGERTRILNRLHGLLRDLVPGGAPTDLTAAKAAALVRRLRPGSATAACRRQLARDLLGDLRRVDARLADNKTQLQAALAATASTLTQIHGLGVILAAKLLGHVGDIGRFPSQDHFASYTATAPLDASSGNQQRHRLNTGGNRQLNAALHTIAVCQARDPGPGRRYYLRKLSEGKTRAEARRALKRRLANVIYRRILADQRRPQPAAA

SEQ ID NO: 384736 - protein, 310 aa, unidentified
MNARSDAACFVGVDLHKDTLTACTIAAKDREVSYRKIACVAREKVREFLADLPRPSVVAIESVGFYRWLWTEAEPIVDQVVRADARADARGCRALAGRRIKTDREDAFNVAELLMTGRLPTAWAPPNNIQRLRDLTRHRNGLSRDHAKTLHRVKSIMNRLNRPGPARMDAAGLQRYLLASVERIEADDLMMLWQHQRRLVEVEQDRSAIERRIIDVMRAEEFRRLREILESIPGVGLITAATAIAEIGDFSRFPDAKAIGRYAGLTPTGYSSADKHRLGRICKTGSPDLRWALQQAAWTAIRCEPAFIEL

SEQ ID NO: 384737 - protein, 360 aa, unidentified
MQEITRVGVDLAKRVIQVLAVNAAGSRVTGRALPREKFLPWCAQLPAGCLVAMEASSSAHHWARKLIAMGLDARIIAAHLVTPYRMQGRSGKNDANDAAAICEAASRPQMHFVPVKSVEQQSMLCIHRLREGFKTERIACINRIRGLLAEFGLVFPQKPEVLRQALPDVIEDATNELGGLARMALQRAWAQWQELDEHMDWCDQRIAAHLKTNEQVRQAQQLMGAGPVTASAVVATVGEFHQFKNGAQFGAWLGLTPRQNSSGGKNNLGRITKRGDTYLRTLLIQGAKSIVLTAHKRDDPISKWAHQLREKSGWQKAVVALANKNARILWAVFVRGKAFDANHVSVKPPAAMPQIGPVPA

SEQ ID NO: 384738 - protein, 357 aa, unidentified
MVHKHTILDWLGQHVFVGLDVHKRSWIVAIVTEQTDFKTFTQSPDVKLLVSYLHRHFPRATYHCVYEAGYSGYWICDELRAFGIDCIVINPADVPTMDKERKHKTNKVDARKLARSLRNGELVPLYVPSRIALEDRTLVRSRHMLVSKQTRCKNQIKALLSFYGVSLPEDLADRYWSARYVAWLESLSLQSSSGTHSLKTLLQELTHLRKSILDTTRAICALARTDSYALNVLYLTSISGISTLMAMILLTEIVTLERFHSLDHLACFVGLVPGESSSGDERTMTGMTERKNRYLRWVLTESAWVAIRHDESLALAFNTLSRRMPKNQAIIRIARKLLNRVRFVLKHQQPCIVLKAA

SEQ ID NO: 384739 - protein, 338 aa, unidentified
MAILNVGIDLAKNVFALHGVNERGQVDLRRPSVPRAKLHALVAALPPCTIGMEACSGAHHWARLFAQHGHTVKLMAPKFVAPYRMSGKRGKTDAADAAAICEAVQRPNMRFVPVKTAEQQSRLMVHRARQGYVEARTALFNRIRGLLAEFGVVLPQKAEVVRREAARHMDTLPGYGKTVIEDLLAEVRHLDERVAQYDVHVRAMARDSASAQQLMQIVGIGEVTATAIVATVGNAREFSSSRQFAAWLGLVPGQYSSGGTTRLGRTTKAGDAYLRGLLVMGARAVLNAAGNKTDSISRWATNIALRRGYWRAVVAVAAKNARLAWAALTKGESFTLPA

SEQ ID NO: 384740 - protein, 344 aa, unidentified
MHHFAIDLGSMESQICVRTPDGEIALERKVATRSLKSYLQKQAPSRVVVETCAEAFRVADMALELGHEVRVVPATLVRSLGVGARRIKTDRRDAQVLSEVSCRIDLPSVHIPTHVARQRRSMCGMRDELVASRTALINCVRGWARTQLIKIVSGVVATFPKRAREAALKLPEGLPEYAERLLQTIETLNAQIVAADAELQKIADEDALCQRLQTVPGVGPVTSIRFAAALDDCSRFASAHAVQSYLGLTPGENSSSQRQQRTGITKAGPAAVRRVLVQAAWTLRRTRPHDPICLWALEIEKRRGRFVATVAVARKLAGVLYALWRDGSKYEPTHQSKRPNASST

SEQ ID NO: 384741 - protein, 333 aa, unidentified
MKKLIHFVGIDVSKETFDLALIKDNDMSQITQKIFLNNVMGFKELHSWLKQQKVDYPESLFCIEYTGYYSRLLSKFIIAKKGNLWMEMSFKIIRSLGIQRGKNDKIDARSIALFDHRNQQDYKPCIPKRPIIEKLKTLLMLRQKLINSKLSITIPVNELKRIDKPAGKEALAITSITLKALDKNLMTVEQQIDQLIASDEDLTEKQKLVTSVPGIGKITFCFLTYFTNEFQNYSEAKQLACYCGVVPFEYTSGKSVRGKPRVHHMANKFMKKLLHTAALCAVTYYPEFKAYYERKIAENKNRMLILNNVRNKLIIRIAAVIKNNYPYKAIHAA

SEQ ID NO: 384742 - protein, 419 aa, unidentified
MSFKIIKNNCCGLDVHKTWIFACIGITDSNNRTEYKQARFSSFTKGLNELCDWLAKYNCKDVCMESTGKYWIPVFNILEQHNLWVTLSHPKYTKPMKGNKTDRKDAKWICDLYMCGMVKPSFIPSADIRELRDLVRYRYKLTCMITGEKNRAQNCLTVSNLKLDEVFSDVFGKSSRSITEQILQHPGEAFDVAHFVHGRCKTPIEEIQAAVDGAISKEQAVKLRQCLDHIDELNKHISEIEQEILRLSDKYETALNLIRTVPGFDKNPLTAVQVLSEIGGDMSVFPTAKHLVSWAGCCPRNDQSNQKIKSTRISRAGSYFKPVLVQVANALIKSKKHPEFTTRYKRIKARRGHKKAIIAICRMILTAIWHILSDLEPYTPEGFLESRPVKEEKVLSTSQALNLLKQRGYIIKDEPLAVS

SEQ ID NO: 384743 - protein, 369 aa, unidentified
MADRITYVGLDVHKESIVVAVASGGLRGEVREYGRIANTATALDRLLRKLGDAGMVLRFCYEAGPCGYGIQRHVSARGHECVVVAPSLIPKRAGDRVKTDRRDAASLAKLHRAGELTAVWVPDPQHEAMRDLVRARLDAVHSLRRARQQLSGFLLRQGCHYGRPAWTKLHRRWLAGLIFEQAIHHIVLEDYIAAVEAAEARRDRLTAQIGTMLPDWTLAPVVAALQTMRGMAMVNAATLIAELGDLSRFADPRQLMAYLGLTPSEYSSGSSARRGGITKAGNGAARRLLIEAAWSYRFPARLSRELLLRQESQPKPIRDIAWKGQVRLCARYRRLARTGKPANVVTTAIARELTGFVWAIARQVTVTPG

SEQ ID NO: 384744 - protein, 413 aa, unidentified
MERLLERCAALDVHQASVSACVRVPDGQGERREFAEAFGTTTPDLFALGDWLRGHGVTHVAMEGTGVYWKPVYYALEGEFELLLVNAAHVKQVPGRKTDTKDAAWLCQLLECGLLRASFVPPRPIRELRDLTRYRKTLIRDRASEANRLHKVLEDSGVKLSSVASNVLGVSGRLMLRALWEGGNDPVALAELARGRLRSKLPALRRALEARFRDHHAFLVAQILGHLDYLDEAIAACSARIEEQIAPFASALTLLESVPGVGRRNAEVIVAEIGVDMSVFPSSRHLASWAKLAPGNNESAGKRKSGSTGKGSPWLRSALVESALAGTRTRGYLRAKYWRIRQRRGHQRAVIAVAHAILEISYQMLTTGELYRELGDDFFERRDNERTTQRHLRALERLGYRVTLDAVPQPEAA

SEQ ID NO: 384745 - protein, 427 aa, unidentified
MSYWIAGIDVHKRMLAVVVADVSVEEAYQFERRTVGTSPDQLRALAEWLVEHEVEEVVMESTAQYWRPVWEALERYWRPIRRKREGAGPMSGALHLAQALSNRGARGRKKDFPDAERLVKRLVAQELTLSFVPDAEQRLWRTVMRREYQVTRTRVQGQNRLECLLEEAHLKLSSLVSDLLGLSARRMLQALADGETNPQALAALADRRLRATPEQLCDALGACTTLHPVYRRLLTLTLEELRVVDDHLGQLDQEMAGLLRHHQAEVQRLAEVPGLGVDSAQQIIAEVGAAAATFPSAKHLSSWVGACPGDDESAGVSYSHRSPKGNRQMRRLLNQAANAAAKTKGSIFELAYRRLVPRLGHAQTIGAIVHRLCRLIWKILHQGLRYDERGPAVTQHRMQRRAAKMIRELRSLGYRVELVPAQSGSPA

SEQ ID NO: 384746 - protein, 407 aa, unidentified
MNAVGIDVSKGKSTVAALRPMGEVAFLPQEFLHTEVGLEQMAGAIVALGEDTRVIMESTGRYHEPVAAALHEYGIYVCVLNPLLIKQSGGGSIRKVKTDKADALKIAKYGLDNWVDLREYTPMDTIRQQLKLCSRQYNLYMKTVVSLQNNLISLTDKTFPGVNELFSSPERADGHQKWVDFVMTFWHCDCICRASEKAFTERYQKWCKRKGYHFSAEKALDIYAGSCGHFTTLPKNENTKLLIVTAAQQLLAGKTTLATLRAEMTRLASQLPEYETVCAMYGVGKITAAQLMAEIGDVRRFPRRSSIVGFAGVDPGVDESGKHSAKSVPTTKRGSPHLRKTLYQIICTYLKKSPADEPVYQFLDKKRAEGKPYFVYMTAAQNKFLRIYYARVKECLEAFDTEPAKQS

SEQ ID NO: 384747 - protein, 399 aa, unidentified
MAAPSLWAGIDAGKLDHHCVLIDASGERLLSRRVRNDEAALTALIDDVIALADGGLVQWAIDLNGGGAALVISLLLARDQHLLYIPGRIVHHASAAYRGDGKTDAKDAAIIADQARMRRDLLEFRHRDEFTVELRTLCARRTDVAADRNRAINRLRAQLLEYFPALERAFDYSHRRGALILLTGYQTPEALRRTGRTRLEKWLRGRNAYNPVAIADRAIAAANAQHVVVTGQRLGSTIVTRIAQQILDIDAELSDLDDMIEERFTQHQQAAVIRSMPGFGPLLGAELIAATNGGLDSFHSADRLAAVAGLAPVPRDSGRISGNLKRPRRYDRRLLRVFYLAANNSIKTCPQSRAYYDRKRAEGKHHRQAILSLARRRVNVLWAMQRDNTAYRSTAKTAA

SEQ ID NO: 384748 - protein, 408 aa, unidentified
MDILCKCCCGLDVHKKTITGCIITPQGKDIATFGTMTKDLRALLAWIKDHGCTHVAMESTGVYWIPVYNLLENEALTVIVANANHIKNVPGRKTDVSDAEWIADLLRHGLLKGSFIPPRGQRELRELTRYRRSLIAEHTREVNRIQKVLEGCNLKLSSVVSRITGTTASHILKALIQGEVDPEVLANFAKGRLVRKKRELMEALDGFIGPHQKKLLALQIDHLEYLEKQIKALDQEVAERLRPFEDDLARLDTIPGVGRRNAEDILAEIGPNMDPFPSAEHLSSWAGISPGNHQSAGKWKSGRTTKGNRYLRVTLCESAQAIGRMKPNFLSHQYHRIAARRGKKRAAIAVGHSILVICYHLLRRKTEYVELGANFYDERKEDSIVKHYLKRLESLGYTVSLKKVEACP

SEQ ID NO: 384749 - protein, 411 aa, unidentified
MDVVHDRAVGIDISKRDAKVAVRIPAAKPGTFTTSVTVWGATTNEILALRTFLETQNVTVVVMESTSDYWKPFYYLLEETLPVMLVNAKNARNIPGRKTDVSDAQWLAQLAAHGLLRASFVPPEPIRELRDLTRARAIAVQDRTREIHRLEKFLESSGIKLTSVASNLTGVSSRAMLDALLAGERDPRVLAELAHGKLRPKIPMLVEAMTGFFNEHHARMVRSHLKQIDGLGDRIDEFTTYIEEAMSPFRHVRDILTTIPGVSERIAEVIIAETGADMSVFPTPGHLASWAGVCPGSNESAGRVKSTHILPGNKHLKAALGMAAMVAIRQKTSYLSVKYRRIASHRGRMKAVVALEHTMLTAIWTMLTTGETYLDLGPNYYATLNPDRARNKAIRQLENLGYEVTITHAAA

SEQ ID NO: 384750 - protein, 343 aa, unidentified
MKHYAAIDVSLELSSVCVVDASGKVVKESKVETHPDALVKFFKDLGLPLTLIGLEAGPLSQWLHAGLREAGFETVLMETRLVKKALSAATVKTDRRDARGVAQLLRMGWFRPVHAKSVGSQEVRALLVGRKQLQHKLTDIELSIRGILRGFGLKVGRVVKTAFAKRIRELVTGHAMLEQIAEAMLSARAALLIQFNKLHKAVLAIVRGDEVSRRFTTAPGVGAIVAITYKSALDDPSRITKSKNAGPLFGLTPKRYQSGETDVTGGISRVGDEMVRTALYEAANAVLSRRTRFSTLKRWGLEVAKRRGMKRAKVAVARRLAVILHRMRIDGTTFRWTKTEAAA

SEQ ID NO: 384751 - protein, 344 aa, unidentified
MEHFAGLDVSVKDTSVCIVDDTGRIVREVKVASEPEALLAVLENPAYHFKRIGLEAGPLSQWLFSALVEAGLPVICVETRHMRAVLKAQINKTDRNDARGMAQMMRVGLYRPVHVKTLRSQKLRMLLTHRKLLQSKAIAIDNDLRGTLRNFGLKVGMAGKARFEARIRELVESLPDLAALVEPLLIVRRTLREQFCILHRRLLAIVRDDEVCRRLMTTPGVGPVVSLTYRATVDVPARFRKSKSVGAVFGLTCAKYQSGEVDWDGRISRCGDEMMRTMLYEAAQAMMRSKKWSWLKAWAMQIARRRGMKKAIVALARRLAVIMHRIWVDGTEFRWTREQATATA

SEQ ID NO: 384752 - protein, 348 aa, unidentified
MAMTIVEGTRAVTGGVDTHLDVHVAAALDDIGGLLGVESFEASAAGDDKLLSWLQSFGPVVRVDVEGTGSYGAGLARFLRAAGVEVIEVDRPNRQSRRRTGKSDPADAVEAARAALSGRAQGAGKTRDGNVEAIRALVVAKRSARSSKIKTLNQIRHLGFTASDDLRERFRGVSRQQLGAVAAGLRPRAGSDPVTFATKTALVTLGRRVLALDEEKERLEVLLAELVTKTAPSLLELHGVGVDTAAALLVAAGDNPDRLRSEAAWAHLCGVAPIEASSGKVTRYRLNRGGDRQANSALWGMVITRLRHDPRTQAYMQRRLGEGRSKPEIIRILKRYIAREVYRHLPRV

SEQ ID NO: 384753 - protein, 380 aa, unidentified
MRNVRFIGLDVHAETIAVAVAEPGGEVRSLGTIPNRPEPVARLIRKLGKPEQLRVCYEAGPTGYVLYWQLSELGVKCEVIAPTLVPVKAGDRVKTDRRDAEKLARCYRAGDLTAVWVPDAAHEALRDLVRARLAARRDQLRARNRLGKFLLRHGRRAPEGTTAWGTKHLAWVKRQSFEQAAQQATVVDYLHEVEHAAERIVRLERSIDAAIETLPQKLHAVIDALQSLRGIAKISAVSIMAEVGELSRFESARQLMGYSGAVSREHSSGERTRRGSISKAGNSHLRRIVIEAAWAYRHRPGLGATLLARQRDQSEDIKAIAWKAQHRLHARYSKLLAKGKAKQQVITAVGRELLGFIWAIGVAAERSQSEAPRRALRRAA

SEQ ID NO: 384754 - protein, 343 aa, unidentified
MDHFAGLDVSVKDTSICIVDDTGRITREVKVASEPGALLAVLMNASHRFKRIGLEAGPLSQWLFSALAEAGLPVICVETRHMRAVLKAQINKTDRNDARGIAQMMRVGLYRPVHVKTLRSQKLRMLLTHRKLLQSKAIAVENDLRATLRNFGLKMGMVGTARFEARIKELVENVADLVVLVEPLLVVRRVVREQIGILHRRLLAIVRDDEVCRRLMTVPGVGPVVALTYRATVDVPARFRKSKSVGAVFGLTCSRDQSGERDRPGAISRCGDEMMRAMLYEAAQAMLLRSAKWSWLKAWAMQIVRRRGMKRAIVALARRLAVIMHRIWVDGTEFRWTRETALA

SEQ ID NO: 384755 - protein, 344 aa, unidentified
MEHYAAIDVSLEWSSVCVVDAAGEIVREAKVPSEPEALVAFFAASGLRITRIGLEAGPLSQWLHAGLIAAGLPAILIETRHVKAALKAMTMKSDRNDARGMAQLMRMGWFRPVHVKTLQAQEIRALLTARKLLVAKLHDVESSIRGILRGFGLRVGAISKGKFEARIRELVAGQAMLERVAEPLLRARAALAAEYRTLHRQLLAAVREDEVCRRLMTVPGVGAVVAMTFRSAIDQPARFAKSKAVGAHFGLTPKKYQSGEIDRTGRISKVGDAMVRTALFEAANVMLSRTVRFSALKAWALRVAGRHGMKKAKVALARKLAVVMHRMWVDDTIFRWGEARVSAA

SEQ ID NO: 384756 - protein, 443 aa, unidentified
MSRKKHTHLRGERGQAFADKIRGIPPEQILCVSLDIHKYFHVVMIHNALGEIVTMPFEIDIFQAGFDRLCRAIDEAVARTKAQVVLVGMEPTGHYFENLARHLHQRPQPVTLINSFAVSRNRDQQMMQREKDDEIDVAAIGDLLRRGEGTPFQPINGLYLEMQHLARVRLSKVKMQTALKNQIIGHLDRIFPGLVIQGKVARERYEPLFVADFWSCQTLQHLIRVCPDPRQLATMAPQDLRTAFHAQGFALGAETAAKIITYAQKVLLPDPEVVAIRCELLARDLALLAEVGRRIAELEDRLHALLQQTPYWSWTKVRGLSVTQVASLAAAIGDPSHYTHAAQVFRRSGLVSGRNDSGTRRHKGKGKRVVKTGDVYLRRALMTAIMSLIRHQPALQDYFNELHRTKHAGVARVATARRAMGILWAMQRDQHSRTLVLKRGAVM

SEQ ID NO: 384757 - protein, 339 aa, unidentified
MRHYCGIDLHGNNNVISVIDEEDRIVFGKRISNELKSVLSALEPYRNSIEGIVVESTYNWYWLVDGLMDNGYKVHLANPAAIKQYEGLKFTDDKSDARWLAHLLRLGILPTGYIYPKADRPVRDLLRKRGQLVRCRVSNTLSLNNLVARNQGFSIARNRFQQLEEEDIIALMEEENLSLAANANLAVIRCLDEQIEKVEKAVKAKAKLRPEFRLLKTVPGIGDILALHIALETGDIGRFPTVGDFSSYCRTVKSTRITNGKKKGEGNTKCGNKYLAWAFIEAANYAVRYNEQARKFYQRKSAKRLTVVARKALANKLARACYYIMRDRVPFNIERLFTT

SEQ ID NO: 384758 - protein, 426 aa, unidentified
MKGQYERVAGIDVHKDMIKVGIRSPGDKPWTRRSEVLQYRTFYGVLQQMAADLRKRGVTHVVMEASGVCTEPVYYALAERDFDEVAVINPAHAKALKGHKTDARDCLRVAELFECGLLRGSYIPAPEIKEVRDLTRYRIKTVQARTSEIQRLAKALESAGIKLDSVVSDLTGKSATAMIEALIDGERRGRVLADLAIGRMRTAGKLADLSQALTGRFTEHHALLCRLHLDRIAVFDAAVAGLEDTIALRAAPWQREQDLLRTVPGFGDVVAQAWLGEIGPAPHTYFASHEKLASWVTLCPGNHISAGKRKHGRTGDAGTYIKPMLVQAAWAAIRVRGRLQARYSRLVRRFGGEKNPAAKKKAITAIAHTLLKIAYQVLRSGKPHQDLGADFYTRRESPGQRQAYLMRQLQKLNPGCTITITPAEAA

SEQ ID NO: 384759 - protein, 475 aa, unidentified
MNVKGTKKKNQVVTANIFEQQELLKKAEVIKKNLTASTWRELETNGKFDKNEKLSFISDDMLILGCDVGSETHYLRAIDTRGRELSKSAFPFSNDSEGFQSAKEWAVRIAADHDKKQIVLGLEPTGHYWFCLATWMISNGISVVQVNPYAVKQTKEVEDNSQLKDDTKDPKLIANLVKDGNFGMPYLPEKLYAELRRLSMFRDQLNEDRIRAINRMHREMKIYFPEYKNAFGKVDGAFSLELLKSAPFPDDLKALDENGIRQIWHEAKLRGRGYSRSGEILGYARSSVGIRDGADAAKIAVQWFVKKIMELDEELAVIENLINQKCQEIPHASNILEISGIGENTLSGILAEMGDISRFDDVKEIQKLSGLGLVACSSGKHKGETKISHRGRKRLRYWLFQAAKSAVAHAEEFKELHVYYTTRPDNPLKKMQSLIVIACKLLRIVYTILKKGTVYDPKKMLMDIRRPEKKEAIAA

SEQ ID NO: 384760 - protein, 353 aa, unidentified
MQKPIEGQIVVGVDTHKEIHVAAAVDWRGTLVDEKSFATTRQGYRQLESWARSLGDVLRVGVECSGSYGSGLTRHLAKNGFTVLEVTFPDKTVRRKRGKDDFIDAEMAAEAAFTGTRTVTPKARDGMVESLRMLQKTRSTAVAARRSALQMIRAIIISAPEELRDQLRGMTRMQLIRHLVATRPDSTDFKSPTGSARIALKRLAKRYVDLDDEIDELDDMIKALLEECAPLLVGCSCVGAQSAAQLMVTVGDNPERLKSEAAFAMLCGVAPVPVSSGMTYRHRLNRGGDRQANSAIHIIAIGRLRTDQRTQDYVAKKLAEGHTKMEALRCLKRYIAREMYYVIKRQYELVNRS

SEQ ID NO: 384761 - protein, 339 aa, unidentified
MIIVGVDYHPSVQQVVFLDMETGETGERRLNHSDGEAERFYRDLQRRQVKVRVGIEATGHARWFERLLAELKFELWIGDPARIKAARVRKQKTDRQDAQLLLRLLIEDRFPQIWVPSPENRDLRQLIWHRHRLVQMRTRAMNQIQAVAMNEGVRRKKTLWSKTGRKQLEALPLAPWATRRRQDLLELVDRWNTTIVELTAAAEQEARKRPEVLRLMTHPGVGPITALAFVLVLGSPDRFGCGHQIGSYLGLIPCEDSSADRQRLGHITKQGSSLLRFLLVEAAQAAVRWDPDWRRRFVHLAIRRDRRIAKVAMARKLAVSLYWMWRKRFDYQQTLQFGK

SEQ ID NO: 384762 - protein, 454 aa, unidentified
MSESAMQRDEMMSLDVRHPNAAGIDIGNAAHYVAVPPDRDVEPVRTFECFTEDLNKMADWLAQCGIVTVAMQSTGVYWLPVYEILVQRGFEVFLVNARHTKNLPGRKSDVQECQWLMKLHTYGLLNNSFRPTEEICVLRTYWRQRDDHVKSASASIQRMQKVLTEMNVQIANVITDISGVTGMAILNAILGGERDRYKLAELADPRVKASKEEIAKSLEGNWRPELLFVLRQQMQTYGAYQKRIEECDEAIEAPLMTMEDKAEPGSKPQTPKAGKKAGGNAPQFNLRGELYRISGIDLTRIDGINVMIAQTLVAEVGLDMRKWPTEAHFASWLGLCPDNKITGGKVYHRGSRHVENRAATAFRMAATSLWRSKTYLGAKFKRLRANLGAPKAITAMAHTLARLVYRMLRYGQDYVDKGMEFYQQRYQQQQINWMQKKAKDLGLVITLTAAPAAN

SEQ ID NO: 384763 - protein, 341 aa, unidentified
MNYSLGIDAHKKFSFWTLIDKDGKVVFQGKIISRPEAIKEAIEKYLPPSTKAVIEPVESWPWYCQIFEEKNIEIVLAHPLEVKAIAHSKLKHDRIDSLILAQLLRSDFLPKAYLAPLKIRNLREILRLRCFLTKLRTQIKNRIHGILAKNAIFHNFSDLFGKKGIKWLKSLELREPFSKEIQTLLDLLEEINQKIKEINKTLQKIAKTDKEIEILTSIPGIGYFSALMIKAEIGDFSRFPKASRISSYAGLVPSSYSSGDKLRFGKITKKGSPYLRWIMVEAAQKVNPSWGKLYEFYQRIKLKKGTKTAKVALARKMLEIAWTLIKKKEFFKRDFKENKRP

SEQ ID NO: 384764 - protein, 377 aa, unidentified
MSLVMGIDQHRAQITAEWLDTETGEVSRARVRPADRAGVRRFLARFAGQQLEVALEATTGWRFLVEELRAVGAVVHLAEPAETAALRGNKRRAKSDRADARHHRELLLAERLPESWIPPDHILDVRARVRLRHTLIEQHTEWQQRIQAVLYHHGCRQRRRLMEGDGREWLASQALSETAREQITVALAIIDALDVQLAPLTKELCAWARRQAGCKALIDAYYGIGELCAVTVIAELGDCRRFQNSRDAVRYSGLDVTVYQSDRHRAPGHLSRQGPPALRWALYEAAQVARRPGSPDRGYYEQAAERLGGNRACLALARKLLKRCYHTLRELGDDALTPPVERPQPGPGSAAARRASSGSPRSLEPTTTNQRADVLAA

SEQ ID NO: 384765 - protein, 348 aa, unidentified
MAKLARIGVDTAKNVFHVHGVDEAEQPVLIRQLRRKQFLAFFAKLEATKVGLEACGASHHWGRELEKLGHKVVLLPPQEAKRYVERNKNDAADASAICEAMSRPRVQNRFVVVKSAEQSAAQMLLGMRDSLVRRRTQLSNTIRGYAAEFGVVTGKGLVRIEPLLASLAAHSDVPELAKEMFVLLGQEFEDIGRKLAAVEKKVMAWHRRNEVSRRLAEIPTVGPIGACLFAIKIPNPSIFSCGRSCAAWLGLTPKDHSSGGKQRHGGITRAGDEALRAALVCGATSYIGYVRRGRTKPSPWLAELLKRKPPKHAAVALANKTARIAWKLMVSGQRYQSSPATAHSAAAA

SEQ ID NO: 384766 - protein, 353 aa, unidentified
MEYGAIDLHKKESQVRILTESGEVIDQRIRTTRDRLTALFWGRPHARIVIEASTESEWVAQHLERLGHEVIVADPNYSLMYGHRSRRVKTDRRDVAALAEACRHGIYRCAHRRSSRQRVVQWHLNVRRELLDARTRLISVVRAITRSQGYRIAGGATDTFLTRLAALDLPVSVSESLVPVRSVMELLNQELAAADQRFEALVAEDPIVKRLTTCPSVGPITATAFVAALDNVHRFAGRRGAAQVTSYLGLVPREYSSGEQQQRGRVMRSAHPYVRVLLVQAAWRIRRSSDARAGALRTWAQAIARRRGQNIAIVALARRLTRILYAMWRDEIDYQPDRIRSARRDTAAAKPAA

SEQ ID NO: 384767 - protein, 423 aa, unidentified
MYYVGIDIAKDKHYICVLDEIKEFAIKPFSISSDIKGLLSLLKKLDSISLDKSNFLIGLESTGVYSENIYEFLKEYDYKVILLNSYQTSKYRDFSTIKKVKTDLIDSFVIAELLATGKYKASFISNDEYTSLKVLNRAKKSIENKIKNIKREISTAIAVANPEITEVFPNIFSKTALILLSNYPTATELKKALPEKLVKLFRKVKGNNFSLQKAKKVVNNATNSIYSGKAYKERSLMIKSNINILLLLLQEKEILEVKIKEFIDNNLDTGNNSVIQNLKTIPGVSDKTIVAVLAECGNLNRFNSIKAFLGYLGFYPTKYESGKISITGSLAKRGIPIAKQALYLAAVASIKHNKEMKKLFMDKVSNGKSKKEALIIVAKKLASIMYALFKHNTTYTPNRVFNIIPAKEIHLILYSKNNEFLKN

SEQ ID NO: 384768 - protein, 340 aa, unidentified
MSIVGGLDLHRRQLTYDYLCLETGEIERGRIAPGDREHLRVWLARFAGEEDVEFAVEGCTGWRYVVEELARAEIEAHLADPAELSVRKGPKRRAKTDRVDARQLRELLRERRLPESWIAPQHVLEARAWVRLYKDLLEERTGWWQRVRATLFHQGVPYFSLTSPEGRERLKHADLSPSGRQAVEVGLRQVERLSIEMAPLHAQLEHLSRAQKGCRALREAHYGVGPITSVAIWAEMGDPRRFSSSSDAVRHTGLDVTVYASDTRRASGHLARQGPGVLRWALFEAAMRASHPNSPDHAYYLQVKQRLDGQRAAFSVARKLARRCYHTLRELGDEAWLPAA

SEQ ID NO: 384769 - protein, 342 aa, unidentified
MEQITRIGMDTSKHVFQLHGVNAAEEPVLRRRLRRKEMIAFFEHLAPTVVAIEACAASHHWARLLRSFGHEVRLIAAQLVKPYVKRGKNDAADAEALCEAMSRPSMRFVPVKTAEQQAALMLLGVRERLIRNRTQVVNAVRGYAAEFGITAPTGLPQFVRLLEDIQTDERVPALARELFIVQAVEFAQLQERIGEIDEKLRAWHQADERSRRLSRIPGVGPIGAAMLALKTPAPEMFRSSRHFAAWLGLTPKDHSTGGKTRLGTITRAGDEALRSVLVAGATSVISHYRGKEGHGALVSWINHLLKRKPPKLVAVALANKIARIAWKLMISDETYAKREYAA

SEQ ID NO: 384770 - protein, 415 aa, unidentified
MALKIVYQICCGIDVHKTFVVACIASTNKQGVTTYKRHRFSTFTQGLKELLQWLLDNHCKDVCMESTGKYWIPIYNVLEKDCNIVLAHPKYVKAIRGKKTDKKDAKWIADLFKHDLVAGSFMPPADIRQLRDLMRYRFKLTCFMSSEKNRLQNCLTVSNIQLASVVSDTFGKSSQRILDKILENPDDTSFDIEPLIHGSMKKKLPELELAIDGFITPEQAGKLKVIKKHFEDLESRKAELEKLILALASPYQQELDLILTAPSFKNKFTAIGIISEIGVNMEAFPSAKHLCSWAGLTPTNNESAGKKKSVRVSKAGCYIKPLLVQCANAAIKSKKHPEIRDRYLRIKKRRGHKKAIIAIARMLLTALYHMLKNGENYNSDLYKKSDILPTTREITVEQAILMAQFQGYRIKSATE

SEQ ID NO: 384771 - protein, 355 aa, unidentified
MTFVGLDLHKRYITACALDAAGGVAAEVRRMPVSLEALGDFLAAVDGPVTVGMEATLYWQWLHDQLEARGHGVRVADARQVKLIWQARSKTDPIDARKLADLLRVNLFPTIWIPDADTRRRRQLLHGRAFLVRQRTQIKNRIHGRLTAENLLFPRSDLYGRAGRAWLTTVPLSPTLRSQVDRLLRLHDALTTEIDQLDDDVKRLRRDHPMIEPLHTIPGVGLFGALFLVAEIGTIERFRSSHQLAAYAGLVPTTRSSGGKTSHGPVGHASNRWLKWILVEIVQTLKQAPGPVGDQYRRLLRAKGKPKATTAAARKLCCYIYWMWKDGLSYEEWLARRSKEVWSEVRPVQRMGAVA

SEQ ID NO: 384772 - protein, 375 aa, unidentified
MAEATMPKNSMLLKPVRSVVEVTGGVDTHGDTHAVAALDQVGGLLGTVIVPATGAGYRQALDWLSGFGPVGRVGVEGTGSYGAGLTRVLLDAGMGVVEVNRPNRAVRRGRGKSDPIDAEQAARAVLAGTATAPPKSRDGVVESIRLIHGVRRGAVKAKTAAINEFHAVLVTAPDRLRAALAGRSWVEQLATAAGYRPGEVSDSGQAVKCVLRRLARRIEALQAEIDQADVELAGLTAQAAPTLLAERGVGADSAAQLLITAGDNPERLGSEASFAALCGVSPIPASSGKTSRHRLSRGGDRQANRALHTIAMSRMRWDQRTRDFIAGIQARGKSKRDAIRILKRYLARRIYRILTTSRADSGVAPSTLTPSLPIG

SEQ ID NO: 384773 - protein, 370 aa, unidentified
MLDTTTFVGLDVHARSIKAVALDAMTGEVRSATFAYDAAAVAEWVGSLDPAAKCVYESGVTGFDLQKRLAALGVDCVVGAVSKMIKPSADRKRKNDRNDAEFLARMLSVGNVVEVWVPDDECEAARDLVRALDDAREDLKRCKQRLSKFLMRHGYVFNEATPTGRRKGNWTAAHWAWIRSIEFPERADNDVLAYYVDAVRQAMEDKKRLERLVEAEASKPRWKKRVDSLRCLKGVDAMTAADIVFEAGEFSRFKNARSFAAWLGLTPSEHSSGESARQGGITKAGNKHLRRVLVEAAWHYISASPHPKDLAKGQVPDPAARRHAAKGIRRLVKRREEMLGRGVHKNKANVATARELACWCWAVGRMIENG

SEQ ID NO: 384774 - protein, 315 aa, unidentified
MTEKDERFVGIDVSKQTLQVCVLPDSVQRCFENSPSGHLELRQYLASVGPQLVVLEPTGGYEMEPLCALWQAGIPVAVVNPRQIRDFGRSLGKLAKTDMLDAELIARYAQTVRPPVRPIPDEESQQLQALVVRRRQLVETRAAEQARKHLAKGRVRASIESLLAYLSAQIDELDDELQKLVESHPAWHKHDEILQSVEGVGDVTSATMIALLPELGTLNRKQISALVGVAPLNRDSGRKQGKRQVWGGRAAVRAGLYMATLAATRFNEQMSSYLQALRQRGKPFKVAMVACMRKLLCILNAMLRDGRPYNPQLQT

SEQ ID NO: 384775 - protein, 338 aa, unidentified
MKVTTLGIDLAKSIFQLHGVDGRGKVAVHKRVTRSKLRETVAQLPPCVIGMEACGSAQYWAREFQKLGHTVKLISPQFVKPYVKGNKNDSRDAEAICEAVSRPHMRFVPLKTVESQDIQAIHRLRSRLVKDRTALVNQVRGLLAERGIVIAQGITRLRKQLPVIVEDLSNELTPLSREVMRELSDQLVALDERIARADCMVQRVFTENAQCQKLAQIEGIGPVIATALVAAVGNAHEFANGRHLAAWLGLVPRQCSSGGKERLLGISKRGDRYLRTLLIHGARATVHRARRKTDARSRWIRSLEQRRGKNIATVAIANKNARIAWALLTTEAEYRKAA

SEQ ID NO: 384776 - protein, 324 aa, unidentified
MYLGLDVSKNTLDCCLNKDGFFYACKISNNEKGYQKLKAWLDGHGCDETLHCCCEATGNYYETAAEYLAVHYKMSVENPRKIKAYAVSELKRSKNDKQDAKTIAEFCEEKSRKLKTWKPKNQTEKELQSITRYIARLKQQKASETVKRQTASDNIKDLIDETIDYLGRKIKEAEGRLKTYISQNKELKQKADNLTTIPGIGIQTAAIIMAALSGNNDFKTAKQFTAYLGLDPAEYKSGTSIKGKDRISKVGDCTTRAALFSPALVAYRIGTFPRLVANMRQNSKHIMKILTAIMRKLAVVAYTLHKTNTTFEKQRHTRIQQKAA

SEQ ID NO: 384777 - protein, 340 aa, unidentified
MEKLYGAFDLHSSNNYLGISDETDRRVYKKRLPNQPDVILAELEPYRNDLVGIVVESTFNWYWLVDLLMEEGYRVHLANPAGIQKYEGLKHSDDRDDTFWLAHLLRLGILPEGYIYPKEERPVRDLLRKRGHLVKLRTSLINSLQGIIHRNCGVKLNATKIKALKVNNVAPLLNGQEDLALSGMVSKEAIDYLGQQIRKVENIVQGKVKLKKEYLYLLTIPGIGKILALTIMLETGTMARFQKVGNLTSYCRKVPSNWTSNDKKKGKGNKKNGNKYLAWAFSEAAEFARRYDDHARAFYNRKAAKKNFMVAHSALAHKLARAAYYVMRDQVEFDPRKLFA

SEQ ID NO: 384778 - protein, 408 aa, unidentified
MDDSSKGHAALIDWITVSLKKHQLTELRCGLESTGGFEDNWFSLLLRLGDQLPVRVARLNPSVVKHGAKASLRHTKTDAISAENIASYLVRFDEQVRYQVADNKYRSYRSFYNHISLLNRQKTQLINELKQLLYTSFPELQRFCKSSIPGWVLELLKQYPSASALSKARPEKLCKIKAITAAKASQLIEKATLSVASRHQSTDSFLVKSMASGILQAQQQLALYKEHLEQTCQGPEVDLLATIKGVGRYSAAAIIIQIEDIRRFPSPKHLAGFFGLHPTVDQSGDKKAKSRMSKKGRPALRAALYMCANSAVLFDPHLKSIYARHRAKGNNHKAALVVIMHKLLRIIWGVLSHKKAYNSDIDLKNQQAVKVVVPDKNETENKRRLQDYDEQAPISRIETKKRKAYQSS

SEQ ID NO: 384779 - protein, 451 aa, unidentified
MKDLSMQVINAHSAGIDVGSRFHVVAVDQRSENVRQFGVYSEDQQAMIKWLKLHQIQTIAMESTGNYWQTLFDALQRAGFEVQLVNGNQIKNVKGKKTDVLDCLWIQKLHSLGLLNGSFLPAAEIQSLRTYHRHRIHLIEQCSRYINKMQKAMRLMNIRLDVVLNDVMGQSGRLIIEAILAGERDPDKLASLANYRVKKSREEIAKALIGNWRNDLLFELRRCLTLHDVYCHEIKECDHQLEIAIKSLLSHSQVAADFKYAKATKQRNKYIPEFDIERFSWQYYGVNLMEIQGVGSGTVLSFLTQVGDRINHFPSSKHFCSWLRLAPNNKITGGKIISSRTPKGKNPLSLALRQAANAIGNQKEGELVHFFKRVAYRKDRASAITATARKLAVIIYNMVTKRESYKPSSPVPLSDKVKNKIIKNIRTRVEALELSQEQLNFLFQGASFSTA

SEQ ID NO: 384780 - protein, 328 aa, unidentified
MNNTRVGVDLAKDVIQVCIYANNKVRSNKEMTQQEFSLWLINIKPGIIIFEACGTSNYWHQVATALGHDARLICPKFVASIRQGQKTDANDALAIIQASLLPEVRFVSGKNIKQQQLQSIMRLRELAIKHKTALSNQLGALLLEFNIRYSARTGGLRGAIESTLENGDNAFSTEFRSSLSASWEQYLSVLKAISKHDESLLKAINSHPECKRLLKLEGVGTLNAVSLYMSIGCSELGVFSKGKDVSACIGLTPIQHSSGGKTKLGTIGKYVKNSMLRSQLITGAMSAINQIVKREARTKKERWVQELVARRGRSCAAVALANKNVRTA

SEQ ID NO: 384781 - protein, 430 aa, unidentified
MGFIVPTDRHPEPADQPMPYEWFVGIDWGSQQHQVCVLDGDRRRVGERTVDHDGASLARLADWLWTVSTGQPQRVAVAIEVPRGAIVEGLLERGFHVFAMHPKQLDRFRDRHSVAGAKDDRRDAFVLADSVRTDQPSFRRLQLDTPQLLRLRERSRAEETLLEDFRRSANRFRDQLHRFYPQMLQLCSAADEPWLWDLIDVAPTPAHVALLSEEQVQWVLTAHHIRRVTAQEVLTCLQALALPVAPGAADAAQAHCQLLLPCLRVLAEQLQACSQQVSALLHTLAEAPGDGEGPSDVAIVLSLPGVGRKITAWLFAEAAQPLAERDYQMLRTHSGVAPVTKQSGKRRVVVMRRGCNPRLRHALYHMARVAMQCDAHFNSVYAALRAQGQRHGQALRNIGGRLLRILMAMLRHRTCYDASRVRREPVVQMG

SEQ ID NO: 384782 - protein, 319 aa, unidentified
MAQNDLVVVGIDVAKGKVDACIRRFTLRQTFPNTAQGHRKLVAWLRKYQVSKAVMEASGGYEREWRNVLHDAGIEVRIVDPRRVRNFALSAGRLAKNDPIDAEMIAWFAETFSQAPSQIPDAAREELAALAKARKALVDVKIRLQAQNEHAAPEPVRKAHARILKSLAAEIDKLEAAISAKVKATPEFAERAEIIQSVPGLAQTTSAILIAGMPELGQVSDEVAAALIGLAPYDDDSGKRRGERHIKGGRRWVRNAFYMPCLGAATQNNPVLRAFYQRLIAKGKEPKVALVACMRKLIIILNTMLARRQKWNPGCHAVA

SEQ ID NO: 384783 - protein, 411 aa, unidentified
MEAAVITAVGIDVSKSKSTVAVRRPGGEIALRPFEVHHTNSDLKKLASTLKKLGGDIRIVMEHTSTYWRPIALTLKEAGFFVSVVNAMLIHDFSDNTIRKLKTDRADALKIANYALTFWDTLPPFNNEEETRLLLKMQSRANEQITATATALRNGLIALADQTFAGVNIAFAPNTKNANGHEKWVDFFLRYWHKDCVCQYSMEAFTESYRSWCKRKNYKFRTDTAHKIYLLAQEGVATLPKCESTKMLITQACKSLNAVCEAKQSTQLEMQRLAAMLPEYEVVMQMEGAGPITGPALMAEIGDVRRFKNKKALVAFAGIDAPPFQSGAFESKSRHVSKRGSPHLRRTIFIVSNIILTRSNPENAVYCFMDKKRSEGKHYYVYTVAGSAKFLRVYYARVTEFLRSQPSSDAC

SEQ ID NO: 384784 - protein, 465 aa, unidentified
MRTDKKVWRNRKARKELARRLQSENPGLEVVHPHAAGIDVGNGAHYAAVRPDRDSQPVRRFECFTADLYRLADWLQSCGVQTVALQSTGVYWIPLYNILEERGFEVYLVNARHTKNLPGRKSDVQESQWLLKLHTYGLLNNSFQPPCKIRILRTYWRQRLQHVTGAATCVQRMQKALTQMNIQLANVISDLSGVTGQLIVRAIVAGERDPQKLAELSHPRIQASRAEIAKSLEGNWRRELIFVLQQELEMYDTYQRRVAECDQELQKHLRAFSDSIPAPVKEALPTKKKKKQNKNNPRFHLADELQRITGVDLTRIDGVDVMVAQTVISEVGLDMSPWRTEAHFASWLGVCPDNRISGDKVLARGTRHVLNRAATALRLGASTLLRSQTYLGAQYRRLRSKLGAPKAITAMAHRLARLVYRMLKYGQQYVDKGAEYYERRNRQQQIEFLRKKAAHLGLQLAPAHP

SEQ ID NO: 384785 - protein, 299 aa, unidentified
MDHFAGLDVSVKETSICIVDDTGRIVREVKVGSEPEALLKVLGNPAYRFKRIGLEAGPLSQWLFSALAEAGLPVVCVETRHMRAVLKAQINKTDRNDARGIAQMMRVGLYRPVHVKTLRSQKLRMLLTHRKLLQSKAIAIDNDLRGTLRNFGLKVGMVGTVRFEARIRELVEDLPDLAALIEPLLIVRRTLREQVVILHRRLLAIVRDDGVCRRLMTIPGVGPVVSLTYRATVDVPARFRKSKSVGAVFGLTCSRYQSGEVDWSGEISRCGDEMMRTMLYEAAQSMMPPAGRDHAPHMD

SEQ ID NO: 384786 - protein, 480 aa, unidentified
MAKHKKSTFERLQYRDMNRSQRRELEHRLGGADPGLKVVHPDAAGIDVGSGSHYVAVPGDRDEQPVREFGSWTSDLKRMAKWLKECRIGTVALQATGVYWVAWQEILEEERIEVFVVNARGTKNLPGRKSDVQECQWLMKLHTYGLLRNSFRPPEEIRRVRTIWRQRCRLVEEAGRTVQQMQKALTKMNVQLTNTLTDVSGASGQAIIRAILKGERDPWVLAKLRDRRVRASEAEIAHSLEGKWQDDILFELRQVVEAYDFYQGQIKACDLELEKYMAALPDRQIAGREEEPEREEAEKRKHKRSHAKNRPGFDLESELRRTMGADLSSIDGIGVGTGQMILSELGADLSAFPDEDHFAAWLQLVPRRDITAGKVIRHVRAEGRQRVANALRMAAETLSRSNSYLGARYRKLRGRLGGPKAVKAMARYLACLVYRLLTKGKAYVDRGAAYYEGQRRQQEISALKRKAVALGMTLVPAGNN

SEQ ID NO: 384787 - protein, 312 aa, unidentified
MTAIFVGVDVCKERLDVVLRPSEQYFEYKNDARGIVKLALAIQKLIPEAIVVEATGGLEMPLVAALAAAGLPIAIVNPRQVRDFAKATGRLAKTDRIDASILAHFAEAVCPQVRPIPDEAQRGLADLVGRRRQIIEMLVSEKNRLSGSTGAIATDVRAHIRWLEKRLSRVDEGLAHEIRGSAAWRDKDDLLRSVPGVGPTLAITLLANLPELGQLDRKQIAALVGVAPINRDSGRMRGTRGTWGGRAHVRSVLYMATVSAIRCNPMIREFWKRLKGAGKPGRVALVACMRKLLTVLNAIVRSGDAWHATAST

SEQ ID NO: 384788 - protein, 401 aa, unidentified
MYFGLDVHKKFIQVCKLSEKGTVVRNYQIDGDRESIEEFTKTLKPTDAVVLETTFNSWGVYNILTKSKDRIVVSDANKVKAIASARVKTDKVDAEILARLLKADFIPEVHLPDEKTWSYRQLVSHLRLLSKQRTVIKNAIWGILNRSLIKVPFDNIFTKKAIKWLEEIDLDPLLRLQLNNQLFLLDAVSAAVNEAECSLEKIAVDEKSIQLLLSIPGVGLKVALGLMSAIGDVSRFETPNQLASYFGLTPSISQSADRKYMGSITKQGTAYGRWLAVEAAQSLALSGSPITASYFKIKNKKGHNVAVVALARKLIVVVWHMLKKQQPYRYAKPERVAEKLKILNPGLPNRYEVTNKEITTEEIYLQADLPKLKPATVAEKRTAIRNKKQVTYEKKRKNPKA

SEQ ID NO: 384789 - protein, 456 aa, unidentified
MARRQQKKRKLSAQVVEDEDYQLRYERCAGIDVAKASGVVCTRLPAQRDGGRRVAVTETVAATVPAIAALAGRLAAAGVELVSMESTSDYWRVWFYVLEAHGLAVQLVNSAQARQLTGRPKTDDLDAKWLARLTEMGLLRPSFVPPADIRQLRDYTRARVHLVQDRTRQYQRLEKLLEGALVKVTAVTRLTTASAKDMVRAMIAGERDPRTLAALARTRLKARHEDLVAALTGMRFTDHHAHLARTLLNLIAYLDEDIAILEDKIAACLDAIPAAQGVDADGTAGGVGPDPLVLPAVWRLAEIPGLTTELACQVIGETGLDMSRFPTAAHLVSWAGLAPVANQSGPRTRKGKKGQGDSYLRGFCTQAATGAALTDTFLGERHRRIARKRGPGRAKVAVARSILIIIWHLLKDPETRFTDLGPEHYASRTDKDKKTRNLIRQLNALGLDVTITPQAS

SEQ ID NO: 384790 - protein, 338 aa, unidentified
MAIVFVGIDLAKNVFAVHGVDEHGKPVLVRPSVARAKLHELIASLPPCAIGMEACSGAHHWARLFAAHGHTVKLMAPKLVAPYRMSGKRGKNDAADAAAICEAVQRPAMRFVPVKSEEQQSQLMVHRARQGFVVERTATINRIRGLLSEFGIVLPQKAEVVRREAARHLEDLPGYANTVIGDLLTEVHLLDERIKQYDAHIRCIARDSAAAKRLMQLRGIGETTATAIVAMVGNGVEFTNGRQFAAWLGLVPGQYSSGGKARLGRITKAGDPYVRSLLVLGARAVLNAAATQADSVSRWAVKLVERRGYWKAIVAIAAKNARMAWAVLTKGESFRLPA

SEQ ID NO: 384791 - protein, 318 aa, unidentified
MTIHTESQIQINVGVDVGKSKLDIVLHPLDLHFQISNDEQSILKVVHVLKKRNIERIVVEATGRHEHAFVFACDQANLPIVVVNPISIRRYAQAIGVLAKTDKIDASVIARFAATIQPDIKPIPDKQSRLIKDLLIRRSQLIEMQTMEKNRLQILPKALHRSIKTLLRSLQTQISTITKQIDEAVMQVKHWRTKTEILTSVPGVGKVLAYTLLSDLPELGKLNRKEIAALVGVAPMNRESGSWNGKRRIRGGRHRIRTVMFMAMLSSIQCNPVFKRFYEHLKAQGKLPKVAIIACMRKLIVVLNTMLKNETRWGENMA

SEQ ID NO: 384792 - protein, 360 aa, unidentified
MKEDAMEQRENSKKDFRGQRIYVGIDVHKQQWKVSIRNNHLHLKTFSMNPVPLELQKYLTKNYPQGDYHSVYEAGYCGFWIHEELERLGIKNKVVNPGDVPTRGKEKLTKSDTVDSRKLARELESETMSGIYVPSKYHQELRSLCRLRYSLSRHQARLKNRIKGHLSFYGKEIPSRSELYHWSNRFIQYLKTIEFDFLMGKEYLGYCLEELETTRKRIAEITKKIRREIPKEIMELLVQSVPGVGTITAATLYSELIDMNRFKRIDELASYIGLIPSTFSSGQTERSYGITIRRNKYLRSMLIESAWIAVREDPALLLHFNELTKRMTKTRAIISIAKQLLRRIRYVWLKREEYVYGITG

SEQ ID NO: 384793 - protein, 388 aa, unidentified
MEKAEAVVAFVGIDAHSEHCSLKAVGRQGESLLTAEVVTQERRLRAAVRKLPRPVWAMVESSSLAPLLKEWLDPVVDRVIVCETRENRWIARSEDKSDPADADRLARLLRMGEFRPVHVPDRAGQERRELVRLYQKTVGDVTRLKNRLKAKYREHGVNPTGKSVYSVRHRERWLEPVKSPAVRAMLGVLYGQLDAAQAARVQVWRELFPRLRARPEYDLLRTIPGVGSRRAAILLAGIDEAERFASKRQLWKYSGLGVRSRWSSDPSRARVSGSPSGNRLLKYAALGAATSAIVGENRFSRHYQEMIEKRIEPAMARRTVARQILAIALAMWKTGTAYHESASGGSGSAEERRSGPGAVSRRGLAEKAQGLIRRPRSRFAAGQVPRIS

SEQ ID NO: 384794 - protein, 325 aa, unidentified
MDKFSNYYGIDISKDVFDVMDGHGKHSQFTNDQTGFKSFLKEVDKKGCFVMEATGVYHTQLADYLFSKKVFASVVNPLVIKRFIQMNLRRIKTDKADAEMICKYAQSHELKAYKPSPIYVKESRIICENVDLLIKSRTMFKNRLHAMKHKSEKHRAILIRPLEKTISELNNQIQKLEKELRRLIEENDSDLFSRLQTIPGIGKSTAMFMIVLSDGFKKFESAKQFTCYIGMSPVEKRSGSSVRGRSGISKQGNPKLRNLLFMCSFNACKSNKACRELFERIVAKGKSKKLALIAVANKLMKQAFAIAKSGLIYDPEFRSVKPKLN

SEQ ID NO: 384795 - protein, 415 aa, unidentified
MSRARKRMIVNYQGIIIGMDVGKYHHVVTALAPDGRFSKPVTILNSREGYEDLLLRVIRWKKEWGTDEVIVGMESTGHYWEVPARWLAAKGIRVVQINALPTKRAKEIEDNSPGKTDVKDARIIAQLVRYGKHLGWTLPEGALAELRELVRIRQHIVTELTEKRNYLRRLLDSVFPEIFTVCKKSWGKTLLHLLAAYPLPEDMISTGLATMTAVLKKTSGNLMSKKLEKVSILAHATVGIPVAHHAYGLGIRHTVERILELLRKKLQIEQHMGIQLVTIPEARFLLDFKGIGTVSATIILGETGGLSRYAYGEQVVKLAGLNLFEVSSGSQKGKVHISKRGRPLLRQVLFLLATIQAKQGMPLYEDYQRLIKKNMARVKALVALSRKLVRVLFALVRDQRSYVSEPPVILHKKAA

SEQ ID NO: 384796 - protein, 382 aa, unidentified
MLQFNDLSRSLVAFDQNSTEIAAIELSLDKWLVGAIVPGITRDPLKALAPDPEALLKLLYRWRDEAVKAGCKIKRIAVGFEAGRDGVWLARWLRDRGIEAYVIHPTSIPVSREQRRAKTDRLDISLLKRSLLGWLRGEKKHCSMVAIPTLAEEDAKRPHRERAQLVGKRTGIVNRMKATLVRLGIRGFNPRLRKAPERLAGLQTPEGSPIPPNTLGELIREMQHLGFINEQIKQIEDERLRQLHDAPQTAHNDRVQHLVRVKSLGIETADMLASEVFPRQYRDQRAVARYAGLTGSPDESGRRRREKGLPKAGYARVRRGMIKLAWRFLMYQPDSALVQWYRARVAAGKKPTVAIVALARKLLIALWRLVTIGEIPQGWVVG

SEQ ID NO: 384797 - protein, 313 aa, unidentified
MVNESFVGIDVSKQWLDIGWEPAGQTERLAHEEAAIAGLCERLAKARPCLIVLEATGGLETHLASALGASGLAVAVVNPRQVRDYARACGRLAKTDRIDALVLAAFARAIRPQVREPKDEETVELGALLARRRQLIDMRVQERLRLERASALQRKSLKEHIDWLTKRIGRLDIELTHRLRNSSLWREREDLLKPIPGVGVITRSTLIASLPELGKLNRREIAALVGVAPFNRDSGKHRGERVIWGGRAQVRQVLYMAAVAATRSNPVIRSFYQRLRAQGKPAKVALVACMRKLLTIIHECHAQTQHTLEPQQA

SEQ ID NO: 384798 - protein, 361 aa, unidentified
MADGIRWVGLDVHAHESTIAVFDQETGELTTRRVAGRPQELIERLMDIPVPARMVYEAGPTGYGLARRARGVGIEMAVCAPGRTDRSPTDRIKTDKRDAIRLARRLAAGELTLVTIPSVEHERLRDVVRCREDIRGDLMRARHRLSKFLLRREIYYEGPARAWTQKHRAWLAALRFSDRASQLTLADYLHAHDVLLARRERIETELEQLAGGSPWAATIARLRCLRGIDTLSALGVCAEVGEFDRFEHPDSLSAYLGIVPSEHTTGQQRRQGAITKAGSTHARRLLIEAAYHYQRQPGIGETLQRRQHGQPAEIINIAWRAQRRLNARWRQLKHARKKPNGIVAVAIARELAGFCWEIALA

SEQ ID NO: 384799 - protein, 330 aa, unidentified
MEKQSEIWAGVDVSKVRLDVGYTGEAEIWSVENNAAGIEMIVKRFMEIQPQLVVVESTGGLERQLVRELYAAGIPLAMVNPHRVREFAKAIGLLAKTDGLDARLLARFGQATKPDPTRLPSEKEQLLAALILRRRQLIDDRTAEKNRLGTAHPATHSNIEAHLKWLNEQIAELDRQIEQLIQDDPGFKAKDEILQSVPGVGPATSAIMIAALPELGCTDRKKISALVGVAPMNRDSGYYRGKRRIQGGRSDIRTVLYMATITATRFNPVIHDFYQRLLKAGKLKKVAIVACMRKLLTILNAMLRDSVAWQPSQVCADLQNERRELVIAYA

SEQ ID NO: 384800 - protein, 401 aa, unidentified
MQDTQQRDAVDVFVGVDVGKGHHHAVALDRNGKRLYNKALPNDEAKLRALIAELKTHGRLLFVVDQPSTIGALPVAVARAEGVLVAYLPGLAMRRIADLHAGEAKTDARDAAIIAAAARSMPHTLRSLRLADEQLAELTMLCGFDDDLAAQVTQTSNRIRGLLTQIHPALERVLGPRLDHPAVLDLLERYPSPAALAGTSEKTLANRLTKLAPRMGKGLAAEIVQALSEQAVTVPGTQAATIVMPRLAQQLAALRKQRDEIAAEVERLVLAHPLWPVLTSMPGVGVRTAARLLTEVAHKAFASAAHLAAYAGLAPVTRRSGSSIRGEHPSRRGNKVLKRALFLSAFAALRDPVSRAYYSRKIQQGKRHNQALIALARRRCDVLFAMLRDGTIYQPKSVPNA

SEQ ID NO: 384801 - protein, 345 aa, unidentified
MKKIIKQVVGIDVAQKELVVSLSRMDEQITVKIFAHKVFANNPKGFTALMGWVEKLTDANVYLSYVMEATGVYHERLAYFLEEKGQAVSIVLPSKISNYARTLDVKTVTDKTASEAIARFGAERKLDKWKRPKAIFKKLRQLTRERDQVVADRTVAKNQLHAELAEAEPGKSSVDRIKKKISFFDKQEKEIMTELKVVMSVDDEIKRLVALICTIPGVGLLTAIIVLAETNGFELIRNKRQLVSYAGLDVKEKQSGTSVRSKPRISKKGNRFLRKAMHFPALSAISHDEKYKAIFARLVSKHGIKMKAAVCVQRKMLEMIYTVFKKQEAYDKMYYQRLAEAKAGA

SEQ ID NO: 384802 - protein, 355 aa, unidentified
MNSEKYIGMDVHKESISIAVMNGAGKIVMECVIETKASVILQFIHGLSGDLQVTFEEGTWAAWLYDLLKPHVTKLVVCDPRKNASMKEGNKSDKIDARRLAELLRLNHLSPVYHGEHGLRSLKELVRSYLTITKDLGRVMSRVKAIYRSWGIACIGKQVYAPRHRAEWLGKISELGVRRRAEFYYQQLDALRALRKQVRRDLLAECKKHQAWKQLCQIPSIGPIRAAVLLGILQTPYRFRTKRQLWTYSGLGIETRSSADHRSVDGQLERAKKQISIRGLNQNCNHDLKNLFKGAAIVASSKPGPFQEFYTTLLTQGIRPEMARLTLARKIATIALMVWKRGASFDAQHLKPQTA

SEQ ID NO: 384803 - protein, 370 aa, unidentified
MLNTTTFVGLDVHARSIKAVALDAMTGEVRSATFGYDAAEVAGWVSSVDPSAKCVYESGVTGFDLQKRLASMGIDCVVGAVSKMIKPPADRKRKNDRNDAEFLARMLSVGNVVEVWVPDDGCEAARDLSRALDDAREDLKRCKQRLSKFLLRHGYVFSETTPTGRRKGSWTAAHWAWIKSISFPEKADDDVLAYYVDAVRQATEDKARLERLVEAEASKPRWKRRIDSIRCLKGIDVTSAADLVFEAGEFSRFKSARSFAAWLGLTPSEHSSGESVRQGGITKAGNKHLRRVLVESAWRYLGCSPHSKDLAKGQVPDPAARRHAAKGVRRLVERRRAMLERGVHKNKANVATARELACWCWAVGRMIENG

SEQ ID NO: 384804 - protein, 422 aa, unidentified
MKAFDVSNFAALIGIDWADRKHDICEVNSQSNTQHFSVILSQPKAINAWANELNKKYNGQLVAVACELKKGPLIYALSKFSHIVLFTINPSTVAKYRKAFTHSGAKDDPTDAAIQVEILQLHMSKLNVITPDSESVRSLAQLVEYRRKLVQDRVDLTNRITTTLKNYYPHVLDWFKEKDTMIFCDFLLRWPSLDQAKRIRKQTLIDFFNQHNSRYPAVNEKRINNIKQAESLTNDNAIIAPNKLLVECLIVQLKHLMSAIERFDVEIKAIYKPHKDRFIFDSLPGAGPQIAPRLLAAMGTNRDRYQSCEEVQKYAGIAPVTERSGKKEWIHWRYSCSKFLRQTFVEWAGISVRYSFWARAYYRQQESKGKPHNTIIRALAFKWIRILFRCWKSKTPYDETTYLEALKRKGSPLLKYAVESKF

SEQ ID NO: 384805 - protein, 348 aa, unidentified
MTMTIVEAARGVTGGVDTHLDVHVAAALDPLGTLLGSESFETTPAGYKALLEWLEGFGTVTKVGVEGTGSYGAGLARFLRKAHLEVIEVNRPNRAERRRSGKSDPLDAVEAARAAIGGRATSISKSKDGAVEAIRVLVVAKRSARGARIKALTQMRHLVITAPDQLRCRLKGLTVSVLVSEASRLRASRSGDPVMAAHKMSLSSLAQRIQSLEDEIAELDQRIEALLVITAPELLSRFGVGPDTAAALLVSAGDNPERLHSEAAWAHLCGVAPIQASSGKTTRHRLDRGGDRQANSALWRIVMVRIAHDPETTAYFERKVKEGRSKRDVIRLLKRYVAREMYHYLPRG

SEQ ID NO: 384806 - protein, 413 aa, unidentified
MRVFCGIDWASDHHDIAIVDESGTLQASARLGDTADGLNELLQMLAEHGDTGEDPMPVAIETSRGLLVAALRATGRPVYAINPLAVARYRDRHTVARKKSDHHDAMVLANILRTDAHAHRQLPADTELAQAVAVLARAQQDAVWDRTQAGNKLTSHLREYFPGYLTAVNRRREGIFHPIARVLLAAAPTPRQAARLTRTQLRALVKKAGRKNTIEAEVERLHSALHAPQMRQLPLVEEAMGRQALALLRQLEAACVSADDLAEASIHAFQAHPDAEIITSFPGLGPLSGARVLAEVGDDRARFADARGLKAYAGAAPVTRASGKKMTVTARRIKNQRLAAAGYMWAFAALSHSAGARAHYDRRRQAGDTHTAAQRNLFNRMISCLHHCLTQRICFDEDVAFPAARQNRPSQAA

SEQ ID NO: 384807 - protein, 328 aa, unidentified
MDQISVGIDVSKAALVIGVYPTGERWTSETTAAAIDGLVGRLRMLSPTIVVVEATGGYERAVVAAGAAAGLPMAVVNPRQVRAFAQALGRTAKTDALDADVLAEFGARVQPPVRPISDAETQMLAALVARRRQLVEMIGMERNRLEQAPPTGKITRDLRHHIRWLERRVDDVDDEIGTAIQTSPVWRVQDDVLRSVPGIGPTTARTLLAELPELGRLDRRAIAALVGVAPFNCDSGQQRGQRHIWGGRASVRKAIYMATLSATQHNPVLRTFYRRLCDAGKPAKVALVATMRKLLTIVNAMMKHQSRWNSEVASTPASLAGSARAATV

SEQ ID NO: 384808 - protein, 402 aa, unidentified
MNAVGIDVSKGKSMVAIMRPFGEIVSTPFEIKHTSSDINSLVKLIKSIEGESRIVMEHTGRYYEVLAHQLSEANLFVSAINPKLIKDFDNDSLRKVKTDKADSVKIARYALDKWQNLKQYSVMDELRNQLKTMNRQFGFYMKHKTAMKNNLIGILDQTYPGVNTYFDSPARSDGSQKWVDFASTYWHVDCVRKMSLNAFIDHYQNWCKRKKYNFSQSKAEEIYGKAKELVPVLPKDNITKLIIKQAVNQLNIASATVESLRTLMNETASQLPEYPVVMAMKGVGTSLGPQLMAEIGDVSRFTHKGAITAFAGVDPGVNESGSYEQKNVPTSKRGSSNLRKTLFQVMDALIKTHPQDDPVYQFIDKKRAQGKPYYVYMTAGANKFLRIYYGRVKEYLSSLPES

SEQ ID NO: 384809 - protein, 349 aa, unidentified
MYSLIIGIDLAKSVFQVHGIDGRGHVMVRRKLKRSELLPFLETQPKEGSLIAMEACASAHYWGRELSKLGFELVLLPPHQVKPFVAPGKKNDANDAAAIAEAATRPHIHAVPIKSEDQQAILVLHSCRTMLVRQRTMLVNALRTHLAEFGLIAPKGIENVGRLVEAMKEATLPDMARQVLDMMARQIHELDSQIDDLLKRIQDHAKSQSLCRLLTSIPGIGPITASELVASIPDISLFASARHFAAYLGLVPRQNSSGGKSRLGGISKTGNVQLRCHLVLGATSLLALARKKSPPPMLGWIGALLKRKSSARLVSVAIANKLARIVWAVLKSGTVFEMDRWIARQQGAV

SEQ ID NO: 384810 - protein, 416 aa, unidentified
MFAVGVDVANGRSMVAVLDGMRNIVAKPFEVVHTAQGFATLVEKLRQLDGEVRIVMEHTGRYYESFAMRMHRAGFFVSAVNPLLIKNYQGSISVRKVKTDKADAQKIAQFALDKWTILPHYTPMDTIRYNLKTLHRQFQLASKTKTALSNNLIALLEQSYPGANRYFDSPVRTDGRQKWVDFVDTFWHVDCVAMSSEHAFVERYRKWCKRHGYVFSEQKAIQLHADARQKIPLVPKSDTCKLLVREAVSQLNAVSRTVETYRAEMDRLASQLPEYETVMGMTGVGKSMGPQLMAEIGDLRCFAHQKSLVGFAGTDPIKEESGDKVSQSAPSSKRGSPYLRKTLFVIMTILLQLQPQEDPVYQFLDKKRSEGKPYYVYMTAGGTKFLRVYYGKVRDCLKAKGLWEVPASASQEVNPG

SEQ ID NO: 384811 - protein, 426 aa, unidentified
MAKKAKKVKTAKGAELRIVNPDAAGIDIADGIMQVCVPADRSKDNNRAFGAYTSDLHAISAWLRECGIKTVAMESTGVYWIPLFCRLQEDGLDVVLTNARDVKNITERKTDESDAEWLMLLHQYGLLKASFQPHNDAKRMRTLTRHRDTLSREASSIVLRMQKAMQQMNIKLTLVLSDITGKSGIRIIEAILAGERDPKRLADLADIQCKTPKEEIAKALEGNWEEDLMFVLRQNYDTFKHYCTQLGECDAELEKLMENYRAEVAKVEDTSYSPAKKRRDYKKTRHTVGFDVERKAYEMWGVNVFEIPGISHLTALELMSELGHDFTRKFPSSKQFCCWCNISPNTKISGGKRISSHVPHRLNNVGLIFRSIASSLANAKNQLGNFYRRIRSRAGGKAAVIATAHKVAEIFFAMVANQTTYNPFFE

SEQ ID NO: 384812 - protein, 343 aa, unidentified
MSIVILGIDLGKNVCSVVGVDAAGAVIVRRSMRRQTLIDYVAKLPACVVAMEACCGAHYLGRLFAAQGHEIRLMSPEYVRPYVKAQKNDDRDAEGIAEAASRPTMRFVELKSEEQLDIQTLHRVRSRLVNERKNLINQMRAILLDRVTTVRVGRRTFEQGIDAMLAGEDTTLSPRLRQLMEQLRAEWRELDARIEALDGEFVELARNDAAARRLTSIPGVGVLNATALIAAVGNASSFAKARDLGAWLGLVPRQHTTGGKPRLLGISKRGNTYLRTLLIHGARAALPSLARSETPLGRWLTGMIERGVHRNAIVVALANKLARIAWAALRKEATFERGYPVAA

SEQ ID NO: 384813 - protein, 408 aa, unidentified
MNPLYVGIDVSSKSNVVYFMLPDGSKHSNFSVANSHTGSSQLVKRILSAMTSCSLDTVLIGLEATSVYGDNLVYFLREDAALARFNSKIHVLNPKQVSKFKEAYNDLPKNDLIDSFVIADCLRFGRINKEVYIGDYRYKALQNLTRARYFAVSNLIKEKQRFMNILFKKYSTMTQEKVFSDTFSTTALAVYDEFESAEALADMDLHELTAFIMEKGKNRFPNPNAVAKAIQKAARSSYRLPKTVNDSVNQVLSISITSIKALEAQIKEFDKAIATQMELLPNVLISIPGIGPVFSAGIMAEIGDINRFHNQAQLAKYAGLAWKQHQSGDFEAQTTRLINSGNRFLKYYLCEAAFSLVRCDKEYSDFYHLKYKEVNRYQHKRALALTARKFVRLVFRLLKDNRLYTSAE

SEQ ID NO: 384814 - protein, 311 aa, unidentified
MQAINAGVDVSKDFLDAALSTGEQGRYPNTDQGVKALCKWLKKLTPERIVLEATGGLEGALAACLYRAGLPVVVVNPRMVRDFARSMGVLAKTDQIDARVLWLFAERVKPEIRQMADEEKVLLADLIKRRKQLVEALTMERNRLRSAARIVRPSHERMIKWLVEEISQTDRRLGESLRASDTLKEQAKLLESIPGVGPVTSASLLGLVPELGSLSPKKAASLVGLAPMNWDSGRMRGRRHIRGGRKDVRSALYMPALVAIKANPHLAEFARRLKEAGKPFKVLITACMRKLLLLCNAVLRDETPFRLQTVS

SEQ ID NO: 384815 - protein, 453 aa, unidentified
MAKVARKIKTKKGLRLKIVNPDAAGIDVSDGEMQVCVPEDRDGENNRRFGSFTCDLHEICAWLKACRITTVAMEATGVYWLNIFLILQDEGFDVVLANPLQVKNMMEEKTDEADAEWLMLLHSYGMVKPSFQPDSVARRIRNLTRHRSTLITAAGREVQHMQKAMELMNIKLSTVISDVLGKSGQAIIRAIIDGNHDPKSLAQKADGRCKASKEAIAKSLEGTWDEDLLFILEQTVELYDTYQEKVKSCEQEIEKLMMRYAGQVDLGKAEKLLRSNKRSTYKNAPDIDIEKYGYALWGVNLMAVPGVGAGALLQLIAELGYDFVSKFDTCLKFCKWCNLSPNNKITGGKLISSHIPRRKNPVGQILRQCANTVKDEKSEMGAYFRRMKSKDGYMQAIVATAHKIARIIYTMVKTKKEYNPKLVGCNEKELLERKIARTTRQLQKLNEKLEKVA

SEQ ID NO: 384816 - protein, 339 aa, unidentified
MRLYVGVDLHANNIFVAVIDKKGKRLEQKRLPNDLAVILEYLKPHQKEIVGIVVESTYNWYWLVDGLMGTGYKVHLANPSAIQQYSGLKHVDDKHDAFWLAQMLRLEILPEGYIYPKEERPIRDLLRKRRHLVKLRTSLLISLQNIISRNCGVQFPVNEMKRLKEGRVSPLLEGNEDLALAGKTSKEAIDLLTRQIHKIEAAIVQRVELKESYQVLLTLPGVGKILALTIMLETGPIARFAQVGDYASYCRKVPSRWTSNEKTKGKGNLKNGNKYLAWAFSEAAEFARRYDAQARAYYTRKMRKTNFMVAHGALAHKLARAAYYLMKDQVPFMPEKLFC

SEQ ID NO: 384817 - protein, 316 aa, unidentified
MQKAGGIVGIDVSKRHLDVALAGGVVRVGNDRLDLDILAQRLRAAETPLVVVEATGGYETALVIALQTHGVPAAVINPRQARDFARAQGRLAKTDAIDARILAQYGEAMRPRPLPPISATQEALAALVARRRQIVEMLVGEGNRLELAHPQVRGWLEAHIVTLRDQLAQVDAAIAASVAANAALTSRRDILMSVKGVGPATAAVLLAELPELGIIDNKKIAALIGVAPMNHDSGQHRGQRHIAGGRPSVRCALYMATLTAVRHNPALNAFYQRLRASGKPAKVALVAAMRKLATILNALLRDNRPWQDHAPIQDGC

SEQ ID NO: 384818 - protein, 337 aa, unidentified
MKQITKNEIYKHYIALDWSKSNFALASIRDSGTKYKVVEHLPDLKILKQCLKELPGKKILTIEETTTAQWLYVELKDYVDKILICEPFQNKLLTSGAKNDKIDSVKLCTLLRNGSLKEVYHTTDELYKLRKLVSVYEDFVNASVRLKNQRSSMFLSEGKDHKKEKILTGNTINKFITQKQNLSIDHFALMRKEFELIFKKIEKENLTIQRLVRISGIAVKLAVMILAIVIDANRFENKYKYYAYTGLVKHFKKSGDRDYGKRNARHSRRLKRCYKIAANAAIIGKNDIREYYEHLLQSNYSFEDARNQIARYIAKATYAVMKNETDYRPYQWRENIK

SEQ ID NO: 384819 - protein, 339 aa, unidentified
MKIVVLGIDLAKNVFALHGVDEHGKPALVQPSVRREKLLEVVAQLPPCLIGMEACSGAHHWARAFSRFGHSVRLMAPKFVVPYRLSGKRGKNDAADAAAICEAVQRPAMRFVPVKDEAQQAHLTLHRVRQGFVTERTAMINRLRGLLAEFGHVLPLKASVVRRQARAAIETLPSLARDALEDLLVTIAQLDERINAYDTKLRQIARQDRRITRLMALPGVGETSAGALVASIGNGHEFKNGRQFAAWLGLVPGQYSSGGKSRLGRITKAGDAYLRSLLVMGARAVLALAAQREDRISRWARALAVRRGYWRAVIAVAAKNARLAWACLARGDAFELKSE

SEQ ID NO: 384820 - protein, 348 aa, unidentified
MTPVAADYEHVIGVDTHARTHTFAVVATDTGRALDSATFPTTAAGISRAMAWMRRRAPGRILAAIEGTGSYGANLTRALIAAGIDVCDVRPPKRATRAGRGKSDEIDAFAAARTALATDIERLVTPRSDGLRSAVRVLLTARQAMDSRRTGERNALIALLRSFDLGVDARKGISNALIREIASWRRRLSDDVATDTIRQEARRLALSIQALTIQLEENQAALSGHVHELAPGLQEILGVGAVTGAILIAAYSHKGRIRNEAAFASLAGAAPLQASSGNTVRHRLNRHGDRQLNRALDVIARVRLSCDPATRDYHARRLAEGKSKREIRRSLKRYIARQLFRHLNMVMA

SEQ ID NO: 384821 - protein, 386 aa, unidentified
MNLKYSVGLDVSSKKINACMCVIDEKQKVVVKSSTIICNTLKGFATLEEWIIKHKKEAIPVVVCMEATGIYHENCAYYLHGKDFNVSIILPNKAKKYLEAIGLKSKNDSIDAKGLSQMGAEQCLEFWEPMGTFFYELRLLTRQHQNVTELKTVLKNQLSALSYAMHHLDAVNNQLEQTIILFEMQLEELDKEIKAHLKSNNEVHEKAENILKMKGLGVLTLSTVLAETNGFTLFNNYKQLVSYAGYDVIEAQSGTRVGKTKISKRGNSRIRRALHMPSLVVIQCKVKPFKDLYDRTYEKHGIKMKSYVAVQKKLLIMIYHLWNKNEVYDADYQLNIQEEEQKFSLGQLASEKTQSQKNSPNLEIEATQGKHPVNYRKKLPLGAANI

SEQ ID NO: 384822 - protein, 347 aa, unidentified
MLIIGCDFHPGFQQVAIFDNVTGEIQEKRLQHRAEAEQFYRGLAGQEVRVGMEACGHYPWFEQLLAELGFELWFGDAAKVRASVVRKQKTDRRDAEHLLDLLRENRFPRIWVPSLEVRDVRQLLVHRHKQVQARTRTKNQLQAMALSQGVQKKYKLWTKAGREEMEQLPLLPYAAQRRKQLLQSLDGLEAEISELDRRVADEARQRPEAVRLMTHPGVGPVTALALVLTLGPADRFESAKQVGSYFGLIPSEDSSGGKQRLGRISKQGSSFLRFLLVEAGQTAARLDPQLKRFYRRLAARKNRSVAKVAVARKLATRLYLMLREDWTYTQLCQAVMQVSPSHSVAGQ

SEQ ID NO: 384823 - protein, 367 aa, unidentified
MKQNISSQIIPTNAMTSTTPYGLTVGLDLGDQWSQFCLLDGMGQIQQEGRVRSTRSAFQARFGALAPARIALETGTHSLWASELLTGLGHEVIVAQVREVRAISGSDRKSDQVDARKLARYARVDPEILHPVRLRDSEQQRDLVLIRARAALIRARTLLINAVRGLVKPFGDRVSSCDADSFAVRCREELSPKMQVSLLPVVEQIAQLTEQIQGFEAQIRTVAEKKYPDIAPLRSVFGVGPVTALTFVLTLADPQRFAKSREVGCYLELRPERSQSGEHDPQLGITKAGNRYLRWLLVECAHRLLRVDAPDSALKRWGQKLCERGGKNAQKRAIVAVARKLAILLHKLWVTQQRWEPLHGVSPVCSH

SEQ ID NO: 384824 - protein, 348 aa, unidentified
MIIIGVDFHPEFQQIASMDTETGEFQEKRLAHPAEAEKFYRSLVGQKVRMGMEASGHARWFERLVAELQFELRIGDAAEIRSKRVRKQKTDRQDAQLILRLLLEDRFPHIWVPSWENRDLRQLLWHRHRMVQARTRIMNQLQAVALNEGLRCKKKLWRERGRQQLESFRLAPWATRRRRDLLELVDRLTPTIAELSHAIEQEVEKCPAAQRLRTHPGVGSLTALAFVLIIGEVNRFRCGKQVASYLGLVPLEESSGNRRRLGHITKQGSSMMRFLLVEAAQVTVRSLPEWRSKYLHLVLRRGRKIAKVAMARRLAVHLFWMMRKEWNYQQLKKFGSHAGEPGNRHGVQ

SEQ ID NO: 384825 - protein, 349 aa, unidentified
MIKKLLKQIVGIDVAQKELVVSLGRMDEEAITTVYAYKKFVNNEKGFMALVLWVKKQTMEAFPLRYVMEATGVYHESLAYFLSNKGYLVSIVMPNKITNFFKTLEIKTVTDKSMSEAIAMFGLEKKLDNWVQPKKVFRELRQLTRERDQLIVERTMLKNQLHAEEVEAYPSVKTIKRIKDRIKMANEQGDEIMAEIKQTIKTDVELKHAVALINTIPGIGVLTSAIIMAETNGFELIRNAAQLASYAGFDVKEKESGTSVKGKSKISKRGNRHLRKAMHMPALAAIRHSERYKAIFIRIVARNGIKMKATVAVQRKLLEMAYTIYSTKKPYDTEYLQSQQTESELQEVV

SEQ ID NO: 384826 - protein, 392 aa, unidentified
MSQHFRFDASRSHTALDQDSTIIAVIEMSQTKWLVAALVPGVERQPLKKFDANEETLLKLLHRWRREAGQAGRNIKRIVVAYEAGRDGFWLARWLRARDAEVYVIHPTSIAVSREHRRAKTDRLDTELLMRVFLGWLRGEKRHCSMVAIPTIEEEDARRPNREHQNLVTEQTRIINQIKAILTRFGIRLLQPTMRKVAERLDDLSTAEGVPLPQNTLAELRRHLTRLRFVRDQIRAVEQERLRNLAAVPAAEKKSPQAMVRLIARVIGVGVETADMLVNEVFSRQWRDRKAVARYAGLTGSPDESGKRRRERGVARAGNARVRCGMIQFAWRFVRFQKDSALAQWFAARTADGRAGTRKAMIVALGRKLLIALWRLVTRGEVPQGVVLRPAS

SEQ ID NO: 384827 - protein, 371 aa, unidentified
MKSIIYLGMDVHTTNYTLCCYTLEDDRMCHLQQIAPDYRLILKYMDQVRRLYNNDVEFLCGYEAGCLGYSLYHQLTAHQVRCVILAPTTMGAVLGIRKVKTDKRDAMLIAKCLAFHTYHPVHIPTPEEEQVKEFIRMRDDHKLALKRIKQQISAFCLRHGFHYTATKSKWTQAHWKWLKSLKPDGLHQETLNEYLLTCSSLCDKLERLDRRIEELAAQEPFQERVRQLTCLVGVKTHTALSIIVEVGDFNRFPTAGKFASFLGLTPGEASSSDKQNRFGITKAGNTHVRRLLVEAAQSYARGQTGRKSKDLKAWQAGNKEQVIAYADKGSERLRRRFRQLLYKGKQHNVIKTAIARELSCFIWGMMTDRIA

SEQ ID NO: 384828 - protein, 410 aa, unidentified
MEQIHDRVAGLDVHRDSVAVCVRVPGPRRGVTTHKQRFATTTGGLAQLSSWLGDHAVAVAGMEATGVYWKPVYYALEHRFEVWLCNAHHVKNVPGRKTDMSDAEWLADVVAHGMVRPSFVPPPPIRELRDLTRYRKRQVDTKTAEVQRLEKVLQDAGIKLSSVASEVLSKSGRMMVEALIAGERDPAVLAEMALGRMRIKRPALGEALAGHFGPHHAVAARQILDHVDFLDTSIAVLSEQVATRMVPFTAAIGLLVDIPGISRLSAEAIIAETGADMSRFPSPAHLASWAGLCPGNHESAGKRRRVGTTNGNRWLRRVLIESARAAARTKGSYFAAQYRQIAHRRGPNKAAVAVAHSLLDVIWHILTTGERFADLGADYYQRRRDPERITRRLIHQLEQLGHTVTITPAA

SEQ ID NO: 384829 - protein, 352 aa, unidentified
MIVLGADTHKRSHSIAAVAATTGELLDELTVQVGRRGFDALLRWARALDGERVWALEDCRHVSGSFERFLIGRGERVLRIPTHLSAGARKSARQRGKSDPIDAIGVARVALQEGLESFPVAHLDGPELDLRLLVDHRERLVRQRVALNSTLQWHLHDLWPELELPGSSLFYDRWAPRVARRLARAEQTMRVRIARDELRRIRELSQAIKALEREIASLVAAIAPQLLSEPGFGPLTAAKLVGEIAGAQRFATPAKLARAAGVAAIPASSGNTQRQRLDQGGNRQINAALHRVIVTRARCHPATRDYIARRQAEGKSTREAIRCLKRYLARTVWRLLQPPHPVQGTPPSPSTS

SEQ ID NO: 384830 - protein, 344 aa, unidentified
MDYFAGLDVSVKDTSICIVDATGKIVREVKVASEPDALLQVLRNPAYRFRRIGLEAGPLSQWLFSALAEAGLPVICVETRHMRAVLKAQINKTDRNDARGIAQMMRAGLYRPVHVKTLRSQKLRMLLVHRKLLQSKSIAIENDLRGTLRNFGLKVGVAGTAKFEARIKELVENLPDLAALVEPLLVVRRVLREQIAVLHRRLLAIVRNDEVCRRLMTTPGVGPVVALTYRATIDVPARFRNSRAVGAVMGLTPCKYQSGQSDRTGAISKCGDEMLRVMLYEAAQILLMRSTKWSWLKAWAMQIARRRGIKKAIVALARRLAVIMHRIWVDGTEFRWTKQEAAAA

SEQ ID NO: 384831 - protein, 370 aa, unidentified
MGKYSEVFVGINTAKSKHAVAIADTGRDGETRYLGEIDSAPATIERVIKKLAGKYEKVRVCYEAGPTGYGLYRQIVTLGHECAVVAPSLIPKKAGDRIKTNRRDAVTLARLFRAGELTAVWVPDAVHEAVRDLVRARETAAADVCKKRQQLLSFLLRHGRIYSGSKHWAKAHARWLAAQAFEHPAQQIVFQDAIDAIEDCASRLQRLEEQLHAIIPNWSMAPVVDAYQAMRGVSFMVAVTFVAEIGDVRRFENPSQLMAFLGLMPSERSTGDSVRRAGLTLAGNRRARRALVEGAWTYRYQARVSARLQKRLEGIPKPVRDIAWKAQVRLCGRFRRLTAIGKKRPVIVAAIAREMAAFLWAIGQHIAPAY

SEQ ID NO: 384832 - protein, 385 aa, unidentified
MTPTQYQSRIVSREYEIFIGLDVDKKRMAVTCVDHGSLQKSLSLPYSSRQLLNYTSKHFPGQRLAFVYEAGPTGFGLHDELVAAQHTCLVVTPAMVPSAPRKRVKTNRLDSKKLAVGLRGGDLQGIHVPTQSYRELRQLVQLRDTQAAQVRATKCRIKSLLLFEGLPFPEPHEHWTVAALKALETLPCNATVRFKLDQLLEALQFHYQMASKAQKEVRRFCNQDPELRQSVKLLRSLPGVGTITATHAVARLGDWRLIKNERQIAGFLGLVSSEHSTGEKEKRGEITRIGDQRLRNKLVQCAWVAIKKDPELRAFYRRIYARHPQKVAARKAIIAVARKLTTRIAAVLKKQRPYEIREDFTTAPLNVEETVGLRERLDMAQNDEL

SEQ ID NO: 384833 - protein, 405 aa, unidentified
MGKVFVGHDWAEDHHDVFVEDDTGCRLAGGRLPEGVDGIARFHELVAGRVEDPADVVIATETDRGLFVNALVAAGYTVLAVNPMSTSRYRQRHSTSGAKSDPGDAKVLADLARTDAHNHRTVAGDSELGEAIKVLARAHQSMIWTRQRQTNQLRSTLREFYPAALEAFDELAGRDALAVLTIASTPTAGSHLSLSKIASALGRAGRQRRLAQRAAEIQTALRSEQLAAPALIAEAMGATVTALAAVIVELNTQIASLETRLADHFEQHPDAKIIRSLPGLAMTLGARVLGEFGDAPNRYVDAKSRKNYSGMSPITKASGKHHVVLARHARNKRLSDACYLWAFAALTASPGARAFYDQHRANGNTHNRALRALANRLVGILHGCLRHDALYDEHTAWAHRHQHAA

SEQ ID NO: 384834 - protein, 344 aa, unidentified
MHIASIGIDLGKTTFHLVALGERNKVLVRKKFSRAQLLAYTANLPPSLIGLEACAGAHFMGAALREQGHEVRLIPAQFVKPYRKSNKNDFIDAESIAEAVTKENMRFVQIKTQEQLDVQAMHRVRDRLVQRRTALINEIRGFLLERGITFAAQPIYLRKNLPTVIEDAEQNLSPRLRWLLQRMWQEWKQVEIDIKAMTDEIERISNENALCRRLRQIPGFGPLVSTATVAAIGNGAAFRRGRDFAAWVGVVPRQYSTGGKQKLFGISKRGNVYLRRMLIHGARAVLLRVKYDTEGFGQWVHRLAQRAPRNKVVVAIANKLARIAWAVLSSGKDYQHQPLQITAA

SEQ ID NO: 384835 - protein, 401 aa, unidentified
MVRYIGMDVHREFAQLAVLEDGLVCDEGKIGVTPEALRAWADGLRADDQVALEATGNSDAIANLLTPLVGRVVVSNPSKTRAIAEAKVKTDKVDARILAQLLAADFLPPVWLPDERTRSLRRQVMRRAHLVRQRTRIKNQVHAILARNLAPTPPVSDLFGRTGRHWLSRQDLPADERATVQALLRQLDFHGSELAIVDKELAVEALTDPMVARLMTIPGVDAIAGISIVAAVGDFTRFDDPNKLVAYVGLNPRVRQSGNSAPVHGRISKTGRAHVRGVLVEAAWSASRAPGPLRAFYQRVKARRGFQKAVVATARKMTVLAWHLVTKDQDYAFARPALVTHKRRKLELAAGAPSRRGNYGLPGAAYNDKQRRNEEKLAVERAEHAYEVLVAHWQPKRPTRA

SEQ ID NO: 384836 - protein, 365 aa, unidentified
MIVIGTDTHKRTHTCGAVDAGTGRLAGEKTAAAREPGFRELLAWGRELDEDRVWAIEDCRHVSGSLERFLVAAGERVVRVPLKLMGQSRRGERAAGKSDPIDALAVARAALREGVDTLPAAHLDEEALEIKLLTDHREDLVKARSEDQCRLRWHLHDLWPDLGLPAGCLDRAVWLDRLARRLARAGQGARVRVARELVVEIRRRTRRVVELGREIAALVEEQAPALLEMEGCGPLTAARLIAETAGAGRFSSDAKFARLAGVAPIPASSGNRTRHRLDRGGNRRLNCALHRIAVTQGRCHTPAREFLAKKQAEGKTRREALRCLKRHLARRVWRLLLDAERGRSEDTVDAQRDSQGATDHRDGLT

SEQ ID NO: 384837 - protein, 400 aa, unidentified
MIFCGIDIGKNEHGFAIVAYGDNNLEKPIIVKNNLEGFNQILKLIRKHENNNSKVIIGIESTGHYWKTVACFFEEQGYRVDVFNPIVSAKREQQSVRGSKSDKSSAVAIAKVVRDDDYSTCHLGTDQTERLKSLLRQRDRIVDESKKAKIAIINYWDLTFPEIHKRLTSEQLSSVSGLSFIKKFAFAEEIGSAHLTSLKNILHRLTSVDVEELRCAARKSTGLNTAALHDAVLSEVRMLEVFNAEIKKLEKMIKEQDDEETILLKSIPGIGLVTASTFKAEIGDIKEFDQKDKSKPLCYRILAYAGAEPRIRQSGKYTGKIKMSKRGNKHLRTALFLAADNARKNSDYFKAIYTKQKKKGKHHYVALSHVMRKLVIIALAVIKTGEPFDEKKLNLELAIT

SEQ ID NO: 384838 - protein, 421 aa, unidentified
MVREKVAGINLGSEQHWVCAPGGEGSSREIDSFGATAPELIRMAEWLKARRVESVAMESTGVYWIAPHEVLEGQGLQVLLVDTRQLARVPGRSKKTDPSDCEWIQRLHSCGLLQGSFRPEEAVCMLRTLVRDKANLMAERGDWLRRMQKSLDQMNVRVHRAVSDINGVTGMAIVRAIAQGERDAHKLASLRDLRCRKTQEEIAEQLSGHWREDHVFSLQQALRMYDAVEERIAAYEKEILRKLGDMERGEHPGQTAPPLQNANKGKMIRKRGQDPKRQALYRMSGVDITQIDAIGVETVEVVLSEYGSDLSRFPTEKQFVSHATLAPRVPKSGGKPVKKKKRNSASTRVAAALRMAALSLRHSQTGLGAYYRRVAQRCGGDVAVFSTARKLAIFIYRLLRWGQHYVDEGAAAYENRYLQQP

SEQ ID NO: 384839 - protein, 345 aa, unidentified
MSESYSGQQFVGIDLHRRRSVIVRMTTDGDPLECIRISNDAERLATVMARAGESPEVVLEATYGWYWAVDALREQGAQVHLAHPLGVKAFEYRRVKNDERDARDLADLLRMGRLPEAWIAPPATRELRELVRHRAKLVGMRSNCKAQIHAVLAKCGIQVSMTDLFGLAGTELLDRLELPKPYAARIASLRRIITALDFEIDAFAGQVRGRLARDPGFVAVQSIPGVGPILGAVFVAEVGDVHRFARAEELTCWAGLTPKHHESDKHVHRGRITKQGSRLVRWAAIESVQILPKTSVVGRIRDRVGDRRGRNIGVVAAARVQLEFVFYALRDHRVRALHGTRPVAA

SEQ ID NO: 384840 - protein, 430 aa, unidentified
MPELIPLVALLGIDWADQSHELSLQPVAPPGGDARVERHQLPHTPEAIRAWMSELRARFPAGAVGVAIESSRGPLIHALLDYDWVVLYPVNPRSLARFRETFTPSGAKDDAPDADLLRELLAKHRDRLRPWMPDTEATRGLRRLVESRRHAVDLRTTFTQQLTAALKEYFPQALEWAGADLGSEMACDFLLAWPTLEAVQRVRPQRLRSFYTRHHCRRPDRIEARLAAIREATPLTVDRAVIESGTLVVQMLARQLETLGASIRRFDTEIAARFAAHEDAALFSVLPGAGAALGPRLLAAFGSDRTRFPQASDLQAFSAIAPVRERSGKSWVIHWRWSGPTFVRQTFHEFAQQSIRYSGWARGYYALQRSRGKDHHAAVRALAFKWIRVIWRCWQDRTPYDEARYLRALADRGSPLASQLPSPSDEPLAA

SEQ ID NO: 384841 - protein, 366 aa, unidentified
MRKPSTSALRRRGKLQGEQLTIGLDLGDRSSFYCVLNGAGEVILEAKVATNPAAMRQTFEKMPSSRIALETGTHSPWLSRLLTELGHEAIVAHARNVRLIGESRRKDDRLDAQALARLARIDPKLLSPIQHRSAQAQADLSVIRARYALVRARTALVCAARGLTKSFGERIRGRNPKGFSLATSEALSPPLQVALAPLLSALEAITARIRDYDAQIEKLAEESYPETALLKQVKGVGTLIALAYVLTLEDPGRFRKSRDAGCFVGLQPGRRNSGQSEPQMHITREGDSYLRMVLVQGAQHIIGPFGEDSDLRRWGLKLAERGGKRGKRRAIIAVARKLAVLLHHLWISCEAYEPLHNTRKRRLAAA

SEQ ID NO: 384842 - protein, 416 aa, unidentified
MNAAGIDVSSRKSTVAVLRPFGEVVKLPFDVRHNAEDLEALAEQLKSIEGETRVVMEHTGRYYESIATVLHKAGLYVSAVNPLLIKEYGNNSLRKVKTDKADAMKIAKYALDNWIELRDYTPMDTIRYDLKTLNRQFQLASRQKTATANNLIALQEQSFPGIRKLFDSPVRSDGTQKWVDFAHDFWHVDCVRGSSQNAFTERYRKWCKRNRYQFSMEKAAKVYALAKSAVVLVQKTSVTKTLVQEAANQLTAISRSVEIYRSEMNKLASQLPEYPVVMKMYGVGESLGPQLMAEIGDVRRFERKQSLVAFAGIDPAPSESGDYCSRSNKTTKRGSPYLRKTLFNIMTVHLQRAPADEPVFLFLDKKRAEGKPYYVYMTAGANKFLRRYYGKVMTYFSTLEGLPLVDMDSTGLQHAD

SEQ ID NO: 384843 - protein, 351 aa, unidentified
MVVMLGIDVHKNTHTAVAVEQVERKLDQKTVRATDAGHRQLLRWALRNWPDTELTFAVEDCRHVSTRLERALLAAGQTVVRVPPKLMAGARSSARTRGKSDPIDALAIARAALREPNLPAATHDSVSREVKLLVDHREDLVNTRTQMQNRLRWHLHELDPELDPTARSLDRLCELDRLTAWLAQQPASMVVRIATELVTDIRALTVRANALERELAQRMAHLAPRLLAIPGCGALTAAKIVGETANVTRFRSEACFAMHAGVAPIPASSGKTNRHRLARGGNRQLNAALHRIAVTQTRLAGPGRDYIHRRRTTGDTTMEALRALKRRLARVVYNTLHHDTTQQPTTLPAAA

SEQ ID NO: 384844 - protein, 325 aa, unidentified
MTYIGIDISKATFVAAFLHGKSYRTETFPNDAKGIRRFISKLDPAIHHCVMEATGNYCFLLLYLLDKSGIRASLINPKKIKNYARVIMSVTKTDSKDACLIADFGERFKPEPYKFPSEQIMILKQKKTVLRQLQKQLTATKNLLSSLEPLPVKDQKCVNSLKQTITFLEKQIKYMQQEMEAVVTEVFDRQLKLLTSIKGIGVTLATALIIATGGFTYFDNAKQLSRFIGICPTIEQSGTSINIRGHINRNGDETLRSMLYVAAWSASQHNKACKECYQRLRGNGKSGKVAMIAVANKLVRQAFAVVTSNNSYIDGFVSKKPDTTV

SEQ ID NO: 384845 - protein, 345 aa, unidentified
MSQHYAGLDVSLDAVHICVIDEVGAPVWRGQTSVCPDNIRDALHQHAPDLVQAGLETGQFAPWLTLQLRKRKIPTVCLDARHVYAAIKLQRNKTDQGDAFCLAQIVRTGWYREVAVKSMDAHDLRSMLLARSQLVSQRQTIANLIRGLLKTHGHVVRRGCKGVFAVRVNAALQDSPTLGAIIEPLLNAWQALREQIAVLEKRLVARAREDAVARRLMTVPGIGPLVSLAFMSTVDDPTRFSSSADVGAYFGLTPKRWQSGEVDYQGKISRCGDAFMRGYLFEAAAVLMGRWCKPSALREWGERLAARSSLRKAKVALARKLAVLLHRLWVTGKEFNAYPIGALAG

SEQ ID NO: 384846 - protein, 402 aa, unidentified
MNCVGIDISKGKSMIAVMRPFGEVVVSPFEVLHTDSELSKLARLLKSLDGETRVVMESTGNYHAPVAWLLHDAGLYVSVVNAMLVHDYGNNSLRRAKTDKKDAVKLANYGLDHWLTLPRYVPEEDTRLMLKTCYRQYQQYSKVQTMLKNNLISLLDIAFPDANRLFTSPPRADGSEKWVDFVAAFWHCECVCGLSEKAFTAKYQKWCRKHGYNFSEDKALDIYASACRHFGVIPKTDTAKLLVEQAISQLQTTSSALAALKQEMQSLAASLPEYPVVMGMFGVGPTLGPQLLAEIGDVRRFHSKKALVAFAGIDAPPYQSGQIDVRSRSISKRGSASLRRTLFLVMSVILQCAPIDEPVYQFMDKKRSEGKPYRVYMMASANKFLRIYYASVKAYLESLEHD

SEQ ID NO: 384847 - protein, 418 aa, unidentified
MEIVYERVAAIDVGKKIIAVAVRTPGEKAGTRRQQVRKHNTYHATLAGMVAWLVSEGVTHVTMEATGIYWKPIFHALCEAEPPLEVLLVNARHVKNVPGRKSDALDAVWLAELTECGLLRGSFIPPPQIAAIRELTRYRKKLIEQRASELQRLAKVLEDSGIKIDSVASTLTTVSAREMIEALINGERGPAALADLARGVMRRKIPELRLACAGRFGDQHALMCTLHLEHIDHLTDMIARLDTRIDEAGLPFGPQIQLLATIPGIGERAAQVIISEIGVDMTRFPTAAHLASWAGLCPGNNESAGRHRSGKTRKGNTELCAVLTECAWAAGRTSTYVGAQFRRFHRRFGKKGGHKAAIATAHTLIVIIWHVLADSTAYRDLGADYFTRSFDNPEARKRRLVRELEALGHKVTIEPAAA

SEQ ID NO: 384848 - protein, 351 aa, unidentified
MIIIGCDFHTRYQQIAMADDETGELLLERRLDHESGEAHAFYRGLQGPVRVGIEATGPIHWFERLLAELGHQLWIGDSAKIRASEVRKQKTDERDARLILELLLAKRFPKIWVPTPAERDLRQLLWHRHKLVCLRTMLGNQLHFLAMSQGLCRKRKLFTKKGRTELIGLALGPWTRRRREELLKLLDQLDPAIAELDGAVLEEAQHRDDAVLLMTHPGIGPVTSLAFVLAIGPVTRFCCSRKLVSYLGLNPSEDSSGQRRRLGAISKQGNTMVRWLLIEAVYSAVRKDLALRQDYQRLKFRRGHAVAKVAIARKLAVRMYWMLRSGADYAQLVRRQGSPGATLVDASPSLG

SEQ ID NO: 384849 - protein, 402 aa, unidentified
MNAVGIDVSKGKSMVAIMRPFGEIVSAPFEIKHTAGDIHSLVELINSVEGESRIVMEHTGRYYEVLAHQLSKANLFVSAINPKLIKDFDNDSLRKVKSDKADAVKIARYALDKWQNLKQYNVMDELRNQLKTMNRQFGFYMKHKTAMKNNLIGILDQTYPGVNTYFDSPARSDGSQKWVDFASTYWHVDCVRKMSLNAFIDHYQNWCKRKKYNFSQSKAEEIYGKAKELVPVLPKDAITKLIIKQAVDQLNSASTTVESLRTLMNETASKLPEYPVVMAMKGVGTSLGPQLMAEIGNVSRFTHKSAITAFAGVDPGVNESGTYEQKSVPTSKRGSADLRKTLFQVMDVLIKTHPQDDPVYQFLDKKRAQGKPYYVYMTAGANKFLRIYYGRVKEYLASLPES

SEQ ID NO: 384850 - protein, 331 aa, unidentified
MDHCAIDLGGRKSQVCVRSPDGRLLFEGPYDTRSLPEFLRLLPRSRVIVETAAEAFRVADAAKEAGHEVRVVPGTLVRSLGVGARKTKTDRRDARALSEVSCRIDLPSVHIPSARSREWKAICGMHDALVTARTKLINNLRGWLRGQGLQIGKGNADSFAVRMAKLEPLPEYVRSQVQALAALTEKIGGSDKRIKALAKDELCQRLMTVPGIGPSSAVRFVAAIDEIARFESAHKVESYLGLVPGESSSSERQQRLSITKAGPSSVRWVLDQAAWSLQVRCRDPAARPLQLWAAEIARRRGGRIATIALARKLAGILYALWRDGTAYERRP

SEQ ID NO: 384851 - protein, 386 aa, unidentified
MQTPNDLNQSRIILKQDSTLIAVIEMSLSSWLVAGIVPGVERQPLKKLAVDESALLKLLNRWREEAEKAGRKIERIAVAFEAGRDGFWLARWLRARGIEAHVIHASSVAVSREHRRAKTDRLDTELLKRAFLGWLRGERDHCKMVAIPTIENEDAKRPNRERESLAGEQTRIVNRMKAALSRLGIRGFNPKLKKAAERLKDLRTPEDQPIPPNTLAELRRDMERRRLVSDQIRQIEHARLERIEHAPSDGPHAMVRLLARVIGVGIETADMLVQEVLSRNMRDRRAVARYAGLTGSPDESGTRRREKGLARSGNARVRRGMIQLAWRFLMFQKGSALAQWFRARTENARGTRKTMIVALARKLLIALWRLVREGVVPDGIVLRPAQ

SEQ ID NO: 384852 - protein, 355 aa, unidentified
MNDAKYIGLDVHQATISAAVRDSDGKLVLEAILETKAETMLQFIHGLRGSLHVTFEEGTSADWLYTLLKPHVTRVLVCDPRKNALLKVGNKGDRIDARKLSELLRANLLQPVFHDDTGLRRLREMARSYLTITKDFTRVMRRLKAIYRSWAIPCGGQQVYSPRHRAEWLGKITEASVRRRAELYYQQLDALRVLHQQAKKELLAEGRKHQAMKLLRQIPSIGPIRSVLLVALLQTPHRFRTKRQLWSYSGLALQTRNSGEYRIEGGQLKRSKKVFAVRGLNKNHNHDLKNIFKGAAIRATTVEGPFQKFYEALVAKGMKPAMARLTLARKIAAITLIVWKKGARFDAEHLKQQAA

SEQ ID NO: 384853 - protein, 398 aa, unidentified
MSMYFIGIDISKYKHDCCIISAADQKVVSKVTIKNNKAGFNELLTIIHSLANSADIRIGFESTAHYALNLELFLENSLLTFMEVNPVLISEYKKSKTLRRTKTDSVDCESIARWLMTVEYKPHSKGFYHAYSLKSLTRLRDKLIRQRSFNLVKITNVLDHTFPEFKPFFNERLSKTALYLLENYGSAEKMARMNSASYEKLRSVSRGKFSPQQFLRLKELAANTVGVNNSIFDVELNSLLSLYKSLVKEIDTIEKEINKLIEEVHPHYMSVPGIGPLSAAVIYSEYGDISNFTNPGQMLAFAGIEPGINESGTESHGGKMVKRGSSQLCYTLINWNLLSIIPIADLILQIVRKLFYINACINDEKSLKISVLSQIRKAINMLKVLKLYDFQICQFFNK

SEQ ID NO: 384854 - protein, 411 aa, unidentified
MPKHTPTRLGIKGQCIVLAVDVAKRNHMLMVQGPDGAREKPRRIGNSAAGFGALLQHAQTARRRWPGVPLVVALEPTGHYWLPLAYWLQARDLPVLTVNPAHTKRAKELEDNSPAKTDEKDVRVIADLAAMGRARPCRLQTGVYATLRALARLRARVAVDLTAVTNQLHQLCDQLFPELLPCFGGDLRRTSGQRLLAVAPTPAAVQALGVERLTVLLRGTSRGRYGAARATQLLAAAATSIGLREGTAPLVTRRHYLLEEEARLRGYRRALEQQQAAALRLVPYAAGLLQFRGLGVVTVATLLGETGDLQGFRRARQLLKHAGLNLYELSSGEHQGQRRLTKRGRPGLRRILYMAALRLLKRGAPLHGYYHRLRARLAGTAAVVAVMRKLLRVVHALVHSGQAYDALRLAA

SEQ ID NO: 384855 - protein, 375 aa, unidentified
MKEKLRFLGMDVHAETIAAAIAEPDGEVRSLGTIPNRMESVRKLIKKLGPAEKLRVCYEAGPTGYVLYWQLAELGVQCEVIAPSLVPVKAGDRVKTDRRDAEKLARSYRSGDLTAVWVPDEGSEALRDLVRAREAAKQDELRARHRLGKFLLRSGHRPPSGVRAWTHLHLIWVSQIRFAQAAQESTRLDYLHEVEHMRERVPRLEQAIVEAVKLASPALQEVITDLQALRGIAHISAVTIAAELGQVSRFPGARELMGYCGAVPSESSSGKRTRRGSITKTGNAHLRRIVVEAAWSYQRPPAIWAGLRKRQQTASEGANEIAWKAQHRLHKRFVRLAAAGKDKRKIVTAVGRELLGFIWAIGTKAEAAAGQRIAA

SEQ ID NO: 384856 - protein, 433 aa, unidentified
MNTRTTVADPGFRYLPDTQGYRPIIPPALPVINGSALHQQSASPPDTDTVSLPQKMHRLTFQTLIFILQLPQTPQFGHAQTSEFLLPVNGMDYLLPLRLTVRNVLTRRITMNIVFLGIDLAKNVFQLCGLNQAGKPVYTKRTGRKELLQTLANIPACLIGIEASTGAFYWQREFEKLRHKVKVISPQYVKPFVRGQKNDGNDAQAIAVALMQPTMQFVPPKSPEQQDIQALHRARQRIVNRRTATVCQIRGLLLDRGSPIGSAVSRARRAIPLILEDAENGLSSRMRRTIAELYELFNDLGRRIHFFDKEIETVFRQSEACQRIARVKGIGPKTATAIVAAIGKGTEFKNGRHFAAWLGLVPHQHSSGDRQALMNMMKKGDKHLRTLFIHGARAVVRVATNNNDGHMNQWVNQLKERRGFNKTTVAVANKNGE

SEQ ID NO: 384857 - protein, 416 aa, unidentified
MRIVYARCCGVDVHKKSITACVLLRDAAGTTQQEIRRFGTMTRDLLELADWLHGLQVTHVAMESTGVYWKPVWNILEGQFAMMLVNAQHIKAVPGRKTDTKDCQWIADLLQHGLLRGSFVPPPPIRELRDLTRLRTSLRQDHTAVANRMQKILEDANLKLASVASDWLGVSGRAMLAQLLAGEEDVAKLAGLARGRLREKIPALQLALHGRLTDHHRWLLRLQWEQLEFLESQIARLDAQIQAHVTEYQEAITLCTTIPGIEEVAAANLVAEIGVNMEQFPSAQHLASWAGLCPGNHESAGKRLSGTSRKGNAWLRRSLCQAAWAASHTKDTYLATQFRRLAARKGKKRAIVAVAHTILVMVYHMLKAKQPYRELGADFLDRRHAEQVKRYLLKRLERLGLQVTVGSSEDPAALLA

SEQ ID NO: 384858 - protein, 358 aa, unidentified
MKTNTIVSEVTQNATTAKAEVIKLGLDVHRRQITVCVQEDGATPKPPRQMSATALVAWVGGLVAQGSRVISCYEAGPLGYHLHRELTAAGATNYVVAPTVLPNGRRQKTDRLDARALLDRLDRYVRGNRHAFNPVRVPTPEQEQARAQGRLREQLLQDRKRAEARGRSLLLSQGLEASGAWWKPRRWALLAAGLPVWLREMVGVWQQLALACDAQEQAVRQQLEAAAPRQLPAGLGALTWVLLSREILQWSRFGNRRQVASYTGLCPGIHKSDGRGREGSINRCGNPTVRHLLVETVWRLVRWQPQYPPLQRLRAAVSGRQRRKAAVAVARRLAIDLWRLATGQCRPEQLGLQGNLAW

SEQ ID NO: 384859 - protein, 411 aa, unidentified
MEIVYARCAGLDVHKATVVACVRGPGLRPGERRGETKTFATTTRGLTELRDWLQRHGVTEVAMESTGVYWRPVYAVLEGGVRLVLVNARHVKMLPGRKTDVRDCEWLAQLLECGLLRGSFVPPQAVRDLRDLTRLRKTLIRERGHHVNRIEKTLELANIKVGSVITDLMGKTGRAIVMALSQGLDDPEQLADCAQGLLRKKRGALRQALVGRLTPHYAFLLQQHLSLIEMLDAHIATLEARIQEAMVPFAEAAALLQTMPGVATRAAQAILAETGADMGAFPTAAHFASWARLCPGNHESAGKRQPPTTGKGATWLRATLQEVAWAAVRTKKSYYRALYHRLKGRGGPKKAIVAVQHAMLVALWHMLKHRVPHHDLGADYFDRRNTTHIRRHHVRRLEQLGYDVVLVEKAA

SEQ ID NO: 384860 - protein, 353 aa, unidentified
MNNDITIGFDLGNKKHKVVGLDVCGKIILKCELSNDKEMLGAFFNEHAGATVAMETGTHCRWISSLAKRCGCDAMVGNARKLRAIWESSQKNDWKDAQMIANIARTSRELFHPVSLRDDEHHALVQLIELRDIVVAQRTQVVNAIRGMCKACGYMLPKCDAGCFHRHLDDIPSSEYWKFEPLVDRMESLAENISMYDWKIQDYADVHFKEDVALLRTVPGVGPVTSCAYVAFAPDPKKFGNPRDAGCYFGLTAGQDQSGDIDKPKTITKGGNEMMRKLLVTAANYILRESSKDSALKRYGERICARGGKIARRKAKVAVARKLAVIMMAMLQSRKPYQDNLAARTDAAGPAMA

SEQ ID NO: 384861 - protein, 338 aa, unidentified
MPLYGGIDLHANNSVVVLLNEQDQVIYQRRLANHLPTILEPLAPHQADIMGVVVESTYNWYWLVDGLMEAGYRVHLANPAAMQQYNGLKYTNDHSDARWLAHLLRLGVLPEGYIYPKAERAVRDLLRKRAHLVRQHTAQVLSVQNLMARNTGSRFSAKRLVDLTPADLQGMLPEAAHVLAVTSSLAVVHCLGQQIKTLEKTVNTCLKPTPAYAQLQTVDGIGTTLAQTIVLETGEIGRFPTVGHYASYCRCVGSTKISNGKRKGQGNIKNGHPYLEWAYMEAAQFAIRFSPTVQRFYQRKPAKSHLMIARKAVAHKLARACYDILRDLVPFDVHKAFG

SEQ ID NO: 384862 - protein, 343 aa, unidentified
MTKDTMIGVDLAKNVFQLHAASMMGQPKYRKKLSRQSFGKFMAEQPPAVVVMEACGSAHYRAREMIRLGHEVKLIAPHYVKPFVKRQKNDAADAEAIVIAAQRPEMRFVAPKTAEQQSRAILFRARERLVHQRTELVNALRACLYEYGHVVAQGIHQIKRVAGILDAANSDLPDLMREECRELLEQIAQKTVRIDARTAKIKVLAAEADTARRLQTIPGVGPLTALAVEAFAPPMENFRCGRDFAAWLGLVPRQFSSGGKERLGRISKAGQSDIRRLLIIGAMSRLNWLGRKSIPEDSWLARIAARKPRMLVAIALANKMARTIWALMTKNEDYGVPTQAAVA

SEQ ID NO: 384863 - protein, 418 aa, unidentified
MDGDYRLFVGIDWATDAHQVCVMDRDRRVVGERSVEHTGAAVAQFVGWLVQLSEGDPGLVAVAIEIPRGAVVETLLERGFHVYAINPKQLDRFRDRHTVAGAKDDRRDAFVLADSLRTDRPCFRRVRVDDPLVIQLREVSRADEDLRQEMNRLTNRLREQLHRFYPQVLRLSAAADEPWLWALLEVAPSPAAAHQLKRRQVDKVLRANRIRRLTADEVLAELGAPALHVAPGTVEAATGHIALLLPRLRLVHAQRQGCAERMEALLDQLASAEENAEGEKREHRDVEILRSLPGVGRVVAATMLAEASWPLAERDYHAGIAPVTRQSGRRLVVNMRQGCNTRLRNALYHFARTSTQHDEASRRYYAELRGRGHTHGRALRAVGDRLLRILFAMLRTGTLYDARRARRVPPGAPAPVPA

SEQ ID NO: 384864 - protein, 410 aa, unidentified
MTDTTIAQTAPVLVAIDIAKARHEVLISVPGRKRRRRLTVLNQLEDFDRLIATLSEYDRPVRAAFEATGNYHRALAYRLGTAGFDVKLVSSVALARTREALNNSWDKNDPKDAQVILHMMQIGNEQFYHDPILCGTNDLQELSKTHDIVSRSKTELWHRVLTHYLPLYFPEAERFHRSSRSDWFFAFLERYPSPHFITAMTQEVFITDAWDVVGRKVSKERLLADIYQTAKSSVGLPIAPDSDAARMFKMVLAEGRSLIAQRNEIEDRAVERLKNNEDYQLLTSIPGIGPINALTILAEAGDLRRFQHHRQFLKFCGMDLATIQSGTFRGQTKLSKYGNARLRRTLWMAGQVAIMQKTNSFRDKFERYIAGDRQNTHLRRKAYTAIAAKMARTVHGIIKRGEPYRPFFEG

SEQ ID NO: 384865 - protein, 330 aa, unidentified
MQFVGIDVSKKHLHLSWLRDPEQGLARSKAVDNTPTGHAQALTWAMQHSGAAPAELCFVLEATGVYHEAVALHLHQAEAQVVVANPLHIKRFAESHGFKTKNDRHDGQILARFGHERRPKPWQPAPEPVRQLRALLARLEALEEDRQRETNRLEKARVQGVPAPVLDSLQAMLGTLKEQIETLSRQIDQHIDSDPGLKGQREDLESIPGVGEKLSAHFLALFAAKRFVDAKQAAAFLGLVPVECQSGTSVRARPRLAKNGDPRWRARLFLPAMVAARFNPDVSALYQRLLKAGKTKMSALGAAMRKLVQIAFGVFKHGLAYQSQCTPAPV

SEQ ID NO: 384866 - protein, 336 aa, unidentified
MTTDTVTAIRSPSNTQLPDHVVAFEVSKLQLVVHTLPADRQCTIPNTPAAVRRVLLAEMRHNRRAQLGAMLVICEATGGYESAVLDVAVELGIDVHKAHGTRVRHFAKYKGLKAKNDPIDARLIALYGLQTEDLVPYQPPSTAVKALRALQERRDDLKLMLLAETNRLEHADNTHVLKSLRTSIEAISKALAAIEAEIAHLLNAEADLTRKAQLMRSVPGVGLVVATTLMAHIPELGTLSRGRAAALVGLAPYDDDSGERKGRRHIAAGRGAVRRCLYMAALGAIRACPHLRNYAARIKARGKPFKVAITAVMRKLIVIINAVLASQSSCHYAKAA

SEQ ID NO: 384867 - protein, 358 aa, unidentified
MFVGVDVHKDTHTAVGVSPFGEKLFEVTVGNYQKDFEILAETVNREAGVLSPYFGLEDCSGFGERLALFLVERYPLVHVPPVLVDRLRKNATHPEKSDSLDALGVAKVMMQNIDTLPVYTISEESKRAKQLKELSHDREFLVAERTRLKNQLHVLLHRVYNSKYTTYFKDPFSLKALRHWVKVRPPCDTLLLRSLKRKVRRLLDLRSEIQELEKDMEAIMDEAGYTLTTASGCGTVLAAAMVGEIGDINRFRSPASLAKYAGCAPREHSSGKTQRHRNRGGNRRLNCALHRMALSQISRMGNDVARTYFAKKVSEGKSKSQALVCLRRQMVNIVYMMLKHKTEFVLPETDNLSTVKND

SEQ ID NO: 384868 - protein, 374 aa, unidentified
MKEKVRFLGLDVHAQTIAVAIAEPDGEVRSLGTIANRAESIRKLVKKLGPTEQLKACYEAGPTGYVLYWQLAELGVACEVIAPTLAPVKAGDRVKTDRRDAERLARSYRSGDLTAVWVPDEGSEALRDLVRARESAKQDQLRARHRLSKFLLRTGQRPAAGVKAWTLAYMAWVRQLRFPQVAQESTRLDYLHEVEHMGERVVRLEKAIVEAVKLAAPAVQEVVKGLQALRGIAQISAVTIASELGNVSRFAGARQLMGYSGAVPSEDSSGKRTKRGITKTGNAHLRRIAVEAAWSYRLRPGVGPALRKRQEGVPEEIKEIAWKAQQRLHKRYCRLAAAGKDQRKIITAVGRELLGFVWAIGIKAEAAAKQQMAA

SEQ ID NO: 384869 - protein, 404 aa, unidentified
MTYFVGLDWAQREHAVWILDERGGTVGKFTVAHTAPGLAKLREQLCRIAPPSEMRVAIERPSGLLVDTLVEQGFTVVAIHPNAVKASRPRYSAAQGKTDLGDAYLLADLLRTDGHRFRALAPLSDDTKALRGLVRVRDDLVAQRVALANQLRSLLEQFWPGAATLFADVESPISLDFLDRYPTPQAAATLGEKRMAAFLARHAYPGRRSAADFIERLRAAPQPVAGEAEVEAKCECVRALVAVLRPLVAQIAALTGAVEHAVEAHPDGKIVTPLFRSGRVCAGQLVAELGDDRGRFVSAEHLAAEGGVTPVTQESGKHRTVTFRYACNVRLRVALTTLADTTRHTSPWARALYQRARDRGCHHPHAIRILARAWCRVIWTCWQKRVAYDPAKHRALRAVDREVA

SEQ ID NO: 384870 - protein, 338 aa, unidentified
MSQITMIGLDTAKHVFHALGFDRAWKEQLRKKLRRNRVLRFFAQMPPTVVAMEACSGSHYWARELQKLGHTVRLIPARDVRVLRRGQKNDFNDARAIAEAAGRPDQRFVPIKGVTDHDFQLLQRLRRGYINARTAQSNRIRGLLAEYGLVLPKGLAALRRRVPELLEDGDNDLSTVVRHLLHQALEYLRHLDQQIATCDQQMKQQLQHDELAQRLLAEPGLGEVSVACWRAVIGDGRWFRRGRDVSAAIGLVPRQHTTGGRPQLHGITKSGDKELRSLLIHGARSVVRHAHKKDDPLSHWICQLIARRGVHKATVALANKMARRAWAISVYGDEVRSY

SEQ ID NO: 384871 - protein, 346 aa, unidentified
MKITRVGVDIAKSVFHVHGVDGHGKTQWQAKLKRRQWVDALCERLEPGGVVGMEACASAHHWARELQTRGYRVKLIAAQFVKPYVKSNKNDRVDAEAICEAMSRPSMRFVAPKSVQQQDAQAVHRVRSELVAQRTAKANQIRGLVGEYGIVAPVGIVQLRRALPCWLEDGENGLSSSFRELLAGLWQDLQRLDERVKALDMSITQLVKEDPVAQRLLALRGVGPLIASALVGALGDGRGFDKGRDFAASLGLTPGQHSTGGRERLLGISKRGDPYLRKLLVHGARAVLRHVSDKDDALSQWLKRLSARKHPNIVTVALANKTARVAWAMVRNEVEYEPALIAGKTQ

SEQ ID NO: 384872 - protein, 410 aa, unidentified
MIEAILERCAGIDVGKKFVVVCVMTGGAKDEPHTQIKKFGTIVSELQRLAEWLVTEGCTHAVMESTGSYWKPVFNLLEAHVRVILANAADVQNRRGHKTDPNDSRWLAHLLRHGMIRPSFIPPLAIRELRDLTRRRRQLIGENSRERNRVQKVLEDANIKLGDVLSDVFCVSGKLMLAALLDGRMTAEQIADLAKKKAREKIPQITASVADHRLSDHQRFLIRHALRHLEFLDEEVEALNQEIRRHIEDPALAEAFHLLQSIPGIKEESAASILAEVGADMEQFPTAAQLSSWAGLCPANHESAGVKKSVRTNRGNVWLKTTLTQSAWAATNRKGSRLQSRYHALKARCGNKRAIVALGHTLLKTVHAVLSARLPYREDPQITRDDRNVERAQHHIRCLKKLGYNTFAVE

SEQ ID NO: 384873 - protein, 315 aa, unidentified
MTQQNNTNTDPIHYVAIDVSKDTLQIQDDHHSFAAENNTKGYAKLLGHLKTCQNPLVVFEATGGYERGLCEFLSKKGIPFAMVNPARVRDFARSEGIRAKTDPIDTKMILAFAKSKALQAMKAPSEACTKLAALLDRRGHLVEQLAREKNRLQNSESFILRSIKKMITFLEKEIEVLDKAIDELVKSDSGLNARSEIIQSVQGVGKITAWTLLAHLSEIESLNRNKLAALAGIAPFNRDSGKFSGKRAIIGGRAKVRKCLYMAAHSAASCNPVIAQYVKGLRDRSKPYKCAIVAAMRKLLIHIQALLKKAQLAPC

SEQ ID NO: 384874 - protein, 338 aa, unidentified
MERQYVAIDLHKSRSLIVRDNAAGEELAVVRINNDPVALAAVVAEAGPEPEVAIEATYGWYWAVDVLQDIGAHVHLVHPSGLNWEERRVKNDYRDCRELLDRMHLGKLPESWISPPDVRELRELVRYRGKLVAQRTSAKAQVKAVLAKHGLHPPVDDLWGPGGTRYLDDLDLEKAYAMKVVSLRQVVEVFDRELSMAEAETRRRLADHEGYRAIQVINGVGPILAAIFVAEIGDIGRFAGPEHLCSWAGLTPKHRESDAKVWRGRITKKGSTLVRWAAIEAISKIRGGPKIQADYHRIAERRGKHIARVAAARKLLTLVYHGLRDGEIRCLARADEAG

SEQ ID NO: 384875 - protein, 420 aa, unidentified
MKEPNINDFSVLVGIDWADKKHDVCEHVIGTDKYHYSIISSQPESLHDWAMSLKKRYPDQSIAVACELTKGPLIYALSKYNHLILFSINPSTVAKYRKAFANSGAKNDPSDAYIQTEILERHMEKLKSIRPEPAKVRALAQLLEYRRKVVQDKVDLTNRITATLKNYYPHTLDWFKEKDTMLFCEFLTKWPSLSAVKKAHKQTLMNFFNQHHSRYPAVNEKRIESIKSSMALTDDLGVIEPNQILIEILIPQLKCLLEAIARFDKEIKQRYKDQKDKVIFDSFPGAGPQMSPRIFVAFGTDRKRFQDANAVQKYGGIAPVIEQSGQKKWTHWRYSCPKFLRQTFVEWAGQSVRYSFWAKAYYEQQKQKGKPHNTIIRALAFKWIRIAFRCWQTSTPYDESKYLNALKRQGSPLLNYAVNG

SEQ ID NO: 384876 - protein, 356 aa, unidentified
MSQEVALIVGIDVHKQTHAAALIDDRGALVGALSITNGPQGFRKLIDWLVDRDAASAVIGVESPGSYGRCLVAALAGAGFEVLQVPAWRTHRERHRRGPGKTDPGDALSIAKVVMADRVDLGPAQEPELVRALGMLELQRRRFVHDRTQAIQRLRSDWTQFDPVAEAGTIRCDRKRELRKLKRITLGDSLAQRTAARCLRELAEDIDDLNDRIAALDTEIADLLAQHGRPLEQLHGVGSNLAAVIVAQAGDVRRFRNASAFARYCGAAPIPCGSGKTAGRHRLHRGGNRQLNAALYRIAIVQQRHHPQAKAFLARKLREGKTPREARRALKRHLANVLYRQLTAWANSTPAMNHLT

SEQ ID NO: 384877 - protein, 344 aa, unidentified
MEKSEHNQPYTWVLGIDVSKECIDACLIRKTDGQLFEGKFHNNVSGFRHLKAWCKQNQCECDQSMLCCMEHTGLYTRLLVHYLVSRQVDVWLEGSLQIKRCQGLVRGKSDKIDAQRIARYALLYQHKAEIMQVSVLTLEKLKDLQANRRRLMKALQTLRTTAEELKAFDASTAKLMEKVNRDAIRGIEKSLDKVDGQILTFISEDDTLKQKYDLMLSVKGVGKVLAAMLLVYTHGFQRLADSRKLACYSGVAPFVYESGTSIKGKTGVSKFANNELKKVLHMAAISSVQHNPDLHAYYQRKVGEGKNKMSVINAVRNKLLHRIVAVVNRGTPYQTHLNNFSMTA

SEQ ID NO: 384878 - protein, 382 aa, unidentified
MNSVGIDISKGRSTIAVMRPFGEIVISPFEVRHTDSELSELARRLKSLNGETRVVMEATGNYHAPVAKLLHDAGLYVSVVNAKLVHGYGNNDLRRVKTDRKDAVKLANYGLDRWLTLPRYVPEENTRLLLKNCYRQYRQYSKVQTVLKNNLISLLDMTFPNANRLFVSPARADGSEKWVDFVAEFWHCECVSERSLKSFVNKYWRWCRKHGYNFSEEKAHAIYDEASGHIGVMPKSETTKLLVEQAVSQLSATSAALAALKQEMQSLSSQLPEYPVVMGMFGVGPILGPQLIAEIGDVRRFYSKKALVAYAGIDAPPNDSGDVIGRHKSMSKVGASSLRRTLFLIMSAYLQNSPPNEPIYQFMNRKRSPVGNDDTLKSPFTA

SEQ ID NO: 384879 - protein, 399 aa, unidentified
MLAVGIDISKSKSVAAILNQDGSMHTSPFEFHHTQPELDAFIKYILNSNQSATILMENTGHYHYPVLKAFREAGLPVCMVNAYQIKKFGDMDLRKAKTDKKDAVRIARYALEKSYSLVPYTSMEQKYEDLRFLARQYNQRMLTLKTNKVFLLNLLDETMPGITNILPLTTRTPETSLSVLFINRFKSYDRIKKMGKSRFLDAFEKIARKSRNRQTKTYGLAIYEAALRNITTRGENEYTLAAQDQCLELVCESQKAADSIILKMQTLAETLPEYAVLRSMAGVGDRLGPLILAEIGDIRRFHSGKALNAYAGNDAPPYQSGIFESHNRHISKRGNAALRKYCFEVMQALKLTRPQDDPVYLFLLKKEQEGKPYNVAKMAGVNKFLRIYYARAMETLKQQ

SEQ ID NO: 384880 - protein, 401 aa, unidentified
MDSHPDTFTAALLTGRTPAEALVENTFHKIPMSQLQSWAKKHTSAEDLIVLEASGNSYQVVRTLEAIGRKARVLESAQMGRLKEAHANNDKISAVRLGKAYLAGTAKEVWVPDVLSQERRDWMHAHRKVVKRTTQLENRIQSYLSDNGVRPPQGVSADDLESLRPAKAWSARQWSVLEGLFLELGHAEQQRTHWVSVIAREVLNDPILLSLTRLCGIRDITAFALGAVIGDIHRFSEPKKLVKYFGLNPAFDDSGENNWSGGIGGHGREDVRALLIESAHAILRSGHPLAKWGKKLLARKGEIKLAVAAVARKLVVAVWYLLVGRETPVQEIEGGMAHKVGKIISHVGSKGLQAMGQTRAELRTKTYESLKTGRIYQLDPNKKMPPKQTFTQKATASSLVD

SEQ ID NO: 384881 - protein, 416 aa, unidentified
MNTSFAQHTHYVGLDWAKDHHEVVLLDRAGTIVANFVFHHDAVGWTEFRKQVQRYPSVGVTVETSQGATVAELVTSGVTVYPVHPQAAKAYRKRQAPSGTKTDFVDAWSLADALRLDGHQWRALSAQDPLVAELRLLCRDEVELITQRTALVNQLQAALYEYYPAALEAFDDWTQPFTWAFVQAFPTPQELGTATPHRRRVFLHTHKLWRPDTAARRLEIFARADQFCGAAAVTRAKSLLALSLAAVLTTLETRLTTYRAEIEKRFAEHPDHDVFGSLPGVGGKLAPRLLSELGSDRGQYPAAGNLQCVAGTAPVSFASGQIRRAKIRWHCDRHFRHTVHLWADCSRKVCAWAQAYYQAHRTKGQSHACALRCLAQRWLKILWRMWQDRQPYDENRHALNQQKHGSWVLQLKPKKA

SEQ ID NO: 384882 - protein, 388 aa, unidentified
MARARISDDVVGLQQLLDLLAEHGDTSESRIPVAIETSRGLLVACLRATDRPVYAINPLAASRYRERHTVARKKSDHFGAMVLANILRTDAAAHRTIPADSELAQAVAVLARAQQDAVWDRTQAGNRLRSHLREYFPGYLAAVQPILGGLCSPVARALLAAAPTPVRAARLTRAQLRAVLKRAGRQRGIEAEATRLHAALGGPQMRQLPLVEEAMGRQALTLLRKLDAACTSTGELAEAAVEAFERHPDSEIITSFPGLGSLTGARVFAEIGDDRSRFADARALKSYAGAAPVTRASGKSMSVKARRIKNQRLAAAGYIWAFASLTASSGARAHYDRRRAHGDRHMSALRNLFNRMIGCLHHCLDNRVHYDETIAFPIQPKPALATTA

SEQ ID NO: 384883 - protein, 452 aa, unidentified
MSQRTGVTRGDKRRNERLGELRRLVPRENALAGVDLAEDKQALAVTDHDSRVLARKTVRSTLAHQLGDELDWAVEQARRGGFAAVTVACEPTGSRWLHLQRLCEERGIAFVCVQPLVTHIAREQEDYTRNKSDERDAVLIARLAGELRCYRPERLDEEWAALRHLGRRRERLISASTAAMNQIRDYLSVAWPAALTTAAKPFESRTWLAAITVVTGRCGADPARLRDLGLDGFTAEVRRELPRFSGQRPARRIVVAVFEALTCADGVAAHRRGLLRRTSWALDDLRAARVQRAQVEQEMVTQLDVLGLGASMASIPGMTAVTAAAILAEAGDPARFASSRALVKHAGLAPASNESGHSTGQAHISRRGRPALRLAVWRVTWAMLRHNPVLAAKYAQLTTRQTGKLTTAQAHVACAAAVLRWIYALTMHHTVWDPRIASGAIPHDQATTAMAA

SEQ ID NO: 384884 - protein, 324 aa, unidentified
MQAIPIGCDVSKDKIDLCVWLNDVKQEYLLIGNNQKGYLKALAEIKRLNIKPHICMEATGIYYEGFADFMAENGHLVSVVNPLKIKKFAESEFQKTKTDKQDARLIACYCLKMQPKADYIKPNSEQYAVRRNIALLKQLNADLSGIKNRIKVAKDEFVRQILSNQQKEIKKHIKEVRQHLAEITEQTAAGQVAEKLESIPAIGQTTALILAHYLNMYRFDSENKFVAFAGLAPGKHESGSSVRRPDKLTKYGNRTIKGALYMPAMVAYRFGYFGAFVNRLKNKGKPPKVILIAIMRKLAAIAWNLWKNGQTFDPARYGLNSKTA

SEQ ID NO: 384885 - protein, 462 aa, unidentified
MQDSDKRRNNAGSSREIGGLPVVRHRVAGMDLGSERHWVCAPMVEGSGREVADFGATTSELVQMAKWLKVRKVESVAMESTGVYWIAPHEVLEAEGLEVLLVDTRQLARVPGRDQKSDPSDCEWIQRLHSCGLLMGSFRPKEAVCMLRTLVRDKGNLVAEVGDWLRRMQKSLDQMNVRVHRAVSDIDGVTGLAIVRAIVNGERDAQKLATLRDPRCRKSVEEIAEQLNGHWREDHLFSLRQGMKMYDSIQERIADYEKEILRKLAEMEREECRGQEVPKVKNPKKRQAIQRHGEEPMRQALYRMSGVDLTGIDAIGVETVQVVLSEYGPDLSRFPTEKQFVKHVTLAPHKPTSAGRPVKKKKRNSASSRVGAALRMAATSMRHSETALGAYYRQMARRIGGDVAVFATARKLATLIYRLLRWGQPYVDEGAEAYEKRYQEGRIKSLAARAKDMGFRLTPIQA

SEQ ID NO: 384886 - protein, 379 aa, unidentified
MKENNSKKQSKTQGKYHNQIAPKDVTLEKFPLYIGIDLGDKNSEICVFNADGEVSERFRLRMNEAAFESYFTGIPRSAVAIEAGAQSRWVAGTLEQCGHKVYVSNTRKVPYISQTDDKDDPGDAFKLGELAYLKPRLLHPIQHRSQAAQADLSWIRAREALVESRTQLINTIRGISKGFGKRLQRCSVESFTAKRAQEVPEDIRGPLAPLLEMVDQLNEKIRYYDEMEEHIARTRYPKYWLLDQVDGVGVHTALAYMLTIGDPERFERSRPVGCFLGMRPKRQDSGEQQPQLGITKGGDMYLRKTLVNCAQHILGPYGVDSDLRRFGLRICERGGKNAKKRAVVAVARKLAVLLHRLWMSGEVYEPLRNHTHAQSAAVA

SEQ ID NO: 384887 - protein, 391 aa, unidentified
MIFVGIDVAKDKHDCFILNSEGAVLADVFTIANNRIGFETLLSRIQSCSQGESKIKVGLEATGHYSYNLLGFLLDSGLATYVINPLHTNLYRKSLSLRRTKTDRIDARTIAMMLMSDVDLKSYSNTAYHNEELKSLTRYRFDKVKERAKLKSSVARLVNILFPELEKLVSSLHIAVVYALLSNYPGASYIANANTEELAETLCTASKGRYTKSKTAKIQVAAGVSIGSKMPAKSMELKHTIALIRELDKEISEVESAIDKITSQMDSPIFTIPGIGRHMGAMILAEVGDFSNFASADKLLAYAGLSPSTYQSGQLQNCYAHMEKRGSRYLRYALFNAAKYVCLWCPTFSAYLEKKRSEGKHYNVAISHAAKKLVRLIFAMQRSGKAFLADY

SEQ ID NO: 384888 - protein, 386 aa, unidentified
MVTPIRPRIEQETPPQSTLFLAFELGQNTWKLGFTIGVAQQPRERTIPAGALETLQQEITRAKQRFGLPEDACVVSCYEAGRDGFWLHRHLVAHGIQNHVIDSASIEVNRRQRRAKTDRLDVRKLLTMLLRHSAGETKVWSVVRVPSVEEEDRRQLHRELTTAKQDRTRVINRIQGLLAGHGVQLTLQGDVDAQLDQGQQWDGSPLPSALRTRLKRAWQQVCFLTAHIQTLEAERRALLRRHEDPVIAQVRQLFTLRGIGVNSAWLYVMEFFAWRDFQTPKQVGALAGLTPTPYQSGQARREQGIAKAGNRHIRAMAIEIAWAWRRFQPASALAQWYERRFGHGSARLRKLGIVALARKLLIALWRFLKTGVLPEGAVLKAETPSR

SEQ ID NO: 384889 - protein, 376 aa, unidentified
MEASIVTPEAVAAYIGIDWADQKHVIALRSAAELNKIEHQVIDQKPEALMEWIGQLEQRFGGQGKILVSLEQSRGPLIYHLMGYEFFELYPVNPLQLARYRETFSPGGAKDDRPDSELLNELLYCHRDRLRALKPDSVLGRKLSFFNQGRREAIDQRTRLSHAIKSQLKVYFPLALELLDQDTSTALAADLLLRWPSLEAIQKQSVHRLRKFFYGHNCRGEQRMLQRLELVQKAKPLTQDSGVIEPAALRVQMLARQLKNLLPDIARYDKKIAELFAAHPDRVLFENLPGAGEALAPRLATAFGSDPERWKSALEIATLSGIAPVRRASGMRSGKKGERKASVHFRQACPKFLRQSFHEFAGCSIRYCSWAQAPLQ

SEQ ID NO: 384890 - protein, 356 aa, unidentified
MRFYSQPHRFYCGIDLHARTMHVCILAHDGGVVCDDHLPCHFETFLKAITPFRDGIVIGVECMFGWYWLADRCAEQHIPFVVGHALYMKLIHGAKAKNDRIDANKIARLLRGGNFPLAYVYPKGMRETRDLLRRRNYFVRQRSGLFTHLQILNAQYNLPPFPKKLSFAANRAELDVAHRFSDPSVQKNAAANLAVIDCLEEQIAELELYLTRTAKVDDVQTYHRLQSIPGVGKVLALVLLYEIHDIKRFASVGQFLSYCRLVRCEHESAGKVLGSGGRKIGNAHLRWAFAEAACLFLRGSERARAWKKKQEKKRGEGKALAILAARLARAVYHLWRKGEAFDECRFWQGQPATAKS

SEQ ID NO: 384891 - protein, 355 aa, unidentified
MTRTVYCGVDFHARMQTIAYCDSADGEIQLAQLDHRKDDVRDFYSKFTGQVIVGLEAGGYSTWFEAMLEELGHTVWMGHAAEIRRRANWRQKNDRRDAELILEIMLRGDFPQIHRHSRESVEVLRMLRYRARLVKMRTMISNNLQAIAISSGLSERSRMLSRSGQQRLKNARMSPAIRQQSEDLLSLLVPLNERIARVEKWLKEQASTDDRVKLLLTHPGVGVLTALGVVHTLEPFNRFTRQRSVVAYVGLEPMERSSAERKRYIGISKGGSRLLRFLLGEAAHTAVRLDPELKRFYERVGKRRGKPKATVAVARKLLIRCWIMLRNNIDYLEFRSRGVEARLARNIARPSVPAE

SEQ ID NO: 384892 - protein, 316 aa, unidentified
MDEPRPACCVGVDVSKDRLDVHLLPSREAFSVARDGKGLENLVGRLKSLNVSLIVLEATGGFETTVAAALASAGLPLSVVNPRQIRDFARALGKLAKTDAIDAEVIALFAEKIRPEARPIASEEAQRLGDLVARRRQIVEMIGMEQNRRSRATDKHLAKRIARHLAFLEKELAEIDGDIDADVRASPVWLETEQLITSVPGVGPVTARTIIAELPELGQLDRRKLAALVGVAPFNRDSGPWRGHRMISGGRTSVRNVHYMAALAAIRFNPVIRANYQRLVARGRPKKVAVIACLRQLLTILNAIVRDATPWAAQSA

SEQ ID NO: 384893 - protein, 343 aa, unidentified
MKHYAGLDVSVEETSVCILDETGRICREVKVTSHPEDLLRILQDPAWHFERIGLEAGQLSQWRFDALADAGLPVVCIETRHAKAFLKAQVNKSDRNDARGIAQMMRVNLFRPVHVKTLTSQKRRVLLTARKLLQEKAIAIENDIRGLLLNFGLKVGVVGAAKFEERIHELIRDMPDLAEILERLLDARRRLREHFAGLHRKLLDLARGDAVCRRLMTIPGVGPVVSLAFVATIDTPARFRKSKAVGPVLGLTPVRSQSGNTDRVGRISLCGDGMMRTLLFEAAQTMLRQTTRWSWLKAWAMRVAQRRGSRKAVVALARRLAVIMHRMWCDGTEFRWTREAPVA

SEQ ID NO: 384894 - protein, 381 aa, unidentified
MDTKTVQGSLQGPISPTLYLAFELSQKQWKLGFTVGMGQRPRIRTIQARDLQALQWEVQEARRRFRLPDTVTTLSCYEAGRDGFWLHRYLHAQGIANLVVDSASIEVSRRSKRAKTDMLDVDKLLEMLIRYHSGERKLWRVVHVPSLEVEDRRHLHRELATLKAERTRHINRIKGLLVSQGVCMPVIEDLLEKLETVRLWDGSGLPGELHTRLEREYQRIQLVNQQIQQLEVQQAEQLRTSVHPSVVQVRQLLRLKGIGVNSAWLFVMEFFGWRDFHNRREVGALAGLTATPYRSGGASREQGISKAGNRHIRAMIVEIAWIWLRYQPNSQLSRWYQQRFGQGSNRLRRIGIVALARRLLIDLWRYLETGTVPEGAVLKSS

SEQ ID NO: 384895 - protein, 373 aa, unidentified
MIQVVAGVDTHSQTHHCAVVTVTGEHLADAQFPATRPGYEALQAFITCQGELVRVGVEGTNSYGAGLTRHLHAHGITVVEVIRPARTVRRLKGKSDPIDAYTAAHAALADNDTVTPKTSDSTVEAIRVVHAGRRSALKARTARARSGAHEVEVFTRSTLKRLAGRYLDLGEEISTYDQELESLVMETNPALVATRGISTVTASQLLITAGDNADRLRSEAAFAALCGTSPLPASSGKTTRHRLNRGGDRQANAALHRIALVRMATDPGTKEYVAKRSSEGKTRKDILRCLKRSIAREVFHLITNPQPVISGPELRHRRQELGLTLTEAALLLDCDPNRISRLERGITKDQKQAEKYHQWLNAQQLPETPKKVA

SEQ ID NO: 384896 - protein, 388 aa, unidentified
MSPSTRHIAARQTAIQHPDLTLYASLELSRATWLVTSLAPGSDRMSKHSTAGGDGGALLGLLERTRTRMQQVAGHPVKIVAIQEAGLDGFWVHRLLEANGIESHVVDPASIAVPRRRRRAKTDAIDGETLLRTLLAWKRDEPRVCAMVVPPTPEEEDRRRVCRERAILLQERIRHTNRIKGLLAGQGIADYNPLHKDRRHLLDATRTGDGRPLPRQLKAEILREIELIELLLRQIADVEAAREALARPRTAKAPSPVVLLEQLKGIGPEIASVLYLEGLFRTFGNRRQVAAYAGLAPTPWRSGTVDQEQGISKAGNPRLRSTMIELAWLWQRHQPGSALSRWFHARVGTERGRIRRISIVALARKLLVAIWRYVTQGEIPEGAVVKAA

SEQ ID NO: 384897 - protein, 429 aa, unidentified
MIYLSTINSNLSADKAGTLYVGIDLSLKSNQVVVTDTFGKQLATFAVGNDLPGANKFKEKIIQIAKQYQIATIKIGMEATSLYWWHLYQFLVQDETLNKEYILDVFTLNPKLVKRFHKATADLDKTDPIDASVIADTVRFGKVTQSHLIDEVYEPLKRLTRFRCHLVTSLIVEKNYFLTHLFLKYSSWQKIKPFSSAFGTTAQEIISKFDPEEITNLSITELAERMIGLSRNRLADPVKTALLVKEVANSSYQLANKLKEPIDLILTNTYDNIRYFGEKIKTIDAVIEKEFSRYTNPLTSIKGIGLVFAAGITAELGTTSRFRRQSQVGKYAGLAWKKSQSGEFTAEETPRKPGNTYLRYYLVQAASSLRVHNEEYKVYYERKYQEVPKHQHKRALVLTARKLVRLCFAMLRDQRFYQPGNQKGDQPKS

SEQ ID NO: 384898 - protein, 417 aa, unidentified
MRIVRPICCGADIHKDLIVATIAATNQDGITEYIQSSFSSQNFDLVRLKAWLIEHHCFEIAMESTGKYWIPVFNVLEGEIKVFVVHPKYTKAIKGKKTDKKDSKWIADLFKHDLLKFSFIPPKEIRELRELSRYRIKLIAMRSSERNRYQNSMTISNIGLASILSDPFGKSSRAVMKEVIRSSSVTEERISKLLERNAKKKVKEVLHSLEGSHIESDQRLKMNIASQHMDQIDSHVKRLETEMAIRCIPYATLINLLLDIPGISYLSAMTIIAEIGTDMSVFETSKQLSCWAGLAPANNESASKKKSVRISKAGSYLKPLLVQCALAAINSKSNPYYRIKYNRIKKRRGHKKAIIAIARMILVNIYHILSTGEVYSPCDMEQIINPKPVKKVMTIQNAIEFLQSQGFDTSKLISSSS

SEQ ID NO: 384899 - protein, 343 aa, unidentified
MQAVTTIGLDIAKSVFQIHGVDAAGNVIVRRQLKRRYVLPFFQKLAPCLIGIEACASSHHWSRELKALGHTVRLMPAAYVKPYVKRQKNDAADAEAICEAVTRANMRFVATKTLEQQSCLMLHRTRHLFIRQQTAVINAIRAHLAEFGIVAPVGRNGVEQLLDVVADPGDKRLPHVARACVATLGAQLRMLKARILEFDRLIMAWHRSSEASKRLDEIPGVGPALATALVASVADPKAFRSGRNFSAWIGLVPKQHSSGGKDKLGSISKQGDRYLRSLFTAGALAVIRYAKIHGTKHRPWLSALLARRPTKVAAIALANKIARMAWAMMARGDRYKEPVALAV

SEQ ID NO: 384900 - protein, 572 aa, unidentified
MSSTESLQVIGVGIDTARYGHRVNFMRPDHKLAAKSLTVSENRAGYDSLHERLKMLHARHPETRFVVRLDAAGQYAANLEQFLRGLALPLTISVGEPMRNKDYRKAHFPKRTTDDTESQALARFAVVEQPEASPPTGSGMMALREIAGRLQAQVRQSTRAVNRLHNIMARGFPELAQLTNDFSAAWVLRLLLRYPTAERIANTRPGSMERIPHISLETATKIRQAARTSVASLNGEVAEVLIRNLVTDVRVSLKGEAKLRRLLTKALDDLPASGYHQVATILGIGRTTAAILVAKIVDIKRFSTPEKVVSYFGAFPEEHSSGVDKNGNPLPPGTLHMSRKGNDLARGHLWNAALTAVRCNPAVRALYRRLRAKGKRGDVAMGHCMRKLIHLVFAVWKTDRPFDPNHFPWGDTAAAAALSKDKEAVGHKQDSPAKKVVTTATSTVAPTADPVKLTMPKQLSTRPRVDFALVRQQVTMEQVLDHLGLLDRLRGRGSQRRGPCPIHSQAESAKPTFSVNLSKKAFQCFHAQCAAKGNVLDLWSLMHRLPLYEAALNLCETFQLAANREEEHVSIS

SEQ ID NO: 384901 - protein, 447 aa, unidentified
MSRRTPQESDASLHIVHPHAAAIDVHSDNHVACVGPGQVRTFGAYSADLDALADWFRAAGVTSVVLESTGVYWIALFELLEGRGFEVFLIEPSQASHCGARPKTDRLDCQWLQRLHTYGLLRPSFRPPDAVLALRGYWRQRQMLVRYASHHVQHMQKALEQMNVKLTEVVSSIVGVTGTAILAGERDPKRLAALRHERCARSEEEIARALEGTWRPEHLFALQQAFDLYGYLHRQIEECDRQIAAELDRLPDRSKGGPIAPKPRRRGRKPNDVRFDAATRLTAALGVDLTAIEGIDAATALVILAEIGPDVERFPSEKHFASWLGLCPRTDRSNKTERRRTPRKGKNRVAQALRMAAQAVGRTQTALGSFYRRIKSRIGGRSAITATAHKLSRLVYRMLKFGMEYVTQSLTEYETQVRAKLERSVRRKAQALGYELVPRGPASPAPS

SEQ ID NO: 384902 - protein, 343 aa, unidentified
MSEVTTIGLDIAKNVFHAHGADASGRALFSRKISRGKLLEFFAQQPRCTVALEACGGAHHWGRELTHLGHDVKLIPPAYVKPFVKRHKNDAVDAEAICEAAQRPNMRFVAIKSEEQQASGLVFRTRDLLVRQRTQLINAIRGHLTEYGWVAPKGPSHVAMLGDLLEDEIGSSIPEAARAMFRTMLDLLEELNDRIGDLDKEIARRAREDAIARRLMTIPGVGPITATAIAALAPPAETFAKGRDFAAWLGLAPRQLSTGGKQKLGSITKMGERTLRRLLIIGSSAVVLQASKRGAPAGSWLEQMLARKPRMLVTVALANKTARIIWAVLTKNEDYKAPVAAAA

SEQ ID NO: 384903 - protein, 321 aa, unidentified
MSEPIGTRFVGIDVSKDWLDACCDPPVPEVAGHMAYDDASLREFCDVLERLRPTLIVMEASGGLEQRLACELAARSLALAVVNPRQVRSFARASGELAKTDTIDARVLCAFARAIRPAARAPKDAQTLELADLLARRRQLVDMRVQELQRQHSASSKAARKSLAEHVAWLDKRIARLDEDMGQRLRDSDVWRLKDDLLQSIPGVGSAMSRTALALCPELGQLDRRAIAKLVGVAPLADDSGKRRGKRRIWGGRADVRRVLYMAAQSAMLHNPAIAAFAQRLKAAGKPPKVVVTACMRKLLTVMNVVLKTGRPWHNLAADPA

SEQ ID NO: 384904 - protein, 446 aa, unidentified
MKKSSRMSVIHPHAAGVDIGAEFHVVAVPPDADAAPVRTFQRFTGDLHRMSDWLKTCHITTIAMESTGVYWLPAFEIPEAAGFNVILVNARDAKNVPGRKTDVNDAQWLQKLHSFGLLRASFRPEHDISVLRSYLRQRERLTEYRASHIQHMQKALMQMNVQLHHAVSDITGVTGLSIVRAIVSGERDPSVLIQYRDVRCKKTPEVLQQALTGNWQPEHLFAPEQSVAFFDFYQEKIRECDDQIETSLLQLSTGTEEPEGVLPSARHRTKQPNQLSFDVRPLLRKITGADLTQIHGFGPYLALKFVAECGTDMNRWPDASHFTSWLCLSPGNKISGGKVLSPKTRRSSSRIAAALRLAATTIGRSDTALGSFYRRLSSRIGKAKAVTATARELAILFYNALKYGQKYVDPGADYYEERYRNRVLDGLERRAKSLGYSLQQDPELCV

SEQ ID NO: 384905 - protein, 340 aa, unidentified
MRLYCGIDLHASNLYLVILDRAMKVHLERRQRNDLVVVLATLEPYREQLEAIAVESTYNWYWLVDGLSEAGYRVQLVNTSKVRQYEGLKHRDDRHDARWLAHLLALGILPTGYIYDPRERPWRDLLRRRGFLVRKRTSHLLALRAVYERQTGRRVSTRTAQQWTSRQVGALVEDSRVALEMSTLLCSARVSTAQIRRIEKRVLAAAELREEFRLLRTVGGIGEILALTIMYEVGDIGRFAKVGHFASYCRCVATRHTSDGKKKGQGNRRNGNRYLSWAFSEAAHFARRYQPGAERFYARKLAKCHPMVAARALANKLARACYYILRLRDQVPFDTRKAFG

SEQ ID NO: 384906 - protein, 321 aa, unidentified
MTPALDPMSFVGIDVSKDKLDLASDAQAQIRTFANDPAGIAPLVEHLRSLNPTLIVVEATGGYERAVLQAALDANLPIARVQPGRVRHFAKAQGLLAKTDDIDARLLALYARCLQPAVTEKRSKNQVELNALLVLRRQLVDARTAHSNQAGITDSAFVRDSLAKLLRQIHDRIKDVDKHITTLIDSDDDLSGRRDLLMSVPGVGKTTAATLAAQLPELGKIDRRQVCALVGVAPFDRQSGTWTGKRTIFAGRAAVRRVLYMATITAIRWNPVISSFAKRLQETGKTPKVIITACMRKLLTILNAMARDGQTWSPQCQLQNT

SEQ ID NO: 384907 - protein, 432 aa, unidentified
MAEEKNRAVQKHMEAFEMEVLYGICGGVDVHKKLLVVCLRSGKKTETRNFGTTTQELFDVANWLKDNHCEMVAMESTASYWKPLYNVLEVMEIPAIVVNAQHMKAVPGRKTDVKDAEWIADLCQHGLLTASYIPDKGQRELRELVRYRKSLIEDRGRELNRLQKMLEGANIKLSGTIREINGKSGRNLLNRIVKGETIDESVYDEMYANNEIAHNLKGSKQQIVADLNGVLSDLQRMMMKELIDHLDELDAHIKNLDVEINKFMTQDEKSASEMIQEIPGIGNTSAQAIISVIGTDMSRFPSDRHISKWAGLCPGNNESAGKRKSGKTAKGNKVLRTTLINCAHSAVKVKDSFFSAQFARIRAHRGTKRAYVAVAHSMLIAIYHMLSTGEIVKDLGNNYYNQFNRERKANGMLKKLKALGYEVTIATVAATA

SEQ ID NO: 384908 - protein, 344 aa, unidentified
MITIGVDPHKASHTAVALDGDGHSLGELRVPATRATAERLLRWAGRWPDRTWAVEGASGLGHLLAQRLVAAGETVLDVPATLAARARLLDRGHGRKTDALDARCVARVAMSQAGLRRVCPEDHTAVLRLLSDRRDELTGERRRVVNRLHRLLRDLRPGGAPTELSTAAAARLLGRIRPETAVDLQRKLMARALVADLRRIDRVLAENRTRCANAVAASGTTLTAIFGISDVLAAKILGHVGDVDRFRSDDSFASYSGTAPIEVSSGEVTRHRLSRNGNRALNNALHLAARVQTMHPGLGRDHYERKLAEHKSSREALRSLKRQLAKVVYRRLVADHVHRPALAS

SEQ ID NO: 384909 - protein, 341 aa, unidentified
MPIVTIGIDLAKNVFAIHGVDDAGKAMLIKPHVPRDQLVALIAQLPACLIGMEACSGAHHWARVFQQHGHTVKLMAPNLVAPYRMSGKRGKNDAADAAAICEAVTRPSMRFVPLKDEHQQATLCLHRTRQGFVEERTATYNRLRGLLSEFGVVLPQSPEKLRRYITEHLDTLPGWAKHSISDLLDHAGNIEDRLIEYDRAIAGIAREDARSKRLMQLRGIGPTTASALLASIGAGHDFRNGRQVAAWIGLTPGQYSSGGKARLGSITKAGDAYLRGLLVNGARAVIASLGEKQDRFSRWVRTLVERRGYWRAAVAIAAKNARLAWASLKYSDDFKLEPVAD

SEQ ID NO: 384910 - protein, 413 aa, unidentified
MKQVFERIFERVAGLDVHKAQVTAAVRVPDGTGGRLQDVAEFKTTVQGLLALRDWLQAHGVTHVAMEATGVYWKPVWAILEDELELLLVNARHVKQVPGRKTDVSDAAWIAQLLEAGLLRASFVPPKPIRALRNLTRYRKTQIEERQREANRLHKILEDTGIKLDCVASDILGASGRAMLNGLVAGTTDPVVLAELAKGRLRAKIPALQEALEGRFDELHALIVSSILAHLDFLDEAIDRLSDAIEEQLVPFGRAVELLCTIPGIQKRTAQTILAEIGPDMGVFPTAKHLASWAGQCPGNDRSAGKRRSGRTRKGSRWLGIGLTEAALAATRTKNTYLAAQYQRLRPRRGHKRALGAVKHSMLVAIWHMLSTGELYNDPGPGYFNRDPARQTKRLVAQLERLGHTVTVQKQAA

SEQ ID NO: 384911 - protein, 387 aa, unidentified
MQTKTPATTVETTVRDHSNTLFASLELSKAKWLVTANSPGEEKFSKHVVEGGDGASLLVLLARLKAKAEQRHGVAVKVVVIQEAGLDGFWIHRLLVQSGIESYVVEAASIAVARRHRRAKTDAIDGVSLLRTLMAWARGERRVCSMVRPPSPEEEDQRRLSRERGTLLKERIQHTNRIKGLLSGQGIRGYDPLKPDRLDRLDALRTGDGRPLPDRLKAEIRRELARIDVVATQLATVERARDALVRTQATEPTNPSALLIKLKGVGIEFASLVWLEGLFRSFTNRRQVAAYAGLAPSPWQSGGTNRDQGISKAGNHRLRHVMIELAWFWLRHQPDSALSRWFHNRVGTAKGRVRRIAIVALARKLLVALWRYVTQGIVPEGATLKAA

SEQ ID NO: 384912 - protein, 412 aa, unidentified
MEVVYPRCSGLDVHKRFVVACLSVIEKGQRHKELRQFSTMTNEILMMKEWLKASGCTHIAMESTGVYWKPIFHLLEGEFEIVLVNAQHMKAVPGRKTDIKDADWIADLLQHGLLKASFIPSSEQQAVRDLTRTRMRLIQERTRLVNRIQKVLEDANIKLASVVTDIMGMTGQAILMALLAGEVDPERLARLARGSLVKKQDQLQTALQGKLTAHHQVLLEELLPLIAGLDRSIARLDREVAERLRRFDALIERLDAVTGLARRSIEVLLGELGWDMSHFPDAAHAASWVGICPGNHETGGKSLSGRTRQGNRWAKTVLIQAAHAAGHTQTYLGEQYRRISARRGPKKAAMAVGHSILVIFYHMVKTDESYQEKGVDYFTESHKQEIQQRLVRQLERLGNTVILQPKAETTLA

SEQ ID NO: 384913 - protein, 340 aa, unidentified
MNATTYGLDVAKRVFQMYWVDAQTGEIVNRRFGRDELIGFLAQRPAGRVALEACGSGHWWARKIKALGHEVVLLHAKFIRPFVQTNKTDAADARAIWTAVQQPGMRTVAAKTEDQQAMLSLHRMRALLVKFRTMQVNQLRGLLYEFGATFRAGRVAGLTEIRARMAELEDALPGAIIGNLQDQLKRIDTLEQDIDRLEQRIGAWQKQEAACRALAEVPGIGKLTATALVATIGDAKTFRSGREFASFLGLVPRQSGTGGKIRLGSISKRGDPYLRTLLIHGARSVLYHAKVPTTWQKNIQARRPANVSAVALAHKMARTAWAMLAHGQAYQKDYVSVKPA

SEQ ID NO: 384914 - protein, 354 aa, unidentified
MIIVGCDYHPGFQQIAYVDTETGEVKEQRLEHRELAEKFYRELASQGETIRLGMEASGHARWFERLLAELNIELWIGDAAKIRAKRVRKHKTDRQDAQHILQLLGEDRFPQIWVASWENRDLRQLLWHRHRMVQARTRIMNQLQAVALNEGLRCKKKLWREQGRKQLEAYRLAPWASRRREDLLKLLDELNPTIAELTQAIDQEVEKSAEAGRLMTHPGVGPLTALAFVLIIGRAERFQCGKQIAAYLGLVPLEDSSGERRRLGHITKQGSSMLRFLLVESAQVAARSIPHWRNQYFHLAMRRGRKIATVAMARKLAVRLFWMMRQGWDYEQVNKFGSHAGQPEHRHGVQSNTE

SEQ ID NO: 384915 - protein, 338 aa, unidentified
MTYYAGIDVSLESASVCVIDAAGKIVREGKVPSEPQALTDWLRAAGSSLERVGLEAGPLSQWLYAGLRQAGIAAELLETRHVRRAFEIMPVKTDRKDAHGIADLMRLGWFRPVHCKSINAQETRAMLTARKLVQKQVLEVESSLRGILRGFGLKVGKTTPVKFEGRVKELVAGNQSLERITDALLATRAVLRREFNGFERQVRAMARNDTRARLLMSTPGVGTIVALTYAAAIDDPSRFKSSKTVGAHFGMTPKRYQSGEIDYTGRISKLGDASVRAALYEAAHVILTKPLKGCTALKSWAMKIARRAGMSKAKVALARKLAVIMHRMLANGTTFHAA

SEQ ID NO: 384916 - protein, 395 aa, unidentified
MESLFVGVDVSKDYFCASGLDVQGNVLFSLTATADKSGFTAMMNALSSHSVNLAEVMVAMESSGCYHLNLFSFLTSENIKVVVVNPLLIANYGKLSLRKTKTDKKDALVIARYLLSHRDTIVRSSVSQSYRDLRDVAREREFTGKMIAAIKNDMKRMLQSTFPELEKLVNVFSDTMLHFLKIFPSARQIAATDEKDLRQAFIHPDKRMRIVVKPEEIKEAALNSVASISPAKEMMLPGKIETLLYLEQRRDELTALMIRLCKATLEEDLKIITSIDGISTKTAAPFLAELGDPSNYQSYKKVIAFAGADPSIHQSGKFQGRSKLSKRGNRHLRKVIYTMAFCAVRIEGPFKQYFLKRKNEGLPFRKALFATAHKLVRVIFAMLQKRTYFMANQTA

SEQ ID NO: 384917 - protein, 355 aa, unidentified
MESTKYVGLDVHTEATTVAVMNSAGKLIMESIIETKAITIRQFIQGLRGDLHVTFEEGTWAAWLYDLLKPYVTKVIVCDPRKNTLLKVGNKSDRIDPKKLAELLRNGSLSEVYHGENGVRTLKELARSYLTISKDLGRVMNRVKALYRSWAIPCAGTQVYAPCHRSEWLSKITEAGVRRRAEHYYQQLDALQTLRHEVRKDLLLESRKHNATKLLRQVPCIGPIRAAQLVALMQTPHRFRTKRQLWTYSGLGLETRDSAQYRYVEGQLQRSKKPQQLRGLNSNHNHDLKNIFKGAATMASVSAGPFHDFYEGLLTKGMQPTMARLTLARKIAAITLIVWKKGVRFDPQHLKQQAA

SEQ ID NO: 384918 - protein, 345 aa, unidentified
MKHYAGLDVSVKESAICIMDETGKVCREVKVVSHPEDLIEVLKDPAWRLVRVGLEAGPLSQWLFSGLVEADLPVVCIETRHTKAFLKAQVNKSDRNDARGIAQMMRVNLFRPVHVKTLVSQKRRALLTARKLLQEKAIAVENDIRGLLRNFGLKVGVVGVIKFEERIFELVDGMTDLAEIMTSLLEARRTLREQVGKLHQRLLSIVRENDACRRLMTIPGVGPIVSLAFTATIDIPARFKSSKAVGPALGLTPILNQSGESNRVGRISQCGDGMMRTLLYEAAQVMLTRTIKWSWLKAWAMNIAKRRGKQKAIVALARRLAVIMHRMWCDGTEFRWTKETVPAAA

SEQ ID NO: 384919 - protein, 389 aa, unidentified
MFVGIDVSKDKFDACGIGEEGEKVFSLTATMDRKGFEQLTFHLKRKKSFLLLGLESTACYHIALFSYLTAKGYRVVIINPLLIANYVKLQLRKTKTDKRDALTIAQFLMLRKEALENQTCSVDLMELRDLARRRERLTDQVTRLKGNMKRILSVTFPELEHLTGVFAKSILQLLIRFPSAEALRKADVETVAALVVPRSWGRKSRAWVDTLMTTAATSIGVSSPAKELVLRQDASLLLCVQEQIKETTKALMSLCNERMKKDIEILTSIKGIGKATTLNFLIEMGGDVTLYKDDKKLIAASGLDPSTYQSGKYEGSSKISKRGNRHLRRVIWLMTRGVVFSNDLFRVYFYKRRNEGLCYKMAMLATAHKLIRVMFAMLVHQTCFEEGGK

SEQ ID NO: 384920 - protein, 431 aa, unidentified
MSERKSLEIRVSVDVGSRSHQVAIGLSSGEVLEEFEIAHRVEGFEDLFSRIERHRKGNSYRVAVAMEGFNGWARPLDSMVRGRGYRLYNINNLKLARFKEIFPGAAKSDRIDARKGLELFQLRDHLPLAKEVLQEVVGTPHENEVLKRLSRRRRRLVDERVRVVNNLQADLQAVCPGLLEITKEAGNRWFLNFLISADTLPQLARLRRTTLLKIPSVGVKYARLIQDWQERAHFSEEVEWVSAMIQEDARRILELDETIKALEVKTAEVAETSTIAKLLRSIPGYGAICTSELAGEIGTIERFNKEGSLALYLGMATLDNSSGKYQGTKRPKHINTRAKAAMMTALDRHRKYVPQSQKYYEKKRAQGKSHNQAIRALGRHLCRIIYKMLKEKREYEVRPLKRDTQAKVTSRSSRIGQIGKKKIRRKDKITI

SEQ ID NO: 384921 - protein, 352 aa, unidentified
MQHFIGCDVHTRNQVVAWIDESTGEIKKRRLEHAGQEVKEFYLQFPRGTVVGIEATFPAHWFERLLGEVGHELWVGDAARIRASEVRYQKNDARDAEHLLDLLRTGRFPRIWVPSLEERDLRQLLVHRMKQVRTRTQVKNQLHALAISQGVCRKRKLWSVKGRKELESLVLLPWAARRRKELLEWLDRLDEQIRELDRAVEEAGREREEVARLRTHPGVGMVVGLAFALTVGPVERFANSRRLVSYWGLNPRENSSGGRQRLGAISKQGNTMMRWLLVEAAQTAARLDPQLRRIYQRLKKQKTSGVAKVAVARRLAVRLFWMLRTRNNYAQLVHMSGSPSSAVVPPPAEPTL

SEQ ID NO: 384922 - protein, 407 aa, unidentified
MRKVRRNSTKALGQLFEKTTGCDVDKEVVVVANFSRGSKEIHTTEYRQNYFTAKKAAQDILKFGSELVILESTANYHMLFHDAFKAAGLNVKIINPLTVKALLRVEGKNDKADAITLAQLAASFSLRTSNMPDRIQREIRLHLRILDKVKRNRTQLINRVQSTLAAYGVTIYNIVKMNSVSGLGVLEGICRGMSSHEIIELFWKGNDKKVPELRENFGRVDELPDYVKLELQQTLDGIHLFNDEIASRERNAESLIEKLGLIEVVNIILSAPGVTPLLSLRIIGEMGVDFTERYSSAEKFVNAIGVCPANQVSGGKVVKKTANHGNKHLKVHLLNSVKGYCVSTKREHELKSFYDALRKRSTFKKAVSATARKLMIAIYAMVKYNQPYLTKAQLRGEPATAVKAAKA

SEQ ID NO: 384923 - protein, 360 aa, unidentified
MNATTVAVDLAKSVFQLAVADNQWHVVETQRLTRTQFERWFVNRNVGLVIMEACGSAHHWGRWLNRLGIEVRLLPAQYIRAYVKRNKTDAADAAALLEAARASDMRPVRIKSVEQQALQGMHRIRSLWMGTRTSRINALRGFFREFGIAIPVGARAGTETISRVLADPNTAVPDLIRGTAKLLVEEIRLLEGRIAQLERELAALAKLSPACTILLSIPGIGLLTATALVAATSGDVSHFKDARHFSSWFGLTPKEYSSGNTRYLGHISKKGDRYLRMLLTHGARSVLRSSKVAQDTGREVCGVRRWALDVQSRSNHNKAACALANKLARICYATLRDKEPFGEDQRLNKKINRESFVMPA

SEQ ID NO: 384924 - protein, 384 aa, unidentified
MTHLPEAEFAACIGIDWADATHDVCLHAVGSDTREFSRLEHTPEAIDAWARAVQQRFAGRPVAVCLELNTGPLVYALRQDAFLILFPGNPLTLAKYRDAFTPSHAQDDPTDAELQLELLLKHRDKRKPLKPPSPAMRALEQLVDHRRRLVGDNVRLTNRLTSALKNYFPHVLQWFHDKDTTIDQRIQAVKSAPPLTTDEGIITPTALLVQALVSQLRVTWQAIDAFDDAIAQHAQSHPDFPLFNSLPGAGAVLAPRLLAAFGEPRERDTSADELPQYAGIAPVTERRGNKSWVHWRLQCPTFLRQTFVEWAAESIRHSFWARAYYQQPRNKGTSHQAAVRALAFKWIRILFRCWQNRTPYDESVYLNALQRRGSPLIHNLARGA

SEQ ID NO: 384925 - protein, 386 aa, unidentified
MSRPSNIPLRAINYDYTLVLAIELSNKSWVLAAQVPGFPQTKAQRTIEPNKNALLAAIDGYRARAAAVGCAVDRVITTYEAGWSGFWLARWLVAQGVEVHVVQPSSVPVDRRLRRAKSDGIDAELLLRTLLAWLRGEPRVCSMAPIPDEADEDARRSVRERTELLSDRVGLTNRIGAVLATLGVNNYNPLLQSRRRRLAELRTGLGEPIPPNALAKIERLLARLELVLAQIAELERERDEVAAADAPDRAGKMIQQLTSLRGIGVQSATVLVREAFVRHFSNGKALGSYAGLTSTPYSSGGIDREQGIGKAGNRRLRTVMVELAWLWQRYQPGAAQVAWFRDRVGSTGRRIRKVMVVALARKLLIALWRFVIDGVMPEGAVMKPSI

SEQ ID NO: 384926 - protein, 399 aa, unidentified
MSGEALAGVDWASEIHAVCVIDGDGEATDQFDVTHDAGSIRALVARLRRVGVSRVAIERGDGPLVEELLDADLEVFVVPSRQIKGLRTRYGSAGNKDDRLDAYVLADTLRTDGHRWKPLRADHDDTRALRALCRSRKDLVETRVQIVNQLRANLELAFPGAIGLFCKPDSSITLTFLRRFPSAEKAQWLSPKRLASWLSSVGYTGGIPSGVLYGRIDNAAPGPLGAEGAARGRITLGLVAMLETLNAEVQALEHDMEELFRSHPDQRIFASLPRSGMVRAANLLAEIGDCRERFPSDDALAALAGASPSTRQSGKREQTVFRWACNKKLRAAVMDFANGSRSADPWAADIYKRAIDRGCRHPHAIRVLARAWLRVIWRCWQDSVPFDPALHGARQQLAA

SEQ ID NO: 384927 - protein, 415 aa, unidentified
MNNTISDIDIDLTAVCEAEDDAAQAEAQPAQNESDDTYAQKMQEQLALACSSANCRYIGIDLHSNNIWLSVIVNEQRPSGSVGKVIFSRSIGTQRVDGTLPEDLIKPVIERFCKDQPHIACVEATYNWYWLADLFERNGWNLVLADPSTVSEAKTKAADDRKDAEYLADRLRYNALRYAVIMPKQLREIRDLVRTRGTAVKQRAREKIIVINKLTNLIGREITGKELRELIKEHAEFGTEAPMLLNWGLTEEVRTILDYHLTMATNIDQGIQKLEEHINAVGRNLRYTRELQKMPGCGPVISSILASEIGSIRRFATAANFVSYCRLASTSKLSNGKSKGLGNAKNGNAYLSWAFTELATLMVRYSEAAKRHFEKLMRKYGQLRVKAIRVLAAKLARSVYQCLSKNEPFDVLRCF

SEQ ID NO: 384928 - protein, 309 aa, unidentified
MISYYVGIDVSKATLDVGFWPQISGSFQVSNDPAGIAELVVCLNELEIERIVLEATGGYEKAVFRALRLAELNVVCINPKRAHDYARAMGRLAKTDRIDALMLAKFAQHIESSSQIEPSPERDELTELVKLRDQIVEHRDDDKRRLKQATSPVAITFFTDHIASLNAQIKLVEQHLQNAAQAVDSESAQRLRSVEGVGLITAAKLMAYLPELGTLSGRKITALVGLAPYNNDSGAKSGPRKIEGGRYKVRAALYMAAWVMIRHSPEFKARYEALRSRGKRAKVAVVACMRVLLVRLNAMMRDRTPWEEQ

SEQ ID NO: 384929 - protein, 402 aa, unidentified
MTDSPTRFFGLDIHKEYFVAVGVNQERETVFGPQRVSNYQLDDWAGRVLTTQDAVVLEMSTNTYLFYDVLLSHAHSIIAVHPPNVPQVTHARVKTDKKAAETLAQLLAAGMLTGVWIPPQDVRDLRALIARREKMIRLSTMAKNRLHALEHRNHLILPENPFSSEQRTWWENLSLSTTEKLLMHSDLDTLEFAQKQVEQVEEYLKQKSAQDERIPLLVQLPGVAMLTAVTILAAIGDITRFPTAKKLVGYAGLGTRVHDSGMTHSSGRITKAGRRDLRRAMVNAANHAAEDHPHWKAELERLEPHLGRSKAIVAIARKLLVAVWHVLNGQVVDRFADPQNVARSFISHAYKVGVRNLPKGQSALAFTREQLDRLGLGKNLQEISWGSKLRKLPPSKLLIEKE

SEQ ID NO: 384930 - protein, 325 aa, unidentified
MNALPVLGIDIAKAKFDVELQFKDKPYRRTFCNQAADFAKLNAWLHQLGAPQVHACLEATGVYGDELALFLHAGGHVVSIVNPAQIKAFGQSELSRTKTDKADAALIARFCHEKRPAAWTPPTPEIRELRALVRRLEDLQQMLNQEQNRLSSGLLSESIASSLQASIAFLKAQIKQLLKQIHAHIQQHPDLARQQALISSIDGIAELTAAKLIAEFQDILGYGGGRPLAAQAGLTPRQHESGSSVRGKPRLSKIGHARMRKALYMPAVVAMRHNPIIREFAEHLRQRGKHTMLIIGAVMRKLLHLVYGVLKSGKPFDPHYLKTGA

SEQ ID NO: 384931 - protein, 343 aa, unidentified
MQITTIGLDLAKHWFQIHGVDAKGDVIVRRRLWRSAVIAYFRSLEPCLVGMEACATAHYWARELTALGHTVKLMPPAYVKAYVKRNKNDAADAAAICEAVTRPSMRFVPVKNAEQQSVLMLHRARSLLVRQRTMLVNALRAHMAEFGIVAPQGFRHVGILTKTIARQQEGLPELARSILQTIIDQLNGTMARIREIEGRLAIWHRQSRVSRLLATVPGIGIMGASAIAATVADPSLFRSGREFAAWLGMTPRQNSSGGKERLGRTSKRGDKYIRSLLTAGAVAVLRHARNRPTRDGEWVRALLARKPTKLAAVALANKTARIVWAVMMRGDGYRVKEVFEQPA

SEQ ID NO: 384932 - protein, 411 aa, unidentified
MDKIYDKCCGIDVHKKLIVACFRCGKQQEVREFGATTRELLELADWLKEGGCEMVAMESTASYWKPLYNILESSDLKAMVVNARHMKAVPGRKTDVKDAEWIADLLQHGLLQPSYIPGKDQRELRELVRYRKSLVGERTRELNRLQKMLEGANIKLSGTVSDINGKSARSILEYLLTGKSMDGSKYDEMYEQKIIAHNLKATKEQIVDDLNGVMSPLQRRMMKELLVHLDELNVHIKNLNDEIDNFMKPEEKQASQAIQDVTGIGNTSAQAIISVIGSDMSRFPTDRHISSWAGLCPGDNESAKKRKSGKTRKGNALLRTTLITCAHAAVKNKKSYFYAQYMRISAHRGPKRAYVAVAHSMLISIYHILKDGVMFKDLGADYYNQFNKERKINAYLKKLKTLGWEAPIVAA

SEQ ID NO: 384933 - protein, 317 aa, unidentified
MTAVGIDVAKKTLAVLVLLADGRQRQKHCANSPAGHAELVTWLGRYAPGRVPVGLEATGGYQEAVAIALHDAGYAVSVINPQAIAAYSQSQLRRAKTDPTDAALIAHYVLTQAPARWTPPPPELRQLQALVRRLDALIEMRTQELNRLELAAPVVQASIRETVAHFEQQIAQVKAQIATHIDQHPTLRAQRDLMQSIPGIGELTAAIVLGELQNLQRFSSARQLAAYTGLVPHVRQSGTSLRGRGSLSKLGASRLRKSLYYPALTALRHNPPLMRFGARLRAAGKPNLVIIAAVMRKLIHQIFGVLRSGRPFDPARA

SEQ ID NO: 384934 - protein, 456 aa, unidentified
MRTSQRVDPQVKKILPQQFQHVNLNAAGIDVGSEFHFVAVPPDRDKQSVRKFSAFTGNIITMADWLQKCGVDTVVMESTGVYWIPLFELLESRGMKVLLVDPRRLKHVPGRKTDVVDCQWLQQLHAFGLLSGAFRPEEQVCVLRSYMRQRGMLLQYAAHHIQHMQKALHQMNIKLDKVITDITGVTGMAIINAILAGERDAERLAALRNERCQNTEATIAQALQGNWREEHLFALQQALTLYRTYHEQVAQCDRKIQAHLSTFEDKSGGEPLPLRPKKTKRNRNDPALDSRTLMYQASGVDLTRIDGIDGHTAMKIISEIGLDMTPWRTYKHFTSWMGLCPGNKESAGRKMSGRTKPCANRAATILRIAAQTLHRSKTALGAYYRRMKTRLGASKAITATAHKLARLVYFILKHGWGYVDPGQDWYDKQYQERIMKSLQKRAKDLGFQLVPLIQAI

SEQ ID NO: 384935 - protein, 399 aa, unidentified
MISIGIDVSKGKSTTCILEPYGVVIKKPFIVEHNKDDLTAFVNLIKTHSSESKVILEATGVYHLPILNYLISKDIFVTVVNPLSMSKYINSNIRPGKTDKKDALMIANYGIDNWHKLIPYSEPKFAYDKLRLLSRQYNQYIGMRVKARLTLINLVEQTMPGITTLLENDSTNICKDKLNSFIKKYWHYDNVTKYSGCQFVVNYNLWAKKEGYKASDAKARKIYTLAQNSIPTLSSKDESAKMLVLEAIRVHREINISTGLILGQMVEMAKPLKEYAILTSITGIGENLASRFIAEVGDINKFHSSSALVAYAGIDAPPHQSGQFISKNRRISKRGSKSLRKVGYEIMTSITRQKSVDDPVFLFIKKKEAEGKAKKVAKIAGLNKFFRIYFAKAKEIYEN

SEQ ID NO: 384936 - protein, 444 aa, unidentified
MSMVHPNAAAIDVGATLLMAAVRADRTPEPVRGFGTFTTDLHRLADWFAECGVETVAMESTSVYWIPIFELLDARGFTVCLVNARDAKHVPGRKTDVSDAEWLQRLHSYGLLRASYRPKGEFAQLRAYVRQRERLLEYAASHIQHMQKALTEMNLQLHHVVADITGGTGLRIIRAILSGEHNPKTLAGLRDYRCHASTGTIEKALTGNYRAEHLFALEQALALYEAYHEKVSACDTRIEAVLKELSIGRGHKADSLPSSRRRADQVNALAFDVRSALFALLGKDITRIDGFGPYLSLKLIAECGDNLSAWPSAKHFTSWLGLAPNNKISGGRVLSSRTRRSGGRAAALLRLAAVTVGRTETALGAFYRRLSARIGKAKAVTATARKIAVLFYNAVRHGMEYVDPGASSYETRYRTRVVNNLHRRAKAFGFVLQPLEPKAGAVVS

SEQ ID NO: 384937 - protein, 363 aa, unidentified
MKNYIAKTIYIGMDVHKKTYAVTAICDGLVVKTDTLPAKPSILISYCKKFFPGAKIYSAYEAGFCGFHLHRCLEREGINNIVVDAAGIEIAVSNRVKTDKRDSLKLATHLSLGKLRGIFIPPVEQEDRRAVTRIRDAFIRERTRLACQIKALMYQYGLIGAEDERLVSSKWIKELDALQLLPGLKFALSQYSNLWLHVNAKIKEIDQQIAIQAEQDGPIEMIYRSVPGVGVTSARVLANELGDMSQFKNERQLFSYIGLTPSEHSSGEHIRQGHITRQGKPIIRKILVQVAWKAIKLDNSLKNSYEQLSHRVGGRKAIVGISRKIIGHIRACFRTGELYRIEIIQNAETIKTKIQAEEQKTLI

SEQ ID NO: 384938 - protein, 393 aa, unidentified
MESAVSQPQPNDLSRSLTALDQDGTLIAVIEMSQSSWLVAGTVPGIERQPLKKLAPDEAALFRLLQRWQDEAARSGRTMARVTVAFEAGRDGFWLARWLRSRGIEAHVIHSTSVAISREHRRAKTDRLDTAMLMRVFLGWLRGERGHCRMVAVPTIEEEDARRPNREHESLVGERTRIINRMKSTLARLGIRGFKPELRKAPQHVEGLRTPEDTPIPPNTLDEFRRDLARLAMVREQIGAVEQARLGRLQEAPATDPHAMMRLLASIIGIGIETADMLVQEILCRNLRDRRAVARYAGLTGSPDESGSRRREKGLAKAGNARVRRGLIQLAWRFLMFQKDSALARWFRARTAGPEGARKTTMIVALARKLLIALWRMVMTGEIPEGVVLRQAA

SEQ ID NO: 384939 - protein, 325 aa, unidentified
MNPNTVQIQSASIQFALGCDVSKATVTLFDSSNGRTVTVENTAVALKATLKPYARRIDTLAICEATGGYEDALLGVLEDLAIPAHRADAARVKAFIRACGAKAKTDPIDARHIAEYGLSRAHSLPRWRPSQPHEAKMKLLVLRRSDLVSMRVQEENRLKAPRNKPIAGEIAGHIAEIKRRIEAIDKQIETIVAHNKRMKDRKAILQTVPGIGRVIAPVLLAIMPELGLIDRKQAASLAGCAPHARDSGAHKGRRFATGGRRQLRPLLFTAAMAASQSNSHLATTYRRLLGAGKSKLTALGAIMRHIVVIANARLKEYEKIQTRLT

SEQ ID NO: 384940 - protein, 387 aa, unidentified
MTVCTVNHLPAATHGETARCLFAIELSKQSWVIGFITPLSAKINRRILSGGDWRGLLELIEEMRARVSRETGRAAEVISCYEAGYDGFWLHRQLEAHGIRNYVIDPASLQVDRRVRRVKTDRIDTERLLRSLMAYLRGEPKVWSVVRVPSVAEEDARRLHRERDRLVSERVQHVNRIKGLCALQGIYDYHPLRPQAMARLEQLRTAQGVALPPRLKPEIKRELHRLELVVEMIASLEAERDIIAEDKASTHVNAEKIQALHKLKAIGPEFAAVLVGEIFHRDFNNRRQLASYVGYAPSPFQSGNVAHDQGISKAGNRKGRTTGIELAWLWLRYQPDSDLSVWFRARVGTVKGRIRRIAIVALARKLLVALWRYLETGLVPRGAVLKG

SEQ ID NO: 384941 - protein, 316 aa, unidentified
MENTQPFVGIDVSSKRLDVDTLPVSQPFSEANTDEGIASLTAHLQALNPQKVVVEATGGYEITVAYALYEVGLPVVIANPRTVRHFAKALGRLAKTDKLDAQILALYAQMVQPPVRPLPDREQQELGSLMARRRQLQGMIVMEQNRRRTSTPQVRPNIEQLLAYLRQLLKDLDREIQDVIRRSPLWHEDAEILMSCIGIGPKVSACLIAEMPEMGSLPRTKASALAGLAPMNRDSGRHRGKRMIQGGRPVVRQALYMAALVASKHNPVIRDFYQRLLQAGKPPKLALTACMRKILVILNAMLKNRTYWNPQLALAA

SEQ ID NO: 384942 - protein, 340 aa, unidentified
MEGLYAGSDLHGNSNFLGIIDAQGKRVFKKKMPNELGLIRQMLAPFRGELVGIAVESTYNWYWLVDGLMEEGYRVHLANPSAIQRYSGMKHSDDRHDAFWLAEMLRLGILPEGYIYPKQERPMRDLLRKRGHLMRLRTSLVVSLQNILSRNLGHKVNGNDVKGLGEDRITPLLGESEDLAMAGRISKETIDFLTYQIDQIERRVDKQVRLKGAYRFLQTLPGVGKILALTIMLETGPISRFETVGDYVSYCRKVPSQWMSNGKWKGSGNRKNGNRYLAWAYAEASDFARRYYPEPRAYYQRKRQQTNAVVAHSALAHKLARAAYYVMRDQVPFDPEKLFR

SEQ ID NO: 384943 - protein, 343 aa, unidentified
MKYYAGLDIPLAETAICVVDEDGIIFREGTAPSHPDDIADWLGTMDIKFTRIGLEAGSTASWLYNGLRLRGLNAICIDPRRLRAVTKTMAIKNDRNDARAIASCMRVGWFSIVHVKSDESQEIRMLLNNRRTLQAKQIDIENEIRGTLRVFGIKFAGRITGGPFEARVLDAIESVPRLAAMVKPMLIARAALRQQCAVLQKMLLETVRKDETCRRLMTIPGVGAITAVTYVTTIDDPARFERSRDVGPHLGLTPKKYASGETDRNGGISKSGDAGMRTTLYQASLALLTRSKKPSAIRKWGLSIAKRRGLRRAIVAVSRKLAIVMHRVWADGTEYRWGDATTA

SEQ ID NO: 384944 - protein, 345 aa, unidentified
MKSVATIGLDIAKPVFQVHGVDAAGQVVIRQRLARRRVLAFFEKLAPCLIGIEACSTSHYWARELIARGHEARLMPAQYVKPYVKRGKNDSADAEAICEAVTRPTMRFVAVKTPGQQSGMMLHRVRLMLNRQRTQLSNSIRAHLSEFGIVAPIGRRGIDQLLAIVADESDVRVPPDARLCLQMLAAQLIVVKQQILENDRRVRASARATDLGRRLMEIPGVGPLLASALTATISDPSAFKTGRDLAAWIGLVPKQNSSGGKERLGSISKAGNRYLRQMLVVGAMAVIRYAERHGTKRPWLVQLMQRRTTKVAAVALANKMARMIWALMTSGERYREPVAIKVMAA

SEQ ID NO: 384945 - protein, 410 aa, unidentified
MQPEQLRYVYVGVDLHKRQHTAVILNCWNEKLGELTFDNAPAAFPFVLNAVNQHVKAGMTAVYGLEDTGGYGWAFGLYLFRHNQRVKSINPAFSSAKRKSYATVQKNDSWDAECVARVLRDDMNHLPDFKPDEHYWVMRQLVMRRRGITKSLSAVIRQLHVQLSYVYPSYRSYFSEVDGKTALAFWRTFPSPRHLNNVTASQLAEFLRKYSNNACSTKKAEQILCNVREDGEGNDLYLEEKELIIRSQVRQLRYFKKEIGQFDVGLERMLTQIDCQLNTMTGVDVVTAAELTAEIGDISRFATADKLARYAGIAPIFAGSGGKGRYYKSKQGDRSLHNIFMSLAIRQLVVHRGTKEPRNPAFLEYFHRKMAEGKTKKQAFVCIMRRLVNIVYGILKHKTAYRLPEKTDCG

SEQ ID NO: 384946 - protein, 448 aa, unidentified
MANRKIIMDIINPNSGGIDVGSRSHFVAINQEHKDVKEFGVYAQDLKDLVQWLIENNIKSVAMESTGSYWQNLYTELQNSGIEVVLVNGKFTKNIKGKKTDVLDCMWIQRLHTLGLLSGSFLPDLQTELLRTLCRHRGNLIKTTSKAAKRMSQNMRLMNLRLDVVVKDIVGLTGLKIIKEVCEGQNNPQELAKLRHGNCKKSELEIAKALQTNNRQDFLFVLQQELKQYQYIRSLIVECDIEIKSLLDNFINNDEVKKSLFIDKKTHKRINKNTPKNIDLNLIAYQYYDGIDLYAIEGFSHGTVLTLMSELGEKGIHKFQNPQYFSSWLRLAPNNKISGGKVLNSKTPKGSNRLKIALRLAANSIGNLRDTHLSNFFNRVAYRKGRGIAISATARKLAVILWNMLHEKTQYNPPTTYEYLDQKRKRKVKQLQKQLAILDNKISNLQPA

SEQ ID NO: 384947 - protein, 349 aa, unidentified
MNNIITIGMDLGDKFHMAVVFDNDGNELKIGKVTNTKIGVSKFFKPYKSAQVAIEASTHSPWISRLLNEMGLTVYVGNPRKLRFIWDSIDKSDAKDARMLGMVCRLEPRLLHPIHHRSSQAQADLTTIKSRDMLVKSRTQLINHVRGIVKANGDRLPKCSATSFANRCSPLISNELWSALTPLFEIITQLNQQIKELEKEIEQLSIKRYPETKYLRQVPGVGPITALSYVLYIEDPARFNKSRQVGPFLGLTPRRDQSGDVDKQLSITKAGNKYLRHLLVGCAQYIMGPFAPESSLRLHGLAIAARGGKNAKKRAAVAVARKLAVVLHQLWISGKEYELFYNIQNKEAA

SEQ ID NO: 384948 - protein, 382 aa, unidentified
MVVAKPTVALRRCNMSNHSHYKVGCDAHKYFSLFAVLDRHAKVVQRTRVNHEPGTIQAFLSQLPPGTPVALETVGNWYWIVDEIEAARCVPHLAHAAKAKAMMGYVHKTDKLDADGLGILLHNGTLPSVWIPPGELRDERELPRTRMAFSKIRTKLKNRVHPTLAKYALSLDTDSDIFTAKWRPQLLALLQQLPPETCRCAHQELELLDLVQAHIDRLEARILQRARRTPSIQLIQSIPGPAEILSIVIDRELGSIDRFSCPKHFAGYAGTVPKVKSSAGKTHYGRMIKQCNNYLKWAFIEAANVVVRQRHHPNWRIKYVVHLYERTRQRKGHAVAVGAVARYLAESTYWVLKKGEPYKEPLPRHLAGSKSVVPPRQARTRA

SEQ ID NO: 384949 - protein, 424 aa, unidentified
MKNCNKQNEKIELVDEKTLVIGVDVGSYDEYARAFTCRKQELSKKPLHFHNTAEGFKTFKYWAVNIMKTNGLEKIIVGMEPTSIYWEALATYCKDNGMILVHVNPAAVHKSKELDDNDPSKNDRKDPKVIADLVTDGRYQFPYMPEEEYAQLRELSNLKIRTQESLTQCKNRLARWYSRYFPEFKEAYKNVVSKTAMIIMDMYPLPEDIVTLGVEGILQIWRNKKVRAAGESRAKKLYEAAKNSIGRKEAAVVARLEFQSIKEDLDRYQERLEAIDKEVDEILPKIKNADKLFEIKGVGKATVLTFLSEVGEISRFDNPKEIQKLAGYAIVTNESCKHQGEKRISYRGRKRLRWVLYQTALSVIGKNEEFRQIHQYYTTRKKNPLKGIQSVVAVACKMIRIFYKILTDGVSYDGTKMTQDIVRV

SEQ ID NO: 384950 - protein, 664 aa, unidentified
MSRSCQNRRRAAARTATNQDAGGAVHAAAMPTAGPVPSTTDPKTSRSRAAPGDTPAATPVAIGVGIDTSRYGHHAIFLDADLQPAAPELKFVESAQGYQQLQSRLAALRQKHGPVHFHFRLDVAGSYADNLLAFLHGLPEPRTISCGDPQRNKNYRAAIFGHKKSDATEANATARYALTEKPKPMPVVAPAVQQLCQIASRLESQARHCTRVVNQLHNLLGRTFPELALLVKDLSAGWVLTLLDRYPTAAKLAAARSSSLEKIPYLPHEHIARLREQARTSIAALTGPVTEELVRELVGQLQDAHVRHKALEKLLVSAYRQLPEPNHLDSIIGFGEVTAAILTAKMVTTGRFVEPAKLTGYFGIYPVEASSGIDRDGQSRLPLRMVMSRRGNDLVRRYLWMAALSAAQHNPAVRPLYQRVRAKHPDKPGIAIGHAMRKLLHLALAVWQTGKPFDPEHYPWDQAAHLPGSQQPATAEPVAPSPTHERTGPHAQAAGHKNPVTTPVRSVVTAACVPTSVTEAASAGNDSTRSVASEHPEATACDMPMSQDAQAEATALAWIDFAHLKTQLPLQRVLEHLNLLTDLRGRSSQRKGPCPVHAPSGKSRTFSVNLDKNLFQCFDPHCGSKGDVIDLWAALHKLSLRDAAADLIQTFNLEPASRTEKRHG

SEQ ID NO: 384951 - protein, 316 aa, unidentified
MSSAAVFVGIDVSKDQLDVALRPSAERAAVANNDAGIARLVKRLQAVHPTLIVLEATGGLELPVTSALAAAALPVVVVNPRQVRDFAKATGRLAKTDTLDASILAQFAEAVRPALRPLPDAETQALSALLTRRRQLIEMCTAEKNRLGTAPTPVRKGIRAHITWIEGRLADLDEELAHAIRESPLWRDKDDLLQGTPGVGPVLARTLLASLPELGTLTRQQIAALVGVAPLNRDSGTFRGKRRVWGGRAHVRAALYMSALVATRFNPVIRVFYQRLCAAGKAKKVALTACMRKLLTILNAMLKHQTPWTITFAHGS

SEQ ID NO: 384952 - protein, 349 aa, unidentified
MHYIGIDYHKRYSYVVVKDDKGKTEQRGTVTNTREAFQHFLRPYYSGKAVLEATRNWGLIYDWLEEMLDDVALAHPLKVRAIAEARIKTDKISADILADLLRTDLLPRAYAPSRETRDIKYILRQRMFYVRIQTMVKNRIYNILDRHPEILSKAPDVSDLFGAAGIKWLTQVVLPGDDNDLLASELELLKFLKEKVSQSDITVRELGKKDMRVKLLKSIPGIGPFFSVLILYEIDDVGRFRDERKLCAYAGLVPSTYASGGKVFHGRITKTGSKWLRWAAIEAAQTAVRSNPEFYAYYQHLRIKKGTNAAKVATARRLLTIVYRLLRQERFYEKRTPVKSKALVALVSP

SEQ ID NO: 384953 - protein, 301 aa, unidentified
MDDNHHGIVGGVDTHKDIHFAAVVDTYDRVLASNSFPTTRQGYKSMLNWMQSFGEVKRIGIECTGTYGAGLLRYLQQFDVEILEVTSPDKMDRRRRGKNDTIDAENAAHTAFAGIRTVTPKTRNGMVESLRVLKVCRKTAIAARRIALQMIQMNIISAPESIREPLRALTRMQLIRTLVTWRPDLGGYRNISTAYKIALKSLARRYLELHDEIADLDVMISAIVDELAPDLIAGKAIGYESAAQLLITAGDNPDRLKSEASFAALCGVNPIPASSGKVNRHRLNRGGDRAANSALHIIAIG

SEQ ID NO: 384954 - protein, 455 aa, unidentified
MAKSRVQKRKVVVNALDQINPNAAGIDIGGEEIYVAVPPDRDEESVRCFGVFTEDLERLADWLKACRVDTVAMEATGVYWVPLYEILEKCGIRVFLVNARHLKNVSGRKTDVLDCQWLQQLHTYGLLQASFRPPEQIVAIRSLVRHREMLVQYRSAHVQHMQKALILMNLRLSNVLSDITGVTGMAILRAILAGERDPHKLAEFRDKRCAKSEEEIVKSLQGHYRPEQLFVLKQAVELFDYYAAQIQACDGALETLYCQFDPPENPGTPPPAPRSTARRKNQAHFDLAPALYRMTGVDLTPIDGVDALTIQKVLSEIGTNMSPWPTVKHFTSWLHLCPNNRITGGKVKQTGVQPTKNRATTALRIAATSLKNSDSALGAFFRRIRSRHGTPVAVTATAHKLARVIYFMLKEHKPYHDVGALSYEQAYHQRMVRNLHRQATKLGYRLEPATVMASA

SEQ ID NO: 384955 - protein, 388 aa, unidentified
MQTVADRPEAPTAIRTDLGAIFVSLELSRSTWLITSLSPGGGEKMSKQVVRGGDVAGLLERFARLREKARARTGKVFPFVVIQEAGLDGFWIDRALQNEGIESHVVDPASIATSRRRRRAKTDGIDGEVLVRALLAYKRGEPRVCAMIKAPTPEEEDRRRLCRERKVLIVERVRHVNRVKGLLFSQGISGYEPLRRDRRRRLDTLQTGDGRLLPVHLKAQVCRELDRLELLLEQIKAVEAERDVLLATQQVAAPAPAAMLLDIKGIGPEFAAILWSEGLFRHFDNRRQVASYAGLAPTPWQSGSVDREQGVSKAGNPRLRTTLIQLAWLWLRHQPHSALALWFEERVRRNGGRLKKTTIVALARKLLVALWKYATAGVVIEGAVMKRT

SEQ ID NO: 384956 - protein, 381 aa, unidentified
MMSKADERGLSFNSKFYLMTNLKYSIGIDVAKSEFKACLSIIDQQQKVTIKSTSCFKNSAKGFDDFYSWAIKRVREEIPFHFLMEATGIYYEQLAWYLYNKDCRVSVILPNKAKKYIQGLGLKSKNDKIDARGLSRMCAEQSLSLWKPLSKNIYQLRSLTRLHEDLTLQRGAISNRLEALNHSMYDLKDSKKSLKKLIHTLDLELSSLETKIKQAINTDAGLSSKFKKISRIKGIGMMSFAVVIAETNGFELFTSRAQLTSYAGYDVTENQSGNRNGKTRMSKKGNSHIRRVLHLPAFTAVKYETSFKIFYDRVYLNTHVKMKAYAAVQRKLLCLMYTLWKKDTEYNPTFSPNHSEGGIADPLLGDSVGIKKSQHPKALAL

SEQ ID NO: 384957 - protein, 430 aa, unidentified
MEVIYPKACGVDVHKSFIVAVICDSTSVKPQYLRKRFSTFNNSLIEFRNWLLANDCQNVCMESTGKYYVPVYNALEGHISNVVVANPKWVRCIKGEKDDNKDAKWIADLFKLGIVRSSFIPNKDIRILRELTRYLYKLTNMRTSEKNRFTNALTVGNCKLDMVFSDIFGKSSSAIINTILSQNEYNDEDILKNIDKHCKSSNEDILNSINGISWKTAQKQRMNIIQEHIDYLDKVIKSVREIIDSIIAPYESAINLLCSIPGIDRKSAITIISEIGTDMSQFSSHYRLASWAGLAPGCNESAGKKKSVKISRAGVYLKPALVEVAHCAVKDKSNDYYAKKFNLISKRRGKKRAYIAIARKILVAIYHMLSTGEFFNPTDASKVETSDKDKIKFTKNNFMQSTKQLISLGLTIDELQTLIISKIPESTPVI

SEQ ID NO: 384958 - protein, 323 aa, unidentified
MTYIGIDISKDSFVAAFPKVSGYQTQTYPNTVKGIRKFIGSLSVTEHHCVMEATGNYGSLLLYLLDRQGIAASMVNPKQIKHFSRMMMTVTKTDPKDACMIAMYGEKMNPPVYKMPSETVMLLKQKKTIIRQLKKQLTASKNLKSSLVVLPLQDKNGMKALDKTISFLASQIESLESELADLASSEFDRQVKLLTSIKGIGITLATALIVATGGFSYFNNAKQVSRFIGICPTYQQSGTSVHIKGGINRNGDASLRSLLYVASWSALRGNTTCKECYTRLKANGKPSKVALIAVANKLVRQAFAVIKSDSPYVDGFVSTRQTK

SEQ ID NO: 384959 - protein, 386 aa, unidentified
MLLAMLAPSIARGVIDRSWRRRPTVGPVIPHIMRWTVPALISCEEPPEGERAMAMMTIGLDISKSWFQIHWITADGEIIRKKLAREKVLDFFSRLPSCLVGLEACGSAHHWARELIKLGHRARLMPARYVRAYVKTNKHDAADAEACWEAVQRPGMRFVPVKSAEQQGILMLHRTRDLLTRQRTGAINALRGHLGELGIVTGKGKANARELMALVDVDDRIPQSARRALSILVDQINDLELNIESYEKMILATARDNEVCRRLMKVAGIGPFAATALAASVDHPQHFASARHFAAWLGLVPKQHSTGGKERLGGISKRGDGYIRKLLIHGARAAVHRVRIHQVTNTWITELLGRRPFNVVTVALAHKTARIAWAIMANGEEYRARA

SEQ ID NO: 384960 - protein, 321 aa, unidentified
MNKYKEIYGIDISKDVFDVYGSKSGHNQFKNDAKGFVSFMKHLPKDVLVVMEATGYYHYRLAQFLYKSGISVSVVNPLSVKRFIQMKLAKVKTDKSDAKAISEYGEMNKVPLYTALTDVQSECLQLFRLLDSYIKHRTATKNKLKGEEALDIPSKIVYRSLKRNLKHLNKEVLDLESRLLELVKQDQQAQLTLLKSIPGMGVKTALFLIVVTDGFKKFETASQLCSYVGITPTIRESGSSVRGRSRISKVGNKKLRNLLFLCSFSACKHNKACREIYERLVAKGKSKKLALIAVANKLLKQAFAIAKSGRPCDENFVSRLA

SEQ ID NO: 384961 - protein, 421 aa, unidentified
MKQQAHEEFAAFVGIDWADSKHDVCLQAADSTKRECFILTHTPEAIDAWVRTLRARFNGQPIAICLELTKGPLVSALRKYDFLTLFPINPLTLARYREAFTPSRAKDDPTDAALQLELLLTHRDKLQPLNPQSPAMRVLEQLVEHRRRVVDDRVRITNRLTSTLKNYFPHVLQWFQDKDTTVFCDFLSRWPTLKAAQLARRSTLETFFRDHHVRSTDVIEKRIQAIKTAMPLTTDEGVIAPNILFVQALVSQLRVTLHAIEDFDTAIAQRAQSHPDFPLFQALPGAGPVFAPRLLVAFGEQRERYASAAALQQYAGIAPVTERSGKKSWVHWRLQCPKFLRQTFVEWAAESIQHSFWARVYYQQQRDKGQAHQAAVRALAFKWLRILYRCWQDRTPYDESTYLHALNRRGSSLIQNLANGT

SEQ ID NO: 384962 - protein, 405 aa, unidentified
MQMNSVGIDISKGRSTIAVMRPFGEVVISPFEVRHTGSELSKLARQLKSLDGETRVVMEATGNYHASVAKLLHDAGLYVSVVNAKLVHDYGNNELRRVKTDRKDAVKLANYGLDRWLTLPRYIPEEDTRLLLRNCYRQYRQYSKVQTVLKNNLISLLDTVFPNANRLFSSPIRGDGSEKWVDFVAEFWHCRCVSEKSERAFTSKYLRWCRKHGYNFSEAKAHTIYAEASGHIGVMPKSETTKLLVEQAVAQLRATSTALAALKLEMQTLASQLPEYPVVMDLFGVGPTLGPQLIAEIGDVRRFYSKKALVAYAGLDAPPNDSGDVTGRHKSMSKIGASSLRRTLFLVMSVYLQNAPLDEPVYQFMDRKRAEGKPYRVYMMASANKFLRIYYATVKAYLESLEHTA

SEQ ID NO: 384963 - protein, 398 aa, unidentified
MFYMGIDIGKRHHEVGLIDDQGNPVGKPLRFANSKAGSEKLVEFINHHHLTPDNAIVGLEATGHYWLSVFSFLHQLGFKTTVFNPLQSDALRHFYIRKTKTDVRDAYLIAQVIRIDSPEETPFLEEDLLQLRHLERLRYSFVDQISDLKRKIISLLDQVFPEYEQVFSDLFGKASSEILLHAPLPEDILKMDTEKLAAVLNRVSKGRLGKSRAYDKALQLKERAEHTFGISIGTDVFKMQIQLLLEQILLLEKHVNQMEAAMIDISNRQQHFLTTITGVSDVTASVILGEIGTIDRFERPEQLVAFAGLDASVHQSGDFHSSGTRLSKRGSPYLRRAIWQAAFVASFHDPALSVHYQQLRKRGKAHGTAVGAVARKLTHIIFAILRDNKPYVPRSPHN

SEQ ID NO: 384964 - protein, 331 aa, unidentified
MSNIIGIDVSKASLDCAYLRDADQKKTKRLRCENNVSCFASLIAWAEARSGLPVESLSFVIEPTHVYHESLVQFLHITGATVYLVNPGRVRKFAEGIGILSKNDLVDADLLARYGLLARNLIVYVPVAQEVNDLRSLLNRLDVLERNLRSELNRQEKVGKTMVFHRLEQQSIARAVKRLKTEVITFKRAIRECVKSTQSLQQNFDLLHTIPGVGAKTAWIMMVILGSRAFRSAPEVASFLGLNPIEKRSGKSQYRRPRLSKSGSGNYRQKLYFPAMVATRKNPDIQALYERLLAADKTKMCALGAAMRKLVHICYGVVKNQTPYQAQTIPS

SEQ ID NO: 384965 - protein, 382 aa, unidentified
MNRTCNWSRIIGLDLSKATFKGCILSGEGFTRRENFSGEMKRDESGYMLIRDRIHENDIVLMEAGSSTFNLARYLLKESDAVDVVVLNPANLRIIWDSQKKNDKADAMKIACIARDMRPEAWPRVTVPSEQEQSERSVIMHWVFLRKQETQLLNRFFALFNSLGYPEIDEARLKKESEFREETINNLLAFNELAFTDALMLHDQISLLQSQLAFMEDRLRAICVNHPKEALAWLSVPGVGLVNAATLIAYIGDGSRFSKPDQLLNYAGMVPRQSQSGTVDLKGRITKRGCTAIRRNVVQGAQVVMQLPPTCDLTRFAYRKKKECPFNGKVAVAVANRMLRTGLSLLHHNQLYRPMIENGYDRLTRKLTANKLKALVDHLPSN

SEQ ID NO: 384966 - protein, 355 aa, unidentified
MLYLGIDQHARQITVSLRDENGDVIEARQVSTKPEKIHDFFQRLTAERLKAGEKFVAVLEVCGFNEWLIRMLRDYRCHQVILIQPEQRTKRKTDRRDAAALSELLWVNRKRLLEGKPIRGLRQVEIASTTDQENRRLTTLRKEAGQTRTRIVNRIRQILRRHNLQWDMPTKIFPTLRAIAWLKKLVLPEIDRLDIQYLLADLELIRQRLQELEKAITDRCGASEDARQLLSMPGVADFTATALACRVGNVKRFPRSSSLANYWGLTPGCRNSGEKSQRLGSITKAGSSMARWLLAQVTLNVLRKDARLREWFKRIKRKRGSKIARVAVMRKLATIIWHMLSKRKTYDECRAFKTA

SEQ ID NO: 384967 - protein, 315 aa, unidentified
MTKQVVGIDVGKEKLDVGVNGEKRVREFANDEAGRVAVREWVAEREPELVVVEASGGYEAAIVSELVEHGQAVAVVNPTRVRAFARAEGLLAKTDKIDARLIARFGATMKPKAQARRKQGQLELNQWVTRRRQLVSMLTAEKNRLQTAVPAMQEHISQHIAWLQTNIAALEEQISQAIAADPLWAETAKRVESVPGIGPITAATLLADLPELGQLNRQQIAALVGVAPFNHDSGKRRGKRRIFGGRTSVRSVLYMATLSAIRYNPVIKWFYQHLLAQGKAKKVALTACMRKLLVILNTMVKTGQDWNPPKTSPSI

SEQ ID NO: 384968 - protein, 393 aa, unidentified
MRFAGIDIASETHVLAVVAADGGVALKATPFTEDDLGYQKVLTLLGTPGEVLIAMEATGHYWKNLFVVLAAAGHRVALLNPLRTHRFAGVDLERTKTDAIDALGSARFAAQKHPAATPLPDALTEELRELVHLRARLLQDFGDRVRQLHRLVDLGFPEFTHYVRTLDSELASAILRDYPTAAAFRGVSVRRLAALRYDGRHHVGLDLARLLIDAARRSVGQHHSATYRLQIRYACDDLDTLRHRLRDLDRDLDGKLREHEVGRLLTTIDGIGTHTAARVIAALGDPAHFRSGSALAAYVGTIPALKQSGKRQSVRGAVTPIGNAQLRAALWMPTLCAVRNNPWLRAYYQRLRARGKLPKVALVACMHKLLLAIYSVAKHRRPFVPHIAIESAP

SEQ ID NO: 384969 - protein, 370 aa, unidentified
MKKNNKNRNEDARRKALQARSGNTRLTVGIDLGDEWSHCCYLDGEGEIVEQCRVKTTREALKASFGELKPALIAMEVGTHSRWVSQMLSEMGHEVIVANARELRAITGSDRKSDKVDAEKLARFARVDRRILRPLRHRGEQAQVDLLVIRGRAVLVKTRTQMVNSVRGMVKSFGYRMPKCSTEKFAQLKNLVPVILKESLEPMMEALEQVQKRIEEYDERVKKLATEKYPETKVLRQVWGVGEITTVSFVLTIEDKGRFEKSRDVGPYLGLRPRRSQSSESDPELRITKAGDCFLRSLLVECAQKILSEKAPDTALKQFGMRIEARGKKKAKKRAIVAVARKLAVLLHKLWVTGEVYEPFPGATARKAAA

SEQ ID NO: 384970 - protein, 408 aa, unidentified
MPYQNLRRYIMNSVGIDVSKGKSMVAALRPMGEVTMRPTEYLHTEVELERLAYAILALGEDTRVVMEATGRYHEPVAAALHEYGIYVSVLNPILIHQSGGGSVRKVKSDKKDSIKIAKYGLDNWVDLREYTPVDAVRQQLKLLSRQYNLYMKSAVSLKNNLISLTDKVFPGVNEYFKSPEKANGHQKWIDFVTTFWHCDCITLVSEKAFTERYKKWCKRKGYHFSVEKALDLYACSCGHITTLPKNSNTKLLITTAAKQLTAFNCLLASVKQEMFSLAKQLPEYETVIAMYGVGDISAAQLMAEIGDVRRFPNRNALIGFAGVDPIVDESGKDVSKCHPTTKRGSSHLRKTLFQVISTYVKRSPADEPVYQFIQKKRAEGKPYYVYMTAAANKFLRIYYARVKECLND

SEQ ID NO: 384971 - protein, 341 aa, unidentified
MKNLFIGVDFSKEKVDVAIIFADGLTETAPRVFNEFKTTVSGYKQLVKWVEQNSYGIDSSLWLFCGENTGDYSKGLCNFIYGKGYDMWLENAKSIKDASGLRRLKSDRADASMIAEYAMRNYDKAVMYEPLSESLAQLRELFLYRQMVVRHRCSFQVRRGEKRLTMEKSPVKTMISQSGRHIVSELNKEIEKIDKRIAELIKSDEELTEVFTIVTSVPGIGTQNAVCLMVYTDNFRRFNYDSRKISCYYGIAPFGKDSGTSVHSDPHVHYMANRQIKAMLTQAALAAVNFNPIMARYYMRLVERGKKKQVALNNVKNKLVHLVTAMVRNRQTFTPEYKISA

SEQ ID NO: 384972 - protein, 434 aa, unidentified
MDEVTDEPLYRDRVCGIDIGKVQMVATIRVPSDQNPARRMQETREFGTTRREVLALADWLRCWGVPAVVMEATGDYWKGPFYRLEAEGFECVLADAKQVKHLPGRPKRDPSDSRWLTACFERGAITWCFVAAPEFRIIRLHTRYRRDLTAERTREKQRAEKLLESAAIKISGVVTDLHGVTGRDIMNHLIAGQRDPKALAQLARTRARRKISELEQALDGAEFFTPAHAALLKVMLERIDQIDAGIDRLTGVIEDLLAPWEEQLQQAESMPGWGRRSAQDVLAETGPDMTRFPTGAHLASWAGRTPLDNQSGARNRRSKSKKGNRYLAAITGETAIAAGKTQTREGARYRRLTRRRGKAKAQVALGNTQLKACHALLSNPGMRHEDLGADYYERQRDTRRQIAHHVGKPGALGFEVTLCRIPQPEPGGDATQTA

SEQ ID NO: 384973 - protein, 345 aa, unidentified
MTMLADGVEFVIGVDTHKQAHTAAVVDRLGGVGKTFEFSADPMGYGKVLARVAAHGGARVWAVEGTGSYGAGLTGFLQNAGEQVVEVERPGRPQRRNGAKSDAIDAIRAARQVLASKDLIEPRRGGEREAVRVLLATRNGAVVARTKALNHLQALVVTAPQRLRSRLEGLSTTQLARQASRLRLGADQPIEYQATVRAMRACARRGLACGEEATELEVELRKILADQVPHLLAEPGIGPISAAAIYLAWSHRGRIRNDAAFAALAGVAPIPASSGQTTRHRLNRGGDRQLNRALHTITLSRLACHPETQAYATRRTAEGKTSREIRRCLKRHIARRVYKLLEHTP

SEQ ID NO: 384974 - protein, 364 aa, unidentified
MVTELEEDPMTIVGGLDIHRKQLTFDYVEVETGRLERGRITPADRAHLAGWLARFDGQAPVAFAMEGGTGWRYVAEEMRNAGVEAHLAEPADTSALRGPKRRAKTDKADAQLLRELLAAGRVPECYIPPSAVLEWRALLELYHDLRLEHTGWAQRIHATCFHQGTTPLGEAGVIRGSRARLDGIVDEQLSLVGRLQVNTALSIMDTLAEHLERLRRQLLGTARHVNGARALMAAIYGVGPMTSLALCAWLGGAGRFSSSRKAVRFTGLDITVHSSDSKRSPGQLSRQGPEVLRWLLFEAAKTSARSCAPGYRYYSDVKQRHDANRACLSQARRIVRHAMHILDDLGDDAFTIIAQPASPSTVAR

SEQ ID NO: 384975 - protein, 384 aa, unidentified
MYKHNILFIGLDTHKVFSEVAYIEDQRGAKPVHHGKIKTTKAAITKLARQYQSKYPQATLHFVYEAGPCGYWIYRLLTSLGHCCYVVAPSLIPKKPGEKVKTDKRDALKLAKLLKDEELTPIYVPESEDEAIRDLSRARETAMKDLKDAKYQLKALFLRNNITCKVNDNWSNKHLRWLTELVLPHPSQHIVLQEMIQTITERLAREKRLANELFYQVKNWRFYPVVKALQALRGVKLLIATGVIAELGDLRRFDHPRKLMSYLGLVSKEHSSGDNRRLGSITKCGNGRARRLLVQGAHTYKHKANISTELQKRQESLPKEITDIAWQAQLRLCRRYNRLMSRGKHRNVVVIAIAREMAGYLWAIAHEVVISPVNSRLRVSRVPA

SEQ ID NO: 384976 - protein, 350 aa, unidentified
MPATIGCDAHKQFSVFVTIDGKGKTSPAVRVEHHRQEYIDFLHSLPPASEIALEATGHWYWMVDEMEKAGHRPHLANPLEAKRRMGKTNKTDALDAKGLAILLHNGTLPESWIPPGELRDRRELLRTRMALRDLRSSLKHRIHAAIDRYGLQATGISDLFGVKGRVYIDAVLDRLPCDTAAMIQVQLTSLDQLEAQIEEIEERIAVALKPSPEVKLLRTVPGIGEILAPLVWLEIGDVSRFPRAENLASYAGLVPRIIASGGRIRHGGTCRNVNQYLKWGFVEAATCSLRIKAYRGTHIERLYQRLAPGKGHGRAVVAVARHLAEASFWVLRKRQPYKDPAPRPASNDAA

SEQ ID NO: 384977 - protein, 348 aa, unidentified
MRFYTKTHKHYCGIDLHAKKMFVCILDADGAVVLHRNIATSPEDFLKVIAPFREDLLVGVECMFAWYWLADLCSREDIEFVLGHALYMKAVHGGKVKNDKIDSHKIAGLLRGGMFPMAYVYPPEMRATRDLLRRRCFMVRRRADLLGHVHSTAIQYNLPEIGGRISKESNRNGIDELFPDPEVRKIVQLDLAMIDAYDNVVGVLERKLETTARRHDWHTLLLLRSIHGIGRILALVLLYEIHDINRFESVQDFASYCRLVKCSHESAGKKKGTGGAKIGNAYLKWAFSEAAVSFLRHNAPGKLLVEKLAKKHGKGKALSILAHKLARAIYYMLKNSTPFNLEKFIATA

SEQ ID NO: 384978 - protein, 348 aa, unidentified
MRGAVHMQISTIGLDIAKNVFQVHGISSSEEVVVRKQLRRSQVLAFFKALPPCLVGIEACATAHYWARELTKLGHRVRLMPAKDVKAYVKRNKNDAADAEAICEAVRRPTMRFVQVKSVEQQGQLMLHRTRDLLMRQRTQVINALRAHMAELGIVAAQGREGIKELLKIIASEEDARLPVDAHTSLVVLAAQLQALQTMIRSIEKRIVVQHRSNEASKRLETIPGIGVIGATAIAATVPDPKGFRSGRDLAAWIGLVPREGSTGGKQKLGPISKQGDQYLRRILVVGAHAVLKRARQQPEKYPWLTGLLARKPFRVVAVALANKMARIAWALLTKGGIYRAPALAAAA

SEQ ID NO: 384979 - protein, 351 aa, unidentified
MEAEKRRFVGIDLGKREYTMAIIDKQKKMKTHQGKTSEQGRQALYRLLSRSDKVALEAGNLAFIMAREIQERVGSEVRVLNSAKLPFIWDTPTKTDKEDAMKLAHLIEERRDEKLPIVPLPDEKELERRKVLANYRREQQGRTKNINLLHAMFVHQGHTTVVRRHLATAERRQEVIELLTGQVREEAEWILRHLELYEERIKELKGTIQAEAKTDKDMQILQTVVGVGPIVAYAFAAHVGDGSRFRTGAQVSNYLGFVPRLDYSGTIMRQGHITKRGNGYLRGLLVQAVWSAVRSRFGGAIRERYLYKTAVKGLSKKKMVVAEARRLTEVMYTILKNKSEYEVRPWTGAGA

SEQ ID NO: 384980 - protein, 358 aa, unidentified
MGDGSKEPQRITAGLDLGDKYSHLCLLNTRSGEIIEESRLRSTSEAFRRRFDSERPMRIAIEAGTHSPWVSRLLEECGHEVLVANARKIRLIYGQGRKNDQLDAQNLARLARLDPKLLAPLKHRGETSQAHLAIVRSREALIEARAKLINHLRGTVKSFGSRLPRCSSPTFHKKVGAHVPEPLKPALEPLLKTIASMTERIQEYDRELEVLAEEYYPETKLLKRVHGIGTLTALTFVLTLEDPSRFGTSRAVGAYLGLVPGKDQSGERDPQKRISKQGNGLLRRLLVGSAQRILGPFGEDCDLRRHGLKICERGGKDAKKRAAVAVARKLSVLLHRLWVSGEVYEPLYNAKRSEGQAA

SEQ ID NO: 384981 - protein, 370 aa, unidentified
MKEFSKYVGLDVHKDTIAVAVADADGGEARYVGEIAHTPEAITKLRRQLKKGGGQISWCYEAGPCGYGVYRQLSAGGEACQVVAPSLIPKKAGDRVKTDRRDALSLARLHRAGELTAVWVPDQAQEALRDLTRAREDMKHLQQQARQRLSAFLLRHGRRFTGKSKWTQMHFRWLETVKFEQPVQQIVLQEYIDAVHGCGKRVRGLDEQLERVARESMFWPVIEALMALRGVNLLSATTIVAEIGDLHRFASAPQLMAYLGLVPSEHSSGPKQVRGGITKTGNGHVRRLLVEAAWTYRHPARKSAPLQRRAERTSEAVQDIAWKAQKRLCQRYRHLTARGKQSVQASTAVARELAGFIWAIGQAMPRPAAA

SEQ ID NO: 384982 - protein, 453 aa, unidentified
MKKLSMEIVNPNAAGIDIGSRFHMVAVNQNVDDVKEFGVYTEDHEAMITWLKENSITTIAMESTGSYWQTLFSALQSAGFEVILVNGQHTKNLKGKKTDVQDCMWIQKLHCLGLLNGSFLPGKYVEQLRTYYNHRQHLIEHCSKYINKMQKSLRLMNIRLDVVINDITGKSGRAILNAILSGEREPMVLASFANVWVKKSKEEIAKSLHGNWREDLLFELQECLSLYDIYCGKLAFCDEEFDKVLQSVKSIDMRLPIAIPSGRVVRDRSKHAPVFNVRKLAYMHLGVDLFDIKGVSHNTVLCIMSNMSREEMKKFPTVKNFTSWLRLAPNNKKTGGKIISSRTPKGKNQIALALRQASNSIGNQKDHPLTHFFKRVAYKKGRVAAVTATARKLAVIIYHMITKQQAYEPINSEQVIARIKKQQINNIKQRLNSLNLLPDEFNDIIKSVSLSAN

SEQ ID NO: 384983 - protein, 388 aa, unidentified
MQVAADRTDASTAIQTDLPAIFVSLELSRSTWLITSLSPGAGEKMSKHSIRAGDVAGLLVRLAQLKEKARGRTGRDFPIIAIQEAGLDGFWIHRVLQSEGIESHVVDAASILTSRRRRRAKTDGIDGETLVRTLLAYKRGEPRVCAMVKAPTPEEEDRRRICRERKTLVGERVEHVNRIKGLLFAQGVSDYEPLKRNRRARLEELKTGDGRPLPAHLKAQISRELDRLELVLPQLKAVEAERDALLKPVSEGCPTPAAMLAQLKGMGPEFTAILWSEGLFRSFSNRRQLAAYAGLAPTPWQSGSVAHEQGVSKAGNPRLRTTMIQLAWLWLRHQPTSALSVWFQERVQSNGGKMRKTTIVALARKLLVALWKYSTSGVVIEGAVMKAI

SEQ ID NO: 384984 - protein, 341 aa, unidentified
MNISMIGLDIAKSAFQVHGVDASGCAVLRRKLRRGQMKPFFAKLAPCVVGLEACGTAHYWARELRALGHEVRLVPPAYVKGYVKRGKNDAVDAAAICEAASRPSMHFVPVKSAGQQAALTPHRVREMLVKQRTMLINTLRSQLAEFGIVAPRGREGVGGLIALLHDPEEDRLPELARETLLEIAGAIEALAPRLRRIEKAILAWVRNIPLARLLMTIPGVGPITAAAFLAAVGDPAAFRNGRHFSAWLGLVAKQHSTAGKSRLGRISKMGDRYLRKLLVLGATSRLKVVKTGTTPLDAWTRRLLEHKDKRLVTVAVANKTARILWAVMTSGQPYQPERAAA

SEQ ID NO: 384985 - protein, 391 aa, unidentified
MVCVGIDVAKDKHDCCILDSDGIVRADCFTIPNNMDGFKQLLQTIRNCTKKSDKIKVGLEATGHYSYNILGFLLDNDLAVYVMNPLHTNLYRKSLSLRKTKTDRVDARTIATMLLSDVDLKSYTDTAYHNEELKSLTRYRFDKVRERAKLKQSVSRLVTILFPELEKLVPSLHGVSVYALLSEYPDAKQISEAHLTKLTNLLSIASKGHYGKEKAIQIREAAKSSIGSVMPAKSLELKHTIKLIKELTSEIGEIEDSIQQIMDELHPPILSIPGVGIQSAAMILAEIGDFSNFESPDKILAYAGCSPSTYQSGKLTNCYAHMEKRGSRYLRYALYNATKYVCHWNPVFAKYLAKKRAEGKHYNVALSHATKKLVRLIYALQKSGKAYLTAA

SEQ ID NO: 384986 - protein, 320 aa, unidentified
MMAQNSRVVVGIDVAKDKVDGCIRPLSQRQTFPSGAEGRRKLIAWLRKHKVDRAVMEASGGYERDWAKALREACFEVRIVDPKRVRNFARSAGRLAKNDVIDAEMIAWFAETFDEAQSQTHDAAREELAALVKARKAVIDLKTRLQSQNEHAVPGAVQKAHARVLKGLDAEITKLEDAIVVTVKATPAFAARAEIIESVPGLAETASAVLIAGLPELGTVREEIAAALLGAAPYDDDSGKRRGERHIKGGRRWVRNALYMPCLGAATQNNPVLKAFYQRLIARGKEPKVALIACMRKLIVILNTMIARGEKWDPGRYALR

SEQ ID NO: 384987 - protein, 458 aa, unidentified
MGQKRSIEKDRRAMPMVHPNAAAIDVGATMHMAAVGADRTSEPVRSFGTFTADLCRLAEWFAACGVVTVVMESTGVYWIPIFEILDERGFEVFLVNARDAKHVPGRKTDVSDAQWLQRLHSYGLVRASFQPKGEIAELRAYLRQRERLLDYAASHIQHMQKALTQMNLQLHHVVSDITGATGMRIIRAIIAGERNPAALAMMRDSRCHSSIETIEKALTGHYRAEHLFALEQALGLYDAYQEKATACDGKIEVVLKALSTRRGIDAGPAPGSRRSTGRQANGPNFDVRGALYAMLGKDLTQIHGLGPYLALKLIAECGDDLSAWPSAKHFSSWLCLAPSNKISGGKVLSSRTRRSGSRAAALLRLAAVAVGRTESALGAFYRRLSSRIGKAKAVTATARKIAVLFYNALRHGVDYVDPGASYYETRYRERVVHNLHRRAKAFGFILQADTSASEPAVS

SEQ ID NO: 384988 - protein, 359 aa, unidentified
MQRKELSFSGQKIFIGIDVHKDSWRVAIAPEVGLVKGHSQKPSAKELLDFLKKHYPDGEYHAVYESGFSGFSTYYALQEAGIDCIVIHAADVPTTQYEETMKTDKVDAAKLVRSLKAGLLTGIYIHRRDDIDARAVVRLRKTIQKQLGGYKARVKHLLHCNGVVLPERFCTPSSYWSKAFIKWLKEEVTLLSATRSSLDLLILQVESIRRTLLEATRAVRELSRSERYNSGYRLLTSIPGIGPCVAMSLLTEIGDFSRFRNEREFASYLGLVPTSHSSGGKVAHGEKTFRGNRKLGPQIVEASWISIYRDRGLGSAYMNYKKRMKPQEAIVRVARKLSNIIFSVVKTGKEYEPYQWNEK

SEQ ID NO: 384989 - protein, 317 aa, unidentified
MSEVITIGVDLAKNIFQVHGIDAEGTVIFCRQLRRTQMLPFFKKQPPCLVGMEACATAHHWARQLMELGHQVKLMPPHYVKPYVKRNKNDMADAEAICESVTRPTMRFVSVKSMEQQSVLMLHRTRNLLVRQRTMLINAIRAHMAEFGIVAPGGVPQVNKLLSIIADTDDARLPLIARTCLESLARQFLSLHEEIHAAEKHIHAWHRSNEASRRLETIPGIGPIIASAMAASITDPEVFKNGRELAAWIGLVPRQNSTGGKQRLGKISKQGDQYLRWLLVAGAMSVIQHAKRRGSTNIPWLADIIARKPTNAARQSR

SEQ ID NO: 384990 - protein, 391 aa, unidentified
MILVGIDVAKDKHDCYIMTSEGEVLFKSFTIANSMEGFNQLYEKILSVTDNLDKVKIGLEATGHYSYNILGYLLDKGLTPFVINPLHTNLYRKSLSLRKTKTDKVDSRTIASMLMSDVSLKPYSDTLYHNEELKSLTRYRFDKVQQRAKLKTSISRLVTILFPELEKLVPTLHMKSIYSLLYEFPSAKAISKAHLTRLTNLLYASSKGHYGKEKAVSIREAAINSIGSYMSVKSLELKHTIKLLEELTLEIDEIEKEIKSIIDKLNSPILTIPGIGYSLGAQIIAEIGDFKNFDSPDKILAFAGMSPSTYQSGKLYSSNAKMEKRGSKYLRSAFFTAAVCVCRIEPTFALYLAKKRAEGKHYYVAISHVVKKLVRLIFHLEKTGEHYVALT

SEQ ID NO: 384991 - protein, 318 aa, unidentified
MEGNVFVGLDVGKTHVDYHLRPTNESGKVRRNEAGLRQLVELLCRAPVEVIVVEPTAGYEQPVLQALFGASLPVKLVPPDRGRHFARSVGRQAKTDPIDAAVLAHMAEVAVEAVRWWVPPPPQEAKLRGLVHRRLTLVRMQEAERKRKNTEPDADVQKSLDRIARSLKVERVRVERKIDSLLQNQAELKQRVAVLEEVPGVGTLTAVTLLTEVPELGTLSRRQVSALVGVAPYNRDSGAKSGRRSIRGGRQLARNSLYMAALVGLRHNPVLKSYYAHLKSRGKHGLVAMVACMRKLIIHLNALLRRTENPALTPAGAT

SEQ ID NO: 384992 - protein, 468 aa, unidentified
MDARKKKRQRRMSAQVVEDEDYQLRYEVVAGIDVAKESAVVCVRMPPAEGRKHRTSHLQAVPATVPAITQLAAELRAAEVQMVSMEATSDYWRIWFAVLEEAGLAVQLVNSSQARNLPGRPKTDKEDARWIARLTEMGMLRSSFVPPPEIRALRVYTRHICDLTADRTRYWQRLEKLLEDALCKLSAVVSKLSGHQTARAVIEAMIAGERDPRALAALGRGKMRNDRLPVLAEALSGMRFGPEHAHAAASLLRAIDLLDAELRDLEERVTAHLAAIPGSWGVDADGVTGPQAGRAGDAAVLPAADRLDEIPGLGREAAAALIAEIGLDMSRFPAPEALVSWAGLTPAARQSGPRTGRGKKGRGNIYAKRICVLAAYAAANTDTFLGERFRRLASRPGGGGRKKAGCAVGRSVLVIVWHLLNDPAARYRDLGPDWHARHTDRSRKARNAQRQLEALGYDVIITLREDAA

SEQ ID NO: 384993 - protein, 342 aa, unidentified
MEIAVLGIDLGKNSCSVVGLDGTGHVVMRRRMQRDSVIKFASGIAPCVVAMEACCGAHHLGRLLRDHGHQVRLMSPEYVRPYVKAQKNDDRDAEAIAEAATRPTMRFVELKNAEQLDMQSLHRVRDRLVGERTALMNQLRAVLMERGITVPQGRRKLEQHLAVILDGKDLRLSPRVRSLVEDMRAEWGGLDHRIEAFDDEFAAQAKTDDAARRLASIPGIGVLNATALAAAVGNAASFARGRDLAAWLGLVPRQMTTGGKPRLMGISKRGNKYLRKLLVHGARAALPSLSASTTPLGKWLKRLLERAHKNTVIVALANKLARIVWAVLRHGGTYDAAALTAA

SEQ ID NO: 384994 - protein, 386 aa, unidentified
MAHSTNILPRSVDYDQTLVLAIELSNKSWVLAAQVPGLSQTKAKRTIDPDKNDLLAAIDGYRTRAAAAGRSVKRVITSYEAGWCGFWLARWLMAHGIEVHVVQPSSVPVDRRMRRGKSDGIDAELLLRTLLAWLRGEPRVCSMVPIPDEADEDARRCVRERSELVSERVGLVNRIGAILATLGADDYNPLLQSRRRRLTELRTGLGDPIPPNALAKIGRLLTRLELVLAQTAELELERDAVARTDAPDQAGKMIQQLISLRGIGVQSATVLVREAFVRRFANGKALGSYAGLTSTPYSSGGIDREQGIGKAGNRRLRTVMVELAWLWQRYQPGTAQVAWFRERVGSTGRRVRKVMVVALARKLLIALWRFVIDGVMPEGAVTKPSI

SEQ ID NO: 384995 - protein, 392 aa, unidentified
MTYFIGIDLAKYKHDCFIMDENGEVIRDSFSFNNDKEGFNTLLNVLNSLDSNQEKRIGFESTGHYGSNLKIFLERNGYSFMEFNPLLVHRHFKSETLRRTKTDKVDARKISSYLYTREYKPNPNSSYHLNCLKSLTRTREALIKERTRHIIHMTNVLDKMFPEFKPQFNNQGLNTSSAMYLLENYGSPSKMSNMTRASYDKMKSELRHTISYAKFLKIKELAKNTIGNEDEILVFELNTYLELFKELDKKILEVEDKITKEFSIMKCHMTSIKGIGIITAAGILAEIESIDRFDNPGQLCAFAGIEPSENQSGTHDGGGKMVKHGSPHLRNYLMQGAGYMLIHNPVLYEYYLKKRNEGKCHTVALSHVAKRLTRIIFYLEKNDTDFNIDKMR

SEQ ID NO: 384996 - protein, 416 aa, unidentified
MDAIVERCAGLDVHLDTVVACVSYGKLDIKPKKEVKTFSTTTKGLLELLDFINQKECTHVAMESTGIYWKPVWSILESGAFDLIVANAKKIKNVPGRKTDVKDAEWIASLLRCGLIEKSFVPPERIRDLRDLTRLRKELLGEVNRNKNRIHKVLQDANIKISSVLSDVFGETGKSILNQIIGNQCITEEFIYSLYEGRGKSKLKSTPMEMYEALNGKIRGHHVILLGMHNSNIVFLEKQINELEKEIDILLQKERDSLELLETIPGISKISASSIIAEIGTSMDVFKTEKHISSWAGLCPKNNESAGKKKRSGIKSWNNWLRSMLCECAWSATKKKDSRFKNKYWSMVPRMGRKKALIAIANMMLRLIYHLLKTKSTYKELEIQYFIDKDKRREDRIIKELKSKGYLVEKDSLQMA

SEQ ID NO: 384997 - protein, 424 aa, unidentified
MNLTQNSRLNQVTAETLVVGVDIGSQDHFARAFDWRGFEFTKRAFRFSNTGIGFLSFIRWLYELQNKTDMKKVIVGCEPTGCYWLTFQKFLRDHNIQLVTVNPHSVKKCKELDDNSPEKSDLKDPKTIAGLVREGRFSTSYLPSGVYAEIREASVCRDMIMKQHVRLANQIQGWLQKYFPEYLDCYKDWDSTSGLMLLKNAPLPQDIIKLGAGGINQIWRDAKVRAAGMKRAKTLVEAAQESVGLEGGEAARLEMWILVNDYISKAEQLARLDKYLNEKVMEVPNVEKLLAIKGVGLSTVIGFVAEVGDIGRFTDPRQVQKLAGLEITKISSGKRKGQPGISKRGRRKLRRTMYESARSLINWNPAFLDVFLYYRNRERRPLGSMQAKIAVACKAIRVFFVIMRTGCDFDEERFRKDILRPEVA

SEQ ID NO: 384998 - protein, 427 aa, unidentified
MFFEILQCVCGVDVHKEFLQVCILRRDEDPDIFRVFNNFSGVQDLKQRVEEEGCECIACESTGVYWYRLYLSFEGQIRVIVGNAYQIKSIPGRKTDVRDSQWIAELAMNGLINPSRVFPKKDRELRELTRTRESTVHTRTQIKNRIHRTLDSAGIALGKGVNDIFGKSGTHLLWGLLNRGSIEDVITTIPSARVKKKVNTLREILSGSLSDLQIMLIKKNLDLMAHINEHIRALDEQIIARIGDQERIRDVDIACSIPGVSVTTAVTTLAEIGDYHDFVNPEKLASWAGLVPSVYQSAGKNCSGKITKHGSEHLRWILVQAAKSAGRTVNTTFRKFFNRITYRKGANTATVALARKILCILWHLLMKNELYVDPLKSAKLTKPRPVQKFSKNSPSDIQKAIDFILDAGFKVIYPDTTLDQNFRRLSR

SEQ ID NO: 384999 - protein, 346 aa, unidentified
MDYVALDVHKHYSWARVENDQGQKIFECKLAHSRGTIKNFTSKWSPATPVAVETVGNWYWVVDEIEAGQGLPQLVNARLAKLMIGSVNKSDKLDAKGMNRLQRAGTLPTVWIAPSAVRDARELPRTRMVLSKQRTQFKNRIHATLEKYGLKVEGVSDAFGKKGRQIIEALSAKLPPHTQQALGLMLDELDHVGANLKTIEGQMQQAFAPCAETTYLQSELGVGEMLAVVIWTEIGTIERFGRAEQLASYAGLVPRENSSGGKVRYGRVRKDVNLYLKWAFVEAANSAVLNRQRCEYRHVARLYENVKARRGHGKAIVAVARHLAEASFWMLKKGENYREPMSSTQG

SEQ ID NO: 385000 - protein, 337 aa, unidentified
MDYFAGLDISMDETHICVRDREGEVVYESKTASTAQAIADELTKAPSCRRIVFETGRMAPILFHGLRELGFPVVCVESRQAYQALKSLATHKTDRNDARGLAHLARTGFFKPVHVKSLPAHALRSLIIARKKLVGQRVTLENQIRGLAVVFGIRLPRALTAGFVDQALKASEGVAGLSAAMRGLIAARTAVMTAVAAIDADMRRMTRASGACSRLMTIPGVGQLTALAFMAAIDDPSRIRRSRDIGAYLGLVPRRYQSGEVDYVGSISKCGDRRLRTLLYEAANVMLTRYKGQLKLKDWAFAIAKRSTMRKARVALARRLAIIMHAMLRNGTEFMPA

SEQ ID NO: 385001 - protein, 392 aa, unidentified
MERIFVGIDVSKHSFTACGLDRAANKLFSFSASMDNRGLSKLLSALNPYPKEAILIAMESSGFYHIPLFASLSARNFKTLLLNPLLISNYAKLSLRKTKTDKKDAFTIASFLLNYHKPLYKELPPYHSQQLKELTRERENISSQIAKLKNDIEKLLAVTFPELTQHINPFSKSILNLLCSYPSAHAIKNCPLETINSFLNPPKGRKPLVSAQKILSLAKNSIAPQNKAKEFILSQKISTLIFFSEKLNDIDTIIYELAQSLIADELKILTSIKGIGKITAIQFLAEIGSISYFENPKKLIAFMGIDPTVYESGQFKGKSKLSKRGNKHLRRVIWLMAHKVVRFNPLFKNYFQKRLSQGLPFKKAIFAVAHKLVRVLYALLTKKMVFNPTHYL

SEQ ID NO: 385002 - protein, 317 aa, unidentified
MSKHTTVSAGIDTGKCKLDIALDRCPERLQVDNTDDGHAVLWGWLRQHRVNRVGIEASGGYEQAVVSALRRKGFLVIMFQPAQVRAYAKYRLQLAKNDKIDAALIAACTAEAKKIHPPPDPRLAPFAELLTVIEQLTEDIARLKTRRATSRDEQTRRFWNEEIARLKRLQSQKLKQLVAAIREHRDLADRLELIVSVDGVGLRTAVAILVRMPEIGRITREQAAALVGVAPYDADSGSHVGLRHIEGGRERLRKSLYTAALPAAFNWNPELVAIYKRLTNAGKPHKLALVACARKMIIFVNTVVARGTPWVPREVLT

SEQ ID NO: 385003 - protein, 391 aa, unidentified
MLNDAPRPAQAAIRTDLGAIFVSMELSRRTWLITSLSPGAGEKMSNHSVPASDVAGLLHRFAELKRKATARSGRDFPIIVIQEAGLDGFWIHRLLQSEGIESHVVDPASILTSRRARRAKTDRIDGETLVRTLMAFKRGEPRVCSMARAPTPQQEDRRRVCRERRILVGERVRHVNRIRGLLFAQGVFGYEPLRKHRRERLEELRTGDGRPLPVHLKAQIIRELDRLELVLAQLKTVAAERDTLLKTASDEMPSPPAMLVQLKGIGPETAAVLWSEGLFRRFDNRRQVAAYAGLAPTPWQSGSIDHEQGVSKAGNTRLRTTMVELAWLWLHNQPTSALSLWFHERVQRLGGRMRKTIIVALARKLLVALWRYMTAGVVIEGAVMKPASATI

SEQ ID NO: 385004 - protein, 320 aa, unidentified
MKLPQRCLDVGVDVAKDEIVVACAEQSFAPCKIANTRAALLAWLKRLPTGSRIGMESTGTYHELLAGLAHKLGFIVYVLNPKDVRHYAKGVGQRGKTDRVDATVVARFVAKEHPALHPFVPPTREQRQLDQLLKRRTKLTRMRAALKQSLKDLSGFASQLKSVVLRLDALIKHIDGKIRTLIEASAQTQDDWARLRRIPGVGPLVGSGVLNSLQRVGFRNADAFVAFCGWDPRPHDSGRKSGRRRLSKRGSSQLRYLLYNAAMAASRTKAWRPSYERALAKGLSRVEALVILARQIARTAWSIYTHKTVFDPQRISQGLT

SEQ ID NO: 385005 - protein, 395 aa, unidentified
MRAIIGVGIDCGKNQHTVCISDNFGKQYGNTFVIHNFQKDIEYLIEKIFKVESEIGKSDIVINLESTGVYHLPLYSGLSKIFQTNIYQPKQIKDRSSKNIRKSKTDKKDAKTLSRIHLEITPPHTNYDDKEMYDIREIIRQRFCYKDIRTNLKKKFRRNLSIVFPNFDSLFKNPYTNVAWNLLKTCPTPEDVIRLGRDEISEIMKKAAKGQNLKVKPEDLIKLAEETIQCDISNRGSLFGLKTLMEDVEYFDKRIEQIDQEIKIYWDKVRRNLYFPTHPGIDMVKAAALHTEFGGFDRFSKPDKAVAFAGIENFVYISGDSKKFNGSMTKAGSPIIRRVFWEILSSPTIKMPKITDHMNKLKEKGKHNSIRIHSASKKLIRILWAMESHKQSYIW

SEQ ID NO: 385006 - protein, 366 aa, unidentified
MGRIAGISAIVATVTRIGLDLAKNIFQVHGVDARGEVVLERKLRRDRVIEFFGRLSPCVVAMEACGSAHYWGRELATLGHEVKLIPPAHVKPYVRRNKTDAADAAAICEAAMRPGQRFVAVRSQDNQAETMRHRVREQLTTQRTALLNALRSHLSEIGVIAPQGAQHAYRLKAMLSDGADENGEIRVSDTVRAALSPLALQIDALDKAIDAIDEELLAAAKADAKARQLMTIPGIGPVIATAILATVRDVEAFASGREFAAFLGLTPRQCSTGGKERLGGVSKMGDRYLRKLLVVGATSALHHAQGHNDALRCWIKTMLKRKAGLKYAYKLTAVALANKLARIAFAILRSGESYDDRPVAAQAQPA

SEQ ID NO: 385007 - protein, 350 aa, unidentified
MIVLGADTHKRSHTIAAVAAGTGELRGEKTVAVGARGFADLLLWARGLGGERVWALEDCRHVAGSFERFLIGRGERVVRVPTKLMADARRGARDRGKSDRIDAIAVARAALREGLGALPCARLDGPELDVRLLVDHRDRLVGQRVALNNTLQWHLHDLWPELTLPGGALFSVKWSTRIARRLARAEQTMRVRIARDELRRLRELSHAIKVLEGEIAELVGQLAPQLLSEPGFGPLTAAKLVGEIAGAARFASDAKLARAAGLAPIPVSSGKTSRHRLDRGGNRQINAAVHRIAVTRARCHPETRDYIARKRAEGKTTRDAIRCLKRHLARRIWHLLQPPTPSEIPINLLT

SEQ ID NO: 385008 - protein, 388 aa, unidentified
MPRYIGLDVHKRYVHACEFRPDRPEGQQERHFRFPNTPEAWTALVAELDREAVVALEVTGNAFEIYDTLAPHAGKVLVANAVELKRLGSGRHTDRVDAARLAKMAALGIVPTVWVPPQPLRQVRRLLKTRERLDSQRRALLNQARAALSRHGIAVPRGADPAVLLERMEGVPLPPGERLAVQVTLEAAQVLEAQVEVLTAEIARQVAEVPEVRLLLTVTGVGLLTAATVWAKLGDPGRFRGPKQVARYAGLDPSVDQSGERDRRGRISRHGDRLLRRALVEAAWSVARHDQGELGRFYRRLAAKKGTKKALVALARKLLIVAWRMLQTGEPYRAQKPATVQRKLVGLQRLVRRRPADGEVIRRAMLRSWAEAVQGTALRSGEKLQRAS

SEQ ID NO: 385009 - protein, 309 aa, unidentified
MDSLIVGIDVSKDRLDVHVLPSGEAFAVARDAEGLAALVARLHAAPVTLVGLEATGGFETVVAATLAAAALPVVVNPASIRAYAQALGQRAKTDALDAAVIARFLEAARPAVRPLPDAQTQLLADLTARRRQIIQMLVAERQREKRTTHARLKRSIGRLVAALEKELAELDRDIDEAVRGSPAWRAKEELLTSVPGVGPTTARTLLAELPELGQLDRRQIAALAGLAPWTRRSGQWRGQSFIGGGRSAVRASLFMAAMVAARHNPVLRAFRQRLIDAGKPKLVALIAVARKLLTILNAIVRDDKPWRTA

SEQ ID NO: 385010 - protein, 426 aa, unidentified
MNYTQNSKIAQVTERTLVIGVDIGSETNYARAFNWRGQELSKKVFRFSNSQEGFQSFSDYLRNNQVIASAEQIIVGCEPTGHYWFTLAKYLKTQHINLALVNPYHVKQIKELDDNSPKKTDQKDPKTIAKLVVDGRYSYPYLPEGIYADLREAVSSRDRIVKELNAATNRIKRWLKIYFPEYLTVYKSFSAESGLAVLEMAPLPKDVVMLGAEGVNRLWREKKLRAVGMKRAQTLVEAAHNSIGLVGGECARMELQLLLEDYRAKEVQLEKVTAVLETETLKVPYAEKLLSIKGVGLITVAGFLSEVGDVRRFDSPKQIQKLAGLELKENSSGKHRGRSSISKRGRKRLRKILFQVMLPMIKNNAEFREVYEYFTTRQKNPLKGKQAIVAAGCKLIRVFYAILKRGVDYNPQKLRTDIIRPELVAA

SEQ ID NO: 385011 - protein, 290 aa, unidentified
MDRVTTLGIDLAKSIFQLHGVDAEGRAVLRRQLRRSQMLEFFQRLPSCLIGIEACASAHYWARELIKLGHDVRLMRPSYVKGYVKRGKTDKADAAAICEAVSRPSMRFVPVKSEDTQALLMTHKAREFLVRQQTQIVNAMRAHLGEFGIVVPKGIHNVERLIIACEQAGLSAPARKALNLLADQLVDTQKKIDELTADIRADAKANEDAQRLQTIPGIGSITASALVSALPDIADFQSGRDLSAWLGLTPRPHSSGGKERLGAHLQDGQQVSAAIALSGRHRAGQRAPTG

SEQ ID NO: 385012 - protein, 337 aa, unidentified
MQITTIGLDLAKHVFQVHGCDAAGNFGVKRRLRRNQVLEFFAGLAPCLVGIEACGTAHHWARELRALGHDVRLMPAHYVKAYVKRGKNDAADAAAICEAVSRPSMRFVPIKTREQQAVLTMHRTRDLLMRQRTQLINAVRGHLAEFGIVEPQGVWHLGRVLRHLEVDDEVIEPARRVIGLLASQLNDLEGRIKEVDKQIALWHKASPTSQRLATIPGIGPVIASAIAATVPDAGVFRSGREFAAWLGLVPRQRSTGGKQRLGRITRDGDRYIRRLLIMGAQAVLQSSKAARANPWIQNLLARCPRLKVAVALANKTARIAWAVMTKGEIYRQAAASA

SEQ ID NO: 385013 - protein, 435 aa, unidentified
MKNSDPHMSPSSNESWAACVGLDWADEKHAVVLQAAGSQIKEHATLEHTPEALSDWVAQLHQRFAGGKIAVILEQSRGSLLYALLPHAHLVLYPINPQMAAKFRKAFYPSGAKTDPLDAELLLQILLQHRDRLKAWQPDEPITRQLQLLVEARRRFVADRVRLSNRLENALKSYFPQALQLAGESLTTPMACAFLQKWPTLEAVQKAGAQRLRKFYYGQHSRAEELIQQRLLLLAQAKPLTTDAAVVSAQSLLVKSVAHELAALPAILAEYDQQIATLFAAHADYGIWDSFPGAGAALAPRLAAAWGTQRDRFESSDAMAAYSGIAPVKQASGRSVWIHMRWACPKFLRQTFHELARTSLCFCVWAQCYYQMQLQRGKGRHAAFRALAFKWQRIMWRCWRDRVPYDDAKYLASLKRDNNELYTRIIAFQSAQVGA

SEQ ID NO: 385014 - protein, 326 aa, unidentified
MQGKVPSQRSAAAPVYIGIDVCKARLDVHIHPVGESLVLPNDAGGLKRLKKILARYDVVIVVMEATGKFHRPAHRSLHASGFKVAIVNPLRSRRFAEAIGTLAKTDRVDARMLALMGESLKPGALEPTPELMETLQELARGRESAVDSKTAIGNQIQTSNSKVLVRELKRQLSAVETAIENLEAELERQIDADPVLARRFEILTSIPGIGLVAAVALIVELNEIGRLSSKQVAMIVGLAPIARDSGQKTGTREIRGGRKHLRTALYMPANSAKQHNPDLKIFHDRLIKAGKLAKVAITAVMRKLLVLANTLVREDRLWQPKHVIAR

SEQ ID NO: 385015 - protein, 358 aa, unidentified
MKKVSRNNKARKETFSGSIWVGVDIHKKSYSVTIRDEEGRERTFSMSSDPEALARKLIMLGCVVNQVVYEAGPCGFSLYRVLTSFNIPATVVAPTRMPRPITRTGKTDSLDSRKLAEYAARDMLAPVRVPSATEEGVRRLYRRRHKLTDLLRKNKQNIKSLLLESHIEEPIGLETWNQSAIQALHDLQTDYDTKMTLESLLREQEFILQERNRVDEDVEKCFSETQKEQIINLQTVPGVGPILARTFVAEIFQPEKFPDAEHLASFLGLAPILSQSGQSKGTGRIARNGQGRLRSILVECAWQHKRRDNQSESLYRRVLARTGLAQKAITAVARRLGILLWRLLVENRPYRAVCIHEI

SEQ ID NO: 385016 - protein, 344 aa, unidentified
MDNHTQYLGFAGVDLAKKVMQIHFVTEDGEITDRQVKRAEFLDFFRNRSKCLIGMEACGASQDWARKLEAMGHEVHLMSPKAVKPFVSGQKNDHNDAIGIYKAMFNGVRRVPVKSTEIRDLQTLRRIRSQVAKDRIKEINHVRGLLAEYGIVMGKSITAFNKGISSALESLKERGDVSLLVAEELQTTVESIKTKIERQKRLDREIEQLARGCKNYENFLKTPGVGPFTAAMLCVLLCDPSIFANGRQFAAYIGLAPRSRGSGGKNYVTGIPSKFNCDSESRAVFVECAQALARYKNKSPWVDGILRRKPKKVAVIAIANKLARQVWAMANKGESFKQMTILTA

SEQ ID NO: 385017 - protein, 347 aa, unidentified
MRGAVHMQITTIGLDIAKNVFQVHGIDAAEKVVVRKQLRRAQVMKFFAALPPCLVGMEACATAHYWARELTRLGHQVRSMPAKDVKAYVKRNKNDAADAEAICEAVRRPTMRFVGVKSAEQQGRLMQHRTRDLLMRQRTQTINALRAHMAELGIVAAQGREGLKQLLEIIADKADERLPIDARASLIVLAAQLQALQTMIGTIERRIIAQHRANEASKRVATIPGIGFLGASAITATVTDPNAFRSGRDFAAWIGLVPRQDSTGGKQKLGPISKQGDRYLRRILIVGAHAVLRLAKKNPQNYPWLAQLLARRPFKVVAVALANKMARIAWALLARGGTYRTPQLAAA

SEQ ID NO: 385018 - protein, 339 aa, unidentified
MKVSTLGIDLAKNVFQLHGVGCNGQTVLKKKLTRDKFLPFLMQLEPCLIGMEACASSHHFARVLRQYGHEVKLIPPQYVKPYVKTNKTDAADAEAICEAVARPNMRFVQIKTAEQQAILVLHTERNILIRERTACANSMRAILAEFGIIMPRTLSQLYKKIPEILEEYDNELSAFVRCSVARQLEHVQGVEDQITLTEQELSRWAKTQPACQRVMKVPGVGLMTATYLVASVGNGQQFHSAKQFAAWLGLVPREFSSGGKQRLGRISKRGDRYFRYLLVHGARAVAAVIERHKDNMPWLYRLLNKKAYNVAVVAQANKTARILWSMLVHHTEYRTLSVV

SEQ ID NO: 385019 - protein, 404 aa, unidentified
MYSVGIDASKGKSTVCILKETGECILTPRDFNHTKDDLEALDQTIQKLTGKNDVRIVMEATGIYHWPLLLFLKRKGYFVSVINPLRMKLFAKSYNFRGIKTDKYDSTIIAAYGCEKWFSLQQWDFNDDTRDELKRLARSYVSYQKPKISVKQSLDLELEKCMPGIKNLFSDDQKLYSFILFFQHFDKITALSQKKFLNKFDIWAKKKGYRFHSSTPTKIYELASSGIPTVPFDDSCVLIIENLVNTLITIDKGLNDILTRMHQLASSLPEYDVVLNMSGVGYTLAPLIIAEIGDVRLYRSKKSLVCAAGIDVPPYESGQFKASHRVITKKGNSNIRRHLYLVMNSLYVTKPKKDSAVYEFMIRKKAEGKLHKQVIVAGMRKFLHIYYARVKERYQDIGLWQTLS

SEQ ID NO: 385020 - protein, 406 aa, unidentified
MEVVHPRCGGLDVHKKSVVACVMIPGHKEVRTFGTVTAELLRLSDWLQQEGVTHVAMESTGVYWKPVFNVLETTGLELLVVNAQHIKAVPGRKTDVKDSEWIADLLRHGLVRASFIPSRPQRELRELVRYRKTVVEQRSHLVQRIQKLLEGANIKLSDVASDIVGVSGNAMLRALANGEQDLDRLVELAKTSLRNKREELRLALQGSFGSHQRFLLGKQLDQLEFLDRQIADLNEEVEQRLRPFEALLARLDAIPGIGRRNAEQILVEVGTDMSRFPSASHFASWAKLCPGNDESAGKRRSGRTGMGSRWLRSTMVEAAWSASRVRNSYFAAQYHRLVPRRGKRRAAVAVAHSMLIAIYHLIKDGTVYQDLGPNHFNEFDRQRVTHRAVSRLQALGYQVTLQEVPA

SEQ ID NO: 385021 - protein, 315 aa, unidentified
MIVGIDVSKKTFDTAWNTAEISQHQTYEYNDQAIKTLLSETPKDSHYVMEATGVYHSKLALKLHQAGRKVSVVNPVVIKRFGQMALTRVKSDKADAQLICRYGEHTELGLWSPSKDEIHKLQQAHSWLDDLIRDRTRLLNRKEAHGHHAVPSLFVKREMKAHEKSLKVQIKRCEQYLGAVVKKCFPELYEQLTSIPSVGPKTAIELIVITRGFTQFESVKSLSAYAGISPTTYSSGTSIKGKGGIAKMGRGRIRQLLYLCSWTAKRSNKPCMELHRRLSEAGKPAKVINIAIAHKLLRQAFAVATKGVYYSENCA

SEQ ID NO: 385022 - protein, 439 aa, unidentified
MNKRRDRVCGADVHKDLIVATITGDDVLPIRANFGTTQAELKKFRNWLVDNKCEQVAFEATGVYWMPIYDALSKTMDTIVANPLQIKTIPNDKSDSKDSNRIAILCLNGQIKRSRVFTEKDRDLRMMTRARSGYVKTRTQFRNRIHKYLSSSGVKLSSTMDDIFCKSGRYILDGLAEEKPLEEILKGIPSGKIRKKQDLIRSALENGLNDTNRMLLKDALEILDNLELKMEKLSLEVLKGVQQKSKDLAIVMSIPGIGFTSASVILSEVGNYRDFKTPDQLAKWCGLNPGENESAGKKKKCGITKKGSKHIRVILVQAAQTISNMNKTALSRFFQRLIKKKERNVAIIAVARKLICLIYHLLINQELYQENECRKKRSSQDKSCQAPSFKEDHLTDRVAAIVDAFYHLKEDNRKNALMRELGAISMAKPGKKRPSGGGE

SEQ ID NO: 385023 - protein, 309 aa, unidentified
MDEVFVGVDVSKTHLDVGIRPSGDARRFANDAKGIAALVAHVRELLPTLVVLEATGGYEAAVAAELAVAAPTAVVNPKQVRDFAKATGRLAKPDVLDAAVLALFAEQLRPEPRPLPDAQARELTDLVQRRRQLMDMIVAETNREQMAQPRVRKAIQRHITWLRNEVTRTEHDLDGAMKRSDAWRANEDLLRSVKGVGPVVTRTLLARLPELGSLSRQQIAALVGLAPVNNESGSFRGKRSIRGGRADVRTVMYMATLSAVRYNPPICAFYTRLVDAGKPKKVALIAAARKLLTVLNAMLRDRRPFALAA

SEQ ID NO: 385024 - protein, 315 aa, unidentified
MTTSRKDYVGIDVSKDTLDLAILEDKNLKQYTNTSKGIRSLVEEMCELDPALIVVEATGGYERAVVMSLYEAGLPMSRVVANRVRQYARAKGVLAKTDPLDAMILADYGKHIQPRKFVAKSEQGQRLTALLVRRRQLIELRKAEKNRLRLASPETGASITRMLELILAEIKQMDKKIWDLIDSDPEWRDQAALLRSAKAVGPVTAATLLAELPELGKLDRKQIASLVGLAPINRDSGRKRGKRKTGKGREPVRSALYMAALTGTKYNPVIRNQYNHLLSKGKEKKVALVACMRKLLTILNAMVRDQEPFRYAAMS

SEQ ID NO: 385025 - protein, 375 aa, unidentified
MNTIYIGVDFHARQQTICYLKTETGELVFHELKHQDKQQVQAFYAQFPGPVVVGLEASGYSPWFERLLEELGCEVWLGHATEIRRRARWRQKNDRRDAELILDLMLHDEFPRLHRPAVQSREVMRMLRYRQKLIKIRTMSKNSLQALALQAGLARRSQLFTKDGQQELGAAEMSPVMHWQREHWLQLLEPLNQQLLETMVWFKAQSKGDVCISRLRSHPGIGLLTSLCLVHALQPVGRFRNSRKVAAYGGFDPVERSSAERKCFLGISKAGSRVLRYLLVEAAHTAVRKDEDLKRFYQRLAERRGRPKAKVAAARKLLIRAYIMLRDEIDYAEFRRRAVAARLARASHRPNVPESLIGQPASAERQEQLPRTKKK

SEQ ID NO: 385026 - protein, 412 aa, unidentified
MQVLYTRCAGLDVHSRSVSVCVSVCESGAKKRQQVRVFPTFTRDLLEMADWLKREGVTHVAMEATGVYWRPVWAVLENQLEQMLVNPQHMKAVPGRKTDAKDCEWIADLLQHGLLKGSFVPPTPIQDLRDLTRYRAQLRQDQGRAANRIQKLLEQANVKLSSVASNALGVSGRRILKEIIDGQADPGQLAQLARGALKNKIPALMLALEGRVREHHRFLLGKFLREWEWYEEEIADMDQRIEEQIQPFAFAVALWQTLPGVSEVTAWSLVAEIGVKMEQFPSAHHLASWAALCPGNHESAGRKRSGRMRDGNKWLRRSLCQAAWCSTRKKDCYLASQFRRLSTRRGVKRAIIAVAHSMLIIGYHMLKTKQAYQELGCNYLDRIQKESLQRYHVKKLQNLGFTVSIEPSFVVP

SEQ ID NO: 385027 - protein, 342 aa, unidentified
MSKKSVVSTNTKTFAGLSATCFIGFDVAKNKLDWSFINAQGIEQDYGTVSNNVDEIGETLSVITGTYSDEVFNCVVEATSTYHYVLLEACQILNLPCLVYNPILTKQQIKGSVRGKKTDRSDAFLVARVGWSGGGRLYTPEPYLTAKYYARSCQRLSALGGSFQQYKGHITKLLEDELTADALQTLKGIKQAIDEAKKQLSKDLAKSVKGETLNRLQTIPGIGEYIAGSIIGEIQDIGRFPRSKHLIAYAGLDTKIRQSGNVLNSTGKLTKRGSSYLRHSLFIAANVARQHDEQFKAIYDKKRAEGKTYKEANCAVSRKLLKVVRSVWLNGKDYELPEEFRE

SEQ ID NO: 385028 - protein, 314 aa, unidentified
MNQTNFAGVDTHKDTIACYYAGRFKEFKTTQKGFQEALKWAPDAKWAIEGAYSFGKPFSAFLIKNGKEVYEINPLLTKTWRSVLSISNPKNDYGDAKVISLFAEKSNLQVVSLATIKLKEKLTARKLAVKQKTEITNSLKMLFSIRGKELPFKDLTTKKALCWLENHDDIIIQTSTRILKILLENIEKIENEIKKELPEKAQKLKSLKGISDIIAATIYSETKGKLINAKKLANYAGIAPVEKSSGKTSRHRHNKTGNRILNSCFYTLSIFQKRFEPEAKKYYEKKLAEGKSPRHARKCLARQLVNIVFKILKD

SEQ ID NO: 385029 - protein, 353 aa, unidentified
MKDYYVGMDVHKASIVIAVQNASGKVVMQSIIETKAQTVRDFVKGLHGTVRLTFEEGVHAAWLYDLTHSLVAEVVVCDPRKNKLLLSGHKSDRVDAQKLAHLLRAGLLQAVYHGEQGTRSLKELAHSYDSLVQDCTRVMNRLRAMYRGRAIECPEQSIYDSAGRAQWLAQLDDKGARLRAENMYKQLDALAALRDEARAQMVNEAAAHPASRILQRVPMIGPVRAAQIIATVNTPHRFRTKRQFWAYCGLAVVTKASAEYGFTKGELQKKAKKNSTRGLTNNFNRRLKEVFKSAAVTAGVRGQFKPYYEGLLAKGMSPEAARLTLARKIAATTLAVWKKGEAFDPQRITQQAA

SEQ ID NO: 385030 - protein, 378 aa, unidentified
MLRFSTPLGETCKGSDRKTGSRPIRRVRATASRLTDRPKLNRFMDFHHYVGIDIAKATLDWAVYSKEGSQLYFQTPNSVAGIKLGLRNLKVLANWQPAKAVFCMEHTGIYNAHLLEYLDKLHLPIWLESSLQIKQAGGMQRGKTDKVDAQRIAEYAYRFQDKTRLWQPPRPIIRQLAFLSAARQRVIQVYNQLAGPLDEQDTFVSSTMQKQVRHSCKASLAALEKDRKALDKQIENLIRQDEHLHELFTLITSVPGIGPATATEILVATNELKTVDSPKKMACHAGVAPFEYRSGSSVRGKTRVSHQAQKRLKSLFHLGAMSAIQVNGELQTYYQRKVAEGKNKMLVLNAIRNKLIHRVYAVVKRGEKYDKFYSLSLA

SEQ ID NO: 385031 - protein, 451 aa, unidentified
MKPKGTPDRRSEAWPMVCPEAAGLDIGASEIWACVPADRASPAVRSFATFTPDLQALADWLSACRVRTVAMESTGVYWVPVFEVLEAQGFEVYLVNARHIKNVPGRKSDVQDCQWIQRLHSYGFLRASFRPEAEMVVLRAYLRHRGMLLEHRAAHIQHMQKALQLMNVQLPRVLSDITGVTGMQIIRAIVAGERDPQVLATFRNGRCQRSEVEIAKALTGNYRAEHVFALKQALALYDAYSGQRRECDEEIERQYAATRPRFDPEDPDEPLGPDIKTNTHSKNAPDFDVRRRLFQLTGVDLTAVDGLDESAAQLLVSEIGTDMSKWPTEKHFCSWLGLAPHNDITGGRVVRSRTLHVHNRAAQVLRMAAQSVGRGKSALGAFYRRLRARQGPEQATTATAHKIARIVYYMLKHRQPYRAVSAAAYDEQQHQRELKSLQRRAAKLGLILAPA

SEQ ID NO: 385032 - protein, 394 aa, unidentified
MKLVGIDVGKNSHHFCVMDKETGEFNVAPSSFSNNKEGFDFLINSLKPYSKKSILIGMEDTGHYHVALLKFLLSNGYTVALINPKTTDLTRKMEGGITKNDKLDTITICDVLDTPERKKQYRITKVDRFDLYEQRQLTRHHHNLKEELNVYCNRLQKSIDLVFPEFNTLFSSKYSIVYMNLLKTFGSAEAIASTDIRTIRKCFEIKGKGGRISLTPEKLKECAKNSIGISSEVETIQIKHLVSQITLIKEQIDEIDKKIEEFSITNNSPILSIPGISHFSGTSILAELGDIGNYSKPSQIIKFAGVAPYHYESSQYNAQHTGITKKGSKYLRKTLYQIILTVINNNPVFKKYYLLKISQGKGHRCAQGHCIRKLLRIIYHLLETGQSFDPALLR

SEQ ID NO: 385033 - protein, 384 aa, unidentified
METITQKIDILQSINFQHLINTLYVGIDPHKYIHHILITNRAMDKLGEFKVHNNQTDINELIKEINKIKEEHNFNNVVIGIEGYHGNGDFITRNLLKEFNSIYEVPVALTSNYRKSSIYREKTDSIDAKGVINALVTNLPKLSVITSKSNDRIAIMLRDLTMNRNRFVSSRIGFKNAIHNLMQHIDPEYVKTVKNFNSKKTRKTTKEFCDNILISDTDLEIKNRAKLVITNIERVNDFEEQINAIEKEIKNILINSRYQKIIDSFKGVNYITMAELISWIYDINRFPTPEKFCKYCGIAPVACSSGKSNKLINSKAGVKSLRTTFRTIAIVRVRRSPEDEQYFKKQLSKGKTKKQSLKLVMRKNALVLYALLTKNQAYISPVLA

SEQ ID NO: 385034 - protein, 343 aa, unidentified
MNEVITIGVDLAKNVFQVHGVDGSGAVIVRRQLRRSQMLPFFKKQPPCLVGMEACATSHHWARQLVALGHAVKLMPPKYVKPYVKRNKNDMADAEAIAEAVTRPTMRFVEIKTRDQQSVLMLHRTRQLFVRQRTSLINALRAHLAEFGIVAGVGRNGLERLLQVIEDGDDDRVPAAARDCLLVLRDQLEMVKHQVLGADRGILAWHRSSEVSQRLDDIPGVGPLIATALVASVPDPHIFKSGRDLAAWIGLVPKQNSTGGKDRLGHISKAGNHYLRTMLVVGALSVIRRAKQLGYTRRPWLAKLLQRRSTKIAAIALANKNARTAWAMMAHGTFYQEPQSEAV

SEQ ID NO: 385035 - protein, 341 aa, unidentified
MRSYLGIDAHSNTGLELAALSEDGKLLWRDRCSLDSEQVVQVAQRAPRPCTVVFEQGELATWLHLTLRNACDEVLVANPRHNRLIATSPDKDDPHDAFVLAKLAAGGYLREVFQPAEKFTVLRLRVRHHYRLGRHLTAVKNQIKASYRTQGIRVSGTSVYSAASRDQWLQRLPGPAHLPAEDLYAVLDVVQARKDAALRALARAVRQFAPAKRMLQVPQIGPVTAATFVGYLVTPERFPSRKHLWSYCGFGLMARKSGHRAEPTRLRTAYNRHLKRVIKSTVERQIARSPSSPFAAAYQTRVQRGMLPTRAKLTVSRKLIDVLCVLWTDQEDYDPDRINID

SEQ ID NO: 385036 - protein, 388 aa, unidentified
MTQTSVSLPHPVALDHNETLVLAIELSNKSWVLAAQVPGLTRVKAKQTIEPTAEALLAALQGYRERAKIAGRQVERVVATYEAGWSGFWLARLLTTHGIETHVVQPSSVLVDRRARRAKSDGIDAEQLLRTLLAWLRGEPRVCSMVPIPAEGDEDARRCVRERTELIAERVGLVNRIGAVLATMGCGDYDPLLRNRRQRLDELRTALGTSLPPHAYAKISRMLDRLDLVRKQIAELEQDRDAVLEEEVPDKAGEMIQQLTKLRGIGVQSATVLVREAFVREFANGKALGSYAGLCATPYTSGGTDREQGIGKAGNRRLRTVMIELAWLWQRYQPGSAVVNWFRARVSGTGARMRKVMVVALARKLLIALWRFATQGVIPEGAVMKPAP

SEQ ID NO: 385037 - protein, 407 aa, unidentified
MNQLFVGIDVGSRNNAVYIMLPDGSKHSSFEVQNNLGGSQFLSKSVVSALNEQGAPSVVIGIEATSVYGDNLMCYLREDGALGQFERKYYILNPKRVKKFKESYSDLPKNDPIDAFIVADSLRFGRINDAVYMDDYRYKALQNLTRARYYAVQNLTREKQRFMNYLFMKCSGLAQEKVFSSNYGTAALAVFEEFETPDDIADMDTIQLAEFIAMKGKNRFSNSVEVAKEVQAAARGSYRLPKTVNDSVNQIMSISISSMRAVQAQIKALDKEIERQFENIPNTLTSIPGIGPVFSAGIIAEIGDINRFDGQAKLAKYAGLMWKHHKSGEFVGQNTRLIMSGNRFLKYYLVEAANSLRRCDPEFKRYYDLKFKEVNKYQHIRALALTARKLVRLVFRLLKDNRLYKPA

SEQ ID NO: 385038 - protein, 381 aa, unidentified
MDTATRDQQCNSEPVLFMAMELSASKWKLGFTVGLGQKPRERTIDAGDLEGLSEAVARAKRRFRLAEDVGVVSCYEAGRDGFWIDRYLRGHGIGNVVIDPASVEGNRRRKKRKTDRLDLGKLLRCLVRWHRGEEKVWAVVRPPSEEAEDARQFHRELEALKAERTRHVARIKSLLVSQGIQVKRVGRDFVTELEAARMWDGSPVPPQLRDRLGREYQRLQVLRQQICELEGQRREAIRKVTDRRMQQIRHLMRLRGIGENGAWLLVMELFGWREFRNRGEVGSIAGLTPTPWASGDEDREQGIDKAGNRRVRAMMIELAWCWLRYQPRSELSIWFEQRFGGGGKRSRRIGIVALARRLLVALWHFLRDGWVPKGAVLTAPG

SEQ ID NO: 385039 - protein, 392 aa, unidentified
MVVSVGIDVSKDKHDCFILNSEGEILSDVFTIPNSLDGFTILLQRIRDCSSSQDNIKVGLEATGHYSYNILGFLLDNGLPTYVLNPLRTNLYRKSLSLRKTKTDRVDARTIAAMLLSDAGLKPYTDTVYHNEELKSLTRYRFDKVKERAKLKSSVSRLVCILFPELEKLTPTLHMPSVYALLDEFPGAKQIAEANLTHLKAILHNASKGRYNRDKAIDIRESARASIGAVMPAKSLELRHTIRLIRELDAEIEDIEAAIQSIMNEMHSPITTIPGIGTRMGAMILAEVGDFSRFDSPDKLLAYAGMSPSTYQSGQLKNCYPHMEKRGSRYLRYALYNATKYVCRWAPTFAAYLAKKRAEGKHYNIALSHAAKKLVRLIFAMEKSRQPYCSAT

SEQ ID NO: 385040 - protein, 412 aa, unidentified
MQVLYPCCCGIDVHAKTAVVCLIKQGRRQTRTFSTMTDDLLRLSDWLASEGCTHVAIESTGVYWKPVFNILEAALTVILVNARDAKAVPGRKTDVRDCEWLADLLRHGLLRASFIPPLEIRELRELTRYRQTLIKEHTAVANRVQKLIESANIKLGQVATDVLGVSGRLMLRALADGEEDAEKLVELARGSLKGKKPELRRALTSRLTPAQRFILNELLLRLAELEAATARVGEQIVKEVAESPDPFVPEAVRLLQTIPGIALRVAEVIISEIGVDMSRFPTDAHLASWAGVCPGNNESAGRRRSGQTTKGSPYLRAAITQAAWAAAHTKNTYLAAQYHRLIKRMGKNKALVAVAHSLLVIVYHVLAHRADYRELGGDYFDRQHRQTQQQRLVRQLERMGLKVTVEALPEAA

SEQ ID NO: 385041 - protein, 322 aa, unidentified
MSVSVLGIDIAKQKFDAALLLDGKTRHKSCKNSVEGFETLIIWLEKQGIQKVHACLEATGNYGEDVAIYLHEAGHTVSIVNPARIKGFAQSELIRTKTDKIDAGIIARFCLAMKPEPWIPPAPEIRSLRALVRRVDSLIDMRSQEKNRISTAHESVMHLIKEHIAYLDKEIEKIRRQIADLIDQNPDLKQKKDLLDSIPGLGKATIPHLLAELNDLEKFRHVREVVAFIGLAPKETLSGSSIKGKPRLCKIGYVRLRKALYMPALVSIQCNPMIIAFYNRLKEKGKNGKVIVCAIMRKLVHLIFGVLKSGKMYDPNYKPTFA

SEQ ID NO: 385042 - protein, 410 aa, unidentified
MTVITIAQNTPVLVAIDIAKARHEVLIAVPGKKRRRRLTVLNELADFTRLIAALKNYGHPVRAAFEATGNYHRALAYHLATAGFEVKLVSSVALARTREALHNSWDKNDPKDAQVILHMMEIGNEQFYHDPLVRGTNDIQELSKTHDIVSKSKTELWHRILTHYLPLYFPEADRFHRSSRSDWFFAFLERYPSPHFISAMSKDAFIADAWDVVGRKVAKERLLADIYETSKVSVGLPVGLDSDAISMFRLVLGEGRSLIAQRNQIEDRAVALLKDLPDYQLLTSIPGIGPINALTILAEAGDLRRFGHHRQFLKFCGMDLATIQSGTFRGQTKLSKYGNARLRRTLWMAGQVAILQRANSFRDKFERYITKDRHNTHLRRKAYTAIAAKMARTVHGIIKNGEPYRPFFEG

SEQ ID NO: 385043 - protein, 397 aa, unidentified
MYIVGIDIAKRKHEAAVIDGEGTVIIKPFSFTNNCSGYNRLLAMLTKAKLPLDEVSFAMEATGHYWLALFTRLQKEGFRVQVINPVQTNSIRSFYIRQAKTDPRDALLIAEVIRFGHFSESTLHPENIYELRELCRGRHAIVSMQADVKRKVVALLDQVFPEYETAFTNLFGDTSMAILQTCPTPKELSEMPFEELCHLIEVSSHKRFRMAKAQELQELARNSFGFAMAGDVFSTMIRLYAKHLVFLKQQVQEMDRKIAEIMDTLDTLITTITGIGPTLGAYILSEIGDISRFSSAAKLAAYAGIDPTMRQSGEYNGVRNRMSKRGSPYLRHAIWLAASSAVLHDPALKLYFQKKRDEGKPYMASVGHACRKMVSIIYAVMRDNKAYTPYIPNEISA

SEQ ID NO: 385044 - protein, 389 aa, unidentified
MTAFEQEAIWPAAIRTDLGAIFVSLELSRSTWLITSLSPGAGEKLSRRPVSAGDMSALLEVFGALKAKVSARTGRDVGIIAIHEAGLDGFWLDRALRLEGIESHVVDPASIAVCRRKRRAKTDRIDGESLIRTLLAYKRGEPRVCAMVRPPTPEEEDRRRVSRERRTLLTERVEHTNRIKGLLFAQGVADYEPLLRNRRARLEAVVTGDGRTLPDHIKQQIERELDRLELVTAQIKAVEAERDALLAAASQASATSPAASLPRLKGVGEEVAAVLWLEGLFKSFDNRRQLAAYAGLAPSPWRSGKIDHEQGVSKAGNRRLRSTMIQLSWLWLRHQPDSALTQWFQARVRQDRGRVRKVMIVALARKLLVALWKYASTGVLPQGAQLKEA

SEQ ID NO: 385045 - protein, 343 aa, unidentified
MDYFAGLDVSVKETSVCIVDDAGKIVREARVASEPEALLQVLTNSIYRFKRVGLEAGPLSQWLYSILAEAGLPVICVETRHMRAMLKAQINKTDRNDARGIAQMMRVGLYRPVHVKTLRSQKLRVLLTHRKLLQSKAIAIENDLRATLRNFGLKVGMVGTVKFEARIKELVENLPDVAVLVGPLLVVRRVLREQIGILHRRLLAIVRGDDVCRRLMTVPGVGPVVALTYRVTVDVPARFRNSKAVGAVFGLTPSKYQSGQNDRTGGISRCGDEMMRVMLYEAAQSMLVRSTKWSWLKAWAMKIARHRGMKKAMVALARRLAVIMHRMWLDGTEFRWTREVAVA

SEQ ID NO: 385046 - protein, 328 aa, unidentified
MDTDILGIDIAKAKFDVILLHGGQSVHAVFANSRTGYGKLRHWLKKQGVKQLHACMEATGTYGDDLAEYLYKQGYAVSMVNPSRIKAYADSQLRRNKTDKTDAAVIADFCRTQQPALWSPPDPALRELRGLVRYLEDLHGMRTQQVNRLKAGSLNPTVSRNLRKHIAFLDRQIQEVEDLIRQHIDRHPDLKHQHELLTSIKGIGDTTASALLAEIGDWRSFPAARQLAAFAGLTPRQRQSGSSVRGRSRFAKIGNPHLRRILFLPALTARRCNPIIKPFCDNLALHHKPKMVVIGAAMRKLLHIAYGVLKSDQPFDPLFLSKNAVAVP

SEQ ID NO: 385047 - protein, 333 aa, unidentified
MEQYIGVDLHKQFFQACSITSTGARAWEMRFPRTDGGLALFCARCGPQTAVAVEACGPTWAFVDAIAPTGTTVCVVDPRKTRLKAGFAAKTDRLDARRLADALRRDSVVSVYVPPPAIRELREVCRGRHQVIRLRTRLAQMIRALLLRSGGPDVPVRRVFSPRGLAWLEEVQLPPDAAASLTRLRHVLTAIHAEAAAAESVVAARAAADPIARALDTMVGIGPVLALTLRAEIGDGLRFPRGAALASYAGLVPRVDASADRYWSGRITREGSPWLRWALVEVAMHAIRRQDPVGRWARQLAIRKGGYKARVALARRLCDDIVQVWRQAGSQDA

SEQ ID NO: 385048 - protein, 415 aa, unidentified
MITAVIERCAGIDVGKKSLSVCVMVGPADGEARHELRTFGTTVTELKQLREWVESERCSHVAMESTGTYWRPVFNILEDCVHVILANPHEVKARKGHKTDHKDGWWLAHLLRHAMITASFIPPRPQRELRDLTRRRKKIIQAATGEKNRVDKMLQDANVKLSDALSDIFGVSGQLMLESLLKGNTDPAAIAVFAKGKAKKRIPQIMASLEQHQMREHHRMMIRFSLEHLRFLEEQLSELDQQIGRKIEEAGYKQQYELLQTLPGVQEPTAAAMLAEVGPDVRPFASEKRLSSWAGVCPGNNRSAGRNKSSATTEGNSWLKGALTECAWAISRQKNGHLREKFWRIATKSPPKAVVAVAHDLLILVYFVLQRGTPYEEKRGVVMSDAQKQRLIRHHVRRLGKLGIRVRTPATPIRK

SEQ ID NO: 385049 - protein, 422 aa, unidentified
MAAKKNKTSSRVVIGVDPHKRIDAVVVLDELGAVLAREIVPHTSAGFKTLMAQARQFPQRVWAVEGCNGVGKNLAHRLVAVGETVLDVSTRKSSLVRALATNSGRKTDDTDAYSIALVGLRSTDLPVVVRDQQTELLRLLSHRRRELVGLRTQAVCRLHRELAILIPGGASSRLLATRIRALLNGIRPHDEVDRLRKQLARDQLADLVAIDQRLAAINIEIRDAVRATGTSLTKIFGIGPVNAAMILGEVAQVARFDTRHHFAAYNGTAPAQWGSGGDTHDWVNLGGNRRLNHAVHIAAITQARYPGPGRDYYQRKLADAKTAKEALRALKRRISDSIYRQLLADAKAREAEGTGPGGQVGAALSSSAANRSPVVSTSDRPQPGPVATDHTPTIPSPGKRSSGASRRPKNAPTRRPRQAQSA

SEQ ID NO: 385050 - protein, 313 aa, unidentified
MTAMRAAGIDAGKLYLDVGIEPSRSRFRVTNAPKGIACLIDRLHQAGVHRVVLEAIGPYGQAVVGGLHEAGFAVGIVNPRRIKAFREAEGKRAKTDRLDAGLIARFAVKMSDELRAIPSASQQALKALATRRRQLVEMIAMEKTRLKQVVDPVLCDSHRATIAALSEQRALIEGQIVTRLDGETALARRVVILRSLPGVGAAIATTLVVDLPELGSVDRRAIASLAGIAPHPSQSGLTPGRNQIGGGRPCVRTALYMAGLVASRCDPRFKADYQAMRHAGKPAKVAIIAVARKLLVLANAIIKQDCLYDPARP

SEQ ID NO: 385051 - protein, 400 aa, unidentified
MSARLIVGVDPGRYGHGIVVRTAEDAEVVRERVGNDAAAIDELVTRVVGLAGGAGEALWVIEADGGDGAVLIGELLARGELVATLTPTEVAVRRKGRRQAHKSDLIDAEVCARIGREEQASLRHLVAVPETVAEMRVLARYQDGLIRDRTRLINRLRFLLSQYWPEFLAARAFAALDGDAVTAFLVAFPTPSAVRSQDPLELASFLARQRYRRRPLERALQLLAAAQVGVRPQESVYGRLVAEVAGELAALKQRIGALDAEIRDRFLSRPEAPIVLSLPGMSHRTGPRFLAEVGTLERFGSPDALAAYAGLTPTLWQSGRSSGTHFLNRRCNLHLRQALWSAALGSLNTPASRRFYDRKRAEGKSHHQAVIALARTKLRVLWGMLKAGTLFMPERALEAA

SEQ ID NO: 385052 - protein, 370 aa, unidentified
MLNTTTFVGLDVHARSIKAVALDAMTGEVRSATFGYDAAEVAGWVSSVDPSAKCVYESGVTGFDLQKRLSSMGIDCVVGAVSKMIKPPADRKRKNDRNDAEFLARMLSVGNVVEVWVPDDGCEAARDLSRALDDAREDLKRRKQRLSKFLLRHGYVFSETTPTGRRKGNWTAAHWAWIKAISFPEKADNDVLAYYVDAVRQAMEDKARLERLVEAEASKPRWKRRIDSVRCLKGIDVTSAADLVFEAGEFSRFKSARSFAAWLGLTPSEHSSGESVRQGGITKAGNKHLRRVLVESAWHYLGCSPHSKDLAKGQAPDPAARRHAAKGVRRLVERRRAMLERGVHKNKANVATARELACWCWAVGRMAENG

SEQ ID NO: 385053 - protein, 400 aa, unidentified
MNEYDEIGVFLGLDVGKSAHHGHGLTPAGKKVFDKQLPNTEPKLRQVFDKLREKFGTVLVVVDQPASIGALPLTVARDTGCQVAYLPGLSMRRIADLYPGEAKTDARDAAVIADAARTMPHTLRSLQLTDEITAELTVLVGFDQDLAAEATRTSNRIRGLLTQFHPSLERVLGPRLDHQAVTWLLERYGSPAALRKAGRRRLAEVIRPKAPRMAKRLIDDVFEALDEQTVVVPGTGTLDVVIPSLARSLGAVHEQRRAAEAQITALLEDHPLSTVLTSLPGVGVRTAAALLVTVGDGTSFPTAAHLASYAGLAPTTKSSGTSIHGEHAPRGGNRQLKRAMFLSAFAALHDPASRTYYDKCRARGKTHTQALLRLARQRINVLFAMLRDGTFYEPRTPRLA

SEQ ID NO: 385054 - protein, 366 aa, unidentified
MKKISTVAKRGNEIFKEPKLTIGVDLGDRTSHYCILDEAGNVILEHRLPTTSQGIQQVFSRLPSSRIALETGTHSPWVSRQLTQLGHEVIVAHARNVRLIGESSRKDDQLDARTLARLARIDPGLLGPVRHRSAKAQIHLTVIRARAALVSTRTALVNAARGLTKSYGERLRKCGTGQMNRQIAKGLSQELREALEPLLEEIESLNERIAEYDRRIEQIAKEAHPEVALLQQVKGVGTLIALTYVLTLDNPHRFRRSRDAGCFLGLRPGRRNSGMSEPQMQISKEGDRYLRTLLVQGAHYILGPFGEDSDLRRWGRKLAERGGKNAKKRAVVAVARKLAVLLHKLWVSGEVYEPLRNNHKVVSAVA

SEQ ID NO: 385055 - protein, 426 aa, unidentified
MRAIGLDIHLEFCEVAISEQGRVRSAGRIETKPEQVELFAQSLGKDDRVALEVTGNAWEIKRLIEPHVAEVIVVSPTDTGIRGARAKTDRLDARTLARLLASGELEAVWMPDRETQVMRRRLQRRSQLIWGRSKAKNQIHAVLMRQLVGRAPFSDLFGKRGRQWLAGLELPIEERESVDSALRQIEFLDSEIEAVERLVATEALESPEIRRLMTVPGVNVICAATFLAAIGDIGRFETPRKLVGYLGLDPKVRQSGTGPATHGRISKQGSASVRHALVEASWSVVRQPGPIRAFYQRVRSRRGHRVAVTAAARKLACLFWCLLSREEDYAYAQPSLTQKKLRLLQIRAGAKTLKGTPTGTWATRQKMRTAEKGLAAQAEAAYRRSVRDWHAIQAKRRGAGATPGRASRGPSSGQAARQDEAPTPAL

SEQ ID NO: 385056 - protein, 316 aa, unidentified
MAKLVSEITLGIDVSKDELVICNWDTNELTTLANQDSTIKTWLKSSYGPLRIAIEPTSSYHLEMVEQAHALGFAVYLINPRQLAHYRKAVGERNKTDPADARLLARYLAHESASLRPFKPQSAKAQRLWALIKRRGVVVAARQKLQQSFREIKLPAKALFTEIQKVIARIDQQIQALITELGWRADYHRCLSIPGIGPANSAALTAVFHRGAFAGSDAYVAFIGLDIRVRESGKFKGQRKLTKCGEAEIRRLLYCAAQAARSYQPFDDYLQLQLAKGLSKIASKTILARKLARIAFTLLTNKQSFKKQQIAYSISP

SEQ ID NO: 385057 - protein, 341 aa, unidentified
MNYYVGIDVSLEASSVCVVDGNGKIVCEGKVASEPDALIAWLRKLKLQLTRIGLEAGPLSQWLYAAMRQAGLEVELLETRHVHNALKTMPVKTDRNDARGIAQLMRLGWFRPVHCKSIAAQETRALLTARKLVQVKLHDIELSLRGILRGFGLKVGPTTPVRFEGRIRELVAGHPSLEAIAESLLAVRVTLRREFERFEKQLRAMARCETRARLLTSVPGVGAIVSLTFAAAIDDPARFKSSKQVGAYFGLTPSKYQSGETDIDGRISKIGDAWVRAALYEAAHIILTKPLKGCTALKSWAMKLARRSGMKKAKVALARKLAVIMHRMLADGISFRNVAAI

SEQ ID NO: 385058 - protein, 350 aa, unidentified
MNVNYYIGFDVHKKSVSYCVKTADGTIVEEGKLRATHDALRQWARQRREPWRGAMEATLFSGWIYDTLQPFAAELQMGHPALMKAIAASKKKNDKLDARKIADMVRCNLLPACYVAPAEIRELRRMLRYRNLVVGQATRMKNKMSGLLMEVGAEYNKERLHGKQYFTQLLDTVAEVPDSVKDLLRLSRGAMETFETTQQQLLARLRKDPLLSRRVMLLESIRGVGEVTALTWALEVGDPHRFSSVAHAVSYCGLTSALVSSADKQQRGPLSKQRNAHLQTVLVEAAKLAPRWNPQLAAIHARELERGNRNRATLAVARKLVAYLLAVDKSGQPFEVRSTPAAETEAQQVA

SEQ ID NO: 385059 - protein, 409 aa, unidentified
MSTTFDCPTGPVAGIDTHTDTHTVAVISDTGRHIATDTFPATNPGYVAISEFMATYGVTTVGVEGTSSYGAGLTRHLRTQKYSVVEVLRPTRAVRRRDGKSDPVDAVAAARQVLTGEALSIPKDTSGPVESLRGLQITRRQLVMTAAKLMTTIKSLLVTAPDEIRRRYSAMPTLVMVEALSRCRPSADLADPRNGVLLALKTLATTYRDLQKQGTQLEKHISILVEMINPHVTSIFGCGSVVAADLIVSVGDNPGRIHSEAALAHLCGVAPIPASSGRTHRHRLNRGGDRRANSALHRIALVRMHHDQRTRDYVAKRTKEGLSKKEILRCLKRAIVREVYRVLCLGQAVLPTGQVEVDELKARRIERQLSQAQVAEKLGCAPARISDIETGKRPLPELRLAYEELLKSA

SEQ ID NO: 385060 - protein, 401 aa, unidentified
MQTVRDNASRVKRFRELKATLRTNRQRLLVGLDIAQAEHVVHLRHAHTRVVTPALTIPNTTRGFAQLWARIQQAQRATGCREIVCGLEPTGTYHQAVAAFLERQGADVVLISSSVAYWNRRTQDGTWDKHDRKDAANCAELLEQGKVLFYSQPTGPLAELRHLVKLLRRARAELASCKARWRTTLRPALGPMGEPLPNRLRAELPAGLQAWEPAASGRPAVPKGRLPLGLATACADLGAQVTAVQARIATLEAACTPVADRLPAYALLRTIPGIGPTVGAILLAEIGDIAWFTQFSQLRKLAGLDIVRVQSGQFAGQARISKCGRGLLRWALYQAALGAARTVAGRARLAALKAKRHGDRFAGFKALVELAAKVLRVVWGVWRSGTPYDPMRAGGLRRQPR

SEQ ID NO: 385061 - protein, 412 aa, unidentified
MEVVHPRCAGLDVSKRDVKVCVRIQGRGSRPTRATVTTWGSTTRQILALRDMLVAEGVGMVVIESTGTYWKPFYYLLEDHLPLTLVNAREAKTVPGRKTDVADAEWLADLGAHGLVRASLVPPPPIRELRDLTRTRATIARDRAREVQRLEKLLEDAQIKLSSVVTDLCGAASRRILTAMMSGVTDPTALVLLRGGLKVSAADLTDALTGRFTEHHAFMTRLLLNRIDQHNAAIQHLEQRIEQKINSLNAPRELLTSIPGVSRTVADIIIAETGADMTAFPTAAHLCSWAGVSPGQHESAGRRKTAPTRPGNLHLKAALGTAAMSTTRQRNTYLCAKYRRIAARRGKLRAVVAIERAILTAVWHMLSTGSYYQDPGPDYYSRHDPSKRAARAVRALRALGYQVTVHPAAVTN

SEQ ID NO: 385062 - protein, 344 aa, unidentified
MNYHTALDVSLRSVSICIVDDAGTIQFEDKIISEVDMIVACLKKFNPNIRSVGFEAGALTQYLTYGLQAAGYEVICLEARQVSAALSAMRNKTDKNDARGIAQILRTGWYSRVHVKSMESHLIRAMLTARKTTLKKCVDLENEIRGLIRLLGIKLPPTVKHGAFNELVRHEIEDHDVLAHSLIPLLDARLVLYETYLKLDSQVLAMARKDAICQRLMTAPGVGAITALTFKAGVDDPTRFKRSRTVAAHFGLTPRRFQSGELDNPGRISKAGDADVRAALDIAAHSLVIRSTEWSSLKVWGLRLLKTKGHRRAVIAVARKLAVILHKMWMDGSEFRHGSTEVML

SEQ ID NO: 385063 - protein, 340 aa, unidentified
MRRLYAGSDLHGNNNLMGIVDEEGKRIFKKRLPNEPELILEVLKPYKEEIVGVVVESTYNWYWLVDALMDEGYKVHLANPSAIEQYSGLKHADDKHDAFWLGEMLRLGILPEGYIYPKEERPVRDLLRKRSHLVRLRTSLMISLQNILSRNLGRKMSVNDVKAVKEDRVSPLLEKNEDLALAGRVSKEAIDHLTHQIFKIEWVVQKKVALKPEYRYLPGVFGVGKILSLTIMLETGPISRFPTVGDYVSYCRKVPSQWMSNGKWKGSGNRKNGNKYLAWAYSEASEFARQLYPEARAYYQRKMQKTNAPVAHSALAHKLARAAYYVMRDHVPFEPQRLFG

SEQ ID NO: 385064 - protein, 409 aa, unidentified
MRLFVGLDVSSFDIKVCILNGEGKKLDSFSVNNDLPGATAIKERLLQRIANQEVKTFKIGLESTSVYSFHPSMFLHYDEDLQRFGAKVFLMNPKQIANFKKSYSDMDKTDEIDAFVIADYLRFGRNQMSIVKESQYVALQQLTRSRYQLVRMLTKEKQHFLQHLSYKCNTFSQEVDSSIFGNAMMELFLEKFSLEELADMSLDELAEFLQMKGKNRFGDPKCVASTIQKAVRSSYRLDKVVEDSIDVLLGTSIAVIRTYQQQIKEIEKSIKRIMAGLTQTLESIPGIGPVFAAGIIAEIGQIERFDDETKIAKYAGLYWRTHQSGRFTAENTSLSRNGNHYLRYYLVEAANSVRKHVSDYQEYYVKKYNEVPKHQHKRALVLTARKLVRLVDALLRSHQLFAPERGVKV

SEQ ID NO: 385065 - protein, 466 aa, unidentified
MKNNYILYVGMDVSKGKADAAILKVSDRRSVKPKFLRKKLSFKFVKSEVASFLETVRSYSDVNCTSICFALEVTGIYSTNVYDYIKANLYENESIKFLNTDFVNQWRIAHNIAKSDPLDAQTISTIIGTDLDVQYVNDNVFENKNGYQDLKALVHRHYQIKKIYSQEINRLIAQCDCLFPELQYVFEPKSAAFIAVLSSYPTTHDIINTSRVEVFDVVYEATKHRCSMDKVDKLFELCQDTLVPDDISSYGKSIILDLVENIKNIKGQLKSIERYIKDIASLNPAYKLLLTITGCGPITAATVIAETGNIRRFKNADCFVSYSGTSPRNKRSGTSVETMGKISKKGSRYLRHAIYMIAEFARRHNPVLKHQFERIKNGNKKRHKLANIAIANKIARYIYSIMKNKSSFVILHDHIMRLPEETRDTFFNSISLDFPKNTRKQIYQYSDINGELHRFVYIKTDEMIPA

SEQ ID NO: 385066 - protein, 345 aa, unidentified
MTEAYDGRQVVGIDLHRRRSVIVRMTEDGRKLETVRITNSAAALRREIAKAGKHPRVVVEATYGWYWAADVLEAAGAEVHLAHPLGVQAYSCRRVKNDQRDAADLADLLRMGRLPEAWIAPPEIRELREITRYRHKLVQARTSVKDQVHAVLAKLGIPVTHTDIFGVHGQAWLDGLRLPQPYAGKVTSLRQLAGELSAEITLLEQVLGDLLAGHEGYAAIRQLPGIGPVLAAVIVAEIGDITRFRKAGQLACWAGLTPRHRESDAKVTRGHISKQGPRILRWALCEAIQHQPAGTRPRQVKDGIIARRGPQARNIAKTAAARELLTLIFYAMRDGRVRRAASPAA

SEQ ID NO: 385067 - protein, 296 aa, unidentified
MISNPSTSTRLSTIGLDIAKSVFQVHGVDAAGEVVVRRKLTRGRVLAFFESLPRCLVGIEACSSSHYWARELTSRGHDVRLLPAQYVKPYLKRQKNDAADAEAICQAVTRPTMCFVPVKSPELNRQRTQISNALRAHVSEFGVVAPIGRNGIEQLLVVINDENDARIPTDARLCLRMLEAQLRVVKEQILENDRRVRASARETELSRRLMEIPGVGPLLASAFVATVADAHAFKSGRCLSAWIGLVPKQNSSGGKEKLGSISKAGNRYLRQLLVVGAMAVIRYAERNGTRSHGSCS

SEQ ID NO: 385068 - protein, 321 aa, unidentified
MTYVGIDVSKATFVVAYSSAKTGRTKTFKNTVKGVHEFIQTISVTEHHCLLEATGNYSALLVYLLSEAGITVSLENPLKIKNFARAMLAVTKTDEIDARLIALYGERMQPAPYKLRSDSILVLKQKRTVLRQLKKQLVATRNLKGSMEALPFFDPKCKKTIERTIAFLDKQIKGMEEEIASLPQGEYKKQMDLLTSIKGIGVTLAAALIVATGGFTYFDNAKQLTRYLGLSPTYQQSGTSVNVKGHINRNGDSNLRSQLYVAAFSSLRCNTECKACFDRLRSNGKPGKVAVVAVANKLVRQAFAVATQGKPYVDGFKSERP

SEQ ID NO: 385069 - protein, 322 aa, unidentified
MQGKMTSVRAELAVYAGIDVCKAWLDVYVHPTGQSFRVPNSKKGCKHLALELTSANAGLIVMEATGKLHRLCHRELSAAGFAVAIVNPYRSRKLADAFGQLAKTDAIDARLLALYGEAISPAVTPVPAKTLAELQELVLARQAAKAQETALKNQYGAAESPVLKRLLKALLDAQARLIDGLKAAIAAILSKDAGLKRRFEILASIKGVGPVVAATLVACLSELGVLSGGKIALLAGVAPINCDSGEMRGQRHIKGGHAHVRSALYMAAVCAIRCNPDLKAFNDRLRAAGKAPKVALTTVMQKLVRLANTLITKDRFWIPKHA

SEQ ID NO: 385070 - protein, 457 aa, unidentified
MNNFYLGIDVSKGYADFVIINHSKKPVMKRFQLDDSFDGHSQLYQIIKSFCNQNPGCRIMAGVESSGGYENNWYQTLFNFQNFFDLRVAHLNPLAVCHSRSADLKRTITDAVSAISIAEYLISHPEKVTYQKQLNPLQSHSKQLGFIIMLEKQYTLFRNQFESIIYGANPTIMAYCKDGMPEWVLKLLIKFPTAKQLSRVKPHTVAKIPYITKERALELISDAKKSIASSTDDMTGDLIKAYAQQMLNLKSTIKIQKKALEKSCDIPEVKLLQTVNGIGAFSAVALMIYIQNIERFQSAKKISAFFGLHPVFKQSGDGTSRIQMSKQGQKNVRRILFMVTLNAIQSNPLIREIYESKVSQGMEKMAAIGLCMHKLLRIIYGMLKTNKPFDPEIDRCNRQKSIVADKGIKKDKNRRLQDYDPKAPISRRQHSKRVERKKSQSDNITKCRIIASVPETT

SEQ ID NO: 385071 - protein, 382 aa, unidentified
MDTTERALQGRETAVTCRLFVAFELGEKNWKLSLGDGVRAPSRCAVPAGDTASVLSAITKARSRCHLHSDALVLSCYEAGRDGFWLHRWLTAQGIANLVVDSASIEVNRRARRAKTDRLDADKLLSMLMRYYAGEHRVWAVARVPSPEQEDERRLHRELERLRHERTAHINRIRSLLVLHNLRVDRVGGRNWARWWAEHALQLLPSLRAEIERECERLKLVIEQVKTLEADQERQVRSGAQPSVAALSRLTGVGTGSAWTLLKELFGWRKFRNRRELAASLGLAPTPYSSGTSETEQGISKAGNRRGRWLMVELAWSWLRFQPASQLSQWFRKRFADAGKRARRIGIVALARRLAIAFWRYVEHGEIPLGATLKTTRAVVGA

SEQ ID NO: 385072 - protein, 363 aa, unidentified
MADGICFAGLDVHARKVSAAAVLLGSGEVFRAQLGGSPEDAIGWLRSLPGDVRAVYEAGPTGFGLARAARAAGVEMIVCSPGSIPRQPGDRVKTDARDALKLARLLAAGQLRAVLVPEPPLEALRDLVRAREDLRGDLMATRHRISKMLLRRGLVWSGPGETWSRRHLEWLSKARFGEPLAEIVFGEYLACHEVLLARRDRLDRLIVEQAADERWAPIVGRLRCLRGIDTLSAVGLVAEIGDPHAFSHPKRLASYLGLVPSERSSGMTRRQGSITKAGSSHARRLLVEAAWHYRRPPRVSLTLARRQQRQPPAAIETAWRAQLRLHQRWAHLDGIRAKRRTSVAVAVARELACFVWELARQPN

SEQ ID NO: 385073 - protein, 422 aa, unidentified
MLGVGLDWAESFHDVALGVPGKGVIEQFRFDHGPAGTQRLIGRCLELEPDPAEVRVVIETRHGLLVEALSDAGFTVLPVNPDLVARRRGPAKKKDDAEDARICCLVALDAYLELRKLIPHGENGTELRAIARDDVRAARDERRLGNRLRADLLAVFGAAIDIADGDLNAPTFLKLIQRWPSADQLATATRADLEAFARSCRHGWPDAFAGRVLDALAQPRLNVRPELARAKAGSIGLAAAQLLLLRAQRREWERRMGELLLGGRRPRPGVAPKETDPGKAFPGGETYLSMPGLGDRLAARVAGEIGEHWDQFTTPNALQCYAGRAPVTRRSGRSEFTIARRLAYNRYLGEAVQQWAFCSLTRSTWAREFYDSKIAKGDRHHTALRKLANRWLDVLWHCLRLGVPYDENVHTSNRNRALKPAA

SEQ ID NO: 385074 - protein, 409 aa, unidentified
MRIIGMDIHRGFAEAVAWDDGKLKRLGRADMRRHLLEAFAKKLANEDVVVIEATGNAASVAAVIAPHVKKVVIANPKQVRIIAYAKIKTDRIDAGVLAQLYASGFLPEVWIPDEPTQALRRQVTRRNQIVRQRSRLKNIIQSILHSHLIPSCPHADLCGASGRAWLFHQVLPEDERLAVERHLREFDRLGEDLKVIERDLARSALGNEGVKRLMTIPGVDMVVALAIVAAIGDVGRFERPEKLASYLGLNPSVRQSGPGPAHHGRITKQGRGHARGMLVEAAWAAARAPGPLRAFFLRVRARRGQHVAAVAMARKLAVIIWRLLSKGESYAWARPALHAKKLRDLELKAGYKAERGQRGPACAYNIKSHRDQERRWVEQAEAAYARFVASWNPRGPRLARTGAANEVRR

SEQ ID NO: 385075 - protein, 402 aa, unidentified
MNAVGIDVSKGKSMVAIMRPFGEIVSTPFEIKHTASDIHSLVELINSVEGESRIVMEHTGRYYEVLAHQLSKANLFVSAINPKLIKDFDNDSLRKVKSDKADAVKIARYALDKWQNLKQYNVMDELRNQLKTMNRQFGFYMKHKTAMKNNLIGILDQTYPGVNTYFDSPARSDGSQKWVDFASTYWHVDCVRKMSLNAFIDHYQNWCKRKKYNFSKSKAEEIYGKAKELVPVLPKDAITKLIIKQAVDQLNSASTTVESLRTLMNETASKLPEYPVVMAMKGVGTSLGPQLMAEIGDVSRFTHKSAITAFAGVDPGVNESGTYEQKSVPTSKRGSSDLRKTLFQVMDVLIKTHPQDDPVYQFLDKKRAQGKPYYVYMTAGANKFLRIYYGRVKEYLSSLPES

SEQ ID NO: 385076 - protein, 421 aa, unidentified
MSYRVAAIDIHKKVLMVVVATGAEEVADATAEALEFECRRFGAGSSERNHVVGWLQERGVTEVVMESTAPYWKPVWLDLESHFAKLHLAQAHSNRAPKGRKNDFGDAKRLARRLLAGELLLSFVPAPEQRTWRTLTRGKQQLIRDRVQLQNQLEALLEEMRIKLSSVISDLLGVSGRRILTGLSAGEADPVKLAQWGDDRLKCSQAELADALRGAPTPIHLALLKLFLKRLKLLDEQIQELDQLVAKELKKHEEAVTRVAEIPGFGVNSAQQIIAEVGVDAETFPSAGEFSSWVGVCPGSNISAEQNHSSRSPKGNRFVRTILTQAAQAAVRKKGCHFQSVFRRFLPKLGYNGAIWVIAHRLACLLWKILHTGVRYIEQGAETNPRAKKRRAQKLAQALRKLGYAVALTPITPDAPVTGQA

SEQ ID NO: 385077 - protein, 395 aa, unidentified
MFIVGIDIAKRSHEAIIIAEDGQVVRKAFSFRNNCTGYNLLLEQVRRLTLVKSQIVFAMESTAHYWLALYARLLKDGYAVMVLNPIQSHSLRELYIRKAKTDARDSLIIADLVRFGRCKASNVPQDKILALRELCRSRAYLVDMAADLKRKLIALLDRIFPEYEFLFDSVFSKASIAVLSKYSTPQKVKNANLRKLTDILMESSNGHFGEWKAHQLKEAACSSFGIDDSDGVYSTLLGMFLEQILSLTAQADSLEKQISVFFQEFNNPLNSIPGVGTILAATILSEIGDITRFSSADKLLAYAGLDPSVKQSGEFKSNQNRMSKRGSPYLRRAIWLASTVAVHRDPMFQTYYEKKISEGLHYMNVIGHVSRKMTAVIFAVLRDGQPYQPVLQTAD

SEQ ID NO: 385078 - protein, 304 aa, unidentified
MNGIGIDVSKRRLDIGTTDGQTLQVSNSPSGYAELSTWLSTRPAIQIVLEATGGYEQTVLDFLHKAGHPVIRANALRARRLAQGLGKVAKTDRVDALVLAQMAALVELPSYQPLEPWQRKLREFVRARRQTMQALTVARQQQEMVTDRELRRQMQGNIIRLQTLVERLGKQISEQVAQHPQLAVLKSMKGVGPALQAVLASYLPELGQISGKAIASLVGVAPISHDSGAMRGRRSIHGGRAEIRQVLYMAAMSAMRHEPRLRDFYRSLRARGKEGKVAIVAVMRKMLVILNARVRDAENGLVPA

SEQ ID NO: 385079 - protein, 401 aa, unidentified
MKSLSGGIDIGSESHHVIIMDDTGEVLYDRKVAHQFSEFHKVIGEFKGIEEREQGVIAFAIEGKNGYGAPFDRILIENGFKLYNVDNLKLRRFRDVFGSEWRNDRRDAKMLAKMLRLKDHMDAQEEKAFIAVEKPSAVHEKLRILSRHQQSLIDEKVRIQSRLRKRLLEVCPDILEHGDTNSKKLLQLLKKYPDFSRYKKITLGALLKIETIGKKTAVSILEGLRNIQYVEELTGIYKALISSYCHRILELKEEIKMLDRELEEAGQKSAEVMQLKSIKGVGTKLSSRLAGEIGDIRRFNRESQLAVYCGVACIDDDSGKSKRTKAIYKANRICKATMIEIAGCTIRHVQESKTYYEKKRAEGKKHNHALRCLARQLIKVIFKMLTENREYIYKEELKKAA

SEQ ID NO: 385080 - protein, 374 aa, unidentified
MSSNVCHQIIYLAIELSSSSWVIAYRVPRNDKAKLHRLEAGDGAGLLAFIAGLRHRLDPPDDAPTLVVSCFEAGRDGFWLHRLLTAHGVINHVVEPTSILVTRGARRAKTDRLDAVGLLRVLAARFAGDPGACRTVVVPSVEEEDAKRPHREREFLVQERVRIENRIAALLATQGVRERPSLRSWDADMRALRTGDGRPLPTHLVAELNRLRRRLSLTLEMIRELDAVREQALEAQHDSASRTVKALCTIRGIGVNFASVLTREVFYRTFDNRRQIASYLGLAPTPFQSGGMDRDRRINRAGNSRARKTLVQLAWLWLRYQPESSHTAWFRARVGSLQGRIRRITIVALARKLLIAIWRFVTLGLAPEGAIIAA

SEQ ID NO: 385081 - protein, 449 aa, unidentified
MEIINSNAAGIDVGSKSHFVAVGQSLEDVKEFGVYAEDLTELCLHLKEYGITTVAMESTGDYWQNLYVELINHEIEVVLCNGKFTKHAKGKKTDVKDCRWIQKLHALGLLSGSFLPDETTEILRTYCRQRSNWIDLASSASHKMQKYLKLLNFRLDVVVKDICGLTGTRIIEDICKGNLDPEALSEHRHSNCRKPKEEIAKALHGNNRKDYLFGLKQEYESYQFYQEKKKDCDKEIEELVNQEINRDPDKVKLNTTDKPHKRINKNSPEIKDFNQVAFRYFGGVDFMAIEGLGHSTVMTLMSEVGVEGLFKFPTGKHFTSWLRLAPNNKISGGKVLSHRVPKGSNRLKIALRQSANAIGNLKDTHLSDFFNRIAYRKGRQAAVSATARKLAIIIWTMATKKVPYSPPTEYLFLDQKRRLKAVQRIKKNIAKFDIKPEDIGFNNSLNFSC

SEQ ID NO: 385082 - protein, 353 aa, unidentified
MKKIVKQVVGIDVAQKELVVCLGRMYRDLTFELYAHKTFANTKNGFTTLLLWIKKMTDAGIAVCYVMEATGVYHEPLAYYLDEQGCELSIVLPNKISNYFRSLDVKTITDKTASQTIARFGLERNLDKWKRPKEIYKKLRQLTRERDQIVQERTIVKNQLHAEQAEAQPNKKSITRIKQRIALLDKQEKEIQKELASLIKEDKEMHALVIILCSLPGVGLLTAAIVLAETNGFELIRNKRQLASYAGFDVKEKQSGTSVKAKPRISKRGNKYLRKAMHLPALTAIRHDERFKNIFIRLVSKHGIKMKAAVAVQRKLLEMIFTIATKKMKYDKNYFNATDKVQTEDISKNKTAA

SEQ ID NO: 385083 - protein, 345 aa, unidentified
MNYFTGIDVSLRFVSICVVDEAGVVRYEEKVAAEVDVIVASLRRFSVEIKQVGFEAGALTQYLTYGLRAAGFKVICLEARQVAATLAAMRNKTDRNDARGLAQILRSGWYRQVHVKSLESHQLRALLTSRKAILTKCIDLENELRGLLKIFGVRLAPRVGHGSFDATARSAITADPLLVRALVPLLDARTVLYKTYLKLDNAVKAVVRTDPICQRLMTVPGVGPVTSLTFKVGVDDPSRFRSSRTVAAHFGLTPRRYQSGETDNPGRISKAGDADVRCALYTAAHALMTRSDAWSTLKAWGLRLAKIRGHRRAVVAVARKLAVILHRMWIDGTAFRSSRTPEVTA

SEQ ID NO: 385084 - protein, 405 aa, unidentified
MDIIIERACGLDVHKDNITACILTPEGKEVQTFSTKTIFLLKLLDWIKENKCTHVAMESTSVYWKPIVNLLESEGIEFLVVNAQHMKALPGRKTDVKDAEWIAQLLRHGLLKASFIPNRDQRELRELVRYRRSIIEERARQLNRIQKVLEGANIKLGSVVSEIDGVSSTDMLRAIANGEDDPEILSNFARGTLKKKKEELKLALQGHIHPHQRLMIKTILTHIDFLSEQIEMLDKEIANRVSSNQEDIERLDSIPGIATRMAEQIFAEIGANFGDQFPSASNLCSWAALVPGHNESAGKRKSSKSKKGNKYLKSALVEAAQSVRGSKNYLGALYRRTAGRKGQKKAAIVVAHAMLRIAYYLLTRKEMYVDLGEDYFDKQRQESIVRHSVRRLENLGYTVNITEAS

SEQ ID NO: 385085 - protein, 346 aa, unidentified
MKKIFIGIDFSKEKFDATAIKAKGVEECAQRQHEVFDNKVSGFRRLLRWVKSVVDEPDTGLWLFCGENTGGYSKARCNFLYGCGYDMWLENALSIKRSSALQRVKSDKADSGIIAEYAMRNYDQMRLYKPLGRNLERLREVFLYRHNLVKLKVCITLRKGEKLLTQQKSDISRFMAMSSKHLISEFNKKIAECDKRIQQIIDEDEELQRNFEIITSVPGVGAQNAVCLMVYTDNFSRFDYDSRKIACYYGVAPFGRQSGTSVNTPAHVSPFANKLIKALLTQAALASVNFCPQMAIYYHRLLEAGKKKPVAVNNVKNKLLHVITAMVRKGEKYNPDYDYHAAIEAA

SEQ ID NO: 385086 - protein, 369 aa, unidentified
MREYSEVYVAFDVSKTKHAVAIADGGRSGEVRFFGEVSSSPAAVERLLRKLAGRYGKLHFCYEAGPTGYGLYRQIEALGHDCLVVAPALIPKRPGERVKTNRRDAVTLARLHRAGELTGVWVPDATHEAVRDLVRAREAAADDRRRKRQQLLSFLLRLGRIYSGGGHWTLAHRRWLAKQSFEHPAQQIVFQEAIDAIEDADQRLHRLEQQLVLIVPSWSMARVVEAYQAMRGASFIVAVTFSAEIGDVRRFDSPRQLMSFLGLVPAESSTGETVRRKGLTLAGNRRARRVLVEAAWTYRYPARVGDTLRGRLDGLPKAVRDIAWKAQIRLCARYRRLSNAGKKLPVVVAAIAREMAAFLWAIGREVAPA

SEQ ID NO: 385087 - protein, 359 aa, unidentified
MSILADTVDGVIGVDTHRDTLAAAALSPVGGILAQTATRADATGYQELLEFADTQTLRDPARRCWAVEGTGSYGAGLTAFLHTHGERVVEVARPKRPARRTGAKTDAIDAVRAARETLGHQHQTLPRRRGDREALRVLLTTRRHATSSRVAAINQLKALIVGAPEELRAELRGVATKGQIDRCVGLRDRPARPLEHRTTVCALRTTAGRIRALQAEIDDLTAALDPLVASIAPWLVELPGVGPITAAQILVSWSYAGRLRSEAAFAALAGTNPIPASSGQVTRHRLNRSGDRQLNAALHTIALTRLRYDPETRAYAARRTTQGKTRRDVKRCLKRSIARQLFKLLERYDQPGVEIIRAA

SEQ ID NO: 385088 - protein, 403 aa, unidentified
MTKDSRIVFGGVDTHRDVHVAAVVDERGRILDTAPFEANSKGYAALRKWMNGFGPLIKVGVEGTGSYGAGLAHHLQSSGAEVVEVNRPNRQMRRQRGKSDTVDAEAAARAALNGEASVVPKSHDDSVESIRVLRVAYCSARDTRTRLALQIRDLVVTAPASLRENLPARTKERVARCASFRPGDPRDPLEATRLALKSLSRRYQELSVDMEELTTILDRLTLEANPALRAAKGVGVDVAATLLVAAGSNCGRLRSEAAFAAMCGVSPVQASSGLTTRHRLNRSGNRQANNALWRVVMNRMIYDDETKAYLARRTAEGKTKRDVTRCLKRHIVREVFWLLKNPAYEEIGPQLRVARKAAHVTLQSVSDDLHVWPTKVSRVERGLDHDNDFIERYKKWLATRIAA

SEQ ID NO: 385089 - protein, 389 aa, unidentified
MYSYFVGIDIAKNTHWASCLSSDGEIILEPFSFSNDNSGFQKFISKLESLDKTKILIGLESTAHYGENIISYLFNLDYNIGLINPIQTANLRRSNIRKTKNDKVDTKTIIKALTLGNYSLITSRDINNLKLKGLCRSRRNLVTMRSKAKIQLVSYLDQIFPELAQFFKGNLHLNVSYQLLKEYSSPKQISSLHLTKLSNILHDNSHGRYNKQDAIRLRELAKNSVGIDNPSLSLQIKHSILQIELYNEQIAEVEALYKQILDEMNTPILSIPGMSYNQAAVIIGCIGDINRFEHSCQLLAYAGLDPSVIQSGNFQARSTRMSKRGSGMLRYSLVYSAHNVVKNNKTFRDYYELKRSQGKSHYCALGHVAHKLVRIIFKMLKDNVAFNLD

SEQ ID NO: 385090 - protein, 423 aa, unidentified
MSTITCVGIDVSKGRSTVAAMRPGGEVVMTPREVLHTAAGLAELVKDLSVLGGELRIVMEYTGAYYLPIARALCVGGFFVSVVHAKLVHDFGNNSIRRGKTDKKDAVKIANYGLANWLSLPQFHSEDAIRQQLKILNRQRSNYGKIKIALKNNLIALLDQTFPGVKNLFASYPRELNGHEKWIDFALTYWHRDCVSGISFARFVGSYSRWCKRMGYYFREEKAAALYNAAVTSVPVLGCDEVTKLIITQAAAQLNAVIDTQFSVQAEMDNLASQLTEYDTVMAMFGVGKILGAQLIAEIGDVTRFHSKRALTAFAGLDSPPFQSGTYEAKERKISKRGSPHLRRTLFNIAAIIAQRQPADNEVYKFLDRKRSEGKHYFVYMTAAANKFLRIYYGKVKASIQDANINSMNIATPSSSPEPTPAA

SEQ ID NO: 385091 - protein, 314 aa, unidentified
MVTPPVCVGIDVAKAYLDVHVLPAGKASRYRNSGAGIAALTKMLKDQGPALVVFEATGRLELPAASALASAGMPVAIVNPRQVRDYARATGELAKTDALDARVIASYGRDLHPEPRLVPDKENLVLQGLLARRRQLVSMMTAEKNRLDRAHPAARRDVREHIDWLHQRLKVVDRELHDLIKASAAWRARDALLQSVPGVGPIVSRTLLIDLPELGTTEHKAISKLVGVAPLNRDSGTMRAHRTTWGGRPHVRCALYMASLAAIRANPVIRDHYRKLRGEGKKPKVAQVACMRKLLVILNAIAQKGTPWEHSAET

SEQ ID NO: 385092 - protein, 328 aa, unidentified
MKYVGLDVHKEYIHGTVLDESGRVVKRGKFQHTRDGFEEFFNGIGDAKVAMEAGYCWQPGYELLEDMGLRVGLAHPLKTRLIADVKIKTDAKASEALAQLLMMGWLPTAYVPPEDIRRLRELTRLREYLVNIQTRFKNKVHSALMKEGIRGRRGIFAKRRRGSLQELEIDEVNRCLSILDVLDKHIKELSVMIRAIARESQEAKWLMSIPGVGYYSAVAILAEIGNISRFSDPENLCAYAGLVPSTKESGGKSAHGEITHQGSPVLRWILVECVWNHLLNAEDTSLTRFFHRVARNRGKQKAAVATARKLLKVMYVLLKEKRDFRDFR

SEQ ID NO: 385093 - protein, 344 aa, unidentified
MEITTIGLDIAKRVFQAHGVDSAGKAVLRRKLQRAEVLRFFASLPPCLVGIEACGTAHHWAREIRALGHEVRLMPASYVKPYVKRGKTDAADAEAVCEAVTRPTMRFVPVKTAEQQAVLMLHRTRDLLVRQRTMLVNALRGHMAELGIIASQGIGRVADLVAVLVGEDTASMPALARQALGGLAAELEALGKRVEEVEAAIVAWHKDNEASRRLASIPGIGPITASAIVATVTDPTQFHSARQFAAWIGLVPKQNSSGGKERRGGISKQGDRYLRRLLVLGATAVIRHARTKVTAETAWLRGVLDRRPARLASVAQANKTARIVWALLARGGSYRAPTAVQAAA

SEQ ID NO: 385094 - protein, 457 aa, unidentified
MMETKRRREQRSMLPVHPDAAAIDIGATVHVAAVGPARDPEPVRSFGTFTGDLHRLADWFAQCGIKTVVMESTGVYWIPIYEILEQRGFEVRVVNARDAKHVPGRKTDVSDAAWLQRLHEFGLLRGSFRPQGAIAALRAYLRQRERLLDYAAAHIQHMQKALTQMNLQIHHVISDITGATGMRIIRAIVAGERDPDTLASYRDIRCHSSVETVRQALIGNYREEHLFALAQALELYEVYQAKVATCDEKIEVVLERLKQPCRAPAKPLRAARHKTRQPNAPAFDARGALYAVLGVDLTQIHGLGPYLALKLISECGTDLSAWPSAKHFTSWLSLAPGNKISGGKILSSRTRPSGNRAAALLRLAATTVGRTETALGAFYRRLSARIGKAKAVTATARKIAVLFYNAVRHGMDYADPGASYYEERYRQRVLTNLQRRAKALGYVLQPTEIKVVSMAVS

SEQ ID NO: 385095 - protein, 303 aa, unidentified
MTTGLAAGTYELFVGIDIAATTAEVSTQRPGAKAGRSFKIDQTPEGFHRLVHTLQATDNEPSHVLVVMEATGSYWISLATRLVHEGFRVSVINPSQAHHFAKALLKRAKTDAIDAQTLAQLAMVLQPEPWMPPPQIYYELQQRLAQRDDLLNLRQQVRNQLHALDQHPEVIASVRTRMERLLVLFQSQIDEVEGEIAAALNQDSAWAAAAERLQSIKGVGWVTAAWTLVTTLNFTTCDTVDALTAYAGLAPMPRQSGSSVWHRPSIGHSGNGRLRTAFYMATLTAARFNPPIKTFYPYNVICT

SEQ ID NO: 385096 - protein, 351 aa, unidentified
MPRASTVHAVIAIGIDLGKNTLHMIGLDSSGAIVLREKVSRGHIASRLANLPPCLIGIEAGMATHYVARELTALGHDVKQVPATYAKPFRQGHKNDFRDAHAVAEAVQRPTTRFVPAKTDEQLDLQALHRVRSRLVSERTAVINQIRGFLLERGVIVRQGLRFLRQLLPDILAKRADVLSPRMVRIVTELAGDWRRLDERIETVTDEIEALAKSDDSCRRVMTVPGIGPIISSAMVAAIGNGVAFARGRDFSAWLGLVPKQMSTGDRTILGRISKRGNGYLRMLFMQAARVILLRPANWPKHGFGAWLARAAQRLHPNVLAAALANKLARIAWTVLAQERSYESRVKKAAA

SEQ ID NO: 385097 - protein, 355 aa, unidentified
MKNSKIDFAGKKVYLGIDVHRKTYALTAVCDAKVVHKVLMSANPQGLLTYLNSHYQRAEIFTAYEAGFSGFGLHRYLEINGIKNIVVNPSSIEVAARDKVKHDGRDSQKIAFHLAQGRLRGIRIPDPVEEDRRQVSRVREQLIEHRTAVGNQIKSRLIYFGLLDSDNQSVMSESFLKKVEVMELAEGLKFSLKHLTTLWRTLNQQVKECDQELKRQGKEDESKTRVYRSVPGIGINSARILANELGDMSQFPNERTLFNFVGLTPSEHSSGEFVHRGHISRQGSSCIRKVLTEVSWRAIYKDSALKADFDRISIRVGKKRAIIAVARRLIGRIRASFRKQEFFKIGYEPETQKAA

SEQ ID NO: 385098 - protein, 393 aa, unidentified
MPVLATQPEAAIAVRTDLCAIFVSLELSRSTWLITSLSPGGGEKMSKYSVSAGDIEGLFRRFGDLQERARVRTGQSFAVVTIQEAGLDGFWIHRVLEREGIESWVVDPASILTSRRRRRAKTDRIDGETLVRTLLAHKRGEPRVCAMLQAPTPEDEDRRRLCRERKVLTAERISHVNRIKGLLFAQGVRDYEPLRRDRRVRLEELKTGDGRCLPVHLKAQISRELDRLEVILVQLKAVDSERDALLAKGNEDQPPTPASLLVQLKGIGPEFAAVLWSEGLFRSFSNRRQVAAYAGLAPTPWQSGSIDHEQGVSKAGNSRLRTTMIQLAWLWLQHQPGSALSIWFRERVQRNGGRGKKTAIVAMARKLLIALWKYAAHGVLIEGAVANTAFEKG

SEQ ID NO: 385099 - protein, 354 aa, unidentified
MESVTYVGLDVHKSLVVATALDPMGNRIDQRKFGPTDSELIEYLAGLPGEKHVALEATTVSEHYYDAAESTGASVVISNPLKTRLIAETSLKNDRVDSEALAQLLRLNALPTAFAPPHELRALRRLARDWVFFQRKLVAMRNHTYSLLLAKGIPYSERLLSRKRQREELRGRHPEIDRGLDAVIVLEGLLRPLEKTLKEVYESNPQAQLVGSIPGLGPVTSVVLVAFLTPIERFRNVRQVIAYCGLCPTNFQSADSSYQGHLRNDCNHLLQWILVEASWRHRRRARSGLAARAGKRAARRHSRGGGAVTAAHRLTQLVYAVLRRGTPYTDHSPGRSRHWGGPVMPAETSAVTCS

SEQ ID NO: 385100 - protein, 415 aa, unidentified
MKKRTYRAKKVNQINWDQVKEHLAGEAAVFAIDVAKEKQYALLTNEDNSVSELFWWNHPQQTPGLLNELHGLACPMTVVMESTGTYGDALRYQFRQIGCDIYQASAKRVADAREVYDGVPSLHDAKAATIITRLHREGLTRPWQELTAQERELNALRREYDMHQSQYQRNQNRLEAYLNRHWPEVCCLLALDSVTLENLLREYGSAEYIAADAEAVAQKMMCWGKSRLTEKKIAQVIDSAAHTLGQPCTEAERHYLQALAEEMGHNRCQRKQAKQALEAIIRSDDELQEMATLIGLVTTAVLMSCHLDPRRFLCARSYQKAMGLNLKERSSGRHIGQLKLTKRGSSIARRYLYFAALRLIHNDPVVKQWYHNKVDPRARNKAVIAVMRKLAKALWHVGRGEVFDANKLLTVAKAA

SEQ ID NO: 385101 - protein, 392 aa, unidentified
MEDRTMSLPPAASHDDAVRCLLAIELSKKSWIVAVNTPLSDKISRYTLKPCDWKELLKLSERIRTRVAGELKKRVDVVCCYEAGYDGFWLHRLLEAQGIRNYVIDPASVQVDRRARRAKTDRVDVERLLRSLMAYLRGEPKVWSVVRVPSVAEEDDRRLHRERGRLIRERIQHVNRIKGLLAIHGIYDYQPLHRDRMQRLKGLHTADGRQLSPRLKAEIVRELQRLELVLGMIETIEAERDAIASAKTKAKTKVEHSNAKKIQDLVKIKCIGPEFATALVSEVFYRSFDNRKQLAGYVGLTPSHFQSGPMCRDQGISKAGNTMARTTMVELAWMWLQHQPGSPLSVWFHNRVGKLKGRIRRITIVAVARKLLIALWRYLETGLVPDGAILKV

SEQ ID NO: 385102 - protein, 407 aa, unidentified
MEVLSPRCAGLDVHAASVTACIRIASGAEVSYQHHTVPTTTRGLMELADRLTAAQCTHVGMEATGVYWRPVWHVLEGAFTIVLANAMHIRNVPGRKSDTNDATWIADLLAHGLIRSSFVPPAAIQELRDLTRTRKQLVREIARHTLRIQKTLEDANVKLTRVVSDILGASGRAILKALIAGETDPLQLADLTQGRLKATRNELVEALHGRVTPHHRYLIQLHLTQIEGLESAVRDLEAHLGEGLAPFRAAISLLTTMPGLSETAARVIVAEVGVDMTRFPSAGHLVSWAGLCPRLDISAGKRHSTRTRHGAPWLKTTLVQAAWGATRKKGSYLQAQFLRLKARRGPKKAILAVAASMLTSAYFMLRDGVEYHDLGPQYFAQRDKEQIAKRLLRRLRDLGVNVEVKVA

SEQ ID NO: 385103 - protein, 341 aa, unidentified
MQITTIGFDLAKNVFQFHGIDAAEKVVVRKPLRRGQVIKFFAGLSPCLVGMEACASAHYWARELTRLGHEVRLMPAKDVKAYVKRNKNDAADAEAICEAVRRPTMRFVQVKSAAQQGRLMQHRTRDLLLRQRTQAINALRAHLAELGIVAAQGREGLKELLAIIADEGDARLPLDARASLIVLAAQLQALQTLIGSIEKRLAVQHRANEASKRLISIPGIGIIGASAIASTVTDPKAFRSGRDFAAWIGLVPRQDSTGGKQKLGPISKQGDRYLRRILVVGAHSVLRRAKLNPEKYPWLTQLLARRPFKVVAIALANKMARVAWALLARGGTYRVPRLAAA

SEQ ID NO: 385104 - protein, 427 aa, unidentified
MKTKPDSYLHYSALAGVDWGHFEHAVSQVTDLTETNPTPTQFMLGSAPEKIQQWLQRLNQQTSGGPVAVAVEAGNGAFIEQLSHCPFVDTYVLNPATTSKLRKAFKPSGAKDDLPDSKLHLDIITRHWDDIRLLSPHGTIDKKLGTLCAKRRGLVDKSNDVTNELRDTLKGYYPLALEMATELNSRMSTSFLKRWPTLGDLKKAREATITKFFIDSCCRNRKKIEERLLLIKSAREVSEDRELISVEAEYMVMLVNQVELLREQVSKLDELIETAFQNHPDRVIWDSFPGSGVVLSPRLAAAWGTDQGRFENAQEMQLMSGTAPVTEKSGKQKPKVHRRWSRPKFMHQTFWEFAQYSTKFCAWAKAYLDDQISKGKKHSTAVRSLAFKWQRIMYTCWLNGEPYDDEKYNQSLLKSGSRFAQPNIQNA

SEQ ID NO: 385105 - protein, 370 aa, unidentified
MSKSTLFVGMDVHQDSVVIAVLPEGAAECEEPRTFPNDIAKLKKFFAKLSKRSDVRACYEASGCGYVLQRALTKWGVACEVIAPSLIPKRSGDRRKTDKRDAIKLARLYRAGELTSIRIPDEAEEQVRSLVRCRETFTREILKSRHYILKLLQSRGYVYRAGSNWTLAYWTWLRKITLEGADATTLQIYVELLEHKLIQRDTLDEQIKQIAFADPYRKPVGLLRCMRGIDTLTAMTLICEIGDVRRFASPRHLMGYLGLTVSESSSGGVERRGGITKAGNARARRVLVEAAWHYRYPARSSRALQKRQEGQSAAVIAHAWRAQKRLHKKFNALAFRMAPTKAVVAVARELVGFVWALLQDDAAKLQQRIR

SEQ ID NO: 385106 - protein, 414 aa, unidentified
MERVYERCAALDVHKAQLTACAHVPDRQGKRSELCAEFSTMTAELLALRDWLLGLGVTHVAMEATGVYWKPVYYLLEDDFELSLVNAQHVKNVPGRKTDLKDAQWVCQLLEHGLVKSSFVPPKPIRELRDLTRYRKSLVWERAREANRLHKVLEDANIKLDCVASRPFGASGKAMLKELCEGNNDPVALADLAKGKLRAKLPALRLALEGRFRDHHALLVSHLLAHIEYLDETIGSLSEEVEERMRPFERKRELLCTIPGVAERTAEVIIAELGPDMDRFPTHRHAASWAAICPGHDESAGKRRSGKTRKGDSWLRTALIEAAQSAAGRTKDTYLHSQYLRIKRRRGHKKAIVAVAHSILVAAYYILRDEVPYQELGGDYFVRREDQERLTRRLVRQLERLGQRVTLEPALEAR

SEQ ID NO: 385107 - protein, 337 aa, unidentified
MDFNYFIGIDVSKKTLDFCLLRGGKALLHLQTENSSKGVQAFMDQSKQQFGLVLKESLFCMEHTGIYNYPVLDFLSEKQASIWLESALHIKHSSGLQRGKNDQVDAERIAFYCYRNHDNVRLWRPTRQVIKELKNLTALRTRLINAKKQLKSSWQEGEGFLDKASQKKIQQCCLCSLKDLDQDLVKVGKELDQLIASDKELNRLFNLITSVEGIGAVTAREVLITTNEFKDFNEAKKYACYAGVAPFQHQPGTSIRGKSRVSHLANKTVKTLLHMSALTAIRNCEELRNYYQRKVAEGKNKMAVINAVRNKLILRIFAVVRKNQKYKKTMYISLHKS

SEQ ID NO: 385108 - protein, 337 aa, unidentified
MDYYAGLDVSMNETHICVVERDGGVVLEAMASSTPEAIAAVLETAPTCAKIVLETGRMAPMLFHGLAALGLPVICIESRQAYQALKSLATHKTDRNDARGLAHLARTGFFKPVHVKSLPAHAVRALIIARKKLIGQRVTLENQIRGLAVVFGVRLPRGLSPRFTEQVIQASQGIAGLSGAMQGLLAARKAVLEAVMAIDRDMRLLARSSQACQRLMTIPGVGQLTALAFVATIDVPERFRRSRDVGAYLGLVPRRFQSGEIDYVGSISKCGDRRVRTLLYEAANVMLTRYRGALALKEWALGIARRSTMRKARVALARRLAIIMHAMLRHGTTFQAA

SEQ ID NO: 385109 - protein, 360 aa, unidentified
MRSDRTFVGLDVHAWSVTGHALDAETGEVWQRKLTPDPAEMLAWVSTLPGPVKVGYEAGPTGYHLYRFLNDHGVSCVVGAPSKLQRPHGDRVKTDARDAELLARLLKLHEFAEVVVPSIEQEAARDLVRAREDVRGDLMRARHRLSKLLLRQGILYNGGNAWTGVHDAWLRGQRFDQPGRQTAYDTAYETVVLTTDRRDRLDAAITAMAADSSYTNVVHRLGCLRGISTLTGFGLAVEIGDWTRFTGSTIGAFVGLVPTEHSSGGSRSQGSITKTGNGHARRLLVEAAWHHAKPYRSPGKVMRHRWEQAPAEARLRGHEGNRRLHQRWEGFTARRKRPVVANVAVARELAGWAWSLAVME

SEQ ID NO: 385110 - protein, 310 aa, unidentified
MTIHPDVVGIDVSKHHLDVFDAALERGERLGNEAEQIQALVARWADQARFVVFEATGRYDMILRRALDAAGVAYARVNPAQARDFARAAGFLAKTDAVDARMLVALGSALKPRPAPPLDQTRERLALLHKRRDQLVGMRQQERTRRAEIDDADLADDLDRHLAWLDQAVADFDRRIAALIDAEPDLRQTKALVQSIPGVGPVTAATLMALVPELGQRSPKAIAALAGLAPFNHDSGKLRGQRAIRGGRKRVRDALYMAAVSASRSNSRFKTSYKALRDAGKPAKLAFIAIARKLLVTANAVLRDQQPFRP

SEQ ID NO: 385111 - protein, 355 aa, unidentified
MNDAKYIGLDVHQATISVAVRDSDGKLVMEAILETKAETILQFVRGLRGSLHVTFEEGTCAAWLYALLKPHVTQVLVCDPRKNALLKVGNKNDRIDSRKLAELLRANLLSSVFHEDTGLRAVKELARSYLTMTKDLTRVMVRLKALYRSWAIPCATKQVYAPRHRAEWLAKIREASVHRRAELYYQQLDALRSLQQQVKKELLIEGRKHSATKLLRQIPSIGPIRAVLLLALIQTPHRFRTKRQLWSYCGLALETRTSAEYRVVHGQLQRSKKPVAIRGLNKNHNHDLKNLFKGAALRAAAVEKPFQEFYAALVAKGIKPELARLTLARKIAAITLIVWKKGARFDAEQLKQQAA

SEQ ID NO: 385112 - protein, 346 aa, unidentified
MDLGGAHMKVYAGIDLHSSNNYVGIINDQDQRVYQKRLPNQVEHILEALEPFKESMEGVVVESTYNWYWLVDGLQAHGYKLHLANPSAIKQYEGLKHTDDRWDSFWLAHMLRLHILPEGYIYPKEDRPVRDLLRRRLLFVRHRTAHILSLQSMVSRNCGTRISGNAIKRLDQGDAEILFDQPHLVLAAQNNIAVIHFLTDRIKLIERAVKSHTTLRNEFFCLLTIPGIGDILALTIMLEAGDITRFPQVGNYSSYCRCVKSERLSNGKKKDENNRKNGNRYLSWAYVEAAHFAIRSCPHAQRFYQRKMAKTNGIVAIKALGNKLARASYYVMRDQVPYDPEKLFRQ

SEQ ID NO: 385113 - protein, 410 aa, unidentified
MEPILISCAGMDVHEKKIDVCIAHGPFDEPPIYELRTFSTMTSDLEALKSWLKRYEVTAIAMESTGVYWKPIFNIMENEFDILLAHPQHIKSLRRNKTDIKDCMWIADLLRHGLVPRSFIPPKEIRELRDLNRTRRKLVGMMASEKNRVVKVLEDANIKLSSVVTKIYGVSSLKMIRALLEKDKLTREEVADMAKGKLKNKIDLLEKALDGRVTDHHRFLLRLHLDNIEYLACQIGKIDEEIQQKMSPFQEKSKMIQAIPGISEVNASAILAEIGVDMSRFPDEEHLSAWAGVSPGIHESAGKKKSGKTQKGNSFLKGTLTEAAWAASRTKGSAYSAIYHNIARRRGKKRALIAVAHRMLIDIYRILKTGEPYQEIGAEVVYERSIKRREKSMIKSLERAGYTVTKAVTA

SEQ ID NO: 385114 - protein, 344 aa, unidentified
MQIKSIGIDLGKTTFLLVALGNRGQVVVRKKFSRQQLLLYTANLPASLIGMEACVGSHFLGRALRERGHEVRLIPAQFVRPFVKSNKNDYRDAEAIAEAVERENMRFVPIKTEDQLDVQALHRVRERLVSPRTSVINQIRAFLLERGISFAKGPASLRRQMPEILENADEKLTTRMRRLLDFLWQEWKHLQLQIESLSEDLELIASSDEACARLQQIPGVGPLVATAVVSAIGNGAAFHKGREFAAWLGLVPGQWSTGGKTKLLGISKRGNPYLRKMFIHGARAVVLRAKREGSYLGQWMKRLEGRAARNVVIVATANKLARISWAVLSSGENYHPMPVLAVAS

SEQ ID NO: 385115 - protein, 350 aa, unidentified
MDKIVTIGLDIAKNVFQLHGIDASGQIVLREPLRRGQMQPFFEKLAPCLIGMEACATAHHWARMLIAAGHEVRLIPPNYIKPYLKRQKNDAADAAAICEAVMRPSMRFVPVKSEDQQATLMLHSARELLISQRTALINALRGHFAELGIIAAQGARNVRQLIAILDDDEQYAPRAVRIALRPLATTLIEIEVQIAKLDKAILTAHRNDDVSLRLSTIPGIGPVIATCLSASVPNPNLFEGGREFAAWLGLVPRQRSTGGKPRLGSISKMGNRRLRKLLVVGAHAALYRMKNGKARSPLADWARTLLAKKSFKLVAVALANKIARIAWAIMARNIQFQRDFVPDHRGTASV

SEQ ID NO: 385116 - protein, 368 aa, unidentified
MNSISNKKINQVTDQTLVVGMDIAKKKHYACFVDERGRVLKKPFPVLQSREGLEWLYQCIVEAMKEFGKTEVIVGIEPTGHYWLNLAYFLDEKGIPLVMTNPMHVKRSKELDDNLPTKHDAKDALVIARLVKDGRFSYPRILKGMEAELRVGATFRSKLVEEQGAVRNQMIRWLDRYFPEFSQVFPSFGKMALAVLEYTPFPSDLAGKELEEVLALYRQSEGLQSPQKPKAKKLMELAQHSIGVTEGQQMARIEIATLVRRYRQLEEEIEALTEQLIELVQTSVEYEWLKTVPGLGDATIVELLSEIGSFSHYQDPRQLIKLAGLTLREHSSGQHKGQKRISKRGRRRLRALLFRVMMPMIRHNEAFR

SEQ ID NO: 385117 - protein, 351 aa, unidentified
MLIIGADYHPSFQQIAFLDQETGESGERRLNHSDGEAEKFYRDLKEQGSSVRVGMEATGYSRWFERLLAELSFELWIGHPAEIKARRVKKQKTDRKDAELLLRLMREGNFPRVWVPSPENRDLRQLLWHRHRLVQMHTRIMNQLQAIAMNEGMRRKTKLWSEQGRAELEKLALGPWTSRRRQELLELLDQIDPVIEELSKAAEQEAHKRPEVVRLMTHPGVGFLTALAYVLIIGTPERFHCGKQIGTYVGMVPSEESSGDKQRLGHINKQGNSLLRFLLVEAAQAAARSNPEWRRRFVRLAMRRHRNIAMVAMGRRLAIRLYWMWRNGCEYSPSMEFGSYAGQLGTGHSVQ

SEQ ID NO: 385118 - protein, 341 aa, unidentified
MQTTTIGLDIAKNVFQVHGIDAAEKVVVRKQLRRSKVIAFFEAVSPCLVGMEACASAHYWARELRKLGHEVRLMPAKDVKAYIKRNKNDAIDAEASCEAVRRPTMRFVTVKSAEQQGQLMQHRTRDLLMRQRTQVINALRAHLAELGIVAAQGREGLKDLLAIIADEKDERLPVDARASLIVLAAQLQAVQTLIGSIEKRIIAQHRATEASKRLQSIPGIGIIGASAIVSTVTDPTAFRSGRDLAAWIGLVPRQDSTGGKQKLGPISKQGDRYLRRILVVGAHSVLRRAKHNPEKYPWLTQLLVRRPFKVVAIALANKMARIAWALLARGGTYRVPALAAA

SEQ ID NO: 385119 - protein, 353 aa, unidentified
MRILSLDLSKYKTVGCDYEAETGRHEFATVLTTHKGLHDLIVDREPDRVVIEICSIAGWVCDLVRSLGIEIQVASTNDERWQWRKVKTKNDRRDGLKLAQLSARNELDLVHVPHSEMRQWRALIAYRQHLVQRRTKIKNHVRELLLREGQLLPRHRSAWTQEGIANLETMARPFAEVSMDELWRGELWVELAQFKAVQAQLTEVVAKLDALGAANHNVRLLQTASGVGPRLAEAVVTMFDDPRRFRRGASVSAYIGMVPKQWDSGETERLGKITRHGNRLVRSLLVEVAWCALRHNPWARETYQRISGGKKSRKKIAIVAVGRKLLVRCWAMLRDQTPWHWEGQSAVVTPPAA

SEQ ID NO: 385120 - protein, 372 aa, unidentified
MIERTTLSFIGQEIYCGFDVHKNLWSVCVRHCGRELACYSMPANAREVGRKLRKDYPDASIHSVYEAGFSGFEAHRILVDEFGIHNIVVNPADVPTNGKERVHKSDRIDCRKLAKSLEAGLLEPIYVPSREHLLLRNLLRRETQTSGAIVRTINQLKSHWYFNGEPIPHRAGKTVLGARREQAHARGDYVAVNLIDQWHCLTESRQRIVKCEHETLAKLSLTKEIKHVASAPGIGMRSAIVLLSELWDMHRFPDKNHLASYVGLAPHLVGSGDKEETVSGGNRKQKQLHYILIQAAWRASRSDPQMISLYGRLRLRHLASQRIACIIAKKILFIIRALLLEDRDYQAIFPTREITCKQTKATRNETPPENGR

SEQ ID NO: 385121 - protein, 384 aa, unidentified
MFKHNILFIGLDTHKVATEVAYIEDQRGAEPMHLGRILSNKQSIKKLVRQMESKYPHATLHFVYEAGPCGYWIYRYITSLNHCCYVIAPSLIPKKPGDKIKTDKRDALKLAKLLKSEDLTPIYVPEPEDEAVRDLSRLRQTAMEDLKDAKYQLKAFLLRNNILCKTKDNWSLKHLRWLTELILPTPCQQIVLQEAIQTISERTNRLKRLDNELEHNVKKWRYYPVVKAIQAMRGVKLLVATGVIAELGDLTRFDHPRKLMSYLGLVPSEHSSGSKRHLGAITKCGNGRARRLLVEGAHGYRYEANISKEMQLRQEGLSKEIIDIAWQAQLRLCRRYQKLMHRGKHRNVVITAIAREMIAYIWAISREVVLSPVNKKLRIARMPS

SEQ ID NO: 385122 - protein, 276 aa, unidentified
MHYLYYVGLDVSKETFDASLVAFEDANEMAHRKFANSRKGICSCLHWVEKRHGILLDDVIFCAEDMGSYISEMAVCASDRTLNFNFSLISPLVIKYSMGIARGKTDRVDARRIAEYAITHYRKIALYLPAEKELCQLRTWLILRAHLAKQRVAKLVLLEKLDYKEKFADVSIQRSMLQEEIAYAETHMKTIEREMKELIAADSNICRNYKLLTSIKGVGPITAIVMLCSTLNFTKITDHRKFACYCGLAPFEHSSGTSVRGGCHTSTWRIETLKYN

SEQ ID NO: 385123 - protein, 376 aa, unidentified
MNTIYIGVDFHARQQTICYLKIETGELVICELKHHDKQAVRAFYAQFQEPVIVGLEASGYSPWFEAMVEQLGCEVWVGHATEIRRRARWRQKNDRRDAELILDLMLHNEFPRLHRPAAQSREVLRMLRYRQKLTKLRTMSKNSLQAIALQAGLAKGSRLYTRDGQAEFSAAEMSPVLHWQREHWLQLLQPLNQQLLETMVWFKAASKGDVCVTRLRTHPGIGLLTALCLVHTLQPVSRFRNTRKVTAYAGFDPVERSSAERQRFLGISKAGSRLLRYLLVEATHTAIRYDEDLKRFHKRLAERRGRPKAKVAAARKLLIRAYIMLRDEIDYAEFRRRAVAARLARRGHGPTSVPEVLIGQPASAERQEPTHYPQNK

SEQ ID NO: 385124 - protein, 388 aa, unidentified
MTQTSGSLSHPNALDYETTLVLAIELSNASWVLAAQVPGLPRVRAKQTIEPRTEALQAAIDDYRDRSRAAGRMVERVVAIYEAGWSGFWLARWLARHGVETHVVQPSSVPVDRRARRAKSDGIDAELLLRTVLAWFRGEPRVCSMVPIPDEADEDARRFVREREDLLAERVSLVNRVGAVLATLGVRDYNPLRRDRRARLEMLRTALGDPLPQHARGRIVRMLDRLELVCAQIAELEQKRDAVLEEETPDNAEEMIQQLAGLRGIGIQSATVLVREAFVREFRNGKTLGSYAGLTPTPFSSGAAEREQGIGKAGNRRLRTTMIELAWLWQRYQPGSALVGWFHQRVSSTGRRIRKIMVVAMARRLLIALWRFTTQGVVPEGAVMKPAH

SEQ ID NO: 385125 - protein, 375 aa, unidentified
MEHTRFVGLDIHKERISIAVAESGRSGAVEYLGEISNDPDAIGKLCDRLRRPGKTLAFCYEAGACGYGVYRQLTDIGHRCDVVAPSLIPTKPGDRVKTNRRDATMLARLHRAGELTPVWVPDADHEAMRDLIRLRSVVRQIVTRARQHLQGFLLRHGRKHGRGTAWRMAYRRWLSTLAFEHPAQQVAFQDYVDAVMDAERRLQRVEEQISGLLPEWNLRPVVDALQVMRGIASINAVVLVAEVGDFTRFSNPRQLMAYFGLVPGERSSAETIRRGGITKTGNAHARRALVEGAWAYRMKGAHRSSQGRSDRGAAKSRSRHRVESASSALHSISAAERARQDRQRRQCRHRTRDGGFHLVDRLHGSIRAKDRMTLT

SEQ ID NO: 385126 - protein, 392 aa, unidentified
MLYVGIDIASKKHDCCIIGANAGVLVPIFTFENNADGYDILLKNIRTFERDFSKVRVGVESTGHYGNNLISFLSGMGFELVVFNPLQVDLHRRAGTLRKTKTDKADAKFIAQMLLTGESSKYVMAQPEIAELKTLIRHRHRIKAIRTKLRVSVARLVSMLFPELYCAVSSIHQVSSYALLAEFPTAKDVADAHLTRLTNLLSESSKRRYGRDKALEIKALAVNSVGNHSRAAGFELQQTLRLIDSASHELKLLDVQIKKLMIEIDSPILSIPGISFNLGSIILAEIGNIENFSNPSKLLAFAGLEPSTHQSGKFVGTQTRMVKRGSKYLRWALLQAAKLISQYDETFAAYAGKKRAEGKHAYVVRSHVGRKLIRAIHHMLTNNQQFRPAPLV

SEQ ID NO: 385127 - protein, 326 aa, unidentified
MIKNTNYFGIDISKDVFDVMGADGKHHQFKNDLSGFKKLFSLTNEFSHCVMESTGVYHLGLAYYLYEKGIAVSIENPLSIKRFIQMRLTKIKTDKRDSEMIYEYAVNTGDELRLWKGQSKTQIACSQIISLTNLYTKQTTALKNKLQTEESMGSPCSKVIRSLKRSLKHLKNEIDNLEESLLELVKQDNQDLLTRVESIPGIGRKSSMLLIVLTGGFERFNKASELCSFAGLTPMIRQSGSSIRSRSRISKMGNRRLRKTLFMCSLSAKKHNKACKEIFDRIVAKGKSKKVALIAVCNKLLKQAFALAKSGLKYDKNYRSVLVKIN

SEQ ID NO: 385128 - protein, 319 aa, unidentified
MLIGIDVAKAELVVAARPSGERWTLPNDERGVQALVERLRQDAPALVVLEATGGYELLGVAALAAAGLPVVVVNPRQVRDFAKATGQLAKTDRIDADLLALFAERVRPEVRPLPGAEAQELDALLARRRQLLEMLGAERNRLGQVFGRGKQPVRKSLKAHIAFLERDVRIADADLNAIIRRSPAWRERDDLLRSVPGVGPVLSLTLLAELPELGRLSRREVAKLVGVAPLSRDSGTLRGRRFVHGGRAGVRAVLYMAALVATKRNAVIRAFYLRLLAAGKPKKLALVACMRKLLTVLNTIVRTGERWSAEHACRVPTPA

SEQ ID NO: 385129 - protein, 395 aa, unidentified
MKYGVGIDISKGKSTIAILSIEGEVIKEPFEFYHNQKDLDNLNLLLNNYSKEDLKIIMEETGTYHLPVLSYLIDKGYCVIAENAFRIKKYLDRGLRKAKTDKKDSLKLAEYACDNWYKLKMPIIEDKNYKDLRFLSRQYFAFNSIKIQQKVNFSNLTDMLFPGYYRLLDENNYILGLKVFQKYSIDIIKKKKLETFINEVNKIAQKIGHKRAGITFAKKVYELAKGSVPSCPPSEYTQLIIDNCVVALIQSIETTKEIISKMQEIANTLPEYETVKSMPGAGPRLAPLLIAEIGDIRKFKDSSSLIAYAGIDAPPYQSGQFEATNRHISKRGNKYLRKTGYEVMKAIKSFYSTGNEFYDYMVKKESEGKKKKVAKIAALNKFLRQYYAKLIKLYN

SEQ ID NO: 385130 - protein, 372 aa, unidentified
MNKKVIYIGLDVDDTQYHGAAFDKGASEIVSFKCRPTLKGLIAQLEKMQKYFSVESLKLCYEASYIGHCLQRDLMQAGYDCDVISPGSIPRKGSKSIKTDRIDALDLAQFYANDLLTIVQVPNAATEQDRDLLRSRQQLMKQQNDLRRHIQSLLRRNGLHYKAETNNKTHWTKHHCCWLERTVEGCSGSLGTNLQLLLRQLESINEIVSAYSEEIELMAKRPNYQQAVSALVCYKGIKNLFALTMITEIGDVKRFAHPRQLSAWVGMDIREYSSGGKHHRYGITRQGNRHLRTAFIEANQRAYRTTKLSREIKARRANANPEYIAIADRCLRRLSKKGNRLLEAGKHPNKVKVACAREMIGFVWESLNKVAA

SEQ ID NO: 385131 - protein, 446 aa, unidentified
MTNNSIQTNSSGAAQPTVPGPIVCWVGLDWADKKHCLVVRSSPTGPAKTYRVEQKPEQLDEVFLDLRAQHPQGRIAVAIEQSRGPVLYALMKYDFLALYPVNPRTLADYRRAFKLSGAKDDPLDGDLLCELVCQHADRLRPLAVEDRATRQLRLLTEARRDFVDERTGLSNRLGANLKCYYPLALELVGEDLTSPMAMELLRRWPNLAKLQAAKPGTVRAFFYAHNSRSEDKIAARLEAIQRAHPLTEDPALLEPLQLQTQRLVTHLRAVQQTIAQYDEKIRQVFATHSQAWLFAPLPGAGPVLAPRLAAVFGTIPANFQAALDLLCFSGVAPVRKQSGAQERVHFRYARPIFLHQSIVEFAKCSIAKCDWARLLYEHELKEGKSKWMAIRKLAFKWIRILWRCWQAGQPYDETRYLRSLQRDGVQLYRSLYQALPPLQTPAVNNS

SEQ ID NO: 385132 - protein, 412 aa, unidentified
MKVAHEICCGIDVHAKMLVACLLQANGEKEIRTFSTMTDDLLRLRDWLLAVKCTHVAIESTSVYWKPVFNVLEGALTVILINPEHARVLRGHKTDVKDAEWLADLLRHGMLRASFIPPAEIRELRELTRYRDGLVREQSRVANRIQKVIESGNIKLGQVASDALGASGRAMLWALARGETDGVKLAALAQRQLKEKVPQLQRALQGRLTVNQRFVLGELLKRWEELEQADRRVTREIDQYVQERPKLARAREIVDSIVGIGPRVAEVVIAEIGVEMNAVFPTDANLTSWAGICPGNKQTGGKRLSGRTRKGNTYLRSALVQAAWGATLKKNSYLSSQYFRLVKRLGRKKALVAVAHSLLVIIYHVLDRDQTYTDLGGDYFDRKYVEQQRDYYIRRLQMLGVKINIEELPTAA

SEQ ID NO: 385133 - protein, 349 aa, unidentified
MPDRHLSYIGRIVYVGVDVHKDTYTVTCVCNKQIVKTATVQAEPAGLAASLLRWFPGATLYSAYEAGFSAFVLHRALTTAGITNIVVNPASVAVAANEKVKTDRRDAKKLAIDLADGRLRGIYVPTEEEELARLLPRTRAQIVEHRATIARQIKAKLHQFGLIAPSSRRMISNRYLREIAAWSLPPDLRVSLTLLAEQWRFATRQLIEIRRLLREQAAAQAELEKVYRSVPGIGAVVARTWATELGDMTRFANERALFSYTGLTPSEYSSGPSVRRGHISRQGSGRVRHLLIETAWRALPRDKVLQEIFDRIAASRGKKRAIVAIARRLTGRIRACFRQGTTYAVGTYA

SEQ ID NO: 385134 - protein, 313 aa, unidentified
MAKLVRKITLGIDVAKDECVVYDWHTAEIVNLPNQPTAIKTWLQSLHGPVQIALEPTSHYHLVLVEAALARGHTVYLVNPRQLAHYREAVNVRNKTDPQDAWLLARYLAHEGTELRPYQPQCRQAQQLWTLLKRRAVVVQARQQLQQSFSDIKLSARALFSHFRHLLERIDLRIGKLIRALGWSAHYQRCVSMPGIGLLNGAALVAAYHRGAFANSDAFVAFLGLDIRVRESGKYRGKCKLTKRGEAELRRLLYCAAQGARSYQPFEDYYQRQLDKGLSKTAAKVALARKLARIAFTLMQNQTMFVKQPESAG

SEQ ID NO: 385135 - protein, 372 aa, unidentified
MKQKIIHIGLDVDDTQYHGAAFNKETGEVVDFRSRPTLKGLLQQLDRMARHFEGHKIQLCYEASYVGYCLQRDLIANGVHCDIVSPSSIPSPRGKAIKTDRIDAGYLAQFYANELLTIVQPPDEEQEQDRDLLRSRQKVMQQRNQLRKHMQSVLRRSGLRYKAETGNKSHWTKHHYCWLDRTIDGLSGSLKVNLELLLRQLKALNEVLTEYGQQIDGLANSPRYRSAVQSLTCYKGIKNVFALTMITEIGDIKRFSHPRKLVSWIGMDIREYSSGGKCNRFGITKHGNRYVRTAFVEANQRGYRTAKIGQDLKSRRQAIAPELVNIADRCLRRLNKKGNRLLLAGKHPNKVKVACAREMVGFVWESLNKAAA

SEQ ID NO: 385136 - protein, 406 aa, unidentified
MRGPVITVDVSKDSCHYQPFLENGKPLRKPKVLHDTIEGFNQLMETIEMTREKSTEEKVPVVFEATGVYHRCLQKYLDDNGIMYYIISPLLSAAYRKTNLHSNKTDPLDCAHIAKAYYCEERLLPFQKQEDIFVRLQKMNRYYETELIHLKKRKVSFRSFLDIIYPRLDKCFGSNGSLYDPIPMEVLKKYPHPSLLLKHREETVIKATEKKVNHDKKFVEKIVHKMYECARHCYSGAEVTDIEVIKLPEMIEELQDQMKLCDSLLNELILEAERIPYFNCVVSIVGIGRNLAARIIAELGDMTRFPNRRAISAFAGLNPKILQSGDVDGTHLKISKKGNRHLRCLLYLGATCNYRLRKHDPLYEFNQKKRQQAQSPLKPKAANTATAHKLLIMIYAMSQSGESYRF

SEQ ID NO: 385137 - protein, 382 aa, unidentified
MQTIAPVNPTILLAIELSTSTWLVAARLPGLDKPRLSRIDGGDTAALLALISSLRARAACGLDATMGVVCCFEAGRDGFWLHRLLTAHGVVSYVLEPTSILVNRRARRAKTDRLDAEGMLRVLAAYLRGDRQACSMVRVPTPDQEDAKRTHREREHLVQERLRIENRIEALLFTQGIRKRPSLRSWERDLTVLRTGDGRKIPRHLRAELDRLRRRLVLTLELIREVEVERDQVTKTKPQDQAHHKMTALCRIRGIGENFAAVLTREVFYRSFDNRRQIASYVGITPMPYQSGAMDRDRRIGRAGNPRARTTMIQLAWLWLRYQPDSELAAWFRERVGTLAGRTRRIAIVAMARKLLIALWRYVETGVIPTGAEIRAETTVAA

SEQ ID NO: 385138 - protein, 339 aa, unidentified
MKTHVGVDLHQQFCYCVALDASGRLIASAPVVNQQEALRQWIGKLPAPRQVVMEACGFWPAFQRAVAPVAERMVMVHPLRVKAIASAKLKNDRVDAATLAHLSRCDLLPEAWMAPFAVQELRLTVRRRRELGQKRAAFKNLLQSVLHQQGLIKPCTDVFGKRGRAWLAEVEMSPAARAAVEGHLRVLATLDEEIRRLERELKTIAANDARARWLMTMPGVGAYSALMVLAEMGDPARFANKRALVNYAGLAPCVRESAGKAKRGHISRQGSEHLRWIMVQAAQIAARCSPPVKAAYLRLKLRKPPQVAITIIARKLLICSWALLRHGVCFNPEEFMHTN

SEQ ID NO: 385139 - protein, 356 aa, unidentified
MDSPRNNYQKEASMETYYYIGMDIHKKTIAYCIKLQDGTIVRQGVVPAERKALRQWVSALPHPWIGAMEATIFTGWVYDFLKPHAFSLKVAHPEMLKAITAAKKKNDRCDAERIADLLRVGLLPECYMASEELRELRRILRYRNHIVRTAVKMKNKISGLLMEVGAPYSKKRLHGRKYFRELLERIEDVPSSVKELLQLSRANLEMFQAVQKRLVETLRDHELIRERVRRLMTIKGIGEVTALTWVLEVGEPERFNSVRQAVSYCGLCSAQRESAGKEQRGPISKKRNKHLQTILIEAAKLAPYWNPHLASVHAKELRKGNRNRATLAVARKLVAYMLAVDKRQSDFVPGTEAMVA

SEQ ID NO: 385140 - protein, 335 aa, unidentified
MSKGNIYVGIDLHKKQFEFVMMTSEGTVVGSGRCSTAMDAVADFASRLDRRHQVTLEPLQNSFWFIRQIRPYVGSVQLANSGKVRLIAESRLKNDRIDARILADLLRVGYLPTVFIPDDEVLQWRALVSHRIRLIRDRTRLKNRVLGQINREGFRIMATDPFGKKGRLELDSLPLPAWLRSQIEVHLTQIDYLTAQITKIDHEIERVVADDKIASLLSTVDGVGPFIALAVRSSIGEIERFRSAKAFAAYTGLIPGYRNSADTVRNGPITKQGVTTLRWALTQSVNHAIRHSDYLKRLYHRVCFRSSVPKARVAVAHALARILYHVWMEARPYYR

SEQ ID NO: 385141 - protein, 387 aa, unidentified
MEPVIGLDVAKGTSVFQAFTKRGEAYGKSETIRHAGGLERLDDVIRQLEMQTGVSPVVVLEATGHYHRTVVAHLERMNIEHFILNPLLSKRSKSAQLRKVKTDAADAWHLAEMYYRGDVKPHRRWTDRIIELQHLTRQHEFMTTQFIQSKLNARALLDQVCPAYEGVFHDLYSKTSLHVLLHMLQGAVITEEVVRETAGSSHGKAWIQSKVERIQAMQIPQKQSAAQRTALLCMVEILLAQQEQLSRLELKIQEEAEEIPEVELLKTIPGIGDKLAAALIAEIGDAGQFEDPKQLVAYAGLDPSVHSSGQFVASSTRITKRGSKRLRRALYLAVQCGIRRSTNEKLRAYYDRKREEGKPYKVTVIACANKLLHHIYAILKKGQPYHK

SEQ ID NO: 385142 - protein, 361 aa, unidentified
MQLQDAFSKPKIFIGLDIHKKSWTVSIQTDLFFHKTYSMPSNAEDLYLYVERTFPDHDVDLVYEAGCCGFSAARYFLNLGWNVLVVNPSDVKRGDKERYQKTDALDSKNLSNQLKLGALRGVFIPTEEHEQFTTLARHRTQVTKKLRQTKSHIKSMLLFHGVKVPDEFDNPNWSKDFISWLEEIKFSTSCGDLALQGKIRMFKFIKSEYLEIANQMRAYCRKNNKRDYNLLRSIPGIGGYLASVILAECGDLRRFNNESQFSSYIGLVPGLYNSGESEKCLGITPRSRSQLRSYLVEAAWIAIRKDTEMQNYYRKHQGKNVKSVIIKVAHKMARRILSVIKTETAYQINKNLVPIAIGIEQ

SEQ ID NO: 385143 - protein, 386 aa, unidentified
MENVVGVDVGKARLDAYCLRRQRRLTVDHDAAGIERLAGWLEPGSLVVMEASGGYERRLHEAMAGRGTAAAVVNAKRVRDFAKASGVLAKTDRVDAAVIARYGAFARPAPTPVPDAPRRRLAELLAYRRQLLAEIAARGQQLGHLRTPALVERARAALDRLRREKAELDALLAEAVAADPDLAAAAALLRTAPGVGPVLVATLLAELPELGTLDRRKIASLVGLAPVARDSGQRRGRREIEGGRGAVRRALYMAVLSASRGRSRLALAYRALVGRGKPAEVALAAVMRKLLVTLNAMLRHRTPWRGDAAPRPAAAGAGGRGRAAPAAPAGGPRQAGPAARPRSPCGRRGMLKTTVAGAAGPAWINDLAAHLPAGGCRREDGRERRD

SEQ ID NO: 385144 - protein, 411 aa, unidentified
MEVYIGIDWSESKHDVIFMNEAAAVLALFTIPHSPDGFHKLDVTCRQQGFHVDDCLIALETAHNLLIDFLWARGYTQVYVIPPSVTKSQRKRYRQSGAYTDVDDAYLLADLLRTDKHRLQPWRPDLPLTQHMRAKVSFLLHLTQNNVRLTNRLRAVLLRYYPGIVGVFSKLNSPIALEFIRAYPTPQAAATLDFDEFRTFARQHCYTQLKKLPRCFARLQTAQPEAAPDIVHIYHGEAVALATLLLDMVRLEKTTQKELNELFVQHPDHQIFASLPGVGDLLAPALLVKFGDDRQRFPTPGSVQALAGTCPVTERSGNRKIVKFRKACDREFRYITQQWAGHSKDVSVWANAYYRQALARGGSKSHAQRCLANRWLSILWTLWQTGEPYDEAYHLRQRAERSRPKNVILIG

SEQ ID NO: 385145 - protein, 340 aa, unidentified
MRELYAGCDLHGNSNFFGIIDGQGKRIFKKKLANDLVWIRDVLRPFQEELVGVAVESTYNWYWMVDGLMELGCKVHLANPAAIQQYSGLKYADDKHDAFWLAEMLRLGILPEGYIYPKEQRPVRDLLRKRGHLVRIRSSLVLSLQNILSRNLGRTVSVNDVKSVREDRIEPLLERNEDLALAGRVSKEAIDHLTGQILKIEWAVQKKIRLKQEYRYLLTLPGVGKILALTIMLETGPISRFETVGEYASYCRKVPSQWISNGKRKGSGNRKNGNKYLSWAYAEASEFARRLHPEPRAYYNRKMQKTNAAVAHSALSNKLARAAYYIMRDQVPFNAKKLFG

SEQ ID NO: 385146 - protein, 308 aa, unidentified
MHYLYYVGLDVSKETFDASLVAFEDANEMAHRKFANSRKGICSCLHWVEKRHGIRLDDVIFCAEDMGSYISEMAVCASDRTLNFNFSLISPLVIKYSMGIARGKTDRVDARRIAEYAITHYRKIALYLPAEKELCQLRTWLILRAHLAKQRVAKLVLLEKLDYKEKFADVSIQRSMLQEEIAYAETHMKTIEREMKELITADSNICRNYKLLTSIKGVGPITAIVMLCSTLNFTKITDHRKFACYCGLAPFEHSSGTSVCGGCHTSSMANRDIKVQLNRSALIAIRCDPQLKAFTNAKWLKVNINSAS

SEQ ID NO: 385147 - protein, 429 aa, unidentified
MKIIYPRVCGIDVHKKFIVAVICISESVEPIYLKKRFSTFHNDLIRFRDWLIQNDCQNVCMESTGKYYIPVYNVLESHISNIVVANPKWVCAVKGEKDDDKDAKWIADLFKFGIVRSSFIPQKDFRILRELTRYKYKLVNMRSSEKNRYQNALTSGNCKLDMVFTDVFGKSASNIIDLILSDNPYTDEDILSKVHKNCKASPDMILNSINGTDLTPVQKSRIELVNDHIKQLSSNIQRLDKLIDLMIEPYEDYISFLCQIPGVSRNSAIIILSEIGVDMNQFTSSRRITSWAGLTPSSNQSAGKKKSVRISRAGVYLKPCLVEVAHAAVKDKNHPYYANKFNKISKRRGKKRAYIAIARKILVAAYHMLLTGEIWNPADLAEVETPVEQRIKYVKNNLKSDIKQLLDIGLTVEELTLMIQQNANTMTAQ

SEQ ID NO: 385148 - protein, 350 aa, unidentified
MSEYIAFDAHKRYTWVEREDVATGRTVHDRLEHAPGVIRRFLHRCPPGTPVAVEATGNWYWILDEIEQAGLQPQLVHPRKAKLMMGQINKTDKLDAHGLNTLQRNGTLPTVWIPPRPLRDLRELTRTRLVLVGQRTRLKNRLTATLAKYGFSSAASDPYGKRARAELQQQLEQLPPQTRWVSEQLLAQLDFVSQQVHRVEERLQELIETSAEMQRLLTLPGIGTILAATIALEIGEVSRFPSAAQLASYAGTTPRVHASGGKVRYGNLRPDVNRYLKWAFVEAANSVAVNHRRCPERHVSRLYFRLRQRKGHSKAVGAVARHLAEAAYFVLRRQEGYREPVQRPGRSSEV

SEQ ID NO: 385149 - protein, 314 aa, unidentified
MTSNAEFVGVDVSKATLDVASRTSNEYKRFRNDPTGIEALIDWLKILQPELIVLEATGGLELPFVAELAYAKMPVAVVNPRRIREFARSIGQLAKTDKLDAKVIAHFGEATHPEARKLPTNDEEKLTALITRRKQIVEMLTAEKNRIHSARFSMKERIETHLSWLESELRDLDNEITKFIHQSPIWKEKDKLLRSVSGIGPVTSATILAMLPELGTLNRQKIAALVGVAPVNKDSGRRQKKRRVYGGRANVRSVLYMAALSASKHNPRIKTFYDRLIRMGKERKVALTACMRKLLVLLNAIIRVNQNFDLKTAI

SEQ ID NO: 385150 - protein, 381 aa, unidentified
MRQVCGLDVHKDSVFVCILNENGIVFQEKYGVLTPELEQMLAKLMEFHVEEVCMESTSIYWMPVWRVLENYVSLKLVNPYFIKQLPGKKSDVKDAEWIATCLLKDLIKGSYVPEDLIQQLRQYDRRISDLNAECVRKLGKLDAALQRCNIRISNYVSTTDGKSYKEVVRLISEGIRDPAELAKVIHGRIVNRVGKGVVLASLTGVISDTDIDVIRQLREEVELAEKHKDECQSKMDTICQQYFPEQLKNLQTIPGIKGRSATAIIAEVGTDMSSFEDAAHLVSWCGLKPRNEESAGKIKARSTTHGNKYLRKTLIECAWAASRTQGCYFNRFSYHQVVVRRKNKMKVQVAIARKVLTAVWYVMHNNVGYRDFTHDIAPAAE

SEQ ID NO: 385151 - protein, 363 aa, unidentified
MPHQTNSHPTVHPVPHGSCIAWLGLDAHAQNCVLAQLDDDGTQRQFWRLPTQAEKLVAQVRAVPARDKRLALEESNLARWLWQLLRPHVTQLVVCDARHNKLISSHQNKKDQRDAFSLARLHRLNELKPVWQLPTDERALFKSAAQSYEEAVWRQTRLKQQIKSTFQHWGLFPTGTRLYSEAGRGAWLKQLPHADLRVQVELLYHSMEQAVTTQRDTRKLMVRWGKSFPEVKLLSTAPGLGVVGAHVFAAYVADPHRFAAPAGLIRYCKLGIRDRSSDDKPLGYEQLDRHGHGVLKAITYRAWLQAMKRQRGAVHQFFLWSKTNTGSATHARLNTQRKLLRAWWTLWRRGEEWDEAKFFPAVK

SEQ ID NO: 385152 - protein, 435 aa, unidentified
MTDSDCPPPPLQAPALPVGEFAALIGLDWGDAKHAIALRPRSVGRAPVEHLDLEHSAESLHAWIKEMGERFGHQPVAIAVESSKGAVVAALMEYPWVVIYPIHPSTSRRFSTAFTPSGAKDDMPDAQILLEIIESHRQRLRVLVPQDAATRRVALLVEVRRKLVDSRTHATNQITSLLKNYYPQALELTGESLCAPMAMDFLARWPELALLQRAKAQTVRDFYQAHNVRRPELIEARLALIKGARPLTEDRALCEVSVLHLAALVAEVRALSAHVAKADEAIATAFDIHPDAHIFRSLPGAGAALAPRLCVLFGADRDRWSNASELQKYYGIAPVTERSGRQKYVHWRWSAPVFARQSLVEWAGQSIKWCPWAKAYYLQQKGRKNRHSAILRSLAFKWLRILWRCWRDNKTYDDSLYLAHLRERKAPLLEFLPAA

SEQ ID NO: 385153 - protein, 315 aa, unidentified
MAQTKCWVGIDVAQDSLQVHIRPTGNNFSVSNDSAGIDALVECLSKHNPELVVIEATGKLEALVIACLVHAGFTVARVNPRQAREFARATGRTAKTDAIDASVLAHYAEAIQPLARQLPDAEVQELADLMARRRQVVEMITAEKNRLKRMHASVLPHIEAHIKWLIGQKTDIEHSVEQLVKTSSVWREIDQVLRSVSGVGKIVSHTLLASLPELGTINNKQIAALVGLAPFNRDSGQMRGRRTIVGGRAQVRTMLYMACVSAIRHNSTIKAFYERLIAAGKPYKVALTAAARKLLIILNAMTRQFILAKTANVAA

SEQ ID NO: 385154 - protein, 325 aa, unidentified
MNTKKLCCGIDVSADTLDICYQTPDGNKAHLKVKNNKTGFAQILKTCQGNYHFVMEATGVYHLALVFFLYEKKVAFSVVNALQIKRYIQMHLERNKSDKKDAKRICEYGIERELELYEMPDIAYFECRSLNNAIQDLAKEITKFTNRIHSLKKAPYDNKIIIKSYTIVIENLKKEKEKLEQELENKLKEWQPDLLQQVQSVKGIGKKAAAEIIIYTKAFKGMENYKQLISYAGLSPVEYSSGSSIKGRTKICKQGGKQLRHILYMGALNAKENNAACKALFDRLVANGKNKKSAVIAVCNKLLKQVFGCIKNQSLYQDNYLKNIA

SEQ ID NO: 385155 - protein, 429 aa, unidentified
MNYNTQNAKIASITEKTLIVGIDVGSETHYARAFNWRNYEYSKKPFAFSNDEAGFASFKAWMNDMAEKHGMETIIPGMEPTGHYWLNLGAYLQEQGMKPVHVNPHHVKKSKELDDNNPSKNDRKDPKTIAGLVNEGRFSYPYIPTGIYAEIRNLSNLRIQTQEEITRIKNRIARWFSIYFPEIKDVYRNPDAVSGLMVIKQAPLPCDIKELGVNGVNKIWRDARLKGAGIKRAATLVTAAEHSIGNTEAPRSARKEIRNLLNDYETYKNRMDELMQEIKETLSEIPYIDKLMEINGIGIKTVSCFIAEVGDIGRFDNPKQVQKLAGYAIVADSSGKHNGESRISHRGRKRLRYALYEAAISVIGKNKEFKEIHSYYRTREKNPLKKMQSVIAVACKLIRIFYTILTKGVDYDSQKMLNDIVRPEIQLAA

SEQ ID NO: 385156 - protein, 329 aa, unidentified
MIVVGVDVHKQSLTAVAVDELGRTVAARSGPVDAEVLEWARRLGADRLWALEDCRHVTRTLERTLLRAGERLLRVPPRLTAPQRRRSRTRGKSDAIDALAIARAALQEPGLEGPREGEETLHELKLLVDHRDDLVDERRRAQQRLRWHLHELDPDLHVPLGALDRTIWLDRLSRKLSRREQTVQLSIARELVGRCRLLTRAILALDRELQQRTQTLAPTLTQLPGCGPVSAAKLLGEIGPIDRFRSDAQLARHAGVAPLDASSGKHQRHRLDRGGNRQLNCALHRIAVTQGRVHAPARAYLERKQNERKAVAKRSAASNDNAAESLKRE

SEQ ID NO: 385157 - protein, 366 aa, unidentified
MLATFCGYPNTSNERKGDWLMDYCGFDVAGVSSYVYVENEKGRKLTCGAVDTTKEAIERRLKPFVRGGLSVAIEAGNQTAWIYEVLVGIGAKVTVVNPAKVKAIAESRRKTDKIDARILCELLRLDALPHPVHMPGRETRALRGLLVARRQLVSARTKLCNVVRGMLRQEGTRLPAGALSSFAGWRRLLAQGYEQTHLPVVLATFFDSFVSLTDSIRDLEKQLAESERKDGRVARLKTMPKVGRIAALTFVAAVDDVHRFPSSRKLVGYSGLAPTVRSSGERTEYGSISREGRRELRAVWVQIAHLVAMDTTRATQPLRRWFEKVAGKRGKKTALVALARRLLVIAYRLLKDETVYDAARLRRKVA

SEQ ID NO: 385158 - protein, 340 aa, unidentified
MHEAVALVGLDISKSVFQVHAADRTGQVLFRRRLKRDDVEPFFRDLPACQVGLEACPGSHHWARLLRDLGHDARLLPAQFVRPYVKSNKNDAADTEAICEAMTRPTMRFVPIKHKQQQEVLVIHRVREMLIRQRTQIINAIRGHLAEFGIIGPNRAHNIGLLTMLIEDGKDTRLPPVARHALGFLVVQLRQTKAKLEQIDTELVGLAARIEECRRLMSIPGVGVVTATALVASMREPQDFKSGRHFAAWLGLVPRQNSTGGVDRLGGISKRGDGYLRRLLIHGSRSVMRWRGRSWPWLARLRDRRPANVATVAVANKTARVVWALLRYGGTYENPACQAA

SEQ ID NO: 385159 - protein, 414 aa, unidentified
MALVRWVGRAIGLDVHRDFCVVAICDDGKVRSAGRVPSTPEGLGLLAESLLPTDRVALEVTGSCWEVARLLEPHVQRVIVVSPDDTGISSARAKTDKLDSRTLASLLWKGELDAVWMPDERCRILRRRLARREQLMRTRTRAKNEIQAVLARRLQERPPFADLFGVKGRQWLAGLELPVEERESVDAGLRQIAFTDTEIAAVDRLIAQQALLWPEIRRLMTVSGVNLICAASFLAAIGEPSRFLTSRKMVAYLGLDPKVRQSGEAPARSGRISKRGSASARWALVEAAWSVVKQPGPLRAFYERLRARRGHGKAIVATARKLTVLFWCMLTRGEDYAHQRPALTKKKQRQLELTAGAPARTKQATGIWSTNRAILHAERALAEQAEVSYKRMVTDQKAGRPSRKAGASATPERA

SEQ ID NO: 385160 - protein, 342 aa, unidentified
MTIAVLGIDLGKNSCSLVGLDAAGRVVLRRRMRREGVIAFGAKLPGCVVAMEACCGAHHMGRALAEQSHTVRLMSPEYVRPYVKAQKNDDRDAEAIAEAATRPTMRFVALKSEAQLDVQTLHRVRDQLVGERTALTNQIRAVLLERGHVVAQGRAKLTACLAALLDTDAGASLTPRMRTLMAEVRERWQDLDQRIAALDAEFAEQARINEDARRLTTIPGIGALNATALVAAIGDVASFARGRDLAAWLGLVPRQVTTGGKPRLVGITKRGSKYLRKTLVQGARAALPSLRQSDTHLGQWLRGLLARSHVNTAVVALAAKMARIVWALLRHGRVYEPAAVAA

SEQ ID NO: 385161 - protein, 307 aa, unidentified
MRKDIRYVGLDVDSEKMAVAVAEPTGEVRSLGSIPYREESVRRLVKRLGPASRLRACYEAGPHGYGLYWQLAKLGVHCDVVAPTLVPVKSGDRVKTNRRDAEKLARCYRAGDLTAVWVPDAAHEALRDLVRAREAAKKDQLRARHRLGKFLLRRGLRAAAGMRSWTAKHLLWVKTLRFEHAAQEATFLDYLHEVEHALERVARLERAIDQAIESAPAEMRALIAGLQALRGIKSVSAATIVAEVGPLSRFSRPKQLMGYSGMVSSEDSTGDSVRRGAITKTGNAHLWAVGVQVEKEQLSGSQRRRAA

SEQ ID NO: 385162 - protein, 341 aa, unidentified
MLKFTIGADISKDKINFTLRFLNDYLLEKEVENATSALNKFIKEVQSIVKSIVKEKKAEYSVEFIMEHTGIYGNLLIECLAGQKMTMFVVAGLEIKNSTGISRGKNDKIDAKRIADYGVRFADKLKPYTLCDQTLSELKGLNTLRTQMVRIKAQLTQANDDIKKFQSKELQKKSDKLKKPVVNELDQAIEIIEAQMLELIKSDESIYENYKIAQSVPGVGKIVAVAFICATNNFTKFESAKALGSYCGVVPFGKESGRYKGKDKVSPIANKALKTLLHLGAVASIGGNNPFAVYYKRKVTEDKKNKMLALNNVRNIIEKTMFACIKNKTKYKADYSFPFAA

SEQ ID NO: 385163 - protein, 467 aa, unidentified
MTPHKDYCLDPRPLAPTPTLPQSPMLADALQVCHPHAAGIDIGEAEHWVAVPPGGDPQPVRRFGTFTADLDALADWLLDCGVTTVAMESTGVYWIPLFALLEARGMQVLLIDPRQAKRAPGRPKTDRLDCKWLQRLHAYGLLAGAFRPDDQVCVLRGYLRHRQMLLTYAAHHIQHMHKALQQMNLKLTQVVSDLTGVTGMAILKAIIAGERNPQHLAKLRNPHCHHDADDIAKALQGTWRAEHLFALQQAVALYEFYHQQLALCDQQIKRHLETFADKSEGQPLPPKARRSKKTNEPRFDARTPLYRMAGVDLTTIEGIEENTALVILSEIGTDMHRWPSVQHFCSWLGLCPQHKISGGKVLSRRVRPGAHRVTVALRLAARSLHHSQSALGAFFRRMKARLGTPKAITAAAHKLARLVYHLLKHGSAYVQQGLENYEAQYHERKVKTMAKQAKALGYTLVPLVAQG

SEQ ID NO: 385164 - protein, 290 aa, unidentified
MKKQCVGIDISKDHLDCCIGCIDSDQNHKLQNNKRFSNNETGFKALLNWVSDLQVTENLMYVMEATGVYYENLIYYLTENDCKASVLLPNMVKHYVKSLNIKTKTDKVDAEVLCRLGLERRLRFWQKPSRIMRELKFLSREYREIKYKINQVKNQLHARFYSYQCPESTEQRLKRQIALLETQALEIEAEIRTLVMTDRSFYDKIQRVCTIPGVSFITVVCVVAETNAFALISNSKQLTSYAGLDIQKNQSGRFNGTETCKKNSGNSRSEKVIVFNLRSLEKRGRIQYEL

SEQ ID NO: 385165 - protein, 461 aa, unidentified
MKNKHSNPKKKKFKKIALDENWEKINPNACGIDIGARELFVCVPADRDKASVRRFGTKTPDLGEMAQWLKDCRIETVALEATGIYWIASFQLLERKGFKVVLVNPRQIKNVTGKKSDVMDCQWIQKLHTFGLLGGSFRPADPYCVARTYMRLRDDLIAGSTCQIQLMQKALHQMNIQLSHVLSDITGSSGLAIIEAIIAGQRDPIVLAELASRRVKSTKDEMAKALIGDWRAEHLFCLAQAHQMYLRYQLDISQCDAQLADELEKLPNKVDPNSKPMPPKIDRKKQINEKLRLGLYCKFGVDVTAIEGIGPTAALTLLTEVGADLSAFPSEKHFCSWLGVCPDNRISGGKVLSSRTRRVVNRMADVLRMSATTLKSSQTALGAFYRRMVARLGPAAGITAVAHKLARLLYSLIKHGHDYIRTGLEEYEKKNADRKMKVLRKMAESLGVQLLEPQLVRAGVS

SEQ ID NO: 385166 - protein, 330 aa, unidentified
MSGFVGIDVAAKTFDVVVRIDGKANKVEQFSQTPDGHAAAVRKLQKLAPELVVMEATGIYYLDLAVALAKANLPVSVINPKSFHHFAALKLNGNKTDAVDAALLAEFAQCMSPRLWNAPQDELLGLRDIGRQLNRLTASRTQAKNRLHALTSKSMTLPMLIEDEQDGIEQLERRIKRLTQAALALIAGNATLAAHFSHITAAKGIGETSAIAILAELCVLPSTMKAPQISRYAGLDVRHTQSGSSVNKPTRLSKAGNVYLRAALYMPAMSAVRHDVRAKAFYEVLTGRGKKKIQAQCAVMRKYLTGIWACMQTQTAFDSTLLFSEKHIKN

SEQ ID NO: 385167 - protein, 471 aa, unidentified
MSTTPTRGKRRHEVCIVSKRKVPLPPQLKRVNLNAAGIDIGSEEHWAAVPPGRDSEGRDVRGFGAFTGDLCALADWLKQCEIETVAMESTGVYWIALYELLVERGFEVLLVDARQAKNVPGRKSDVLDCQWLQELHTYGLLRGAFRPVDQICILRSYLRQRSMLVTYASHHIQHMQKALEQMNLKLAHVVSDITGLTGMGIIRAILSGERDPVKLAKLRDPRCKSSEATVARALQGHYREEHLFALQQAVELVDFYQHQITACDRQIEACLQQFEEKSTEAPVAARSRKHRRGGITFDARSYLYRMTGVDLTQIDSIEANTALTVIGEVGLDMSRWPTEKHFGSWLGLAPGSKVSGGKRLSSRTKPSANRAAAALRLAAQSLNQSQSALGAYFRRLKAHIGAPKALTAAAYKLARILYRMLKYGAGYVDQGEAAYEERYRDRLLRNLKRRAAELGFQLTAIDSNAAQLVLT

SEQ ID NO: 385168 - protein, 339 aa, unidentified
MRLYAAIDLHSNNNVLVIIDERDRTVCERRLTNDLRVVLAELKPHSKKIEAIAVESTFNWYWLVDGLMDAGYKVKLVNTVAVKIYDGLKYSGDEHDARHLAHLLRLGILPTGYIYPKEERAVRDLLRKRAQMVRQRTTQILSIQNLVSRNSGAGITKAEIRELDEKAILETCKGDRTRALAISSNLTVLRCLDEQVAKLERDVLSRAKLKPEFERLLTVDGIGKVLAMTIMYEAGTIDRFAKVGQYASYARCVGSSRWSNGKKKGEGNRKNGNKYLAWAFVEAAVAGLRHSEPIRRYHQRKRAKTNAIVAIKTVAHKLARACYHVMRDKEVFDVARAFA

SEQ ID NO: 385169 - protein, 313 aa, unidentified
MAVAPEYIGLDVSKDTIDVASYPHDEHWRVTTSEADLAALVAQVRARAPALVVVEATGGYEMALVGLLVAAAVPVAVVNPRQVRDFANATGQLAKTDAIDARVLALFAARVQPTPRLVPDAALQDLTAMVTRRRQWVEMLGAERNRLAVARPALRRSVGAHIRWLERQLATLEEELATRIRATPVWREKDDLLRSVPGVGPQTARMLIAHLPELGQLSRHEVAALAGVAPLNRDSGRWRGRRTTWGGRAVVRAGLSMAALVASRYNPVLRAFDLRLVAAGKPKKVALVAVMRKLLTILNAMVHHHRAWAPVTA

SEQ ID NO: 385170 - protein, 368 aa, unidentified
MIVRIIPYERSTLVNSEKYIGLDVHQATIVVAVMDSTGKLVMESILETKAATILQFFAGLRGTLSVTFEEGTWSAWLYDLLHSRVDKLVVCNPRKNALLKDGNKSDRIDARKLAELLRGNQLKPVYHGETGVRMLRELSRSYLTIVKDLSRVMNRLKAVYRSWAIPCAGRDVYYRRHRAQWLAKIREAGVRRRAERLYEQLDRLQHLRQQARRELLAESRKHTITAKLRQIPYLGPIRVALAVALIQTPHRFRTKRQLWAYSGLALETRTSAEYRFVEGQVRRSKKLLSIRGLNKDHNHDLKGLFKGAATMASVRPGPFQDFYQAALAKGIKPTMARLTLARKIAAITLTLWKKGENFDPEKLKSQAA

SEQ ID NO: 385171 - protein, 367 aa, unidentified
MKKVSTAATMQSRNISQQKLTIGLDLGDRNSWYCLVDEAGQIQREQRVHTSAKALQEVFGGMPRSRIALEIGTHSPWISRLLSELGHEVIVANARKVRLIGESRKKDDRLDAQTLARLARIDPELLYPVKHRSAPAQADLMMIRARAGLVRARTGLVNTARGLAKSYGERLRGCNVRNMNPEKAEGLSPELQAALEPLLNAIESLSERIVEYNERIENLAQQSYPQVALLKQIKGVGTLIALTFLLTLEDPHRFRKSRDVGCYLGLQPGRRNSGQSEPQLHISKEGDPYLRTLLVQGAQHILGPFGVDCDLRRWGLKLAERGGRSGKKRAIVATARKLAVLLHHLWVNGEAYQPLHNSRRTTVVAAA

SEQ ID NO: 385172 - protein, 426 aa, unidentified
MSRNDYNRQAVRRQRIRRTTLIVGVDIGNAFNALGFMNKEGNVLGSYAKLYNNREGFEQFVNMIEGLKTKHHLRDVLIGMEPTGHYWRKLAYFAKEHGYEVRFVRTTALKHHRELDESSSAKSDQRDALTIANITREGKYIDTVIEDGVLRQLRTLSKARERLLRYSVSAKNSLHAALDDYFPELHETFWSTGSRSLWAILEQCPFPQDVMLMEVPTLQELIARSSRKKAGSVLKAEKLLEAAQKSIGVKQIGNADRYRVQMCLEEVKRTVLSLKHIDKQLKFLLKETPAALYLMSIPGIGPLSAAVFLGELGDPAHFHNARQIVKYAGYDPQESDSGSRIGRKFISKKGRWLLRKYLFFMSMRVVVLSNYFQEYYLRKLETKNRVGQQPRRKEMLCAVAIKLIKVIFALLRDKREFEDLAPAAAA

SEQ ID NO: 385173 - protein, 419 aa, unidentified
MKVTYQTCCGVDVHKSFLVATIVKTTGGIEPYYQKKRFSTFNNSILEFKQWLLDNDCHDVCMESTGKYWVSVFNLLEDEINVVIANPKWVKAVKGNKDDTKDSKWIGDLFRLGLVKGSYIPCKIVRILREYTRYRYKLVSCRSSEKNRYQNALTVCNVALDSVVTDIFGKSSTSFIDYLLEQSGTSINHEEITSKLLRSLKSKEDAVIKSAEGYQMTDVQKYRMRLVRAHMDYITAEIKDVDKMIENMISSNPDFENAVQFLCTIPGVKRDSAVTIISEIGTDMSQFSSSKRLCCWAGLTPGSNESAGKKKSVRITRAGVYLKPALVQCAHAAVKSDKSPYYKKKYESLVKRRGKKRAIIAIASMILTAIYQMQSTGEQWNPSDLYKIDMPVALVEKQKLSSKPRNYYNEKEYSLLMNH

SEQ ID NO: 385174 - protein, 420 aa, unidentified
MTSQNSIPADAVLVAIDIAKVRNEVLIEAPGHKRRRRLSVLNTRAEHDHLIEILQSYDRPVVCAFEATGNYHRPIAWRLVEAGFETRLVSSLALARTREALHNGWDKNDPKDAQVILHMLRIHSTQVYHDPLRAGINDVQELSKTHEAIANAKTEIQHRILTHYLPLYFPEIERFRGNSRSDWFFAFLDAFPTPSSITILTKEKFVEAAWDVVGRKVSKSQILMDIYETARTSIGLPLPLDAPAIRMFRMVVAEARSLIRQRNEIEAQADELLRHSRDYQILRQIPGIGPINALTIIAEAGDLRRFHHHRQFLKFCGLDLSTQQSGQYRGQTRLSKFGNARLRRTLWIAGQVAIRQRENGFRHKFERYIARDRDNPDLRRKAMTAITAKMARVVHAVIKSGSDYRPFVEGRVPGGRTSVS

SEQ ID NO: 385175 - protein, 343 aa, unidentified
MPHYVGLDVSQKTTAICVVDAQGKRLWRGVCATDPGPISARISQHAGVDAKVGIETGSMTPWLVHGLRAAGLDVACLDARRVKAALQMQLNKTDENDAEGLAQIMRTGWYRAVHVKSLDAHRARALLGARAQLVGMTTRLSNMIRGVLKTFGLLPGAGRGLRFDRKVEALLEGAPEIALVVRPLLATWRQLRQQIAVFDKAVLQQVRADPICRLLMTVPGIGALSSLMYVSTVENPSRFSRSRAVGAHLGLTPRRYQSGETDRSGHISRCGDGLARTLMYEAATVILHRVKRPLHLKNWAEAIERRSGSGKARVALARKLSVILHSVWRSGEPFRWAAPAMAA

SEQ ID NO: 385176 - protein, 434 aa, unidentified
MEEVTDEPLYRDRVCGIDIGKAGMVAAIRVPSDRDPARRAQETRSFGTTKREVLALADWLRCWQVPAVVMESTGDYWKGPFYRLEAEGFDCVLADAKQVKNLPGRPKRDPSDSRWLAACFERGAVTACFVATPEFRIIRLHTRYRRDLTDERTREKNRTEKLLESAAIKLSSVVTDLHGVTGRDIMDHLIAGERNPRTLAQLARARARRKISQLEEALEGAEFFAAEHAALLKAMLARIDRVGAEIDQLTEVIERLLAPYEEQLQQAESMPGWGRRSAQDAIAETGVDMTRFRTGPHLASWAGRTPLDHQSGKRAGRAKTKKGNRYLAAITGETAIAAGKTQTREGARYRRLARRRGKPKAQVAVGNTQLKVYHKLLSNPGMRYEDLGADYYERQRDVRRQITHHVGKLGALGFEVTLCRLPGPGEEAGSTSAA

SEQ ID NO: 385177 - protein, 345 aa, unidentified
MQNMYYIGLDVHKKTISYCVKDGSGKIHAEGAIGATRLDLDHWMKTLPQPWTAAMEATVFTGWIYDYLRPHAAALKVAHPLMLRAIAAAKKKNDRIDASKICDCLRCDFLPECYMAPTTLRERRRTLRYRNLLVRQLVQTKNKIAVLLMEAGVSYNKQRLHKAGYFRELLATNPDIDPGLCELLRLCREMVVRLQRTESALVRSLERDSLLTNRVDRLMTIPAVGPITALTWALEVSEVQRFSSIKKAISYCGLCGAEKSSANTVQRTPLSKQRNKHLQTMLIEAAKMAPRYSPELALLYDQEKQKGNANRATLAVARKLVAYLMAVDRGQRNFQVLPVKHCAAA

SEQ ID NO: 385178 - protein, 417 aa, unidentified
MAESFAWYVGIDWGNEAHVLCLMDATGTLRGTRLVAHTAVAVHDAIQWVLQETGATPDGIAVGLERPRGVLVDTWLERGFPLFAVNPKQLDRFRDRFTAGGAKDDRRDAHAVADALRTDRRAFRRIQPDAAPVIQLREWCRIVEELHEEEQRLANRLREQLYRIDAAWLMLCPAANEPWLWTVLADTPHPAAWPTWSRRRLASLLRAHRIRRLTVDEVIAAVRQPRLHAAAGVAEAVEARIASLVPPLRLVHAQRTVADRRIEQGLASLVAEAPDAEPREHRDAEILQSWPGVGRMVAATMLTEATGPLADRDYVTLRAHAGTAPITKRSGKRAAFVHMRYACKPRLRHALYHWARTSIQHDQTARAYYDTLRARGHHHARALRSVADRWLRILIAMLRAGTLYDASRFAQAIPRPV

SEQ ID NO: 385179 - protein, 438 aa, unidentified
MSNKVIFNLDDLFISVGIDVGADFSWMSIALPNQQFVGKPYKILHSSIDSLTTAVSKIKEAEELYSLESRIFLESTGIYHYPLFCYLRDKGFNCSVINPIITKNSTNINIRKVHNDRFDSKKAALVGLKPDLKVSLMPSDLALNCRNLCREYYDLMDNRGAYVNKLQGELLMAFPQYLGIFSKVTINTSLTLLETYTSPSAFLEADKQEIIDIIKSTARFGLTYAQNKYNAIIQAATDANQFGYIIDSNIKRIRLYISFIRKYDEEINNILESLHELVDANEDADFVKQIHLIETFKGAGFLSAVSIMGEIGDFSAFSKPKQLFAYFGLDPAVKQSGKFEGTKVQMSKRGSAIARRVIHTLTLQSISISRNGEAKNPVLREYYLKKCDSKPKLVAMGAVSHKVCNMIFAILRDNKSFEIITPQEHIKQYNASKCDMAA

SEQ ID NO: 385180 - protein, 423 aa, unidentified
MSETVSGAEPRFAAFVAIDWADQKHVWCWQAADSKERQHGEIRHTPEAVEAWVATLSARFPGQPIALAVEQSRGALVFMLSKYEQLHLYPIHPRAAAQFRAALYPSGAKDDPVDADLLLDLLVYHRDRFRRLDPDTEPTRLVQHLVEGRRRLVNEKTRQKNRLTARLKLYFPQILQWFNEVDSALVGDLLERWPTLESWQKARPAAVRTFLTAHHCRGEERMEQRLEQIRQAVPATRDGALIEASVTFTKVLVKLIAALREGIAAFDRQIEQAAAAHPDFAIWDSFPGAGRVLAPRLLAAFGSHREHYQTAADLQQYSGIAPVLERSGKSEWVHFRWACPKFLRQTFHEWAGHSIGFCDWARAYYQQQLNQGKGHHAAVRALAFKWIRIAFRCWKDHAVYDDSRYVECLRRRGSPLALALSSL

SEQ ID NO: 385181 - protein, 366 aa, unidentified
MKKIRLADVPAQGNAQPPVRPAPGTAVSMAIDVSRSKLVYCLRWNGVEQRRLSTPAELGHLQAVVAQYQHCQLHVAYEACGFGYEAAWWLQEQQVAVTVIAPSRVERAPGRAVKTDRMDAGKLARKLEAGELKGIYIPPRLLHEQRQLGRTYAQYVRDRQRAQIRIRSLLQEQGRIGPPPPAGWTAYRTWLAAQELPAPVRACVQAHEQIRALADQHAVRLRQELLQLARSAPYRPLVQALCAQAGVGSFSAIRLVLELGTIERFARGAALAHYLGLTPSQYSSGELDHRGHILKCGPGALRALLVQCAWAAVHPGRDAALRAVFERLAPRCGKKRAIVAVARRLAVQLHRRWWGVCQLPEVTPMP

SEQ ID NO: 385182 - protein, 384 aa, unidentified
MNNDSIIFIGLDTHKSFIQVAVLRENRGAHPEHLGRIKSNKSALIKLAQQLQSKYPKATLHFVYEAGPCGYWTYRLLTSLGHCCCVVAPSLIPKKSGDRIKTDKRDAAKLAKLFKAEELTSIYVPEAEDEAIRDLSRARETAMKDLKDAKFQLKGFLLRNNVQATVNDNWSKKHLRWLTDLIMPHHSQQIVLQEMIITISERMQRLQRLDNELLHQAKNWRYYPVVKAVQAMRGVRLLVALGTIAELGDLRRFDHPRKLMAYLGLVPTESSSGGKIRRGSLTKCGNSRARRLLIEGAQTYKHKANISVELLRRQESLPKEIVDIAWQAQQRLCRRYQRLLQRGKHRNVVVTAIAREMIAYIWAIAREVVICDVDPKTRIARLPS

SEQ ID NO: 385183 - protein, 323 aa, unidentified
MNKYNETFGIDISKDVFDCYGSEQGHLQFKNTEIGFKKFLEKLSKNSLVVMEATGYYHYRFAQFLYKNSVFVSVVNPLSVKRFIQMKLAKVKTDKSDAKAICDYGLTQEVPLYNALTDTQSECLQLFRLMDNLLKTRTATKNKLHGEEVLGIPSKWVYRCLNRSKNHLDKELRGIEQKLLSLVKQDQQDQLTLLQSIPGIGIKTALFLIVVTDGFNKFETASQLCSYVGITPTIRESGSSVRGRARISKVGNRKLRNLLFLCSFTACVHNKGCREIYQRIVNKGKSKKLALIAVSNKLLKQSFAIAKSGHPYDANFVSVLASK

SEQ ID NO: 385184 - protein, 372 aa, unidentified
MGHHTEVFVGIDTSKSRNAIAIADGGRGGEVRYLGEFPATEAAIRKLVAKLAAKCCQLTFCYEAGPTGYGLYRLLKSLGHDCLVVAPSLVPKKAGDRVKTNRRDAVSLAKLLRADELTAVWVPDERHEAMRDLSRARQAVKKDLQGKRQQISSLMLRLGRIYPGKTTWGPAHMRWLMSQKLEHREQRIAFEELLEGVRQESERLERLEDAIREVVPEWSLAEVVSALQAVRGIDLIAAVGVLAEIGDLSRFQNPRELMGYLGLVPTENSTGDQVKRGGITKAGNGRARRILVEAAWSYRYPPRVSRDKQPKVEAAPRVAREIAWKAQTRLCGRFRSLERKGKRRTVIVTAIARELSAFIWAINRELMPPRQA

SEQ ID NO: 385185 - protein, 425 aa, unidentified
MKSNRNDRTNQRIERISMQHAVVGIDIAKDAHAAQMTDFRGRSLTPRHLSFPNTLEGFEKFLRWVREAQSKHRLTSLLIGLEPTGHYWFNLANWLLQQGIEVVLVNPVTTHRNKENRDNSPSKNDPKDALVIADVVSRGYYTDYVTQAAVFERLKTLMSDREYWVKQSTSLGNRIVRWIDLYFPEFRQVFPDWTVLRSLASLHACPMPCDLKRLSIDEVIDHWRKQGMRRASGVSGRAKAAALLAAATHSIGDTRATEEARQDIRRLLQTYEHVVAMLGEMDEAIQSILTEIPLAEQLRSICGLGNMTLAAILASAGDLRLYAHGRQLLRRAGLNLAECTSGKFKGQIKLSKRGDSTLRKHLYWGMLNLVRQNPDFKRWHAHNQAQGMKKQASLFKLIGKLARILIGMVQRGETYRSALAAPVAA

SEQ ID NO: 385186 - protein, 387 aa, unidentified
MQKPHDNSKASPAAFTQDNTLIAVIELSLSSWLVGGLIPGVSREPLKKLEPNPEDLLKLLHRWRDEAIKAGRLITRIAVAYETGRDSFWLARWLRERGIDAHVIHATSVTVSREHRRAKTDRLDTAMLKRGFLGWLRGERGHCTVAIVPTMEEEDAKRPYRERDGLVHEQTRVVNRMKSALIQFGVRNFNPKLRKASVKLETVRTPESKSLPPNTIAALRRDMERLKIIKQQIKAIEQARLQQFEQKPEALANRMIYLLARIYGLGLETADLLVHELLSRTLRDRKAIARYAGLTGSPDESGSKRREKGLSRSGNARVRKIMIELAWRMVKFQPDSALVQWFKQRTENAKRSRKPMIVALARKLIIALWRYANDGVIPEGFRLHLAA

SEQ ID NO: 385187 - protein, 417 aa, unidentified
MANKSQKVKMVNKETMVVGLDIGKGSHYGYFRAPDGQDSIPFEFHNHRDSFNQFWQKLCRFKSNHGLKEVLIGFESTGPYAEPILHFLRQQPVKLVQINPMHTKRVKELTGNSPNKTDRKDPRVIVDVMMLGHSLTVVVPEGASAHLRRLTQARERAVTDRTAMLNQLQHLLFIIFPEFLRVIKTVSSKTGLYLAGHYPTPDAIAALGLAELSRVIKAVSCGRIGADRADRLFQAARNSVGIVEGRDSIVTEIGYLVAQIEHANAFIVQLEGKMQQHLERIPYSGSLLSMRGIGVITAAGLIGEVGDFRKFSTISEITKLAGLDLFEVSSGKLKGQRHISKRGRSLMRKLLYFAAINTVRSNGVMQYSYARMLERGMPKMKALVAISRKLLAVMFALVRDQTAYIENYDHNCLQLAA

SEQ ID NO: 385188 - protein, 324 aa, unidentified
MIGGILGIDVSKNTLDVSIAICTRVRSRSFANSSDGWRLLLDWLIAQNIQCVHACLESTGRYSLGIAYALYEAGHVVSITNPAQIRDFARTKLGRNKTDGVDASHIREYCELFKPSPWEPPTQAHRRLGELQTIRSGIIAGLTEWKNRKNSGIVDVEAQALADATISHFTSQLGVVDEAIARTIDNDCDLRSKRDLLLSISGVGETLAGVVLAELPGPDVLRSSAEVVAYAGLNPRQYQSGTSVVRATRISKIGNAVLRAALYMPALSAMRYNPAIVALVTRLKSQGRLKPKQIVVAAMRKLLVLCFGVLKTRRPFDAAIAMGC

SEQ ID NO: 385189 - protein, 417 aa, unidentified
MAKNINRSNRKKLDSAGANKRAIKVQKTIKSRNEGRDECKARHRWGVQSLLRKLEDAKNAPKQPAPDANVGYHIGIDLGDKKSDYCILDKNANIVAEGKLATTMIEFGMYFREIPRSRIAFEVGTHSPWASSLLETIGHEIYVANPRKMGGGKKNRQKNDKLDAEALARQVRSDPRALYPIQHRGEKARHALVLLRARHAVVCARTKLICGARGLVKSAGERLPRCSADSFHNVGLKYVPEALRNMLEPIFQQIGTMTDQIKKYDVEVRRMCRQAYPETEMLQQANGVGELTSLAYVLTIDNPGRFAKSRDVGPYLGLVPRQYDSGDSRPQLRITKTGDRMMRQLLVQSAQYILGRYGNDSDLRRHGLKIASRGGKNAKKRAVVAVARKLAVLLHRLWVTGEVYEPLRNSKQQEKAA

SEQ ID NO: 385190 - protein, 365 aa, unidentified
MRKIRENAAGIDIGAKKVFVYIEGQEVKSYYTFTEDFDILCQYLLKHNVKTVAMEATGVYWSILYEILEESGIDTWLVDGRQTKQVPGRKTDVKDCQWIQELHSLGLLNRCFVAKDDVKELRSYNRLREDHIRTASMHVNHMQKALTEMNIRLKEVLSQIHGVSGMRIIEAILNGERNKSTLLNMCNVRIIRNKKKEVLKSLNGRYTNTGIFALRQAFDGYNFYQGQIKQCDKEIETIIHRMGNGGLNNNLTTKRKAIRHNKPEIDNLGANLIDIFEGRDATVISGITDYSWMQLLSEIGTDLSRWPTEKHFSSWLGVAPGQHWSGKMNRNKKNLVIRRQVRFSDKLHKAYWQVRISHWVHLDEE

SEQ ID NO: 385191 - protein, 313 aa, unidentified
MIIALRYVGIDISKKHLDIFDEADGVPRRIANATQAITQQVARWQCDALVVFEATGIYDLALREALRQAGIQFARINPARARDFARASGLLAKTDPIDARMLAAFARAMQPAPEQVADPARGALARLAKRRDQLVLMRAQEKNRRSEADDRAMAERIGRLIEVLDSEIAEIEADISALIKAEAQIADDAKLMRSLPGVGPVACMQLIAQMPELGRVGPKQLAALAGLAPFNVDSGTFRGKRKIAGGRKRVRDALYMAALNAVRRADPFKAFYARLRQAGKPAKLALIAVARKLLTVLNAMMRDRKPYLQTKPT

SEQ ID NO: 385192 - protein, 370 aa, unidentified
MNTSHINQHSLVVGVDVHKYSHTAVALDPWGKERGMLDFSNDNLPVFTSWVSSLGEQENTIVALEDVNCYGVHMVRALVSGGFHIRYVPAILTERERKCSTKREKSDAVDAKRVAKVMLTKYEETLPARESIAGKEELLTAQSLDLLLTERRDLVRLKTILKNQLHGLLHQHYGDHYADAFKKPFNKEAVAFYESDLSILDVPNERSILAAAILRRLKRLSFVEGQITDISKGIKDVGEGSLAVMALSEELHGCGMVTAASIVAELTTIRRFSTRDHLASYAGVAPTEHSSGRKERLHTNPFGNRRLNAAFHTIALSQIAIKGDPRGREYYARKVKEGKTKLWALRCLKRQIANRVFRILSNVTKEPPLT

SEQ ID NO: 385193 - protein, 356 aa, unidentified
MNGLKHQMEKRSMDYFAGLDVSVKETSICIVDDTGKIVREVKVASEPDALLQVLKNNAYHFKRIGLEAGPLSQWLYSAFAEVNLPVICVETRHMRAVLKAQINKTDRNDARGIAQMMRAGLYRPVHVKTLRSQKLRMLLTHRKLLQSKAIAIENDLRGTLRNFGLKVGIVGKLKFETRIRELVENLPDLAVLVEPLLVVCRVLREQIAVLHRRLLVIVRDDDVCRRLMTVPGVGPVVALTFRATLDVPARFRNSRAVGAALGLTPGKYQSGESDHTGGISRCGDEMMRVMLYEAAQVMLVRSTRWSWLKAWAMQVARRRGMKKAIVALARRLAVIMHRIWVDGTEFSWSRQEAAEA

SEQ ID NO: 385194 - protein, 343 aa, unidentified
MEIIRIGLDLAKSVFEVCGVDMRDHVVLRKTLRREAVPQFFAELPPCLIGMEACSSSHYWAKVLTDLGHQVCLIAPQFVTPYVKSNKNDRNDAEAICEAISRPSMRFVPPKSSEQLEIQAVHRIRQRLVSSRTRLVNQIRGLLAEHGVVIGRDISRLRRALSQIVEGADRNLGDLIQELASDIHQELAALDERISSYDRRIRNLFRTNEMCQRIGKIEGIGPITATALVAAVGDQSCFENGRQFAAWLGLVPKQRSSGGKSRLFGISKRGDRYLRTLLIHGARAVLGKAGGKQDARSVWINRMRERRHPNVVAVALANKNARIVWSILSKNEDYRGPETPQAA

SEQ ID NO: 385195 - protein, 461 aa, unidentified
MTSLFFGIDVSKGYADVCCINQAGSRLGNVGQFDDTAAGHAAMKKTIETLKSKYPDAQMVFGLEHSGGIERNWAVFLRDLAAPSGGKVFTLNPLAVKKFLDRDLHRNITDRVSAQGIANYLRQGMRLAEVPFEDLLSGPTTLYRHLRNFISRSAQIQNELQSLLPRVQPEMVQFCRQGFPEWVLQVLLKCPTAARLAIARPGNLAKIPHVTRDRAEKLIAAAQESVASQTDVFTEITVTSLVKDLMHAQETVDELKEQVIASMAHDEGVKIMQSIPGIGAWSATCLRLEIGSIERFPAPESLVAFAGLDPRILQSGDSIRHVGISRRGRRQIRAILYPVILSAIRCNPVITEFYAGLTARGKGHLKSATACMRKMLHIIYGCWISGKPFDAAHEKGRKTAKPRPEAEAATTEQPQPSPVCTVAAPVSRREAAKRRKATTMPQTDNFRRERGLGVASVSHTT

SEQ ID NO: 385196 - protein, 422 aa, unidentified
MITQQIDSFTAIVGLDWGDSKHDVCIQASTGEAREFDVIAHRPAVVDQWVKSLHDRFGGPIAIALELSKGPIISILQKYDFIVIFPINPSTLARYRSAFKPSRAKDDPTDAEMALDLLLRHPDRFKPLHPQSTDMRTLAKLVEQRRQLVADKIRLTNRLRSSLKEYYPQVLEWFDHIDTPLFCSFFARWPTLAQARRARSKTLQRFFHEHNMRFEKVLASRIEAIKNATPLTLDNAIIKPHRMIAQVLVEQLQLMLSAIKEFDAEIDSIAKAQPDYALFRALPGAGPSLAPRLLVAFGEQRDRFTSAEDVQKYAGIAPVTERSGKKHWVHWRWQCSTFLRQTFVEWAAQTINKSYWAGSYYRQQREKGCTYQAAVRALAYKWIRIVYRCWQTGVPYDEAKYLKALEYRGSTLLAPQKILKTA

SEQ ID NO: 385197 - protein, 336 aa, unidentified
MSHYCGIDLHSNNHFVVVIDEADKRLLEKRLPNDLSRTLTALSPYRDSLHGIAVESTFNWYWLVDGLQDQGYAVELVNTLAIKQYEGLKYRGDRHDAFHLAHLMRLGILPSGYIYPREQRAIRDLLRRRLFLVRTASAQLISVQSQIWRSTGVRIKSTDLRKPDFEPRGVEGYTRQAVEAGLSVYQAVQREIDALERSAHAAVKLSEDFRILQTVTGIGVILAMTIMLETGPIERFAGPGNYASYCRCVDSRRDSNGKKKGEGNAKAGNKYLSWAFSEAAHFAVRYEPLAQRFYERKKARTNGIIAIRAVARKLARASWMMLKHQVPYEAKLMFPG

SEQ ID NO: 385198 - protein, 429 aa, unidentified
MNESESIRLKGFRQLRKEIRGSEKHLIVGIDVGKDKHHAFFGTATGKTVLKRMVFENTIDGFEKLLRHVEADKVKQCLEKVVFGLEPTANYHKPLGEFLIKCDREVVLVAGGAVKHNREMLDGRWDKNDTKDPGNIADLISQGKFLYYDYPCEALRGLRELLALKRVQKKQEHRVKVRIRNNLLAKYFPELERYQSKWGSEILSIVKWCIDPAVIAGMEYEEFVRLVAPGCRGVPSQKERLRAIWEKAIASIGCDAGECVDFEAKMMVKGLHQIREALRETDDEIEKVCLEFPEYSYLLTIPGFGPDVSSKVLGYIGDPFRFENRSQVIKMAGFDLSASRSGKRSDNVVPVISKKGKADLRYALYQAALIASTRDRYFMVYFTNKLRGREREKGIKTKMRVKLAAKMLVIGWTLMKKQEPFDPSYLKTE

SEQ ID NO: 385199 - protein, 633 aa, unidentified
MPPAALVPVDLIGVGIDTSRYGHRVSFLGPDRRPAAPPMTILENRKGYDALRDRLQRLLQQHPQARLNVLIDAAGQYAANLEHFLRSLSLPLDVSIGEPRRNKDYRKAHFPKRTSDDTESQSLARFAAIERPPATLPVPPQMALLQEVASRLQARVKQTTQATNRLHNLMARVFPELADLAPDFTAGWVLELLDRYPTPQRLARAHRSSIEAIRYLPQDQVEPLLQTARQSVGSLSGDIAEALVRDLVAQVGHCVKHETPLGDLLEQAFDALPPSGHRQLLTIPGIGPATAAVLTAKVIDIGRFASPEHLVGYFGIFPEEDSSGVLPDGQPRPTGSMAMSRKGNDLVRAYLWNAARSASLHNPAVRALYQRQRAMGKRGDVALGHCMRKLLHLVYAVWTTDRPFDPEHFPWEGSPAASGEAAPATAPAASGEAAPATAAAPAASVTAAESATVPATAAAPAAPVSAPEPAAVPATAAATNEEAVGHTREIPAGSVVTTASPTVAPPPLPVNGPAGRAARPRVDYRYLREQIGMEPVLRHLGVLEQLRGRGQQRRGRCPVHHAEAGTLPTFSVHLGRNVFQCFDAGCGAHGNVLDLWAAVRGLPLYEAALNLAETFGLRRNREEEPVNRGRPAG

SEQ ID NO: 385200 - protein, 326 aa, unidentified
MTTIGIDVSKAKFDSAWLRDSETGKVKTKVLKNDNAGFQTLIAWAEKNIGQPITNIHFVMEATGIYHEALAYALHEAGAKVSVVNPAYIHSYAKSQGSRIKTDKKDSITIAYYGATQNPSLWQPEPGEIRQLKALIARYEAIEKDIQRESNRLEKAEITQVSAEVINSISTIIDELTKEKNRIRKLIDDHIDQNPQLKNDRALLESIPCVGPVVSQYMLALIYSRHFSTAKQCSAFIGLNPVTHESGTSVRSRPRLSKVGNAKIRAKLYMAAVVAIKHNPDIKQQYERLLKNGKSKMAALGAAMRKLVQICFGVLKHQTPYQAQAI

SEQ ID NO: 385201 - protein, 454 aa, unidentified
MSERKKRKKKAPRINLPASLQHVNLDAAGIDVGSNRHVVAVPEGRAEVSIREFGAFTEDLIALANWLAKCGVKTVAMESTGDYWIPLYEILESHGFEVKLVDARRVKNVPGRKSDVLDCQWLQQLHTYGLLHGAFRPPDQVCVLRGYMRQREMLVQASSMHIQHMQKALQQMNLHLHNVVSDITGITGMKILKAIIAGERNPQVLAKHRDQRCRHSAETLAKSLVGNYREEHLFALTQAVDLYETYQAKISDCEEAITRHLQAQPTRTDEPPPPAQKRIEKKHSVRAGVNVREELFKLTGVDLFSIAGLGADTLLTLAGEVGFDMKSWKSEKCFTSWLSLCPGTRTSNRKVLSSKTRRNSNRAAAAFRLAAATVGRSKTALGAFYRRIAARIGHPQAVTATARKIAVLYYSLLKNGTAYVEIGQEVYEQKYRQRRFNAMQKQALSLGYQLVPIS

SEQ ID NO: 385202 - protein, 408 aa, unidentified
MDVVYPVCCGIDVHQAHLTACLRRVQEDGHVTKDVQEFATTYPALLILLDWLIAQHCPVVALESTGVYWKPVYHVLAGSLEVLVGNAQDMQQRPGRKTDKADARWIAELLAHGLIRPSFVPPPAISALRDLTRTRVALVQTRSQAKNRVHKVLEDTNVKVASVVTDLFGVSGRRMLAALIAGERDPQALAGLALGRLRRKLPQLEVALTGQFTHHHATIIQASLELVDLLNRQIADLDSQIGELVTPLEPQITQLDSIPGVDKIAARDILAEIGTEMSRFGSAARLASWAGVCPGNNESAGKRRRGKSRKGNRYIRRVLVQCAWAARKTPTYLGRTFRRLEVRLGGKKAAVAVAHKILVIVYHLLAEGTLYDEERYDRLQPRQEAQQRQRAIKVLERLGYHVNLERVA

SEQ ID NO: 385203 - protein, 325 aa, unidentified
MIVPKLGIDIAKKNFVVCLIGEKKQRKYSFSNDADGFPELSNWLNSKGIAKVHACMEATGRYGEKLAAYLHRQGHKVSIINPKFVKRHGEALNKQNKTDPNDAYVIAHYAQCFEPREWQPRTAVQDELLDVVGQIALVKKTRAAFLNRGKCGLRSMDVLKVNEELIASLTKELLKLEKLKDALLAKDTKLKKTADIVDSTPGIGQEIAAAMAVKIDFAKFRNGRKLACYLGLSPREWQSGEQKRRGKQTKAGDDQLRALLRMGAMSATYTNPLYIEFAERLRQKGLKEGQILTAVARKMVMIAHALVRKQQLFDSCYVHSLTKAA

SEQ ID NO: 385204 - protein, 321 aa, unidentified
MARQRELAAVWVGVDVAKKMIDVARGPEGHLERVERALGPLQAWAQTLPPDARVVLEATGGLERVVTVVLRARGVAVSVVNPRQVRDFARATGQLAKTDRLDARVLAHFGAALTPRETAAKTIDAEALRALIDRRRQLVETRTAEKNRRHTAPEAVRGSIDEHIAWLDHEIEQLDQAIEGAATACATLAEPLARLQAIPGVGRVVALTLVTHLPELGTLDRKRIAALAGLAPFARESGLQRGRRAIWGGRGDARAMLFLAAQSAARWNAPLQAFYERLVGRGKPKKAALAAVARKLLVAINAMVRDRRGWQPALVGQPSCC

SEQ ID NO: 385205 - protein, 442 aa, unidentified
MDKTLFLGIDVAMAENACCSLLEDGTEARRRFIVANNLPGAQHLVKEILVLMERFGLNRLLIGLEATNLYWWHLACFLTSCPELAPFQPRVYAFNPRLIRAFKKALADSGKSDIADAYAVAERLRFGRLPAPFMVNEVYQPLQRLTRFRCHLMHQITTEKNYFLTFLFLKFSEYQNLDPLSNTFGAASQAVLMDYLTVDEIVAAPLEELASLVAKEGRNHFPSPEAVAAAVKRAAKDSYRPHPNLNEPLNLILGATLENIRTLSQQVKKVDKAIEREVRNFPNTLGSIRGLGPVFVAGILAEIQDINRFPDSAAVAKFAGLFWRTRESGSFQAEETLMGKSGNPYLRYYLIEGANSVRMHTAEYGRYYQAKYDESTKHKHKRALVLTARKLVRLVDAMLRRNQLYIPPPLNLTEEVRKQGITKARPAKQHRYRQPGVPALCA

SEQ ID NO: 385206 - protein, 385 aa, unidentified
MAPPRRPEIVIGLDVGKSSHWACVATRDGEVLASKPVANRENALDSLFAEFPGALVVVDQVRNIGALALSRARAAGMPSAYLPGLAAHEAARLFGGDAKTDERDAMVIAKTALGIPDALLPAPHPDPAIAAARALAAQRDFLTRESTRSKNRLRSILLESCPEFESLVDLSDVSELRLMAALGGPWSVADAGRRRAAALARGARRGKVDALVGSVGSSTRPDAAAIAAEDRAVRFLARRIAENAAELQAATAEISALLERDETYRCLLTIPGIGPKTASELAISVNIDDFPNHDRLASYCGLAPRNRQSGTSVSSVSASRQGNKRLKNLLIFSCNCLARTDGRWGEYYARCRDRGMPHGKALKAVARKRLKVIYAVMRDKVPYVA

SEQ ID NO: 385207 - protein, 344 aa, unidentified
MKNYAGLDVSLEETAIAIVDETGRTVREAKIASEIEAIDAWLGKTGIAIVRLGLEAGPLSSWLHAGLKERGWPAICIETRRLRAVTRAMPVKSDRKDAEAIARVMRTGWYRAVHVKSLASQQLRVLLRHRKILLAKRQDLENELRGTLKNFGLKLGRVGRAKFAQRVGELVTGEPWLERLALPMLAARAALLKSFGELHALVLRIVKADAVCRQLMTIPSIGAVNALAYKTGIDDPTRFRHSADVGPHFGLTPRRYQSGETEIVGSISKCGDAMVRGLLFEAAMTLLFRVKAASALKRWARALAKKIGTRKAAVALARRLAVIMHRMWLDGTDFNPNLIRAAAG

SEQ ID NO: 385208 - protein, 323 aa, unidentified
MQGQKSPERSAQPGVYVGVDVCKDWLDVYLHPSGQAFRVSNAPAGLKTLKRRIAAIPVELIVMEATAKFHRQAHRSLHAAGFAVAVVNPLRARLFAEAVGQLAKTDRLDARLLALMAQTLEPSPLAPAPEALEALQELARARAAAKAEQTALSNRRGASQTAFLKTELGRRLKTLASPIERLDAEIERRVGADPALKRRYDILISIPGVGPVAAVALLVGLPELGACSAKAAALLAGLAPLACDSGAKAGERHIRGGRAFVRTSLYLAALAAARCNPQLRHDYKRLRDAGKKAKVAITAIMRKLVVLANVLIKEDRPWKPIHA

SEQ ID NO: 385209 - protein, 415 aa, unidentified
MSDRVCAYAGVDWGSQNHCVFLTDGEGRKIGAKTFKHSGEGLAEMADWLMKTSGAEAAEQVFVAIEVPHGPVAEGLIERGFAVHALNPKQMDRFRDRFSVAGAKDDSRDAEVMASSLRTDAKCFRRLTPADPIIVELREWSRLAEELGVERNRLANRLREQVWRYFPALLELETDLSAEWLLEFLVLAPTPAKAARLRETTVAKLLKERRIRRFDAASILKTVRATPPQLAPGTIEAASAHVASLIPRLRLLNRQIRDAERKLDALTARLVDSEETEPGQNKQHDAVILASLPGLGRIILATLLSEGTEPVQRRDYAALRSLTGVAPVTKRSGKSCIVLRRQACNDRLANALYHWARVAVQYDPISHAKYAELRQRGHTHGRALRQVGDRLLNVACAMLRSGTLYNPTLAAEKTA

SEQ ID NO: 385210 - protein, 323 aa, unidentified
MNKDTNYYGIDISKDVFDVMDQNGVHYQFKNAEKGFKNFLKILTKESHCVMEATGYYHYQLAYFLLENNIRVSVENPLSVKRFIQMKLSKIKTDKSDAKMICEYAQNVELKLWKGNSKDQQECLQIIRMLSVYSKQSTALKNKIHGEKTLGNTKTCVVKSINRSLKSIKKEVDLLEEQLQEIVKKTHQDLLTRLESIPGLGRKTSLMLIVLTDGFERFETANALCSYSGLTPTIRQSGSSIKGRPRISKMGNPKLRNLLFMCSFTACKYNKACKAIYDRIVAKGKSKKLALIAVCNKLLKQAFAIAKSGLIYDETYRSTLVKN

SEQ ID NO: 385211 - protein, 341 aa, unidentified
MNVTTIGIDLAKTVFSIHGTNQHGKVVVRKRLNRPKLLAFFAQLSPCLIGMEACSGAHYWARELTRFGHDARIIAPRFVAPYRKSSKNDDNDAEAICEAVGRPNMRFVPTKTVDQQAVLCLHRIRRGLTKERTAQINQIRGLLAEFGLTVPQGRYQARHRIPDILEDAENGLPMLARRLLNNINQRILQLDEEILAYDREIEAMARRDERAKRLMAIPGIGPQTATAIMASAPDPRQFKSGRHFAAWLGLVPRQYSTGGKPRLGRITKRGDKYLRTLLIHGTRAVIAKLANKDDRLSRWAKELVERRGYKRAAVALAAKNARIIWALLMNQSEFKTQPVEG

SEQ ID NO: 385212 - protein, 364 aa, unidentified
MDVHLRSTTVCALDAETGEAVTRRFRGNPWGEVAEWMSGFPGPSLAAYESGYLGFAPQRELSGLGVDCVVAAVSKVPRSAADLSSKNDRNDAARMAKAILSHDVTPVWVPSPEIEGLRDLAGAHDAATARLAAAKQRLLAFLARRGYAYGGTTPAGNPRKYWTYGFLRWLDGIHPADDGGIRALAALRNEVEAADETREAVLAEYRAAVAAGPLSAEVEALQSIKGCGFALAAAFAAEVGDFSRFRSGRQVTAYFGLAPKQRSSADSVRLGGISGAGNALVRKLAVEGSWCYAQAGHQPKLMPKGSGVPLEIRMHGRKGSERLLRRREEMLERGMPQAKANAATAAELVRWLWALGAMCREAGE

SEQ ID NO: 385213 - protein, 442 aa, unidentified
MARTLRSKKRRRSVRAHLIFKPGGIIHPRVQAVGPEHFGIVSVDCAKARSKWMLAEFYGNVLVPPTTVEHNRKDLDAMVQSVRQVIEQFDLQDVIVAIERTGRYHLPMKRTFAQAGFDTRSVHPLTSKQFRQPANPGNKTDDTDLNAIHRAAVNGFGMIEPSPDPVYVHLQLLARHRRDLVEKSTALRCQIHEHLQAIMPGYARCFDDIYECHTALVIAKRLGSADEILRVGLAGLTQEVEKASVRPHRPTLEKILAWARAAAAGATEASVHHRVMRELDDDRVAKLGAIKAIEGELAELLVQTPYVLLLGTPGINVVSAADFAGEMGPIQFYANARAITGRAGLFPSRYQSDEVDRPDGRLVRCANRRLRNAIMIIADNLIDCNDHFRLLAAQWRVEERPARDPRARGRTFLPNRVPYGGWTDPIPASELPATGLRSFEVD

SEQ ID NO: 385214 - protein, 393 aa, unidentified
MVCVGIDVAKDKHDCFIISSEGEILADVFTIPNNAEGFDTLLQAIRRSTRPEDKIKVGLEDTGHYSYNILGFLLDKGLPTYVINPLHTNLYRKSLSLRKTKTDRVDARTIAAMLMSDVDLKSYTDTVYHNEELKSLTRYRFDKVRERAKLKQSVSRLVTILFPELEKLVSSLHSASVYALLSEFPGAKQISSTHMTHLKAVLKNASQGRYGQEMAETIRNAARSSVGSVMPAKSLELQHTIRLIRELDAEIEDIETAIQAIVDEMQSPITTIPGMGVRMGAVILAEIGDFSRFDSPDKILAYAGMSPSTYQSGQLSLSGAYSHMEKRGSRYLRYALYNATKHVCHWDPTFAAYLAKKRAEGKHYNVALSHAAKKLVRLIFAMEKSQRPYCAAA

SEQ ID NO: 385215 - protein, 413 aa, unidentified
MRVMIERCCGLDVHQETVVACLLIGAPGVRPTKEVRTFRTMTRELEALRNWLKAAGVTHVGMESTGVYWRPVYAVLEGYFELIVGNARHIRNVPGRKTDVKDAEWIADLVRHGLIAKSFVPARPLRELRELLRYRRKLVESQSAERNRLLKLLETANIKLASVASDVFGVSGRAMLKTLSEGNATAEEIAGLAKGQLRRKHDDLVLALEGRVEEHHRFLLAIQLHRLEAAEHDIEALDSRIAERLEPYRTQHALLMQIPGVDWVVAAVLIAEIGIDMSVFLSAYHLASWAGVCPGNHESAGRQRSGRARKGNVHLRTILVGAATSASRTKGSYLKDKYHRLKARRGALRAALAIAHKILVAAYHMLAKGLAYRDLGEAYLDQLHQTRTAANLKRRLERLGYTVALQLKEATTA

SEQ ID NO: 385216 - protein, 307 aa, unidentified
MLYIGIDISKSKLHIAFFKDDAWQKMEIANESMSIQKWIKCLDKEAVQVIFEATGSYGAKLMYLLHLNHIHFTMLNPCQSKGFAQVEKNHSQTDQRDAVSLSKYGALIRPNPSLVAAQQWEKLRQTRGALRQMKKYERMLGNQLHALEQFPFQEPTVKTALIRTLATIREQILTLEANICDLTNDEMDKMVRKIATINGIGLVTARELVISTNGFQYFEKAKQPAKFIGVAPTTKSSGTSVRKKGKISRSGDSGLRGALYMAALSAIRCNNACKELYKRLKDKGKCSKQALVAVAHKLLRQAFALAK

SEQ ID NO: 385217 - protein, 370 aa, unidentified
MEDISFVGLDVHKATISVAVAVGDRRGEVRHLGVFANRSDVITKLVRRLAAKGKRLNFVYEAGPCGYGLHRQLTSLGHACQVVAPSLIPIRSGDRVKTDRRDAAMLARLCRAGELTSVWVPDPAHEAMRDLVRARAGAVRDLTRARQQLSGFLLRHGRIYPGQRGWTRAYRRWLTTVRFDHPAQQLVLQDAIHQVENAEARVARITGHIEDLLPAWSLAPIVQAIQAMRGVGLIVAVTVAAEVGDFTRFSNPRQLMAYLGLVPCEHSSGSSVRRGGITKAGNALARRALIEGAWTYRLPARVSRKLYDRLEMLPQAVREIAWKAQVRLCARYRRLVAAGKPKVIVVTAIAREMAGFIWAIARQVQTPKPA

SEQ ID NO: 385218 - protein, 343 aa, unidentified
MYYIGLDVHKRTISYCVKDAAGHVHQEGKIRSTRCELDAWIKTLPQPRMIAMEATIFTGWIYDHLRPHAEKIKVAHPLMLRAIALAKKKNDKIDAAKIADCLRCDFLPECHMASTEIRDRRRMLRYRNLLVKQMVQMKNRVSGLLLETGVSYNKRRLHKVGYFADLMSTNEEVNESIRPLLKLSREHIVRAQRLDYGLVSSLERDPLLAERLKRLRTVPGVGPITALTWALEIGDFTRFRSIKQAISYCGLCGDERSSADKVMRMPLSKQRNKHIQHVLVEAAKLAPRECHELAMVRDRELQKGNPNRATLAVARKMVGYLLAVERRKQDFVAAEKFKCTTAA

SEQ ID NO: 385219 - protein, 323 aa, unidentified
MNKDIKYFGIDISHLVFDITDSDGNYHQFKNNPSGFKRFAKLLDITSHCVMEATGYYHYQLAYFLLESGVKVSVENPLAVKRFIQMKLSKIKTDKSDSKLICEYAQRVELKLWQGNSKHQTECLQMTRLLAVYTKQSTMLKNKLHGEAVLGNPSKVVVRSLKRSLKQVQKEMKNLEDKLLILVKQVHQDVLTRLKTIPGIGNKTSLMLVVLTDGFERFTSGSELCSYAGLTPMIRQSGSSVKGRPRISKMGNQKLRNLLFMCSFNACKYNKACREIYERIVAKGKSKKLALIAVCNKLLKQAFAIAKSGLTYDDTYRSTLVKS

SEQ ID NO: 385220 - protein, 388 aa, unidentified
MSGGTSRPVPTVPDAPDGGIVGGVDTHKDEHAAAALDALGRVRGRAAFPATPDGYGRLLDWLAGFGPVRRVGVEGTSAWGAGLTRFLRAAGVEVLEVSRPNRQRRRRAGKSDPADAEAAARAVLAGEALGVPKAQDGPVEAIRALRVARRSALHARTQAANQLRSLLDTAPADLREALRGRTLRRIVDAARRFRPAADLAVPAAATKAALRSLARRWLALTEEMAALDQQLAQLVRATAPSRLLDEVGVGPDVAGALLVAAGDNPHRLHTEASFAALCGTSPRDASSGRQRRHRLNRGGNREANAALWRIVMVRLRWSHPATQAYVDRRVGEGKTPREAIRCLMRYLARRVWRLLTQAPPAPLHAWPLAPPNHVSAGDHAGALTHEYV

SEQ ID NO: 385221 - protein, 340 aa, unidentified
MRALYAGCDLHGNNNLIGIIDGEGKRVFKKKLSNDLALVRDTLKPFQEKLVGIAVESTYNWYWIVDGLMEKGYQVHLANPSAIQQYSGLKHSDDKHDAFWLAEMLRLGILPEGYIYPKEERPVRDLLRKRGHLVRLRTSLIISLQNILSRNLGRRVNVNDVKALKEDRITPLLEMNEDLALAGRVSKEAIDHLTGQIRKIEGVVENKVKLKEEYRHLLTLYGVGKILSLTIMLETGPISRFETVGDYVSYCRKVPSQWTSNGKRKGSGNSKNGNKYLAWAYSEASGLARQLYPEPRAYYNRKMQKTNAAVAHSALANKLSRAGYYVMRDQVPFQPEKLFG

SEQ ID NO: 385222 - protein, 406 aa, unidentified
MRYYVGVDWADAEHAVWVEDEAGGKVMSRSLAQTAEGFAEWGRWLDERRAEGSELWAAIEKPDGRIVDFLLDHGVVVFAVNPKALDRARDRFRMSGAKSDPFDARVLAGFLRTDHGHLRALQPSSEAAQELKGLTRDYARQVRQQTRLLNQLTVTLKEYYPRALEVVDDLKSRWGRAFLRAYPTPAAVGALTERQWRRWARTQHLSVERGAELWTIVQRPQLAVPAHVVRVKARRLVVLLDQLEVTRGAVDTYRGAVEDFFASMPAAEWAASLPGGQSGTVVPALWAELGDAPGRWQTAQHLQGHGGTVPVTEKSGKAHVVKFRFACNTHLRAVIHQLAFLSLRHSEWARVYYDRCRQRGHSHHHALRALAAKWLKIIFAMWSRQAPYQEQYHLASIARHQLRQPA

SEQ ID NO: 385223 - protein, 338 aa, unidentified
MKFGLDVHAAQITVCRQLDGLLPQPPQKRSWEECLAWIEAHVRAGATVHSCYEAGPCGFGLHRRLEALGVSNLMVAPQKLDAKNRRVKTDKRDARELCDRLDRYVRGNPTVFSTVRVPTPEQEQRRALTRQRSTLVKERQRCVVRGHGLMLAQGVQAPEGWWRPRDWPALAAELPAWLRTQVDCWREQALGYDAQVEALTPAIEAQVAGLPLPYGLGALTGAIIEAEIVTWSRFTNRRQPGSFCGLCPSEESSGTKRRQGAVTKAGNPRLRHVLVEAAWRLAQWQPDYPPLRLLRGAQGKRARKRMIVAVARRLVVDLWRWRTGRCTAEQLGLKLKQH

SEQ ID NO: 385224 - protein, 340 aa, unidentified
MGEITTIGLDLAKQVFQVHGIDADGTTVLRKQLRRSQVLSFFSRLAPCLVGMEACATAHYWGRELAALGHEVRLMPAQYVKAYIKQNKNDAADAEAICEAVVRPTMRFVPAKTAEQQAALLLHRGRERLVRQRTGLVNALRGHLAEFGVIAPQGLRNVGKLIAVVRDPSDARLPDLARQVLEVLAAQIEQLEGAVAAVEKQLMAWHKSNPVSQRLATIPGIGPIIASAIAASVAEPGGFRSGREFAAWLGLVPRQNSTGGKHRLGGISKRGNQYLRRLLINGASANLLRSKATKADPWVIGLRRRRPSLVVAVALANKTARIAWAVMQRNENYQRMAAAA

SEQ ID NO: 385225 - protein, 340 aa, unidentified
MSLYGGIDLHANNSVVVLLNDQDQVIYQKRLANHLPTILEPLNLHHGEIKGVVVESTYNWYWLVDGLMEADYRVHLANPAAMQQYNGLKYTDDHSDARWLAHLLRLGVLPEGYIYPKAARAVRDLLRKRAHLVRQHTANVLSVQNILVRNTGARLSLKRIRELTKSELKGLLPEADQVLAVTSSLAVLDCLRQQIKTLEQSVHQRLQQTPAYEQLLTVKGIGTILAQTITLETGDVRRFPAVGNYASYCRCVDSTKLSNGKRKGQGNVKNGNPYLGWAYMEAAQFALRFHPSAQRFYQRKLAKSNNNTILARKAVAHKLARACYYIMRDLVPFDAMKAFG

SEQ ID NO: 385226 - protein, 424 aa, unidentified
MKTTTTNPQSQNNSMAILAFDISKERLNLAASVAGRLSDHEFANRTPVIEEQLKTWQRRAQMAGHDQVLVVCEPTGCYHEPLLQTARRLGLETAWVSGEAVCKMRAIETNDSGKTDIKDPHVISTLAQMGKTLICRHYDEPYSLLREWHGLYDQADVGVVRAKCLMASQIKALFPDYSFQKDFLYSKSGSALLANYGGNPYRIVRSGKTRFARVMRKHAPRIRQTTLDRLYTEAESSVRNQLSPRLNHIMERRLVQSWEDYLHYEERKEEAREQMELLYQEAGQLDPRLPTAEKGVITTFHLARILAETGPVSDFDSLRKFMRYAGLNIREKQSGTFRGKNKLSKKGRSLLRKALSQIVLPLVKKTGLFGPYYHGKKAQGMSGTKAMAAVMRKFLKLFYGWYKSGGAFDRARVFACESQYGLAA

SEQ ID NO: 385227 - protein, 433 aa, unidentified
MSKRNHLKERLNEKLQAITFSTLVVGIDIAKKNQWARFVDCRGIEHGKALKFENNKNGFEKILATIFELCKMDNFTNVVIGMEPTGHYWKPLANYLLKQGLIVVLVNPYHTKKSKELDDNSQTKSDIKDALTIAKLVKDGRYFETYLPHDIYSELRGLTATRTSMLKRLKSIKNTIIAVLDEYFPEYEIVFKCIFTGKASRHILKTCPIPALILELGEEGVLAEIKSAVKKTVGRKKAKQLLEAAQNSIGVDYGESSASFRIKQYMTELEVIENQLIQVEKEMKSALEKTGLSEYLISIPGAGIVSMASVLGEMGDPLRFENPRQMSRMAGYNLIEDSSGKNKSGTCISKRGRKNLRCMLYKMALTMVAVNPEMKQLYGYLKTRKNNPLKKMQALVVVSKKILTMIFTLSKKKEYYNPEHVFGNVRKEQLKAA

SEQ ID NO: 385228 - protein, 428 aa, unidentified
MKMGQPYALPEEHERMPLKGLGVRSCSDWCPEPVTALDLDTCWPPKLSPASSGKARTPGSLFGLGYPASPLRAWRCEMDVVFTRCAGLDVHKQRITACRMIPAPTGREAEGMMERRTCGTMTRALLGWAAWLPAASIPHVAMASPGEYWQPVSHRLEDPLTGFLVNAAHGKNVPGRQPAKADARWFANRMRFGLWQVRCIPPKGQRDWRDRTRSRTKRVQERVREVHRVQGVLERSHSKLASVIADIMGVSGRAMLEALIAGRVDPATMAELAKRRMRSKIPLLEQALTGLVHDHHRQWLAMQLAPIDFLDEHSEALNRAMEASLRTLSGATPASEGKPPLPVTSHGSPPSASPTLTCTHAVELLETLPGIDQRGAEVIGAEIGMDMARCETAPRLAAWAGVAPGNDASAGKQRSGKTRKGNLPSAPS

SEQ ID NO: 385229 - protein, 438 aa, unidentified
MKKISQLQIINPAAAGIDVSDSEMMVAFPINSEQIEVRAYECFTRDLHTLAQTLKSFGITSVAMESTGVYWIPLFLLLQDYGFEVYLVNAKHVKNVTGRKDDESDAEWIQKLHRCGLLSASFQPDNMIRTLRSIVRHRKNLVRMSAGYINRMQKALELMNIKLHTIISDIDGKTGRLIIEAILNGERNPEVLADLRDKRIKASREDIIKSLEGNWTSEHLFELKQCYQLYCYHHQMIDECDKEIEKQLIEQLASKNEGLIPDLPKVKRKTVKKNRVDFELTSYLKEIIGVDVTEVVGLSEITVLSIMSEVGPDMSKWKTENHFTSWLGLAPNTKISGGKIISSRIQKKKHHAGQAFRMAANGLHNSKSPLGDFYRRIRSKAGAAKAVVATARKIAIIYYKMVSKKEAYNPKAMEDHQQKYKEKKISQLKRKIEQLEAA

SEQ ID NO: 385230 - protein, 360 aa, unidentified
MTTSIPSKTTVSYDSVKLGIDAHAKYYWVSRQLDGATPQPVQKMTYDELLLFVVKQQKLTPNLVTCYEAGAFGFHLHRKFEQLGIKNYVVQPQDWDERGKGVKNDRLDAAALCQRLDRYQRGNTKAFSTVRVPSEDQERERAISRQRQQLMRERQRISAMGRSLLATHNIHVTGKWWKGKTWTVVQKLAPVWVVERLEVFIIILKPLEEQELKLMHQLQEAAQEQKIPRGVGPLTFEILRREVGDWGRFNNRRQVSSYTGLCPREHSSGGKRRFGSVSKSGNPRVRAMLVEMVWRMMRWQPEYKPLRKWAHVLYSLTPNAAAKKKAVVAIARQLAVDLWRIFTGQCKAEIYGLIYLPEAA

SEQ ID NO: 385231 - protein, 338 aa, unidentified
MIVIGVDVHKHSLTAVAVDEAGRMLAEATVTAADDELLVWASRIGSDRLWALEDCRQLTRSLERQLLAAGEELVRVPPKLMAPERRAGRARGKSDPIDALAVARAALREPSLSRPRPDEQPFRELKLLVDHRDDLVDERRRAQQRLRWHLHQLDPSFAVPAKALDRATHLDRIGRWLARREQDVQVRVARDLVVRCRSLTRTILELDRELAQRTMRTAPALLELPGCGAITAAKVLAEVGPIDRFQTDAQLARHSGVAPLEASSGRVQRHRLDRGGNRQLNCALYRIAITQARYHPAARAYLERKQAEGKSRREAIRCLKRQLVRVIFNTLKTTPALT

SEQ ID NO: 385232 - protein, 336 aa, unidentified
MKKKWFIGIDVSKKTLDVVVYDPAKKKADNDSHLLISNDEEGYKSLLKWFKDKKISLPFIVICMEYTGIYCFDLCVFLEKKKIDYRLENPLNIKRSMGLVRGKNDKVDASRIAYFCYLHREELTYSHLSSNIMYHLQALQAERKRYVRQAAEYKSFLNEKKDKDKSYKRAEDMLKYLETDIEDINKEMRNIIEEDDALFVNYKLLTSIVGIARVNAINTLVSTNNFQKFQTARQYACYLGIAPFEYTSGTSIKGKTRVSKLGNRQLKSDLSLAACCAVRYDTEINHYFNRKEKEGKVYGVILNAVKFKLVERMFAVVKRGTPYVQTMEYQKIRNQQ

SEQ ID NO: 385233 - protein, 423 aa, unidentified
MSPSTLCVGADVHLDEIVLRAVDKADGREVVQRFRVTNNLPGAQAAAATLAQTARQGDYIRIEIGWEATGLLWVPFHRLLSTSPLLQPFELELICINPKLVANFKDGLVLRRPKNDDRDAADIAARVRFGELPVSYVPSDFWQGLRRLTRYRFRLSQMLAREEMRFQSYAFLKASDWKRVKPFSTILGATSAALLTEFTISELTAMSHDELVDVIAHRGRGHFDDPDETARAVQEALRTSYPIDPHMDEMVTLTLATGWEHIRFIKRLMKRLDRQIAHFIAPFPNPLISVKGLGAVITAGLLAEIVDITRFPHHKHLAQYVGLTWEKRSTGQWVSQTTRLSKVGNVYLRYYLILGADKLRQFNLEYKAYYWRKYQEVSKYQHKRALVLTARKLVRLVFALLTKNVPYVRPPMLLAVQEDELLQ

SEQ ID NO: 385234 - protein, 357 aa, unidentified
MRFYMQQHKFYAGIDLHARTLHLCVLDQLGNIVCDKNLPARPESLLRALAAFRDDVVLAAECMFAWYWVADLCATEKIPFIIGHALYMKLIHGAKAKNDRIDAGKIARLLKGGNFPLAYVYPKGMRETRDLLRRRNFFVRQRAALMTHLQILNAQYNLPPFPKKLSFAANRAELDIANRFDDPSVQKSAASNLAVIDCLDEQIAQLELYLVRTAKVEDVQTYHRLQTIPGVGKILALILLYEVHNMLRFENAGQFLSYSRLVRCQHESAGKVQGSGGKKIGNAHLRWAFGEAACLFLRASERARAWKQRQTKKRGEGKALGILAAKLARAVYHLWRKQEAFDEERFWSGQAKATTRT

SEQ ID NO: 385235 - protein, 482 aa, unidentified
MKPKPQEKTSKDSCRPKPGHWNEMNRKQRRETMRKIQSDDLSLEVVHPDSAGIDIGNESHYVAVPPTRDSQPVRRFGCTTAELKEMAQWLKQCAIRTVAMQSTGVYWIAVYDIFEAAGFEVYLVNARETKNLPGRKSDVQESQWLMKLHTYGLLRNSFRPSQEIRTMRTYWRQRNDLVQAAGRHIQRMQKALTQMNIQLANVLSDVSGMTGQTIIQAILAGERDPHKLAEFRDPRVKASKHEIARSLEGNWQEDLLFVLKQEQDGYEFCQKQMLECDRQVEQYLQQREDRSKGTPLPEEKRKGRLKKKKGNAPVFDLRGELFRMTGADLTQIDSIDIMTATTILSEVGWDMGKWETEDHFVSWLRLCPDNRISGDKIVGKGRLPTKNRVSIALKMAASTLRRSNTYLGAQFRRFRTKLGSPIAIKAMAAKLARLVYRMLRYGMKYVDQGAKFYETQHRILQIKQLKWKAAKLGFQVVQAPAA

SEQ ID NO: 385236 - protein, 443 aa, unidentified
MNPSPTAQTIKYVGLDVHAQTVAVAIAHAGGDVVSYGTVPAHSHSMDRLHKKLSEGGAQVRYVYEAGPTGFWLARHLRGKQISCEIVSPSLVPKKSGDRVKTDRRDALALARLYRAGELSFVHVPDEADEAMRDLVRTRLRAVEDLRRCRQRIKGFLLRYGRRYDGRSAWTAEHLNYLSRQKFDHPGQQIAFEELLNAVQDPAQRIERLTKAIEAQVQPWSRRPLVEALMCLRGLALINAVTWVAEIGDFTRFTHPSQLMSYIGITPSESSSGQKRRQGAITKTGNEACRRAIIEAAWQCRLPARVTPHIRQRHHGQPQAVIALAWKAQTRLCARYQDLIRHRKKTVVVVTAIGRELVGFLWAIAREIHTPGTAAAEALKRKTPDALKKETQTPVKPVAKAGRSHPLDARKKHEATPPAIGKQVLRTGARKAPRKKKKNPAAC

SEQ ID NO: 385237 - protein, 316 aa, unidentified
MAKEVTEITLGVDISKDTLVICDWDSGELTELANKADEIASWLDSLTGPVRLAVEPTSNYHLKMIDAAQRRGCTVYLVNPRQLAHYRQAVNARNKTDPADAWLLARYLAHEGEQLRPFEPASGKARELWALLSRRAVVVQSRNQLTQSFRESGFSTQRLMSEIKHVVRRLDERLLVLIKALGWEGDYRRALSIPGIGPLNAVALVATFHRGAFASADAFVAYLGLDVRIRESGSYKGKRKLTKRGPAELRRLLYCAARPARTYEPFADYHQNQLDKGLSKIAANCILARKLARIAFTLITRQQTFQKKEIAYSQAP

SEQ ID NO: 385238 - protein, 400 aa, unidentified
MRVVFGIDVSKASSEVAILVNGEKVHGYTISNDAIGFARLLGDLRTVHKPEIIFEATGVYSRRLQAFLDEHGYAYTRLNPLEAKKQLDSLRVRKTNQIDAEKLAQSQFVLNRKPTYVQEEVYQNLRDLSRFYQNLTEDIVRAKNRLHKVLQVTFPELENILSTPSGEQYWNLVIAFPCKDCVLELSNDELSKSIRLSTSKRISDKRVAYLAEKLIALANQSYCAVKKTSPILEEVRYYTKELLRLSEQRQAVLDEMVELAQPLPEYDILLSIPGIAETTATSIIGELGDIRRFQSANQINAFIGIDLRHYESGNFLAKEHITKRGNPYARKILFKCIHNIASANHTNPCHIADFYKKRKRQSQTTSTKLHTIASIHRLIRTMYYLIMHNKFYDYASTQNR

SEQ ID NO: 385239 - protein, 347 aa, unidentified
MRFYTTQHNHYCGIDLHARTMYVCIIDATGQVVLHKNMKANPQALAGAIKPFQEDMCIAVEGMFTWYWVADFCEDNHLPFVLGHALYMKAIHGGKAKNDKIDSYKIASLLRGGTFPMAYVYPRPMRSTRDLLRRRMHLMRKRAELLTHIHNTNSQYNLPEIGKNLRYKSNRSLVENRFDDQSVQKSVDLDVELINFYDMQLSSIEWYIHKHARAHDYHSYMLLKSFPGIGDIISLVILYEIHDIHRFPTVQDFASYARLVKCKAESAGKTYGTSGAKIGNPHLKWAFSEAAVLFLRCNPNAKAYLEKLAKKHGKGKALSILAHKVGRAVYFILKRKEPFNPDLFLAA

SEQ ID NO: 385240 - protein, 321 aa, unidentified
MKSDSVHIGVDVSKEKLDIYNPHTKTLTSEPNSPEGFRKIREAARKAKAVVCCEPTGGLEFDMVMFLQKYNIPVAYCDGYRVRHYAISTGEFSKNDKIDARMISRFADNTNVRILSEKDKKQIRLRRLWSLYQTLIDTHVILAQKAAIEPEKDLKAMLRVESKNLRKKAEKILVSCKKLIEEDEELNRIFTTFLLIDGVGQITALAVLAGVPELGKISDEAIAKLVGTAPMDNQSGKTDKYKHIHGGRKNVRNALYMAAVASVKFNHILGAYYQQVRQRMPGPKASKWALVPVMRKLIHLMNRIARDSNFTPQKKPTIKAA

SEQ ID NO: 385241 - protein, 328 aa, unidentified
MEREYIGIDLHKAFFQVCAITSTGERQWEQRWPTSDAGIAGLLTRCGRQSRIAVEASSPTWAFVDRIVEHVDAVHVVDSRKTRLKAGYAAKTDRLDARRLADALRRDSVVGIYYPPPAIRDLRELCRYRCHLARLQASLKQRIHALLLRHGVAVPVKRLFGTRGSVWLEALRVPGWGGASLTGLRHVLRDVRAQLVPVLTAIRAIAASDAIACALDARPGFGPVFSVTLRAEIGVITRFPDGPHLASYAGLVPRVERSGGRQWSGRITKAGSPWMRWVLIEAAIHQLRRQDDFGRWARQLAVRKGILKARVAVARALCDELVDAWPRG

SEQ ID NO: 385242 - protein, 320 aa, unidentified
MSVTSVVVGIDVAKAHVDVSVLSVKLDVQRFDNDADGHSALVAALQPLAVRLVVMEATGGYEAAIACALQAAGLSVAVVNPRQARDFAKSMGQLAKTDAVDARLLAEFASVLVRREDLASFIRPLPDDKQQTLAALVTRRRQLLTMLGAERQRLQLAIAKVRPSIEAMIKAIRAQLDDVEAQMVGHVKEHYEELDKLLRSASGIGPVASATLIAELPELGRLNRREIAALVGVAPMANDSGTTRGRRRIQGGRFEIRRVLYMAALVAAKHNPAIKAFYQRLLAAGKLPKVALVACMRKLLTTLNAMVKTNTPWDAEFDHA

SEQ ID NO: 385243 - protein, 409 aa, unidentified
MEAIVERGCGIDVGEATLTACLVVGKSEEKPRKTLRTFATVTVELIALRDWLLSQGCTHVAMEATGVYWIPIFAVLEGYFDITIANAYHIKAVPGRKTDVKDAEWIADLLRHGLLKKSFVPPGEIRDLRDLVRYRRKLIEGRTSERNRVLKFLEEANIKLASVVSDVFGTSGMLMLRALITGEAAPEEMARMAKGRMRQKLRKLELALEGRVQEHHRFLLGLQIRRLEQMEADIALVEARIQEKLAPFRAEVDLLITIPGVSELVAAAIIAEIGVDMSVFGTAARLSAWAGVCPGNHESAGKRKKVRTRKGNTYLKTILIEAGNAAGHTKGSYFAEKLRRLQPRLGRNRAQMALAHKVLVVAFHVLEKKVAYRELGPSYLDTIRSIATTRRLVRRLERMGYNVQIEKAA

SEQ ID NO: 385244 - protein, 370 aa, unidentified
MSVRRILAKTINTDLEYEAIGIDLAKNCVSAALLTTDGEVVCIDRLDYSELEKSAQALSSTTFAMEPCTEMNYLVQKLEAWGHRCLVIGGKNVQNYVENHFSGQKTDLNDAQALAFLAQDTQLRTIKAKDVEQQKYASLTTLREQYIKQYRQTIVSLKGICQAWGLNISKGISGKARLKDLIENHAAFPEELKESLVDMVTHAQTAQKALNKITKTLEELAKSDKVCQLIQTIPGLGSICSCRLRATVGDIKRFKSPKDFPAYYGLVPRSIATGHNERKGKITHRGDRTMRSLMVQAAGSLVNMATKGKLKSKQLTKWILKKQKEKMPWGKLVCAVAAKLLRIVRAVLISRKAYDPKLAGVAKCSLPKAT

SEQ ID NO: 385245 - protein, 420 aa, unidentified
MKDVNTKKLKRVNEKTLLVTVDVSKMKHTGYCRCPNGTDIKPFEFFNNGRGFQEFWDRVCHMKKIHNLEEVVVGFESTGPYAEPLLHFLQKRNVRLVQVNPLHTKRLKELQGNSPGKTDRKDPKVIADIIELGHALTVIIPEGTVAELRRLTQARERSIQRRSILLNQLHDLVFLVFPEFLEVMKDMSIKSAQYLLKNYPKPQDITEAGVATLTQILKKISRGRLRKERAEALYHAATGSMGIEDGQESISFEIKEIISTIESINRFTAELENYMSNHLKEVSYSKSILSLKGIGEITAAGLIGEMGDFRNFTTISEVIKHAGLDLFEISSGKHKGKRRISKRGRPLLRKLLFFASINVVRKGGILHEQYQLHLKKGMPKIKALVAISRKLLSIVFALVRNHSIYMDNYSKIKYQLKEAA

SEQ ID NO: 385246 - protein, 394 aa, unidentified
MYCGIDVSKNKSRVCLLDDNQRVINEFGIEHTKEGFERFKSLVPKNTKIILEVTGNYSKVLYNYLCDKYDVIYIDNVQMNHIARYHSPTLKNDKVDAMLLAKALSFPDLLKVNPIRTNELKDLCNLYLKIRKQLIQYKLIFKDQINIVFPEIESLMNSNDNLGIAKLLLLYSTPNEIASLEPKTILSVMKSDLGKGSANFKLEKAIKIKELAMNSIGDSNYPTTYFKYSIETMLYSLSLRKKIHKELETALQNTNYFSLIKKFGFDVVSVSIIVGEIGDVRRFSNYKKFVSYCGFGIYEKRSGTSVNKSSRLSKRGNKLLRATFYTLVLVHLSKKTSIYNYYERLKNRGKHPKKCLIAAARKIAIQTYYDMIKCHEEYKDVPNVIFKRSEYGLK

SEQ ID NO: 385247 - protein, 416 aa, unidentified
MSSRTQSRPRIKADILVVGIDVAKRTHVAAIRKPDGTKEKPFPFGNDRSGFERLRARSERTRERLGLNGVVFALEATGHYGHALRQYLGLQGYAVLGINPAHTKKAKELEDNSPEKSDQKDARLISDLAAEGRGRLVRPVKGVFAELRRLGKLRERYVVERVRLSNRYSCLVDLVFPELVQEVRKLTIRSIRRLLAEYPTAREIAGLELEELEDRLGRWSQRRLRPDKIARIHRLARESIGIVEGLETARMEMRQLLESLELVEQRLQEVEAAQHAALEKVPYAELLLTVPQLGSVTVATILGETGDLRHYKNAEMVIKMAGYNLYTISSGMFRGKTRITKRGRPMLRRYLFLAACRLSKKGAPLREFHERLTARKAKPQVLVGSCRKLLRLLVAMVRDGKPYEPGRLAVPFGEAA

SEQ ID NO: 385248 - protein, 338 aa, unidentified
MEHKRIAIDTSKHVFTLHGVDGQGRPVLRRELKRGQVETFFSKLEPTEVVLEACGGSHHWGRVLSRLGHHVRLIPAQYVKPFVKRAKNDRADAEAISEAASRPTMPSVAVKSVDQQASAMILKHREMLVAQHTQAVNALRGHAAECGVIAAKGAVQVTALLDKLAAEAAVPAAAQAMFAQMGEHIEALDRRITTLDEQLLALHKANPVSQLLAEVPGIGPVTAITLALTVEPQHFASGRHFAAWLGLTPKEHSTGGKQRLGRISKAGNERLRALLVVGATAVVRHAKPGGKSASAWLLGLLERKPRKLVAVALANKTARIVWAMMARGEAYRRQPAAA

SEQ ID NO: 385249 - protein, 336 aa, unidentified
MTIIRIGLDTSKHVFQIHGVDENEKPVLRRQLRRSEVEKFFAQLPPTRIGIEACGASHHWARLLRGLGHAVLLMPPQYIKGYVKRGKNDAIDAEAICEAMSRPTMRFVPVKTAEQQAALTMLGVRDLLVKQRTMLMNALRGHAAEFGVAAAKGPNKIVELLQRLATGEGVPALAREMLGMLASQLEAVNGKLKAIEARLMAWHRQDQTSQCLATIPGVGPIAGVSFALKIPEARAFRSARHFAAWIGITPRENSTAGKHRPGKISHEGDESLRRLLVLGATAVIQRAKRGRVSPWLLGLLARKPKKLAAVALANKMARVIWAMMISGEVYRRPQEA

SEQ ID NO: 385250 - protein, 313 aa, unidentified
MDQGNLVVGIDVAKNSLEVATERESFTVDNDEQGLEQLIARLLPLKPELVVLEASGGYEKAAWLALWSAGIKVARINPRDAYHFAQASRQLAKTDRLDAQGLRRFGEQLRPAPTPVPSDADQELQELVRRRQQLVGIITAERNRQQQTRNPTIRKSIERTIRNLQREKGAIEHAIGHKLEQQSSKRVALLESMPGVGRVTSAILIARLPELGSLSAREVAALVGVAPFTRHSGKWRGESHIFGGRADLRCALYMAAHNAVRCAGPLRDFYQRLRAAGKARPQALTACIRKLIVILNAMVKHDTHWSPQCPTPA

SEQ ID NO: 385251 - protein, 395 aa, unidentified
MFIVGIDIAKRSHEAIIIAEDGQVVRKAFSFRNNCTGYNLLLEQVRRLTLVKSQIVFAMESTAHYWLALYARLLKDGYAVMVLNPIQSHSLRELYIRKAKTDARDSLIIADLVRFGRCKASNVPQDKILALRELCRSRAYLVDMAADLKRKLIALLDRIFPEYESLFDSVFSKASIAVLSKYSTPQKVKNANLRKLTDILMENSNGHFGEWKAHQLKEAACSSFGIDDSGGVYSTLLGMFLEQILSLTAQADSLEKQISVFFQEFNNPLTSIPGVGTVLAATILSEIGDITRFSSADKLLAYAGLDPSVKQSGEFKSNQNRMSKRGSPYLRRAIWLASTVAVHRDPMFQTYYEKKISEGLHYMNVIGHVSRKMTAVIFAVLRDGQPYQPILQSAG

SEQ ID NO: 385252 - protein, 426 aa, unidentified
MNYTQNQKISQVTEATLIVGVDIGSETNFARAFNWRGQELSKKVFHFRNSLEGFQSFLAYLNTYTTIASARQVIVGCEPTGHYWFNLARYLEENNIKLALVNPYHVKQIKELDDNSPKKTDLKDPKTIAKLVVDGRYSYPYLPEGIYADLREAVSSRERIVKELNAITNRIKRWLKIYFPEYLVVYKNFSAESGLTVLESAPLPQDVLRLGPEGVNQLWRDKKLRAVGMKRALTLVEAAHNSIGLPGGSCARMELQLLLEDFRTKQSQLEKITEVLEEETLCVPYADKLLAIKGVGLITVAGFSAEVGDVRRFDSPKQIQKLAGLEVKENSSGKHRGRSSISKRGRKRLRKILFQVMLPMIQNNAEFGEIYQYFTTRQKNPLKGKQAIIAAGCKLIRVFYAILKHGVDYDPGKLRADMIRPELEAA

SEQ ID NO: 385253 - protein, 319 aa, unidentified
MTKPLPPVNVGIDVSKDKLDIHLLERDLSLSVSNQEQAIASLITRLARYRLERIVVEATGRLEHAFVSAAVARGLPVVVVAPLKVRRFAEAAGQFAKTDAIDARLIARFAAALKPTARPAADANSQFIKDLVVRRRQLTSLRTTEKNRRGVMPKTLHPGIDRIIESLDRELASLEQLIQNTVEQHVAWRRKRDLLTTMPGIGPSVASTLIGDLPELGSLSRRQIASLTGVAPFNRDSGNFHGKRRIRGGRAHSRTALFLSAMVAIRYNPDIKRFYERLLHAGKHKKVALTACIRKIVTALNAGAGQGSCRAVSCRGGWF

SEQ ID NO: 385254 - protein, 349 aa, unidentified
MGEVSTIGVDIAKSVFQVHGVDADGTVVIRRRVGRAKILEFFSKLRPCLVGMEACATAHHWARELKKLGHDARLMPPIYVKAYLKRGKNDAADAAAICEAVTRPSMRFVPIKSVEQQSTLMLHRTRDLLIRQRTQLINALRAHLAELGLVAAKGREGLRQLVTVVTECGDERLPSNARFACQAIVGQLHAVQTQISGLDKRITQTHRANPDSKRLDAIPGFGVILSTAVVATMTDPKAFKTGREFAAWIGLVPRQNSTGGKDRLGSISKQGDRYLRRLLVVGAISIVRTARMWPDKYPWVIELLGRRPAKVVAVALANKMARVAWAVLAKGETYRAPTRLSNAAITVAA

SEQ ID NO: 385255 - protein, 360 aa, unidentified
MAKFTENLARVTRVGLDLAKTVFQVHGVDAQGEAVVVRKLRRGGVLEFFGRLAPCVVAVEACGSAHHWGREIAALGHEVKLIPPAHVKPDVRRNKTDAADAAAICEAALRPQQRFVPLRSVENQAELMRHRLREQLVSQRTALLNALRGHLSEIGVIAPQGAQHAYRLKRLAEGDADDNGEIVVCDAVRAALAPLVKQIDALDDAIEAIDKELAAQAKADLKAKRLMTVPGIGPVTATAIAATVRDVEAFASGREFAAFLGLTPRQHSTGGKERSGGVSKMGDRYLRKLLVVGATAVLHHAAGHNDALRTWAKETLKRKATHKYAFKVTAVALANKLARIVYAILRSGGTYDDRPVATRA

SEQ ID NO: 385256 - protein, 320 aa, unidentified
MAKKKPKSFIGIDVSKQQLEVAAHESDYQFRCSNKASAFGELIAELINLRPALIVLEATAGLEIPVVGALHAAGLPVVVVNPRQVRDFAKALGQLAKTDRLDARVLAHFAAAVKPPLRPIKSKEEQELDALTGRRSQLIEMLTDEKNRRASAATDTVRDKIKEHIDWLEECIAELDEQLKALLQSSARWQAKDEILQSVPGIGPVVSFSMIADLPELGTLNRQKIGKLVGVAPLNRDSGQQRGTRHIYGGRARLRRVLYMATLTALRWNPVIKEFYERLCANQKPFKVAITACMHKLLNIINVMVRDSTCWKFKEEPVSA

SEQ ID NO: 385257 - protein, 272 aa, unidentified
MVYFVGLDVSVKTTSVCVVDDGGKVILEQKVSTDPADIIAILTSLGVSFGRIGIEAGPLSQWLVSALTVANLPVICAETRHMKALLTAQQISKTDRSDARGIAQMMRVGLFKPVHVKTLVAQEQRMLLDMVRGDLVCRRLMTAPGVGAVVALTYRATVDQPQRFVHSRAVGAHVGLTPKRYQSGEIDYDGGVSKCGDALLRTMLYEAAHSLLICSRKWSWLKAWGVRVAQRRGMRRAIVAVARRLAVVLHRMWVDGSEFRWRKDSAAVPAVA

SEQ ID NO: 385258 - protein, 352 aa, unidentified
MMIIGCDFHPRFQQICFLQEETGECGQRRLMHPGEAEGYYRSLSGAEVRIGIEATGSYGWFRRLLSELGHELLVGDATQIRASNPRKQKTDKRDAEHILRLLVEDRFPAIWQPPAENEQLRQLLLHRSRLVRLRTRVTNQLDGMAKNEGLILAGRWSAKRRQAIEALPLPGWYGERRRDLLALLDRLEERIAPLNKAVGRAAASNAEACLLMTHPGVGPVVSLAYVLTIGNWQRFARGKQVGSYLGLIPSEDSSSDKRRLGHISKQGSTLVRWLLVEAAATAQRYDPSWHRQYARLSMTKHHGVAKVAIAHKLAVRLYWMLRSGQDYRQVMERGSHARQSECPVGRSTRPIE

SEQ ID NO: 385259 - protein, 339 aa, unidentified
MTDIVTIGIDLAKNVFAVHGVDATGKPKLLRPSVPRAKLLELIAALPPCLIGMEACSGAHHWAREFQRFGHTVRLMAPKFVAPYRLSGKRGKNDAADAAAICEAVTRPNMRFVPIKSLEQQGQLMVHRARQGFVEQRTATLNRIRGLLSELGIVLPLKAAVVRREALASLEDLPGWANTVIGDLLSEVTRLDERIAQYDQHITALARYNTEVKQLMQLPGVGPTTATALLSTIGHGHDFQCGRQLSAWLGLTPGQYSSGGKSRLGHITKAGDPYLRSLLVLGARSVLQTAKNRSDPISRWACALAERRGYWRAVVAIAAKNARMCWAVLNRGEAFRLPA

SEQ ID NO: 385260 - protein, 391 aa, unidentified
MINIGIDVGKFKHCATVLDDSTGEVLIKPFFLTNNRKGFDLLYSKTKQFIHRKHSVGMEDTGHYMINLTNYLLDKKFTVKYINPRATCLRRKGLGISAKNDRKDALLIAEMLSEKRFWRSISVRSIENSKFRDITRLYHQLQEQQNQDMNRLQRALDIVFPEANSLSWTRYSKAYMKFLSTYPSASSIALEDIRILRKALKTEGRGRQCKVTAEEIRELAKNSVGEDNISIDLEVTSIIAIINTREEQIRMLEKKIEEFSHKLNSPIISIPGISHISGMTILAEIGDINQFQNTGNLISFAGMDPLVYQSGKYDAAHMPISKHGSRYMRKALYQAVFTVCKYSPTFHDYYTKKRNQGKSHRCAQGHCARKLLRVIYKLLSTNSLYNQNHIQ

SEQ ID NO: 385261 - protein, 389 aa, unidentified
MSASEGKADIAIPHARSEFMMGWTPRRRHRCAKVEVLSTTLREASVSEVSIIGLDIAKHVFHAHGADERGRVIFSKRIGRGKLLDFFAAQPSCTVALEACGGAHHWARQLTQLGHDVRLIPPAYVKAFVKRQKNDAIDAEAICEAAQRPSMRFVAVKSEEQQAAGLVFRTRDLLVRQRTQLINAIRGHLTEYGWIAPKGPSHVAMLADLIEEDEMANALPEAAHAMFRLMLDLLAGLNGKIADLDKEIARRAREDEVSRRLMTVPGIGPISATAIAALAPPVETFAKGRDFAAWLGLTPLQRSTGGKQKLGATSKMGERTLRRLLIIGSSAVVQQASKRGAPKGSWLEQMLARKPRMLVTVALANKMARIVWALLVKQENYRAPVAAKA

SEQ ID NO: 385262 - protein, 352 aa, unidentified
MKKILKEVLGVDVAQKELVVTLGRMFDDLSIELYAYRVFKNSEAGIISLLKWVKLSIDKDIKVHVVMEATGVYHEKFAYYLDDKGYDVSIILPNKISNYIRTLDNKTITDKTCSEAIAQFGLERKLSLWSRPQKVYKELKQLTRERDQIVQERAMVKNQLHAEKTEATPNKRSIDRIQSRIKFLNKQEADIKRDIEKIVNNDSNLKQEVERITTAPGVGMLTAITVLAETNGFELVRNKKQITSYAGFDVKEKLSGTSVKGKPKISKRGNKYLRKALHLPSLSSVKYNKQHKELYTRIVSKSGIKMKALIAVQRKMLELIYVLWKNKTTYQIDYLEERADNSKECCSLQTSL

SEQ ID NO: 385263 - protein, 354 aa, unidentified
MLAELVDHVIGVDPDRDWITAAVVDAHTTGVVAKQKFSADATGYNEAISWAEEFTVAGERAWAIEGTASYGRGLTAALSRASEWVIEFDRPREKASKDGAKSDELDAVRAAREALGRDRLHQPRAHDGHREALRVHTVTRAGVVRARTAAINELKALELTAPDDLRQELRHLTTKALVKRCASFRDTPQRPIVERCSRNTMRSIARRLICFNDEIALHDTAMKQLIDDAAPQLVAEPGIGYVTAAMFYIAWSHPGRCRNEAAFARLRGAAPLPATSGQSQDRHRLNRSGDRQLNNALFTVALSRARSHQPTRNYRDRRRSEGKTDREIRRCIKRYIARRVWRLLEHPPGTEIVA

SEQ ID NO: 385264 - protein, 307 aa, unidentified
MCCVLMVVIAPKNSLTPLKGHDELVSWLKGHKIDHAHICIEATGTYMEPVAECLYDAGYIVSVINPALGKAFAQSEGLRNKTDTVDARMLAEFCRQKRPAAWEAPHPLERALRALVVRHQALTDMHTQELNRTETAREVQRPSIDAHLLWLEAELKRLEKQIKDLTDDDPDMKHRRKLLESIPGIGEKTSAVLLAYIGLKDRFAHARQFAAFAGLTPRRYESGSSVRGASRMSKAGHVSLRRALYMPAMVATSKTEWGRAFRDRLAANGKKGKVILGAMMRRLAQVAYGVLKSGVPFDASRHNPVAA

SEQ ID NO: 385265 - protein, 372 aa, unidentified
MDQHSRLFIGLDVSKLKISVAVADGERGGEVRFFGDIPSDPASVSSIVQKLAKRGAKLHFCYEAGPTGYELYRQLTEMGHDCVVVAPALIPKRPGDRVKTNRRDAVSLARLHRAGELTAVWVPDRGHEAMRDLVRAREAAQEAQKRARQQLQSFLLRHGRIYSGRSSWSLAHMRWISTLKFEHPAHFIVLKEYCQAIEDAEVRLKRLTDLISETVKSWTMAPVVEAYQALRGVSLIAAVVFVAEIGDIRRFENPRQLMAFLGLVPSESSTGEHVKRGGITKAGKSRARRMLIEGAWAYRFPARVSRTKQAQLEGLRRTVREIAWKGQLRLCSRYRKMILAGKHKAIAITAIAREIGAFLWAIGQEVQPAHHA

SEQ ID NO: 385266 - protein, 339 aa, unidentified
MKLYVGVDLHANNNFIAMVDRKGKRVDQKKLSNDLFVILDFLKPYQKDIVGIAVESTFNWYWVVDGLMDSDYPVHLANPSAMQPYSGLKHLDDKHDAFWLGQMLRLGILPEGYIYPKEDRPIRDLLRKRRHLVKLRTSLMVSLQNIISRNYGVKFRANEIKRLKEDRVSPLLESHPDLALAGLTSKEMIDQLTRQIQKIEGVIVQRVQLREAYRYLPTLAGVGKILALTIMLETGPIGRFADVGHYASYCRKVPSRWTSNEKTKGKGNQKNGNKYLAWAFSEAAEFARRFHVQARSYYTRKMRQTNSRVAYSALAHKLARAAYYVMKDQVPFRPEKLFF

SEQ ID NO: 385267 - protein, 340 aa, unidentified
MQTTQAGIDIAKAVFEVALSETPGTVRERHRLSRERFRRFFSARGATTVLMEACGSAHYWGRELQAMGHQVRLLHPGDVARYRDGNKTDRADAKAVLEAARNAALDPVPVKSQEQQAIAALHRMRQGYLQTRTARINAVRGHLREFGIVLPLGARHVVGRAESALSTAELPDVLRRALLDLLAEIEELQAKAEQIRSELERLAQTIPEVGVLMSVPGIGILTATALVGFVGDLNRFRSGRDLAAYLGLTPREHSSGHNRRLGRITKRGNSYVRMMLIHGARSALRAGSITDAPDDLRTWALAIAQRRGFNIAAVALANKLARVCWRVSHDQRFFERREAA

SEQ ID NO: 385268 - protein, 529 aa, unidentified
MITIPAVLDNCAGIDVGKRGLAVAVMKGPADKEASIQTRWVGTTVPELEALREWLVQEGVTSVAMESTASYWIPVKNILEKSVKVMLVCPKKHHPKKGQKTDFRDAMNLAHLHRHGMLTGSYMPETGVVELRDLTRRRKKLLSHLGSEKNRIQKVLEVANVKIGNVISDVFGISGQEILEALLTVREMEVEQIAEMAKNRLRIKIPQLIETLKGHQMNDHHRWLIQQSIDHIVLLDRQLEELEDKIMVKMEPYRKQFDLTCTAPGIKDMNAAAILAEIGPDMSVFPTADHLCSWAGRCPGNNRSAGKTKSGRVKKANKFLSSALSQAATGAVRKKGCIMRRKFQRWIKRMDRKKANVAIGHSLLKVIWCILTTGQPYQEPDIGVMHELERQKLVRHHARRLRALGADPDSIEIIVEQVLCPDPSPETIPSNAAVEQAGSGDVALDETRAVEETPTAERRRRKTTTCKPTGREEVCRGKLGIRARQARNRYSLCIDQPKQRSQPKSEDVPSNHTRKRSSRGRKASSTDSA

SEQ ID NO: 385269 - protein, 498 aa, unidentified
MKNRSEQVLPPEYKPSGGIAPHGARSAKSQLLKLPASSPARAAAPVPRSERTIAREAPGIRLTYDSATMPKEKGKTMKEWQSITHYAGFDWARDHHAVVIVNQQGQIVADFEFEHTQAGWKAFREKTAAFPNLAVAIETNQGAAVDQLLQAGYTVYPVNPVAAKAYRQRKAPSGTKTDHLDGWSLADALRVDGQGWRAIQPTDPLSAELRLLCLDEVTLICQRTQLINQLQQALVEYFPAATEAFDDWTLPACWDFVIEFPTPQALVQAGRRRWEKFLHTHRMWRPETAGKRMEIFARADQFAGSAPIIQAKSRLALSLCKLLRTLQQQLDEYRKQIEELFARHPDHDLFGSLPGAKKVLAPRLLAAIGSDPARYANAVSVLQAYAGTAPISFQSGQRNQVKMPWACDTFMRHTVHLWADCFRHASSWGQVYYQNKRHAGMSHACALRCLGQRLLKIVFRMISDKKPYDAELHARNQQKHGSWILTLANKTSAATAGE

SEQ ID NO: 385270 - protein, 355 aa, unidentified
MSQDKYIGMDVHQATISVAVRDVQGKLIMECMLETKAATILEFVQGLSGTLALTFEEGTSAAWLHDLLKPHVSRLVVCDPRKNALMKDGNKNDRVDARKLAELLRTNQVKPVYHEKHGTRALKELGRSYLTVTKDVTRLMNRIKSVYRSWAIPCAGTSVYTPRHRGEWLAQLVEPGVRIRAEHLYQQLDSLEPVRQAARGELLRESRKHAAVKLLRQIPAIGPIRSALLVALLQTPHRFRTKRQLWAYSGFAVQTYDSGEYRFVRGKLQRNRERITVRGLNHNHNHDLKNLLKGAAISAIERPGPLQDFYAARVEKGMRPSMARLTLARKIAAITLTMWKKGVSFDPQQLQRQAA

SEQ ID NO: 385271 - protein, 425 aa, unidentified
MNYKQNEKINQVKESTLVVGIDIGSTTQYARAFDWRGIELGKVFTFSNSREGFEAFKAWMRHLQDKYRKSDVIAGIEPTGHYWFDLGAYLEDEGILLVMVNPYAVKQTKELDDNSQSKNDRKDPKVIAKLVTEGRYSAPYTPDGVYADLRIMVANRKRLIREMTQIKNRFARWFAIYFPEYTDVFGDYEAQSSMLLLKKVCTPEAIVELGAEKINQIWRDAKLRAVGMKRATTLCETAKRSIGLKKGSSAARYEMKLLLEDYEYKKAQLDAVMEEIEKLCRKIPESEQMLAIKGIGVITVAGFLAEVGDVRRFESPRQIQKLAGLSLRENSSGKHKGQTTISKRGRSKLRAVLFNAAIPLIAKNPEFKSLHEYYTTRANNPLKKKQSVIAISCKLIRVFYAILAKGVTYDAQKLISDIHRQPQVA

SEQ ID NO: 385272 - protein, 323 aa, unidentified
MSEPLYVGIDVAKDSFDVASNLPDRQAGPAGLVLSLPNDPAGRQRLLDALQAHPVALIVLEATGGYERSLAADLLGAGHTVVVANPRQVRDFARGIGRLAKTDRLDAQVLAQFAAMVKPRPRQPSSPETVDLAELVTRRRQLSDLATQESNRLPQARHPDVRRSLKKSLRALQQQIDDLDKLIRQNIDSDDGLRRKDQIVQSFKGVGPGTSAMLLSHLPELGRLNRQQIAALAGLAPWDIKSGQWAGQSRIWGGRMPVRNMLYMAALSAIRFNEIVRTFYQRLSSQGKKFKVAITACMRKILVILNTLVRNDCLWSAPPEQKA

SEQ ID NO: 385273 - protein, 360 aa, unidentified
MGEITRVGVDLAKRVIQVHAVDATGRVIVAKQLQRDGFMAWCAQLPPGCLVAMEACSGSHHWGRRLRAMGMEVKLIAPHFVSPYRLSGKTGKNDAADAAAICEAASRPSMRFVPVKSVEQQSMMALHRLREGYKEERTACINRIRGLLAEFGLVFAQRPEVLRAALADVIEDASNELGAIARMALQRAHLHWIELECHIAWCDECIVRHARSDGQAKAAAQLCGIGPVTASALVATVDDFKQFKNGRQFSAWMGLVPRQSSSGGKAVLGEITKRGDVYLRTLLIQGAKSAVFTAHRRSDRLSRWIVQLRERVGWQKAAVALANKHARILWSILVNGQSFDPEHVPSKHLMRPPAALPAAG

SEQ ID NO: 385274 - protein, 343 aa, unidentified
MDHFAGLDVSVKTTSVCIVDDTGKVIREVKVTSEPEVLLATLTNPAYRFKRIGLEAGPLSQWLFSALAEAGLPVICVETRHMQAVLKAQINKTDRNDARGMAQMMRVGLYRPVHVKTLRSQKLRMLLTHRQLLLSKAIALDNDLRGTLRNFGLKVGMVGKVKFEARIRELVENLPDLAVLVEPMLIVRRVLREQIVILHRRLLAIVRDDEVCQRLMTTPGVGPVVSLTYRATVDIPARFRKSKSVGAVFGLTCAKYQSGEVDWDGRISRCGDEMMRTMLYEAAQAMTRSKKWSWLKAWAMQIARRRGMKKAIVALARRLAVIMHRIWVDGTEFRWTREQAVAT

SEQ ID NO: 385275 - protein, 342 aa, unidentified
MDSIKAYVGIDVSKKKLDIALLRDNKVKPKAIPNTAAGFEQLEKWLVFQKVDLALVWICLEATGPYSDSLATWLDDHGFKVSVVNPARIKGYAQSELVRNKTDKSDAATIARFCQSIKPEQWHAPSAQIRVLRALVDRLDELKQTRQQELNRIEAYQSQQQELLIDGVQKHIDWLSAEIDKLQSEIDDHFDNNPDLKKDADLIQSIPGMGSISTAKFMAYVGDISRFDNAKALAAFAGVTPRNRRSGTSVRGRAMISRMGNTQLRTALYMPGLVARRHNPTLKAFADRLSERGMKNKAVIGAVSRKLVHIIFGVIKSENPFDPKLGHKPLASQDGICPQYYA

SEQ ID NO: 385276 - protein, 411 aa, unidentified
MDKIYDKCCGIDVHKKLIVACFQCGRKQEVREFGATTRELLTLADWLKEGGCEMVAMESTASYWKPLYNILESSDLNAMVVNARHMKAVPGRKTDVKDAEWIADLLQHGLLQPSYIPGKDQRELRELVRYRKSLVGERTRELNRLQKMLEGANIKLSGTVSDINGKSARSILEYLLTGESFDEAKYNEMYEQKVIAHNLKAPKEQIIDDLNGVMSPLQRRMMKELLAHLDELNEHIKNLDDEIDNFMKPEEKQASQAIQDVTGIGNTSAQAIISVIGTDMERFPTDKHISSWAGLCPGDNESAKKRKSGKTRKGNVLLRTTLITCAHAAVKNKKSYFYAQYMRIRTHRGPKRAYVAVAHSMLIAIYHILKDGVIFKDLGAEYYNQFNKERKINAYLKKLKALGWEAPVVAA

SEQ ID NO: 385277 - protein, 324 aa, unidentified
MAKPTTICAGIDTGKRKLDIALDGSSEQLQVDNTPEGYKALLDWLRRHRVKRIGIEASGGYEQAVVAELRRQQFVVVVFQPAQVRAYAKFHLLRAKNDKIDAALIAACTAAVKKIHAPPDARLLPFAEHLTMIDQIGEDIARLKNRLETCRNPRFRQTWKEDIARLAKREKIELKALVAAIRQHRDLAERLDLIESVDGIGLPTAVAILVRLPEIGRITREQAAALAGVAPYDDDSGDQVGIRHINGGRERLRRALYTAALPASFRWNPQLMALYGRLIAAGKEHKRALIACARKLLIFANTVVARGTPWNHERPPIASMIAAG

SEQ ID NO: 385278 - protein, 294 aa, unidentified
MQTTKTVGLDIAKSVFQVHGIDADGNVVVRRQLKRRYVLTIFQKLPPCLVGIEACASSHYWSRELQALGHTVRLMPPAYVKPYVKRHKNDAADAEAICEAVTRPNMRFVPTKTPEQQSCLMLHRTRHLFIRQQTAIINSIRAHLAEFGIVAPVGRRGVEQLLKVVADANDTRLPEIARACVAALGTQLLALKAQILAFDRRILAWHRSNETSKRLDAIPGVGPALATALVASIGDPKTFRSGRDFTAWIGLVPKQNSSGGKDKPARSASKAIAICAACSPPLRSPTRSHEWPGR

SEQ ID NO: 385279 - protein, 351 aa, unidentified
MLIIGCDFHTRYQQIAMAEESTGELLCERRLENESGEAAAFYRSLHKPVRVGIEATGPIHWFERLLAELGHELWIGNSAKIRASEVRKQKTDERDARLILDLMLAKRFPKIWVPTPAERDLRQLLWHRHKLVCLRTMLGNQLHFLAMSQGLCRKKKLFTKKGRVELTGLALGPWTRRRREELLKLLDQLDPAIAELDGAVLEEAQRRDDAVLLMTHPGIGPVTSLAFVLAIGPVTRFPGSKKIASYLGLNPSEESSGGRRRLGAISKQGNTMVRWLLIEAVYPAVRKDLALRQDYQRLKFRRGHAVAKVAIARKLAVRMYWMLRSGADYAQLVRRQGSPGATLVDASPSLG

SEQ ID NO: 385280 - protein, 401 aa, unidentified
MESPIVSIDVSNGNSHYMCFIKNNKRFGKVKKIDHDIEGFKRLLEDIQKLEAETNEKVCAIFEATGVYTKPLERFLSKNSIKTYIINPLESARKRKEEIHNKKTDKLDPISISKVYYDKEEMMELTKKDETHNWLRKKNRLYEDQLNHLRKYKVTFQNQLSICFPGYLDLFKDGYSDIPMTILKKYPHPDLLKNKKAETVARYLEKNTCHTHKVSLEYALKIIEFAKKTYPGCEKDDVEVEIFKILLDKVIETQRECEKTLNEMITVASTLEEYRYISSIDGIGPNLAARIIAEIGDIEEFKSREALVAYAGLDPHIYQSGDQDGKHLKISKKGNKYLRCLLFLAVGCSIRGAKDNPVNRFYQKKKQQSNPLNSKAAKTACTAKLLKIIYGICKNKTTYER

SEQ ID NO: 385281 - protein, 389 aa, unidentified
MPHPMSARPSMESAATKEGVATVFVSLELSQSTWLVTSLAPGSATMSKHSVTAGDSAELLARLARLSTKARSASKVPIKICVIQEAGLDGFWVHRLLEANGIESHIVDAASIAVPRRRRRAKTDTIDGETLLRTLLAWKRGEPRVCAMVSPPTPEEEDQRRTSREHAILLRERVRHVNRLKGLLIGQGITDYQPLRKDRRERLDALRTGDGRPLPPRLKAEVIREIEVIELLLRQIAEVEAERDAVRKCDAAQDHSAVAMLKRLKAIGPQIAAVLYFEGLYRHFGNRREVAAYAGLVPTPWRSGTIAREQGISKAGNPRLRHIMVELAWLWVRHQPDSALSRVFRERAGAGSGRSRRIAIIALARKLLIALWRYVNLGEIPEGAVLKSA

SEQ ID NO: 385282 - protein, 342 aa, unidentified
MGEVSIIGLDLAKNVFQAHGAGADGSVIFRRKLSRAQLLTFMAAQSPCVVAMEACASSHHWSRAIGSLGHEVRLIPPAYVKPFVKRQKNDMADAEAIAEAASRPTMRFVAVKSEAQQAAAMAYRTRDLLVRQRTQTINALRAHLAELGIVAPAGPAHVGRLAAIIEGEDGMLPAGVRDLARLLLDQIAGLAAKIAGLDAELRRRVPTDDTARRLTTIPGVGAVTAAAITTFAPPMETFSKGRDFAAWVCLTPRQHSSGGKERLGGISKMGQRDIRRLLIVGAVAVVRWAARKGAPEGTWLGRMMARKPKMLVAVALANRMARTAWALLRKGEDYRDPTMATT

SEQ ID NO: 385283 - protein, 420 aa, unidentified
MKVVYPVCCGVDVHKSFLVATIIKTEGITPKYSKKRFSTFNNSILQFKQWLLDNHCLDVCMESTGKYWVPIYNLLEDKIRITVASPKWVKAVKGNKDDNKDSKWIGDLFRLGLVPGSYIPEKPIRILREYTRYRSKLVACKSSEKNRFQNSFTVCNVALDSVVSDMFGKSARKITNYLMNTDTENFNPEYCKSLLHGKMKPKEDAVVDSIQGYSITPAQKERMVMGREHLEYVETSIENLDSKLDGLVCSYEPNISLLCTIPGVDRQSAISIISEIGVDMEQFANSKRLCCWAGLTPGNNESAGKKKSVRITRAGVYLKPALVQVAHAAVKSNKSPYYANKYERISKRRGKKRAIIAIARMILTAIYFVFKSGEVWNPSDLFKVDMSVVLQNKQKQKAIQHAYKLLIAEGLLDPAFVPVA

SEQ ID NO: 385284 - protein, 427 aa, unidentified
MRFIGLDVHRDFCEVAISEGGKASSAGRIATSPGELELFAQSLAGDDRVALEATGNALAIARILAPHVGEVVIANPMQVRAISHAKVKADRFDARTLAELLAAGLLPSVWLGDERTRLLRRLTSRRTQLVRQRSRLKNEVSAVLVRNLKGKPPFSDLFGKQGRGWLAELELPADERDTIDACLRQLDFLAGELATLERRIAEQALDSPEIRRLMTIPGVDVTSAATMQAVIGDIARFPTSRHLVGYVGLDPSVRQSGASAARHGHISKRGSAAARHVLVEAAWAAIKTPGPLRAFYERVKGRRGSQVAIVAVARKLCALCWQLLTKQEDYAFKRATLLERKLRALELRAGAPRRRGRPTSPASDTRAAHDLELTLARQAELAYRRLVADRQASARAKTGAGAASGRASSSQPKRQAARQETAPPPAL

SEQ ID NO: 385285 - protein, 366 aa, unidentified
MLQKAELSGTADSENNPGGSSETMYYIGLDVHKKTISYCVKDAAGCVFSEGKIGSTRCELDAWVRTLPQPRMMAMEATIFTGWIYDHLLPHAEKVKVAHPLMLRAIAAAKRKNDRIDAAKIADCLRCDFLPECHMASTEIRDRRRILRYRNLMVRQSVQLKNRVSGLLLETGVSYNKRQLHYVGYFHDLMSTNPEVSDSIRPLLKICRDQIERSRKLDYALVSSLERDPLLKERLRRLRTVPGVGSITALTWALEIGDFTRFSSIKDAISYCGLCGDENSSAEKVMRMPLSKQRNKHIQRVLVEAAKFASRSNPQMAAIYDRERQRGNSNRATLAVARKLVAYMLAVDRRRQDFRAAEECMPTAAA

SEQ ID NO: 385286 - protein, 412 aa, unidentified
MDVVHERCAGIDIGKADVKVCVRVPGPGKRRRKEIRTFSTMTRDLLAMRDWLLAEEVTVVGMEATGSYWKPVFYLLENDIECWLLNARHMKNVPGRKTDVADSEWICKMVEHGLVRPSFVPPPAIRQLRDLTRYRTEVIRERTREAQRLEKLLEDAGIKLSAVVSDLLGKSARAMLEALIAGERNPEVLAEMALASMRTKRQILAQALTGQFTEHHAFLARIMLDRIDAVRATEARLSEEIARQLAPFRRQIELLITIPGVSTRSAEMILAEIGADMSRFQTAAHLASWAGMCPGNYESAGKHTSGKSRPGDPWLKNALGLAATAAARSKNTYLASRYKRIAIRRGKKRALVAVGHTILTSIWHMLTHDAEYADLGADYFLQRTGRTRQTRRLVSQLNMLGYQVSLQSAEAG

SEQ ID NO: 385287 - protein, 357 aa, unidentified
MKKDTTIAVDIAKSVFEIAVSDRPGHVSERQRLTRAKMVAFFRERPPAVVVLEACGSAHPLGRELGAMGHEVRLLPPKHVRPYVLRDKTDRTDARALLEANRNEEIMPVPVKTVGQQALSAVHRLRSGWLRTRTARLNALRGILREFGVTIPVGARHVEGRVVEMLGAGQVSQPLETLLTSSLGEIRQLEQSIAEADRQLKNLAREMDSVVRLQTIPGIGLLTATAMVASVGEPSRFRSGRRLASFLGLVPREHSSGQRRSLGRITKRGDPYLRTLLTHGARSALLAAARRRAKGGPLDRLGQWGLELSQRRGHNRATIAMANKLARLAWAVWSRQDVYRPVLLPPVTITSDMASTR

SEQ ID NO: 385288 - protein, 359 aa, unidentified
MQRNKISFKGQKIYIGIDVHAKTWEVCVLTESGYRERYPQQASAKTLFDFLKKHFPDGEYHAVYESGFSGFATYYALKEYGIDCVVTHAADVPTTQYEEVMKTDKVDAAKLARSLRAGDIRPIYIRERENIDDRSVIRIRKTIQKQLSGYKSRVKHLLHCNGVEIPDRFASPGTHWSKAFIKWLKENVVLLSPSRLSLDLLVKQVETIRHTLLDATKAIRRLARTDRYRSNYEILMSIPGIGVSVAMCILTEIYDVKRFRNENQFASYLGLIPTCHNSGERTSSGEKTFRGNKHLGPMVIEAAWIAVYRDYGLGLAYARYKQSMKPQEAIVKIARKMSNIIFSVLKNGRKYEPYRWDKE

SEQ ID NO: 385289 - protein, 437 aa, unidentified
MSEKKSVEIRVSVDVGYRRHSVAIGLPSGEVLEEFEIAHRPEGFAEFFSRIEKQQKIRGCEVAVAMEGFNGCARPLDAMVRRRGYRLYNINNLKLARFKEIFPGAAKSDRIDARKGLELFQLSDHLPLAKEVLQEVKGTPRENEVLKRLTRRRRRLVDERVRVISNLQTDLQAVCPGLLEITKNAGNQWFLNFLVSAPTLPQLARLRPATLLKVCAVGRKYARLIEDWQKQAHFSEEVEWVSEMIQEDAKRCLELDEKIKALRAKIKEVAKDSKIAKTLLSIPGFGTICTAELAGEIGTIERFSKEGSLALYIGMSTLDNSSGKYQGSKQPKHVNTRAKAAMMVALDRHRKYVPESQRYYEKKRSEGKKHNQAIRALGRHLCRIIYKLLKEEREYEMRPEKGNTKTKVKRRSLIKTQIRKPKISVQGKNTKIYQQST

SEQ ID NO: 385290 - protein, 340 aa, unidentified
MTVIIGIDPHKASHAACAIDDNEHELAQLSVRAGQRQLEQLLCWARPLGERTWAIESAAGLGYLLAQQLVGAGECVVDVPATLSSRVRLLGTGRSNKNDPNDARAVAIAALRAPALAAVRREDHTTVLRLLAKSHLDAGRAKNRACCRLHALVSELVAGGIRKEVVVSQAETLLAGIDATGVAQQQRLELARELLDEIRGLDNKLKRSKTRITDAVVASATTLTDLYGVGPIVAAIVIGYSGDVCRFPTAGHYASYNGTAPIELSSAGRTVHRLSRRGNRTLNHAIHIAAVTQIRNLQSEGRAYYDTKLAAGKTKREALRALKRRISDRVYRQLINDARK

SEQ ID NO: 385291 - protein, 317 aa, unidentified
MSAPAASFVGIDVSKQQLEIAVRPSGETWTVAHDEAGVNALVGRLRDLTPTLIVLEATGGWEVAVAGALAAAALPVAVVNPRQVRDFARSTGTLAKTDRLDAQMLAQFAEAVRPEPRPLPDAQAQELTALLQRRRQLVEMLTAEKNRLPLAARRIRPQLQAHIAWLHKQIAQFDEDLRQLLRASPLWREKDDLLRSTPGVGPVLATTLVAALPELGTLSRRQIAALVGVAPLNRDSGTLRGRRTVWGGRAQVRAVLYMSTVVAVRHNPVLSAFYQRLRAAGKAPKLALTACMRKLLTILNAMLKHHTRWAPVLAQHV

SEQ ID NO: 385292 - protein, 412 aa, unidentified
MLQVIHERCAGLDVHKKTVVACALVNKPDGQVTQELRTFGTTTGEILALAGWLKSLEVRSAAMESSGIYWVPVYNLLEADFELLVCNAQHMKAVPGRKTDVQDAEWIAQLHRHGLLKGSFIPPKPQRLLRELVRHRTNVVERRSQSVNELQKVLEGANIKLASVVSEITGVSAMEMLRGLLEGGAAGTLAELARGRLREKKPQLAAALTGRLEKQHRFILSQLLADIAFCEEQIKELDQQIEVEMQEQAELIERLDEIPGVNRRIAEVLLAEMGTDMSRFGDAAHVVSWAGMCPGNNQSGGKRRRSRTRDGNKSLRRVLVEAAHAAGRKRDSYYAAQYRRLSARRGKKRAKVAVGRSILETAFHMIERGSRYQDLGGDYYDRRDPEKLAKRLAARMSKLGYQVSYTPLPKAA

SEQ ID NO: 385293 - protein, 439 aa, unidentified
MQHINLNAAGIDVGSDRHLVAVPEGRDTVSVREFGTFTVDLQAIADWLEQCGVTTVAMESTGVYWIPLYEILEQRGFEVYLVDARRVKNVSGRKSDVLDCQWVQELHTYGLLAKAFRPAEEVCVLRGYLRQKEMLVQTAAMHIQHMQKALQQMNLLLHNVVSDITGATGMKILKAIIAGERNPKVLAKERDPRCRNSTETIAKSLVGNYRPEHLFALRQAVELYEIYQTKIADCEAAIVAYLEQQDHRTEDEPPSPPKPISARDRMRGGTDVRAKLYKMTAVDLFAIPGLAADTLLTLASEVGLDISPWQSEKHFTSWLALCPGTRRSGRRVLSRKTRPSANRAAQAFRMAAATQARAKTALGAFYRRIRARSGGREAITATAHKIARIFYSMLKNRTEYVEVGQAAYEQKFKERRLRSLKHQATALGYQLTPIAARSF

SEQ ID NO: 385294 - protein, 452 aa, unidentified
MNENKISMEVINSNAAGIDIGSRSHWVAVGQKEEDIKEFGVFNEDLKNLSNWLKENDIQTVAMESTGTYWQALYAILLADGFQVILCNGKFTKNIKGRKTDVQDCQWIQKLHSIGLLTGSFLPDEITEKLRTYCRHRANLLDSAAGTSKKMQKYLRLLNLRLDVVVNDICGLTGLLIIHAICNGEKDPLKLAELRHGNCRKTEEEISKALHTNGREDYLFALNQELEMYEILQSKIVQCDVEIEKILNSTIGQDDNKRQHHIEPKKHKKINKNTPKNIDLNLMAYQYFEGVDLLAIEGVSYSTVLSIMSEVGLEGIKKFPTAKHFASWLRLTPNNKISGGKILSNRIPKGSNRLKIALRNAANAIGNLKDSTPLSNFFKRINFRKGRVSAISATARKLAIIIWNMVVKNQAYINPEGYLFLDEKRKLGLVKRIQKQITKFGLTNEEINFATN

SEQ ID NO: 385295 - protein, 343 aa, unidentified
MVHYVGLDVSLKQTSICVVSDTGSVVREGVVDSDPAAIAAFVRSKAPDTVRVGLESGPTSTWLWIELKRLGLPVICIDARHAKAVLKMQINKSDRNDAVGIARIMQTGWFKEVRVKDADCHAVKALLTSRALLVKIKRDLENQIRGLLKNLGRVIGRAKFNGFTTRAVELIEGRPELVAVVAPLLKVRAVIEKQIDDLDRKVLKLARHDAQIRRFMTVPGVGPITALCFKATIDDPARFKRSRSVGAYIGLTTRRHASGEMDWSGRISKCGDAMLRSYLFEAASVLLTRVPKWSVLKAWGMRLAKRNGLRKAKVAVARKLAVILHRMWIDGTEFTWSNKEADA

SEQ ID NO: 385296 - protein, 316 aa, unidentified
MTDQAVEVFVGIDISKQSLDVHIAPPGQSLKVAYDEAGVAQLVQRVEAAQPTLVVMEATGGYEARLASELAAKGLPIAVINPRQARDYAKATGQLAKTDRVDAIVLCGFARAIRPEVRPRKDPDTEELDALVSRRRQLVEMRVQERLRMAATVNKKIRKSINDHILWIEQCIAEVDSELKGRLRRSDMWRPKVQLLESIPGVGAVTTTTLLAKCPELGTLNRRQIAKLVGLAPLANDSGQRHGRRHVWGGRAEIRSVLYMATVTAIRCNPTIRTFAQRLQQLHKPPKVVIVACMRKLLTIMNVMIKTGTAWNPTAA

SEQ ID NO: 385297 - protein, 338 aa, unidentified
MRLYCGIDLHSNNSFIVIIDEDDQVVCRQRQPNDLDVILATLEPYRDELVGTVVESTFNWYWLVDGLEDAGFRVHLANTTAIQQYSGLKYADDSTDARWLAHLLRLGILPTGYIYPREQRALRDLLRKRISLVQLRTSNKLSLQNLSQRNLGRRFSSSELKSLNTAGIQERLDDANLVLAMDSTLQVTACLDQEIQRLEREIRIQTRPHPAFEPLKSVCGVGNVLAQTILLETGEIGRFPSVGNYASYCRCVGSQRLTNYKSKGKGNTKNGNRYLAWAYVEAANFAIRYYPEIKRYYQRKAARTHRIVALKTVAHKLARASYYVMRDLQPFELKRAFG

SEQ ID NO: 385298 - protein, 391 aa, unidentified
MSMYFVGIDISKYKHDCCIISAADQKVVSKVTIKNNKAGFNELLTIIHSLANPADIRIGFESTSHYALNLELFLENSLLTFMEVNPVLISEYKKSKTLRRTKTDSVDCESIARWLMTVEYKPHSKGFYHAYSLKSLTRLRDKLIRQRSFYLVKITNVLDHTFPEFKPFFNERLSKTALYLLENYGSAEKMARMNSASYEKLRSLSRGKFSPQQFLRLKELAANTVGVNNSIFDVELNSLLSLYKSLVKEIDTIEKEINKLIEEVHPHYMSVPGIGPLSAAVIYSEYGDISNFTNPGQMLAFAGIEPGINESGTESHGGKMVKRGSSQLRYTLINCCLPLIRFDMTFATYYAKKRGEGKPHRVAITHVAKKLIRVIYALERQDIDFNAQKLR

SEQ ID NO: 385299 - protein, 347 aa, unidentified
MERTTIGLDIAKRVFQAHAVDRESGEVTRTKLGRAELLQHFAQMQPSLVAMEACGAAQHWAREFRKLGHEVKLIAPQFVRPFVKTNKNDAADAQAIWTAAQQPEMRAVAVKTEEQQAVLALHAIRERLKKARAAAINQLHGLMGEFGIELPRGWRTMLAKAAAALDQADSAVPAVLQPQLHRQLAEVRSLTEQMAEVERQIASWKRGQEECERIAAIPGVGLLTATAAVATMGEARTFRSGRQFAAYLGLVPRQTGTGGRVQLLGISKRGDTYLRTLLIHGARSVLAHRQAAADPNSWLGRLLQRRPKNVAAVALANKMARQIWAIVAHERTYEPNYGLPQVTATPA

SEQ ID NO: 385300 - protein, 354 aa, unidentified
MLIIGCDFHTRYQQIAMAREETSELLVERRLDHQSGEAHAFYRSLQNLQEPVRVGIEATGPIHWFERLLTELGHELWIGDSAKIRASEVRKQKTDERDARLILDLLLSKRFPRIWVPTPAERDLRQLLWHRHKLVCMRTMLGNQLHALALSQGLCRKQKLFSKKGRAELGSLTLGPWAGRRREELLKLLEQLETPIAELDRAVLEEAQRREDAISLMTHPGIGPVTSLAFVLAIGPVTRFSCSRKIASYLGLNPTEDSSGGRRRLGGISKQGNTMVRWLLIEAVYPAVRKDPALRQDYQRLKFRRGHAVAKVAIARKLAVRMYWMLRSGADYAQLVRRQGSPGATLMNASSSLG

SEQ ID NO: 385301 - protein, 420 aa, unidentified
MKSFVPVAGVDVSKRFSDLCVLSPDNNVLLRQKIYHDMVSMKLAEKKLHEIELECGARPVVVMESTSHYHLILFQFFTDAGFEVVVVNPIQSGALKNINVRKVKNDRVDAYRIAMLYRLKVLRPSQIPTSSLRGLRLLTRQRSELKGDVARFKNRLTAYLDQIFPGYGEVFSDVGGSASRAVLHMCPTPEKLLNANGSLLAKAICEAGNKGPKFGAEKAAKLREAAGSAQVIGVRSASNASLIKNVLDIIEGLLAAIQRIEREIKELVTQDTRLDEDVKLLCSIPGIGFSSAVVIVAEMGNISLFRKPKQLATYFGLDPGERQSGTFKGRKNKLSKRGSPQVRAALHMAAVSSVSRNRDGTYRNPVLAEYYERKCAEKPCKVARVAVMRKLSNIIYAVLRDRRPFELRTPQEHMALLAAA

SEQ ID NO: 385302 - protein, 473 aa, unidentified
MKKQPGPAASRRRATGHAERRKRAKKDERPILGLPVLCADTAGIDIGATEIYVAVPADRDEEPVRCFDSFTEDLHKIAEWLRQCGVEKVAMESTGVYWIPLWQILADAGFEMCLVNARYFKNVPGKKTDVEDCQWLQFLHSVGLLRGSYRPAQAICGVRTLLRYRTELIRFAAEHIQHMQKALEQMNVKLSHVISDLTGVTGLAIVDAILNGERDLRKLAGLRNARVHASEETIMKSLEGDYRLEHLITLQHSLDLYRHYQVKIGELDKKMEAFMSNLPDRIDIGQCPLPARRKKSRAHKQHNAPAFDLRTHCYRILGVDLTAIHGVDEVTAHMVVTEVGPDFSAFPRESAFCGWLRLCPNNRITGGRILSHRTQKGKNRLAQALRNAAQTLHSSQSALGDYYRRMRAKPGPAEATTAAAHKMARTIYHMITTGQEFDETRLEKQNEKQLKKREFRIRRQALEPGFQLTPVSS

SEQ ID NO: 385303 - protein, 426 aa, unidentified
MADMNHPIAALHWVAIDVARYWNAVLVETASGQRQRFRMTNSAADMQRLTDFLLSLGGRCRVALEPTGDYHRPIAHRLLRAGFEVVSISSVAQSRFREAMFNSWDKNDPKDAAVILEMLKQGRTQRYVDPMLAGHHDIQELSKTYYQISRARTKVQHAIINHHVPLYFPEMHKYWTSTRNEWWVKFMIEFPTPAHVRQHTCQEFINLASPVVGRRVHRVAKLTEIWECCADSGALPHDPQSVAVQTFLFTLRHYQHLNDMRRQLEEQTQKLLASDADYINLMSLPGVGPINALTILAEAGNLRRFGHHRQFLKYCGFDLAKSQSGVQRGREQLSKRGNARLRLAFWLAAVVAIRARENSFREKYDRYVSSNPKDPDLKRKALTAVAAKMARVAYGIIKKNQPYRRFFEQSLPSGSIPLNRAVGAPM

SEQ ID NO: 385304 - protein, 450 aa, unidentified
MKKKENQKKEVKKYSKNLSVINAHAGGIDIGDSEHYIAVEKGDSYEVRNFNSFTEGLKSIVAWLIAEGITTVAMESTGIYFLSLYTMLEEAGIDVWLVNAKHVKNVTGRKQDDTDAIWIQKLHRCGLLQRSYQPENEQRILRTYVRQRKNLITIESDSVRRMQKALELMNIKLHIVISDILGKTGMQMVDSILKGERDPEVLIKYKDSRIKASNEDIKKSLQGIWSDEYLFMLKQAYDEYHFYQTQIKECEEKIKQQLLKYVATIKEGDITNIVTTKSKRKPIKNQFSFSLTTYLKEIVGVDLTKIPNIGEATAIEFISEVGNDITKWGSLNQFSAWLNLAPNTKKTGGKIISSKMMKKKNRAGQTLKMAASGLAKNKGPLGDYYRRMRGKLGGKGATLATAHKLAKIMYTMIKDKKEYDIEKMNKSQEQYKKQRIKLLEKQLAKLKNAA

SEQ ID NO: 385305 - protein, 339 aa, unidentified
MNRIVVGVDIAKRVFQLYWVEPETGEIVALQLKREKFLEHFVNRSTCLIGMEACGGSQHWARSLQELGHEVKLMSGRMVKPFVVGNKNDVADARGIWMAVQQPGIKAVAVKSEEQQAVLALHRMREQLVKFRTAQINGLRGLLTEYGEVMPQGRAGIKRDIAGALGRLSDRLPAIVIETLREQYARLSELDEQISQIERRLRQWQREDSATQRIAAIPGVGLLSATAAVATMGDAKAFKSGREFAAWLGLVPRQTGTGGRVRLLGISKRGDKYLRTLLIHGARSVLTHSKSPPEWLSELVKRRPKNVAVVAMANKMARTIWALTAHERAYQSGYVSRPA

SEQ ID NO: 385306 - protein, 497 aa, unidentified
MPTKSTIYSRCNPQLLKLFETAGHPAKVLCVALDYAKAQHTALLCNGLGELLKPSFAIDNTPQGAAKLLSEVRACVKPRKIRPEHVFFGGEDYPSYAENFLRHLRQAKFLVVRVNAWEAKQQRDNFQASSDSLDLLGIARCCLNRRGESVRDLPAAYPNLRIATRDRDKLVRMRTAISNRIHSYVDRLFPGFLSEGKSALEPFSKASLELMEERFSPAQLSRRPRQALAQWLGRRGVTQPRDTADQLKGFAKNVLAPAPEQTLMLQQTLAQLVGLYRNLEQSIARIDREVAHWLARTPGAWLTSIPGFGITLSAGWTAELGPPSQWRSVRQLCSYSGVVPKSKQTGGPQKEPVVGAVQQRCNKRLKNVVLQAVQKVIQHGPEELRRTAQELQARGAHTEFALAKRLVRLGKYLALTGTVYRPKAMMDPDTPKATLAAHYQSLWDKLLPKWRDKADLREVFAPEQPLGQWRKMVQELYALELRLPQQKAGQKSSAVAP

SEQ ID NO: 385307 - protein, 430 aa, unidentified
MKQYELLHSLFVGIDVSMKENVVHAMPFSPEDHPGHAHLRFSAPNTPAGSVGIVEKVSDFLKFYPDVIQVVIALEATSVYSFHLATFLSVAHFNGHIPAIVYSVNPKEIHAYKKTFTDVGKDDYVDAMVIADYARSNKIRSRPWKGPELLGLRVLTRLRFRIAKLMGIVKNSTGNSIYLECSGLMTGENPFCNVWTTTCQELLTTFQGPDEILSLSDEELLNFITEKGHGRFSHPLDVVEKVKKAARNSYRLDKRVYEPLTSGLSVSFFIIHSLEAAIKKLDKSIETMAKSFSSDSYQILLSIDGVGPVIAGGFLAEIGDIKRFKTDDALAKYIGLTWRGKQSGQSESPVKHLSKAGDVYLRYYVLLATGQIINYSAKYREAYERIRSRKTLFPYRAALNLVARKIVRLIFTLLDKHQLYSDNKVMVTLE

SEQ ID NO: 385308 - protein, 319 aa, unidentified
MNTISHDRIIGIDVSRDWLDIHCLPDGHHLRLPNTCDGHERLADIASTPDTVVCFEATGGQEWQLWTTLDTAGVRTRQLPPAQIKAFAASRGTRAKTDRIDAELIACFMAFRPDAGRTLPAQKLRLLRALTSKRSQLVETRKRLVAQIKAHGKLGTAERFAVMDGDLKGLLDQQIAELEIQIEAVIDSNAELAGTAHILRSIPGIGPVASTMLIAEMPELGQITGEQAAALTGLAPFAHDSGAMRGKRAIGGGRRLLRHVMYQAALVASYHNPVLKHFADRLREAGKPHKVVITAVARKLVTIANALCKARQTWASPAI

SEQ ID NO: 385309 - protein, 348 aa, unidentified
MIIIGVDFHPEFQQIASVDTETGEFQEKRLAHPAEAEKFYRALVGQKVRVGMEASGHARWFERLVAELQFELCIGDAAEIRTKRVRKQKTDRQDAQLILRLLLEDRFPQIWVPSWENRDLRQLLWHRHRMVQARTRIMNQLQAVALNEGLRCKKKLWRERGRQQLESFRLAPWATRRRRDLLELLDRLTPTIAELSQAIEQEVEKCPAAQRLRTHPGVGSLTALAFVLIIGEVNRFRCGKQVASYLGLVPLEESSGNRRRLGHITKQGSSMMRFLLVEAAQVTVRSLPEWRNKYLHLVLRRGRKIAKVAMARRLAVHLFWMMRKDWNYQQLKKFGSHAGEPGNRHGVR

SEQ ID NO: 385310 - protein, 445 aa, unidentified
MQVVYSRCCGLDVHKDQVTACVLVLGEDGKREVRTREFRTYRKELQKLKMWLYASKVMHVAMESTGVYWKPVWHILEGHFPLLLANPYHMHNIPGRKTDQQDAEWIADLLAHGLLKASFVPVRQIQELRDLTRYRVKLKGEFNRVHNRIAKVLEDAGIKLGSVATDILGVTGRKIIRALIAGEQRPEWLADKALSRLRNKRDELRLVLHGEVNEHHRYLLKELMEDMERIESKVLRIEAEIVKRTQPFERQLARLTTIPGVDWITAWTILAELGDDMSAFPDASHAASWAGLVPGSFESAGKRKSSRTRHGNRWLRRALCQSAWAVSRKKNCYLTAHFYRRAARSGVKKAILATAHQILIIAFHILRDGTNYQERGGDYFDRINPERTRQRLTNRLQRLGWEVVMKPLARTEASASAITTAETARRRGRPCKCAERGIDCKHRRI

SEQ ID NO: 385311 - protein, 352 aa, unidentified
MSDKISRHTLKPSDGKELLDLCERIRTRVAKETKKRVEMVSCYEAGYDGFWLHRLLQAHDIRNHVIDPASLQVDRRARRAKTDRVDAERLLRSLMAYLRGEPKVWSVVRVPSVAEEDDRRLHRERGRLINERIQHVNRIKGLLAIHGIYDYQPLRRDRIQRLEQLHTADGRTLPPRLEAEILRELQRLEIVIGMIKTIEAERDAIASANTETERGSVKKIQHLAKIKSIGPEFATTLVGEVFYRSFDNRKQLASYVGLTPAHFQSGAMSRDQGISKAGNAKARTVMIELAWLWLRHQPDSDLSVWFRDRVGKLKGRIRRITIVAVARKLLITLWRYLETGLVPKGAALKVCD

SEQ ID NO: 385312 - protein, 341 aa, unidentified
MQLTTIGMDLAKNVFQLHGADDKGRTVLKRQLRRAQVLPFFANLAPCKVGMEACGSAHYWARKLQAPGHTVQLIAPQYVKPFVKRNKNDAADAEAICEAVSRPNMPEVPIKNAEQQAILSLHRARQGFVKARTAQANQIRGLLAEYGITIPQGITHIAKRVPEIIEDGENDLPGQFRRLIQRLMNHLQELDRQAKELEVDIQVWHRQNSASQKLAAIPGIGALTATAMVGSVGDAKNFRNGRQLAAWLGIVPRQHSTGGKATLLGISKRGDSYLRTLLIHGARAVIRRAEGKLQPDPWLQKLVARRNKNVAAVALANKNARTIWALLAHDREYEPHYGMAA

SEQ ID NO: 385313 - protein, 345 aa, unidentified
MHDPTTAIHLYVGIDIAAETFTAAWLGPKGKPTAPFTRAQTPAGYLALQQQLRATAVPPAATAVVLEATGSYWVALAVTLHEAGYHVSVINPLQAHHFAKAQLRRAKTDALDAQDLAQLAATLRPPRWTPPPPVYHEVRQRLVARDGLLTMRQQARDQRHALLQWPVVVAAVRQQLDEVIADLDARIATLEVEIAAVLKESVWAATLARLTSAPGIGIVAASWLLVATLNFTLCTGPAAPAAYAGLAPMPRESGRSIRGRPRIGHAGNGRLRAAFYMATLSAAQHNPAIKAFYDRPRLPGKPMKVARCAAARQLLHLAWALGTKQRPFDPRQQQQRTVVLADQTP

SEQ ID NO: 385314 - protein, 439 aa, unidentified
MPTPSLPVLDATAAAIDVGSEQLHVSIAGGPPKIFGTTTGELHGLRDYLLAQGVRSVAMEATGIYWLCPYEVLEKAGLQVLVVNGKYVKNLPGRKTDLSDCQWQATLHAHGLLKSGFVPPEHIRRLQDYLRVRTDHIVMAGSHEQHMQKALERMNLKIHDVISDLTGMSGLKMVQAIIGGQRNPVALLALCDPQVQKNKAGRLRAALEGTWKDEHLFALRQAYELWQFYQKKIAECDQAIEAVLKELAGPEDPKNPAPPPIKRGGVNTPQIAGLHGLLLRLCGGKDPTQLPGVADYVLLQLLSEVGCDLEKNWKTEKHFTAWLGLAPGSRNSGKRRASQRRSRNRAGRLFCVVARSVGRSVDKALGGFYRRLKGRKGGLVANLALARKMAELFWRLMVHGISYVEQGLKKYEEKVAHTEQRLLQKLARKYNLVLQPKVP

SEQ ID NO: 385315 - protein, 433 aa, unidentified
MKVLYEHVAGIDVHKEMVKVAIRSPGEKPWTRKTEILEFRTFYGVLQEMARELRRRGVTHVVMEASGVYTEPVYYALCEQDFTQVAVINPAHAKALRGHKTDAKDCARLAELFECGLLRGSYIPAPELKEVRDLTRYRTKTVQARTSEIQRLGKALESAGIKLGSVASSITGTSSTAMIESLIDGERRGDVLAELAIGRMRSAGKLADLSMALAGRFTEHHALLCRLHRDRITVFDDAVDGLDQRIAGKAARWQREAGLLTSVPGFGDVVAWAWLGEIGPAPHQWFASHEKLACWVTLCPGNNISAKKRKHGRTGDAGTYIKPMLIQAAWAAIRVRGRLQARYNRLVRRFGGDKNPGAKKKAITAIAHTLLKIAYQVLKTGTPYQEPGADFYTRRESPAARQAFLERQLQKLHPGCTITITISPPEAALTPAA

SEQ ID NO: 385316 - protein, 348 aa, unidentified
MHFYTRQHQYYCGIDLHARSMYVCIVDQAGTVVFHRNLPTDRQQLIEVISPYRADIVVGVECIFTWYWIADVCAQQAIPFVLGHALYMKAIHGGKTKNDKIDSQKIAALLRGGMLPVAYAYPQAMRSTRDLLRRRMYLMHHQSELLAHIQNTNSQYNLAAFEKRINYRGNRVELAEHFQEPMVRKSIEADIEVLDTLHQVLLKVEQAVLEQAREHDPVALQLIRTAPGIGKVLSLLILYEIQDINRFSTVGRFISYARLVKPARESSGKKSGSRGSKIGNVHLKWAFSEAAVLFLRNNEPAKRYHHKLVARYGKAKALSIIAQKLGRTLYFMLKHKKVFDPIRFYQGG

SEQ ID NO: 385317 - protein, 391 aa, unidentified
MSMYFIGIDISKYKHDCCIISAANQKVVSKVIIKNNKAGFNELLTIIHSLANPADIRIGFESTAHYALNLELFLENSLLTFMEVNPVLISEYKKSKTLRRTKTDSVDCESIARWLMTVEYKPHSKGFYHAYSLKSLTRLRDKLIRQRSFYLVKITNVLDHTFPEFKPFFNERLSKTALYLLENYGSAEKMARMNSASYEKLRSVSRGKFSPQQFLRLKELAVNTVGVNNPIFDVELNSLLSLYKSLVKEIDTIKKEINQLIEEVHPHYMSVPGIGPLSAAVIYSEYGDISNFTNPGQMLAFAGIEPGINESGTESHGGKMVKRGSSQLRYTLINCCLPLIRFDMTFATYYAKKRGEGKPHRVAITHVAKKLIRVIYALESQDIDFNAQELR

SEQ ID NO: 385318 - protein, 358 aa, unidentified
MTNLAEKLDFSGHTISCGIDVHLKSWTVSLYLGKQYLKSFVQSPPSVEGLRNFLLTSYPKANYECAYESGFCGFWIQRAFAALSISCIAVNAADVPRTDKSTKNKNDRNDSRRIAEALQAGQLEGVYVPDPELEADRQLVRLNERYSNDLTRAKNRIKGLLRLMGIEIPHRFAKANWSNAFVDWLKQVSCGESSIRVVLDRQLSIMETIRAQKLDTLREIRKLMHKVRYQNISRLLCSIPGIGPVTAAVLIVEIVDITRFEKSDRLNSFVGLCPMQHSSGEDDRKGSITTRQHRRLRYLLVESAWVGIRTDPALTLCYSKWSARIGSRRAVIKVARKLLQRIRHVWIHSVPYAPGLVK

SEQ ID NO: 385319 - protein, 487 aa, unidentified
MAKGTSVYERLTRGNRKQRKDLQRRFYSDNPGLEAIHPNAAGIDIGSESHFVAVPPARDEEPVREFGSWTADLERMAAWLKSCGIDTVAMQSTGVYWFAVYDVLEKHGLKVFLVNASHTKNLPGRKSDVQESQWLMKLHTYGLLRNSFRPPEDIRPIRAVWRLRDRHVQDAARSIQHMQKALTSMNVQLANAISDIGGLSGQTIIRSILAGERDPQKLAQLRDRRIQASEEEVARSLEGNWQEDQLFELRQAVDEYNFRQKQVAECDCKLQAYLAVLPSRRVPPADTGKVPPPPPRATGRKKKRAKRVGGGNAPQSFDLAAELKRVTGVDALRVEGINLMTIQTVVAELGTNLGEWFPTEQHFASWLGLSPKRDVSGGKVIRHTREKNRNRVAGVLRLAATSLLRSDSYLGARYRNLRSRLGSPKAIKAMARYLACIIYRLFTKGQAWVDRGAEQFEQNRQTRDLAKLQAQANSRGFRLIPLTEQTA

SEQ ID NO: 385320 - protein, 361 aa, unidentified
MTHNMTTPPDARKVIVGVDTHKHVHVAVAIDTWEIRLGDHSFVADSGGYEALVMWAQTHGRIEAFGIEGTGSYGAGLVSTVRRAGHRVVEVNRGDRRTRRAAGKSDTIDAEIAARSVLAGQATAIPKTADGAVEMIRQLKIARDTAVKARTTAMNTLKQIVVHAPPGLREALHDLTDHSLLRRCAGLRPGPLDTLPAAAKHTLRALARRWIALAEEIATHDRHLARLTTETSPTLREGFGVGAHTAAELLILFGDNPDRIRSEAAFAKLCGVCPIPASSGRTTGRHRLNRGGHRQANAALYRAVIVRMRYHQPTVDYVARRTADGRTKRDIIRCLKRFLAREIYQRVMTDFRARQEIIQAA

SEQ ID NO: 385321 - protein, 393 aa, unidentified
MICVGIDVAKDKHDCFILSSEGEVLADVFTIQNNAEGFDMLLQTIRRCARPEDKIKVGLEATGHYSYNILGFLLDKGLDTYVINPLHTNLYRKSLSLRKTKTDRVDARTIAAMLMSDVDLKPYTDTAYHNEELKSLTRYRFDKVRERAKLKQSVSRLVTILFPELEKLVSSLHLASVYALLIEFPGAKQVAGAHLTHLKAILSDASKGRYGRDMAVTLRDAARCSVGSVMPAKSLELQHTIRLIRELDAEIEDIETAIQSMMDEMQSPITTIPGIGVRMGAMILAEIGDFSRFDSPDKILAYAGMSPSTYQSGQLSFSGPYSHMEKRGSRYLRYALYNATKYVCLWDPAFAAYLAKKRGEGKHYNVALSHAAKKLVRLICALEKSQQSYRNAA

SEQ ID NO: 385322 - protein, 344 aa, unidentified
MKHYAGIDVSLEDSSVCVMDAEGLIIRETKVPSEAEALIAWFEALGIAMERIGLEAGPLSQWLYAAMAKAGLAVELLETRHVRTAFKTMSVKTDKKDARGIAQLMRLGWFRPVHCKSLPAQEVRAVLTARKLLQGKLHDVEMCIRGILRGFGLKVGPTTPRTYEARVRSLTEGHPTLEAITAALLNARGVFAQELRGFERRVRDLARQDERARRLMTVPGVGVLVSLTFVSAVDEPERFRSSRMVGAHFGLTPSRYQSGETDYSGRISKVGDTRVRAALYEAANVILTHRVRSSDLKTWALAVARRAGMRKAKVALARKLAVVLHRMLRDRTDFVPYFGAPMAA

SEQ ID NO: 385323 - protein, 320 aa, unidentified
MTSKGAEKMILSTIGIDISKDSLEVCRLPGGESARFDNNGSGHQQLIRWLAQTPIARIVFEPTGAYHRTLEQTLTAAGLPLAKVNPRQARRFAEAAGKLAKTDRADAAMLARMGMALALQARQPPNQRLSELKELHLARQALIKDRTAAKNREKILTLPLLKRQNQNRQRQIEAQIAAIEAEIEARIAADPALAERLAILESIPGIAKVTACALLIDMPELGTLDGKQAASLAGLAPITRQSGRWTGRAFIRGGRASLRQALYMPALVATRFNPQLKAKYHQLITAGKPTKVALTAIMRKLIVLANALLRQRRNWAENPA

SEQ ID NO: 385324 - protein, 322 aa, unidentified
MRYIGIDVSKATFVVAYSSDKGGGIRTFNNTTAGIRQFIGTLPKDGSIHCVMEATGNYSALLLYMLNVAGITVSMENPLKVKNFAKAMLSTVKTDKSDARLITLYGEKMNPRPFKVQGEAILRLRQKRTVIRQLTKQITAMSNLRGSLACLPVPDKGATHTVDETIKFLEKKRDRLQAELTDLVEVEFSRQLALLTTIKGIGITLATALIITTGGFTYFQNAKQVSRYLGICPTYEQSGTSVNIKGHINRNGDAYTRGLLYIAAWPASRFNAQCKETYTRLRQNGKSGKLAMIAVANKLVRQAFAVVAHDKEYVDGFVSNRP

SEQ ID NO: 385325 - protein, 416 aa, unidentified
MNAVGIDVSSRKSTVAVLRPLGEVVCLPFDVSHDADGLASLAEKLKALDGETRVVMEHTGRYYEAVAKALHEAGLFVCAVNPLLIKEYGANSLRRVKTDKADAVKIARYALDNWADLRDFTPMDAIRYDLKTLNRQFQLASKQRTASANNLIALLEQSFPGIRKCFDSPVRSDGTQKWVDFAHSFWHVDCVRKQPFAAFCERYRKWCKRHAYLFKLSNAEEVYALAKRAVVLTPKSKVVKVLVQEAANQLSSISRSVEVYRAEMDRLAAMLPEYPVVMAMYGVGKSYGPQLMAEIGDVRRFERKQALVAFAGIDPMPNQSGDKNVRSNKSSKRGSPYLRKTLFNVIRTYLQCAPQDEPVFQFLNRKRAEGKPFYVYMLAAANKFLRRYYAKLRDYFASLDTLQSVDPIPATLKATL

SEQ ID NO: 385326 - protein, 369 aa, unidentified
MVLFVGDDWAEDHHDIEIEDESGRRLARARLPEGLQGITRLHALIAGHVPGQWADLPPGEAAGRVKVGIETERGPWVQALVAAGYEVFPVNPMSVARYRERHSTSGAKSDAADAHLLAEIVRLDRAHHRPVAGDSPQAEAIKLAARAHQTLIWDRSRHVLRLRAALREFFPAALESFADLDAPDTLELLGRAPDPDRAARLSQSQIAAALGRANRRGAAARARQIQSVLRAPQLRQPPPVQTAYAAIVTGQVALIRALNAQIEELGEVVAGHFGQHRDADIYLSQPGLGITLSARILAEFGDDPARFDSPKARKNYAGTAPITRASGRKKVVLARYARNRRLADALHQWAFCAMRGSPGAKAYYQQSAA

SEQ ID NO: 385327 - protein, 407 aa, unidentified
MSTSTDVFAGLDWAVHTHAVCIIDASGAVRDRFEIAHDRQGLAELMRRLARFGASVRIAIERPSGLIVDALVEAGHQIFPIHPNAVKASRPRYRSHGAKSDASDAYLLADLLRTDGHRWAALSPQSDSIRALRALVRARDDLVTTRVALGNQLHSTLEVFWPGAACIFADITSPIGLAFLRRYPSPASAARLSEAQLLRFCRAQHYSGRRSPAELLARLRAAAQALPGKLTNESMAHVVRSLVTVLNPLVAQISDLTRRIERFVESLPDGQIIMSFPRAGRVCAAQILAELGDVRERFSTFDQLAAEAGAVPVTYQSGKTRSVTFRWACNHRLRQAITCLADNSRHANEWARGIYLAARARGCDHPHAIRILARAWLRVIWRAWTDRKTYDPKLHLGALKLASDTGG

SEQ ID NO: 385328 - protein, 430 aa, unidentified
MKSNTQNAKIEAITEKTLVLGIDVGSETHYARAFDYRGIEYSKKPFKFSNTEVGFATFKEWILDLKERHEKDKVVPGMEPTGHYWFNLGKFLQDNEMKPVLVNPHHVKKSKELDDNNPTKNDRKDPKVIAGLVREGRYMIPYLPDGVYADLRTASNIRFQLQAELTRIQNRISRWFNIYFPEYKTVYGKPDAKSGMLILKAAPLPEDILTLGIDGVNQIWRDAKLRAVGKARAKTLIKAAEHSIGSKEGTMSARMEIRMLLEDYESRNTRLQEVMVLIEELVKKIPMAEKLLEIKGVGIRTVSGFLAEVGDISRFNNPKELQKLAGLALVENSSGKHKGKTTISRRGRKRLRYLLFEVAMSLVAKNPEFRELHNYYTTRRLNPLKKMQSLMAIAAKLIRVFYAMLTKGVDYDPKKMISDIKRPTVYLQAA

SEQ ID NO: 385329 - protein, 430 aa, unidentified
MSLDPHEEPAAIQTHIGAIFISLELSRSKWLITSLVPGGGQKMSKHWVEAGDLAGLLARFWAIRDKVLARTGKSYPIVVIQEAGLDGFWIHRSLVKEGIESHVVDAASIAVSRRRRRAKTDKIDGEGLLRALLAFKRGEPRVCSMVRVPTPQDEDRRRICRERKTLTAERIRHVNRIKGLLFSQGIGDYEPLRRDRRRALEAARTGDGRALGANMKAQIGRELDRLELLLGQIAAIEAERDAMLARQAGAEAVQGAQGAPACVQKPMDLNGPGAETVPEAEAAPGAQSAQSAPAHVQKLMDLNGLGAETVAMLSTEAFYRSFDNRRQLAAFGGLAGTPWKSGSIDHEQGVSMGNHRLRQTMIQLAWLWPIHQPNSALTRWYRERTKGATKLQKKKMVVALARKLLVALWRYVDAGVMIEGAVLKRAARAR

SEQ ID NO: 385330 - protein, 311 aa, unidentified
MTDHTIGVDISKSHLDAFRLEDGAAQRFENAAAGFRALVKWLGKAPVARIVFEPTGPYHKAFEAALAGTFPLVKVNPLQARRFVEAHGTRAKTDAVDAQMLARMGAAFGLVPQAPCSRETRVLKDLHVARTGLIKDRTRLRNRAQTQDIAVLKRQTKARLAQVERQIAELDAEIAARIEAEQTTARSRDILCSMPGIGAVTAAAMLTLMPEIGTLERKQVASLAGLAPITRQSGQWQGKSFIGGGRKPLRDALYMPALVAMRFNPDLKAKYTALRDAGKPAKVAIVAVMRKLIEMANALVKADRKWTPKTA

SEQ ID NO: 385331 - protein, 336 aa, unidentified
MKYYCGIDLHSNNHYVCVIDDNDKRLIEKKLDNNIDDTLCLLSPYRKHLTAVAIESTFNWYWLVDGLMEDGYRVDLVNTAAVVQYEGLKRTDDRYDAFHLAHLMRLGILPTGYIYPKKERGLRDLMRRRMKLVQEQSQHLISLKTQHQRQTGQTLLTNKIKTKSFELPVVGDENVQLSMQANLYLSRILAQTIHKLEVSIMAQIKQVPRFALLKTVDGIGDILAETIMFETGSISRFKSPGNFASYCRCVDSRRTSNGKKKGTGNRKNGNKYLAWAFIEAASKAICHSAEAKKFYEKKKRSGNACIAMKALAHKLARACYHIMKNKEAYNPDKLFA

SEQ ID NO: 385332 - protein, 349 aa, unidentified
MKILAIDLGKYKSVACNYVIATGTARFATVVTHVPELDRLLRRESPDLVVIETCSIAGWVHDLCCQRGVKCQVANPNGEAWKWKNVKRKTDRDDALKLAQLAALEQLPTVHVPAPETRQRRGLLKYRQSLITRRVAIQNHLRAIAQRQGILLDRGSRAWTVAGLAMIQQLAKPLEQCSADELWRGEAALELEALEAVTKLLREVERKLEAFAASDESVKLLRSIPGVGRCTAEVVVAYLDNPQRFENGRQVSAYAGLVPKQFQSGETDRRGRISRRGPSLLRKVLVEAGWVLLRYNPWAQRLMLRLSRGQKTRRKQAIVALARKLLVRCWAMLRDSTEWREPPPATATA

SEQ ID NO: 385333 - protein, 341 aa, unidentified
MITTPVGNRFVGLDTATGETEERKLEHASGEAEKFYRGLPGHALIGMESTGNSQWFVEMATTAGHDVWIGDAAQIRASEVRQQKHDRRDAALILKLLLEGRFPRIWTPSGQEKDLRQLLIHRYKLVRIRAQVKTELQHLAMNQGVTKKQKLWSKAGEKVLRELPLKPWASRRREDLFKVREMLNGQIVLLDQAVVEAAEKNEKARLLMTQPGVGPITSMAFVLTMGDVNRFQRGKQVASYLGLIPREYSSGGHQRFGSISKQGNRFLRMLLVEAAQGAVRCDPGFRNEYLHRCHKKAKGVAKVAAARKLAVRLYWMLRTNTGYPEVVRVESSSRVPLVSAS

SEQ ID NO: 385334 - protein, 370 aa, unidentified
MVVVETPSEGKQSMGKSIQKLSSVTRVGLDLAKRVFQVHAVDSNGEVVVTRKLARGRLVGFFSELPRCVVAMEACPSAHHWGRQLLALGFEVRLIPPAHVKPYVRRNKNDAVDAAAICEAAGRPGQRFVPVRSIENQAELMRHRARELLAGQRTAALNALRGHLAEIGLIAPQGAQHAYGLKRMAADGFDEYGEVVVPDCVRAALRPLVSQIDALDEAIGAIDKEIAMSVKGDETAKRLMTIPGVGPVTASAITATIQDMGDFASGREFAAFLGLTPRQSSTGGKPRLGRITKMGDRYLRKLLVVGACATLCHRKGHNDALRLWASGMLERKTVKYKFKLTAVALANKVARIVFVLMTRGGQYDDRPVAA

SEQ ID NO: 385335 - protein, 337 aa, unidentified
MGLYCGIDLHSNNHVLTVIDEADRRVYERRLPNELAITKAALEPYRAELVAVAVESTFNWYWLVDGLMEAGYAVRLVNTAAVRQYEGLKHTDDEHDAFWLAHLMRLGILPTGYIYPKSERGLRDLARQRMRLVQHRSSLITSVQNQVWRSTAVRLRSDTIKGRGKQPWPEISDPDLVSSIKAGRAAIDTLTVQIERLEKLLLKRVGPSPQFRMLKTVTGIGPILGMTIALEVGDIGRFAGVGEFASYCRCVDSRRLSNGKKKGEANRKCGSRYLAWAFMEAAHFAIRILPAAKRFYERKRRQRHALLAVKALAHKLARACFYVLRDQVPFAPERLFV

SEQ ID NO: 385336 - protein, 335 aa, unidentified
MGHYVGIDLHRRRSVIFTMDEDGNRLGCRRIANEPIALVQAVTEFGPDSEVVIEATYGWYWAVDLLRDEGMQVHLAHPAGNDWGKRRVKNDERDARDLADLLRLGRLAEAWIAPKEIRELRELVRYRYKLVNLRTGLKAQVHAVMAKEGVLPEWTRMFGPAGNAQLDKMDLDPSYSIRVKSLRDLVGVYDAEVAKLEREIHSRLKGDPGYEAIQAIPGVGRTLAAIFVAEIGDVSRFKSPDALSSWAGLAPRHRESDTKVIRGQITKMGSKMVRWAAIEAVTGRRGTTKLRSDFQQIAERRGKYKARAAVARKLLTLVYYGLRDKEIRCLAEEAS

SEQ ID NO: 385337 - protein, 311 aa, unidentified
MKCAGVDVSKATLDVAVFDGQRFVETNDAAGHRRLAARLTAAGVERVGMEASGNYEAAVRAALEAVGFAVKVFDPRQVHGYRIFRGRRAKNDAIDADLILAATAALGSGGAAADPRLAAFQEHMTLIDALTDDIARHETRRDRFSDPAHRRYLEAEIRRLSKRKSKELAKLIAKVKAHADLAKRFALLLSIPGLGEITALVFVVRMPELGRLSRAEAAALVGVAPFDHDSGTHAGQRRIAGGRRRLRKAVYMAAFSAANHWNPILVAFRKRLVDAGKTYKQAIVACARKLVHMANAVLARGTPWNPQNASA

SEQ ID NO: 385338 - protein, 474 aa, unidentified
MKKHKQAETKTKSEAIKPIGEREPDSAGIDLGANEIWVAVPADRDQKAVRQFGAFTRDLLAIVQWLVQLGVRSVAMESTGVYWIPLYQLLEEAGLKVCLVNARHVKNVPGRKSDVRDCQWLQYLHSVGLLSGSFRPAQAICASRSIYRYRQNLLSMAAQHVQHMQAALDQMNIKLHHVIDDLSGVTGQAIIAAILSGQRDPVQLAQLRDKRIKAPEAAIAKALEGDWRKEHLFVLAKACAQYQELQKQIQDCDQELWSYTRKLEACTQVIKPAKVMRLKPQLMGVEPLSKPPIQKRLRRKTSKNQPEGPWQQELERFFGVDLTAIPGISVLTGLTLMTELGNDLGAFKTEHHFASWLCLCPDNETSAGKVLRRRTRRSQNRVRQALRMAASSLHHDKSYFGDKYRRLRARLGAPKAITAMAHQLARILWTLITRQLPFDPSVFAYHEKAHQQRRLKHLAASARQMGYHLTPLAA

SEQ ID NO: 385339 - protein, 412 aa, unidentified
MQVVYPCCCGLDVHKKSVTACVLWAGDGGRSRKEKRSFGTFTRDLLRLADWLQQCGVTHVALESTGVYWKPVWNILEGSFEVLLVNAQHIKAVPGRKTDQKDSEWIADLLQHGLLRGSFVPPQATRELRDLTRYRVSLSQEINRIANRIQKVLEDANIKLASVATDPLGASGRAMLEAMLKGEGDPARLAEMSKGLLRNKIPELKLALEGRMTEHHRFLLGQLCDHLRFTETKLSEIEQEIERRLRPYQDEVARLCTIPGVDRVTAWGLLAEIGQNMNQFPSSAHLASWASLCPGNFESAGKRLSGKMRKGNVSLRRCLAQAAWAISMTKNNYLSALYRRIAARRGSKRAVMAVAHALLVIAYHMLKRKENYKELGADHFDRIDVNRIRRSLVRRLERLGHRVTLEPLVRTA

SEQ ID NO: 385340 - protein, 338 aa, unidentified
MGFEPGPSKEGSWMMAQNDLVVAGIDVAKDKVDVCIRSLSLRRTFASTAEGRRELACWLRRKKVGKAVMEASGGYEREWAKALREKDVEVRIVDPKRVRSFAQSAGRLAKNDAIDAEMIAWFAETFGEANGQAYDAARENLVQIVRARQGLLDLQTSLQNRSEHAAPEVVQKMQGRLLKKIALELAGLEAAIAAMIKATAHFAKLAEIIESVPGLGEVTAAGLIAAMPELGQVSNQAISALLGVAPYDDDSGKRRGERQIKGGRRKIRNLFYMACLGAATRHNPMLKAFYQRLLAKGKPKKVALVACMRKLIVILNTMIARRQKWDTSHYAVSRSSAP

SEQ ID NO: 385341 - protein, 333 aa, unidentified
MVEGTEGSHHKEGSKKMSKDSMVCAGIDTGKHKLDIAVESSAERLQIDNSAESHPALSAWLRRCGVERIGIEASGGYEQAVVSTLRAAGFHVIVFQPVQVRAYAKFVLQHAKNDGIDAALIARCTAAATDIHEPTDVRLAPLAQHLTMIEQLTADVAQLKTRREACRNQRIQAFWKQEIDRLKRLLQAELKQLVLAIREHRDLADRLDLIASVDGVGLRTAVAILVRMPEIGRVSREQAAALAGLAPYDDDSGLRRGPRHIKGGRQRLRQSLYAATLPAVFYWNAQLKAVYKRLIAAGKTHKLALVACARKLLIFVNTVVARGTPWTSPPATI

SEQ ID NO: 385342 - protein, 344 aa, unidentified
MKEITLLGIDLAKNTFQLIGVDKHHKVVMKRRCGREKLVEITRNLPSCRILMEACGSSNDWGRRFIEMGHEAKLISPQHVTPYVSNHKNDYKDTEGIIEAGTRPRTKFVEIKTIEQQDIQSIHRVRERLVGNRISLSNQLRGLLLEYGIVIGKGFRCLKEKMVDILGEENRSLTEQMKEVVSDLYDEFKELSKRITRYDKKIEEISNQNGSCQLLCTIPGIGPIVSTALYASFGNGSQFKNGREMAAHIGLVPKQHSSGDRQLLLGITKKGDGDLKRLIIHGSRSVVAHAVKKEDKRSRWINRLATRKHTNVVATAVANRTARIAWSVLQSGKPYDSNYGYGIC

SEQ ID NO: 385343 - protein, 440 aa, unidentified
MKVMYERVAGIDVHKDMIKVAIRSPGEKPWTRKTEILEHRTFYGVLQEMAADLRRRGVTHVVMEASGVYTEPVYYALCEQDFTEVAVINPAHARALKGHKTDAKDCARLAELFECGLLRGSYIPSAEQKEVRDLTRYRIKTVQARTSEIQRLAKALESAGIKLGSVASEITGKGATAMIEALIDGERRGGVLADLAIGRMRSAGKLADLSMALAGRFTGHHATLCRLHLDRIKVFDDAVGGLDGRIAAGTARWQREAGPLKSVPGFGDVVTGAWLAEIGPAPHQWFSRHDKLACWAGLCPGNNISARKRKHGRTGDAGTYIKPMLIQAAWSAIRVRGRLQARYNRLVRRFGGPKNPAAKKKAITAIAHTLLKIAYQVLKTGTPYQDLGADFYTRRNSPEERQKYLERRLQKLHPGCTITITISPPEAALRRGARLGLAGK

SEQ ID NO: 385344 - protein, 479 aa, unidentified
MPLLGRNHNPQPKTNMKRKTPKLKKAKKQISVDQGWDVLHPHAAGIDIGSREHLVCVPAQASAKPVRRFGTFTADLMGLADWLKECGILHVAMEATGVYWIPLFQILEQRGFNVVLVNPRQTKNVAGRKSDVQDCQWIQRLHTYGLLAGSFRPADPYCVLRTYLRHRDELIGARSAQAQHMHKALQQMNVQLAQVLSDLTGVSGMAIIQGILDGQRDPVKLAALVDPRVRATADRIQKALQGDYRPEHLFVLGQAFSLWATLEEKINACDEQIVRETATLPDQVDPQRPLPPRKQGRPACMDQMQGLDMRQMLYRKLGADLTAIEGIGVTTVLVVLTEVGPSMDKFRTEKHFCSWLGLCPDNRISGGKVLSSHTRKVINRLSDALRMAAVTLQRSQTALGGFYRRMKARLGAAEAITATAHKLARLIYRLIKHGEAYLRQGLEDYEKKFQERKLYALRKAASHMGFDLVEKQQVVPPVS

SEQ ID NO: 385345 - protein, 494 aa, unidentified
MGACELESGDVALATIPIRKMTIGIAQTLLLIIEWRIAMPKKRTAGDRPELKPVNVGAAAIDIGSTMHMAAVNPACTDVPVRSFGTFTRDLHELADWFKTCGVTSVAMESTGVYWIPVYEILEQRGFEVILVNARYAKNVPGRKTDVSDAAWLRQLHSYGLLRGSFRPDAEIATLRAYLRQRERLVEYAAAHIQHMQKALMEMNLQLHHVVSDITGATGMRIIRAIVAGERNPDVLATYRDVRCHSSIATIRAALVGNDRHEHVFALTQSLELYDVYQAKMLDCDRKLEVLIAALNNKGAKPIGKLCKPRINTKQVNAPTFDVRTALYGVLGVDLTEIHGLGPSLALKLIGECGTDLKAWPSAKHFTSWLCLAPSNKISGGKVLSARTRRSSSRAPALLRLAATTVGRSDTALGAFYRRLSSRAGKSKAVTATARKIAVLFYNTLRHGMHYRDPGADHYEQQYRGRVLANLQRRAKSLGFVLQVIPGAPDPAVS

SEQ ID NO: 385346 - protein, 386 aa, unidentified
MQKLNDLSRSLAPLEPDGTLIAVIEMSQSSWLVAGIVPGVERQPLKKLAADEIALLKLLHRWREEAEKAGRRIERTAVAFEAGRDGFWLARWLRTRSIEAHVIHASSVAVSREHRRAKTDRLDTELLKRAFLGWLRGERDHCKMVAIPTSKDEDAKRPNRERESLVGEQTRIVNRMKAALIRLGIRGFNPKLKKAAGRLEDLRTPEDEPIPPNTMAELRRDMDRRRLVSDQIRQIEEARLDRLKQAPDDGPHAMLRLLARVIGVGIETADMLVQEVLARNMRDRRAIARYAGLTGSPDESGTKRREKGLARSGNARVRRGMIQLAWRFLIFQKNSTLAQWFRARTENARGTRKLMIVALARKLLIALWRLVREGVVPDGVVLRPTQ

SEQ ID NO: 385347 - protein, 398 aa, unidentified
MTDSASVVGGADTHADTIHVALITALGQNLADKEFPTTPQGYRDAVAFLSAQGPIDQVGIEGTSSYGAGFSRAVAAAGIDVIEVNRPNRAERRRRGKSDPLDAYQAARTVLAGEATSAPKNASVDAIRSLHNTRRSGVKARTATMNQITAMLVTAPDPIRAKYRALQALSLVTALARCRPTTTDPLNLAVLTALRTLAERHQFLTTQNDQLTTLIDSLVTQANPALRAAHGVGPATAAQLLVTAGANPDRLRSEASFAALCGVCPIPASSGKTTRHRLSRGGARNANNALYRIALDRMSSHRTTREYVSRQVEAGRSKPEIIWMLKRAIAREMFGLLTNTIEVPEYADLRATRQTKNITVTAAAGAFSVWPTVISRVERGLQRDDALADRYRTWLNAA

SEQ ID NO: 385348 - protein, 370 aa, unidentified
MSVRRILAKTIDTDLEYEAIGIDLAKNCVSAALLTTDGEVVCIDRLDYSELEKSAQALSSTTFAMEPCTEMNYLVQKLEAWGHRCLVIGGKNVQNYVENHFSGQKTDLNDAQALAFLAQDTQLRTIKAKDVEQQKYASLTTLREQYIKQYRQTIVSLKGICQAWGLNISKGISGKARLKDLIENHAAFPEELKESLVDMVTHAQTAQKALNKITKTLEELAKSDKVCQLIQTIPGLGSICSCRLRATVGDIKRFKSPKDFPAYYGLVPRSIATGHNERKGKITHRGDRTMRSLMVQAAGSLVNMATKGKLKSKQLTKWILKKQKEKMPWGKLVCAVAAKLLRIVRAVLISNKPYNPKIAGVAKCSLSKGS

SEQ ID NO: 385349 - protein, 316 aa, unidentified
MYLGIDVSKLTIDCCLISDGQNHEKRFSNNPKGFQLLTDWLKFHQMTSELHCCCEATGTYYEPLAHYLHQHYTVTVENPRRIKGYAIAELQRSKTDKQDARLIAQYCQDRKHKLKAWIPPAQEQKQLQELARYLDHLKQQRATETTKLHEAPDYIAPHIKITIENLSSQIRDIKKQLLQFYKSHPDYNTQRKRLKTITGIGEQSAAVLLSAYKRHPFSNQKQFTAYLGLDPRKNQSGSSVNGKSRISKIGNADIRKSLYMPAVVAYRCNVFSSFVNRLKAKGKPIKLILIAIMRKLAVIAFNLLNNGQDFEPERYK

SEQ ID NO: 385350 - protein, 310 aa, unidentified
MPTPPFQIIAVDVSKDSLQIKTDSDSFFVDATTEGLAKLLKFIEKFQSPLVVCEATGGYERHLINHLHKAKIASRVLNPARIRAFAESEGMKAKTDPIDAEMIRRFAIEKEVQPAPEPTALQQELTALMDRRSQITGEIAREKNRLQKACKVIANSIKRTLKFAEAELKRLEKSIREKIASNSTLTHYAKTMQSVSGVGEVTAWTILTYLSEITEIGRNQLIAMAGVAPYNKDSGKKNGKRSIRGGRPKVRRALFMAAHTAAYSNAVIKPYVQGLMGRGKPYKCAIVAAMRKLLLHLQSLLKKSQFSLAS

SEQ ID NO: 385351 - protein, 340 aa, unidentified
MKTMTRIGIDLAKHVFQLHGVDERGHTVLRRRISRVPLRPFVAQLQPCLIGMEACGSAHYWARELTALGHDVRLIAPQFVTPYRTKDKNDGNDAEAICEAVGRPHLRFVPVKDLGQQAVLTVHRARQLLVAEWTALVNQTRGLLAAYGLIIPAGIGAVRRTVPGLLATSELPALAREVFTDLVARLRALDDRIAAYDRRVTPLAQQTEPVQRLMQAPGVGPVTATAVVATVGHAHPVNNGRQFAAWLGVVPRHHSSGGSRRLGRITKRGDVYLRTVLIHGARAVMRQLAHRTDATSRWVLALKARRGFNKAVVALAAKHARIVWALLATGQPYQPAPVSS

SEQ ID NO: 385352 - protein, 410 aa, unidentified
MAVLEVALDPATVIVAVDPGKAFNRVWLSNGSGLLADPMSLSVSRDGISQLELTLNEHGADAPVIAIEATGSLHRPWVAELERRHPGSVRLFAPSETKAARAQLGSGRFKTDDRDCAALTYMARQGGGRRYSQESPVEGLRAAVRHRRGLVADRKVAQQRLHDQLNALCPGLSAPAGHGRSLALETPTGLAVLACAAAFAGRPPQLRSLMCRAPGRLTTSTAQYWLQRWRRCLPPPADADQRAHRLGRDLDRFRRLRTDIDALDVEVVELLAKTDGQILTTLPGVASVRAAAFAAHSLPIERFPDAEHLYSATGLAPALYQSATLNRRGRISRQGLAEHRDALMGIAWGLAQNSPSFAERDAQLRARGMAPIQARVALARHACRLAYRLLRTQQPFDEQRYRQGRLSGER

SEQ ID NO: 385353 - protein, 347 aa, unidentified
MTLTIVDEARLVTGGVDTHADNHVAAVLDSIGGLLGVQEFPATPAGYARLLGWLKGFGAVGLVGIEGTGSYGAGLARYIAAAGIRVVEVDRSDRQDRRRKGKSDPLDAVSAARAALSGRASGAPRGRDGQVEAIRALMVAKRTARAQRTQTINQARALLITGPDDIRTRFTGQTPAELVAELAALRPRPGSMVRYHTLLALRELGRRAQYLDGQLTRLDELITPLVTARAPGLLRLFGVGPDTAAVLLIAAGDHPGRLRSEAAWAHLCAAAPIPASSGKVARHRLNRGGDRQANHALWRIVITRMGSHPPTRAYVARRSKEGLSKPEIIRCLKRYAARETYRYLRPR

SEQ ID NO: 385354 - protein, 462 aa, unidentified
MEGKREEQRAPGGRRQLEGLPLLKADAAGMDIGSEKHWVCAPTPDGRCREIADFGATTAELLRMAEWLKERHVRSVAMESTGVYWIAPHEVLEAQGLQVLLVDTRQLAKVPGRDKKTDPTDCEWIQRLHSCGLLRGSFRPTEKICMLRTLVRDKAALVAESGDWVRRMQKSLDQMNVRVHRAVSDIGGQTGMAIIKAIVAGQRDPGKLAQLRDPHCRKSEEEIAEQLTGHWREDHLFSLSQALKMYEAILERISAYEKEILRKLGEMQADGQAGKTAPPLKNSNKARMIKKRGQEAKRQALYRMSGVDVTQIDAIGVETVEVVLSEYGPDLSRFPHEDEFISHVSLAPRVPSSGGKPLKKKKRNSPSTRVATALRMAAQSLQHSDTALGAYYRNVKRGNGPGIAAFAAARKIGTLIYRLLRWGQPYIDEGAEAYEKRYQQQRLRGLESRAKQLGYQLAPLPA

SEQ ID NO: 385355 - protein, 332 aa, unidentified
MMAQNDLVVAGIDVAKGKVDVCIRSLSQRQTFPSTPDGRRALIRWLRKYKVGKAAMEASGGYEREWAKTLRKADIEALIVDPKRVRNFARSAGRLAKNDPIDAEMIAWFAETFIEARGQAYDAAREELAQMVNARQALIDLQTSLKNRREHSTPDVVEKMQGRLLKQIALEIAKLEAAIAALIKATPRFAELAEIIESVPGLGEGTSAGLIGAMPELGQIGNKVAAALLGAAPYDDDSGKRRGVRHIQGGRRKVRNLFYMACMGAATRHNPVLKTFYDRLIAKGKEPKVALTACMRKLIVILNIMIARGEKWDASRYEVSDSARLPPSACTA

SEQ ID NO: 385356 - protein, 417 aa, unidentified
MKSKSQKIRSVNNETMIAALDIGKGFHYGYFRAPDGQEQTPFKFFNSRDSYQQFLQKLYRFKKRHRLKQVIVGFESTGPYAEPLLHFLRQQPVQLVQINPMHSKRIKELTGNSPNKTDCKDPRVIADVITLGHALTVVVPEKAAADLRRLTQARERAVKHRTAVINQLQHLVFVIFPEFLKAIKTISSKTGLYFVRHYPTPEAVAGLGREELCSMVRRISRGRIRPGRAQQLYQAALDSVGITEGRDGILEEIGYLVEQLHSCNAFIDRLEAKMQSALKQIPYSEYLLSMRGIGLITVAGLIGEVGDFRKFSTIAEITKLAGMDLFEVSSGKHKGQRRISKRGRPLMRKLLYFAALNTVRSNGIMHEPYRQMVDRGVLKTKALVAISRKLLAVMFALVRDQAQYIDGYRDHRLSIAA

SEQ ID NO: 385357 - protein, 383 aa, unidentified
MTGTEPHAWETGLMATITYVGLDVHKATVAVAVAQGGRGGEVRQLGVFENRSEILTKLAARLSKPGRRLSFCYEAGPCGYGLHRLLTGGGHDCVVVAPSLIPVKAGDRVKTDRRDALMLAKLHRAGELTPIWIPDAAHEAMRDLVRARATAGRVLSKARQHLQSFLLRHDQIYRGARAWTLAYRRWLTTVRFAHPAQQIVLQDYIHAVQDAEARLDRLTRQIEELLPSWAMAPVVAALQAMRGVALVVAVTVVAEVGDFRRFANARQLMAYLGLVPSEHSSGASVRRGGITKAGNVLARRVLIEGAWTYRMPARVSRKLHDRNEKLSPAIRDIAWKGQIRLCSRYRRLAAAGKPKVVVTTAIAREMVGFIWAIARIAQPALEG

SEQ ID NO: 385358 - protein, 430 aa, unidentified
MKSNTQNAKIEAITEKTLVLGIDIGSETHYARAFDHRGIEYSKKPFKFSNTEVGFVTFKEWVLDLKEKHEKDKVVPGMEPTGHYWFNLGKFLQDNEMKPVLVNPHHVKKSKELDDNNPTKNDRKDPKVIAGLVREGRYMIPYLPDGVYADLRTASNIRFQLQAELTRIQNRISRWFNIYFPEYKTVYGKPDAKSGMLILKEAPLPEDILTLGIDGVNQIWRDAKMRAVGKARAKALIEAAGHSVGSKEGAVSARMEIRMLLEDYESRNIRLQEVMTLIEELVNQIPMAEKLLEIKGVGIKTVSGFLAEVGDISRFNTPKELQKLAGLALVEKSSGKHKGKTTISRRGRKRLRYLLFEVAMSLVAKNPEFRELHNYYTTRRLNPLKKMQSLMAVAAKLIRVFYAILTKGVDYDPKKMVGDIRRPVVYLPAA

SEQ ID NO: 385359 - protein, 400 aa, unidentified
MRFIGLDIGRDYAHVAVVEGSGTSRRLPRVAMGDDFRAFAATLGPDDAVALEASSNTWALADLLGRHAGRVVVSNPLRTRAIASAKRKTDDIDAATLAELLAADYLPPVWQPDAATRRLRRLVSHRAGLVRDRTATRNRAIAVLARHLLRSPATDLFGVRGRAWLASLELPVEERIALDAALALDAVLSEQVRAAERAIAEAVVDDPRARRLLTIPGIGLVIAASILAVVGDIARFDRPAKLVSYLGLDPRVRQSGDRPAMRGHISRAGQAHARGLLCEAAHSAVRSPGPLAGFHARLKARRGAGVAIVATARKLAVLVWHILAKDEDCRFAPPVRTAFKHRELERLAGRERTRPPQRGATGSSHDLGRARLRGGHDPHQPALRQAIDRVRPDDTSMPGA

SEQ ID NO: 385360 - protein, 381 aa, unidentified
MPSMQLRRDDVIVGVDTHKDNHVAVAIDGFGGRLGDIVVPTTIAGFEELLAFCLAFVGSAGRLIGFGVEGTGSYGVGLARYLRNHGHDVHEIARPARAAERRLAGKNDTIDAEHAARQLLAGHGLSTPKTADGAVETIRLVKIAYDGAVQARTTAMITLKATLATGSEALRAELETLTDHKLILACAALEGPTPLPPVRRGAPAVVVPGDPDVAMRHVLSSMAKRWLALHEEAKAHAASLKALTAAAAPQLVEAVGVGYDTAAQMLITAGDNANRIKSEAAFAKMCGACPIPAGSGKTNSRHRLYRGGNRQANAALYRVVIVRMRWHQPTIDYVARRTAEGMSKREIIRCLKRYFARELFRLLLAPDAIAKPVNGELEIAA

SEQ ID NO: 385361 - protein, 313 aa, unidentified
MGSQRIIGIDVSKDEVAVAVHPSQTTWTETTTPTGLDALVRRLQQESPTLIVLEATGGYEWPVVAACTAAGLPVAVVNPRQVRAFARAIGRTAKTDAIDAHVLAEFGARVQPEARPVPDAATQALAALVARRRQLLEMLIAERQRLAQARTRVVRRDLQRHVRWLERRVRDVQAELGTAIQASPVWRVRDDLLRTVPGIGPVVARTLLAELPELGQLDRRQIAALAGVAPFNRDSGRWRGRRTIWGGRASVRGALYMAALVAARRNAVLSVFYQRLRTAGKPPKVALVAVMRKLLTIINAMIRTAQPWAPSRP

SEQ ID NO: 385362 - protein, 343 aa, unidentified
MQAVTTIGLDIAKSVFQVHGIDAEGNVLIRRQLKRRYVLAFFQKLSPCLVGIEACATSHHWSRELKALGHIVRLMPPAYVKPYVKRQKNDAADAEAICEAVTRANMRFVETKTPEQQSCLMLHRTRQLFIRQQTSVINAIRAHLAEFGIVAPVGRKGVEQLLAVVTDARDQRVPELARACVAALGAQLCRLKQQILEFDRRILTWHRSNEISQRLDAIPGIGPALATALVASVANPKAFRSGRNFSAWIGLVPRQHSSGGKHKLGSISKQGDRYLRSLFTAGALAVIRYAKLHGTKHRPWLTALLARRPTKVAAIALANKIARMAWAMMARGERYKEPVALAA

SEQ ID NO: 385363 - protein, 433 aa, unidentified
MSASTGCDAALWLCGSEKGRTMSAAVYRFYVGIDWATEKHRVVVLDAERRVVREREVCHEGAALESFADWLTQLAASAVETVAVALEVPRGAVVDVLLARGFHVFALNPKQLDRFRDRFTVAGAKDDRRDAQVLASALATDLATFRRLEPEHPLLLELRELSRLEDDLQEELGRLTNRLREQLHRYYPQLLHLVPAADEPWLWTLLERAPTPSIAQHLPRATVRTILSRHRIRRVDTDAVLATLRAPALPVAPGTVQAAQRHLAVLLPRLRLIHQQRAECATQIEGLLERLGESQEHRDVPILRSVVGVGRVVAATMLAEASRLLAARDYHGLRAQTGVAPITRQSGRRTLVCMRYACNPRLRQAAYHWGQSAARHDPVSRAHYERLRARGHSHARAVRGVVDRLLHVLIAMLTAGTLYDPARRRLPVGEAVA

SEQ ID NO: 385364 - protein, 401 aa, unidentified
MKTVLSVDVAKNKSMIMLMNSDGEIFIDTKEINHNLEDFEKVKEEIKEINPQNLTVFMESTGTYHLPVERYFKENGFNTLVINSLTTKNNYDTIRKTKTDKKDCYRLAKLFFVNEVEYHDLSKKDLYANLKAMTRQYFYLLQNNVSCKNRYKRLINICFPELEKIFKSTRIYDDTALNFIKEFPHAEIVKEKRIDVLYNNLYKTNGRNLNFYKKLATTIKTASINSYPGVDKEHEDVKNLSYMAKIVQNNNNIINELREKMIETAKQSPYYKIINSFYGIGETLTAEILGELGDITRFDSPKEIIAFCGLDPTIKQSGKSINVKGAISKRGNKYARYILFNCSQMVVKLGASNYPEHPVYIYYQNKKAEGKHYYESLTACSTKILRMLYSMCKNNKQFLEN

SEQ ID NO: 385365 - protein, 423 aa, unidentified
MLKIVYKVCCGMDVHKKFVVATVASTNESNITTYKTKQFNTYSQNLYQLKEWLAKQNCKDVCMESTVKYWIPIYNILEDSCNITLANPRYVRNIPGKKTDKRDALWLADLHKHGLVPGSFIPPKNIRELRDLMCYRFKLTNIRSGEKNRLQNSLTVSNIMLSSVVLDTFGKSSSAIIKYAMDHPDKLDIDYSQFLHKSMISKADEIKLAMQGNISKEQKSKMSICLNHYDYINYCISQLNNAIALVSSDFTPQIKIAASAPGVTIQSATSIISEIGINMSVFKDAKHLCSWAGVVPQSNESAGKKKNVHISRAGVYLKPILIQCANAAIKDKSCPYFRHRYECIKKRRGHKRAIIAIARMLLTCIYNMFLKNEPFDNSIYEEYLKRENSSKHINPNIDRIILFLKSQGFEINKINKDISPQPI

SEQ ID NO: 385366 - protein, 411 aa, unidentified
MEMLHPRCAGLDVHRDTVVACARNATAGVIALEVRTFGATTKELMALSEWLTEHSVTHVAMEATGVYWKPVWHVLEGSFELVLANAMHIKNVPGRKTDVNDAMWIADLLAHGLIRGSFVPPAPVQDLRALTRTRKQLVREHAAHVQRVDKTLQDANLKLGSVLTDIMGKSGRAILDAIVRGETDPAKLVLHIDRRVKASPEQIIEALRGKVTANHRFLLKLHLGQADGLQAAIDDLDREVGERLEPFRVSAQRVSQVPGIADRAAAAIVSEIGVDMSRFQTSAHLISWAGFCPKNDESAGKRRSTRLRKGAPWLKTVLVQCAWSATRAKNTYLQAQFLRLRARRGPKKAIMAVAASMLTAIYHMLKKGVDYHDLGPNHFSGADKTKSVNRLLRKIENLGFEVTGIREKVAA

SEQ ID NO: 385367 - protein, 373 aa, unidentified
MYYTTLFVGMDVHKENFTVCCYDMIQDKIFYTQKLEPDYNQILKYLTFVRKAFRKDVDFVCGYEAGCLGFTLHHQLTQHGVSCVILAPTTMMKPAGKKKIKTDKRDAALIARCLASNNFSPVHVPTTQDEEVKEFLRMRDDHRLALKKVKQQILAFCLRHGYSYTATKNHWTVAHIAWLRSLKPEGLYSEILSEYLLTFQALSDKLERLDWRIEELAAMKAYSEGVKKLSCFLGIKTHTALATMVEVGDFHRLASANQFASYIGLVPGEDSSSESVNRLGITKAGNAHIRTLLVEAAQSYTKGQVGYKSAALKKRQAGNTSEVIAYADRANERLRRKYYKMILSKSKRTNVAKTAVARELACFIWGMMTDRIA

SEQ ID NO: 385368 - protein, 445 aa, unidentified
MQPKGFLGIDVSKGYADFLLLDEHKGVLEEGFQLDDTLAGRQQLTILIQEWFSKGMKALHCGVESTGGYENNWYSLLKNVSKQMNVQVVRLNARAVKAVSEASLKRTITDAVSAYNIGSYLISFPEKITYTQVEAGQNNAFKEGRQHYSYIRMQIKQKVQLNNQLEKLLYQHFGEILLYCRHGIPGWLLRMLTRYPCAEAVLKAGIRNLCDIKGISAAKAQALIKKSNQSVQKINRQIQHVIAVTAKEILHKEQLIHREKAILIPQYQHAEEVKIVDSIKGIAVESAVLIMLEIEDISRFERSKKMTAYFGVHPTFKQSGDGTWGSHMSKKGRGEIRAVLYMAALSGIRCNPILKQLYARMRTKGMKHYQAMGVVMHKLLRIIYGVLKNKTNFDPRIDEENTRKATEKQKEQNSSEQKKYRYQIESAEAPISRRAAQKRKKQIAS

SEQ ID NO: 385369 - protein, 425 aa, unidentified
MDVMHERCAGLDVHKATVVACVRTVTGGKVNRECRTFDTTTAGLLALLAWLTESGCTHVAMEATGVYWKPVWNILSDGDFELMLANAAHIKNVPGRKTDVNDAMWIADLTACGLIKASLVPGEATWELRSLLRARKQQTREQTRDIQRIQKTLEEANIKLDSVISDILGLSGRRMIKAMIAGVTDPSKLADLADRRIKATREELRDALHGRLTDHHRFLLGIYLKQYDALDALIMEIDRRVDASVARLDEETKAQAGQCPFRSLIELLCTIPGVSTLGAMIILSEIGRDMSRFPTAGHLVAWAGLCPGQNESAGKRRSSRLRKGAPWLKTLLVQCAWSASKKKDSYYKAQFHRLKAKRGPKTAICAVAAAMLTAIYHMLKDGTEHQDLGARHFDHRSTKLKANRLVAQLSKLGFKVEIQPIAEAA

SEQ ID NO: 385370 - protein, 344 aa, unidentified
MDYYVGLDVSLRSVAVCVIDVDGKHVFERTVECEIEDIVRCLEVFSASELRVGFESGAMSQHLYHGLRAAGFDVVCMEARQVNAALSAMRNKTDKTDARGIAQVLRAGWFSTVFIKSREAHAHRVLLSSRKAIQKKCIDLANEVRGLFRIFGLRLPSRVDQGSFDERVRPLVEADPDLSHALLPLLDARAVLYKTYRELDRRVKQAASHDEICLRFMAIPGVGPIAALTFRAAVDDPARFTSSRTVAAHFGLTPRRYQSGEMDNPGRISKAGDSDVRAALYAAANAMMMRAVASSEIKSWGLRLMRRKGRRRAVVAVARKLAVIMHRMWADNTEFRHGKVEGAA

SEQ ID NO: 385371 - protein, 379 aa, unidentified
MDHAITDTPAETILHGALELSKNSWLLALQFPDRAQPSLYPISGGDTVGLMAKLTAARDRWAKMSGKAPSIVLCYEAGYDAFWLARFLKARGIECLVVDAASVQVNRRARRAKTDRLDVRMLLRALIAWDHGERHVWSVVRVPSVDEEDLRRSHRERDRLVRERTAHINRIKGLLFGQGIRGINVKSKYKTLQIDKLVTGEGRPLPPRLASEITREIARLALIQEQIVALERERDQAPTPCKVTEKKRVQLMCLTGIGPAIAAVMTREVYYRQFDNRRQVAGFLGLATSPHDSGDVERSQGISRAGRGQVRGAIIQAAWLWLKHQPKSAITRWFVQRTAGHSGRIRRIMIVAVARKLAIALWRFLEQGLVPQGAMLANR

SEQ ID NO: 385372 - protein, 353 aa, unidentified
MKSDKYMGMDVHQAMTVVTVLDADGKVILETMVATEAAPIIRLVQSLSGPLHVTFEETTQAAWLHDVIRHFVTEVVVCDPRRNKLLAEGSKTDKVDARKLADLLRTGMLRSVYHGHEVTRQLKELVRAYETLLVDTRRTMTRIKAIFRGRGIRTLGRGVYQPKQREQWLEMLTEPGIHQRAEWLYEQLNQLRVLRRKAKQAMLEESRKHRAVGLLKTIPELGSIRATFIVATVDTPHRFRTKRQFWSYVGLAVVTHMSSEYEMKAGQVVRRRKPLATRGLNHNCNHRLKEVFIGAATSASQHKSYESVRERLSHNGMRAEMARLTLARKIAAIALIVWKKGVEFDPKKLNCTT

SEQ ID NO: 385373 - protein, 346 aa, unidentified
MKQIIRIGMDTSKHIFQLHGVDAAEYPVLRKRLRRSELLAFFAKLPPTVIGMEACGAAHFWARELGQLGHTVKLIAPQHVKPYVKRNKNDGRDAEGLCEAMSRPTMQFVAVKTQEQQAALMLAGMRERLVSRRTQLSNAIRSYAAEFGVTTAKGLDKIEPLLAAIAANQTLPALARNLFVLHGREYAQLQAELKIIESKLQAWHRANVDSRRLAQIPGVGPIVASTLVMKAPDPHLFQSGRHFAAWIGLTPKDHSTAGKTRLGAITRAGDERLRSVLVAGATAVIQQARRGRGHPSPWLLALLARKSPKLAAVALANKIARIAWKLMTTGERYNNARMPDTSALAA

SEQ ID NO: 385374 - protein, 372 aa, unidentified
MKKIKEVSVLISVGVDVSKGKSTVCILKPYGEVLMSPNDYEHTQRDLKKLVDQMDSFEDEIHVTMEATGNYHYPIATYLKKRDYDVRIVNPLEMKRYRCQGIRNPKTDSIDAIMIAQYGIDFWFRSFQEYVASDERMELKTLGMQYFKTMKTRQDRYLVLESVIDRTLPGIGGVLNGYDKSTGKDKKSDFVYDFYHAEKITVYSENRFCDRYESWSKKKGYRYSEKEARQLYSIAKDSIPTLPSSKNTKLMIQDAVKILREVDSALYSILNQMNVIAKKLPEYTTVMEMKGVGISIGPRLIAEIGDPRRFHSAKALIAYAGIDAPPYQSGKFTGTERHMSKRGSRIMRKLGFELMDTINKHQKLYAGDPVCE

SEQ ID NO: 385375 - protein, 364 aa, unidentified
MSVYVGIDVHRKRSQVAVVGEDGRVQLNRNVVNGSQPMLGRLGGLPAGTPVAFEAAFGWGWLAGLLEDYGFRAHLVHPLRCKAIASARLKNDKVDAAILAQLLRADLLPEAWIAPPEVRALRALLRHRIQLVRLRTLLGNRIHAVAADHGYDRPAGYWSGPGRAWLACLDLPPASRQVVDDDLALIDALAGRITGLDEQVHQRATADPAVKVLTQLPGVGEFTALVILAETGDITRFGSARKLAAWAGLTPIVRSSDRTIRHGHITKQGSAWLRWALGQAAQTARRSPGFAATYQAIAARRGKQIATTAIARKLLTRAWHLLTDAGITGPQTSPPPRLPPGTGRQAPGELAKVHEPAPPPRTSC

SEQ ID NO: 385376 - protein, 382 aa, unidentified
MNTAATCNFEYTLERVLYMAIELDNNRWKLGFTIGFGQRPRERNVATRDTTGLEQEIQSAKRRFNLPENCRVLSCYEAGREGFWLHRFLLHTQIENLVVDAASMEIRRKRRRPKTDRIDLEKMLRMLIRYHAGDEKVWSVVRVPDVEAEDRRQLHRDRWALTGERNRHINRIKGLLATQGISLSVNGDLRKELNLVRKWDGSPLPPGLTARLLQEYDRLQLVEQQMKVIEQEQRQAIRRPEHPSTAMVRNLMRLKSIHIHTAWPFAMELFSWRQFRNSCEIGALVGLEPVPHQSGETSRDKGMSKCGNARLRSLAVEFAWQWLIHQPDSELSHWYEKRFGKGSRRVRKIGIVALARKLLIALWRYLEMGEIPKGAALKTITV

SEQ ID NO: 385377 - protein, 343 aa, unidentified
MKLTRIGVDVAKQVFQVHGVDRHNTAVWRRRLSRERWLQAVSEIAEPGCEIGIEACGGAHHWARQLQWRGYRVKLIAPQFVKPYVKSNKNDANDAEAICEAMSRPSMRFVAVKTIQQQDIQAMHRIRSGLIEQRTAKGNQIRGLVAEYGLVAPKELSSLRRAIPCWMEDADNGLSACFRQLLDGLWRDLRAVDDRISELDRTIADLAQADPDARRLQQLRGVGPIVATALIAAIGDARQFANGRQMAASLGLTPRQHSSGGKDRLLGISKRGDAYVRGLLVHGARSALRTAPAKDDRLSQWATRLAQRAHPNVACVALANKTARLAWALLRHGTHYQPALAAA

SEQ ID NO: 385378 - protein, 340 aa, unidentified
MKLYGAIDLHSTNNVTVLIDEQDKIVYEKRLPNDLALILKDLSVYQPRVEGIVVESTYNWYWLVDGLMAEGYKMHLANTAAIQQYEGLKYTNDHSDARWLAHLLRLGVLPEGHIYPRAERPVRDLLRKRSQLVRHRTMNLLSIQNLLTRNTGSGMKANQIKDLDIQQVDGLLPDRDLALAVKANLAVMSSAAEQIECLEHRVTELVELRPQFRFLKTVPGIGEILALTIMLETGDIGRFASVGNYASYCRCVGSEKMSNGKKKGKGNTKNGNKYLAWAYVEAANFAIRPNSRIKSYYQRKKAKSKTVIAIKAVAHKLCRACYYIMRDQVAFNMTKAFGQK

SEQ ID NO: 385379 - protein, 428 aa, unidentified
MVQENCNSLEEFRQLKEEIRGSQEHLIVGIDVAKDKHNAFIGTATGRTLYKRLIFDNDIEGFKMLLLHVEAIKVQHGLKKVVFGVEPTANYHKPLGDFLVNGGHTVVLVATDAVKKNRSLLDGRWDKHDRKDCANVADLISQGKCLYYEHVSLELRDIRNLLSFKRKLKKLEHGLRMRIRSHLVAQYFPELDRYCRWGDNEGLAIVRSCLNPAVIAGLEYDEFLRRIHTRGRSLSQQRRLCAVWQNASASIGCQVGPSVEFEARMLVNMLEQVRRSISDTESQIENVCLKFPQYKSLLSIPGFGPSISAMVLGAIGNPFRFNTGAQVLKLVGLDLSASRSGKYSDAITPSISKKGKSELRYALYQAAMIASTKNKYFIAYFTNKLRGHHKEKGIKTKMRVKLAAKMLIIAWTLMKKQEVFDPKYLNTE

SEQ ID NO: 385380 - protein, 321 aa, unidentified
MTYIGIDVSKDSFVAAYPAKSGYTTKSFQNTASGVHKFISSLPNECHCVMEATGNYSMLLLYLLQEKGIPASMENPQKIKHFARAMLSTTKTDEIDAKLIALYGEKMNPASYKIPSESVLLLKQKRTVLRQLKKQLTMMTNMQHSFTALPKQDPASKVALEQTIKFLRKQISKLEEEITNISNKEFRHQMALLTSIKGIGDEIASALIIATGGFTYFSSAKQISRFLGLCPTYQQSGTSVNVKGHINRNGDTYLRSQLYIAAVSSIRFNTACREIFERLKANGKSGKVAIIAVANKLIRQAFAVVTNNRPYEDGYVSSLAK

SEQ ID NO: 385381 - protein, 486 aa, unidentified
MAKRKMSTFERLNAGRMNRSQRRELGRRVAAGDPGLTVVHADAGGIDVGNESHFVAVPPDRDANPVREFGCWTESLNQMAEWLKSCRVDTVAMQATGVYWIALYDILEQHGIRVVLVNAQHTKNVPGRKTDVQECQWLMKLHTYGLVRDSFRLQQDMEYARTIWRLRDRHVKDAGREIQHMQKALTKMNIQLANVISDISGTSGQAIIAAVLKGERDPYKLADLADYRVKASREEVARSLEGNWRPEVLFELQQAVDSYRFAHRQIQECDEKLALYLANLPTRTLDIPAPSNPAPETAAQKRKKARKPRDNEPKMDLKVELKRICGVDLTSIDGINVMTAFTVISEVGTDMSGFQNENHFTSWMGLAPSKDISGGKTVGRGKKKVKNRVAVALRTAATSLLESNTHLGARYRHLRRQLPSYKAAVKAMARYLAVLIFRLLTRGEAWVDRGAAQFERRRAERELATLLSKAKAKGFALVPIADACQS

SEQ ID NO: 385382 - protein, 344 aa, unidentified
MSTVNQATVFVGLDYHAASVQVCALSPDGKVLMNRSCANDWRAVMGAVRKQCPGGVNVQAAIESCCGAAGLADELIGHAQWSVNLAHPGYVARMKQSPDKTDFSDARMLADLQRVGYLPKVWLAPEEVRELRRLVHYRQRLARERRNLKLQMGATLREARQKAPDTVNPWTKAWLAWLDSSAQLSHNARYIIDCCLRRLVSLAKELAQIDKRLERQTKDDPLVQKLLTIKGIGLITAVTLRAEIGRFDRFRTGKQLARFCGLSPRNASSGEKQADAGLIKAGNKELKALLIEAAHRLIRCEERWTALAARLSSRRQKGCVVVAAVANRWLRWLFHQVQPSCLRA

SEQ ID NO: 385383 - protein, 350 aa, unidentified
MLIIGADYHPGFQQIAFVDTETGELQERRLQHCEEAEKFYRDLAAQGMKVRVGMEASGHARWFERLLSELQFELWIGDAAEISARRVRKQKTDRQDAQLILKLMLKDDFPQIWVPSWENRDLRQLLWHRHRMVQARTRMMNQLQAVALNEGLRCKKKLFREAGREQLEAFPLAPWASQRRRDLLELLDQLNPKIAKLTQAIEEEVKRYPAAQRLRTHPGVGPLTALAFVLIIGKADRFQCGKQIASYLGLVPLEKSSGNQRRLGHITKQGSSLLRFLLVEAAQVTVRSLPEWRSKYYHLTMRRGRKIAKVAMARKLAVRLYWMMRKEWDYGQLTKFGSHAGKPGTGDGVK

SEQ ID NO: 385384 - protein, 365 aa, unidentified
MIWVGMDVHQASITAAVLHGDEQEPEVVRLPGDLNPARRLFRRLADKGIPRACYEASGAGFVLQRALERDGFHCEVIAPSLIPSRPGDRRKTDRLDAVHLVRMYRSGHLTAVSVPDEQQEAVRQLVRARLFRQRQIVRVKHRIMGILRTTGHRFTGTKSNWTKKHRAWLASLRRQSEGPLHTVLTGELEYLEYLETSQRALDAEIAALARRRPWRAPVEALCCFKGIKTLTAMTIMSEIGDIRRFRSPRQLMGYTGLMPAERRSGDRQRRGPITRAGNRYLRRVLVESAWTYSKRACSDLILNRRRMGQDPGVVAIAVRAQHRLQRRHYHLSRTKHTNKATTAVARELCGFLWSALWELEHAGLH

SEQ ID NO: 385385 - protein, 391 aa, unidentified
MTEDASRPAQAAIRTALGAIFVSLELSRRTWLITSLSPGGGEKMSKHAVPAGEVSGLLRRFAELRRKAAARTGRDLPIIVIQEAGLDGFWIHRVLQSEGIESHVVDAASILTSRRRRRAKTDRIDGETLVRTLMAYKRGEPRVCSMARAPTPQEEDRRRVCRERRTLMGERVSHVNRIKGLLSAQGVFGYEPLRKGRRERLEDLRTGDRRPLPVRLKAQIIRELDRLEVLLEQLKTVEAERDALLKPASDEAASPAAMLARLKGIGPETAAVLWSEGLFRQFDNRRQVAAYAGLAPTPWQSGSIDHEQGVSKAGNPRLRTAMVELAWLWLQNQPTSALSLWFHERVQRLGRRVRKTIIVALARKLLIALWRYTTAGVVIEGAVMKAAAAAN

SEQ ID NO: 385386 - protein, 401 aa, unidentified
MAFVAGLDWGGAQHAVCVLDRESGAVVDRFEVRHDAEGLRALARRLARFGDAADLPVAIERPSGLIVDALIAAGHPVVPIHPNAAKAARPRYRASGARDDRGDAYLLADLLRTDGHRFRPLAPVSEAIRALRALTRGRDDLVGTRVALANQLRSLLEGFWPGAAAIFADIDSPIALAFLARYPTPQSAARLGGKRLAAFLAAHAYCGRRSPAELLARLRAAPAGLAGEAEAEAKGELVRALVAVLAPLVARIAELSARIRHAVADLPDGRILMSFPRSGQVCAAAILAELGEDRARYQSADQLAADAGLCPVTYQSGRSRGVGFRWACNRRLRAALTCFADNSRHASPWAARVYADARARGCRHPHAIRILGRAWTRVLWRAWQDRTPYDPAKHPAAAAMG

SEQ ID NO: 385387 - protein, 343 aa, unidentified
MSIVILGVDLGKNACSIVGVDATGAVVLRRSMRRQTLIDYVSKLPACIVAMEACCGAHHMGRLFADHGHEIRLMSPEYVRPYVKAQKNDDRDAEGIAEAASRPTMRFVELKSQDQLDIQTLHRVRSRLVAERRSLINQLRAIMLERGTIFPVGRRKLELGVDALLTQEETALSSRIRRLIGDLRAEWRDLDEKIESLNAEFVELARNDAAARRLTSIPGIGVLNATALIAAVGNAGSFAKARDLGAWLGLVPRQHTTGGKPRLLGISKRGNTYLRTLLIHGARASLPSISRSDTPLGRWLKAMLERGVHRNAAVVALANKLARIAWAALRKGATFERSYPVAI

SEQ ID NO: 385388 - protein, 413 aa, unidentified
MDWVACVGVDWGDKKHAYEIRGGDGSKTSGTMDTTPEAIHEWVRSLRERFPTGTIAVAFEHGRWSLIYALMMYEFLALVAINPRASKAYRDALRLSGASSDQADAALLCEFAAKHPSELRVWQPEDPVTKKMRLMVESRRTLVDQRTGFTHTLTDTLKQYFPQALQWFAGETSRKLRAFLTRWPTLEHLGQAKVDDITAVLRTLRCRKVAAAAQELVEKIRTAVPLTRDQAIIDGYAIYAQSLAAIIEPLELQIAKYDKAIAAAWAVHPDRQIFDSLPGAGVVMAPRLAVAFGTDRSRYQAAHDVECYSGIAPVIEQSGNQRWIHARWGFPTFMHQTFHEFAQASIPYSAWAKAFYEDQRERGAGHHAAVRALAFRWIRIIFRLWTNRDQYDEELYIEALTNKQSPIVRRLVA

SEQ ID NO: 385389 - protein, 388 aa, unidentified
MIYVGIDVAKDKHDCFITNFDGEVLFKAFTITNNLDGFNELYQKIASVMDDVTKIKVGLEATGHYSYNLLGYLIDKGLPAYVINPLHTNLYRKSLSLRQTKTDKVDARTIASMLMSDLNLKSCSDTSYHNEELKSLTRYRFDKVKERAKLKSSVSRLVCILFPELEKLVPTLHMASVYAMLSEFPGAKQVADAHLTRLTNLLSESSKGRYGKETAIAFRNAARTSIGSNMPAKSLELKHTIKLIRELTSDIDEIEHEIKLIMDEINSPILSIPGINYRMGAMIIAEISDFSRFDSPDKILAYAGFSPSTYQSGQLDGAYARTEKRGSRYLRYALYNAAKYVDPTFAAYLAKKQAEGKHYNVALSHAVKKLVRVIYHLEKSKQQYIKAA

SEQ ID NO: 385390 - protein, 343 aa, unidentified
MKIASIGIDIGKATFHLVALDEHGSIVIRKKFSRKALLAYSAKLTTSLIGMEACGGAHCLARLLRDQGHQVRLIPGQFVKRYREANKNDYLDAEAIAEAVTRKNLRFVPIKTEDQLDVQGLHRVRERLVHNRTEVINQIRGFLLERGVTFNRGPLSLRKGMPDLLEDAEQNLTPSLRTLLSHLWQEWQGLNSQIDRISAAIEEVAESDAACQRLRKIPGVGPLVSTATVAAIGNGAAFKRGRDFAAWLGLVPKQHSTGGKAKLLGITKRGNRYLRKLFVHGARAVLLRVKYDTGGFGQWVHRLAARAPRNKVIVAIANKLARIAWVVLASGNEYQHQPVAAAA

SEQ ID NO: 385391 - protein, 426 aa, unidentified
MPYKIAGIDVHKRMLHVVVSDVEVDGEYEFTRQVFGSYPEALRSLAAWLVQQQVEEVVMESTAQYWKPVWGALERYWKPICEKRESARRRSGTLHLAQALSNRGRRGRKKDFGDAERLVKRLVANELTLSFVPDVEQRLWRTIMRTKYQLTRNRVQLQNRLEALLEEAHIKLSSLVSDLLGASARRMLKAIAEGETDPMVLAALADERLRATPERLRDALGVCQELNSVYRRLIEIALEELASIDKRIDELKQAMADLLRPHEDQVKRLVEVPGLSVDSAQQIIAEVGATASTFPSERHLSSWVGACPGEEESAQVNYSRLSPQGNRHMRRILNQAANAAVKHKGSIFQILYRRYVPRMGHNQTIGIIAHKLCRLIWKILHLGAHYEEHGPQVNETCQQRRTQRMIRNLRKLGYRVELTSESVLPA

SEQ ID NO: 385392 - protein, 349 aa, unidentified
MYYVGVDYHKRYSVATVLHSDGTMLTRKRLDNRLEAFRELLGSYDKAELEAVVEATRSWGIPVDILEQLAGRVILANPGEVKLIAKGRIKTDKVDSLALAKLLRVNWVPEAYLRPRANREHQLILRVRCFLVQLRTRVKNRIHDLIDRQDEPIREMAASFSDLFGKKGMVWLKGLDLGHPCGTLLDRLLAAYDALDAQVRQSDRLVAELFAADDDCKLLKKTPGIGTFFAVLIKTEVGTIKRFHSSARFCSYAGVVPSTESSGGKVWHGRIIKQSNRWLRWALVEAVIPATVADAGLRAHYEYYRRTKGSRVAKVVTARRLGCIVYRVLKEKQPFYERPVPSRGYRQAG

SEQ ID NO: 385393 - protein, 363 aa, unidentified
MKAEKKAVPRYVGIDLGKRTYEAAIVEKGKVQKSNGKTCVAGRQALYKKLRAGDKVALEAGNLAFIIAKEIEAAVGCTVYVLNPSQLAIIYGSMKKTDKEDALKLAHILEDCREERLPVVPVPGEKEMGRRKLLAGYRRGQQSRNREINRLHGLFLAQGITTMTKEDLSTGDARKEAVKALTGIEREEAEYLVACLDLHERRIEALYRKIQEESAGDEVIKRLQSVPGVGPMVAFAFVSHVAPERFENASQVSNYLGLVPRVYISGETARYGRITKRGNGYLRALLVQGAWALTRTKKGGKLKERYEYMTAEKSKSKKKAIVAIARRMAELLYTLMKDGTGYEARPFIRENKTEELVRLAMSA

SEQ ID NO: 385394 - protein, 403 aa, unidentified
MPHDQVRTKVNDLLATGASHAMALAALGDDNATLEKMRCVEDPSAQTLDYQGVSKQLQELEEVSMAIVGGLDLHRKQITFDVLDTVSGEVRRGRISPADRQLFRGWLTELTGQQVELAVEGCTGWRFVIEECQAAGVVAHLAEPAEVAGLRGRRRHAKTDRIDARHLRDLLLQGRLPECWIPPQVVLETRAKVRLYRDLADQRTGWQQRLHATLYHLGAPAQRDLLSGDRDRLTRIAGLSPAARQAITVALSMIAALDAQIEPLRAELIGFARRQPGCRAIAAEYGIGALTSVVIWSEMGDARRFTHSRDAVGHAGLDITVYSSDSKRSPGRLSRHGSPLLRWALYEAARCSARTASPDHAYYRQVADRLGGQRAALSVARKLARRCHHRLRALGEHALAPPA

SEQ ID NO: 385395 - protein, 457 aa, unidentified
MSNRSRRLSRGDRRRNDKLVRLRAVVTRQTAVLAFDLAADKQVCALADQDSRVLARRTVKAKAWQLAEAVQWGLVQAAAAGFSSVVVACEPTGHRWRVLDQIAEQAGVRLVCVQPLLVHRARESEDFTRNKSDETDAIIIARLVTELRCYLPERAEPAWARLRHLGARRAGLVTDTIAARQQVTDLLECAWPAALQAAGKPMKSKSWQAAMTVLLDRVGTSGDLSVIRRWGWNRFAAAVRRELPRHGTTRWYSTIVRAVFDAATDPTLAAAGVADQRAGALERARFALADLAHARAETAVVETRMVQVLDELGLAQLATSIPGLSAVGAAAILAETGDPTRFSSARALVKHAGLCPRDNASGTYQGKTGISGRGRPQLRLAAWRAAHAALRNNPVLAARYAHLTGRTDNKLTPTQARVAVAGSLLRQLHAVLTTGTAWDPAIAGGLPRSVKEAAPAA

SEQ ID NO: 385396 - protein, 413 aa, unidentified
MVGPLDAEPRTETRKFGTNVGDLEQLRDWLKENGITHAVMESTGSYWKPVFNVLEEALTVYLANPHQVKPRKGHKTDNKDGHWLAHLLRHAMIQPSFIPKREIRELRDLTRRRKKLIGAGTSEKNRIQKVLEDGNVKLGNVLSDVFGVSGQLMLNALLDGKAGPREIAQMAQRRARKKIPELVAPLEKHRMSDHHRRMIRFSVEHMELLEKQIAQLDEDIMAKIRDIGLVKPWELLQTIPGMQAISAATILAETGPDMKQFGDERNISSWAGVCPGNNRSAGKSKSSHTNKGNPWLRSALTECAQGASKKKDCFLKDKFWRITTKHGGKRAPAVMAVAHNLLRFVFQVLSTGKPYQAKAATPLEPQQRERMIRHHIRRLGKLGIAVGQRGPAPLRPRRRTTAAKDAALLTAST

SEQ ID NO: 385397 - protein, 352 aa, unidentified
MKILALDLGKYKTVACEYEAESGRHRFATVLTTPKALHDLIVDREPQRVVIEICSIAGWVGDLVRSLGIELQVANTSDERWQWRKVKQKNDRRDALKAAQLSAVNQLGPVHVPELTMRQWRALIAYRSKLVQRRTKVKNHIRDLLLREGQLLPRGRTAWTQAGMATLATMAQPFAVLDSEQLWRGELGIELAQLNELQQQIMTVQAKLDELAAADPRVQLLRTIPGVGPRLAEAIVTMFDDVTRFTTAGQVGAYIGMVPKQFDSGETQRSGRITRHGNRLVRSLLVEIAWASLRHNPWARQTFQRISGGKKSRRKIAIVAVGRKLLVRCWGMLRHQTPWHWQTSVAPQLTDG

SEQ ID NO: 385398 - protein, 343 aa, unidentified
MTQYVGLDVSLKETKVHVLDEAGNRIWRGRCATEAAAIAAAVRRYAPTAVRIGLETGPLTTWLWTALTAEGLPMICLDARHAKKALDMKVNKTDANDAEGLAHLVRAGWYREVRVKGRSAMLAKALLGARSQLLSMSLALENQIRGILKTFGRIVPKGAGGLFEKNVRALIMDDAEITAVIMPLLQARQMARGKCAALDRRIIRSVQGDATCRILMTMPGIGPITAVAYVAALEKPDTFKRSRAVGAWLGLTPRRFQSGEVDYDGHISRRGDGQLRALLYEAAAVLLTRVRRESALRSWGLLLRKRLGFKRAATALARRMAVVLHAMWKSATPFNPALGATTP

SEQ ID NO: 385399 - protein, 420 aa, unidentified
MELIVERPAALDVHNASVTACVRSPAVGGRREQFVEEFQTTARGLLALRDWLASHRVTQVAMEATGTYWKPVWAVLEDDFRCVLVNARDVKQVPGRKTDVSDAEWLCRLLEAGLLKACLVPPKPIRTLRNLTRYRKSLVRDRQREANRLHKVMQETGIKLDTVASKLLGKSGRSMLDALVSGTTDPEVLAELAEGRLRKKLPALREALAGRFDAEHALVVGQILAHLDFLDESIAQLSAEIEERIRPFASAVELLQTIPGVAQRTAEVIIAETGGDMTAFASAKHLVSWAGVCPGNDRSAGKRRSGKTTKGSKWLRGTLIEAAKSAARTKDTYLSAQYNRLRARRGANRASVAVASSILTAAWHMLATGEIYHDLGADYFARRDPERTTRRLIAQLEKLGHVVTLQPATSTTTTTDVVAA

SEQ ID NO: 385400 - protein, 332 aa, unidentified
MSDTPARFVALDVHKAYVVIGAVDGTQTVVLPPRRIALAQFWEWVGHHLLPGDQVVLETTINAWTFYDQLVPLVSRVVVANPAHIKLIAASMVKTDKRDTLVLAKLLAANLIPAVWVPPPEVRELRALVTHRQRLLKQRTMAKNRLQSLLHQHNLTPPGADPFAVTHQTWWETLEHTLPPSERLRAQQDRAVVAYLTTLIHTVEEELARVSQQEPWRDQVPFLIQLPGIGLIGAMTVLATIGDISRFASAKHLVGYAGLGARIHASGQMHRSGSITRTGRAELRTMLVEAAWTTGNRRAYPPSAQMRFSRGHCPRRRSNTSLAPSRSCRLAG

SEQ ID NO: 385401 - protein, 412 aa, unidentified
MQVIAERAAGLDIHQDTVVACLLIGAPEARPRKEIRTFGTKTKDLEELRDWLMTAGVTHVGMESTGIYWRPVYGVLEGLFELIVGNARHIRNVPGRKTDVKDAEWIANLVRHGLIAKSFVPPKPLRDLRDLLRYRRKLVENQAAERNRLLRLLETANIKLASVASDVFGVSGMAMLKALIAGDNSPDEMADLAKGKLRRKRVDLALALRGHVEDHHRFLLAIQLRRLEAAESDVKILDARIAERLAPYDVQMSHLMQIPGVDWLVAAVLIAEIGVDMRVFVSAYHLAAWAGVCPGSHQSAGKQKSVRVRKGNVHLRTILVGAAVSASRAKGSYLKDKFYRLKARRGALRAALAIAHKILIAAYHMLARGLGYRELGDAYLDQLDKTRTVGNLKRRIERLGYQVSLEPMKAVA

SEQ ID NO: 385402 - protein, 347 aa, unidentified
MEYFAGLDVSVKETSVCVVDADGRIVHEAKVASEPEALIALLSDWPDGLKRIGLEAGPLSQWLWSALAEAGLPAICVETRRMHAVLKAHTALNKTDRNDARGIAQMMRAGLYRAVHVKTLRSQKVRMLLRHRKLLKAKALDVENDLRGTLRKFGLKVGIASSGRFEARIRELVAGDGDLAAMAEPLLVVRRVLREQAAALHKRLLAIAREDAVAQRLMTIPGVGALVALGFVTTVDVAARFARSKSVGAAFGLTPSQYQSGETQRQGRISRCGDGSMRELLYEAAQAMLFRSRKWSWLKAWAMKVVRRCGARKGIVALARRLAVIMHRIWVDGTTFRAEREEVAVHV

SEQ ID NO: 385403 - protein, 408 aa, unidentified
MQVVHARCAGLDVHKKSVYACVICREGDGKHREVRSFGTMTADLLKLADWLREHAVSHVAMEATGVYWRPIWAVLQGHFELLLVNPHHIKVIPGRKTDTKDCEWIADLLQHGLVRGSFVPPTDIQDLRDLTRYRAELKQAQSTVSNRIQKLLEQANIKLSSVASNALGVSGRRMIEAIIAGEENPEQLAALAKRRLKEKIPELRLALQGYVRDHHRFLLREFLDEWKALAERVARVEEEIDRRIVPYEHAVTLWQSIPGMDRVTACNLVAELGVNMAQFPSAQHLTAWAGLCPGNHESAGKRMSGATRPGNKWVRRTLCQSAWAVTRKKDCYLSAQFRRLAARRGVKRAVMAVAHSMLIIAYTMLKTGNTYRDLGGNYLEQTNKQHLQNYFVKRLRRLGLNVTVAPAT

SEQ ID NO: 385404 - protein, 351 aa, unidentified
MKPTQYTTLDFSGQDLFIGIDVHKKHWHVALHLGQLALKSLSMDPVPERLLRYLRTQYPGARYVSCYEAGCFGFWIHDRLCELGIENRVVHPADIPTSDKERTYKSDRRDAAKLARELARGDLKGIYIPTPGEQQLRALWRLRFRLVGEQTRYKNRIKSFLTFFGYAPPPVRSHWSAAFLEGLRRLDIPGESARLVLDQLIEGLLQVRARIAQLTRQLMRLAPEAPFRLIKTLPGIGTIAALALYCELFHLDRFPSLDQLASYVGLIPSTHSSGSREDPGRLTPRRNRYLRSLLIEAAWVATRKDPAITAYFLRLKQRMKPQEAIVRVAKKLLRRLWVLWRSGTPYVQGIA

SEQ ID NO: 385405 - protein, 343 aa, unidentified
MQTVTTIGLDIAKSVFQVHGIDAAGNVIIRRRLKRRHVLAFFQRLPPCVVGIEACATSHHWSRELKALGHAVRLMPPAYVKPYVKRQKNDAADAEAICEAVTRANMRFVETKTPEQQSCLMLHRTRHLFIRQQTAVINSIRAHLAEFGIVAPRGRHGVEDLLDIVADPSDRRVPEVARACLAALGAQLRMLKAQILEFDRRIMAWHRSNETSKRLDEIPGVGPALATALVASVADPKAFRSARHFSAWVGLVPRQHSSGGKDKLGSISKQGDRYLRSLFTAGALAVIRYAKIHGTRHRPWLTALLARRPTKVAAIALANKIARMAWAMMAKDERYKEPAALAA

SEQ ID NO: 385406 - protein, 341 aa, unidentified
MKNLFIGVDFSKEKVDVAILFADGLVETAARVFNEFKTTVSGYRQLVKWVEQNSCSIDSSLWLFCGENTGDYSKGLCNFLYGKGYDMWLENAKSIKDASGLRRLKSDRADASMIAEYAMRNYDKAVMYEPLSESLTQLRELFLYRQMIVRHRCSFQVRRGEKRLTMEKSPVKTMISQSGRHIVSELNKEIEKIDKRIADLIKSDEELTKVFTIVTSVPGIGTQNAVCLMVYTDNFRRFNYDSRKIACYYGLAPFGKDSGTSVHSDPHVHYMANRQIKAMLTQAALAAVNFNPIMARYYMRLVERGKKKQVALNNVKNKLVHLVTAMVRNRQTFTPEYKISA

SEQ ID NO: 385407 - protein, 425 aa, unidentified
MNSTQNKKIEQAKETTLIVGIDVGSEKHYFRAFHWRGIELTRKPVAFSNSMEGFNSFCNSIVELMKKNELKEALVGIEPTGHYWFDLGQFMGEKNIKFVMVNPHHVHKTKELDDNSPSKNDRKDPRVIAGLVRDGWYFYSYMPTGVYAELWNASNRQFVLIEEQTRAKNRLQKWITVYFPEYKGIYTHIDAKGGLLVLKQAPTPEEIVRLGVEGIIKIWKDAKFRGNGHKKAMLILNATMKSIGLKAGLTEAWMEIQDLIEDYELQTKRLERVNDLIKELCQQVRLLEIKGIGITTVAGFIAEVGDITHFDSAKELQKLAGLELVADSSGKHNGKTKISKRGRKRLRYLLFEAAISVVGKNEEFKEIHRYYTTREKNPLKKMQSLIAVACKLIRVFYVILIKGISYDASKMLKDIRHPGEQLKAA

SEQ ID NO: 385408 - protein, 406 aa, unidentified
MFIGWDWATETHDVTVMDNSGTRVDRWELAHTEQGIEGTLKRLRKHGSPADLPVAIETTRGLVVDRLLAAGHPVVPVHPNAFHAMRPRWGASKAKTDAGDSHKLADYLRTDGHQLRRLVPTDPKTLQLQALTRQRADHVEAKVAAVNQLDAQLDQLWPGGKAVFADRDSDIALDFLDRYPTPQAAAKLTPARLEAWCKRRGYSGRRTGTQLIERLRAAPAAATRLGEATVATLIRVQVQLVRAMRATIRELDREITTAVETHPYAPLLASMPRIGQVNLGQIIGEIGPILERAESCEQFIAETGVVPVTRASGKSHAVTFRFATNRRARVAITTFADNSRHGSAWAAKIYADARARKKRHPHATRILARAWLRVIWACWRDGACYDPEIHQANGKINTTADTPLAA

SEQ ID NO: 385409 - protein, 429 aa, unidentified
MNYNTQNAKIASITEKTLIIGIDVGSETHYARAFSWRNYEYSKKPFAFSNDETGFAAFKEWMNDIAEKHGMEVIIPGMEPTGHYWLNLGAYLQEQGMKPVHVNPHHVKKSKELDDNNPSKNDRKDPKTIASLVNEGRFSYPYIPTGIYAEIRNLSNLRIQTQEEITRIKNRMARWFSIYFPEIKDVYRNPDAVSGLMVIKQAPLPCDIRELGVEGVNKIWRDARLKGAGIKRATTLVTAAEHSIGNTEAPRSARKEIRNLLEDYEGYKKRMDELMEEIEKTLSEIPYIDKLMEINGIGIKTGSCFIAEVGEIGRFDNPKQVQKLAGYAIVADSSGKHNGESRISHRGRKRLRYALYEAAISVIGKNKEFKEIHSYYRTREKNPLKKMQSVIAVACKLIRIFYTILTKGVDYDGQKMLNDIVRPEIQSAA

SEQ ID NO: 385410 - protein, 371 aa, unidentified
MEQLIKIHVGLDVHKDSITVAKALAGRGDPQLVGKVAHDIPKLLKVLAKIGSPEQLHVVYEAGPTGFGLQRALRARGYACEVIAPSKTPRKAGNRIKTDRRDALDLARYSRSGELTAIWIPDPADEATRDLVRAREDAVQARTQARHQLSAFLLRHSKVYTGKTRWCGVHDRWLAAVSFESSSSQTAFTEYWQAVKSGDARVQRLSAALLGAIGGWRFEPVVQALQTMRGIATLTAISLVAEIGDFQRFGSARQLMGYLGLVPSEQSSGDKTSRGSITKTGNAHARKLLTESAWNYRFAARISKDIHARQQGASEAVQAIAWKAQLRLSRRMAALNARGVQKNKVCVAVARELAGFVWAVGRQAQNEPRPS

SEQ ID NO: 385411 - protein, 421 aa, unidentified
MGKLIERCAGIDIGKRFLVCCVMTGAAHEEPRSEMRRFDTTVPGLKRLRNWLNEERVTDVVMESTGSYWIPVFNLLEGHVTVVLANPEEVKNRKGHKTDRKDAEHLADLLRHNHVRSSYIPAEPVRQLRDLTRRRVQLTQDATRERNRVQKLLEQVNVKIGSVLTDVFGVSGLHMLLALLDGRAAPEEIAGLARGSAKRKTPQLIEAIEGNRMSDHVRFLIRGCLRHLACLEEEVEELDAEILRRMQLSTFQKAFTLLQTIPGVGQLSAATILAETGPDLDSFPTIEKMASWAGLCPGNRESAGLQKGPQTTHGNPYLCTALVQCAWAPTRNRDSVFRSRFQRLAPRRGEKRAIIAVAHHMLIILYCMLKRGVPFLGAEHAPKQRRRERRAHHHLRCLRRLGFSVDIRLSSESTPPDTISR

SEQ ID NO: 385412 - protein, 423 aa, unidentified
MKVTFLTCCGVDVHKSFLVATIIKTTGGIDPSYLKKRFSTFNNSILEFKQWLLDNDCHDVCMESTGKYWIPVFNLLEDEINVTIANPKWVKAVKGNKDDTKDSKWIGDLFRLGLVKGSYVPCKAIRILREYTRYRYKLVSCRSSEKNRYQNALTVCNVALDSVVSDIFGKSSTSIIDYLLEQPGTSVNHEEIASKLLKSLKSKEDAVIESIEGYQMTDSQKYRMRLIRTHMDYITAEINDIDSSIEKMISSNPDYENAVRLLCTIPGVKRDSAIAIISEIGTDMTQFCNSKRLCCWAGLTPGCNETGGKKKSVRIMRAGVYLKPALVQCAHAAVKSSKSPYYKKKYESLVKRRGKKRAIIAIARMILTAIYQMLSTGEEWNPCDLYKVDMPAPLIEKQKTKAIKQAKKLLLREGIISESQLVS

SEQ ID NO: 385413 - protein, 366 aa, unidentified
MDTHKKQHKIALHYPCQEEIVEFTINNTVRDIKKLVKKITKQAPGGVEFCYEAGVCGFTLKRRIEQFDCRCSVIAPSLVPRKPGERVKTDRRDAKKLLMMFKAGLLTEVHAPNEHQEAARELTRLRETARENLKRIRHQLLKFLTRHGYVYSNGRHWTQRHITWLRTIEFTEPMLTSVFENYFNEMIYCIGRLEALDKEVELLASSQEYKEIVGLLRCFHGIDTLTAITTLTEIFEFGRFESPRYLMSYLGLTPSEDSSGDKQKKGSITKAGNKRIRRLLNETSWHYRYRYVPTAALKKRRKGQPQWAIEIADAAGRRLSKRHRHLVNNGKMPCKANIAVARELAGFIWFVVTQYHARKNTTKDVA

SEQ ID NO: 385414 - protein, 369 aa, unidentified
MVPTMPKRIALSNPDPAGDPLLVFGGVDTHADTHTVAAISHLGAMLGHESFPATPKGYRQLYCWLAGHGTLMRVGVEGTGSYGAGLAAALTSRGLELVEVNRPSRATRRARGKSDPIDAEAAARAALAGVATAVPKAHTGVVEEIRVIFVARRGAVQARTAAINTLHQMIITAPLQLRDQLQPLTRTQQITACAALRSSDITSPTRATKLALRRLARRIKHLTTEITDATDDITTLVQSHAPQLLTEVGVGPLSAAQLLITAGDNPDRMTSPATFAALCGTTPIPASSGKTNRHRLNRGGDRQANCALHTIVLSRLRHHPETQAHAAKRGAERKTELDIRRSLKRYLARRLFTLILNTSQAAHSTLVAA

SEQ ID NO: 385415 - protein, 391 aa, unidentified
MEYMYESCAGLDVHQNNVVACVLYGPLTSTRPKKEEKRFDTTTSGLNALKEWLSSFDCQVVAMESTGVYWKPIWHVLQADFQLILANPRKIKAIPGHKTDKKDAEWIAKLMRIDLIPASFVPEETIQDLRDLTRSRKSLVESCNKEKNKIHKILQTAGIKMTTYIEDIFGASGRNLLEMLINGEILTEETIAANVYTSLKKKIPQLVDALNGFVRSHHRFMLEQEYDMILAYEKTIKNMEERIDQVLENYQEEVAVLDELPGIDRKAAAVIIAEIGTDMTQFPSVEHLASWAGLCPGNNESSGKRKSTHITKGNAYLKKVLCQAAFAASRSKNTKFKAHFYRIKQNRGTQKAVVATAHSLLKTIYTLLSTKQHYQEFGEDYDKKKNVLEAS

SEQ ID NO: 385416 - protein, 381 aa, unidentified
MQGIFWVGMDVHKDTVTIAVFEGSAQGAREVVQLPNDTRRLHRYLGRLGDRGEIRACYEASGAGYVLERAMRRWGYGCDVIAPSLIPQRPGHRRKHDRYDAMELARLYRAGALVVVQVPTEAQERVRDVVRCRERFQQEILQTRHSILKFLRRRDRVFREGKHWTKRHWGWLQGLLKPGELAAEDHLVLSEYMGLLKFKLDRREELDRWIEEQALAPYYQVRVSRLRCFRGIDTHAAMVLVSEIGDWSRFARAEQLMSWLGLVPSERSSGDRERRGSITKAGNSRCRHVLVQAAWNHQHPPRVSAALRKRQVEQDPEVIAHAWKAQQRLYKLWGRISYKRGKHIAAVAMARELVGFLWAVMREMDAEVPVQDQATELAAAA

SEQ ID NO: 385417 - protein, 348 aa, unidentified
MTTMVEDARVITGGVDTHADMHVAAALDSVGGLLGVQEFPATAAGYASLLSWLRSFGTLAVAGVEGTGSYGAGLARHLAAAGVRVVEVDRPDRQDRARQGKSDPLDAVSAARAALSGRASGVPRGRDGAVEAIRALMVAKRSARQERTQAINQARALIMTGPEELRARFVRRSPAQLIEAIAALRPRPGDVPGYATRVALRELGRRGQFLDAQLDRLDELIGPLVTERAPGLLALHGVGPDTAALLLVAAGDHPERLRSESSWAHLCGVAPIPASSGKTAGRYRLNRGGDRQANSALWRIVIVRMSSHPATRAYADRRSEEGLSKKEIIRCLKRYVAREVYRQLRDGA

SEQ ID NO: 385418 - protein, 329 aa, unidentified
MQDFLIVGVDVSQDTLDIYFKPSGHSLRIENEAAGFKRLLSAIRKESTSDPRLMVVMEHTGHYSHRLEKFLLAKGIDFCKLSALHIKRSAGLIRGKDDKGDARRIAEYGWLRRDELQPHLVCTTEVAALKNLMSLRAKLVKDRAGYKTRLKGMLTTGTCTTGDLLFTVQTTVIKELTVHIKVIEQQIKAVIAASPLLKNNYELLCSIKGVGFVIAAYMISCTENFEKFASARKFNCYAGLAPFKHESGTSIKGKSKVSHLANKEAKALLGLAANSAIQYNEELKAYYNRRIKEGKLAWSSKNIVKAKIVARMFAVIKRQTPYQPLPKAA

SEQ ID NO: 385419 - protein, 415 aa, unidentified
MALKIVYKICCGIDVHKTFVVACIASTNDKGITSYESHRFSTYTSGLKTLLQWLIDRNCKDVCMESTGKYWIPVYNILEKDCSIVLAHPKYVKAIRGKKTDKKDAKWIADLFKHDLVSGSFMPPADIRQLRDLMRYRFKLTCFKSSEKNRLQNCLTVSNIQLGNVVSDTFGKSAQAILDKLLENPSDTSFDLEPLVYKSLKKKLPELRDAIDFFITPEQAGKLKIIKDHYDNLESRKAELEELILALAAPYQQELTILQTAPGISSNFTAIGIISEIGTNMEAFPSAKHLCSWAGLTPTNNESAGKKKSVRVSKAGCYIKPLLVQCANAVVKSTKHPEMRNRYLRLKKRRGHKKAIIAIARMLLTALYHMLKNGENYNPELYQKTDLPPVDREITIEQALMLIRNQGYKIKSATT

SEQ ID NO: 385420 - protein, 376 aa, unidentified
MVRFVNISNEGTWLMIVIGADIHKRNHTLVAVDGQTGAARGQLAIAASDVGALDALRFAIELDADRVWAIEDCRHVSARLERALLAAGERVIRVPAAMTGQTRKLSRQAGKSDPIDARAVALAVVRDGVQSFPVAFCDEHALEIRVLCDYRDQIICERTRMINRLRWHLVTIAPELEAQLGQAALKGPQICARLTRQLARLTPSPQLRVARALLRRVTEIVREERELLAELTTLLGAHAPQLLAQPGCGTVTAAIIIGHTAGAQRFPTDGHFARHAGTAPVPASSGKTQRHRLHRGGDRQLNRAIHIIALSRARTDPETRVYLDRKQAEGKTKREAIRCLKRHLARRIWRLLYTAEISGAPPVLITRSNPQIPTFT

SEQ ID NO: 385421 - protein, 405 aa, unidentified
MLYLGIDLHRKQMTVSLRNPNGDVLLRRQVSTRWPKVEEFREQLHQALAAGEKYVAVVEVCGFHDWLVHWLRQDERCEQVLVVQPLGHSKNKTDRRDAHGLSELLWVNRERLLRGQRVQGVRTVHQPRADDQADRCLTQARERLVRRRTQTLNQIHKVLRRRNLEWERPTKTFQTQKVRRWLKAVPLDPIDRLAVDQLLAQWDLWDEQLRAAEARIAERFQANPDARLLATMPGVSLFIGLAIACRIAPIERFPRGRSLANFLGLTPGCRSSGETERVGSITKVGSRMVRYLLAQVIVHLLRRDGTVRAWYQRIKRRRGSKVARVAVMRRTATILWRMLRTGEPWRPGKAGAEQPSAAGDPRPTNEPRDEQREPSHPSARVDEPGRSSTGSSSLLAGAEVTPCPA

SEQ ID NO: 385422 - protein, 349 aa, unidentified
MIVGVDVHKRTHCAALIDERGVVLGTLSFPNTTAGVRKLRTWLCAREAASAVVGIENGAGYGQLLCCSLAAAGHEVLNVPAWRTKRDRGRHGPGKSDPGDAVAIARVVLYDCEHLGPALEPELVRALAIVETLRRQTVARRSDAIQRLRALWTQFDPEAEAAVGNVLAARTLQRLRHLKLGSGVLGDTATSCLHLIVREIARLDAAVHELDKQLEELIALAGNPLADVCGAGLQVAATLIAQSGDVRRFRDSAAYARYGGVAPIPCGSGASAGRHRLHGGGNRQVNAALHRIAIVQAQWDPAAQAYLERKLAEGKTLREARRALKRHLANLVYRRLRRWAEDTLPAMTC

SEQ ID NO: 385423 - protein, 361 aa, unidentified
MQNSLTHIGLDVHQRSISVAVLRAGASRAEEDQIPNDPAAIRKLVSRWGDPAGLRVCYEAGPCGYGLQRQLASFGIDCQVIAPALIPRRAGDRVKTDRRDALKLARLHRAGELTAVKVPSTEDEAVRDLLRLREDLGEDVLRSRHRLSKFLLRHDRLWSGGESWTHKHVDWIRSQHFTDPALERSAGEHLEALELRLRQRDELTRELERIAALPPYALRVGRLACLRGVKALTALTLLVEVGDFRRFESAPSFMAFTGLVPSEHSSGESHRRGAITKTGNAHLRRVLVEAAWAYRVRPRHASATRRAGQPAALVAHAFAADRRLHARYWRLVERKKRTTVAAVAVARELAGFVWAVMREPA

SEQ ID NO: 385424 - protein, 335 aa, unidentified
MDREYVGIDLHRRRCVIVRKSAAGEKLSSVRVANDALGIASAVAEAGPNPEVVIEATYGWYWIVDLLQEQGATVHLANPSGLNWGTRRVKNDERDAVDLIDMLRLGRLPEAWIAPPATRELRELVRYRAKLVALRSGLKAQVHAVMAKEGVLPAVTDMFCQAGNAQLDTLELADAYATRVQSLRTLIDAYDHEVARLEAQIRSRLRGHRGYRAIQAINGIGPTMAAILVAEIGDVTRFRSAPALCSWAGLTPKHKESDTTVRRGAVTKQGSRLVRWAVIEGTVRYHGGGKLAADYRQIAERRGKNKATMAIARKVLTLIYYGLRDGEIRCLAHAA

SEQ ID NO: 385425 - protein, 383 aa, unidentified
MLLRSLSATRSPHPCKSRITGSARLADAVADGRPSHPGALKPVPQLGSSSVVPSNPNSRLGRKRARLRKEGVVMEQIYVGIDVSKDRLDVHVRPGGEAFVVSRDGKGLEELIDRLRTLAPMLIVVEATGGFETVVAAAIGGAQLPLVVANPAQIRHFAQAVGKRAKTDPIDAEMIARFAEAVKPTPHQVPDEAARLLGELVARRRQIIEMLVAERQREGRAGNVRVRKSLVRHIKVLERELQDISDDISGLIRSSPAWRETEDLLVSVPGIADKTSSSLLAELPELGRLTRRQIASLVGVAPFTQQSGRWRGKSMIAGGRAAARSAIYMAALSASQHNPVLKAFYRRLLAAGKPKMVALIAVARKLLVIINAMIRDKTPWRYA

SEQ ID NO: 385426 - protein, 393 aa, unidentified
MSWLQNGCAVLPAPDREWLYRGLPWLKVGLPSRCVLLALEKGARMPVMIGVDPHKASHTAAALDEHGQLLDQQRIPATLDGYRQLRQWAGRWPQRCWAVEGAHGIGRALAQRLVGDGEQVLEVPAKLAARVRVLSVGHGRKSDPDDAVSVAVAARHAPSLRQISVEDQATVLHLLTKRREDLVAARTQTINRLHRLLMDLIPGGARRNLTAKRAAALLAAVRPTGAPAVTRWELASELVADVRGLEQRIAVVEARIKAAVAQVNTSLLGLFGVGPVLAATFMGEVGDIGRFPTKHHFAAHTGTAPLEASSGQVIRHRLSRAGDRKLNHALYMMAMVQVRRPSPGQAYYQRKRAEGKSAKEALRCLKRRLSDAVYRCLLADQHLQPRPVGLRPV

SEQ ID NO: 385427 - protein, 402 aa, unidentified
MGYAGLDWADAHHDVAVIDEAGLQVATLRVAHSKEGLNELTRFLLGIAKTPEQMACIIETNHGLLIATLLDAGFPVYPVNPKTVDRRRKAAGAKTDAIDAYLLAKTGRADLVDLRRLQPDSPLVQELKALTRDQDALIESQTRLVNQLTACLKAYYPVALELFSKLHQRTTLVFLQTYPTPEQAMAAPVERLETTLRTGGHPTPTKTANTIWQRLHPPHLRADRITTRTKARLMLALVGQLLPLVEQIAAYDKEIRRLFLMHPDSGLFGSLPGAGKRLAPRLLAEWGDDRSRYTGSTSVQALAGTAPVAFASGNYAKAHKRYACLKPLRNALHQFAWLSTQREGWALRYYQRKRAEGKSHSMAVRALANGWVRIIYAVWSQHARYDTAIFEAAQLAHHQRAA

SEQ ID NO: 385428 - protein, 346 aa, unidentified
MLIVGCDYHPKWQQVAWFDTETGEIGEQKLVNGDGEAERWYRQLPVPSLIGLEATGNSQWFLDLLNQLGHEVWVGDAAEIRASYVRRQKNDRRDAGHVLKLLREGRFPRLWVPSAEQRDLRQLLIHRHKLVQIRSRVKNGLQHLAMNQGMQKKSRLWSVAGQKAFRQLPLVGWAQCRRQDLLQLLVYLDQQIAPLDQAAQQAAEQDPQARLLLTQPGVGPITALAFVLTIGDVTRFPRGKQVASYLGLIPREHSSGGRQRLGAISKQGNSFLRMLLVEAAQSVVRLDEGFRKQYAHRCHSKPKGIAKVAAARRLAVRLYWMLRTNTPYPEIVRIESSPRVPLVGKS

SEQ ID NO: 385429 - protein, 351 aa, unidentified
MVMIGADSHKRTHTLVALDDVGRRLGEKTVKATGAGHLELVRWAARWNEVTFALEDCRHLTRRLEHDLLAAGQRAVRVPTRLMAGARRGGRQPGKSDPIDAEAVALAALRHEDLPVAELDGPTRQVKLLVDHRRDLVAERTRIQSRLRWHLHELDPTLTVPSRGLRRFCVLDALAEQLAKFDGTVARLARAQVVRCRDLTVEINGLERELRDLVRELVPSLLALPGCGVLGAAVILGETAGAHRFRSKDAYARFTGTAPIPVWSGNTRGQVRLNRGGNRTVNCALHMIAVTQARGVGPGKAYVENLRARGKTRTAALRLLRRRLSDAVFTALRIDEKRSAVNTTEVVIAAA

SEQ ID NO: 385430 - protein, 352 aa, unidentified
MEDYRRRVGEGKTVFVGVDLHRVKWHVTVRTEDEELFSGTIPGHWDGLRRLLDRYRGCSIHVVYEAGYFGFWLYDRLIGYGAECIVTPPSLVPQEYGNRVKTDRRDSRKLAYLLAKGMLRRVWVPSQQERYHRQVVRRRRQLIGDRVRVQNRIKSELQFYGVELAGPRAPWPRVYVEKLWCIRFGDRWMQESFQRLLEQYDFLSEQIGKQTQLLRELSQTALYRERVEILRSVPGVGLIAAMELLVELQDVSRFRRAEQLAAYVGLTPSQYSSADKIRMGRITRAGKSGLRGTLVEASWRLISKDMAMRDKYERIKSRAGGKRAIVAIARTLLLRLRRILLDGRPYVLGLAG

SEQ ID NO: 385431 - protein, 360 aa, unidentified
MIVQGTSVGLDVHALSVVAHAVDEETGKVARARLCPDHGEVLGWLHQLRAPVRVTYEAGPTGFGLARAITEAGMQCLVAAPSKLQRPAGDRIKTDARDAAHLARLLRLGEITAVTVPSREMEAVRDLVRAREDARADLMRVRHRLSKLLLRQGIVYSGGTPWTCVHEQWLRRHRFDDIHLKAAFDHSFDAVLVATAARDRLDEQIMVVAASPRFADPVNRLGCLRGISALTGLALTVEIGDWSRFSGSSIGAYVGLVPCEYSSGNSRVQGSITKAGNTHVRRLLIESAWHHRKSYSTSGPTLLARWAKVDPALRARGHAGNRRLNKRWRSFTERGKNPLVANVAIARELAGWCWSLATMQ

SEQ ID NO: 385432 - protein, 456 aa, unidentified
MQKKELALQIVNPYAAGIDVGSRSHFVAVDQNAASVKEFGVYTKDHIRMIEHLRNAGITTIAMESTGSYWQTLFNALQSAGFEVLLVNGSQTKNVKGKKTDVLDCMWIQKLHSLGLLSGSFILSDHLQQLRTYFAHRQHLIEQTSKYTNKMQKALRLMNIRLDIVLNDIAGKSGMAIIHAILSGERDPNQLVALVSGRTKKSKEEIATSLHGQWRPDLLFELQSCLSLYKTFETAIIECDRQMEAALIAHAPVNDQPAEQPVLSLQGQKKRLVKRSPTFNIQQVAFAYFRTDLYEIPGVSHTTILCLLTNMGNDLPKFASAKQFAAWLRLVPNNKISGGRIISKKTPSGKNQIAHSLRQAANTIGNQKAHPLTPFFKRIAYRKGRIAAITATARKLAIIIWNMIAKHEPYRLFDYEKVNQKNKNQQLKTIQHRLSKLSLTTDELKTLFQRTSLLAT

SEQ ID NO: 385433 - protein, 336 aa, unidentified
MEIIKQVVGIDISKDTLVAGYGTLSINQEQKITPAKTFDNNLSGFRELISFTKKNKGTLTAPLYFVMEATGVYYENLAYFLTEKHLKVIVVLPNKTKNFSKTLDIKSKTDKLDAQMITQFGLERQMQPWQVPSPLMKALKALTREYNSIKRMAAQVKNQIHAKEYSYEPLKESLKRSKATLSVFQKQLKEIEKQLKELVQNDSDLNDRINKIDKIEGVGFMTVVSIVAETNGFALIENTKQLTSYAGLDVVHNESGLKKHKTTISKKGNRFLRQAVYMPALSACKHNQRLKHTYIRLVIKKNIKKIAIVAVARKLLVLIYTIFKKNVDYVPNYIPA

SEQ ID NO: 385434 - protein, 367 aa, unidentified
MKKHNIAKESAVTRKRANRKLTVGIDLGDRSSRYCILDEQGEVLAEGGLATTKKGFAQIFGSKPRSRLALEVGTHSPWVSRYLVDLGHEVIVANPRRVRLITDSTRKDDRLDAKTLARLARIDPELLSPVRHRSAQAQADLMVIRARAVLVEARTMLVNAARGLTKSYGERLGSCGTGQIREELATSLSEPLQNALKPLLGEVESISERIRAYDEQIEDIAKSRYPETALLQQVHGVGTLTALTYVLTLDDPNRFRRSRDAGAYFGLRPRRRDSGDSRPQLRITKEGDAYVRKLLVQCAHHILGPFGPDSDLRRWGLELAAHGGKNAKKRALVAVARKLAVLLHKLWVTGEVYEPLHVRKGSKAVAA

SEQ ID NO: 385435 - protein, 343 aa, unidentified
MNATSYGLDIAQTVFQMYWVDGQTGEISNRKFRREQLIRFLSTREPGRVVLEACGGAHWWARKIRDLGHEVVLLHAKYVRPFVKTNKTDSADAEAIWTASRQPGMRTVAIKSEEQQAILSLHRIRSGLVATRTRETNQIRGLLAEYGLHFRYGRKALMNELNVRMAEIESSVPALVWRGILRQLEQLRHIEQGIDEAERENLLWMKSNPQAKALEAIPGVGPLTATAAVAVMGSPHAFRSGRAFAASLGLVPRQRGTGGKVKLGGISKRGDPYLRQLFIHGARIVVTHSKQCPQWIGELLKRRPINVVVVALANKMARTAWALLAHHRAYDRKFMSERLSMAT

SEQ ID NO: 385436 - protein, 343 aa, unidentified
MSEQKIIGIDLAKTNFYLFSINAHGKPAGKIKLSRNQLLNWLAQQPKMTVAMEACGASHYWAREIRKLDHGVILLPAQHVKAYQRRQKNDYNDAQAIAEACQHGTIRPVPIKTLEQQDVQTFLKMRRLVSMERTQLINHVRGLLAEYGIVFSKGATELHQKLPALLEDAENELTDTMRTLLHRQYIRLITLDNELEWYDSEQKKYVRQDPVCKRLLAIPGFGPLVSQAIKSWMGDGKQFRRGRDASAALGLVPRQFSTGGKQVLLGITKCGDQYIRSMLIHGARAVLFRASEKTDSLSVWVNRIREKRGFNRAVVALANKLLRIAWVIIARNEMYLPATKQNQ

SEQ ID NO: 385437 - protein, 490 aa, unidentified
MKVRLGIDVACRADHQASLAGADGEFLWSGWRFRTTPEDLEALWAKVPDGADVQVILEPTRNAWVPLAAWLTARGAEVVMVAPEQSADLRDYYNKHTKTDRLDSRVLARLPLLHPEGLDPVGGPTPADPFRRAVRRRARLVKARTVAFSRLDALIELLGPAWAEVLGGGDYNKTALMVLERFADPRALKRFGLRRLSELLIKTSMGAWRRDKAEELLAAAEQTLTLWAGGGLDFGELAADIAGEVRAVRSINAEIDLLEGRIAPLFAAADRRPAAVSADGEILDDSDQAGIVASVPTLGGVLGAGILARFGDFDRFASLAGVRSFTGLVPKIDQSGTNTDGHGGPTKAGDPGLRQALYLAANQLRKVDPQFAQRYYRLVVDEGKHHNSALCHLAANLATRIAACWRRREPYLLRDTDGRPITQAEGRAIVQQRFKIGDDVRRARRRSSKAKQLKQRTGRRGKESTGAAPAAGPSTNNATAREQLFERNLG

SEQ ID NO: 385438 - protein, 344 aa, unidentified
MEYYVGLDVSLKSTHICIMDKDQQVVWRGSTDTQPSMIAEWLARWKDHLAKVGLETGSLTPWLYHELKALGVPVICMDARRAADALKARPEKTDKADAQALAEMLASGWYSPVHVKTMESHRLKALLGAREQLVNVKRQLYGQVRGLLRPFGIKISARAGGKRFDEEVRSSCNQHEALYIGISALLDTLARVEMELAGLDKKVRQITAASKPCWHLMSVPGVGPLTSLAFVVTVEDPGRFRTAKSIGSYIGLTPKRYQSGDRDVTGSISKQGDQMLRHYLYEAAGCLLTTVSAPSALRSWGLKLAKRLGPKRARTAVARKLAVLLLGLWKREEHFCAAHGSKTF

SEQ ID NO: 385439 - protein, 397 aa, unidentified
MIAVGIDISNAKSTVAVIDSDGTVLASPFTMAHTQPEMEAFVTYLKELGEPTTILMEYTGHYHYPVLKKLQGEGFPVCIVNPYQMKKYGDVEIHKAKTDKKDALRIAAYALEKSYKLVPYSSMEQKYEDLKFLSRQYSQRITYVAKLKVQLIALLDQTMPGITRILPLNSRNPEKCALLLFIRRFKSFDEIHRIGKARFLASYDVLAKKTSERSASSKGLSIYELAVDSITTRGEDPYIWLSQNQCVDLLSATQNAADEIISQMRNIAETIPEYKVLRAMRGVGDRLGPIILAEIGDIRRFHSGKALNSYAGNDAPPYQSGQFESRNRHISKRGSSTLRKACYEVMQALKLTKPQDDPVYLFMLKKEQEGKPFNVAKMAGVNKFLRIYYARAMELYK

SEQ ID NO: 385440 - protein, 364 aa, unidentified
MKKNTMQIPRWTVGLDVGDQYCHLAVVDRAGNLVERLRLKTEEQALRRHFSGPAVSGKTLRVVLEAGPHSHWLSRLIEEEGHEVLVANPRRLKLIYSSDSKSDETDAEALARLGRLDPSLLKPIKHRSLKSQADLTLIRSRAVLVRSRTQLVNHVRGVAKGFGVKLPKCSTESFARQVPDQLPESLKPPLMPLLATIQELTQKISWFDRAVEKKAIEEYPVTERLRQPKGVGALTALAYVLVLEDHHRYRNSRMAGAYIGLRPRRSQSGGTDPELRITKVGDRMLRSLLIGSAHYILGPFGEDSDLRRWGLKLAARGGKSAKNKAAVAVARKLATLLHHLWASGDDYEPLRNQRYIEKHQLAAS

SEQ ID NO: 385441 - protein, 331 aa, unidentified
MDKFTQFIGIDISKEYFDASIYVEVNKYKHNQFANTKKGVLEFMKWMKGEGCSIDNTLVCMEHTGIYKNILVRELQVKNCNIWVEMAYKIIRSSGIQRGKNDKVDSARIALYAKKNQEEATLFKASDQVIDKMQALLGQREMSIAHKTAMSTRTNELKDFNVDLYKILCTNEKASLKALEEMIKSIDNQLDILLKEHQEIKEIYDCVTSVVGIGPITAMFLICYTNRFTSFDDARQLASYCGVVPFEYTSGKCVKGKPKVHFMSNKKLKKLLHMCALSSIRHDPEIKSYYERKVGDGKHKMLVLNNVRNKLVQRICACVENRKMYVMKQVA

SEQ ID NO: 385442 - protein, 409 aa, unidentified
MEVVYERCCGLDVHKQTVVACVVVPGAGQPPHKEIRTFNTMTADLLELADWLTTLGVTHVALESTGVYWKAPWNVLESSFTLLLVNAQHIKQVPGRKTDVRDCEWIADLLRHGLLKASFVPDLPQRELRELTRYRTTLIRERTAERNRIQKTLEGAGIKLGSVASDVLGTSGRLMLEALVEGTTDAATLADLAKGSLRTKLPQLERALTGKVGAHQRFLIAHQLAHLDALDELIEQLSQEIAERLRPFQDKLERLDGITGVGLRTAEVLLAEIGTDVARFPSAAHLASWAGICPGNNESAGKRKSGKTGKGDVWLRTALTEAAQAASHTKDTYLASQYQHLAARRGKKKAIVAVAHSILCIVWHLLDHDCEYVDLGSRYLEERDRQQIQRRLVRRLEDFGYTVKLEPAA

SEQ ID NO: 385443 - protein, 317 aa, unidentified
MAQEAFCVGIDVSKPWLDAYRHPDGARERFANDGEGWAALLVWLAGVNIVRIGIEASGGFEQGVVKALMGHGLAVRILDPQRVRLFARARGRRAKNDRIDARVIAEFTALGDTPCKLPDAARDQLGELLGARQALLDASTQLGHVSAHLSDRGTAAVFKKQLAALSRDVVMLERRIGQAIAASEAFDKTAQLLMSAKGVGLILAATLIARLPELGRLDRRKICALVGVAPYDDDSGDASGARHIQGGRRLVRNVLYMATMGAATRHNPRLMAHYRQLRAHGKKPKVALVACMRKLLTILNAMVKTNQPWREPATIAA

SEQ ID NO: 385444 - protein, 321 aa, unidentified
MTEEAVYVGVDVAKDTLDVADSGSRETRQFLNDPQGIAQAVQHIASLQPAGIILEATGNLEMPLAAALQAECLPVVIINPRQVRDFARATGALAKTDAIDARILALFGLRIKPEMRPLPDKQAREMRSLLTRRRQLMEMLVAERNRLSRADEDVRPNIKDHIKWLKEALSDINNDLERRIQSSPSWHEKDNLLRSVPGIGKVVSTTLLIELPELGQLNRRKIAALVGVAPLNRDSGAMRGKRTVWGGRAALRAVLYMAALVATKCNPVIAAFYRRLLDVGKVKKVALVACMRKLLTMVNAMMRTRTFWNPEPARKSAVTEA

SEQ ID NO: 385445 - protein, 346 aa, unidentified
MMIIGCDFHPSWQQVSWLDTETGETGERKLVQASGDAERFYRQVAAPALIGMEATGNCHWLVDLLSELGHELWVGDAAQIRASYVRQQKTDQRDAAHLLKLLVEGRFPRIWMPSSEVRDLRQLLLHRYKLVIIRARVKNELQHLCLNKGVQRKRKLWSAAGQQILRELPLKPWAARRRDDLLKLMAMLDQQIEPLDQAVQEEAQRDKMALLLQTQPGVGPITALAYVLTMGDVSRFPRGKQVASYLGLIPREHSSGGRQKLGAITKQGNRMMRMLLVEAAQIAVRYDPEFRKQYLHRCHSKPKAVAKVAAARKLAVRLYWMLRTQQPYPAVVRIESSPRVPLVGAS

SEQ ID NO: 385446 - protein, 342 aa, unidentified
MEVSTIGLDIAKSVFQVHGVDGSGATVMRRQLRRRQLLGFFAKQPPCLVGMEACATAHHWAREIGALGHEVRLMPPHYVKPYVKRNKNDAADAEAICEAVTRPTMRFVAVKSTEQQGVLMLHRTRELMVRQRTMLVNAIRAHMAEFGIVARVGLPQVKALLAVIADEEDGRLPPLARTCLAGLAAQLMSLEREIAAAERRIHAWHRANEASRRLETIPGIGPITASALAASIADPSVFKNGRELAAWIGLVPRQSSTGGKERMGRISKQGDHYLRWLLVAGSMTVIRHAKRRGTANPWLAELIAGKPTKVAAVALANKMARMAWALLSHGGTYQEPVVAANS

SEQ ID NO: 385447 - protein, 383 aa, unidentified
MKAVCGLDVHKDSVYLCILSEFGELIEKVFGVLTYQLEEMRDLMLHHHVVEVSMESTSVYWIPIWRVLSPHFKLNLANPYFIKQLPGRKSDVKDAQWIAECTMKELIRGSFVPPETIQQLRQYDRRIFDLNEEIVRKLSKLDAVLQRCNIRLSNYVSNVDSKSYKAVVRAISQGITAPEELVKLIHGRIINHHGIDVITASLKGVVSLAEIDMISQLRDELDMAEAHKEKCQAKMLEICEREFPEELKRLQTIPGIKERAATSLIAEIGTDMNKFETANHLASWSGLKPRNDESNKKIKSRSITHGNVYLRKTIIECAWAAGRTKDCFFSRFSYHQTQVRKKNKMKVLVAVARKMLIAVWHVLHDNTIYIDFTTDRKTSRTKG

SEQ ID NO: 385448 - protein, 409 aa, unidentified
MDVVITRCAGLDVHQATVVATVRVPDDQGGRRVVTDTFGTMTADLLALRDWLQAYGVTHVALESTGVYWKPVYYMLEDAFTLLLINMQELKRVPGRKTDVKDSEWLAQLLECGLLRPSFVPPPPIRELRDLTRYRVQQVRDRSQEVNRLCKVLEDAGLKLTTVISDVLGKSGRAMLQALVDGTTDPAVLAELARGKLRKKLPELRRALQGRFRPHHAFLIEQIFAKIDFLDEALQRLTTEIDQRLVPFEPMLTALDTIPGVDRIGAISIVAETGGDMTRFLTAGHLCSWGAMCPGQNESAGKRRSGKTRKGNRYLRGTLIQAGLGAMRKNGSALQARYRRVARHRGHKKAVVAVGHQILEIAFYIMRDGVTYEELGADYFNRRHAEKAVRRHVKQLEALGFHVTIEKAA

SEQ ID NO: 385449 - protein, 419 aa, unidentified
MFKIFRKNCCGLDIHKTWIYACIGITDANGRTEYKQSRFSSFTKGLRELVEWLAKYDCIEVCMESASKYWIPVFNILEKTCLVTLSHPKYTKPQKGNKTDRKDAKFICDLFMCDMVKPSFIPPPDIRNLRDLMRYRGKLTNILTGEKNRAQNCLTVSNLKLDDVFSDVFGKSATSITKYILEHPGEDFDVAPFVDKRCKQPIEEIQAAVDGSISHEQTVKLREVLAHIDELNAHRETIEADILRLVAPYQRQLELIRTVPGFSANPMTAIAVLSEIGADMSVFPTAKNLSSWAGCCPRNDSSGGKRKSTRISRAGVYIKPLLVQVANAIVKSDKHPEFKERYRRLKGRRGHKKAIIAICRMLLTAIWNILSKMEPYSDEGYLVDRKTGETMIITKSQALHLLRMRGFIIKDDAPSEVYA

SEQ ID NO: 385450 - protein, 430 aa, unidentified
MEENFQLADSKEGRQKLKELIAGWQQQGLENLYCGVESTGGYENNWYSYLKAVFKDEKVYVCRINPRGVKAVGDASLKRTITDAVSAENIACYMIGFPKKIDYGIDAAPVNKGFKEGRQHITYIRMLQKQKVQLNNQLEKLLYQYFDEILVYCRHGTPVWLLSVLSKYPAAPMVLKAGIAKLSAIKGIGEAKAKAIVAKAKDNMHNVSTQIAHVIMVTAKEILHKEALIKEEKQYLTELYKESEEVMLLTSIPGIGTDSAVAIALEIEDVNRFETAKKMASYFGVHPTFKQSGDGLWGNHMSKKGRGDIRAVLYMASLSAARYNPVLKQVYARFRAKGMKHYPAAGVVMHKLLRIIYGMLKNKTKFNAQINEQNQQKSTEKQHNKEQKDKAGNKVKQQKKHRFQAVSTNAPISRRAEQKIRKQIASQASE

SEQ ID NO: 385451 - protein, 378 aa, unidentified
MIYVGIDIAKFTHFASAVNSDGEVLIKPFSFENSRKGFDLFLSKIKDFDKDNCLIGLESTGHYGDNLIYFLFNENYKIGLINAIQTNSLRNTNIRKTKNDKVDTFLIAKCISLGNYSLIKQKDIEIIKLRTLCRFREDVIFHQTKLKVQYVNCLDQIFPELYHFFKGNLHIKTCYELLRKYPSPQVIAHTRIDALTNILHSSSRGHYSYDEAVKLKDLAKNSIGINNPAISIQIKYLIEQLDLLKEQINGIDNNIKEIMNNLNTPILTIPGIGYVLGAMIISEIGDIKKFSNPHKLIAYAGIDPSVRQSGNFNASTTRISKRGSSHLRYAIYRASFLLVYNNDVIHKYYTTKRSQGKSHTNALPFLINKTALLYISSK

SEQ ID NO: 385452 - protein, 294 aa, unidentified
MGNASTLHVGLDVHKESIAVAYATEDGATAPVPLGAIGTRQCDIDALVRKLQSKSPRLVFVYEAGPCGYWLYRYLTRKGLTCFVVAPSLIPRKPGDRVKTDTRDAVTLARLARSGDLTPVYVPAVPDEALRDLARAREDALHDLNAARFRLKALLLRNDVRYVGRANWGAEHRRWLARFVFPTPAQQIVFQEYVRTVTERTELLQRLEAELLEQAKTWRLSPVVEALQALRGVQFTVAITTIAELGDLTRFDTPRQLMSYLRPSVDRSGQGLSSSGQGLRADPSPPGASARGHS

SEQ ID NO: 385453 - protein, 343 aa, unidentified
MDYFAGLDVSVKETSVCIVDDAGKIVREARVASEPEALLQVLANNTYRFKRVGLEAGPLSQWLYSVLTEVGLPVICVETRHMRAVLKAQINKTDRNDARGIAQMMRVGLYRPVHVKTLRSQKLRVLLTHRKLLQSKAIAIENDLRATLRNFGLKVGMIGTVKFEARIKELVENVPDLALLVQPLLIVRQVIREQLGILHRRLLAIVRGDDVCRRLMTIPGVGPVVALTFCVTVDIPARFRNSKAVGAVFGLTPAKYQSGENNRTGAISRCGDEMMRMMLYEAAQSMLVRSAKWSWLKAWAIKIARHRGMKKAIVALARRLAVIMHRMWVDGTEFRWTREVAVA

SEQ ID NO: 385454 - protein, 362 aa, unidentified
MKKVSRQLPKMEAGIAKPEMTLGLDLGDRYSHYCLLNGDGAVIEEGRVQSTEAALRRHFEGDPCLRIALECGTHSPWVSRLLTTLGHQVIVANARKIPAITGSESKNDRNDAEKLARFAAYDPMLLAPLEHRSPERQLDLNLIHARSTLVRARTMIVNALRGLVKSAGGRLPVCSTAALPVLAAAVIPAVLVGVATPLINQIALLNAQINGMDKQVEKLSTKYPEISLLRTVPGVGPIVAAAYVLTLERPDAAASNRSAGAFLGLRPGQSQSGASDPQRRITKTGDSCLRSLLVQSAQYVLGRFGPDSELRRWGLKLAATGGKRGKKRAVVAVARKLAVILHSLWRNGERFQPFPQSAASAA

SEQ ID NO: 385455 - protein, 323 aa, unidentified
MNDKDGINNEPQCFVGLDVSKAWIDAHSLPDAQIRRFDNNEQGLEQCLAWVQTQPACLCVAEATGGFETAVASVLASAGIPIAVVNAKHVRDFARAFGILAKTDRVDARVLALFAQKRRPPLRPLPDETQRQFIHLVDRRRQLVAMRAQEQTRLGLAKGLSRESLKAHIEWLSSAIADLDRELTVTVRSSELWLVKSKLLASVPGVGKVTLCTLLARLPELGQLDRAAIAALAGVAPFNCDSGQHRGRRRIWGGRADVRCALYMAVITAIRCNPVIKAFYQRLLSAGKPKKLAITACMRKLLTILNCMLRTNTSWNPELLSNT

SEQ ID NO: 385456 - protein, 369 aa, unidentified
MKKYITFVGLDVHKNSINVALADGDRNGDVRYYGAIGGTLDDLDRVVKKLSSSSRELRFVYEAGPCGYDIFRSLTDKGYACSVASPSHIGKKPAERIKTDRRDAMMLARLHRAGELTYVFVPRAEDEAMRDLTRAREDALKAQRVARQQLCGILLRLGFRYQGRTAWTPAHFRWLADQKMPTPSQQFVLQEYINAIDETTKRVERHTQQIEMLIPSWRLAPVVIALHSLRGVSLIVAATMIAELGDLTRFENPGKLMAFLGLVPSEHSSGQKRRLGAITKCGNSHARRVLIEAGQAYSYRARISPLLLKRQKGVSKEVKDISWKCQVRLCARFRRLTATGKNRNTVVTAIARELAAFMWSIAKQVPISA

SEQ ID NO: 385457 - protein, 411 aa, unidentified
MSSLLRESLAAETLVVAIDPGKVMNRVWLASGERGMIGEPLSLPTLREGVDELERLVAGSGVEGAPVIAVEATGSLHRAWTVELERRFPGCVRLFAPSETQAARTQLGARRFKSDDRDCAALVWLARQGLGRAPEEPTVEALLGVVRHRRQLVTELKVLRQRLHDQLNRLCPGLSAPQGHGRALDLLQPSGRAVLAYAAAFAGRAPSARALLARAPGRLTSANAEFWAQRWKSCLAPPADAELRAHRLGLDLERLDLLLAAHAAADEQLTALLARTDGQMLTTLPGVAVVRAAAFAAHSLPIQRFPTPEHLYSATGLAPASYQSATISRRGGISRQGLPEHRDALMAIAWGLSQASPAFAQRDADYRARGFTPIQARVALARHACRLCHALLRTQRPYDEERYRRARRRGR

SEQ ID NO: 385458 - protein, 355 aa, unidentified
MNSEKYIGLDVHQATISVAVLDSTGKLVMESILETKAATILEFFAGLRGTLSVTFEEGTWAAWLYDVLKPHVAKLVVCNPRKNALLKDGNKSDRIDAHKLAELLYLNKLSSVYHGETGVRMLRELARSYLTIVKDLTRVMCRLKAVYRSWAIPCAGRDVYYTRHRDEWLGKIKEAGVRRRAERLYQQLDMLQYLRQQARRELLAESRKHAITVKLRQIPSLGPIRSALAVALIQTPHRFRTKRQLWAYSGLALETRTSAEYCYVKGGLRRSKKQISIRGLNKDHNHDLKGLFKGAATRASVLPGPFQDFYQRSLAKGIKPTMARLTLARKIAAITLTLWKKGENFDADKLKSQAA

SEQ ID NO: 385459 - protein, 321 aa, unidentified
MATYIGIDVGKKSMQVYLPWIDKSLDITNNEAGFTKLVNKLTKHYEQLADLIIVFEPTGGYEKPLREFLKSNQINFTTVHPNKVRNYARAKGWLAKTDKIDSKLLFDYATVFSLPIKQDYNTESQQKLHSLIKRREQLILIKNQEIARLDKAANDTFIKKSLEEVLSCLEKQLTAIENVIKELCENDVEIKSKFDRLTAIPGVGIVLATTVVCEVPEIGNIDFRKLTSLVGLAPFARDSGQYRGKRSIFAGRSNLRKVLYMAAVASLRCNHKLKSYYDRLIANHKLPKVALVAVMRKLLAFMHALFKNNTVWLQHKENVSS

SEQ ID NO: 385460 - protein, 392 aa, unidentified
MRTIALDLGVRKIVLCEVRDGEVVHRKTARSLHELDDFLGAHTPPARVAFEACREAWHVHDRLIALGHEPVLIDTTRVRQIGVGQHGRKNDRLDAEALARALAQGRVPRAHVLSPARRQLRAELGARSALVMTRAQYVTTVRGLARSEGVMLPSCATETFVARVRAASLSPAMTAVVAPVLVVLDLIGAQLVEVETRLETLARTEPVIALLATVPGVGLIVASTFVSALDEAGRFRDGHSVASYLGLAPSENTTGMAGRRLGSITKHGNPWARAALVQAAHTILRVAPAEDALRLWGEAVIARRGKMIGVVALARRLAGVLWAMWRDDRPYDSARLAARSAEGLREDAYATLSQADRLAAIADAEKKIYARTMPRRPRRAPARKTTEVTRRG

SEQ ID NO: 385461 - protein, 454 aa, unidentified
MAKPKKKSKFNVHSLPAHLRHINLNAAGIDIGSERHLVAVPEGRDKVSVREFGAFTADLQALADWLRQGGVTTVAMESTGVYWIPLFELLDRQGFEVKLVDARHVKNVSGRKSDVLDCQWIQQLHTYGLLAGAFRPNDELCVLRSYLRQREMLTQTASMHIQHMQKALQQMNLLLHNVVSDITGVTGMKIIKAILAGERDPRRLARNRDGRCQNSSATIAKSLVGNYREEHLFALKQAVDLYETYQAKIADCDEAIIKQVEKQPDLTDDTVPPGEKHIQARERIRSGVDVRELMFKKSGVDLFAIPGLAADTLLTLTSEVGVDMSPWKTIKHFTSWLGLCPGTKISGGKVLNKKTKRHPNRATQAFRLAAATQARSKTALGAFYRRIKSRTGGKQAITATAHKIARIYYTLLTKGTSYVELGQQAYEQKYQERRIHHLKTQAKLFGFQLVPCAT

SEQ ID NO: 385462 - protein, 319 aa, unidentified
MAQNSVVVAGIDVAKDKVDVCIRALSLRRTFAATAEGLRELASWLRRQKVGKAVMEASGGYERDWAKALRNAKIEVRIVDPKRVRSFAQSAGRLAKNDTIDAEMIAWFAETFDEARGQAYDATREQLHQMVNARQALKDMQTKLESQGEHALPATVQRIHARIIRTITVELVKIEAAISALVQTTPRFTELAEIIESVPGIGRTTAAVLIAAMPELGQANNKIVAALLGVAPYDDDSGRRRGERHIKGGRRRTRNVFYMACLGAATRHNPVLKAFYDRLVAKGKEKKVALVACMRKLISILNIMIERRQKWDASRYALS

SEQ ID NO: 385463 - protein, 489 aa, unidentified
MMHDREKSDSAIVAGKPTNKAVSTTAESVERRAEAKGNASQQSTRRTQGRVSVSQELDRIRQALTENALPSHPRWEKLWGGTAEVVAPSSPIRTDGGCPVQVNDLSRSLAAFDPISTLVVVVEMSKASWLVSGVIPGVERQPLKKLEPDATALLRLIERWRSEAVRADRPIWRIALAYEAGRDGFWLARWLIARGIEAHVIHSASVAVSRERKRAKTDRLDAVMLMRVFLGWLRGERGHCGMVAIPTMEEEDARRPSRERESLVNERSRIVNRMKSALARLGIRGFKPHLRRAPERLACLRTAEGTGLPANIIEEFRRDMARLALVREQISSIEKTRAERLERAPDTGPYAMVRLLSRVIGIGIETADMLVREILSRKLRDRRAVARYAGLTGSPDESGLKSREKGLAKAGNARVRRGLIQLAWRFLMFQKDSALARWYRTRTEGPSGARKTTMIVALARKLLIALWRLVTTGEIPDGLELRPAARAIL

SEQ ID NO: 385464 - protein, 369 aa, unidentified
MTDLTLFVGLDVHKKTISVAVVEAAAGAVVRFYGTIANTPDSVRTLCRKLSKDGQQLHFCYEAGPCGYGVHRQLTRLGHRCDVVAPALIPRKVGDRVKTDRRDAMMLAQTLRAGQLTAVWVPDEAHEAMRDLVRLRTQAMRDLRKARQQLLSFLLRHGRNSPYGHWTKMHRRWLGELVFAHPAQHLALEEMLQRIERAEALCDRLKAAILELVPQWSLAAVVQAIQALRGVSLIVAAAIVAEVGCFSRFESPRALMAYLGLNPSEHSSGATIRRGAITKTGNTLARTCLVEAAWTYRFPPRVSQIIRDRLKELPEPIRAVAWKAQVRLSARYRKLTAAGKPGPKVVVAIARELVGFIWAIARMVEPKFA

SEQ ID NO: 385465 - protein, 418 aa, unidentified
MNEDGITRGPRRYIALDVHKKYSVIGGVERDGRVVLHAVRVEHADLEGWLKKNLRSTDHVVLESTTNAWHVYDLLSPLVERVVVANPAKVKQIANARVKTDVRDTFILARLLVANLVPDVWVPPAHVREMRQLLSQRRQLVETHTQIVNRMHSVAHRHHLKHERGKRFNEKNTVWQKDKRLSKMEQFQLELEMENQVYIEKQISRIGKEVAKMSHQKPWAESMTYLMQLPGFGVITAMTVLAAIGDIQRFRSARHLASYSGLTGGLDQSGTHLVQKGITKEGRKELRWAMVEVAQRAVKSDPHWKRKFQGMEKRMHRNQAIVAIARQLLELVWYVLTRRQPYRHFSQERIAYKYLTWAWQMDEAARDGLTRQQFTRYYLMRLGIGQDLTRIALDPKHPRKIATETELLALRPELHHIE

SEQ ID NO: 385466 - protein, 342 aa, unidentified
MQITTIGLDIAKNVFQIHGIDAAEKIVVRKQLQRSQVLEFFKALPPCLVGMEACATAHYWARELTKLGHQVRLMPAKDVKAYVKRNKNDAADAEAICEAVRRPTMRFVQVKSAEQQSQLMLHRARDLLMRQRTQVINALRAHMAELGMTAAQGNAGLRELLAIIAGAADERLPAEAHASLIVLAAELQAMRTLIASIEKRIIAQHRSDEASKRLRSIPGIGLVGATAIVATITDPKAFRSGRDMAAWIGLVPRQDSTGGKQKLGPISKQGDRYLRRILVVGAHAVLKLARQKPEKYPWLTQLLARKPFKVVAVALANKMARIAWALLVKGGSYRARALVAAA

SEQ ID NO: 385467 - protein, 343 aa, unidentified
MNEVTTIGLDLAKNVFQVHGVDASGRAVVRRQLRRSQVLPFFEKQAACLVGIEACATSHHWAREIAKLGHEVRLMPARYVKPYVKRNKNDAADAEAICEAVTRPTMRFVEVKTEEQQSVLMLHRTRQLFVRQRTTLINAIRAHMAEFGVVAGIGRNGVERLLRLIDGGVDKRVPPAAEECLRALQTQLALVKRQILEADRRILAWHRSNELSRRLEAIPGVGPLIATALVASIPDPHAFGSARDVSAWIGLVPKQNSTGGKERLGGISKAGNRYLRSLLVVGALSVIRRAKQVGYTRRAWLAELMARRPVKVAAIALANKIARIAWALMVHGTRYREPVPQAA

SEQ ID NO: 385468 - protein, 404 aa, unidentified
MQVVYLRSCGLDVHKKKVVACVITPEGRETRTFGTVTHDVLELTDWLVEKGITHVAMESSGVFWKPIYNVMEGLGLTVLVVNAQHIKAVPGRKTDVKDAEWIAELMQHGLLRGSYIPDRSQRELRELVRYRRSLIEQRAQVVNRIQKVLEGANIKLSGVATNVVGVSGRAILEAMVAGINDPSLLSELAKGRLRKKLPELNDALAGLMGHHQRLLLSSQLRHLDFLEVEISGLSKDIVERMRPFAEAIQRLDSIPGMGQRTAEEVLAEIGPDMSRFPTKAHLASWAKLCPGNNESAGKRMSGRTGHGNRWLRASLVEAAWGAAHTRDTYLSSQYHRIASRRGRKRAIVAVAHTILVTVYYLLRDGISYDDLGGNYFDERDRQRSIHRAVHRIERLGFNVVLEAV

SEQ ID NO: 385469 - protein, 347 aa, unidentified
MRFYTKQHRYYCGIDLHARTMYLCVLNQQGEILLHRNMPCSPDFFLKAIAPYREDMAVAVECIFTWYWLADLCSKENIPFVLGHALYMKAIHGGKAKNDKIDAHKIAALLRGGMLPMAYVYPALMRSTRDLLRRRMHLMHKRSELLTHIQNTNSQYCLPQFGKKIAYKKNRQGVAEHFPDSSVRKSIEMDLSLIDHYDKLLTEVELYITQNAKIHDVNAFNRLRSVHGIGKILALVILYEIHEIDRFPTVQDFVSYARLVKCAKESAGKRHGSSGAKIGNVHLKWAFSEASVLFLRANPAGQRYADKLTSKHGKAKALSILAHKLGRAVYYMLKRDKAFDMNKFLNS

SEQ ID NO: 385470 - protein, 356 aa, unidentified
MSRDIKYIGMDVHKEAIVIAVLNSSGQLVMESIVETKASSLLQFLHGLRGELHVTWEEGTWAAWLHDLLQPQVHQMLVCDPRRNALLKEGNKSDKIDAQKLANLLRTGMLRPVYHGEHGLRTLRELGRSYQTISKDLNRVMNRLKALYRGWGIACSGTQVYAARYREEWLRKIPHAGVHRRAELLYQQLDGLQALRRTLRPELLAESRKHKAAKLLRQIPCIGPIRAARLIALMQTPHRFRSKRQLWTYSGLGIETHDSAQYCYVNGQLQRSKKPQQIRGLNRNHNHEMKDIFKGAATRASCGVGPLRDFYVGLLDKGMKPEMARLTLARKIAAIALTLWKKEERFDAEQLKTQAA

SEQ ID NO: 385471 - protein, 482 aa, unidentified
MKSKPQEKIKKATNHPTEQHWHEMNRKQRREMIRKMQSEDLSLEVIHPDAAGIDIGNESHYAAVPPGRDSQPVRRFGCTTAELKAMATWLQQCAIRTVAMQSTGVYWVAVYDILEQAGLEVYLVNARDTKNLPGRKSDVQESQWLMKLHTYGLLRNSFRPSQEIRVMRTYWRQRNDLVQSASRHILRIQKALTQMNLQLANVLTDISGATGQAIIKAILAGERNPHKLAEFRDPRVKASEEQIAQSLEGNWQPDLLFLLKQEQDGYAFCQRQIVECDRQLAQYLQQREDRSQGAPLPEEKRKGRLKKKRANKPRFDLRKRLFRMTGTDLTRIDGIDVMTATTVISEAGYDMSKWADENHFVSWLRLCPDNRISGGKVIGKGRLPTNNPISIALKMAATTLRQSKTYLGAQFRRLRTRLGAPIAIKAMAAKLARLVYRILRYGMKYVDQGAAFYQAQHRQVQIKQLKWKAAKLGFQIVQAPAA

SEQ ID NO: 385472 - protein, 411 aa, unidentified
MDKIYDKCCGIDVHKKLIVSCFRCGKQQEVREFGATTRELLELADWLKEGGCEMVAMESTASYWKPLYNILESSDLKAMVVNARHMKAVPGRKTDVKDAEWIADLLQHGLLQPSYIPGKDQRELRELVRYRKSLVGERTRELNRLQKMLEGANIKLSGTVSDINGKSARSILEYLLTGKSIDGSKYDEMYEQKIIAHNLKATKEQIVDDLNGVMSPLQRRMMKELLVHLDELNVHIKNLNDEIDNFMKPEEKQASQAIQDVTGIGNTSAQAIISVIGSDMSRFPTDRHISSWAGLCPGDNESAKKRKSGKTRKGNALLRTTLITCAHAAVKNKKSYFYAQYMRISAHRGPKRAYVAVAHSMLISIYHILKDGVMFKDLGADYYNQFNKERKINAYLKKLKTLGWEAPIVAA

SEQ ID NO: 385473 - protein, 338 aa, unidentified
MAIVTIGIDLAKNVFAVHGVNEAGKPVLVKPTVARGKLLELIASLPPCTIGMEACSGAHHWARLFMAHGHTVRLMAPKFVAPYRLSGKQGKNDAADAVAICEAVQRPHMRFVPIKTVEQQGQLCIHRVRQGFIEQRTATINRIRGLLSEFGIVLPLKATTIRREAMAHLEDLPGWANTVIGDLLSEVSHLDERVEQYDQHIAQIAKEDSRTQQLMRLPGVGPTTATAILAMIGNGHEFKCGRQFAAWLGLVPGQYSSGGKARLGHITKAGDSYMRSLLVLGARAVLNSAKNKSDSTSRWAVALAERRGYWRAIVAIAAKNARMAWASLTLGERFAMPA

SEQ ID NO: 385474 - protein, 467 aa, unidentified
MKNNDYNLFVGIDVSKGKADAAVLAVPELRSVKPRFLRKKLSFKFIKSDVVEFLNTVRKYSSDPHCLHTYFALEVTGIYSTNVYSFIKENCNSDEEIHQLNTDFVNKWRESHNISKSDPLDAQTISTIIGTDDDVRYVSDSVFENKNGYQDLKALVHRHYQIKKLHSQETNRLIALCDCYFPELQYVFEPKSAAFLALLSQYPTSHDIINASKNEVFSLVYEASKHRCSLDKIDKLFNYAQDTLVPHVSDHIRCVISNTVESIFNIRAQLKLIEKDIRKLAATFNVYSLLMTITGCGPLTAAVIIAETGDIFRFKNADHYVSYSGSSPRNKRSGKSVEIMGKISKKGSKYLRHALYMIAEFARRHNPVLKHLFERVKNGNKKRHKLAVIAVANRIARYIYSIMKNESSFVIMHENIMRLPEETRNTFFNSISLDFPKNTRKQIYQYSDVNGEIHRFVYKNETTESIA

SEQ ID NO: 385475 - protein, 349 aa, unidentified
MTQQRISYAGERVYVGVDVPKETYTVTCVCRKQIVKTATVPAEPVSLAASLLQWFPGAMLASAYEAGFSAFVLHRALTQGGITTIVVNPASLAVAAHDKVKTDRRDSKRLAIDLADGRLRGIYVPTEAEELARLLPRTRAQLVEHRATIARQIKATLHQFGLIAPASRRLLSHRYLREIAAWARPPELHVRLTLLAEQWRFATRQRIEIRHLLREQAIAQAALEHVYRSVPGIGAVVARTLATELGDMTRLAHERALFSSTGLTPSEYASGPAVRRGHISRQGSGRVRHLLIETAWRALPRDKVLQEIFDRIAATRGKKRAIVAIARRLTGRMRACFRQGTTYAVGTYA

SEQ ID NO: 385476 - protein, 344 aa, unidentified
MGEITTIGVDLAKNVFQLHGADKLGRVVLRKQLKRAQFLSFFVNLPPVLVAMESCSSAHHWARELSKLGHQVRLIAPQFVKPFVQGSKNDVSDAHAICEAATRPTMRFVAIKTIEQQSTLALHRARQGLIRARTAQINQIRALMGEFGWVSPQGPHQLLANLPAQLEQARETLPAMFIELIELLREQLLGLNKRIETITKLIVQAIGHDPVAQRLQSIPGVGPLSASALAASVGDVKSFKNGRSLAAWLGLVPGQHSSGGKAKLLGISKRGDSYLRCLLVHGARSVLCGIKRSSSKKCDPWIEQLKQRKHVNVVSLAIANRNARIAWSLMAHGHSYEAQPRRVA

SEQ ID NO: 385477 - protein, 377 aa, unidentified
MEKDSRFVGLDVHAETIAVAVAEPGGEVHALGTIPNTPEAVRRLVKKLGPPETLRVCYEAGPTGYVLYRQLTALGVPCAVIAPTLVPVKAGDRVKTDRRDAEKLARSYRSGDLTPVWVPDPGHEALRDLVRAREAAKKDQLRARHRLGKFLLRQGRRAPRGSKAWGVKHRAWLQTIRFAHAAQDATLLDYLTEIDHAADRIVRLERAIATAADVAPAPVRAVIAGLQALRGIAKLSAVSVVTEVGTLSRFAKPRQLMGYSGAVASEHSSGPHRRRGGITKTGNAHLRRIVIEAAWAYRHRPAIGGTLRTRQAGLSEEVKALAWKAQHRLHGRYARLIAKGKAPTQVVTAIGRELLGFIWAIGVHVEQHAAGSAPAGA

SEQ ID NO: 385478 - protein, 482 aa, unidentified
MKKRNIYQNQSQELLTLFEEAGNSAKVMCVPIDYAKTDHVVMFCNGHGDIVRKPFSVKNSPLGVDYLTDQVMRSCKNRGINKRHVFFGGEDVGSFAANFVTTLRSQGWLVAGVNAHDAKKQRANLQASTDRLDLMGIASMLLNRRANSCPAQNGIYWNLRTVVRHRQKLVKLTTEVRNRVHAVVDRLFPGFLDEEKSGISPFSKSSLWLMQARFSTLQIRRRKRSTLIKGLRKLGAKNPEFAAAKLQQYAAQVLKAPQEYIATLQFSLAQHVKHLSCLQDNIDQLEKEMAVGLAQTQGAFLTSFRGIGIVLASGVTSETGNPYEQAPLNNLISYAGIIPRVKQTGGPQGESYSGKVARRCNRILKNYVVQSASHLGLHGPQELMADYKRREASGQHADFGMGRRFLRIAMCLMRTSQIYLPPRLRKPETKLQERAEYYLMNWPHLHEKWRKSGALEVAFDKNMPLGQWRNIVQHLYGIKLAL

SEQ ID NO: 385479 - protein, 322 aa, unidentified
MSVSNQRCAGIDVSKGTLDIAISNNASQFTVPNGSDGFTQVIGELKRNETRLILMEATGGLESSVACHLQSEGFDVVVINPRQARDFARAMGYLAKTDRIDARVLLQMSEVINQHPEREKYIRPLPDAHRQILTAMVVRRRQLTIMLTAERNRLHPSHPQSYESIKSIISALKGELARIEGEMAIHIKDHFSELSDLLSAVKGVGAATVAVLPAEVPELGSLSRREISALIGVAPVNRDSGTMRGRRTVFGGRASVRTALYMSALVGTRHNPVIKEFYTRLVAAGKPKKVALTACIRKLLTILNAMPKKNEAWDPMYHQHAS

SEQ ID NO: 385480 - protein, 343 aa, unidentified
MNNVNLISLDLAKSVIQACKISSHGELISNKAISRQKLKELLAKSPPSIVAMEGCGSCHYWGRLARSYGHEVRTIPPKKVKAFLQGQKTDANDALAIAAAALQLGMRFCPVKEVDQQSLQTLETSRKFLDKERTAINNHIRAFLYEYGITTGRGRKNLKETMLTVLDAEETRLPRSLRSTLIVLWARYQSTETQLKEIEMAKSELVKQLEPCQRLMDLEGVGPVCASMLYASLGDGREFKNGRHASVYIGLTPKQHSSGGKIYMTGIDKHGGNKELRVALYQGALSVISRLPDEPVTAKQKWLLALVKRAGIKRSCIALANKTTRTAWALLATGAHYQAAIPG

SEQ ID NO: 385481 - protein, 413 aa, unidentified
MNKHTYRSKKVNAINWEQLRERWSGQALLFAVDVAKDGQYAELSCQGPDGAVLMHWDLLEGTAALIAELKGFGSPVAVVMESSGTYGDALRHRCRLAGFEVFRASAKRVHDAREVYDGVPSLHDAKAACLIAKLHRDGLTKPWHEPDARERELGALRREYEMHRGQYERCQNRLEAYLSRHWPEALRILSPDSVTLEQVLKKYGSPAEVAARGEEAAADMRRIGGHFLAEGTIREAVASAGATLGEPCVEAERRYLMALAGEMEHSRLHMRQAGRAMEALVGADGELSGMAKAVGLLTTAILLSLHLDPRHFASARAFQKALGLNLREQSSGKHKGRLMLTKRGSALARKYLYYAALRLIKNDPVVARWYAGRLDPKAKLKAVAAVMRKLAVALWHVARGQAFDAGRLLKPAA

SEQ ID NO: 385482 - protein, 435 aa, unidentified
MANYYHIPVVGIDVAANFSVVSALKPNGDIYIKNVKIIHSFDGFSKLLTLIQKIEKEFNVKSKVFCESTGIYHLTLLHYLINQKIDISVINPLITNSNKNSNIRKVKNDNLDSLSIARLGKFDDIKVSSYISEEFLHLKFLVREYYKIVDLRANLKKSFSNNLYIHYPGFNKAFTDNTGKSALSFIKTYPTPDDFFNAPKLEVIELLKKSSRKGSKWAATKYNTIFAIATSASKIGLNTALFGTKVKRFIESYTFYSNQIDDLFAEIMDYIDNAIFGETFKTNIQLLKSFKGVGDISAITLLTEMSSIDNFSKPSQLVAFFGIDPSVNQSGKFVGDRNKMSKRGTAIGRRALYAIALASIRKTKNKVPMNQVLYDYYHKNLKSKKKKVRLVAIMNKLLRYIFSILKNQKPYVVRNPKFHQRMFLESKTRLDKKTA

SEQ ID NO: 385483 - protein, 401 aa, unidentified
MDPHLCIGIDVGCKAHRVGIATPDGSILEEFDISHTDAGFQDFFRRVERRRQQLSLPVAVAMEGYNGYARPLDRLVQQKGYRLFNVNNLKLARFKEVFPGAAKTDPIDTRKILELFRLRDQLPMAKDAIQEVVSAPLVNEKLKRVSRRRRHLVLEKMRVLNRMQADLQAVCPELLAATNDADNLWFLRLLTFREDLCQLARLHGSTIRQIPGIGEKYSRIIQDWQRKAQFSREVEYVGAMIIQDARRILELRCQIHTLDEDLEELADQSEIARRLSTIPGFGKTSIAELAGEIGTMQRFGAETSLALYLGMCPLTHQSGQMCRARIPRQVNTRCKAAMMTAVARHTTCVPQSRAYYDRKRADGKTHNQAIRALGRHLVRVIWAMLRDQRDYEIREDTHPIP

SEQ ID NO: 385484 - protein, 382 aa, unidentified
MQRIARKEARFVGLDVHAATISVAIATKDGDVHTLGSIANRPESIRRLVAKLDAGGPWAACYEAGPTGYTLYWQLAKLGRACEVIAPTLVPTKAGDRVKTDRRDAERLARCYRAGELTAVWVPDAAHEALRDLVRAREAAKQDQLRARHRLGKFLLRHGKRPPQTMRAWTQQYLEWIKREVKFEQCAQQATLEDYVNEVEHCALRIVRLEKTIDTAVEQAPESMREVIEALQALRGVAKVTAVTIVAEVGTLSRFEHARQLMGYSGAVSSEYSSGERTRRGGITKTGNAHLRRVIVEAAWSQRYKPLISRAARKRQEGLSAEVQEIATKARQRLHSRYVKLLGRGKSKQQVVTAVAREMLGFIWAIGVTVERSHVEKAKGAA

SEQ ID NO: 385485 - protein, 341 aa, unidentified
MNIITVGIDLAKNVFAVHGVNDNGKPALVKPKVQRADLLPLIAQLPPCLIGMEACTGAHHWARLFRQHGHTVKLMAPKLVAPYRMSGKKGKNDAADAAAICEAVTRPNMRFVPVKEEHQQIILTLHRTRQGFVEERTASYNRLRGLIGEFGIVLPQKVTCLRREIGAHLENLPGYANLCVGDLLAHTSALDAKIAEYDRLIAQAAREDARSKRLMKLPGIGPVTASAMLASMGSGHDFDNGRQVAAWIGLTPGQYSSGGKTRLGRITKAGDGYLRSLLVMGGRAVLNSLGDKQDRFSRWARSLQERRGYWRAVIAIAAKNARLAWAVLKYGEDFKLEPGKN

SEQ ID NO: 385486 - protein, 436 aa, unidentified
MRGCRCSVIMGFTKPIEHSNLTTKEGDFMNPLYVGIDVSSKSNVVYFMLPDGNKHSSFSVANSLDGSTQLVKRILSTMESKSLDAVLIGLESTSVYGENLVYFLREDASLASFNRKIHVLNPKQVKKFKDAYNDLPKNDYVDSFVIADCLRFGRINKEVYIGDYHYKALQNLTRARYFTVCNLTKEKQRFINVLFKKYSTMTQEKVFSDTFSTTALAVYDEFESAEALAYMDLQELTAFIIEKGKNRFPDPDAVAKAIQKAARSSYRLPKTVNDSVNQVLSISITSIKALEAQIKEFDKAISAQMELLSNVLISIPGIGPVYSAGIMAEIGDINRFDNQAQLAKYAGLAWTQYQSGNFEAENTRLIKSGNRFLKYYLCEAAFSLVRCDKEYKAFYHQKYKEVNRYQHKRALALTARKFVRLVFTLLKDNRLYRPAE

SEQ ID NO: 385487 - protein, 429 aa, unidentified
MNSTRNKKIEQVKETTMIVGIDIGSEKHYFRAFNWRGIELTRKPVAFSNSMEGFNSFYNTIVELIQKSELEEALVGIEPTGHYWFDLGQFMGEKNIKFVMVNPHHVHKSKELDDNSPSKNDRKDPRVIAGLVRDGRYFYSYMPTGVYAELRNASNRRFVLVEEQTRAKNRLQKWIAVYFPEYKGIYTRIDAKGGLLVLKQAPTPEEIVRLGVEGIIKIWKDAKLRGNGHKKAMLILHAAMKSIGLKAGLTEARMEIQDLIEDYELQTKRLERVNDLIKELCQQIRYADKLLEIKGIGITTIAGFIAEVGDITRFDSAKELQKLAGLELVADSSGKHNGKTKISKRGRKRLRYLLFEAAISVVGKNEEFKEIHRYYTTREKNPLKKMQSLIAVACKLIRVFHVILTKGISYDASKMLKDIQHPGEPLKAA

SEQ ID NO: 385488 - protein, 316 aa, unidentified
MDHKQTVYGVDVSKATLAIAQYEGETVVEIANTPEAIAAWLASVPADSAVAMEATGVYHRMLAQLAHAAGLVVYVFNPQVLKHYARAIGQRGKTDGCDARMIARYLVHERSKLRPWQPPVAAADTLSRLLVRRRALVGARQILAQSLTGMPMLKAPRQTLLASFKRTIATLDLLIRRELARVPEMAALHRRLKSIVGIGEVVAAQLVAALSTLCFTRAAAFIAYTGLDPRPDESGQHRGRRRLSKRGPALLRCLLYNAAMSAAKSKVFKPVYMRLRERGLQSTEAIVILARKLARIAFALYKSGETFDVQKHLKTT

SEQ ID NO: 385489 - protein, 427 aa, unidentified
MYCTQNEKINQVTENTLVVGIDVGSKTHYARAFNWRGIELTKYLRFDNTAEGFKVLDRWIAELQKKHHLSEFLLGAEPTGHYWYALADHLKAKKSPLVLVNSTHVKQSKALDDNNPSKSDKKDPKVIAKLVIDGRYSYPHIPEGVYAELRIANNNHVRLKRDISRMKNKVQRWLKIYFPEYKEVFKDPFGEASIEVLSRLALPSQIKKMDARSINQIFRDVKIRAVGVKRAQRLIEAAKGSIGRKTEPVAASMEIEMLIDEYRMKEKQIEKIEQLMESLCESIPSAETLSPIKGIGPITVAGFLAEVGDIRRFQSPKQIQKYAGFGIKESSSGDHQGKTEINRRGRKLLRTTLFQAVLSLVSNNEAFQALHQYNIKEKPNPMKKKQSIVALCCKLIRVFYAILTKDIAFDGEKMLEDIQRPSPPLAA

SEQ ID NO: 385490 - protein, 464 aa, unidentified
MGHARARKIPAQLVEDEEYQLRHERVAGIDIAKAKADVCTRLPPQRDGGRRASRVEEVPATAKAILALAVRLIADGAELVVMESTPDYWRMWYYLLEGAGLSVQLVNPAHARQLAGRPKTDRLDAQWLARLAEMGLLRPSFVPPPEIRALRDLTRTRLQLVRDRSREWQRLEKLPEGALVKLSSVVHSLAKVQSARAILEAIAAGERDPKALAALAHPNVKGGRAAVEEALGGMAPGDHHPMLIRVHLDHITLLDRSVAEAGDEIEAALDAIPAAWGTDPGGETGPDAGRGPDPAVLPAAERLAEIPGVSPALARAIIAETGLDMTRFQTADHLVSWAGLAPVARQSGPRSRKPKKGQGDAYLRGYCTQAANGAAGTDTFLGERLRRLSRRLDGNRARCAVARSILVIVWHLLASPDDRFADLGPGWHQRKTDTDRRTRSLMNQLRALHPDADVNITIVPGTAA

SEQ ID NO: 385491 - protein, 387 aa, unidentified
MARKRTLSTLDTSIAYEAVGLDLAKEDVALAAFDSEHKEPYLIDRIPYDKLYELLADMAPTLVAMEPCSGAHQIAEQIQELGHEVMMISGRHVQAWVKDHCNGQKTDLNDAFAILNLAYDRWLTPIRGKTREECRLLALQASYRQLKGQRTKTMVHVKATLHAWGFPIRTGSFNQKALHELIDANREAFGDEVVETLHLMINRVHDLDHDIATVLKLLTEATKRDPRASLLRSIPGFGILTMSRWCAVIGDIARFDSPKQTMAFVGLVPNNRITGHHTETSSGREARGQGRMSKRGDKMLRSLCILGAASLCLMVRNDRLPDCPFVASIKERLASPRPWFKVLVYVAAKLVRIATALLKYGETFSYEKAGISKAVLKQWELEQAKAA

SEQ ID NO: 385492 - protein, 374 aa, unidentified
MGDYSEAFVGFDTSKLRNAVAIAEAGRGGEVRFFGEIENTPAATTKLVRKLSARYERLTFCYEAGPTGYGLHRQIRDLGFECVVVAPSLIPKRLGDKVKTNRRDALSLAKLLRADELTPVWVPDGGHEAMRDLTRARETAMLDLRTKRQHVSAFLLRLGRPYPERRKTGTKAHMSWIASQKLEHPQQRLVLEEMMLAIRQAQERLVRLEQAISAMVPEWSLAPVVTALMAMRGIDLISATTLLAEIGDLSRFRTPTELMAYLGLVPSENSTGDTVKRGPITKAGNRRARRMLVECSWSYQHPPRVGQAKQPKVDAAPPAVREIAWKAQCRLYRRYRTLIRNGKLKTVAIVAIARELAGFIWAVARAVTTPPVAA

SEQ ID NO: 385493 - protein, 399 aa, unidentified
MDERYEVFCGLDVGKSEHHAAALNAAGERVFDKPLPQDEARLRELFTGLQQHGRVLVIVDQPNTIGALPIAVARDCGCTVAYLPGLAMRKAADLYPGKSKTDARDAFIIAETARAMPHTLRAVDRDSEVLAALKVLSGFDADLTHECTRAINRLRSLLLQIFPALERVFPGTVLTRSLVLELFIKYAGPTGLRAAGRSNVLRWARNHSRKDPANLVDAVFTALDEQTVTVIGTEAVELVIPRVAAQIKELKHQRAIVAEEVEKLLDDFPLSQVLMSMPGVGIKTAATILLTIGDAGTFTSPGHLAAYAGIAPVTRRSGTSIRGEFPARSGNKQLKNALFRSAWIASCHHPASKAYYQKKRAQGKKHNAAVICLARRRCDVIYSMLKHGTFYEEKPALAA

SEQ ID NO: 385494 - protein, 388 aa, unidentified
MIYVGIDIAKLNHFASAISSDGEELIKPFKFTNDNDGFQLLISKLDPLDKDSLIIGLESTAHYGDNLVRYLVAKNYKVCVLNPIKTSTMRKNNIRKTKTDKVDTYIICKTLMVQESLRFVTFYDLDLMDLKALGRFRQKTIKQRTRLKIQLTSYVDEIFPELQYFFKSGLHQKSVYALLKEAPTPEAIASMHMTHLAHLLKVNSHGRFDKEMAQQLRVLAQKSVGASDSSLSIQVTHTIQQIELLDSQLERVEAEMTEIMKFNDSVIMTIPGIGYINGGMILGEIGDIHRFSSPNKLLAYAGLDPSVYQSGNFQAKKTRMSKRGSKVLRYALVNAAHNVVKNNTTFKAYYDAKMAEGRTHYNALGHCAGKLVRIIWKMMTDNLEFNLD

SEQ ID NO: 385495 - protein, 424 aa, unidentified
MSRKKSGPAGLQALYGRACGLDVHKKLVVACVRILDSKDGTVQSTLRKFGTMTADLMELRQWLAEQKVTHVAMESTGVYWQPVFNLLEGHFEVWVVNAQHIKKVPGRKTDMKDAEWIAQLMQCGLLRASFVPDRQQRELRDLTRQLTKLVQQRNAVDNRIQKVLETANIKLGSVASDVLGVSGRKMIEGLLSGEKDVAVLADLARSQLRGKIPELQRALQGDLTEHHRFLLRQLLGQYDFLEKQIASVSERLGAVAPPSFRAAVEQLDAIMGVGERGARALLAETGTDMSRFPSHKHFASWAGRCPGNHESAGKRKTGKTPAANRHLDAVLTEIAHAAVRSKNSYFKAQYHRLAGRRGKKRAIGAVKHSLLVTIYFMLRDHKPYKDLGADYFDKLNPQQRIRYHVRRLQELGQAVEVSSMTAAA

SEQ ID NO: 385496 - protein, 390 aa, unidentified
MIRNPSDATVRRIMKENDVVQSAIQLANSGYTTIGMDVSDRKTQVCVMAKDGKSPKIVMETVIPTTKEGLAKFLSTQDRSTPVAFETGMHCRWMNEVAEGLGFKVYVANPCRLRMITESKTKNDVNDARMLARLALSDPGLLHPVKLRGPEHQRMLNLHEMRNLLVKQRTGVIVQMRAIAKAMGFRIPKCPTGSFHRLDTSPWPREFRDIAWPMLKNLGQLAVTIKTYERQIRELAQTPTFKAQVDRLMEIHYVGLYVATGFVAVTGGDMDRFEKPRDVGPWLGLTPRQDQSGDIDRQCHITKAGSPFMRRLLVESAQMILRDGSADTDLKARGRRMCARGAKIAKRKAVTAVARALAVLMVAMLKKPDAPYVPLSGRCEKELLAMRATA

SEQ ID NO: 385497 - protein, 341 aa, unidentified
MEKTMLTQQAPTFILGIDVSKDSLDVCLIKTCDGKLHHHKLNNNPSGFRRMKAWLKQHGCEAGADTLCCLEHTGLYTRQVVHYLMARDVRVWMESALQIKRSIGMVRGKDDKVDAHRIARYALVHQQQARCVNLSGVTLERLKDLQANRSRLLKALQSIKVTIKELIAVDPVSGKTLEQVNKKAIRGLEKSMEQVEEKMQEFIAKDEELKRKYDLLTGIKGVGKVLAISLLVYTQGFTKMDDGRKLACYCGVAPFEYRSGTSVMGRTGVSKFANKELKHILHMAAMNSVRFNEEFRLYFERKVGEGKSKMSVLNAVRNKLLHQIVAVVKRGTPYELKLKNI

SEQ ID NO: 385498 - protein, 487 aa, unidentified
MAKRRKSTFERLSTGQMNRSQRRELGRRVAAGDAGLAIVQANAGGIDVGNESHFVAVPPDRDTNPVREFGCWTAALNEMAEWLKSCRIDTVAMQATGVYWIALYDVLEQHGVRVVLVNAQHTKNVPGRKTDVQECQWLMKLHTYGLVRDSFRLQQDMEYVRTIWRVRDRHVKEAGREVQHMQKALTKMNVQLANVISDVSGVSGQAIVTAVLKGERDPYKLADLADYRVKASREEVARSLEGNWRADVLFELQQAVDSYHFAHRQMRECDEKLTFYLVSLPTRMLEIPVPSKGAPETPESPAQKRKKARKPRDNEPRMDMKGELKRICGVDLTSIDGINVMTAFTVLSEVGTDMARFKDEDHFSSWMGLAPSKDISSGKIVGRGKKKVKNRVAVVLRTAATTLLESDTHLGARYRHLRRQLPTHKAAVKAMARYLAVLIYRLLTKGEAWVDRGARQFEQRRTQREMVSLQTKAKAKGFTLVPLAEAR

SEQ ID NO: 385499 - protein, 377 aa, unidentified
MQETMIQIKTADKLFIGMDLHKNTSTFVVKNKDGKLINFAKVLTDKNEVTRYINSIRRNNADKGLSLVVEPVSQWYYYADLIENLGVDVHLAHPMEVKAIAHARIKTDKIDADVLADLLRTNFLPEAYFAPAEVRGWKEQCRFRASLINLRTQTKNKIHAILFKHSLKHNFSDLFGKSGRRWLAALDLKEPFKNNLNKYLSLVDYLTEQIVLAEEIITNTVINCPQAKLLISIPGISYCSALTIMAEIGEIDRFISVKHLQSYAGLIPSTYNSGDKQIHGRITKRGSKWLRWIMIEAAYHQMNCKRIPGFGAYYNTLKKRKGSKTAAVATARKLLAVVWRLLKDNRPYEVADPRCWKSRPIASKISSVSTVINTTED

SEQ ID NO: 385500 - protein, 379 aa, unidentified
MTGPIDTDEFCCASLDLSQTKWVCAFSAPLSRRPSVQSFAGGSTEQLVGWLEKQRQRSEAFLGRPLKIVLCYESGYDGFWLARLLPTRGIRTIVFDPASFLRPRRGRIAKTDRLDAEDMIRTLRAWLSGDASVAREVRVPSIEEEDAKRLARERKHLVNERTRLIGRIKGVCALHGVRVRPHMISKRWARTLDQQLTGEGKPIPPFLRRELQRMLRRYEFLIALIREVESDIAKAVTDPESPFPQKPKVALLAKLAGVGQGSAAMLVAEVFVRTFENQRKLSSFLGLAPTPHASGEISRNKGISKAGCKLARSTLVELAWSWLRYQHDSALATWWRARFSKRGMRVRNIGIVALARKLAVAFWQFVEDGQVPEDALLKA

SEQ ID NO: 385501 - protein, 422 aa, unidentified
MNAKSNIYEPEFAGFIGLDWGDASHAVALADADGGPVEESTLVHSAEELRAWLQRLESRFGGRSVALALETSKGPLIHLFSHVPWLVIYPIHPATSARYRKAFSPSGAKDDQPDARVLLDLVINQRHKLRPLTLDDGPTRLLGRLCELRRKTVDRRTQLTNTMRAVLKDYFPQALQLVGEVLYSPLALDFLERWPDLLSLKVARPATITRFYYSHNVRRPEAIRERLELIDRAVALTTDDAIVKVGIRQLERLIQELRILQKHILEDEKQIAALFKDHPDAPMFRDLPGAGATLAPRLLAGFGTDRTRYQSATEFLRYSGVAPVKEKSGPRVWIHWRWNAPRFLRQSLIEWAGQTILYCPWAKAYYQHQKAKGKRHWMILRALAFKWVRILWKCWTTRQPYEEARYLQSLIRHKSPFVPHDI

SEQ ID NO: 385502 - protein, 441 aa, unidentified
MAMRKRDDEVVFPNAAGIDVGGSSHWVAVPRQASDETVREFGAMTDDLNAMADWMLACGVDTVALESTGVYWIPVYELLEQRGLKVWLVDARQMKYVPGRKSDVQDCQWLQKLMSLGFLRAAFRPAGEVCVLRAVARQREVLLTEQASWVQRMQKSLVQMNIQLTEVLSDVMGLTGQAIIRAIVAGEREPKVLARHRHSRVKASAEEIAKALTGNWREEHLFVLRQALAMYDDIARHLRECDTELQALLSQLGQVKVDLGRVPRAGSKTRAEFDTRQTLANWAGVDLTRINGLGLAAVMKILSEIGPDISRFASVKHFCSWLGLCPGTKISGGKVLSAKTTRSTNRVRQALKMAAMSLSHSDSALGAFYRRLCSRMDKPRANTATAHKLARMVYFMLTRGEEFVDQGQQRYEELQHQRSIVALKRRATALGFQINPTPIPA

SEQ ID NO: 385503 - protein, 324 aa, unidentified
MSKIKEFFGIDISKDVFDVMDPSDKHHQFKNDPSGFKEFSKLLSEKSHCVMEATGSYYQGLATCLYDSSVIVSVVNPLSVKRFIQMRLKTSKTDKLDAQMIRMYGESEQPKLWNPPSKLIIEATELHKLIELLVRQRAGLKNRLHALESKGITRSLVLTSVRRQIRNLSNEITDLELKLESVIKEYEPDLLTRLCSIPGVGKRTAIYLIVLTQGFEKFESSRQLISYFGLNPIIRESGSSVRGKSRISKTGDNQVRKLLFMCAFTACEHNKACREIYQRLTAKGKSKKLALIAVANKLLKQSLAIAKSGLYYDENYRSVNGNLG

SEQ ID NO: 385504 - protein, 368 aa, unidentified
MDKAITFFVGLDVHKESIAIGVAAAGDEAPRFVGTVGPALAELLTALGRIGPVASLRLVYEAGPTGFHLARELTGRSYDCQVIAPAKIPRRPGERIKTDRRDCQKLARLARAGELVAVVVPDARDEAIRDLSRAREDAVAARFKARQQLKAMLLRHGHRYAGKTAWTAAHERYLAAVSFPHPAQDLAFAEYRLAVGAAAAQVMRLTDALRTQVETWRMQPVVTALGTLRGIDFVAATTLLAELGDLTRFAHPRELMGFLGLVPAQYSTGETRRHGAITRTGNGHARRVLVEAALNHRFPARMSRLLQQRQTGQPEAVRAIAWQAQIRLCHRYRRLVDRGVPKNKVSVAIARELAGFVWDIARHVAPTR

SEQ ID NO: 385505 - protein, 376 aa, unidentified
MMVLGADTHKRSHTVGAVGELTGRVIADTTVRATQRAFEQLLVWARGLEDPDRVWAIEDCRHVSGALERFLLARGERVLRVQPKLMAGARTSGRERGKSDVIDAVAIARAAIREGVDTLPVAQLAGAELDVRLLVDHRERLVGQRTRLINDLRWGLHDLWPELEIPARALIGPTWQDRVGRRLTRAEQSARVRIARDELRRIRELTRSIQALEAELAPLVAQLAPGLLAERGCGVLTAAKLIGEIAAIGRFATDAKLARLAGTAPIPASSGRTDRHRLDRGGNRQLNCALHRLAISKGRLDPETAAYLARKQAEGKTRREALRCLKRHLARRVFKLLQPSASMPQTAPAIGERPPAIAKPGRMIHCNPPAGTPALT

SEQ ID NO: 385506 - protein, 430 aa, unidentified
MISAAIERCAGIDVGKKFLAVCVMVGPLQGEPQVEIRQFGTIRSQLDALRDWLKQQGVTHVVMESTGSYWKPVFNALEDAVKVYLANPQEVKNRKGHKTDNKDGWWLAHLLRHAMIHPSFIPPRAIRELRDLTRRRKRLLGAGTSERNRVQKVLEDANVKLGNVLTDLFGVSGQLMLEALLKGQATPEEMAQFAKGRAKKKIPQIIAALEGHQMSDHHRRMIRYGVDHMHFLEEQIEQLDQDIMTKIQEAGLEPEWRLVQSVPGVRETSAAAILAETGTDMTQFPSGKHLSSWGGICPGNNRSAGKNRSSHTTGGNRWLRGTLTECAWAAAAKKDCFLKDKFWRITTKSGGKKAPAVIAIAHSLLILTYQVLSTGQAYQEKQAPISDPRHKQRLIRHHIRRLGKLGVRVYGHDLSHDLGSPPTATSPTES

SEQ ID NO: 385507 - protein, 410 aa, unidentified
MKLCVGIDVSSKDLVTSMISEETCEVVFQGNFVNDLKGATELKTIIINTANSNHLDQVVIGMEATSIYSFHPAMFFQEDQDLKKFDTQSVVIDPKKTKRYHDVFAEDKNDQIDAFYIADFLRVGRYSTGIVRQENYIALQRLTRSRYELVQSLVRAKQHFIENLYYKLNKLVISDELNTSVFGSTMMSLLTEDMTTDDLLNTSINDLADYLNEHGRGRFANPEALAKTIQKAVRASYRLDKVIANSVDTVLSVYAEEIKAFQKMIKGLDKAIEEVMKVIGKEEEVLRSIPGIGPVYAAGILAEIGQIDRFDNEAKLAKYAGLSWKEKQSGNYASDNTPLKRTGNAYLRYYLVEAANRVRIQDPVFGKYYQRKYKEVKRTPSKRALVLTARKLIRVIFFLLKNHQIYQEKR

SEQ ID NO: 385508 - protein, 533 aa, unidentified
MATRRKSRKSRTTGPALLGKRNGIIQPRVQAVGPEHFGIVAVDCAKARSKWMLCDFYGNVLVPPTIVEHQRTALQVATLQVKEACQRHDLRDHLVAVEMTGTYHRPVQRAFRQAGSETRLVHPFAARHYRVLAHGDCKTDDHDLEGIFRAAVNGFGLLEPAWDETHQRLQLLARHRRDFVKKRAKLQCQIRQYLERCLPGYAALFPTDDLWTRPVAMAVARRGGSAEAIREARVHGVMGWLHSQKVHAQARTVERVVCWAANAAAADPLARHLTPVWHALHDDWQAKTQQIGRVEQELAEILVQTPYVLLLSHPGINVVSASELGGEMGPIEHYAHAKAITGRAGLFPSRYQSDEVDRADGPLARFRNARLRGAWLLVADNLIRCNVHYRGMSELWKQRGVDPRDIRCRVANRATRTVFQMVSGRRLYHHPSHRDRQYVLNKLLEFHHEHGTPPHEILRDLSRAAQQIPSHEHAGEAVPLRDTYERARRNRRKGPQPIGMLLVEVLARLGVVGLQSEDEARSPDANVSETSIR

SEQ ID NO: 385509 - protein, 366 aa, unidentified
MDKRTTVGIDLAKEIFAICVLDAQGAVLERKVLRRAAFERWAESLAAPCTVAMEACGSAHHWGRVFAARGHAVRLMAAEFVVPLRQGGKNDGNDALAIAIAARQPTMRFVPVKTVEQQAILAWHRMRQGWIEERTALLNRVRGLLAEFGLVPGRSPAVLIAAMARLVDEGTAPAPLRAIVQQAREQLHQLDARLGACDVQIQAHARQSPQAERLRALLGVGPITASAVVATVPDARLFRHGRLFGAWLGLTPSQHSTGGKTRLGASSKRGDAYLRGLLVNGARSALQAALRAAPDKATRLQQWMVGLAGRCGYQKALVAIANKHARMIWAMLARDEAYDPQAWQRHPRARTTAVTTMPSATALGNA

SEQ ID NO: 385510 - protein, 422 aa, unidentified
MNHLTDNAFTAYVGIDWADSKHDICVQATGGQQREFDCIAHQVDQIEEWAQSLHKRFGGVIAVALELSKGPIVYALQKYDFFVIFPVNPSTLAKYREAFTPSRAKDDPTDAELALDLLVRHPERFTPLKPQSVEMRTLVCLVEQRRSLVNDKIRITNQLRSALKQYYPQMLEWFEHLDTVLVCDFITRWPTLTQVKRARKNTLEKFFHTHNMRFAHVLDARLKSIKAATPLTLDAAVVTPYSLQALVLTDQLRVSLQAIHRYDDEIAELAPKHPDYGLFSALPGAGPSLAPRLLVAFGEQRERFASAAAVQKYAGIAPVTERSGKKHWVHWRWQCPTFLRQTFVEWAAQTINKSFWAGAYYRQQRDKGCTYQAAVRALAFKWIRILYRCWQTRTPYNESVYLNALKRRGSPLLNPSTTVKMT

SEQ ID NO: 385511 - protein, 444 aa, unidentified
MSDSLPSVTTEREWAAFAAIDWADQKHFWRLVPAGSQHAEQGELDNTPEAVEIWAVALQQRFDGRPIALCLEQSRGALVYMLAKYAHLVLFPVHPTTAARYRETFCTSGAKDDPGDTASLLDLLVRHRERLRPLQPDTTETRLLQFLVEQRRQVVDEKTAQNNRLTDCLKLYFPQILQWFDDVSGPLVGAFLERWPSLQDLHRTRPGAMREFFHEHNCRGEARIDERITAIYQTIPATRDEAVLEAGVITARGLVAVLATLRDNIAKLDERIAQLVACHPETPLFDSLPGAGAALIPRLIVAFGTRRERYDSAYQMQCYSGIAPVKVASGRTETIRFRRACPKFLRQTFHEYALHSLKKSEWAKAYYQLQRDRHKSHQAAVRSLAYKWIRIVFRCWKDRKPYDEAIFLQSQRRRSATLGASVASVTDVGWKKVAGFNKFSAISS

SEQ ID NO: 385512 - protein, 387 aa, unidentified
MPQPNDLSRSLVALDQDSTIIAVVEMSQSSWLVAGMLPGIERQPRKKLEPSAERLLGLLHRWRDEAVKAGRQITRIALAFEAGRDGFWLARWLRARGVEAHVIHPSSVAVSREHRRAKTDRLDTELLKRGFLGWLRGERGHCTMARIPTIAEEDAKRPNRERECLVGERTRIVNRMKGTLARLGIRNFKPTLRKAAERLATLHTPEGSALPPNVSAELQRNMARLGVVVSQIKEIEGARQKRLEQEPETEPHAMVRHLARVVGIGVETADMLVNEVLSRPMRDRKAVARYAGLTGSPDESGAKRREQGLAKAGNARVRRGMIQLAWRFLRFQQNSALARWYQARTADHRAATRKTMIVALARKLLIALWRLVTTGETLEGVVLRPAG

SEQ ID NO: 385513 - protein, 367 aa, unidentified
MNSARILYVGMDVDAGKIAMATIDRFGTDELSEQVIRNDVASVKRYFEKLKETGAEVRACYEAGFCGFELVRRLLEMGVRCTVAAPGMLPKKPSDRIKTDRRDARTLARALRNGDIHEVNVPTKEDEAIRDYLRLHEDMKIDLKRAKQRILHFLHRRGLRYTNGNNWTAKHRQWLKALELEHSLEQETLNEYYACVVELEEKCERLAARVEEIAGEDRYVEPVRLLKAFKGIGTLTAVSLVAEIGDFHRFATAEQFMAFLGLVPAEHSSGNKRRLGGITKAGNSHLRRLLIEASWHYRRYHVESTRLTKRREGLPVALVSYAQRAGRRLNKKFVRMLFSHKPSQVAATAVARELSGFVWGAMTGKIA

SEQ ID NO: 385514 - protein, 353 aa, unidentified
MNITSSKQEVILGVDTHLDIHVGILISNTGKLLGELPTETNTAGYQKLLKWAQSFGQLNRAGVEGTGTYGAGLTRVLREHGVIVYEVNRPDRSRRRLQGKSDPIDAENAARAVLAGRAVAIPKEQSGVAEAMRIICVARRSAVKAKTQAINQLRALLVSAPDDIRARLLRRKPEDCVAACARVRSLGESLRLGALTISLRSLAKRWRALAEEIKEHDRALDELTAHHAKRLRQQFGVGPQTAAILLSVAGDNPERLRNEAALAALCGVNPLPTSSGKTVRHRLNRGGSRTANNALWTIAMVRMRSELRTRAYMARREGEGLSTKEIHRCLKRYIVRELYPLILADLTESAGVT

SEQ ID NO: 385515 - protein, 316 aa, unidentified
MENPARYVGIDVSKDHFDVHVRPDDRKQRFNYDNDGLQGVLSLMKEVRPQLIVMEATGGYEQRLVAVFAAQAFPVAVINAKRVRDFAKATGKLAKTDRLDAAVLSDFADKLRPEPSALPDESREELKALLARRRQLIDMITAENNRQLTAPKAIQREIRAHIEWLRRRLKKTDDDLTRHIKASPIWKAKDQILQSTPGIGPTTSMTMLAVLPELGSLNRRTIAALAGVAPMNRDSGKWRGRRTIQGGRTTVRNALFMCTLVATKFNPTIKALYQRLLLAGKPKMVALTACMRKLLIILNAMLKTNTPWSEDHAKKC

SEQ ID NO: 385516 - protein, 409 aa, unidentified
MYYCGIDWSDKTLEYHLRNAESKVLCKGVVAAGVGGMAELYSKLERHACPEEIGVAIETCHGAWIQAMLDRGYIIYPVNPKTVERFRQACSANGVKTDKIDSKVLSMFLLTFHKENKPLRPDAPEIIKLRILCQDRLRLTEEHTAKINELGAVVKCYYPAFVGLFGRMDSDIALDFLIRYPTQSQFKKLSERLFRNWLGRHHYSCPRRVEGMLEKLHAPVFGVAEHLQESKKHLIRYLSRSLKMLNAEIAERDREINDHLDGLPESDWVRSLPGAGNVLAPSLLACLGRDPERYGSTGEARAFMGTAPVTFASGNSCSVHFRRGCWKFARRTLQLFAEQSRHHCCWAQVFYEKQRAGGRRHHAALRALAHRWLKILLAMKRTGSCYNEAVYLNDQRRHILKIPMLKAAN

SEQ ID NO: 385517 - protein, 356 aa, unidentified
MEIIAMDCHKHYSLANVQTADGRRLAEQRIEHQRGNIRAFLAAYTPGTPVAVETIGNWYWIVHEIEAAGLVPRLVNARKAKLMLGSINKTDKLDVRGLNKLQRAGTLPTVWIPPAALRDQRELPRTRMVLSVARTRLKNRIHSVLDKYGLQDQFKGISDIFGVKGRVILEQTLAQLPVHTQYTAERLIEQLDQIQDPIDKIEQQMAEVFDPTPEMKLLKSLPGVGRILSVVIGLEIGDIRRFKWADRLASYAGTVPRVHASGGKTRLGRTRPDVNHYLKWAYIEAGNSVAVHRKHFPYRHVTQLYTRLNAHRGHAQAVGAVGRHLAEATYWMLTKHEPYQERGLKQVQGAVSATLS

SEQ ID NO: 385518 - protein, 324 aa, unidentified
MYKYIGIDISKQTFDVFSFDEEKKSLVLNFSNNKKGGKQLVSKYGKTGCYVMEATGPYYLQLATYLFERGIDVSVVNPLIIKRFSQMQLNRAKTDKKDAQVIQNYATIHELKLWKPEPEEIKEMQEIITTIELLNKHHSAVANQLGSFMSSGEIRKETKKILEKSLKQLEENISKLENRLDKIIEDNFKDTKELLESIPGIGPKASAKLIAITNNFKKFEHYKQLIAYVGLSPRIYSSGTSVKGKGHICKMGKSVIRKQMYISSWSAKYHNKSCINLYNRLKEKGKPERVIKIAIANKLLKQAFAVVKNKRMYDENYISKFIAA

SEQ ID NO: 385519 - protein, 429 aa, unidentified
MTQDGVTLWLGIDWADEKHRWAMRIDGEARIQQGELEHTPEAVEQFVSSLALRFPGQRIAVALEQSRGALLFLLSKYAHLVLYPLHPNTVNHYRKSIYPSGAKSDPSDAALILDILCKHPERLRPFQPDTVETRTLQLLVEARREAVDDKTRFLNRLTAQLKMFFPQVLDWFSTIDTIVVGQLLQKWPTLDKLQRASVTKVAAFLREHRIPESRITALQQLIQQSVVAIRDTAVLESSVLTVRRMIRQIEALRASIAEHDKRIAELAETHPDYGIFSSLPGAGPTMIPRLIAALGTQRERYATASAIQCYAGIAPVTETSGKQKWVHWRWACPKFLRQTFHEWAWLSTRKSAWAKHFYHQQRERNKSHHAAVRALSFKWLRIVFRCWKDRVPYEETRYILALQNRAVPKGVEIRLKTSTGFTQLEGISC

SEQ ID NO: 385520 - protein, 355 aa, unidentified
MKIAVGMDLHARKTTAFAVSANASIEIKTNEHTFLEEFNKEFSSFSSNEEGMSALVRFLCGHDVHILIENSTKTHEIYWMLTGMGMDVTVAFAADLYRITKSKKKTDRHDAIELAGYMRRKLNGEIEFRVSFMPNREWLMRRELCRTLYDESSNLSDTRRQIRSHMLLHGMVYQATDIVGTAPLEYLGSLGDPVLDSLVARARDSRKRMKNLEHLILRQFGDDPLYKSLRTIDGVGSVIAAYIAALTVDVRRFENAKEFSAFFGLVPGMRESADSSPHCHITRRGDDVARMMIYQAALVHISIDPDGESGVTRTFRRLNGNGKKMPFKKAMTAAARKMAELMFAVMRSGRPYEPR

SEQ ID NO: 385521 - protein, 335 aa, unidentified
MNRYIGIDVHQDKCHATIQNCDGETVKRGYFQNSPSGYDDFFDGAGEGIVAIEAGDAWQPIYDWLDEKGFEVKLADPHKMRIIAEVKIKTDCRDSEALADLVRADLIPEVYVPCDEKRDLRRTVRHRGKLVKDRSKLMNRIQAVLRERGIELDVDLRTKKDRRKLLELGIDSIDDYLEVIETLDDRIGELEEEIEETAGDMEEAQLLMTIPGVKYYSALTIIAEIATVERFPTSGHLCSYAGLVPSVNQSGSKEVHGSIQGGRSLLRWILYQCVHVHIQHAPESHITKFYKRLARKKPKKVAKIAAARKLLKTIYWMLKLKEEFHPEGYDPRKSR

SEQ ID NO: 385522 - protein, 370 aa, unidentified
MKKKILYIGLDVHKKSIDVAITDARVNGKVRSYGKIDGTLQALDKLVSKLKSPGSDLHFVYEAGPCGYPIYRHLTSKGHSCSVVAPSLVPKRSGDRIKTDRRDAVNLVRLFRAGELTSIYVPTAEDEAIRDLLRCRVDIRRIERKTRQQLLAFLLRHGHYYPGKKNWTKGHMNWLAELKPAHRAQQIVLQEYIDAANECTRRIQRITEQIQDLVVQWSRAPFVRAYQALRGVSLIVATTVVSEIGDMNRFKNPKQLMAYLGLVPSEHSSGNRIRRGSITKTGNSHVRRVLIEAAWTYNLRARKTKLILKRQQGLDDRICEISWKAQLRLCNKYRRLFARGKSKPAITTAIARELSAFIWAIDREVQQTIS

SEQ ID NO: 385523 - protein, 434 aa, unidentified
MGSYAGVDWASEKHDVRVADAAGEKLLVATFAHDEQGLRSLCRQLVRLGVELVATERPDGLLVERLLDAGLRVLALHPNQVAAARDRFRVSGGKSDGFDAFVLCELARTDNHRFRVLEPDSDQTKALKALTRAREDLVTARTALVNQLRAELDRFWPGPAELFSSLDSLISLAFLKRYPAPLDAQKLSAVRLAKFLANQHYSGRKTPEELLAKLRTAAVGCAGETEAQAGRAIVLALVATLETLGKQVKQLDRQIALAVRAHPDGAIFLSLFKGADTVLTASVMLAEIGDCRARYPTHESLSGDAGQSPVAVESGKHKVAHFRWACNKRLRDAFCTLADSTRHWHPWAQAVYARAIAKGHDHQRAIRTLGRAWSRVVWRCWQDGVPYDPARHRALQQHITVTIPTLSGPVVDHAATQRMAAGLPTTDDEVTAAA

SEQ ID NO: 385524 - protein, 366 aa, unidentified
MEGAPSRLPSHPETEAFLRYFQPPAGARFYAGVDLHARSLFLCVLDRDGQQRFARNLPAAPAPFLRAVQPFREGLVVGCECMHCWYWLADTCRDEDIAFALGHAWGMKAVHGSKTKCDRHDAQAIARLLKGGNFPLAYAYPKERRGLRDLLRARLRLVRQRAELYGHVHTARRQANLPPVSSDVKYKSKRAAITADIADPFVRRRVETHLGLLEPLDATIRRLEAEIEQAALEHYPTELAVLQTTPGVGAVLSLTILLEIDTVGRFDTRQQFCSYARLCGAVQESDAKRVGVGNRKAGNAWLKWAFSEAAVLAAQKDERIGALLTRLSSRLGKPKALSALAHKLGRAFYHMLHTKEVFDVNRFVRH

SEQ ID NO: 385525 - protein, 339 aa, unidentified
MMIIGCDYHPSFQQVAFVDTKSGECGERKLNHKLEAENFYRDLHGHGVRVGMEATGHARWFERLLAELQYELWIGDPGEIRAKRVRKQKTDRQDAELLLQLLVENRFPRIWVPSPENRDLRQLLWHRHRLVQMRTRVKNQLQAIALNEGLRRQKGLWSKPGRAQLEALGLAPWSARRRQDLLELLDRLNPRIDELSAAIQQAAEQWPEAQRLMTHPGVGPITALAFVLILGVPDRFRCGKQVGSYLGLIPCEESSGGRQRLGHISKQGNTLLRFLLIESAHAVVRYERDWRRRFLHLAMRRGRPIAKVAMARKLAVRLYWMWRQGWNYQQISKFGSHVE

SEQ ID NO: 385526 - protein, 331 aa, unidentified
MKNKEFVGIDVSKNVLDVFVLSAKFHFTVANSPEGFAQLLEIVSSKLHEAFSRVFFCFENTGRYSRLLSVFMQDGGFGFAALDALDLKRSMGLTRGKSDKKDARTIAVYAWRRRDELVTTKLAGPVLDQIRQLLTLRDKLIRHRTAFKNTSRDLHDGYFDGEFDFIKKRQDSMLSHLQQEIDLVEKEINRIISLQDDIQINYKLLRSIPGIGNVLAVYLIALTHNFTRFDTPRKFACYAGIAPFEYSSGTSVKGKTKVHPCANKHIKSLLNMAAMASIQINGEYKMYYQRRLAEGRNKMSTLNIIRNKLVFRAFAIVKRGSPYIDLHKFAA

SEQ ID NO: 385527 - protein, 375 aa, unidentified
MGHHSEAFIGIDTSKLRNAVAVAEAGRKGEVRYLGEIDTSEAATRKMVAGLAAKHATLTFCYEAGPTGYGLQRLIESLGHSCIVVASSLIPTRPGDRVKTNRRDAEGLARLLRAGELTAVWVPDARHEAMRELTRARDAARQDLTRKRQQVSSMLLRLGQYYPGIKTWGARHRSWLANLKLEHPEQRFALEEILQAERQAAERIRRLEQAIRDAVANWSLGAIVPALMAMRGIDLVSSVTILAEIGDLSRFENPRQLMAYLGLVPSERSTGDSVKRGGITKAGNGRARRVLVEAAWAYRHPPRVGYEKQALVAAAPRPAREIAWKAQVRLCKRFRTLSRAGKKSTVVATAIARELAAFIWAIAREVRNGTPARAA

SEQ ID NO: 385528 - protein, 346 aa, unidentified
MEHYVGLDVSLKQTAICIVDQTGKIVREGAVASDPEAIAAFIKSHAPHVARVGLETGATSTWLWTELNKLGLPVICIDARHAKAALKMQINKSDRNDAVGIARIMQCGWYREVRVKDLDSHAIKALLVSRALLVKIKRDLENQVRGLLKNLGLVIGRAKMNVFAVRAAELAEARPELAAAVEPLLKAREAIGQQVADLDRKVLRLARNNAQVRRFMTAPGVGPITALCFLATIDDPTRFRRSRSVGAYAGLTTRRYASGEIDWTGRISKCGDKMLRSYLYEAANVLLTRVAKWSALKSWGMRVAKRSSLRKAKVAVARKLAIILHRMWIDGTEFKWSSKEAANQPA

SEQ ID NO: 385529 - protein, 334 aa, unidentified
MTTYNYFIGTDIGKKTNAVCVFDALENRKLELTIPNTKAGMEALLKQLNKLPNFELETTLFCMEHTGIYCQPMINFFYPIGANLWLQSAVHIKRSLGLTRGKTDKADARLIAKYCIRHQRDQRLFKLTDKVLATVRQLAQQRERLMEMAKAFTDLSQDYQAMGLLAELKLHQQTSEVALVALQKQIKLVEAQIEGHIKASPELKSNMDLLMSIPGVGRQTALFMLIFTSNFTRFTDAKKLASYAGVAPFAYESGSSVRGRTKVSRMANTKLKHLLHMAALAAVKAKGELRDYFERKVSAGKRKMSVYNAIRNKLVHRMVSVMERRTAYMAMYEK

SEQ ID NO: 385530 - protein, 380 aa, unidentified
MAKVRSWAGLDVHAAKVVACVVDAESGEMTVHRLPGDTAKVVAFCAALPGATRVAYEAGPTGFGLARALQAAGVECVIAAPGKIERPAQDRVKTDQRDAERLVRLLMINALHPVRVPGLAEEALRDLTRAREDLRGDLMRARNRLGKLLLRYDVRYEGTWDRWTDRHRAWLAKVELPERGAQATFLDYLGAITALEIRRETLEATICELAPQSRWATDIARLRCLRGIDTLTAVGLCAEVGDFARFERPAQLMSYLGLVPSERSTGEARRQGAITKSGSSLARWLLIETAWHYRHPPRVGAKLARRQQGQEPAVIALSWKTQQRLYQLWRGLGHKRGKRRQLVVVAIARHLAGFCWAIVNLDPAPNDTPANDEALTPVTV

SEQ ID NO: 385531 - protein, 350 aa, unidentified
MRKNSKVAERHPAETIGIDLGDKMSRYMILNEEGLEVEEGSFRNHADSIAKHFGNRGRARVAMEVGTQSAWIAREFAKLGHEVIVANARELKWITSSDDKNDRNDARKLARLARADRSLLAPVEHRTAEQQAELAVIRARDALVRSRTLLVNTARSLAKGFGLRLPASITHTFGARALAGLAENLRAAMTGLLEQIDLLSVKIGGYDQGIGELAARHPEVERLASVPGVGTLTAATFVLTLGRRERFAHSRDVGSFLGLRPRQRQSGERDPQLGISKSGDQYMRKLLVQCAHHILGHWGRDSAMRQWGLMKSDGSASKKRAVIAVARKLAVVLHRMWTTGEKFKPFPKMA

SEQ ID NO: 385532 - protein, 444 aa, unidentified
MKTELPNIYEQAAGIDIGADKIFVCAKDGEYQVFGCFTKDFQKAAAYIKENGVSRVAMEATGVYWIALKDVLEQEGLVVDVVKAGDAKQLPGRDKTDGSDCQWIRTLYQKGLLRPCVVSDAAIRELRTYVRMRQDHIEMAAQHVQQMQKALIQMNIRLPQVFSDIMGASGKRIIEAIINGERDPEKLVLLCDRQILKNKKEEVILALEGNYREDYLFLLSQAYQGWQFYNELMKECDKKIDEWLERHTKDKAPLEKVTPAKSIRHHKLDIEKLHEKVLLLNDGKDVTRIPGFTDYTVLRLLAEVGTDMSKWKSAKHFVSWLGLAPKKRYSGKGKRHYRGIANTKAAQILRESAQALLRSKHCALGSFGRRIRSTRGPAIAIKAMARKLGILFYNTLTKGIEYVEQGIKKYEEQVRQTELSKVTKWAERLGYTLIPNQQINVVHQ

SEQ ID NO: 385533 - protein, 363 aa, unidentified
MQYIAFDAHKHYTLASVARPDGQVLREERIEHERGALQEFLARCEPGSPVAVETIGNWYWIVDEIEAAGCIPRLVQARKAKLMMGEINKTDRLDVRGLNRLQRNGTLPTVWIPPGELRDQRDLPRTRMVLVRQRTQLKNRLHATLAKYALHDFEVSDVFGVRGRVVLRQRLELLPPHTAYASGHLLKQVEDLSSQIREFEQRIQTTFKPTAAIQHLMTVPGVGLTLAVVIALEVGDVVRFATAEKLAGYAGTTPRVHASGGKTRFGRSRPDVNRYLKWAFVEAANAICLTRRRARSRHVSRLYERLARRRGHAKAIGAVARHLAEATFWILSKQEPYREPKLSTVSSTGDKREIPLSSPKLDR

SEQ ID NO: 385534 - protein, 417 aa, unidentified
MEDWLGGFTCLTKIQYTGGVIVYNLFVGIDVSKDSLSVTGLEPKGNICFSITANMDLNGFSELFKSINSVCKDPSKVFAAMESTGCYHINLFSFLCSKGINTVIINPILISNFTKLSLRKTKTDKKDSLTIAQFILVHKDSISKFSVPQDIKDLRDIARERESLCNMIASTKNEIKRILQFTFPEMESLCNIFTQTMLNFIKSFPSARLIKIAEPKAIEKALENNFSRGRKITITAYDIIRAAQSSVASVSLAKELILPEKISTLLHLMERLDKITDILSNFCQSMMIDELEIITSIEGIDKTSGATFLAEVGNIFNFPSHKSLIAFAGIDPSVFQSGKFEGKSKISKRGNRHLRRVIYIMTVNVIRVNSFFKAYFLKRKQEGLPYKKAILATAHKLVRTIFAMLSHKTLFHVKNSL

SEQ ID NO: 385535 - protein, 348 aa, unidentified
MEHIAIDLGSRESQVCVRTTDGEILEERRVGTRSLGRYLAGRPKSRVVLEACAEAFPVADASLAAGHETVVVPATLAPSLGVGDRGVKTDVRDARNLSEASCRMSRLPAVHVPTKVSRDRKAMCGMREGLVQARTKLINTVRGWTRPQGLGVIRSGSPTTFPLRVKEHVSERAVTMPPYVEQVLKAIEELSLRIGEADEAMEEAAGTDPTCQLLMTAPGVGPTTAVRFAAAIDDVKRFPTAHKLQAYLGLVPGENSSSERKRRTGLTKAGPSKLRWVLVQACWAARRYYKDHPLVLWSQEVEKRRGKQVAVMALARRLAGVLYAMWRDGHPYDKDHRNHGTRASSVDA

SEQ ID NO: 385536 - protein, 347 aa, unidentified
MNQYIGIDLHKAKSFVTRLDRRGRVLEQVELQHATGALQQYLERVPADTRIAVEATGNWMWLYELIEARHPALILAHPLKTKAIASARIKTDKIDATTLAHLLRADLVPAAYIPPRAVRDTREILRFRASLVRLRTQVKNKIAAILSKNGIVTPTKTAFGVKSRQFLATVAVRPCYRLALDGYLRQLAHLTDEITQAAQTIEAQAQADPEAQLLCTMPGIGAYSALLILSEIGNVHRFPDSRHLCSYAGLVPSVHASGGKTRLGRLTKQGSTWLRWILIELSMHAIKGAPQFRQLYQRVARKHGRNAGRTAVARAMLKTIYAMLKHQEAFRPIEQGSTGQRLGAMAG

SEQ ID NO: 385537 - protein, 341 aa, unidentified
MQITTIGLDIAKNVFQVHGIDAAENVVVRKQLRRSQVIAFFKGLAPCLVGMEACATSHYWARELMRLGHQVRLMPAKDVKAYVKRNKNDAADAEAICEAVRRPTMRFVAIKSAEQQGQLMQHRARDLLIRQRTQLINALRAHLAELGVAAAQGCAGVKELLTLITGEEDRGLPVDARASLMVLAAQLQAVQTMIGSLEKRIVKQHRLNQESKRLQTIPGIGVIGASTITAVVPDPTVFRSGRDFAAWIGLVPREGSTGGKRKLGPISKQGDRYLRRILVVGACAVLRRARQQPEKYPWLTHLLARRPFKVVAVALANKMARIAWALLAKGGTYRAPQLTAA

SEQ ID NO: 385538 - protein, 494 aa, unidentified
MKAKACKAKGKHSNSSKRGTKIAARGGAEGMEIVNPHAGGIDCGAQEHYVAVPPQSVEAGEPVVRCFSAFTEGLDALVEWLKACGVTTVAIESTGVYWIALCQKLEAAGIEVFLVNARHVRHVPGRKTDVKDCQWLQRLHSFGLLSASFRPEDAICRLRSLQRHRLNLVSTAGAEIQHMQKALQQMNLHLHHVVSDITGVSGLRILDAILAGQRDAGQLAKLRDHRVYKSTLAQMEAALVGDYRPEHLFVLGQSLQAYRFYQARTQECDAEIESHLQQLAQRFESASTLGAELSQPEVLNDAQSQNPQPAKRKVKRKPQANEPKIDLADYLRRICGVDLTQVIGLNVLSVLLIVSEIGVDMSKWRSAKAFCAWLGLCPRNKISGRKVLDTRTCKVISRVATTLRLAAQSVGRTNTALGIFYRRKKAHLGPAKATTATARKLACLVYHLLKYKEQYREPDPATYQLKVQKTILAKIQKQAAALGYKLLPTALVPA

SEQ ID NO: 385539 - protein, 386 aa, unidentified
MKRDDLSRSLVAFDQASTLVAVVELGLRSWLVAGLVPSLTRQPLKKLRSDPDALLGLLLRWRDQATKAGGRIKRMVVAFEAGRDGFWLARWLRARGIEAHVIHPTSIPVSREHRRAKTDRLDTGLLMRAVLGWLRGEPKHCSMAAIPTIAEEDSRRPNREREKLVGEQTRAINRIKSTLVRFGIRAFKIKLRQASKHLEELRGPEGEPLPPNTMAELRRDLARLQIIRAQITEIERARLERLKRVPRQGTNPMIRMLTKVMGIGIETADVLVHEVLTRKLRDQRAVARYGGLTGSPDESGIKRRERGLARAGNARVRRSMIQLAWRWLMYQKTSALAQWYQARTAGAKSGLRKAMIVALARKLLIDLWRYVTIGKVPPGAVLRPAT

SEQ ID NO: 385540 - protein, 336 aa, unidentified
MTIIRIGLDTSKHVFQIHGVDENEQPVLRRQIRRGEVAKFFAKLAPTRIGIEACGASHHWARVLRGVGHEVLLMPPQYVKPYVQRGKTDAIDAEAICEAMSRPKMRFVPVKTAESQAALTMLGVRDLLVKQRTMLINAIRGHAAEFGVTAPKGPQQVPELLRRVAGEESVPALAREMLGLLASQLEALNAQLKAIEARLMAWHRQHQASQCLATIPGIGPIGGVSFTLKVPDPKAFRSGRHFAAWIGITPRENSTAGKHRPGKISREGDESLRRLLVLGATAVIRQAKAGRAAPWLLGLLARKPKKLAAIALANKMARIVWAMMVSGETYRRPQPA

SEQ ID NO: 385541 - protein, 345 aa, unidentified
MLMVRSVVGGVDTHADVHVAAAIDSNGGLLGIESFSADSAGYEMLLGWLVGFGVVTLVGVEGTGSWGVGLARFLHDQDIDTVEVDRPNRQARRKVGKSDPTDAVAAARAALSGAAAVTPKTRNGPVEQMRVLLVARRSARRQRIQTLNQLRHLVFTAPEPIRVRFKDRYKRGLVTEAAKMRPRPGSDPVTYTTNVVIRNLARRIQGLNAEMASIDDLLTELVAETAPSLIALYGAGADTAASLLVTAGDNPDRLGSERSWANLCGVAPLPAGSGKTSGRYRLNRGGDRNANSALYRIVLTRMSSDQETRRYVARRRDEGLSTPEIMRCLKRYVARQVFKELPRAA

SEQ ID NO: 385542 - protein, 344 aa, unidentified
MKLFTGIDVSLRSVSICVVDEAGEVRHEGKVAAEVDVIVATLKRFSAEIRQVGFEAGTLTQYLTYGLSAAGYEVVCMEARQVAASLAAMRNKTDRNDARGLAQILRTGWFRTVHVKSVESHQVRALLSSRKMILTKCIDIENEVRGLLKVFGVRLPARVGHGGFDDLVRPRVVALPDVAKCLLPLLDARNMLYRTYLQLDTAVRGLARQDPVCQRLMTVPGVGPVTSLTFKAAVDEPHRFRSSRNVAAHFGLTPRRYQSGETDNPGRISKAGDPGVRLALYGAAHALMTRSDAWSVLKAWGLRLAKVRGHRRAVIAVARKLAVILHRMWIDGTDFRAARLEVAA

SEQ ID NO: 385543 - protein, 339 aa, unidentified
MMKLTADQLNAATFVGIDAHPDSLTALAMNRFKEPKGHVSFPNTFTGISQFQTWLQTLGTQKDQIVIGVEGGGNARNTLLSTILSTHDLLFEVNPLYTKHKRSFGTKGDKTDLDDAKLIAGVLTTELEELPRITPEQLTSAMLCLKKAVWFYEEITVQGARLKNQLHKLNREHKLTQEKEEKQLLLKIIKARMKELSFVEKTKVDMEKELKVLFRGYGKNLTSIRGVGIITAARIIAHTGGIERFSNRDGYVRYTGIAPLARSSGKTNFFVKANRGNRKLNSVYYFASLCRIVHNPQVKELYEKKIASGKTKREAITFIMRKTAILAYSMLKSGKEYRQ

SEQ ID NO: 385544 - protein, 406 aa, unidentified
MLFVGDDWAEDHHDVEVQDEAGRRLGKAKLGEGIAGIARLHELIAEHLDEDAEAEQVVIGIETDRGPWVQALLAAGYRVWAVNPLQVARYRERHSVSGGKSDAADAHTLADMVRTDRHQLRPIAGDSDLAEAIKVVARAHKTLIWERTRHTLRLRVALREFFPAALEAFAELAAAEALELLGRAPDPVSAARLTTAQITAALKRARRHHAADKAQAIRAALRAEHLTQPTAVATAYAATVRAQVAILATLNAEITRMQEQVEAHFGQHPDAEIYRSQPGLGQILAARVLAEFGDDPTRYANARSRKNYAGTSPITRQSGKKRLVLARYVHNDRLIDAVGRQAFAAMIASPGARAYYDELRGRGVGHHAALRQLANRLVGILHGCLKTGTTYDEATAWSHREEKAAA

SEQ ID NO: 385545 - protein, 310 aa, unidentified
MSTEIFVGIDVSKDSLEVGVYPSHPGCRMANSEQGVEELIHALRALNPQLVVCEATGGYETLAVGCLAAAGLPVVVVNARQVRDFAKSIGRLAKTDAIDAGVIARFAEAVRPELRGIKDAASQQLSALVTRRRQIVEMITAETNRLSVACRRSRRDIETHVRWLHKRLDQLDDQIKRDIHSGPMWRTKDQILRSTPGVGPTTSAMLISCVPELGQLNRKQIASLIGVAPLNRDSGRLRGRRMIWGGRGQVRAVLYMSALSAIRHNPLIGQFYQRLRASGKCFKVAIVACMRKLLVILNAMVRDQATWRQC

SEQ ID NO: 385546 - protein, 345 aa, unidentified
MEPMYYIGLDVHKRKISYCVKDSSGKVFAEGLLPATRLDLDLWMKTLPQPWSAAMEATIFTGWIYDHLKPHAAVLKVAHPLMLRAIAAAKKKNDRIDAGKICDCLRCDFLPECYMASTAIRERRRTLRYRNLLVRQMVQMKIKISALLMEAGVSYNKQRLHKAGYFRELLARNPDIDEGLGSLLRLCRETVVRLQKTESALVRSLERDPLLLDRVERLMTIPAVGPITALTWALEVGDVQRFSSIKKAISYCGLCGAEKRSGNTVQRTPLSKQRNKHLQTTLIEAAKMAPRNSPELAMLYDKEKQKGNANRATLAVARKLVAYLVAVDRRQKEFLTVERENRTAA

SEQ ID NO: 385547 - protein, 408 aa, unidentified
MDVIYECCGGIDVHKAMIMVCLRNGRRKETREFGTMTHQLREMTAWLKGEGCEIVAMESTASYWKPLYNIFEMEGLPAIVVNAQHMKAIPGRKTDVKDAEWIADLLRHGLLRASFIPDRGQRELRELTRYRKSRMEERARELNRLQKVLEGANIKLGDYLSDITGVSAQALLDAMLSTETLDLQTVQQHRDYRMKASAKELLQSLEGILTPLQRELIREVLRVVREQSEQIQRIDALIGRHISEEYRAAAEALEQLPGVGRVSAQQIIAEIGIDMSRFPSAQHLCSWAGVCPGNNESAGKRKSGKTKKANKTLKSTLTQCAKASVKNKNTFFYAQYQRLVVRRGKNRASMAVAHSMLIAIYHVLQGNQFKDLGAEYYSQFNREKKINSHLKALEKLGFPVMDEMRIAA

SEQ ID NO: 385548 - protein, 301 aa, unidentified
MSSVEDRVIIGMDPHKRSVTIEVMAGDETILGGGRFGTDRDGFQQMLASVKAWPNRVWAIEGCSGIGRHVARRLLGGGDEVVDVPPKLSARTRVVATGRGRKTDATDAHSVALVGTRMAGLRPVVNDEQLAVLRILVDRRRSLGEEHTRMASQLHQLLLELIPGGAKRALSAAQAKALLAKVRPRDIAGKTRRRVAAELIGDLERIYQRKKAANKELRELVAETGTTLMDLHGIGHSGAARLLVEVGDITRFPDRAHFASWNGTAPIDASSGDQVRHRLSRAGNRQINRVLHMMATVQLRN

SEQ ID NO: 385549 - protein, 375 aa, unidentified
MEGAPMLDTTTFVGLDVHARSIKAVSLDVMTGEVRAAAFGYDAGAVAGWVRSVDPRARCVYESGVTGFDLQKRLSGLGVDCVVGAVSKMIKPSADRRRKNDRNDAEFLARMLSVGNVVEVWVPDDECEAARDLTRALEDARDDLSRSKQRLSKFLLRHGLVFDERTPTGRRKGNWTRAHWSWIESIRFAERADNDVLAYYVDAVRRAAEEKARLEGLVEAEARKPRWRKRVDSLRCLKGVDTASAADLVFEAGEFSRFGNARSFAAWVGLTPSEHSSGESDRRGAITKAGNKHLRKTLVEAAWHYLTCSGRPKDLAKGQAPDRGARRHAAKGVRRLVERREALLARGVHGNKANVATARELACWVWAVGLMAEEA

SEQ ID NO: 385550 - protein, 428 aa, unidentified
MTQDGIAVWLGIDWADEKHRWAMRINGESRIHQGELEHTPEAVEQFVSGLAIRFPGRQVAVALEQSRGALIFMLGKYAHLVLYPIHPNTVDHYRKSAFPSGAKSDPGDAVLILDLLYRHAERLRPFHPDTVETRTLQLLVEARREAVDDKTRYLNRLTAQLKMFYPQVLDWFSTPDTVVVGRFLLKWPTLEKLQRARAGSIADLLSEHRIPDSRIETLMELIAQAVPAVKDAAVLESSVLIVRRLVQQLEVLHEAIADHDKKIAALAKSHPDYGIFSSLPGAGPAMAPRLIAAFGTQRDRYATASAIQRYAGIAPVTESSGKQKWVHGRWACPKFLQTFHEWAWMSTKKSTWARSFYDQQRNRNKSHHAAVRALSFKWIRIVFRCWKDRVPYDETRYTLSLQKRSTSKNVEIRVKNFYGFAQFDGLSC

SEQ ID NO: 385551 - protein, 367 aa, unidentified
MKKISTEAAQQSGKISEQKLTVGLDVGDRSSWYCVLDEAGTIVLEQKLGTTPKAMKEVFGSMPRSRIALETGMHSPWVSRLLSKLGHEVIVAHARNVRLIGESRKKDDRLDAQTLARLARIDPQLLSPVKHRSAKAQADLTVIRARAGLVRARTALVNTARGLAKSYGERLRGCNVRNMNPEKAQELSPELRSALEPLLAGIESLSERIRECNEGIERLARESYPQVAQLKQVKGVGTLIALTFLLTLEDAHRFGKSRDGGCYLGLQPGRRNSGQSEPQMHISKEGDPYLRTLLVQGAHHILGPFGADSDLRRWGLKLAERGGKSGKKRAIVAVARKLAVLLHHLWVSGEVYEPLRNSKQRAMPAAA

SEQ ID NO: 385552 - protein, 348 aa, unidentified
MLADQLDYIIGVDPHRDSHSVAVVHVHSGAVVFESTVIANSDGYAQALKLVNRHAPGRRAFAVEGTGSFGAGLTRFLTGRGERVLEVGRLRRERRSGGKTDALDAVRAARSALSQQQPSTPRAGGERQALQALVAAREGAVNAKRAGLCQLRDLLITTPEPLRSELRPLTRARLLQRLAATRPHGRQDRELRGSLLALRSIARRVLQLTAEERELAREIETLTRKLAPQLLDQPGVGPHAAAQLVLSWSHRGRITSEAAFARLAGAAPIPASSGQTIRYRLDRSGDRKLNRALHMILVTRKRSHPATIAYIERRIQEGKTRREATRCLKRYLARSLYRLLEHGAPIAT

SEQ ID NO: 385553 - protein, 457 aa, unidentified
MPQPKRSRSRTGLSAVHPAAAAIDIGATMHVAAVGPDRDTEPVRTFQTFTDDLHRLADWFARCGVKTVAMESTGVYWIPVFEILEQRGFEVMVVNARDAKHVPGRKTDVSDAEWLQRLHEYGLLRPSFRPQAEIAGLRAYLRQRERLLDYAAAHIQHMQKALMQMNLQLHHVVSDITGVTGMNIIRAIVAGERDPNVLASHRERGCHASVETICQALVGNYREEHVFALSQAIELYDVYQTKVAACDRQIEVILKRLKESATPPASKLLPPKHRSRQPNAPSFDARAALHAILGVDLTQIHGLGPYLALKLVGECGTNLTAWPTAKHFTSWLGLAPHNKISGGKVLSSKTRRTSNRAASLLRLAAVSVGRTDTALGAFYRRLAARAGKAKAITATARKIAVLFYNTLRHGMSYADPGATYYEERYRQRVLGNLQRRAKSLGYVLHQAERDPVQMVVS

SEQ ID NO: 385554 - protein, 351 aa, unidentified
MKTEHTAGPKLFIGIDIHKRSWKVHCSTDISGGKTFSMAPSPEGLKNYVDRYFPGHEVTTAYEAGCCGYRAHRCFEGYGWRSLVVNPADIHRKGKEKHTKTDRIDAQLIARELKDGRLDSIHVPDIQREQLRSLFRRRNDLVKDYRRIKSLIKSQLLYFGTVVPEEFDNSHWSHNFRNWLDALEFEYSPARATLDSRMRQFRFVDQDLRDVSTQLRRFCKTYYKKDYNLLRSIPGIGGIVACGILCELGDLRRFRSLKHLSGYVGLAPGIHQSGDKLRTTGITRRAHRLVRSYFIEASWQAIRTDPVMQSYYRKHLGKNVKSIIVKVARKLLSRTLAVIRTETPYVVGVLE

SEQ ID NO: 385555 - protein, 411 aa, unidentified
MERIVERPGALDVHKESATACVRVWDGRTLREEIAEFKTTVAGLLALSDWLAALGVRQVVMEATGVYWRPVWAVLEDAFDCMLVNARHVKQCPGRKTDVLDAQWLCQLLEAGLLKASFVPPKPIRTLRNLTRYRKAQINDRQREAARLHKIMEDTGIKLGCVASDILGKSGRDMLDALVSGTKDPEVLAELARGQLRKKIPALREALVGRFDDEHALVIGQILSHIDFLDEAIDRISADIEERMLPFARERDLLMTIPGVKQRAAEVLIAEIGTDMSAFPTPKHLASWAGMCPGNNESGGKRRSGKTRKGSKWLRATLTESANAAARSKNTYLAAQYARLRGRRGHAKAITAVGHSILTAAWHMLQTGEIYNDLGGDYYTRQNPDRATKLLLRQLEALEHRMTLEAREVAA

SEQ ID NO: 385556 - protein, 417 aa, unidentified
MFKIFRKNCCGLDVHKTWIYACIGITDTNGRTEYKQARFSSFSKGLKELAQWLAQYSCTDVCMESSGKYWIPVFNILEKTCFVTLAHPKYTKPQKGNKTDVKDAKWICDLFMCDMIKPSFIPSPEIRQLRDLIRYRFKLTNMLTGEKNRAHNCLTVSNLKLDDVFSDVFGKSSRSITTYMLDHPGERFDVAPFVDGRCKTPVEEIQAAVDGAISPEQAVKLRQCLAHIDELEAHRQEIEQEILLIAEPFSAVLDFLYTIPGLDKNPMTAIAILSEIGPDMSVFPSSKNLVSWAGCCPRNDQSASKVKSTRISRAGCYLKPLLVQIANGLLKSKEHPEFRERYHRIKTRRGHKKAIIAVCKMLLTAIWNVLSKLEPYNPEGFLEHRPVKEAKILTKTQALELFRKRGYTIIDDSVVNS

SEQ ID NO: 385557 - protein, 345 aa, unidentified
MQIVGCDLHTRYQQIAMLDQETGELIERRLEHESGEARAFYVALSSPVRVGIEATGHTRWFERMLAELGHELWIGDAAQIRASVVRKQKTDARDAAHLLELLLSERFPRIWRPTMAERDLRQLVWHRQKLVWMRNAVGNQLHALAMGEGVCRKKKLFTKKGRAELESLGLGVWASYRRQELLTMLDRLDASLREMDGAVAEQAEQNAAAVLLMTHPGVGPVTSLAFVLTLGPVERFERSKQVVSYLGLNPREHSSGGRQRLGAISKQGNPMMRSLLVEAGHTAARLDGELRQDYQRLKLRRGSGVAKVAIARKLAVRMYWMLRGPASYAQLVRMQGSPWATLVKE

SEQ ID NO: 385558 - protein, 416 aa, unidentified
MTWGGQRQARDLRVDRLMNTNPTHLVSEPVPLESSRKRAKRIKLGLDVHGAHHVVVRQIDEAAAQPPQKFTPEQFLVFARKQLALADEVHSCYEAGPFGYVLHRRLTQLGVRNLVVRPRDWSTYGERVKTDSRDAAALCSCLDRHLAGNRGALAPVWVPTAAQEQARALGRQRQSLQRERVRLILQGKSAAQLCGEHLPKDWWVARTFAQLAPTLPDHLVAQLQCWQRVLVSVNTELAALTAQLEQHQTTPRPLGVGALTLELLTREVGDWGRFRNRRQVASYTGLCPSEHSSGQTRRQGAITRHGNPRLRHLLIEAVWRLFKFQPNYQAIRKWHAALLEPRLSRARKKKDHRRGGPATGRGPVAPGHRACRGRHARLAVERLNFGAAGRPAISLGGLRPARLIDRAARWLLCVTP

SEQ ID NO: 385559 - protein, 414 aa, unidentified
MEGEINKSCGLDIHKRFFIATILSRSGEIQQQRFDRDDNGILNLKNWVTSEKCDVVACESTSDFWVPIYDSLINHLPVIVGNARDMKAFTHKKTDKIDSEFIAKLALNKMVQPSRVFLKNQREYRSYVRLRLTLVRKRTDMKNEAHAILSSEMLRLSDVLTDIFGKNGRAILSGISSGKTVDQIIESLSPNVRKKGSQIREILDREISQSAAIRLQICLNLIKHFDDEIKLLEREIFNYAYGKHKREMEILMSVPGIGEIGAATLIAEINNFNDFSSGDKLASWLGLVPNVYQSADKYHNGRITKRGSKVARWILTQIAQAAARKKNSKLKEFFNRKKKSIGHAKAIIALARKIATIIWHLVTNDEMYEDETGYEKGEIQKRKIVETETFTVDERITIISGLIAIMGKEDRGST

SEQ ID NO: 385560 - protein, 346 aa, unidentified
MEIIRVGVDLAKNVFQLHGVDEHEKPVWKRSLRRGQWLRELQRRVAPGAEVGMEACAGAHHWGRELRSRGYRVKLMAPQFVKPYVKSNKSDRNDAEAICEAMSRPSMRYVELKSAEQQDIQAVHRVRAELIKQRTGKANQIRGLVGEYGLVAPVRIGHLRKALPRWLEDATNGLSDRFRRLLAGLAEDLRGLDARIEALDEEMAGIVRETPAAQRLLALRGVGPTTATALVAALGTGESFARGREFAVAVGLTPKHHGTGGKERILGISKRGDAYLRQLLVHGARAAVRTAKGKPDPLSRWINALLAHKHSNVVTVALANKTARMAWALIRHDVDYDPRLAAYGSA

SEQ ID NO: 385561 - protein, 349 aa, unidentified
MTEQCRSYAGECVYVGVDVHKETYAVTCVCHKQIVKTATVQAEPTGLAASLLRWFPGATLYSAYEAGFSAFVLHRALTTAGITNIVVNPASIAVAANDKVKTDRRDSKKLAVDMADGRLRGIYIPTEEEELARLLPRTRAQLVEHRATLARQIKAKLHQFGLITPSSRRLLSHRYLREIESWTLPPELRASLKMLAEQWRFVTRQLIEMRRLLRDQAKAQEDIEKVYRSVPGIGEVVARTFATELGDMTRFANERALFSYTGLTPSEYSSGASVRRGHMSRQGSSRVRHLLVETAWRALPRDGVLKEMFDRIAATRGKKRAIVAIARRLTGRIRACFRQGTTYAVGTYA

SEQ ID NO: 385562 - protein, 400 aa, unidentified
MRTVFGIDVSKASSEVAILVNGEKIHGYTMLNDAIGFNRLLNDLKTVHNPEIIFEATGVYSRRLRVFLEEYGYAYTQLNPLEAKKQLDNLRVRKTDKIDAEKLAHSQFILNRKPTYAQEEVYQHLRDLSRFYQNLTEDIVRAKNRLHKVLQVTFPELENLLSTPTGEQYWNLVMAFPCNEFVLSLSQSNLCEIIRQSTSKRISEKRIAYLTDKLIKLAKQSFCAVKKTSPMLEEVRYYAQELLRLSEHRQVVLDDMVALAQPLSEYDILRSIPGIAETTATSIIGELGDIRRFQSTNQINAFIGIDLRHYESGNFLAKEHITKRGNPYARKILFKCIHNIASASHTNPCHIANFYEKRKRQSTTASTKPHTIASIHRLIRTMYYLITHNKLYDYSLTQNR

SEQ ID NO: 385563 - protein, 345 aa, unidentified
MEITTVGIDLAKNVFQVHGIDERGQAVLRKQLRRTQLAVFFGNLPRCVIGMEACASAHHWARTLQRFGHTVRLIAPQFVTPYVKTNKNDVADAEAICEAVGRPNMRFVPAKSIEQQAILSVHRVRQGFVKARTAQANQIRGLLGEFGLVIPQGIINVAKRVPEILEDASNELPVPFRHLIDRLTKHLKELDRQVKEFEREIIAWHRSSELSRKLEKIPGIGPLAASALVASIADARSFKNGRQVSAWLGLVPRQSSSGGKPTLLGMSKRGDAYLRTLLIHGARSAILAAKNKVDNTNGWLTNLLQRRHPNIAAVALANKNVRTVWAILAHGREFKPDYVPTRMAA

SEQ ID NO: 385564 - protein, 284 aa, unidentified
MNYSHFIGLEVSKSKIDVAVFDKGEITIGLVFKNNPKDLKRAIENLVESERLDLKRTVFCAEYTGMYTYSLIQVCDEIGIDLWLENPAQIKLCTGVHRGKSDKIDARRIALYAFRFKDKINLYEQKTERIQELEFLTSERELLVTDKQKYSVQVKDQKGHINDTFYKNKASRLKKLIRTLDKLIKEVETKMEQVIRSDMKLSHQYKLITSVAGAGKQVAINTIVATKGFTKFNDPRKFACHAGVAPFSYSSGTSLRSKRRVSQRANKKLKKLFHMAPVRNPGAR

SEQ ID NO: 385565 - protein, 415 aa, unidentified
MKVVFPTCCGVDVHKTFLVATIITTPADSLQPNYQKKRFSTFNSDLNRFADWLLEHNCLDVCMESTGKYWVPVFNVLEKRGIRVVIANPKWVKAVKGNKDDTKDSKWIGDLFRIGLVKSSFIPDLNIRILREFTRYRYKLVSMKSTEKNRFQNAFTVCNVALDSVVSDMFGKSATAITDYLTSDESFDSEHCVSLLQRSLKKKAEQVLESIEGFSIASEQKARIKIIREHYDFLEKMIAKVDTCVSEMVEKHEGEINLLCTIPGIDRNSAITIISEIGTDMRQFGSSKRLCCWAGLTPGNNESAGKKKSVRISRAGVYLKPALVQVAHAAVKDKASPYYALKYERITKRRGKKRAIIAIARMILTAVYSMFCTGEVWNPVDLYKVDMPEHLKEQQLAKAIKQATRFLEKQGLSVA

SEQ ID NO: 385566 - protein, 408 aa, unidentified
MNAVGIDVSKGKSMVAALRPMGEVALLPQEFLHTEVGLEQMAYAIIALGEDTRVIMEATGRYHEPIAAALHEYGIYVCVLNPLFIKQSGGGSIRKVKTDKADAMKIAKYGLDNWVDLREYTPMDTVRQQLKLCSRQYNLYMKTVVSLQNNLISLTDKTFPGVNELFSSPERADGHQKWVDFVMTFYHCDCICRVSENAFAERYQKWCKRKGYHFSAEKAQDVYLGSCGHFTTLPKNDNTKLLITTAAQQLLAGKMTLAALRTEMTRLAKQLPEYDIVRAMYGVGETTAVQLMAEIGDVRRFPRRSSIVGFAGVDPAVDQSGKHSTKSVPTTKRGSPHLRKTLYQIVCTYLKKSPVDEPVYQFLNKKRSEGKPYFVYMTAAQNKFLRIYYARVKECLEAFDAQQDTSQR

SEQ ID NO: 385567 - protein, 342 aa, unidentified
MINITGVVAVLGIDLAKQVFALHGVDRSGRVVLKQVISRSTLMRVIAQLQPCLIGLEACSGAHEWARQFQGHGHTVKLIAPAFVAPYRKSGKNDDNDAEAICEAVSRPSMRFVPVKTREQQALLSLHRVRQGFVEERTAVINRVRGLLAEFGLVFAQRHGGLRAIPTALEGLPLLARRAVDDLLAHLRQINERIAAYDVEFKHLANQDEAAKRIMTIPGVGPITALGMVATLGHARDFKNGRQLAAWLGLTPKQHSSGGKTRLGGVTKRGDDYLRTLLVQGARATMQHASRAEPTRLSRWASNLVERRGYHKANIALAAKNARIVWALLARGGEFEAKAAAA

SEQ ID NO: 385568 - protein, 354 aa, unidentified
MEQYVGLDWAYRRARWCAKAPDGAVLAEDWAPADEDGLARLVARLGPDVTACVEMMSGAAWVRDRLQAGGWTVQVADARKAKAVASLAAKTDKLDARVLAELARRDLVPEVWVPSFGDRELKERLGRRMHLVRLRTSAINRAHGVLTQFGIRLAFDRLRRPDAGELLERRGVPDVWRRSVAEAVAVVDQLDARLAPLERELRPLARADARVCLLVTIPGVGELLGLTIAVCVGDIARFASAKKLVGYSGLTPRVAQSGERSRTGKLSKTGSKVLRWAAIEAAQQAWRPTNPWNALYRDVKSRSGGQGNPAKAAVARKVLIAAWHVLALEQPFTPARPRGATNPVPASSGCVLVD

SEQ ID NO: 385569 - protein, 465 aa, unidentified
MSRRSKSNRSHSDRVKKRIAGHLEKINLFAAGIDIGSESHFVAVPEELDEQPVRSFGCFTADLEAMADWLVKLGITTVVMESTGIYWIPAFEILESRGLDVKLVNARHVKNVAGRKSDVLDCQWLLQLHTYGLLNGAFRPDEQVCSLRSYRRQRDTLVGYRASHIQHMQKALRQMNLLLDNVVTDITGKTGMTIIRAILNGQRNPVELARYRDKHCKKSEEEIAKSLKGHYRDEHVFALRQAVELYDTYDEKIRACDKALEQKLNTFDSKDDKDSQKPSTPDKPSKKRKSRCAPDFDVRSELNRVSGVDLTDIDGIDENTALKIVSEIGLDMSRWPSAKHFASWLGLCPGTKISGGKVLNRKTKRLPGAAATAFRLAAYSLTRSKSALGAYYRRMRSKLGAPKAITATAHKLARLVYSMLKHGSQYVDEGQEYFEQRYRERVLKTLKQKAKDMGFTLTPVETAVG

SEQ ID NO: 385570 - protein, 337 aa, unidentified
MKYSGIDLHSNNSVVTITDEEDRVMAEKRLPNDLTKIIDLLKPWKNELAGVVVESTFNWYWLVDGLQAAGYKVHLANTTAIKKYDGLKHSGDETDARHLAHLLRLGILPTGTILPPEQRTVRDLARKRMQLVRSRTAHILAVENITARQLGMRISSNQVKQLTAEAVDQMPLPPDVALAIKANVAVITTLSAQIDLLEKRLQESVRTRAEYGLLTSTPGIGQVLATTILLETGPIERFAAAGNFASYARCVDSRHTSNGKKKGEGNTKNGNKYLAWAFVEAANFALRYCPEAKRFYERKKAKTNNVVAIKALAHKLARACFHILKEKKPFDVKRCFA

SEQ ID NO: 385571 - protein, 407 aa, unidentified
MEVIYPRCAGLDVHKQTVVACARIAGDGPVAQHVRTFEATTAGLLALSDWLESFGVQHVAMEATGVYWKPVWHILDGHFELILANAAHVKNVPGRKTDVNDAMWLADLLAHGLIRASFVPPVAVQELRTLTRTRKQFVRERAQHVQRIEKVLEDANLKITSFISDILGKSGRAVLQAIIDGHSAPDRLAACVTTRVKARPEELLEALRGRIRAHHRFMLKLHLGHIDALDAAIADIEREVSLGLEPFRAAAKLLSTMPGISQVAADVLVSEIGIDMSRFETPGHLLSWACLCPRNDESAGKRRSTRLRRGGKWLKTTLVQSAWAAVRVKGGYLQAQFQRIRARRGAKKAIIAVAASMLTAAWHMLRDGTEWHDLGAAHFDRADASKTANRLIRRLQQIGYQVTAVPV

SEQ ID NO: 385572 - protein, 412 aa, unidentified
MEVMYPRCAGLDVHKETVVACVRIVEGGNVSRSVRTFATTTASLIELGEWLEVNGCTHVAMEATGVYWKPVWQVLADSSLELVLANAAQVKNVPGRKSDVNDATWVSELLAHGLVRASFVPEPAIQQLRGLLRTRKQLVREKASHVQRLQKTLEEANIKIESVLSDVMGRSGRTMIQALIDGESDPAKLAALAHWKVRASAATLREALHGRIKRHHRFLLRLHLQQVDALDAAIAEIDREADAGLACFRDAVKQLSTTPGVSELSAQVILSEIGTDMGRFASAAHLRSWAGLCPRNDESAGKRRSTRLRRGAPWLKAMLVQCAWAAARTKATYLHAQFVRLRARRGPKKAICAVAASILTAAYHMLKDGTFYEDLGAVHFDRRRPETQARRLIKRLAELGFSVELKPAAAVS

SEQ ID NO: 385573 - protein, 339 aa, unidentified
MQIVTLGIDLAKNVFQLHGVDRTGKVVLTKRLRRAHLLRTVAQLPPCLIGVEACPGAHYWAREFAKFGHDVRLMGAQFVAPYRKGNKNDGNDAEAICEAVARPSMRFVPVKSVEQQDLQMLQRIRENVIQNRTALINQIRGLLAERGIVIAKGIARARNELPLILENGENELSDLARSLLATLREELQHIDAHLALIDRRIVHQFSSNEACARIAAISGVGVMTATAIVSSVGDARNFKNGRHLAAWLGLVPRQYASGDRSHMYGITRRGDKRLRSLLIHGARTVVHYAAKKNDRLSQWINRLRSKRGTNVAAVALANKFARWIWAILAKGGTYRSQTI

SEQ ID NO: 385574 - protein, 412 aa, unidentified
MRRVIGIDIHRTFGEVVIWENGLLRHEGRVDMTRTALEGLGRKLESTDEVVIEATGNSMAVSRVLTPFVARVVIANPLQVKAIAHAHVKTDKVDAGTLASLHAAGYLPEIWTPDAETERRRRLVARRYQVVRHRTRLKNEVHAILHAHLIPNCPHADLFNRRGRDWLARKPLPGDERAAIERHVRELDRLGEDLAVLDHEIAEGAMEDASVNRLMTITGVNLTVAVGLMAAIGDIERFDSPGKLVSYFGLNPRVRQSGLGAAHHGRISKVGRSHARAMLVEAAWAAAKAPGPLRAFFIRIRAKRGHQIAAVAVARKLAALCWQTLTNQEDYRWARPSLVAHKRRAMELAAGRPQKKGNRRGPAYAYNVKELRNQEMRIAEQAQKGYEQFVEAWSPRPPRGRVRGRPNPAGSP

SEQ ID NO: 385575 - protein, 338 aa, unidentified
MKKFFIGIDFAKTKFDVVVLSCDNLLSKGEHSQFCNTKDGVKQFEKWLRQMHGTSVITDSVICGENTGVYSLLAAKILSKDGYTVCLESALRIKRSLGISRGKNDKKDARDIAEYAARHHDKLVVYQAPSQTTEALKTLFTQRRLMVKQKSDLQRRNKELTALYKDNPLLKKMLDSDKRIINVIDKEIEKIEAQMKSIIGSDPEVNKVYNILTSMKGIALVNAVALIVYTHNFKRFDYDARRICSYWGIAPFANQSGTSINGKPHVSHFADHYLKSLLSQAVLCAIRYCPDIRKYAQRLMAKGKHISIVHNNCKNKMIHILVAMVKNGTYYGDTQKKS

SEQ ID NO: 385576 - protein, 431 aa, unidentified
MTESSDYESVQVFIGVDVGKDTHHAVAINRSGKRLFDKALPNDENKLRSLISDLKQHGQILLVVDQPATIGALPVAVARSEGVLVGYLPGLAMRRIADLHAGEAKTDARDAAIIAEAARTLPHALRTLKLADEQIAELSMLCGFDDDLAAQTTQASNRIRGLLTQIHPALERVLGPRLEHPAVLDLLQRYPSPEKLASLGEKKLAAQLCKLAPRLGKRLAADIAQALAEQTVVVPGTNAAAVVLPRLALQLITLRKQRDEVALEVEQRVLAHPLYPVLTSMPGVGVRTAARLLTEVACRAFASAAHLAAYAGLAPVTRRSGSSIRGEHPSRRGNKALKRALFLSAFAALRAPLSRAYYTRKMSQGKRHNQALIALARRRCDVLFAMMRDGTFYTPQGHNMLDNLIGAPPRTITSGSRIFTTCASDFASRSS

SEQ ID NO: 385577 - protein, 414 aa, unidentified
MEPQSPFRFFVGVDWASEEHMASVLDATRREIDKKVYAHSGNGLNHLADRLTELSEGNPGTVAVGIETPHGAVVETLVERGFAVYSLNPKQMDRFRDRHCVSGAKDDSRDAYVIADALATDIHKFHRVQLDGPRIIRLRQLCRSEEEIKKSQRQAGNQLRELLNRFFPQILSLCPSVDEPWVWDLLEKAPLPDQAAKLPAARIQRILSNHRIRRIDGKQVREILQSAPLRLAPGGAEAASEHALMLLPQLRLYHGLLKQVANRIESVLDEISTDEQTIEHRDANLLRSLPGVGRCVAATMLAEASQALAERDYHALRSYAGVAPITRRSGKRQSVMMRQSCNERLRNAFYHWARVSAQNDPRSKLHYANLRAKGHTHGRSLRGVADRLLSVLFAMLRAGVPYDASRRMTAATPT

SEQ ID NO: 385578 - protein, 457 aa, unidentified
MTETKRRREQRSMLPVHPDAAAIDIGATVHVAAVGPARDPEPVRSFGTFTGDLHRLADWFAQCGIKTVVMESTGVYWIPIYEILEQRGFEVRVVNARDAKHVPGRKTDVSDAAWLQRLHEFGLLRGSFRPQGAIAALRAYLRQRERLLDYAAAHIQHMQKALTQMNLQIHHVISDITGATGMRIIRAIVAGERDPDTLASYRDIRCHSSVETVRQALIGNYREEHLFALAQALELYEVYQAKVATCDEKIEVVLERLKQPCRAPAKPLRAARHKTRQPNAPAFDARGALYAVLGVDLTQIHGLGPYLALKLISECGTDLSAWPSAKHFTSWLSLARRNKISGGKILSSRRRPSGNRAAALLRLAATTVGRTETALGAFYRRLSARIGKAKAVTATARKIAVLFYNAVRHGMDYADPGASYYEERYRQRVLTNLQRRAKAFGYVLQPTEIKAVSMAVS

SEQ ID NO: 385579 - protein, 355 aa, unidentified
MNSRKYIGMDVHKESISIAVRNDAGKIVMECVIETKASMILDFINGLRGELQVTFEEGTWAAWLYDLLKPHVTKLVVCDPRKNASMREGNQSDKIDARRLAELLRLNHLSPVYHGEHGLRSLKELVRSYLTITKDLGRVMSRVKAIYRSWAIPCTGKQVYASRHRAEWLGKITEPGVRRRAEFYYQQLDALRILRQQVRRDLLAEGKKHKAWKRLCQIPSIGPIRSAELLGILQTPHRFRTKRQLWTYSGFGIETHSSADHRSVGGQLQRVKKQISIRGLNRNCNHDLKNLFKGAAIVASSKPGPFEEFYTALLSKGIRPEMARLTLARKIATIVLIVWKRGVSFDARYLKPQTV

SEQ ID NO: 385580 - protein, 340 aa, unidentified
MTITTIGIDLAKNVFAVHGVDQNGKTVLVKSRVTRAALPGLIASLPPCVIRMEACSGAYYWARLFLQYGHEPRLMAAKFVSPYRMAGKSGKNDAADAQAICEAVRRPHMRFVPVKDESQQAMQCLHRNRQGFIEEKTATYNRLRGLISEFGVIAPQSTDALRHMVSAQKSSLPLQVQQCVDDLLEHVDRIEANITEYDRILSRIAKTDHRSQRLMKLKGVGPTTACALVACIGNAHDFKNGRQLAAWLGLTPSQYSSGGKSKLGRITKAGDSYLRTLLVQGARSVLIGAEKRTDLFSRWVCSLVERRGYWRAVVAIAAKNARLCWASLHYGDDFRLYSAS

SEQ ID NO: 385581 - protein, 404 aa, unidentified
MNMFVGIDWSHTNHEVCVIDIEGKVTASFSVQHSHEGLKFLCDKLREQAQGDLTTIGCALETSRGLLVNTLLAEGFNVYPINPREVDSRRKTSGAKTDRIDAKIIAKILRSDYQDLKKLEPDNETIAELRQLTRDQNGLIQKQTALFQQLRDCLKEYYPGLLKIFSILSSETPLMFIKSFSTPDDALQANVEQLTALFKQCRVPRPNDLANRVYSELHKPQLQARPAIIRAKSRLALGLIEQIQVLKKLIQDYDCEIDRIFKSHSDSQIFTSLNRAGKRLAPRLLAEWGDDRTRFNNAKEVQALAGTSPTPYQSGNLSWPHYRWSCVKDFRYVMQHYAWQSTFTEPWAYDYYYRKRSEGKTHHEAVRALANIWVRIIFVMWQKHVPYNRETFLAAQKAHKKQIA

SEQ ID NO: 385582 - protein, 295 aa, unidentified
MECYVGLDVSLKQTSICVVNERGSVVREGVVDSVPEAIAGFVRSKAPGAVRIGLETGPTATWLWTELARLDLPVICIDARHAKAVLKMQVNKNDRNDAAGIARIMQTGWFKEVRVKDLDSHAVKALLASRALLVKIKRDLENQVRGLLKNLGLVIGHGTFNVFALRAKELIADRPELTSAVSPLLTARTAIEQQIGELDRQVLKLSRQDAQARRFMTVPGVGPITALCFKATIDDPARFRRSRSVGAYIGLTTRRHASGELDWSGRISKCGDAMLRMYLFEAAGVLRPACRNGRR

SEQ ID NO: 385583 - protein, 346 aa, unidentified
MEQIIRIGMDTSKHIFQLHGVDGTERPVLRKRLGRQQMSAFLSKLPPTVIGMEACGAAHYWARVLGEFGHEVKLIAPQHVKPYVKRNKNDGRDAEGLCEAMSRPTMRFVPVKTAEQQAALMLAGVREQMIARRTQLSNMIRGYAAEFGLTTAKGLDKIEPLLAQIAQDESVPALARDLFTLQGREYGQLQTELKAIEARLRAWHRSNANSRRLAKIPGIGPVGAPELIMKTPDPRAFTSARHFAAWIGLTPKDHSTAGKTRLGKITRAGDERLRSVLVAGATAVIKQARLGRGHPSPWLVALLKRKPPKLAAVALANKNARIAWKLMVTGESYDGARMPAASAAAA

SEQ ID NO: 385584 - protein, 440 aa, unidentified
MPTPSLPVLDPTAAAVDVGSEQMHASIAGGPPKVFGATTGELHALRDYFLQQRVSSVAMEATGVYWLCAYEVLEKAGLEVVVVNGKYVKNLPGRKTDISDCQWQATLHAHGLLKPGFVPPEHIRRLQDYLRVRTDHITMAGAHEQHMQKALERMNLKIHDVISDLTGLSGLSMVKAIIAGERNPEVLLKLCDPQVQKNKAGRLRAALEGTWKIEHLFALRQAYELWQFYQSKIGECDQAIEEVLKQMTGPKDPNKPEPPATKRGGVNSPQIAGLHGMLLRLCGGKDPTQLPGVADYVLLQVISEVGTDLGKTWKTEKHFTAWLGVAPGSHQSGKRRRSSQRRSRNRAGRLFCVIARSVGRSVDKALGGFYRRLKGRKGGLVANLALARKLAELFWRLMVHGVSYVEKGLKQYEEKVAKTEQYLLQKLARKYNLILQPKAS

SEQ ID NO: 385585 - protein, 350 aa, unidentified
MTLYVALDVSLEKTAVCVMDAEGAPIVERAVPSEAFAIAELLTALPERPERIGLEAGPLSEWLVRGLADAGFRAMLMETRQVRAALSSMTVKTDRNDARGMAHLLRMGWFRPVHVKSMDAREQRVLLSARTALVRRLRDIENSVRGLLRGFGFRFPRMLRVRWAQSVREALAGNPTLLAIIDPLLTAGAALRDQLAILEKRVRDAARQDPVCHRLMTMPGVGAVVALTFRAAVDRPERFSSSKAIGPCFGLTPRRYQSGEVDRTGAISRAGDPAVRTALFEAAHVLMTRVAKWSKLKAWAVAVAKRRGAKRAKVALARKIGVILHRMWIDGADFRFTDKSEVGNQTTVAI

SEQ ID NO: 385586 - protein, 462 aa, unidentified
MLEQFIGIDVSKGYADIVVLDSAHTIVHKPFRLDDTSNGHERLATLLSKWHEQDKSITFYAAVESTGGLENNWLASLRTMAEKVPLYSVRVNPKGVAQYIKASLTRTVTDGVSAFAIAAYQLAHKNTLRYNEPVHPLEYLRPTWSTYTLVKKQRQQLYNNLHPILYTANPTILTYCRKGMPQWACNVLLKYPTAPLLANATKADLSAIPYVSEARAEALINAAKKETGSRHDVATVRSIELIVNQIHNIDKTINSFESLLQASVVGNADIKIITTFKGIGVMSAIGLLINMPSITLIDDSSKLAAFWGLHPVFKQSGDGQSISRMSKSGRIQPRAILYMVALSSIVHNPLIRELYKKKLSKGMKSHAAIGVCMHKIARIVYGMLKTKKAFDASIDQKNSEKKHQINKQEMIRRQRKELRRFQEKDPVAPISKRERKKRATEEKPQDEVSSKTRSKSKVAQCK

SEQ ID NO: 385587 - protein, 345 aa, unidentified
MALTIVETPITGGVDTHADVHVAAALDPVGGLLGVAEFPVTPAGYARLLGWLGEFGTVCLVGIEGTGSYGAGLARHVTAAGIRVAGVDRSDRQDRRRQGKSGPLDAVSAARAAQSGRASGAPKGRDGSVEAIRALMVAKRSARAERTQTINQARSLIVTGPDDLRARFARHTVVALVAETASLRPRPGSTVGYATRIALRELGRRATFLDGQLERLGELIVPLVTARAPGLLALYGVGPDTAALLLIAAGDHPARLRSEAAWAHLCAAAPIPASSGKRTRLNPGGDRQANHALWRIVITRMSSHPPTRAYVERRTAEGLSKTEIIRCLKRYIAREIYPRLRAAAD

SEQ ID NO: 385588 - protein, 368 aa, unidentified
MGGKSSKLYVGLDVHKTSIDIAVAEEGGEVRHHGQIGGDTNALWRAVRKLESSGRKLVFVYEAGPCGFAIYRGLIGRGHVCWVVAPSNTPRRVRDRIKTDRRDSVKLAGLARAGELTPIYVPDVVDEAMRDLVRAREDAVVMQRQARQRLAALLLRNDVRYTGKTAWTAAHRRWIADVRLPEPAQRLAFEEYVQAVEEATVRVAQLGHYLEQEVTQWRWLPVVNALQACRGIQLIHAVRIVAELGDLSRFDHPRQLMSYLGLIPSEDSSGERRRQGAITKAGNSSARRALVEAAWAYQYTAKVSGLIARRQAKVPKAALEIAWKAQVRLCARFRRLAARGVSRNKIVVAIARELAGFVWAIGQRVKPA

SEQ ID NO: 385589 - protein, 405 aa, unidentified
MNAVGIDVSKGKSMVAVLRPLGEVVTLPYSISHTASELSELADSLKSLEGEVRVIMEYTGRYYEPVAKALHQAGIFVSVVNPLLINQYGNNSVRKVKTDKADAVKIARYGLDNWAELREYTLMDTIRQKLLLVCRQYHLYLKNKTTFKNNLIALLDQTFPKVYTLFTSPARDDGSQKWVDFATKFWHCDCVCGVNEKAFTQCYRKWCKRHRYCFSPRKAAEIYAVASEQVPTLPKDNHIKLLVTEAIMQLNAISRTVEALRSEMRSLAQSLPEYPAVAAMYGAGDTTAAQLIAEIGDVRRFKNKQALSAFAGVDPSPTQSGQKEAKSTSITKRGCAPLRKTLFNVMDCLIKNKPPDEPVFQFLDKKRAEGKPYYVYMTAGANKFLRIYYGRVKEYLNTPRSGDDS

SEQ ID NO: 385590 - protein, 356 aa, unidentified
MDITTVGVDLAKEIITVYAVDAAGQKRQLRDLRRKEFGAWLSGLPKGCIVGMEACSSAHHWGRMMMELGLVPKIMAAEFVKPFRKSRSTKNDHNDAEAICTAVRQANMRFVAVKTIDQQQRLSWHRMREGWKEERTALINRSRGLLAEFGIVIGRSSTAFTRALTGLIRDENVPATLRTLLDQVQKQLMVLDEQLAKCDHAIAQQARHCEAAKRLQAISGVGVITADAMTASVGDARDFRNGRQFAAWHGITPKQFSSGGTTRLGRITRRGDAYLRTLLIQGARSTLQVALKRAPDKLTRLQQWIVQLYARAGYHKTLVAIANKHARMIWVILAKGKAFDANAWEKYQVGTSEQGA

SEQ ID NO: 385591 - protein, 359 aa, unidentified
MGSIAFDPADVIVGVDTHKHQHVGVALDGLGRRLGQRLVPATPAGYAELLTWATGLGRVAVVGVEGSGSYGLGLARFLRRHNVTVLEVARPPRKGQRRLQGKSDPVDAEPAARQVLAGAGAVTPKTGEGSVEAIRLLKVARDTAVTAHSQAMITLKATLVTASDALRAELEPRTDFALVTACAELAVTGELADPEVAMRHTLRALARRWLALHEEIKLHTRQLKTLTNKTAPALVATFGIGFDSAAELLCAAGDNTARVRSEAAYAKLCGACPIPASSGKTTRHRLNRGGNRQANAALFRIVVVRLRWHPPTIAYAQRRTAEGLSKREIIRCLKRYVAREVFRLLPAPAATPAQSLQAA

SEQ ID NO: 385592 - protein, 343 aa, unidentified
MEQYAGIDVSLESASVCVVDSTGRIMREAKVVCEPEALIAWFTKLGVSMARIGLEAGPLSQWLYARMREAGLSVELLETRHVRDAFKAMPVKTDRTDARGIAQLMRLGWFRPVHCKSLPAQELRAILTARKLVQNKRHDLEMSLRGILRGFGLKVGQTTPRNFEARVRELADGQQTLLVVADAMLLARAVLVEQLGKLQKRLVSLARQDTRARLLMSTPGVGVLVALTYVAAIDDPARFRSSKAVGAHFGLTPKKYQSGETDVTGRISKIGDASVRTALYEAANVILTRPVRGSLLKSWAMRVAKRTGMRKAKVALARKLAVILHRMLANGSAFVAGKAAAKA

SEQ ID NO: 385593 - protein, 425 aa, unidentified
MNKQSQQTNTPQNLSDAVVVGIDWADREHVVCVIDQNDRSKIETLKQSPEAIDAWVAELSRRFPGKTIAIVLEQSKGALIHALMKYEQLVLYPINPKQLSRYRDAVHPSGAKNDPEDAKLLAQFLKRHAEQLRPWKADTQATRTLARYTEIRRKIVGERQRLALQLGSLLKQYFPLAKELFPRNLPLMTALIKRWGSLEKLKRVHPKTLRTFLKENGMANQDRQTEVIEAVRAAVPLTRDKAIIEPNAVYARMLAGQIQDLSNTIEQLEKEIAIAVAAHPDEKIFRALPGAGDALVPRLIAAFGSDRDRYDSAEEIQCYSGIAPVTRQSGKTRHVSRRYACPKFLKQTFHEFADHARKWSPWSAAFYRQKREAGCKHQAAVRALAFKWIRIMFRLWKDHTIYDEAQYIEQLKKRNSPLVKFIQNA

SEQ ID NO: 385594 - protein, 342 aa, unidentified
MNKVTTVAVDLGKKTFQVGFADKYGREAGKQERLTSREAFSEFVANADPRWTVLMEVGWGAQAWARAFKARGMRVRLLPAQLVMAHRTGGKNDRNDVLAILRAGQDEQIHEVPVKSAEEAAIQAEHRVRRGWVRRRTAVANQARGLLADQGMVFDKGDAAFVHGIERTIEDASLPIPNGLRQLLQQLLIEWHQLGERIHGADRRLERLVREHPIARMLDELPGVGPIGATALACKMVDLERFASARHFAAYFGIVPEQHSSSDRVRLGKMSKRGDSYIRATLVSGARAVFRHLPARQDNSKETQRLRRWYAKHGCSGASIRLANRNLRIAFIQVRNSMRDSA

SEQ ID NO: 385595 - protein, 343 aa, unidentified
MQLVTTIGLDIAKSVFQVHGVDAAGQVVIRRQLKRRYVLMFFQKLPPCLVGIEACASAHHWSRELKALGHRTRLIPPAYVKPYVKRHKNDAADAEAICEAVSRPNMRFVATKTPEQQGCLTLHRTRHLFVRQLTSVINAIRAHLAEFGIVAPVGRNGIEELLYVVSDASDRRLPEVARACVAALGTQLRMLKAQILQFDRMIMAWHKSNEASRRLDDIPGIGPVLATALVASVADPKMFRSGRDFSAWIGLVPTQNSSGGKDRLGSISKRGDRYLRNLFTTGALTVIRYAKIHGTRRRPWLTALLARRPTKVAAIALANKIARMAWAIMAKDERYKEPAALAA

SEQ ID NO: 385596 - protein, 329 aa, unidentified
MSNLLKKVIGVDVGSKFLTLSFLDDEKGEQVLNLPNNERNILSFLSKISPSDYCFVIEATGNYSSRLLHFSIGKGFESSLINCMSVKHFARMKNIITKTDAEDAKLIRNYGEMFRPEFYIPKTQDIEYLDQEIKLLNDLEEEKRRYAVKLKALRFHPVLNPSTEKHYEKRLKQLDKEIKEVEARLPQLQDEEFTETKNLLQSVSGIGEKTSLQLMTATSGFKNFHSSKSLVKYFGLAPRIYQSGKKSYSPGKCRTSKTYIRSILYVCSWTAIKHNHKCKELYLRLLEKGKAKKLALIAVCNKLLRICFSVVKNKTAFQQDFQNKLKILT

SEQ ID NO: 385597 - protein, 386 aa, unidentified
MIYVGIDVAKDKHDCFITNSNGEVLFKAFTISNNQDGFNVLYQRIESVMEDVTKVKVGLEATGHYNYNLLGYLIDKGLTTYVINPLHTNLYRKSLSLRLTKTDKVDARTIAYMLMSDVNLKSYSDTSYHNEELKSLTRYRFDKVKEYAKLKTSVSRLVCILFPELEKLVPTLHMASVYALLSEFPGAKHIAGAHLTRLTNLLSDASKGRYGKDTAITFREAARASIGSNMPAKSLELKHTIKLILELGSEIEEIENEIKIIMDEINSPILSIPGINYRMGAMIIAKIGDFSRFDSPDKILAYSGFSPSTYQSGQLDSAYSHMEKRGSKYLRYALYNAAKYVCHWDSTFAGYLAKKRAEGKHYNVAISHAVKKLVRVIYHLVKSNQQ

SEQ ID NO: 385598 - protein, 307 aa, unidentified
MAESVGVDVAKHTLEWCIGAEGKIQHTRNEPRPIAQLVRQLVALAPERIVVESTGGYERTLVVKLAEAGLPVVVVNPRRVRSFGQGMGILAKTDAIDARLLALFGEKVEPPIRPVLQGRARLLADLVARRRQLVSMVVAEKSRRDTASSVVRRSIEALLRILEQHLRELDGRIERALLEDVECAELAALLQTVPSVGPGVARTLLVDLPELGHLGRRKIASLVGVAPFARDSGKIRGVRRIRGGRASVRTVLYLAAMNAARFNPVLRALYQRLRQAGKPPKLAFVAVARKLLTILNAIARERTAWQA

SEQ ID NO: 385599 - protein, 399 aa, unidentified
MLAVGIDISKSKSVAAILNQDGSMHTSPFEFHHTQPELDAFIKYILNSKQSATILMENTGHYHYPVLKAFQEAGLPVCMVNAYQIKKFGDMDLRKAKTDKKDAVRIARYALEKSYSLVPYTSMEQKYEDLKFLARQYNQRMLTLKTNKVFLLNLLDETMPGITNILPLTTRTPETSLSVLFINRFKSYDRIKKMGKSRFLDAFEKITRKSRNRQTKTYGLAIYEAALRNITTRGENEYTLAAQDQCLELVCESQKAADSIILKMQTLAETLPEYAVLRSMAGVGDRLGPLILAEIGDIRRFHSGKALNAYAGNDAPPYQSGTFESHNRHISKRGNAALRKYCFEVMQAFKLTRPQDDPVYLFLLKKEQEGKPYNVAKMAGVNKFLRIYYARAMETLKQQ

SEQ ID NO: 385600 - protein, 365 aa, unidentified
MDTHKKQHKIALHYPCQEEIIEFTVNNTVRDIKRMVKKVTKRAPGEVEFCYEAGVCGFTLKRRIEQFGCRCRVIAPSLVPRKPGEKVKTDRRDAKKLLAMFEAGLLTEVHAPNEHQEAARELTRLRETAAENLKRTRHQLLKFLTRHGYVYTDGRHWTQKHIAWLRTIEFTEPMLTNVFDNYFNQMIYCMGRLENLDKEVGLLADSQEYKQIVGLLCCFHGIDTLTAVTIITEIFDFGRFESPRHLMSYLGLTPSEDSSGDKQKKGPITKAGNKRIRRLLNEASWHYRHRYVPSAVLKKRRKGQPQWAIEIADSAGRRLSKRHRHLINNGKMPCKANIAVARELAGFIWFVVTQYHARKDIKNVA

SEQ ID NO: 385601 - protein, 344 aa, unidentified
MKITTVGIDLAKNVFQVHGVNEFGKTVVKKQLRRDQVAQYFVNLPACLIGMEACGSAHYWARKLQGFGHTVKLMAPQFVKPYVKTNKNDAADAEAICEAVARPNMRFVPIKNVEQQAVLALHRVRQGFVKARTAQANQIRGLLGEFGLIVPQGIGYIATRVPELIEDASNELPGSFRVLVQRLLDHLKELDRQVGELEVQIQTWHRSSEVSSKLAKIPGIGPITASALVASIGDAKSFDSGRQVAAWLGLVPKQHSSGGKQNLLGISKRGDTYLRTLLIHGARSVIYRADQKPESCSWINGVVNRRNKNVAAVALANKNARIVWALLAHDREFRSDYTTANAAM

SEQ ID NO: 385602 - protein, 347 aa, unidentified
MSHKTAATVAHTIGIDTGKNTLHLIGLDDKGAIVLREKIARGRIAARFANVPRCLIGIEAGMATHYVARELSALGHEVRQVPPAYAKPFRQGHKNDFRDAHAIAEAVQRPSTRCVPVKTDDQLDLQALHRVRSRLVGQRTAVINQIRGFLLEHGIAVRQGLRFLRQQLPDILAKRGDVLSPRMIRIMEDLSGDWRRLDERIQHITEEIEVLAHGSESCRQLMTVPGIGPLIASAMVAAIGNGAAFAKGRDFAAWLGLVPKQMSTGDRTILGRISKRGNRYLRTLLMQGARVILLRPANWAKHSFGLWLTAAAQRLHHNVLATALANKLARIAWTVLAQGRSYEARVN

SEQ ID NO: 385603 - protein, 368 aa, unidentified
MFEHTFIGLDVHAVNVVGHALNPATGEIRTHTMASDPAVVLEWIHRLAPPVKVVYESGPSGFVLARYLRAADINCVVAASSKLLRAPGDRVKTDRRDARVLAEMLAVGSVTEVRIPDPDEEALRDLSRLRSGTAKDLAHARQHVNAILLRHGIRYPEATRWTKEHSRWLHRQHFKEPALQFTYEADVEQAELLAGHLARIDKQVTIVAAACRYTPVIEALMCLRGIQITTAFGLAVEIGDWTRFSGSSIGSYLGLVPSENSSGQSRHQGPITKAGNTYARKLLIEAAWQHRRPYARPGERLLRQLNHVGPATRIRALEGNHRLHRKWEVFDERHKMSVKANTAIARELAGWCWSLAAPLQQGERMNAA

SEQ ID NO: 385604 - protein, 475 aa, unidentified
MGKNRNIQGRKGCRFSEKLRGISLDQILVVPIDAAKYHPKALICNYFGDILEDSFFFSVNSVGLDELDNKIRQCAKACNAQHILIGIEATGHYHEDIVRELEKRGYQVTIINAYTTSEERASSLNWTKTDDVDLAAIAVAIRHNKGTESKLPSGIYDKLLTATRARRSEVNKHSALQIEIRHLMDVIWPGFQAITEVRNGKTETKPIFSDFWGKAPLFLMRHYPEPRHILNLGPEGLSLMSREHRLKMRSGTIEKLLYAAKVAFNKSSDDLEIELMLLSMKLDELNRASQNISILEQKIEELLVQTPGVLLLSLPEVGLVTAAEFTAEAGPIEQYTNPRQIIKKAGTNPLVSQTGGGEPTYGPISKQGNPWFRTVIYSIGFNLANGRTNPYFRIFAERLKANGKKGRQIWIATGNKFIRVAFALLRDKKLFNPPLWNGLPLTKNVVSKIKTKENKAAAQKILDSLLNRSDHLKVS

SEQ ID NO: 385605 - protein, 440 aa, unidentified
MSNVISFEVKNEQAAAIDIGSRHIFVSWDGITSKSYESFTQGYSACIADLKQQGVKHVCMEATGVYWIALHHMLEKAGFDVCLVNPKEVKQLQGRKTDVSDSCWMYQMFSAGLVRRSYVPKDLLKELRMLIREREDIISMGSTYINKMQKALELMNIKLTEVISQINGASGIGVIKAIIAGERDAQKLLLLCHKTIKENKAEQVLKALEGDYNETWLFLLEQNLILWEFHQRQLDIIDARIQQILERLQQDKQIIEITGKPKPIRHHPPKIKNLHQTLLNIYGVNANCIPGITNYSLLKLLAEVGTDMSRFATVKHFVSWCGLAPGHNQSGTKRKKSKFKNRSNAGQIFRELAWGLMNSKYIAIGAFIRRLKGRKNSGIAIKAGARKIAEAFYNLLTRGVDYVEQGVRKYEQQLKEKQRLYLEKMAKQHGFKLVDNPQVG

SEQ ID NO: 385606 - protein, 379 aa, unidentified
MKPIELYLGLDVHKDSTTIAIAEPGPKGEIRLFGTVSSDIDRLEKALRRIGKTHPNAHLQVVYEAGPCGFVIARRLQQLHIPCLVAAPSLIPKKPGSPFKTDKRDAKALARLLRAGDLTAVYVPEATDEAIRDLCRSRTDAIDDHRRCKYRLKAFLLRHGYRYQGKANWSQPHMRYLRELVLPHPAMKVILEEYLQGIDAAHQRVQRIEASMLDLLQSWRLKPAVEALMAFRGFQLVAAMITVSELGDIHRFEHPRQLMTYLGLVPTESSSGPRQRLGGISRCGNGHQRWLLTECAEHYALPPKVSKELSRRQEGQPPEVRALSWKAQNRLHLRFKRLLARRLNRNKAKVAIARELCGFIWALLRTLDCYKTSAGGAAS

SEQ ID NO: 385607 - protein, 338 aa, unidentified
MAIVGGFDLHRRQITFEYVDTASGEVSRGRVAPADREHLRAWLRRLEGQEAAFAVEACTGWRFVVEELERAGAQAHLAEPAETAALRGRKRRAKTDRADARHLRELLMAARLPESWIPPAHVSDARTEIRLYKALVDERTAWLQRVHAILFQLGAPAVPGLARASGRGRLDLAALPPAARSAVEVALRSVDRVNEELDTLRPELARLARAQGGCRALQAHYGIGPLTSVAIWAELGDCGRFSSSSDAVRHSGLDVTVHSSDSRRARGHLARQGPGVLRWALFEAAVCAARPASPDHPYYLQVKARLGHQRAVLSVARKLTRWCHHTLRALGDQALAPA

SEQ ID NO: 385608 - protein, 433 aa, unidentified
MEDVEDEPLFAERVAGIDIGKKQIMVTVRVPSDTRSGRRQQETREFRALRKDLLALADWLRSWGVTKIGMEATGHYWKPVFFLLEREGFDCVLYHASQVKALPGRPKTDKLDSVWLAKITERGSLAGSFVPPEEIRRLRTHTRYRRHLTQARTAEKARCEKLLEDAHLKLSSVITDIHGVSGRDMLNAIIAGERSPRVLAQMARTRMRGKIAQLEEALDCSFFTSQHAFILQMMLANIDHLSAQIDELSANINVLCEPYQRQIAQLDGIPGYGVITAQDIIGEIGVDMTVFPTAGHLCSWARQAPRVSESAGKRKGKNATGRGNPYIGGSLGEAAATAGRTQTFLGAKYRRLCKQMPKKKAQGAISRTQLTITHALLSDPDATYQDLGTDYYQRRADTRRRARNHIRGLERLGYHVTIQAINPDTGELLAPAS

SEQ ID NO: 385609 - protein, 355 aa, unidentified
MNVNVNHYIGFDVHKKSISYCVKLADGRIVEEGKLAARRVTLCQWASKRAEPWHGAMEATLFSGWIYDTLKPFAAKLEMGHPGRMKAIGASKKKNDKLDARTICDLIRANLLPACWVAPSEMRELRRILRYRNLVLEQAVRMKNKISGLLMESGVEYNKKRLHGEKYFHELVENLAAEVPESVKDLLKLSRGWLESFQATQQQLLVKLQKHPILMERLKRLKSIRSVGEVTALTWALEIGDPHRFSSIGDAVSYCGLTSALVESADKQKRGPISKQRNAHLQTVLIEAAKLAPRWNPRLAELHQAEIDNGRHRNRATLEVARKLVAYLLAVDKSGKDFAVRTPSGKSEGEVKPAA

SEQ ID NO: 385610 - protein, 423 aa, unidentified
MNQTVPVAGVDVSKRFSDLCVLAPNNDILTRMKIYHDLPSMERALTELRRIKGAYGATPVVVMESTSHYHLILFQFFQEAGFEVIVVNPIQSGALKNINVRKVKNDKVDAYKIAMLYRLKVLRASQVPANSLRGLRLLCRQRSELMGDVTRYKNRLTAYLDQVFPGYDKVFSDVGGVSSRAVLKECATPQALLSKSEDELADLIHTASRCGMVFSCKKSAKLHNVAKEAVKFGISAPGTTAVIDTVLNVLEILLQNIRQIEQDIKALVKQETYIQKNLILLQTIPGIGFNSALTILAEIGDFSLFQKPKQLAAYFGLDPGERQSGKFRGSKNKMSKRGSSQVRAALHMAAVNSVAVQKKRPPCNPVLAAYYEEKCKSKPGKVAMCAVMRKISNIIFAVLRDQKPFELRQPQEHIQRINTTVAA

SEQ ID NO: 385611 - protein, 398 aa, unidentified
MTESSDYESVQVFIGVDVGKDTHHAVAINRSGKRLFDKALPNDENKLRSLISDLKQHGQILLVVDQPATIGALPVAVARSEGVLVGYLPGLAMRRIADLHAGEAKTDARDAAIIAEAARTLPHALRTLKLADEQIAELSMLCGFDDDLAAQTTQASNRIRGLLTQIHPALERVLGPRLDHPAVLDLLQRYPSPEKLASLGEKKLAAQLCKLAPRLGKRLAADIAQALAEQTVVVPGTNAAAVVLPRLALQLITLRKQRDEVALAVEQRVLAHPLYPVLTSMPGVGVRTAARLLTEVACRAFASVAHLAAYAGLAPVTRRSGSSIRGEHPSRRGNKALKRALFLSAFAALRDPLSRAYYTRKMSQGKRHNQALIALARRRCDVLFAMMRDGTFYTPQAA

SEQ ID NO: 385612 - protein, 337 aa, unidentified
MDYFAGLDISMDETRICVLDREGAVVYEGKSASTAEAIADELAKAPSCRRTVFETGRMAPILFHSLSQLGLPVVCVESRQAYQALKSLATHKTDRNDARGLAHLARTGFFKPVHVKSLSAHAVRSLIIARKKLVGQRVTLENQIRGLAVVFGVRLPRALTTAFIDQALKASEGVAGLSAAMRGLIAARTAVMTAVAAIDADIRRMTGASEACRRLMTIPGVGRLTALAFVAAIDDPSRIRRSRDVGAYLGLVPKRYQSGEVDYVGGISKRGDRRVRTLLYEAANVMLTRTKGQLKLKDWAFAIARRSSMRKARVALARRLAIIMHAMLRDGTEFVAA

SEQ ID NO: 385613 - protein, 360 aa, unidentified
MASIALDRSDVIVGVDTHKHQHVAVIIDGIGGCLGELAVPATNAGYSELLAWAASFGKIHAFGVEGTGSYGIGLARFLRRHAHKVIEVSRPPRAGERRLAGKSDPIDAEHAAREVLAGKAKVTPKLADGAVEAIRLTRIARNTAVKAHSQAIIALKATLVTAGEDLRMSLEPLSDHKLIVACAALDTDGDLADPDAAMRHVLASLARRWLDLHDEIKTHTKRLKALTTAAAPELVAAFGIGPDIAGELLVTAGDNSDRVRSEAAFAKLCGASPIPTGSGQTSGRHRLNKGGNRQANAALYRAVIVRMRWHAPTIAYVERRTAEGLSKREIIRCLKRYLAREVYALLPAPASTPATLEKAA

SEQ ID NO: 385614 - protein, 425 aa, unidentified
MNYKQNEKINQVKESTLVVGIDIGSTTQYARAFDWRGIELGKVFTFSNSREGFEAFKAWMQHLQDKYRKSDVIVGIEPTGHYWFDLGAYLEDEGILLVMVNPYAVKQTKELDDNSQSKNDRKDPKVIAKLVTEGRYSAPYTPDGVYADLRIMVTNRKRLIREMTQIKNRFARWFAIYFPEYTDVFGDYEAQSSMLLLKKVCTPEAIVELGAEKINQIWRDAKLRAVGMKRATTLCETAKRSIGLKKGSSAARYEMKLLLEDYEYKKAQLDAVMEEIEKLCRKIPESEQMLAIKGIGVITVAGFLAEVGDVRRFESPRQIQKLAGLSLRENSSGKHKGQTTISKRGRSKLRAVLFNAAIPLIAKNPEFKSLHEYYTTRANNPLKKKQSVIAISCKLIRVFYAILAKGVTYDAQKLISDIHRQPQVA

SEQ ID NO: 385615 - protein, 320 aa, unidentified
MQSVCGIDVSKDRLDIMVLPEQQCFSVRNDAAGWAELVERLRGLSISAIGLEASGGYERGAMRALLAAGMPARQVNPFKLRQFARASGVLAKNDPLDARMIASFVAIMPTQPAQLRAPAIERLAEMLAVRRQLSAEKVAAENASRLLEDAMLQRLSRRRIRRLAADIDMLDRHLADIVGTDAALAHRYRLLTSMPGVGLVLACTLIALLPELGRMSRKQVAALVGVAPYAFESGKFKGRRCIWGGRAPVRNVLYMGAMSASNWNPVLKAFHDRLKAVGKLPKVVIVAVMRKMITALNAMVRDDVVWADHLSGRHIVPTAR

SEQ ID NO: 385616 - protein, 296 aa, unidentified
MLIIGCDFHPRYQQIAMMDTETGELVERRLEHENGEARAFYASLPKPVLVGMEAPGYAQWFERMLAEFGHELWIGHASEIRAGVVRKQKTDARDAQHLLRLLLEKRFPRIWIPSPAERDARQLLRHRYKLVCFRVSVKNQLHGLAMSQGVCRKKKLFTAQGREELEKLSLGPWGSCRRQELLGMLDQLNPVIDELDRAVRQEAESRADAARLMIHPGVGPVTALAFVLTLGPVARFRRSKQVVSYLGLNPKERSSGDKQHTYAISKQGRRNAVDLARGRAVNFSESRREPHKFGQR

SEQ ID NO: 385617 - protein, 334 aa, unidentified
MENIALIGIDLGKNSFHIHCQDRRGKAVYRKKFTRPKLIEFLATCPATTIAMEACGGSHFMARKLEELGHSPKLISPQFVRPFVKSNKNDFVDAEAICEAASRPSMRFVQPRTESQQAMRALHRVRESLVQDKVKTTNQMHAFLLEFGISVPRGAAVISRLSTILEDNSLPLYLSQLLLKLQQHYHYLVEQIKDLESQLKRKLDEDEVGQRLLSIPCVGTLTASTISTEIGDGKQYASSRDFAAATGLVPRQYSTGGRTTLLGISKRGNKKIRTLLVQCARVFIQKLEHQSGKLADWVRGLLCRKSNFVVTCALANKLARIAWALTARQQTYVA

SEQ ID NO: 385618 - protein, 334 aa, unidentified
MDNCIGIDVSKASINIHISKNGQDLKVDNNLKGFKSLRSKLKKIYKKEINDNVFIFEPTGSYSEALRKYCSEQKIKCFIINPKQFSNYAKALGVEVKNDIEDARVLSQALHLAKEDQVKIPMYDEDVEHIKELMSYYKFTSKQTTQQKNHLESLMSKDGDSFAIKELKKSIKESKEKEQRIIDQIQIIINSNAKYKNDYENIISIMGIGQIGAIALLHLFLKYPEANQRQITSLTGLNPIYKQSGTSVQSGYRISKSGAKTYRGSLFMAAMCAIRYDANFKAFYERLKANGKQTTQAQIAVMRKLIITAHSLYRNNRKYDVNYNLKKEENMIKS

SEQ ID NO: 385619 - protein, 410 aa, unidentified
MEVLYPHCAGLDVHKDTVVACVRHMVNGTVTRELRTFGTTTKDLLALSEWLAGHGCTHVAMEATGVYWKPVWHILSDGEVSLVLANAGHVKNVPGRKTDVNDATWLADLLAHGLIRGSFVPDAQTQQLRALLRTRKQFVRERSSHVQRLQKTLEDANIKLDGAISDIIGLSGRRMIAALIAGESDPEALAALADRRIKAPPAALREALRGRVTDHHRFLLQLHLQHIDALDTAITAIDREVGVHVEPFHTQVLLLTTIPGVSDLSAYVIRAEIGGDMSRFATVGNLISWAGFCPRNDESAGKRRSTRMRKGAPWLKTTLIQCSWAAARKNGSYLQAQFRRLRARRGAKKAIGAVAASILTAAYHMLKDGTLYHDLGPDHFDRRAKTVQAKRLITRLQTLGYAVQLTPLAA

SEQ ID NO: 385620 - protein, 374 aa, unidentified
MKVKTIGIDLAKEVFGVHGVDARGKSLVHKRVSRKHLLGLLVKLEPCLVGMEACGSAHHWAREIEKLGHTVKLMSPRFVAPYRKGNKNDPNDAEAICEAVTRPSMRFVPIKSEAQQDLQALHRVREQLLKSRTALVNQVRGLLGEHGIVAPRGIAHLRRLMVEILAEPASRGLSGLFGETLFEIAERLRFLDERIRTYDLRIGRVFAHDERCQRLAKVEGVGPLVATALVAAVGNANEFKSGRELSAWLGLVPRQHSSGNRNVLLGISKRGDRYLRTLLIHGARSALCRAERRSDRRSIWASKLKLARGFNVAAVALANKNARILWALLTRGENYRPAAIPDQASKAERTAAFRHHPPTSGRRVVAESSLIKRI

SEQ ID NO: 385621 - protein, 323 aa, unidentified
MSLSVVLGIDIAKQKFDVALLVDGKTKHKTCKNSVEGFEILTLWLERQGVGKVHVCMEATGSYGEDLAVYLHEAGHMVSVVNPARIKGFGQSELIRTKTDKMDAALIARFCLAMKPREWIPPLPEIRSLKALVRRVDSLIDMRTQEKNRISTAHESVTFLIKDHIIYLDQEIEKIRRQIADLIGKNPHLKERQELLNSIPSLGKATIPRLLAELDDLDKFNHVREIVAFIGLAPREKLSGSSIKGKPRLSKVGHARLRKALYMPALVSIQCNPVMIDFYNRLKDKGKNGKVIVCAIMRKLVHVIFAVLKSGKKYDPNFNQILA

SEQ ID NO: 385622 - protein, 387 aa, unidentified
MPQPNDLSRSLVALDQNSTIIAVIEMSQSSWLVAGMLPGIERQPRKKLEPSPERLLGLLHGWRDEAVSAGRTITRIALAFEAGRDGFWLARWLAARGIEAHVIHASSVAVSREHRRAKTDRLDTELLKRGFLGWLRGERGHCTMARVPTIAEEDAKRPNRERECLVGERTRIVNRIKSTLARLGIRNFKPTLRKASERLATVHTPEGMPLPPNTLAELQRDMARLGFVMSQIREIEVARQKRLEQQPETGPHAMVRLLARIVGVGVETADMLVHEVLSRPMRDRKAVARYAGLTGSPDESGAQRREQGLARAGNARVRRGMIQLAWRFLMFQKESALALWYHARTADSRSGTRKTMIVALARKLIIALWRFVTTGEPLEGVVLRPAS

SEQ ID NO: 385623 - protein, 411 aa, unidentified
MRLFVGDDWAEDHHDVELMDVAGRVLAKKRLPEGVAGMARLHELIAQHAQDPDERGEDAEVVIGIETDRGPWVAALVAAGYTVYAVNPLQASRYRERHGVSGAKSDTGDAHMLTDMVRTDSHQLRAVAGDSADAGAVKAVARTHKTLIWDRTRQVQRLRHQLREYFPAALAAFEDLDAPDALELLAKAPDPARAAKLTRAQVSAALKRARRRDIPGKATAIMAALRGAQLGQPPAITAAYAATVRSLIAVITTLNEQVKTLQGQVEADFGRHPDAEIYLSQPGLGPVLGARVLGEFGDDPDRYASGKARKNYAGTSPITRASGKKKTVIARFIRNDRLIDALMAQAMSALTSSPGARALYDAERAREVEHNPALRKVANRLVGIQHGCLKTRTLYDEATAWPQQQKIELAA

SEQ ID NO: 385624 - protein, 427 aa, unidentified
MPYKIAGIDVHKRMLAVAVSDVEIDGEYEFEWRHFGSNPAQLRLLADWLIEQQAEEVVMESTAQYWKPVWGVLERYWKPFCQKREGAGPMSGTLHLAQAQSNRAPQGRKNDFADAERLVKRLVAHELVLSFVPDPEQRLWRTVTRAKYQLTRNRVQLQNRLEALLEEAHIKLSSLVSDLLGVSARRMLYALADGETDPAVLAMRADGRLRATPEQLCDALGACRELNPTYRRLLKMALEDLYLIEKQIGQLDQEMADLLYPYQDQVQRLAEVPGLGVNSAQQIIAEVGVTAATFPSEGDLSSWVGACPGDNESAGISRGHRSPKGNRHMRRILNQAANAAVKYKGSIFQILYRRYVPRLGHNQTIGVIAHRLCRLIWKILNRGVRYEERGPSVSQRSRHQRASRMIRELRSLGYRVDPPNPQQAAPA

SEQ ID NO: 385625 - protein, 450 aa, unidentified
MAKKNDKRDRRMPVMRPHAAGMDIGAEEIYVAVPDDRDEGPVRCFSTFTCGLRGLADWLQKCGIETVAMESTGVYWIPVFQILESRGFEVFLVNAHYLKSVPGRKSDVSDCQWIQYLHSVGLLQGSFRPPEEICAVRTLWRHRQSLLQMAAEHILHMQKSLSQMNVQIHHVLSDITGLSGMTILDAILAGERDCLKLAQLCQPSVKSPREKVAQALEGDYRPEHLFTLKQSVAGYRYYQNQIAELDHEIQQLMRTVVSAPDVQDHIPDRTRRTRYQRQGNDPAFDLRAELYRIAGVDLTDIPGVSAITAQVILTEIGPDVSRFRNASAFASWLGLCPEKRVSGGKVLSCKTRKVKSRAATALRLGAHSLCRAKDYFGEFFRRMRAKLGTAQATTATAHKIARVLYHVMRTREPYAETIFHKCDEQARRRAEQRLRKQAAQLGFQVIPQAS

SEQ ID NO: 385626 - protein, 454 aa, unidentified
MTVPKPARLRIDNLPTVFPNAAGLDIGSAEIVAALPPDRDVTVVRTFTTFTADLRQWVTWLLDHHIDTVAMESTGVYWIPIYEMLEAAGIRVYLVNARHFKIVPGRKSDYNDAQWLQKLHALGLLTGSFRPDDEMCVLRSLLRHRAQLIEHRSPHILHMQKALKLMNIQLPEVLSDVTGVTGMAILRAIVAGERRGDVLARLRRPGCRRTEQDIIQALTGTWRDEHLFVLAQSLDLYDFYTTKITDCDHRVDQQFSSMKPRFDVEGDPPAPPTSRTKKNSNSKNQPTDNVRAHLVRILGIDLVDVIGISESLAQTIIAEIGTDMSSFPTSKHFCSWLGLAPHNDISGGKVLRSRVMKVHNRAGQALRQAAQSCSRSHSLFGAFYRARSARSSSEEAVVATAHKIARVIYHMLTCHEAFKPESIRAFDQKRQQREVKHLQKRAKALGFILQPVAA

SEQ ID NO: 385627 - protein, 348 aa, unidentified
MGVFIGLDLSLAKTAVCVVDRDGRVLWQGKVPSEPEPLVKRLAEWSGVIDLAGIEACPLSEWLHRGLREAGIPVVCVETRHAQRFLSSRPVKTDKNDARGIAEMMRLGHYRSVHVKSPAAQSMRTTLTARMQLVASQLQIESTIRGLLKVYGLKIGAIHRNRFAARVLELLEMAALPDLSAAIEPLLRVREGMRTERKTLDRTLAATARRSDIGRRLMTIPGVGPVTTLAYIATVDDPGRFGTSKALGAHLGLTPRVYQSGEIDRSGQISKCGDRMLRHLLYEAASALMTHTRKWSRLRAWGVAVAKRRGMKRATVAVARKLAVIMYRIWVTGEEFDFGGPAVAAKAA

SEQ ID NO: 385628 - protein, 492 aa, unidentified
MPGPSLGIDLSINGAHDCTILDATGQLTQRFTFDSSEAGLRKLDHHVRAIKASHGAPIVVMEPTGLAWFLPCLYLRAQHPELKIVRIKTSKVAALRRYLKQDAKSDRLDSFTLAKMPFVDPEKLYGVDVPPAALQGLDRMTRQRTRLVEELTGRKNRLLALLRGYLPGLMDAVGKPWEPQFLAVLAVSLNPFTLAGQDEGALRKAFQNTLPRMPRREELIPQLRTACGRLARLYRPIVEAGQLTEGFFDDVRDEVARELRLMAEAEREVKMLEAAIARRYQEAAPNDHLGTLKGLGAITAPTILAAVGTPQRFQNQAAFRGWTGIVPHASQSADGDAKGLPMTKAGPKRVKLALYQAAETARQWDPQLAKIYYDQMVNKGKPHFKAIGAVMSHLASRIHAVLTEQRDYVLRDVDGREVTAREARMIILTQYQVPAEIRAERRKSRRRRKQDVSTEPHRGSAKRSSQRSSPSPTLNCTRAQEVEQTRAAAIGH

SEQ ID NO: 385629 - protein, 323 aa, unidentified
MSTKATKKRRSFIGIDVSKKLLEVGVHQSDYHFRCPNDPKNFPALITELISLRPARILLEATGGLERALLQALHSAGLPVVVVNPRQVRDFAKALGLLAKTDRLDARVLAHFAAAIQPAIRPVKAQQETELDALMGRRTQLSDMLAQEKNRRGSAATKDTRDDIEEHIEWLEERIQELDEKLKEQLKCSAVWQQKDKILQSVKGIGFVTSMSLLADCPELGQLNRHQIAKLVGVAPLNHDSGQQRGARHIWGGRAQVRGKLYMATLAAIRFNPVLKSFYQRLLAKNKLKKVAIVACMRKLLTIINVMVRENKLWNVKAQPVSA

SEQ ID NO: 385630 - protein, 449 aa, unidentified
MSKSGKVIGLPIVNVRAAGIDIGSRIQVAAVPPELCDNPVRTFQSFTADIEQMANWLVSIGITTVAMESTWVYWIPVYEILEAHGLTVVLANARDCKAVPGRKSDVNDAQWLQRLHACGLLRASFQPAREIAALRAYMRIRDRHLEYASAHMQHMQKALTLMNLQLHHVISDISGVTGLRIIRAIVAGEQDPDVLASMRDVRCHESLQTIRSALVGNYQPEHVFALSQALGLCDAYQARIADCDKQIESSLRVLNADRPQLETPLPAPRTKTKQANAPKFDVRSMLCQLTGTDLTVIHGIGPSIALSLVAECGTDMSKWPTEKHFASWLCLSPGCKISGGKVLSAKTRKSSSRLASQLRLAASNVGRTETALGAFYRRLAGRIGKAKAVTATARKLAILFYRAMRFGMRYEDPGVDQYEQRYRERVVKQLQRRAAHFGFSLQPTEVGVS

SEQ ID NO: 385631 - protein, 329 aa, unidentified
MNDPRYSHLPVLGIDSSKLTFDAHLTVGSQSHYAQFANHPEGFAQLESWLKAHGATSCLAGLEATGPYGVALLWHLHSQGHVVCQLNPRHVKDYGRSQGRRIKTDRTDAALINAYLKACERLRPWQAPTQALVELQALVRRRQQILDAQQAERNRQDTGRTAAVVASLQRHLLQLRTELKVLDKAIDAHVLEHRELQHRVRLLRTIPGVGRMVAVTLLAEVPALSAFARARDLAAFAGLTPSVVQSGTSVHRRGRLTKEGSALLRKMLYMAALQAAGRPSNALHRCYKAFVERGKSKMCALGAIMHKLIRIAFGVLKHQHPFVENFARS

SEQ ID NO: 385632 - protein, 337 aa, unidentified
MHGNNLVIGVINQDGKRIIHRKLDCDLKQVTEFLKPLKPQLQSMAVESTFNWYWLVDGLHGQGYEIDLANPAKIEQYSGLKHADDKHDAFHLAELQRLNILPKAHIYDVELRPVRDLLRRRTNLVHQRTALFLSFKSLYARTTGQAMPLNQLKSMEPKQGKELYVHPANQLIATVQLEHIEALDGSIGRIEKAVLGCAREIPLYEKLLTLPGVGKILGMTITMEVGDIKRFKTDGDFASYCRAVDSRRLSNGKQKGENNQKCGNKYLSWAFVEAANFAKRYDLNCRRWYDRKKARTSTVIAVKALACKLAKAAWHVMAKAADYDAARMFPELVSKKK

SEQ ID NO: 385633 - protein, 392 aa, unidentified
MIYIGIDVAKDKHDCFITHSDGEVLSKSFTISNNRKGFDSLFQKIISVSNDLSKVKVGLEATGHYSYNLLGYLIDKGLTAYVINPLHTNLYRKSRCLRQTKTDKVDARTIASMLMSDVNLKSYSETSYHNQELKSLTRYRFDKVKERAKLKVSIARLINILFPELEKLVPTLHMASVYSLLSEFPGASHVASAHLTRLTNLLSEASKGHYDKDTAIHFREAAKNSIGSVMPAKSLELKHTIKLIQELTTEIDEIETAVKRIMDEEIRSPILTIPGISYRMGAMIIAEIGDFHRFDSADKILAYAGMSPSTYQSGQLDNGYSHMEKRGSRYLRYALYNATKYVCHWDESFGAYLEKKRSEGKHYNVALSHAAKKLVRTIFAMEKSGQAYKATS

SEQ ID NO: 385634 - protein, 363 aa, unidentified
MFTERTSVGLDVHARSVAAAAIDSVTGELKQAKLTPSHEQIRSWISDLPGPVAVTYEAGPTGFGLCRVLNQAGVRCVVAAPSKLQRPSGDRVKTDSKDAVHLAKLLRLGEVTPVAVPSEGQEAARDVVRAREDCRGDLMRARHRLSKLLLRHGQVYTGGSAWTGAHDVWLRQVGRDQLAGPGTRVAFESDYDAVLTTLARRNRLDKEITAMAADSEFTAVVSRLGCLRGVATLTGFALAVEIGDWDRFDGNTIGSFVGLVPSEHSSGASRSQGSITKTGNGHARRLLVEAAWHHRVRYVAGKTMRDRWDLAGPAARARGDAGNQRLHARWGRFTERRKRPVIANVAIARELASWCWSLAVIDE

SEQ ID NO: 385635 - protein, 408 aa, unidentified
MEVLYPRCAGLDLGKDTLVACIRIHGRPVQQEVRTFATTTRELVGLAAWLTASGVTHVAMEATGTYWKSVWHLLENDFTLVLGNAGHIRNVPGRKSDVKDAEWIADLLAHGLIRGSFVPPAPIQEVRDLTRTRKQLVREIAQHTQRIQRTLDVANLKITGLVSNVLGVSGRAILRALIAGQTDPTQLADLARGTLKNKRAALIEALTGRITPHQRRLLKLHLDLIERLEAAVADVDAQLGEALAPFREAVARIDRIPGIDTVVAQAIVGEIGLDMSRFPTHQHLISWACLCRRLDESAGKRKSTRTRKGACWLKTGLVQAAWAAVRTKNTYYRAQFFRLRARRGPKKAIIAVAASMLTAIYYILRDDVDYRELGGQYFERLDRTKMTQRLVKRLRDLGYQVQLAEVAA

SEQ ID NO: 385636 - protein, 343 aa, unidentified
MDYFAGLDVSVKDTSVCIVDGTGKIVREVKVASEPQALLAVLRNATYCFKRIGLEAGPLSQWLYGALAEAGLPVICVETRHMRAVLKAQINKTDRNDARGLAQMMRVGLYRPVHVKTLRSQKLRMLLTHRKLVQSKAIALDNDLRGTLRNFGLKVGVVGTVKFEARVRELVENLPDVAELVEPLLIVRQVLREQLGILHRRLLAIVRDDDVCRRLMTIPGVGPVVALTYRATVDVPVRFRKSKSVGAAFGLTCAKYQSGEIDRTGAISRCGDEMVRTTLYEAAQILLVRSTKWSWLKAWAMQIARRRGMRRAIVALARRLAVIMHRIWVDGTEFRWTRKAAAA

SEQ ID NO: 385637 - protein, 362 aa, unidentified
MSSIAARGLTYLGLDVHRDTISVAVLGPGREAPTVDRIANDEPSVRRLVAQFPNRRGLRACYEAGPTGYELARLLDRLDVRCQVIAPALIPKAPGDKIKTDSRDCRRLVRLHRAGELTPIRVPTVAEEAVRDLCRARADMLADRSRARLGLGGFLLRHGRVWRGGSTWTFAHERWLLAQRFDDPALATTYAHYRATLTARDAALDAIEADLATWYDQPPFAAAVARLSAYRGVTRLGALTLASEVGDWRRFASAPQFMGFCGLTPSEYSSGERTRRGHITKTGNGHLRAQLVESAWPTSIGPRPPWSCAAARKACHPRSSPALGPRSCGCAAGSAACTPANSADRWWSSPSLASWPASCGPR

SEQ ID NO: 385638 - protein, 412 aa, unidentified
MSQTIQRFVALDVHKNYVVVGAVDTRQEVVLHPRRVSLIRLDGWAKKHLKPTDAVVLEATSNAWHIHDLLKPLAARVVVANPYLVKLIAASFVKTDKRDALALARLLAANIIPEVWVPPHHVRELRALISHRRRLVSQRTAAKNRLRSVLMRHNIVPPAGQIFSTAHRDWWDRLSLSDSEKLRARHDLTVIDHLSPLMEEVAAELARLSVDELWADRVAFLVQLPGIGLLTAMTLLGAIGDITRFASAKKLVGYSGLGSRVYDSGQTHRTGRITKQGRRELRSAMIEAAWVAVRLHPFWQAKFERLADRIGKQKAIVAVARKLLVVVWHVLTAQAADRQADPQAVARSLMTWATRYGLATSLGMSRALFVRRELDRLGIGQTMQRFKYNGHYYHFPLTMPATVTEEEVVVGG

SEQ ID NO: 385639 - protein, 352 aa, unidentified
MKPIKYIGMDVHKAMTVIAILDSMGKVLAEAIIETKGSTILDFLKSQRGTLHVAFEEGTQAAWLYDLIYPHVASVVVCDPRRIVRQGNKGDKVDARLLAELLRTGALKPIYHGEKSTRAVKELALSYLSVVEDGTRIKNRLKALFRGRGIDCRGAGVYRVDERSDWLAKLDSPAVCARATRQWQELDLVERLSEEAANDLVVEARKHAATRILRSVPGIGPIRAAVTLGVAGTPHRFRTKKQFWGYCELAVITTTSAEYELVNGRVYKSKKRPLVRGLNKNYNRAMKTVFKGAAKTVADGVWKSRFEAMVAKGMPESLARLTLARKIASITLAVWKKGERYDHRKLKTMHAA

SEQ ID NO: 385640 - protein, 312 aa, unidentified
MDKRYIGIDLHRNQFTCCIQLENGRTYVTKWRLEELAKFVTKLRPGDEVAVEITGNTRLFHEAVAAHVARVVVVDSNQFRVISRSVKKTDANDARLLALYLSKGLLPEVRMKNKLQAHVASLTQTRDTLVKQRSALKNKVNNILSARGLNLPKEALGSEKRLAEVLALPFDELVLIELRVIVDQIRSLKKSIAELEKAIAEASSELEGHTSLTSIKGIGATTSAILLSVIGDVNDFPDEGRLASYFGIVPRVSNSNETERSGRIHKRGTKLGRTALVQSALIAAKYSPYLKRFYEQVKARRGAGKLRRGAGW

SEQ ID NO: 385641 - protein, 438 aa, unidentified
MSNKVIFNLDELFISVGIDVGADFSWMSIALPNQQFVGKPYKILHNSIDSLTTAVSKIKEAEELYSLESRIFLESTGIYHYPLFCYLRDKGFNCSVINPIITKNSTNINIRKVHNDRFDSKKAALVGLKPDLKVSLMPSDLALNCRNLCREYYDLMDNRSAYVNKLQGELRMAFPQYLGIFSKVTINTSLTLLETYTSPSAFLEADKQEIIDIIKSTARFGLTYAQNKYNAIIQAATDANQFGYIIDSNIKRIRLYISFIRKYDEEINSILESLHELVDANEDADFVKQIHLIETFKGAGFLSAVSIMGEIGDFSAFSKPKQLFAYFGLDPAVKQSGKFEGTKVQMSKRGSAIARRVIHTLALQSISISRNGEAKNPVLREYYLKKCDSKPKLVAMGAVSHKVCNMIFAILRDNKPFKIIAPQEHIKQYNAAKCDIAA

SEQ ID NO: 385642 - protein, 342 aa, unidentified
MDHHAGIDVSLEYSSVCVVDASGKIVREGKVASEPDALINWFRSLGLELSRIGLEAGPLSQWLYAAMKQVGLVVELLETRHVRKAFEAMPVKSDRNDARGIAQLMRLGWFRPVHCKSIGAQETRAVLTSRKLVQSKLQDVENHLRGILRGFGLKVGKTTHLSFARRIRELVANHASLEMIAEALLSVHAVLLREFKAFEKQVRSMARQDAKARLLMSTPAVGPIVALTYASAIDDPGRFKSSKRVGAHFGLTPKKYQSGQTDYTGRISKIGDASVRTALYEAAHIMLTKPLKGCSQLKSWAMRVARRAGMSKAKVALARRLAVIMHRMLSDGTAFNAAAAAA

SEQ ID NO: 385643 - protein, 341 aa, unidentified
MHYVTNTELSSHEGTRCQFNGGRCAIKLGIDVHQDFYVVVEQEGGSNPKPPQRFQKQAFLHWASKLKSRGAEVYAVYEACGFGFCLQRQLSALSIQCYVVCPQKLDEQNRRVKTDGLDAKALCLKLDRFVQGNRDALAIVRVPSEEEEQARAIHRQREQLVKARKQLEAHAALPAPQWMKELLGNSQPILLALQQKIAALTIQLQSAAAPKQPRGLGLMTSVIVDREIGDWNRFSNRRQIASYTGLCPGEYSSGNTRLQSCVTKHGNPRLRAALVELAWRLVRFQPNYKPVVKWRATLAKGALATGATRKKAIVAVARQLAVDLWRIKTGRLRAEELGLIN

SEQ ID NO: 385644 - protein, 385 aa, unidentified
MGSQAFIPRDYDVFAGLDVDKKSISATFSDHQGIQKSVRMPYSVEHLVNHARKHYGDKKVAFAYEAGPTGYGLYDGLVAQQYACLIASPSMIPKAPGQRVKTNRLDSRSLSENLRGGQLKSIHVPTTLYRELRHLTQLRDALVSEAVAMKQRIKSLLLMEGLEFPPAPAGSQWSFRVKKKLREMSCSATVRFKLDRLLDSLEFSEKQIVKTTAEIRRFCHNDPELSRCIGYLQSLPGIGWIVASQLMARIGDWRQIQNIRQLPAFLGLVPTESSTGERTERGSITRSGDPRLRSKFIQASWSAIRQDGELREFFRSVCQKHPRPVASRVAIVAVAHKLSVRASVVLMKQRPYEVRQTVQSAPLTQEETVSQGTTRRQAVPGEKTS

SEQ ID NO: 385645 - protein, 360 aa, unidentified
MLYLAIDQHRKQLTVNLRNESGDVLLKRQVSTEWPRVRKFLEELQTQSQAEGGFVVILEVCGFNDWLIKLLKEYGCGELILIQPEKRSKKKTDRRDANSLGEILWVNRRRLLEGRSVQGVRRVWWPDLGDREDRQLTAVRKRLGQLRTKTINQVKYLLRKHNLEQECPTKGLDTIKGKKWLAELTLGPIDRLQMDQLLTQWKLWDEQIKKVAAEIEKRQVESEPAAVLATIPGCGAYSSLALASRVGPIERFPRPGSLPNYWGLTPGCRNSGEATDRLGSITKQGSGMARFILGQLVLHVLRRDPWMKAWYGRIKKRRGSKIARVAVMRRLATIIWHMLKHNEPYTIGGPPRRKRKDQAA

SEQ ID NO: 385646 - protein, 335 aa, unidentified
MARQYVGIDLHRRRSVIVHKNDAGEVLSTRRIDNDPVNLAAAVADAGEHPEVILEATYGWYWAVDLLNELGCDVHLAAPSSLNWGQRRVKNDERDAIDLIDLHRLGRMTEAWIAPPRTRELRELVRYRLKLTGLRTGLKAQLHAVMAKNGVLPARNDMFGPGGRAQLAALEIPAAYVTRIESIQRLVDAITSERRALDAELRRELRDDPGYQAVQTIEGVGPLIAAVFVAEIGDVTRFPSPSQLCSWAGLTPKHRESDTKVVRGKITKQGSRLVRWAAIEAISKQRGGAKLRADFNAIAARRGKQKANVAVARKLLTLVYYGLRDHQIRCLQPAA

SEQ ID NO: 385647 - protein, 349 aa, unidentified
MIVVGIDPHKQTHTAVAIDAATGRVLAELTVRARNPGFERLLTWARDLDAERLFAVEDGRHVSGHLERHLITRGERSIRVPPRMMGESRRTDRLRGKSDPVDATAVARAALAHPDLPEATLAGREREIGLLVAHRESLVRERADKICKLRWLLHDIDPDLAPAPRSLGRFVTLRRLAQVLEAMDASVEVEICLDLIARCTEITTRANELERRITSLMRSHAPALLQIPGCAALTAAKIVAETAQVGRFPTEGHFARYAGTAPIPASSGARHRQRFNRRGNRQLNTAVHRIAVTQIRIHPPARDYLAKKRAEGKTKTEAIRALKRHITRVVFKTLISIEQPTDRLTAVAA

SEQ ID NO: 385648 - protein, 366 aa, unidentified
MKTIAYVGIDYHINVLAIAVVVNDQKELYETIRISNNDKVIKRYMKKLSNTFQIKACYEASSSGYAFQRKMASWGYDCVVIAPSLIPKKPGNRRKNDFRDAKDLAQNYAKDMLTKVHLPSQKEEALRSLIRCRLSFKESAKRVKHQINSLLLSQGFRWPKSKWTQQHRKWIFQIELPIRHLQQALDEYFSLLQYLESRLDYLEQNIEQIASSSAYASSVNKLKVFKGISTLTAMVLIAEITDFRRFANPRALMAFLGLIPSEHSSGDKQRSGPITKTGNSRCRKLLIESVQHYSKRPYISNKMRQELAQVDSHSANIAVKSLKRLHKRYWSLTMKGKIRPVVITAIAREFVGFIWSMMQPVPVEAC

SEQ ID NO: 385649 - protein, 339 aa, unidentified
MSKFSTVGVDLAKNVIQVHGIDANGKVVVRRQLRRSRFLAFFEGHASCLIGLEACSGAHHWSRQLQEMGHEVRLMPPSYVKPYVKRNKTDAADAEAICEAVTRPSMRFVPIESEENSAALVLHRARDFLVGQVTQVGNAIRAHMAEFGIVTAKGSKRVASLADELDNLPEAARLPLRTLFDQFEETQCRIDRLTDEIEEVHRQNETSRRLASIPGVGVLTATAIAATTPDVGNFSSARDYAAWLGLTPRQHSTGGKPRSGGILKMGNRYIRRLLYLGAMAQIMVRRRSRYRGTDCLSQKLATKETRVVAIALANRMARTIYALLRDGTSFRSQVGPMRG

SEQ ID NO: 385650 - protein, 355 aa, unidentified
MSQTSNTAIAVIGIDIGKNSFHVVGHDARGAIVLRQKWSRGQVEARLANVPPCLIGMEACVGAHNLSRKLASLGHDARLMPAKYVRPYSKGQKNDFNDAEAIAEAVQRPTMKFVATKTAEQLDLQALHRVRERLVSQRTGIINQIRAFMLERGIAVRQGIGFLRTELPTILATRTDALSPRMLRVIEELAGDWRRLDQRIDGLSGEIEALARQDQACSRLMTVPGIGPIISSAMVAAIGTGDVFSKGRDFGAWLGLVPKQISTGDRTILGKISRRGNRYLRVLFVQAAWVVLVRIKNWERYGLKSWIEAAKRRLHHNVLAIALANKLARIAWAVLAKGRAFELTRTDDAGVVQPA

SEQ ID NO: 385651 - protein, 343 aa, unidentified
MNTVTLIGIDLGKHCFHVHGQDAQGRMVFRKKLSRSQMLTQLANVPVCRIVMEACAGSHWIARRLSAMGHEAKLISPQFVKPFVQGNKNDFADAQAICEAASRPSMRFVSPRNEVQQTISATHRVREALVRDRTSSTNQIHAFLLEFGISLPKGSAIIKRLPAMLAEHEGDLPPRLMALIERLREHVMYLDEQIKAVERELAQQLAEDERSQRLLEIPGIGPITASVLAVELSDAHQFANARQFAASIGLVPRQHSTGGKPTLLGISKRGDKNLRRLLVQGARVIMQHVQTRTDALGEWTRSMLCRRHSNVVACALANKMARIAWAILAKGTHYQSRSAATTA

SEQ ID NO: 385652 - protein, 373 aa, unidentified
MGVGRYAEAASPPEAAESLQEGSMRHIGVDLHKLAFTACFLEEDDSQHLATFPLTPEGLAAFRAQLVAADKLALEVGQNAYFFHDQVRDAVGEIQLVSPYQFAVIAKSTKKTDRHDARALARFLKLGCLPTVVMPDDRIRELRQLFTAREAFVKVSRQLKNMGHAALVRNGVTSRKSDFASGVGRRRLGLLQGLRPSDRRILDSVLRQLEAVEAELIELERAIIRAGKNLPGLKRLLQVRGLGLVAAIGVLSEIGDIARFASAKQLVSYSGLATAVHQSGGTERYGHITKQGRKRLRGFMVEAVLSLARNPAPNPLVDFYQRKKKEKGTGKAICATARKLLATIYVLLTKGLDYWFLEERLYQTKLRALAAAA

SEQ ID NO: 385653 - protein, 421 aa, unidentified
MSNVTEFGKKANNQVHELMENVSWVVGIDIGKEKLSCALMDIKKALICRFDVEGSLAGYNELLNRVKKETKGSGKIIFALEPTGHYWMVLGQFFEDHNQSYVLIHPLVVARSREVHRLSKGKTDSLDARLIGELACDRSITRTQIPEDYWATIRFYAREYMDREKEIAREKNRIVSYLETTLPGFIEIFPKPLCMSGRACLRFLANFREASKGDMKNFEMQIRKHLLGKRLMTSRVRRLYDMLQRGDVLGLRAGRPAMFFRIIHSLNRLEMYEGQKEAAKQAMLDMYEKSEYKEYLDSIWGTAPTVNALILGFMGDPVLYDSPASLVKLAGCDPVPNESGKFKGRASISHRGRSLLRKAGDRVSFLLEKRNSVFRAFFNHLMSRQKNKFTKRQARVACINKYFRIVWVLCHYRVPFNPALA

SEQ ID NO: 385654 - protein, 343 aa, unidentified
MDHFAGLDVSVKDTSICIVDDTGRITREVKVASEPGALLAVLMNASHRFKRIGLEAGPLSQWLFRALAEAGLPAICVETRHMRAVLKAQINKTDRNDARGIAQMMRVGLYRPVHVKTLRSQKLRMLLTHRKLLQSKAIAVENDLRATLRNFGLKMGMVGTARFEARIRELVENVADLVVLVEPLLVVRRVVREQIGILHRRLLAIVRDDEVCRRLMTVPGVGPVVALTYRATVDVPARFRKSKSVGAVFGLTCSRDQSGERDRPGAISRCGDEMMRAMLYEAAQAMLLRSAKWSWLKAWAIQIARRRGMKRAIVALARRLAVILHRIWVDGTEFRWTRETAVA

SEQ ID NO: 385655 - protein, 419 aa, unidentified
MAQRHDKPIISVVHPICCGLDVHKASIAACCLATAADGGEDMEIAEFDTFTDDLLRLRDWLIERDCPVVAMESTGVYWRPVHNVLEGYVKVVLVNARHTKHVPGRKTDLADSQWLAGLLRHGLLRGSFIPPQQVRQWREMTRLRKAYQESLADFKRLIHKLFECANIKLGVVVSDLFGATGRYIMNLLATGEAELSADDIAAGAHGQLKQKINELCRALQGFFTDHHRYQLRLLLATVTELEQHINLIGEHVKELMADHHAVLSRLQEIPGVSEVASATILSEVGATLEEFPRCAALASWSGLCPGNNQSAGKRKSGRSPVRGHRLKTIMVEVAWSAVRKPGSYYKDKFQRLRARRGAKRAIVAIAHRLLKAVYYIIKEGRHFRDLGAEYLTHKHQTGKLGSLKKQAKLLGYELTPLAA

SEQ ID NO: 385656 - protein, 398 aa, unidentified
MRVMALDISKGKSYVVVYNQEICTDEFEVYHNQEGFNKLRNVLNKHETTVVFEATGVYSRVIERFLNTENISYCKLNPLLAKMQTQTLRSNKTDIVDAHKLAQSHYSFNRELTVAQDTLYIELKDVSSLYDEIKRTLIKERNQLHAVIQKTFPELESLFSNYLSHFALNIIKEYPHPDLISESSRTKIKNRVLLFTKKRLSQEQAKKKANKLISMAKLSYPSVDKNDFAVTEVQIRIDRIKNLLDTKETLAQKMIDLSLDLPEFGILTSIPGIGDLSAALIISEVGDIRRFPTSNKMNAYIGIDIRSYQSGTLQKKDRINKRGNAKARMIFYFIVRNMLRVQKTSPNHIVDYYYKMKKQPFNKHDKVAMVACMNKLVKVIHFLVNTENFYDYTKSPRS

SEQ ID NO: 385657 - protein, 322 aa, unidentified
MSVTILGIDIAKQKFDVALLLDGKTKHKACKNSAEGFEILMIWLEKQGIQKVHACMEATGNYGEDLAIYLHEAGHTVSIVNPARIKGFGQSELIRTKTDKIDAALIARFCLAMKPGSWTPPSPDIRYMKALVRRVDSLIDMRSQEKNRLSTAHGHVIVLIKEHIAYLDQEIEKIRKQIADLIGRNPHLKQRKELLDSIPGIGKATIPHLLAELNDLDKFTHVREVVAFIGLAPKETLSGSSIKGKPRLCKIGHARLRKALYMPALVSIQCNPVMIAFYNRLKEKGKNGKVIVCAIMRKLVHVIFGILKSGKKYDPNYKPVLA

SEQ ID NO: 385658 - protein, 331 aa, unidentified
MKFTETIGIDVSKLTLDACIHGQQFLIQVPNTKKGHLKLLSWAKKNTGCSIENILFCFEHTGIYSFILARFMTEMKLNYILVPGLEIKRSLGIQRGKNDQIDARKIAQYAYRRRDEITPYQAPDESINKIRQLFSLREKLVKQRSEFMTTLKDQANFIEKSKNKLFFSVPNKLIKELNKQIENIEKEVDIVLEESAAIMDNFKLVISIIGIGRQTALLLIVVTNNFLWFNGHRKLASYAGIAPFPYSSGTSIKGRNKVSPLANKKLKSLLSSCAVSAIRNDPEMKIYFNRRTESGKHKMNTINAVRNKLLSRVFAVVKRRTPFVSLCKYAA

SEQ ID NO: 385659 - protein, 463 aa, unidentified
MAKKAQKIKKNQRTELLVVNPDAAGIDIASNEYQVCVPEDRDSNYNRRFEAFTCDLEAISQWLHQCRIKTVAMEATGIYWVQLYIVLEKHGFDVVVCNAKHIKNLGEKKTDYVDAGWIQLLHTYGLLTESFQPENQIREIKDLSRHRERLIDKNNQSILRIQKSLDMMNIKVHKVLSDIKGVSGLAILQAIVKGERDPKELAKHIRPGVKASGEEIRKSLEGNWSVSQVFILKQNFDAYNYTLQQIKELDHQIEELLVSYTQIRQINDKQDGSDNAPQTRELVRSKKKKDANNAPHFDAEKYAFEIFGVNLTRIPGISNLTALKLAAELGANFTVKFPTNDKFCAWLNLVPNNKGSGGKIISSKLPKRKNYAGQIIRVAANTLKNHKGYLGDVFKTKKARLGYNQAVIAVAHKLARIIYVMVAESVEYDESLEQRKTEINLEKKLTYLKKKLLLIEKQLSLCA

SEQ ID NO: 385660 - protein, 387 aa, unidentified
MTSSQQELAQRSEQAPAEKPATDRACQGATDTVTERDRRRSRGLSPNSRQNHSARLGRASSHPQDRDTFMESTARTFVGIDVAKHSLDVYHSGEDRSFTTTNNTAGFKQLLAELPSAGSCLVVIEATGGYQNQVVGALVAAGHPVAVVNPRQVRDFARGLGILAKTDRLDARVIARFGQQAGVRPVEVASEKQTELRELVTRRRQLIEMRTAEQNRLEASATKVVRKNVRHLVELLNKQIRQVEEAIGQLVESEPELAAKAAILETAPGVGPVTATSLLVDLPELGSLDRQQVAALVGVAPFNRDSGKFHGRRAIWGGRAAIRSVLYMAALTARRSNPVIRAFAQRLEAAGKPFKVVLTACMRKLLVILNSMIKNNQPWNSTLPLNP

SEQ ID NO: 385661 - protein, 365 aa, unidentified
MTKIAYVGIDYHLNSLSIAVLIEGEKEPDQMVHLKNDDRFIRKFMSKISQNFQIKACYEASTNGYCFQRKMASWGYHCDVIAPSLIPKKPGDHRKNDFRDARALVQTYAHGMLSIVHLPSEEEESVRSLIRCRYAFKEISKRVKQQINSFLLGQDQHWKHSKWTHQHRTWLGKLKMSNSHLQQVLEEHLAHLDYLETRLRHLNEQIEGIAALPRYAPAIKKLCALKGIQTLTAMLLIAEITDFRRFPTPRALMAFLGLVPSEESSGEKRKGGAITKAGNQRCRTALIEAVQNYAKSSHISTRMKSALSQVDALTASIAMKCLKRLHKRFWALTLKGKLRPVAITAIARELVGFIWAMMQTEPSLA

SEQ ID NO: 385662 - protein, 338 aa, unidentified
MYYTGIDLHKKTSFITTIDADGKIITRANLQNVEEDILAYFADLGDKTKIVIESMSSWYWLYDLLTGNGLDVVISNPVKTKAIASAKIKNDKIDSHMLAQLLRADLISTVHVSSLERRKLKELLRHRSRLVRDATRMKNRIHMLLMKNNLRSPVSDLFGVQGLRYLEEIDLPAYHRHQVETYLLLYEKLQEQIKPLTRRVRALVKQNHTAQLLMTIPGIGPITAMFIVAEVDDISRFRSYRNLASYAGLVPSLDASAGKEKMGRITKQGSPYLRTALVEAAQAAARMQNSRLRVFFRRRIVKAGYQKAVVATAHKILQYAFYVWKNQTPYQETYPVCA

SEQ ID NO: 385663 - protein, 304 aa, unidentified
MAHSTNILPRSFDYDQTLVLAIELSNKSWVIAAQVPGLSQTKAKRTIEPDKNDLLAAIDGYRIRAAAAGRSVKRVITSYEAGWCGFWLARWLMAHGIEVHVVQPSSVPVDRRMRRGKSDGIDAELLLRTLLAWLRGEPRVCSMVPIPDEADEDARRCVRERSELVSERVGLVNRIGAVLATLGTDDYNPLLQSRRRRLTELRTGLGDPIPPNALAKIERLLTRLELVLTQIAELELERDAVARTDAPDQAGKMIQQLISLRGIGVQSATVLVREAFVRRFANGKALGSYAGLTSTPYSSGGHRS

SEQ ID NO: 385664 - protein, 344 aa, unidentified
MTEFVGLDVSQKDTAVSVVDEEGRQLWRGKVKTDPTTIADVIASRAPDAKRIGFETGPLSTWLWHALKDLGLPLICLDARHAKAGLSVQVNKTDENYALGLAQLVRTGWYREVKVKSLDSHLVRGVLGARAQLVSTRIHLTTTIRGLLKNVGVFVAVGHRQTFASAAEEAIGAQTGLAAMVAPLIAAWRAITEQIRAYDGLLRSRAAHDETTRRLMTVPGVGPIVALAFASMVDEPGRFAKSKSVGAYLGLTPRRYQSGEKDVTGSISRTGDTLVRSYLFEAANVLMTRVKRWTGLKAWGVKLARRIGMNRARAAVARKMGVMMHKMLITNADFRWGKEEAVAG

SEQ ID NO: 385665 - protein, 355 aa, unidentified
MNDVITRKGFTIGLDLGDRFSQGCVLNEAGEVVARFRMATTRKGLEGALRRYPGARVVLEVGTHSPWVSHELEARGFETIVANPRRLRSITQSDRKDDRADAEQLARLGRVDPKLLSPIRHRGLETQRERSRITVRDGLVRSRVLLVNEARGLAKPLGLRLPTCTTEGFASRMRREGLENAFPGMGALVSMVDALTQQIRALEREIEGACQERSPETERLRQVAGVGALTALAYVLTIEDPHRFRCSRSVGAYLGLRPRRRQSGEQDPLLRITKAGDPYLRRLLVQCAHYILGPFGPDTDLRRFGLRLIARGGRAGRKKALVAVARKLAVLLHRLWVTGETYEPLRGEAAEVAAA

SEQ ID NO: 385666 - protein, 355 aa, unidentified
MSGDIKYIGMDVHKEAVVIAVLNGSGKLVMETIVEDPSEQHSADHPRSPGRVACDLGRRNLGGWLYDLLQPQVEQVLVCNPRRNALLKEGSKSDKVDAQKLAELLRTGMLRPVYHGENGLRTLRELARSYQTISKDLNRVMNRLKALYRGWSIACAGTQVYAPRYREEWLNQIPHAGVRRLAELLYQQLDGLQGLRRTLRPELLAESRNHKAAKLLRQIPCIGPIRAARLLALMQTPHRFRSKRQLWTYSGLGIETHDSAQYCYVGGQLQRSKKPQQIRGLNQNHNHEMKEIFKGAATRASCGRGPFHDFYQALLAKGMKPEMARLTLAGKIAAIALTLWKRGERFDPEQLASVH

SEQ ID NO: 385667 - protein, 350 aa, unidentified
MDKELYIGVDVSKQTLDLAYYDGESIDWKKAHIKVSNNNAGFKKIGSWVAKVSKGFDIVLFCMEYTGLYTQNFRLWLEEKHYIYRMVEPRKMHRFEPDLDDGLRSLDRIKTDELDSFRIAIYCEQNHRKILRNPSKLPPPVYFKLKRLLAERKQTVKQSVLYKQQLHDICAYDTDLSVERKNGQLKTLNDALKGIDNEIDMYIKEDADISKNFSLLTSIPGIGRVVALETIVLTENFMAIDNPRKYACYIGVAPFKKESGTSVRKGSSVSKKGFRQAKADLSIACLVCMQHIPNIRDYWERKRKEKCSGIVFNAIKFKVILRMFAVIKRGTPYVETDNYRNGKNKQPGVN

SEQ ID NO: 385668 - protein, 391 aa, unidentified
MAPVMIGIDPHKGSHTAVAIGADEEPLRQVRVRASAAQAQKLVAWAADWPERTWAVEGARGLGYLLAQQLVAAGERVLDIQPKLGARVRLLATGASGKNDPNDARSVAIAALRSTTAAEVAAAGHAAVLKVWSKRHRDLGRARNQLACRLHAVLCDLAPGGFSKEITAGQASGLLQRIRPSGAAAQARYDLASEFVEDLRRLDAQLRDTRSKLTAAVKESGTSLTEIFGVGPVIAATVIGATGQVSRFASRDRFAAYNGTAPIEVSSGNRRACRLSRRGNRRVNHAIHMAAVTQIRNKHSEGRAYFDRKLAEGKTRKEALRCLKRRISDAIYARLQDDARRTRQARTLTAREGNRGTTLTPARPAHTPITGSSDKPLPGLTPLYDPGQSPA

SEQ ID NO: 385669 - protein, 349 aa, unidentified
MNKKLFVGIDFSKETFDAAILKVSEESSIDLKIIGNEQFKNDVPGCKRFVKWLNKTCALSGDYSSVLVGGEDTGNYSTTLPKQLYVLGIDCSVQNAYSIKCGSGKIVRDKTDKMDAEKIAYYFYRFRDQIRLYKPLSKDMESLERLYSYRYGQVRESARLQCQIKEYEHILKSEPNDETLKFMIQRLEEQERFLKEEIKTIEAKMVEMIEADEELNEIHKCLLSIPGVGKITSLLLIVVTRGFTRFDNPKQLACFLGVSPHPNQSGTSVQNGNHRSWFADPYFASLLHMTALTASIHNPKFKAYDERLKSKGKPKLLIMNNIKNKLLTVAFTIATRRTKFYSDYDAKRA

SEQ ID NO: 385670 - protein, 342 aa, unidentified
MQITTIGLDIAKNVFQVHGIDAAEKVVVRKQLRRGQILGFFEALPRCLVGMEACATSHYWARELTKLGHQVRLMPAKDVKAYVKRNKNDAADAEAICEAVRRPTMRFVQIKSVEQQGQLMLHRARDLLMRQRTQLINALRAHMAELGIVAAQGREGVKELVKIIASEQDARLPVDAHTSLVVLAAGLQALQTMIGSIERRIIAQHRSDEASKRLRSIPGIGIVGATAIAATVPDPKVFRSGRDFAAWIGIVPREDSTGGKHKLGPISKRGDQYLRRILVVGAHAVLKRARHQPENYPWVTRLLERKPFRVVAVAVANKMARVAWALLARGGSYRAPAFAAAA

SEQ ID NO: 385671 - protein, 332 aa, unidentified
MFIIGCDLHTRYQVIAEADRETGEMTTRRLEHENGEAQRFYAGLDKPSLIGIEATGYTQWFERLAGELGHELWVGDPAEIRARAGRRPKTDTRDAENLLELLLAQRFPRVWVPRPEERDFRQLLKHRDKLVKMQTSLRNQLHFLAMNQGVCRKKKLWTERGRKELEGLSLGTWASRRRQELLELLDRLGPRIEEMDQAVKAEAERRPEALELMKQKGVGPVTALAFVLTIGPVERFAGSRKLVSYLGLNPREHSSGGHQRLGHITKHGNEMLRWLLVEAGHTAAQYDEELQRRYLRLKFRRGSNVAKVAIARRLAVRLYWRLRCYAADSHAQ

SEQ ID NO: 385672 - protein, 403 aa, unidentified
MNAVGIDVSKGKSMVAVARPLGVIIAKPFEVFHTSAGINALITYLHTLEGDTRIVMEHTGRYYEPMAQQLTGAGFFVSAVNPKLIKDYGTNSLRKVKTDKADALKIARYALDNWQDLCQYTSMDTLRNQLKTLNRQFAFYSKHKTAIKNNLIALLDMTYPSVNNLFDSPVRSDGSQKWVDFAASFWHVDCVRGIGLKAFTERYHKWCKRHGYNFQVHKPREIFETSKELICVYPKDESSKLLVKQAINQLNAVSSSVEHIRTEMNRIASQLPEYPIVMAMCGVGTSLGPQLMAEIGDVTRFNRREKLTAFAGVDPGANQSGTYEAQSVPTSKKGSPYLRRTLFLIMDCLIQAKPFDDPVYAFMDKKRSEGKPYYVYMTAGANKFLRIYYGRVKEYLASLPASK

SEQ ID NO: 385673 - protein, 335 aa, unidentified
MHYLYYVGLDVSKETFDASLVAFEDANEMAHRKFANSRKGICSCLHWVEKRHGIRLDDVIFCAEDMGSYISEMAVCASYRTLNFNFSLISPLVIKYSMGIARGKTDRVDARRIAEYAITHYRKIALYLPAEKELCQLRTWLILRAHLAKQRVAKLVLLEKLDYKEKFADVSIQRSMLQEEIAYAETHMKTIEREMKELIAADSNICRNYKLLTSIKGVGPITAIVMLCSTLNFTKITDHRKFACYCGLAPFEHSSGTSVRGGCHTSSMANRDIKVQLNRSALIAIRCDPQLKAYYERKVAEGKHKFSVLNAVRAKIAARCFAVVRRGTPYVALQI

SEQ ID NO: 385674 - protein, 273 aa, unidentified
MNHNVIGLDIAKHVFHLYTIQSDGKVFKKMLKRQEVLVFFANYPNSLIGIEACGSSHYWARALTNLGHDIKLLNARHVKAFVKGNKNDFNDAEAIFDAVSRPNVRTIAIKTIDQQDIQLIHRLRQEAIKRRTALVNQLRGLLSERGIVIGQGVNQVRKRLPELLEDAENALTVLSRAAFAEQYERLLEFDKEIKRYDQNMNQLCQANALSQRLAEVPGIGPLTATIVAAYLGEYRHYVNARHYSASLGIVPRQNSSGGKSTFAENLGNGAIAK

SEQ ID NO: 385675 - protein, 457 aa, unidentified
MRKRHRSKSKLRSRQIAPATIRPDAAGIDVGATEVHVAVNPERDPESVRTFATFTVDLERLAAWLRACQVKTVAMESTGVYWIPLFDILEAHGFEVCLVNAQHVKKVPGRKSDVLDCQWLQYLHSVGLLRASFRPPSQICALRALLRHRQNLVRYAAAHVQHMQKSLDQMNLQLHHVLSDITGVSGLRILDAILEGERDPLQLAGLRDYRVRSSEETIAKALTGNYRDEHVFTLRQALAAYRHYQQMIVACDQHIESLLEGFSDRVDPQQQPLPEPRRKRRRSGNGAHFDLRTHCYRVLGTDLTAVPGVDALTAQAVIAEVGTDFSKFPNAAAFSSWVALCPHNDITGGKVIRRGTRPVKNRLAVALRQAAQALHGEQSYLGAFHRRLRARLGPAAAVTATAHKLARIIYHLVTTGEAYDESVFQREQQRYRQRAEAHLRARARSYGFQLVPLDAPA

SEQ ID NO: 385676 - protein, 347 aa, unidentified
MNTILAADLGKYNSVLCWYEPDSRTAAFRTVKTTPEELARELLRLPVALVAFEACSQAGWVHDLCERLGLPAIVASTTGTAWQWKRVKRKTDRDDALKLARLAAVGEIDPVAVPPRATRQWKSLIGLRKRLVSERVRGQNRIRGVLVCQGLPAPIGARAWTALGLAGIAQFAAPLTDCAPDDLWRGELNVLLERLRFLDTQIRTVEARLDDLAASDSRVSLLESVPGVGTRTAEVVAVHLHDARRFRSADEVSAYAGLVPRQYQSGETDRRGRITRRGPRLLRAALVECAWCSLRYNPWARDTWLRLQSNGVSKKKAIVALARKLLVRCWAILRSGQPWRTPTPAAA

SEQ ID NO: 385677 - protein, 349 aa, unidentified
MTKVSMIGFDLAKNVFQAHGVDAAGKVVVRRQLRRPQVEKFLAALPPGVVVGMEACSGAHHWGRVVQKLGHEARIMPAAYVKPYVKRNKNDGRDAEGVCEAMGRPTMRFVQVKSLECQAVLVLHRTRRLLVRQRTMSGNAFRSALAEFGIVAAQGLKGLRSLMELLADPASAVPDAALLPLRVLARQWETLNADICKLETEIVRAAKTDEVARRLMAIPGLGPIGATAILAAVPDIRVFKTARDFAAWLGLTPRQFGTGGKHSSGGISKQGDRTLRMLLTVGATAHLRYERVRDIKDPWLQALLARRPFRVAAVAYAAKMARIIWAMLVTGEHYRAPNRRHSGCVQAAA

SEQ ID NO: 385678 - protein, 387 aa, unidentified
MSQTIAAPIPAAVDYERTLVLAIEVSNKSWVLAAQVPGLPHTKAKRTINPEAEALLAAITGYRTRAAATGRSIERVIAVYEAGWSGFWLARWLMRRGVEVHVVQPSSVPVDRRMRRAKSDGIDSELLLRTLLAWLRGEPRVCSMVPVPDEADEDARRCVRERTELISERIGLTNRIGAVLATLGVSNYNPLLRNRCRRLAELRTGLGEPLPANAHAKIKRLLARLELVLMQIAELERERDAVVETEAPDKASKMIQQLTGLRGIGVQSATVLVREAFVRRFANGKALGSYAGLASSPYSSGGTDREQGIGKAGNRRVRTVMVELAWLWTRYQPDAAQVCWFRERVGSTGPRVRKIMVVALARKLLIALWRFVIDGVVPEGAVLKPAV

SEQ ID NO: 385679 - protein, 437 aa, unidentified
MSLNRLQVGIDFSQKRADFCLLFPDGQPLVAHQAFPNSLPGYQKARQLLLDSLRTQSFDGLDVSGEATSYYWLPYFWQMAHDSELSACDISLFLLNPRQVFWFKKSLPPDDKTDNVDPFYIAERTRTRRPTSSWDPQDDWMPLRFYTRLRFHLAQCLTREKNYYLIYLFLMHNTYQRIKPFSNTFGVTSQQVLGGELSLEDLIALPEDDLAEKLDDWSGGTLDDPLETAKKLRQVAAESFALSEPLAIPVQRILDTTLEHINFIEKQIQQGEQWITAEVETRHPEVRFLETVPGVGLVLAAGITAEIGDLQRFFRTKKWNKKHKCYRTRTLREVEDAVAKLAGLWWPQNSSGDFVSENRHLAKTGNRYLRYYLVQAANGMRRHIPAYVSFYGSKFREAIRFKHKRALVLTARKSIGLFVGLLHRKEAYRPQEVSGHL

SEQ ID NO: 385680 - protein, 387 aa, unidentified
MPQLNDLSRSLVALDQDSTIIAVVELSQSSWLVAGVLPGIERQPQKKLEPSAERLLGLLHRWRDEAVRAGKKITRIALAFEAGRDGFWLARWLNARGVEAHVIHPSSVAVSREHRRAKTDRLDTEMLKRGFLGWLRGERGHCTMARVPTIAEEDAKRPNRERECLVGERTRIVNRIKATLARMGIRNFKPTLRKAAERLATVRTPEGMPLPPNTLAELQRDMARLGFVVSQIREIEQARQKRLEQETETGPHAMVRQVARVIGIGIETADMLVHEVLSRPMRDRKAVARYAGLTGSPDESGARRREQGLARAGNARVRRGMIQLAWRFLRFQNQSALAQWYRARTADSRPGTRKTMIVALARKLLIALWRFVTTGETLDGVILRPAG

SEQ ID NO: 385681 - protein, 406 aa, unidentified
MQDAIARFGSVDWAANRHAACVVDATGHLIDQFSVEHTATGLATLVRQFQRQHVARVAIERPDGPIVEALLAANLEVVVVASRAIKGLRTRYGLAGNKADQSDAYILADCLRTDGHRWASLQPDAPQTLALRASVRGRKELVATRVATANQLRAHLQLVFPAAVGLFAEIDSRITLRFLERFPSADKATWLSELRMQAWLRANAYSGRHTARELMDRLRTAPKGVQGATAEAQAVVTLSLVRVLRVLVAEIAQLERHIREQLAVHPDGPIFCSLPRAGTVRAAALLVEIGDCRARFPSPESLAALAGAVPSTRASGQYRLVTFRWTCDKKLRDALVDFAQDSVRASAWADQLYRRHRQARKTHPHAARIVTRAWISVIWRCWQDHEPYNPARHRALQRVIAPGGLT

SEQ ID NO: 385682 - protein, 401 aa, unidentified
MKEFNAEAVRIETASALETVRPAQAEGRYPAYIGLDVHKETIAVAVAQAGREAPESRGEIANKPKTVAKLVERLNREFGGEVLLLCYEAGPCGYGLYRQLLELGHDCQVVAPSLIPKKPGERIKTDRRDACKLARTLRNGDLTAVWVPDEEQEAMRDLTRARDDMKGQERKARQQLNAYVLRHGHAWPSNKTRWTQTHYNWLESLKFPHDWQQVVLQEYIDAVKAASQRVADITAQMERVLPQWSLAPVVDSLVALRGIDKLAAMVLLAELGDISRFDSPKQLMAFLGLVPREHTSGGRRRQGAITKTGNSHARRMLVESAWSYRFPARQTAHLKRKAANASDEAKVIAWRAQKRLCGRYRTLLHAGKNTKQTTVAIARELVGFIWDIACHEMPKVQQAVR

SEQ ID NO: 385683 - protein, 473 aa, unidentified
MGKGSGGNGMTRGDRRRNARRERLRAMLPRDGAVIGIDLAEDKQALAVIDHDVRVLARKTERVKVFRLGAALDWAVGQARAKGFGQVTVACEPTGARWLQVQRLCAERGLPLVCIQPLISHIAREQQDFTRHKTDESDCVLIARLAVELHCYVPEELDETWAHLRHLGRRRAQLITAATASAQRIRDFLSVAWPAVPETCARPLESVTWLAALQVVTARCGADPGKLAAMGEQEFTALVRGAVPGWGGQKAHGPISRRVFAALTDTEGVVVSSRRGLLRRVADELGDLQRTRAQLRAVEADMVAVLDELGLSRLADIPGLTAVGAAAILAETGDPHRYDNSSSLVKHAGMSPSDNASGAFCGQAHISRRGRPGLRLVVWRAVWPMLQYNPVMAAKYQAMTRAADTAAAGAGPQQGRAAQAAARARRAKARVACAASLLRWIYCMVVHDTSWDPAVASGAASRHDAPHTQAEAA

SEQ ID NO: 385684 - protein, 316 aa, unidentified
MTTTPVFVGIDVSKDRLDVALRPPADGWAVANEEPGIATLVERVRGLSPTLIVLEATGGLEAPLTGALAAAGLPVVVVNPRQVRDFAKATGTLAKTDALDANILAQFGEVIRPALRPLPDAATQALSALLARRRQLIEMLTAEKNRLGPAPPPVRKGIRAHITWLKRQLARTDDDLASAIRESPVWQAKDDLLRSAPGVGPVLATTLVANLPELGTLSRQQIAALVGVAPLNRDSGTMRGRRRVWGGRAQVRTALYMAALTATRYNPVIRAFYARLCAAGKAKKVALTACMRKLLTILNSMVKHRTRWQDNLASTP

SEQ ID NO: 385685 - protein, 355 aa, unidentified
MNQEKYIGMDVHQATISVAVMDGSGKLIMECILETKAATILEFIAGLRGTLSVTFEEGTPAAWLHDLLKPHVSHLVVCDPRRNALLKDGSKSDRIDARKLAELLHANKLHAVYHGEHGVRTLKELGRSYLTIPKDLARVMSRIKALYRGWAIPCSGATVYAPRHRDEWLAKIPHPGVRLRAERLYQQLDLLQPVRQEARRDLLVESHKHHAVELLRQIPSIGPIRAALLVALLQTPHRFRTKRQLWAYSGFAVEIHDSGEYRFARGKLVRNRERIPVRGLNHNHNHDLKNLFKGAALSASTRPGPLGDFYVALVEKGMRPTMARLTLARKMAAITLTIWKKGVDFDAKPLNRHAA

SEQ ID NO: 385686 - protein, 418 aa, unidentified
MASKANGRLPIKSGVMVVGIDVAKRRHVAAIRLPDGRFQRPFSFTNDREGFAKLLERVGLAGAASGSSEVRFGLEATGHYGHALQHFLLARGAVVTSVNPAHTRRAKELLDGSPEKSDPKDAMLVAELVAQGRGRPLTMPMGVYAELRRLGKLREQLAAERIRHLNRYYGLVDLVFPELEGLVYDVRCLSIRRLLAAYPTAADVAAGGCEEICGLLWRVSIGHLGAARGQQIYAAAQRSVGVREGLSALRLQMRLALASLDSVSAQLAQVEQAQCEALTQIPYAAHLLTIPCLGPVTVATVLGETGDLRQYRSAEALIKLAGLNLYSLSSGTFQGRTRISKRGRPLLRHAVFLGALRMSKHGQPLAAFHDRLGDRLAGPQVAVAGCRKVLRLLYALARDGVSYAPDRLATMTSDQVAA

SEQ ID NO: 385687 - protein, 372 aa, unidentified
MQQNSKVFVGLDTSKLKISVAVAEDGRQGEVRFVGEIDNTPEAVRRLVNKLASRHGELLFCYEAGPTGYGLQRQISALGHDCAVIAPSLIPKRPGERVKTNRRDALTLARLHRAGELTAIWVPDPGHEAVRELVRAREAAMADLREKRQHLQSFLLRHGRIYPGRRPWTLVHARWLAKLTFEHPAQYLVLHEYRKAIEDAETRLERLNQQVAEVVATWSMAPVVEAYQALRGVGLLTAVTFVAEIGDVRRFDSPRQLMAYLGLVPCESSTGERVRRGHITKAGNPRVRRVLIEGAWTYRYPARVSRPLEVRLEGLPAVVRAIAWKAQLRLCARYRRLMAAGKRQTLVTTAIAREMAAFLWAIGQEVEPRAAA

SEQ ID NO: 385688 - protein, 344 aa, unidentified
MTVDYYVGIDVSLEASSICVVDGAGKIIKEAKLSSEPEAFIAWFKALPFSLARIGLEAGPLSQWLYAALKEAGFAVELLETRHVRDAFKAMPVKTDRNDARGIAQLMRLGWFRPVHCKSAPAQETRALLTARKLVQGKLNDIEMSLRGILRGFGLKVGRTKKAGFASRIMELTEHHPALKAIAKALLTVHEVLLKELNRFENQVRKLARSDARARLLMTTPGVGPIVGLTYVAAIDDPARFSSSKMVGAHFGMTPKKYQSGEIDVTGRISKMGDKGVRAALYEAAHVILTTPVKGGALKSWAAKLARRAGMRKAKVALARKLAVILHRMLADGSVFDVTKAAAA

SEQ ID NO: 385689 - protein, 386 aa, unidentified
MKPGGEVLSAPFEITHTKSELLDLINIIKSQNEEVRVVMEDTGHYHLPVATLLVDNDIFVCSVNALRMKKYCSQSIRRAKTDKIDSVHIASYGIAYWNELQSIPCSDDIYKELQLLARQYYQSVALLVKAKVNFSNLLDRVMPNIQSIITDNSSNSKLTDFVARYWHFSRILEMGEKRFISDYCKWAKKKGYRMCECNAKEIFALAQNGIPVLPSSQSTKIVITEAVRVIHELESSRDTILAQMQSFAKTLPEYSVVREMPCIGDVLAPRIIAEIGDVRRFKNKHSLIAYAGIDAPPYQSGSFNATERHISKRGNSYLRKTGYEIMQSLIKHKPENDSVYDFIVKKRCEGKCAKEVMIAGLNKFLRVYYGKVTELYDNLEYCNLTA

SEQ ID NO: 385690 - protein, 443 aa, unidentified
MSRKRRTHLRGKRGQAFADQIRGIPLDRILCVSIDVHKYFHVVMIHNALGEIVTPTFEIDIFQTGFDQLCQAIDEASVRIKAQVVLTGMEPTSHYFENLARHLRQRPQPVTLINSYAVKKNRDQQMMHREKDDEIDTASIGDLLRRGEGTPFKPASGVYLQLQHLDRVRLSKVKIRTMLQNQVLGHLDRIFPGLVIIAKEAKARYTPLFTTDFWSCQTMQHLIRVCPDPRQLAAMSPQDLIDAFHLHHYAMGPVTAAKTIAYAQKVLLPDAELIAIRGELLAHDLALLEEVEDHIAQLEDRLRTLLAETPYQIWVKLKGLSDIQVASLAAAIGDPANYSYAAQVFRRSGLVSGRNDSGIRQRKGKGKRIVKVGDVYLRRALMNALATLILHQPVLQQYFNKLRKSKPAGVARVATARRATGILWATLRDQQAKTLILKKGATM

SEQ ID NO: 385691 - protein, 348 aa, unidentified
MSQSKQYVGLDVSLKETSICVIDDVGKIVWRGRTESTPEAIGSAVKQHAPYAVRIGLESGQLSSWLFHGLKVAGLPVICIDARHAKAALSLKVNKTDANDAFGLAQIMRVGWYREVTVKGLDCQAVRALLVARAQIVSQITTTKNCVRGILKTFGRVLPKGLRSQFSGRVRAAIDGDPILGAIIEPTLRVLEAMRAQLLVYNKAVIQRARGDDTARQLMSAPGVGTVVALAYMTGVEDPARFKRSSSVAAYFGMTPRRYQSGEVDHAGRISKCGDGMVRGLLFESAKVLLSRSARPSALKTWGEALGKRIGPKKATMAVARKLAVILHRMWTTGTMFQWNAEAASPAA

SEQ ID NO: 385692 - protein, 371 aa, unidentified
MSFLGIDLHSNRITVARLAVKDEAFETITKTYNFEQESFKSFLDSLSENDYVLVENTFNAFWFYDQIAERVKECLVYNTNEARSRGNKTDKIDSRHLVQKLGYYFMMGERKEYLPTVYVVDAEIREIRGLFTTYQLYKKTKVQLKNRIHSILKQNGICIERGKIDKKDFEARIDDFEISEIWKFQIRSALKALNSVHEEQKEIRDQIHLLGYKLFKEEVELLMSIRGFSAFTGIALMSDVVDVNRFSSARKFCSYLRATPKVKSSNQSIQIGHINRQSRPLTCSLLTQSIVQLSQAGEHMTEFYGRVKIGKSAGKCRIALIRKILVSAYHMLNRKQKYHWVEEELYSRKLKEFQNEMTKITTSAEEKRESA

SEQ ID NO: 385693 - protein, 356 aa, unidentified
MLNKFNKFVDFSGHNVYAGLDVHGKSWTTTIIVDDIEHRRFNQPPEPLALYKYLSSNFPGASFSSAYEAGFCGYHHHRKLIELGIENIVINAADLPITNKEKVNKNDHIDSRRLAQALQRNELKAIYVFGPEHEQFRSLFRMRWRAAKEHRRAKNRIRSFMYYYGINPPSDFNPEHWSLGFIHRLNQITMPTQSGTLSLKFLLKAYQNTREQLLEVTRQLRHEVKLHYPDLYKLLMTVPGIGPIVALCLIAEIGDITRFRSYRHLSSYAGFIPNSHQSGDKDPKGRLTYRSNKYIRSMLVEAAWVAMRHDPALLKYFKERVIKQESKRVIIKVAHKLLNRVRQVWISNNPYQTGII

SEQ ID NO: 385694 - protein, 359 aa, unidentified
MKGISMPDQQQAVIGGIDCHTDFHVAVALDPLGRVLGTDAFPATSAGYRLTHRWLASFGPVAAVGVESTGSYGAALTRALVEQGCRVIEINQPHAHLRARRGKNDAIDAEAAARKVLSGEATAAAKDTSGIVESIRQLSVARSSAVKARSAALCQLGDLLVTAPATLREQLDTRRSLEGKAAVCARLRPDTDRLADPAQAAKAALRSLGHRIAQLGAEADELGRRLDRLVATAAPTTTSRLGCGTHHTAALLVAAGQNIDRLGSEASFAHLCAAAPIPASSGRTSRHRLNYAGNRSANRALHMIVIVRLRYCERTRSYLNRRVAEGKTKKEAIRCLKRFVARELYRTLRADLATLKTRT

SEQ ID NO: 385695 - protein, 314 aa, unidentified
MSLQESACVTYIGVDVAKPELAVQFPDQLWFTANTAKGHAALIERLGAVGAVHVICEATGGYERALVCALHQAGTAVSVINPRQVRDFARACGRLAKTDAIDARVLADYGTKLNPRPDPVPADGEDDFAELIKGRQDLIALITEEIGRREHLHLPALLKLSTARQRQLETQLAKLDSLIDAHVAAHAALAARAKRLQGVSGVGRVSALTVLALMPELGTITDNQASALAGVAPLNHDSGQYRGQRHIAGGRAAVRRVLYMAALTACRRNPILTVFYKRLREGGKPAKVALTAVMRKLIILLNRLLKNPHFTLAT

SEQ ID NO: 385696 - protein, 409 aa, unidentified
MLFIGDDWAEAHHDVELQDEQGRRLVRRRLPEGVAGIAVLHALIADHLGDDEPDTVVVGIETDRGPWVQALLAAGYQVFAINPLSAARYRERHVTSGAKSDPGDAKVLADLVRTDRQHHRPIAGDSELADAVKALARAHQNLIWTRQRQTGQLRSTLREFYPGALAAFDELAGRDALAVLEIAPTPAKGRALSRSKIASALRRAGRQRGIDARAEQVQAVLREPQLAAAPMVEVAFGHTVTAMVAVLAQLTTQIELLEQELNAHFEQHPDAEILRSQPGLGPVLAARVLAEFGDDPTRYADTRARRNYAATSPITRASGTRRVVLARVAGNKRLRDALYLQAFAAISRSPGARAYYDTHRASGHTHHQALRALANRLVGILHGCLRHHTTYDEATAWPATKKPPLANAA

SEQ ID NO: 385697 - protein, 329 aa, unidentified
MKVQHIIGADLSKKSIDLVCHLLKSHVQIENTITGFKDLMQWFKHQKVNASKTMIVMEHTGLYSYCFEKFLHQHQIPFCKVNALTIKRSMGLVRGKTDKLDAARIAAYGYEKKDKLTIDVPASDSLRRLQMLHSTRERLVRHRASLICSIKEYKCIGISDKDVIMQTQLQLIKNFDKQIEKLMIEIETIIENQKALKQNFRLLQSIRGVGKVVALVTIIKTHNFTRFANARKFACFCGTAPFPHDSGTSIKKRTRVSHLADKQMKSLLDLSAKSAIQYDKELREYYLKRTEGGKSKMSTINVVRNKILYRMFAVIKRQTPFLENYLQAA

SEQ ID NO: 385698 - protein, 416 aa, unidentified
MNAISVGIDIAKGQSVVAAMRSPGETVWKPRKVMHTAAALERLAYDIKALGYNGAGEVRVVMEATGRYHDPVAQELHEVGNFVSVVNPKLIKDFGNNTLRKVKTDKADARKIAKYGLQNWDDLREYTPAEAARAKLKQFSRQYNLYSKMKVQLKNNLIAMLDQVFPGANELHDSPARPDGHEKWVDFVTTFWHCECIADMSEAAFAERYRKWCKRLGYHFSERKAESLWGDSLGHITTLPKNANTKMLITEAARQLTSISRTVEIYRAEMLRLAQMMPEYDVVMGIYGVGPTVGPQLMGEIGDVRDFTSRKALVAFAGVDPGDNSSGKQVSKSEKTSKSGSPLLRKVLFQAVNTYVKKKPANEPVYQFYAKKRAEGKLYYVCTTACANKFLRIYYARVKEHLEKVRPEEDRFPCQG

SEQ ID NO: 385699 - protein, 437 aa, unidentified
MQEVEDEPLFAERVAGIDIAKAEVMVTIRVPGDTGRGRRQQETRSFRATRKDLLHLADWLRSWGVTRAGMEATGNYWKPVYFLLEREGFDCQLYHAAQVKALPGRPKTDKLDSVWLAKITERGSLPSSFVPPEPIRRLRTCTRYRRHLTQARTAEKQRCEKLLEDAHLKLSSVITDIHGVSGRDMLTAIIAGERDPKVLAQMARTRMRGKIRQLEEALDCSFFTGEHAFALAMMLANIDHLTAQISELSARIDALCEPYLHQITQLDAVPGFGIITAQDIIAEVGTDMTVFPTAGHLASWARRCPQVTSSAGKRKGSNATGRGNPYIGAALGEAAVNAGRTQTFLGAKYRRLVKRMPKKKAQGAVSRTQLVIAHALLSDPDAVYADLGTGYYEQRANIRRQVRSHVRAIERNGYKVTLEPVGPDLIDPGTLPVATAS

SEQ ID NO: 385700 - protein, 449 aa, unidentified
MLRWLRHLAEQEFAMKKFLPCCAGIDIGKREMTATILTGSPDVEPVQQTRTFGTTVQELNRCLEWLRSNQCSTVVVESTGSYWIPVWNVLSEQLAVIVANPEHVKARRGEKTDPEDSRRLAERLRVGDVRGSFIPDQDVIELRDLTRRRKRLLFNANSERNRIQKLLEHANIKLGNVVSDVFGASGQAILRALLDHPDQPPAELAELAKGTVRRKRAALRESLEGHRLNDHLRWMIQHSLDHLVFLEQQINALTERTLEKLKRFQREYELLQTIPGIGPETAAVIIAETGANMAQFPSARHLTSWAGVCPGNNRSAGKQKSSSIKRANKWLLAALVQSAWATVRDRGSIFRKRFYRQMMHRGRKRALIAAARALLAVVWQVLHQGVPYAEPTNELFQQRERSKKVRHHLRRLQELGVDITPIELPPTPTIRKPQPDFTRPLGALGIHAR

SEQ ID NO: 385701 - protein, 421 aa, unidentified
MDNRWYHVNLSDWRALIMFNAVGIDVSKGKSTVSVLQPGGTVVKKPFNVVHSSSSLNELSRFILHLDGQTRVVMECTGRYHEPILHALHDAGIFVSAVNPHLIKNFGSNSIRKVKSDPADSRKIARYALDNWASLRQYSDMDTTRTQLKTLNSQMDFFTKQKVAARTNLISLMDMTYPGVNFLFSSPARDDGSEKWLDYAESFWHVDCVRKIGLKAFTKRYQAFCKRNGYNFQPGKPEELYLASKELVAVYPKDKVYKDLIMTGIEQLKSTTQHVEHIRHEMDALASTLPEYETVLSMRGVGKTLGPQLMAEIGDITNYTHREALTAFAGVDPGVNESGSFRSKSNPASKCGSSRLRKTLFLIMTSLLQTSPADDRVYQFLDRKRSEGKPYLVYMTAGANKFLRIYYGKVKACIAAQSKSE

SEQ ID NO: 385702 - protein, 341 aa, unidentified
MAIMTIGIDLAKNVFAVHGVDENGKAVLIKPRVTREQLPALITQLPPCLIGMEACTGAHHWGRLFRQYGHTVKLIAPKFVTPYRMSGKRGKNDAADAAAICEAVTRPNMRFVPVKEEHQQIILTLHRTRQGFVEERTAIYNRLRGLISEFGIVLPQKVSCLRREIGLHLEDLPGYANLCVGDLLAHADRLDTLIDEYDRRIAQSARENARSKRLMQLPGIGPTTASALLASLGGAHEFKSGRQVAAWIGLVPGQYSSGGKARLGRITKAGDSYLRSLLVMGARAILSGLGDKQDRFSRWARNLVERRGYWKAVVAIAAKNARLAWAVLSYGEDFRLNRDCA

SEQ ID NO: 385703 - protein, 432 aa, unidentified
MSKRRVYRATEVNHVRWESLVAGRVAGAVTVGMDIGKFEILVVVRWADSTFERPWRVENPAGIPQLIGLLRKLRETQALTVALESTGTYGDALRSQLAAADLPVRRVGGKAAHDYAEVFDGVPSQHDGKDAAILAELGAFGKATDWPYVTASDTERDLAYWVDWLDAQQQVQMMWTNRLEPLLARHWPELTRLVPLNSVMLLRMLAHYGGPAAVAADATATEQLARWSRCSARAPRIGRVVASAASTLGVPQAQRDIERVRQDATLALAAAREVTRARRQLAVVAQEIGPLQQQGAVVGIATACVLWTCLGSPENYPCAAAYRKAMGLNLKERSSGRHQGQLKITRRGPALVRRWLYFAAMRLAQRAGVRAWYQAKKAKDKDRGKGALIAVARKLALALYYVGARGEVFAACRLFPGTPTLGPPARTAAVPE

SEQ ID NO: 385704 - protein, 383 aa, unidentified
MRHGGILIEANDSEGEAMKKHTSINQSLSADVSACTTVAVDLAKRVFQVAGEDALGQVIFEERIKSREAFQAFLHRLPASVTVLVETGPGAQAWGRLLQTQGNPVRILPAQLVANHRSGPKNDRNDALAILRAGRDCKISAVPLKSAAALAMQALHRARQGYVRRRTAVGNQMRGLLLEQGVAMAQGEIAISQLVPRILEDATQPLPDVLRELIAELLGEWRQLAERITVLTGRLETAAQEDETAKRLMTVRGVGPIIATALLAKQTQPERFANARLFAAYFGLVPSQHSSGEKVRLGKMSKHGDAYLRSLAIQGAHAVLRQLRPDSQQPDDQRLQRWVSRLGRKEAAVRLANRNLRILWVLLQNDQTYRRQPGTAQEAAMSH

SEQ ID NO: 385705 - protein, 315 aa, unidentified
MSQEPIYFGIDVSKERIDIAARPTGTSWSVSYDSDGVDDLVAQLKDLKPAGVITESTGGLELPLVAALAASSLPVAVVNPRQVRDFAKSTGQLAKTDRLDAQVLAHFGEAVRPPIRPLRDADTQALGAVLARRWQVMGILVAEKNRMRRAAAEVRPSIEAHIGWLEQELDDLDTDLRQRIQSSPAWREKDDLLRSVPGVGPQVSLTLLAYLPELGKLNRKQIAALVGVAPFNRDSGPYRGKRSVWGGRAMVRKTLYMGALVATRFNPVLSEFYRRLLDAGKPKMVALTAYARKLLNILNCMARTGVHWDPTAPRP

SEQ ID NO: 385706 - protein, 320 aa, unidentified
MSASSVVVGIDVAKAHVDVSVLGAKLDAQRFDNQAEAHSALTAALKPLDVALVVMEATGGYETELACALQGAGLPVAVVNPRQARDFAKSMGRLAKTDTVDARMLAEFAAVLLRRDDLARFLRPLADPQQQWLAALVTRRRQLLAMLLSERQRLQITPKGLHPSIEAIVAAIKAQLDEIEAQMVGHVREHFGELDRLLQSASGIGPVASATLIAELPELGRLNRREIAALVGIAPMANDSGSSKGRRRIQGGRFDVRRVLYMAALTATRRNPVVKAFYERLIAAGKLPKVALVACMRKLLTTLNAMVKSNKPWDNSLHGA

SEQ ID NO: 385707 - protein, 413 aa, unidentified
MDVLHPRCCGLDVHKSSICACILLREAGRVQKHQRRFSAMTQELQELAEWLRQFGVSQVAMESSGVYWKPVWNILEGQFTVVLANAQHIKNVPGRKTDQKDAEWIAQLLQYGLLRPSYVPCEIIRDLRDLTRMRASLSQEASRISNRIQKVLEDANVKLASVATNVLGKSGRAMLEDIISGEDDPEHLASLALGHLRVKIPQLRLALEGKIRSHHRFLLRRLVDQIQFVEHEIALLDERLEEIAQQRPELSQAVARWDTIPGIDRVAAWALLAEIGDNMAQFPTAEHLASWAALCPGNHESAGKRLRGTTRQGSPWLCRMACQCAWAAARTKNTYLSSQFRRLAARRGKKRAIIAVAHTIIVIGYHLQKNQSNYEDLGGNYFDRIHSDGLKRYLVKRLQQLGHKVTLEPMEAA

SEQ ID NO: 385708 - protein, 330 aa, unidentified
MAFNNIMGIDVSKNTLDCHLYLQQEGLSSVANSVQGFKQVGKWAKKQCKGNTGGILVVMEHTGIYTYGLEQYLYKHGIAYVKRPALDIKRSLGMVRGKTDKADARFISKYGWMRKEELAPMKPVSDTLAELQHLMSYRDKLVADRASYLSRTKELEGQLGKKLNSKISESSAYIIDVLDREIKELEQAIKELLKEEQALQTNYELATSVVGIGFATAVHFIIATENFTRFPDARKLICYCGVAPFKHESGSSIRGRTRVSPLANKKLKSLLTMAAICAVRFDQDLKRKYEQKVAEGKPKMSVINIIRAKLIERIFAVVKRQAKYEIRTAA

SEQ ID NO: 385709 - protein, 339 aa, unidentified
MGQRPFIPQEYDVFGGLDVDKKSISVTFINHQQGFIRSLHMPYSVEQLVKHVRKHFAEQKVAFAYEAGPTGYGLYDGLSAQGYNCLVAAPSMIPRALGQRVKTNRLDSRGLSENLRGGQLKSIHVPSPIYRELRHLTQLRDTLVSEGAGTKQRIKSLLLFEGIPFPLAPAGSQWSLKGKAQLRKLQCSKSVRFKLDQLLDRVEFSEKQGVKVSKEIRQFCHNDPELSQCIEYMMSVCGIGWIVASQLLARIGDWRELQNVRQLAGFLGLVPSERSTGEKTHRGAITHSGDGRLRSKLIQASSSAIRQDGELREFFRSVCRRHPRGVGARGWPLWRWRVS

SEQ ID NO: 385710 - protein, 344 aa, unidentified
MKITRVGLDIAKQVFQMHGVDENGKSRLRKQLSRAKVLEFFAQLPPCLVGIEACASSHHWGRELTKFGHTVRLMAAQFVVPYRKRDKNDANDAEAICEAVGRPNMRFVAIKSEEQQSVLMVHRARTLVVANRTAQVNQIRGLLGEFGLVVPKGVARLRRELPGILEDAENGLPALAREVLAGLLEQFHDFDTRVTAYDRQIRALAEASEPARRLMQVEAIGPQTATALVASMGDPRVFESGRSYAASLGITPRQHSSGGKERLGQITRQGDGYLRTLLVHGARAYLRVVDKKTDAKSAWARRLKERRHVNVAAVALAAKHARIAWAILAHGTEYRPAGPEVVAA

SEQ ID NO: 385711 - protein, 345 aa, unidentified
MTEAYDGRQVVGMDLHRRRSVLVRMTEDGRKLETVRIENSPAALRAVIARAGNNPRVVVEATYGWYWAVDVLEAAGAEVHLAHPLGVKAFSYRRVKNDERDCADLADLLRLGRLPEAWIAPEPVRALREITRYRHKLVGQRTSCKDQVHAVLAKAGIPVTRSDIFGRGGGIWLDGLPLPQPYAGKIASLRALISVLDGEIARLGEQAAAMLAGERGYAAIRQLPGIGPVLGAVIAAEIGDITRFRNPGQLASWAGLTPRHYESDTRVIRGRVSKQGSRMLRWALVEAIQRQPAGTRPRQVKDAIIARRGPDVRGIAKTAAARVMLTQVFYGMRDGHIRRATSQAA

SEQ ID NO: 385712 - protein, 414 aa, unidentified
MLKIVYRVCCGMDVHKSFVVACIASTTEYGVTTYKSKRFSTFTGDLRRCAAWLAENSCKDVCMESTGKYWIPIYNILEPTCNIVLAHPKYVKAIRGKKTDKRDAKWIADIFKHDLVAGSFIPPADIRQLRDLVRYRWKLTNFTTGEKNRAQNCLTVSNIKLDDVFSDVFGKTASAITTRILENPAEKITDVSGFRTKGMKATNEQVLAAVDGEMCEEQAEKLRIIRSHMDSLQLCKLDLESLILATAEKYLPQLGLVMTAPGIQSFAAIGIISEIGVDMSVFPTSKHLCSWAGLTPQNNESAGKKKTTRISRAGAYIKPLLVQCALNAVRAKKFPEVRNRYLALKKRRGHKKAIIAIARMLLTAIYNILKKNESYNPELYRQTDRPPAHREVSVAEAIFILQRQGYLVAAPPTP

SEQ ID NO: 385713 - protein, 425 aa, unidentified
MDFKQNQKINQVTEQTLVVGIDIAKRTHYACIVDDRGRVLQKSFSVPQAGNGFELFYQRVLAAMKEHEKSEVIVGIEPTGHYWLNLAYFLEERGIPLVMVNPMHVKRSKELDDNLPTKHDRKDALVIARLVKDGRFSYPRILKGMEAELRVGSTFRSKLTEELGAVKNMIIRWLDRYFPEFVQVFPSFGKMALAALECTPFPSDLYQKQPDEVLSLFRKVEGLKSPQRPKAVRLIEVAAGSIGVTEGLEMARIEIATLVRRYHQLEQDIESITGQLIELVKISAEYEWLSTVPGLGDTTIVDLLAEIGSFSHYQDPRQLIKLAGLTLRENSSGLHKGQKRISKRGRRKLRALLFRVMMPMIRHNEAFRKLHEYYTNRQVNPLRKKQSIVVLCGKLLKVLHGISTKHKPFDAQRMMRDIPGLAEAE

SEQ ID NO: 385714 - protein, 351 aa, unidentified
MQRFIGLDVHGQSCTLVVMGPSGRRLGEHVVETNAGALIEKMRSIAGDKHVCMEEGTQSEWLCEVLERHTTQLVVTQPMRRAGSKSDAIDAWALADLLRRDAVERTVFKSPRKLMGLRQAARGYLTVRRDMVRAKCRLNALYRSRGIQPSAEIYAPDAREAWLRRLPLSHRPLAELLSAQVDGLVRSNETAERWLLEEAKEIPATRQLATAPGIGPIRAALLVAIVVTPARFRTTRQFWSYSGLAIVTRSSSDWTREKTGWVRKASARPRGLNRNRQPELKAIFKGAATTIIQHMTKHPLHQDFQRMTDAGIKPNLAKLTLAKRIAATTLAMWKHQEDYDPSKHRRAPLSQ

SEQ ID NO: 385715 - protein, 367 aa, unidentified
MGNDNIVWIGMDTDAKKNQVALYRGWETQPAAEWEAGMDEKGIKRLIERLKREEGEVRCVYEAGPCGYELYRKLRKAGIGCDVIAPSLTPKKASDRVKTNRRDARNLGRLYRAGELTVIGVPDEKQEALRDLTRAREDVREDLTRRQHRLNRFLARQGCHYQDGEKWTQKHWAWIRKIRLEDSNAETVREESIRAVEQSQEQLKTYDAKIEENAGKPEYAKKVERYQTLRGVKTVTAMTIVAEVWDMRRYGRAPQFMGSTGLVSSERSTGDHQRRGKITKTGNAHLRRVLVEAAWHYRHRPIAGQAIKKRRQGQPEAVVSIAERADQRLNRKFRRMVDRYNKKPVIAAVAVARELAGFIWAIGQLQD

SEQ ID NO: 385716 - protein, 375 aa, unidentified
MGEITRGAIVRVGVDLAKRVIQVHAVDAAGRRVVSRALKREQFMAWCAQLPAGCLVAMEACSSAHHWARKLRSLGLDARLIAANFVSPYRMEGKSGKNDMTDAAAICEAASRPSMRFVPVKTCEQQGVMSLHRVREGLKEERTGCINQIRGVLAEFGLVFNKSPKALRAVLADVIEDASNELSAMARRVLQRAFDHWRELDEHMRWCDSQVGQHVRSSPAAQRAAKIIGIGELGASAFTAGVGEFKQFKSGHQLSAWLGIVPRQNSSGGKTSLGRITKRGDDYLRTLLIQGAKSAVMSAGKRDDPTSRWLQQLVARVGWQKACVAMANKNARILWAVMTREQGFDAQHVSVKPPAKLPKPASAPTTAPQTQACAA

SEQ ID NO: 385717 - protein, 426 aa, unidentified
MRVIHDRVAAIDVHKDMVKVAVRVPGEKRGKRRTDVLEYGAFYGVLQEMGRELRRRGATHVVMEASGVYTDPVYYALAELDFEEVMVINPSHAKALKGHKTDARDAIRLLDLYECGLLSGSYVPAPDLREVRDLARYRMKTVQARAQEIQRLQKTLETAGIKLSSVVSDVTGVSAMAMVEALADGERRGAVLADLAVGRMRTREKMADLSMALSGRFTAHHGVMCRLHLDRIRLFGEAVADLDARIAPRVARYAREAELLKTVPGFGDVVVAGWLGAIGPAPHEYFATAQRLASWATLCPGNYMSAKKSKGGRTGDGGAYIKPLLVQAAWAAVRVPGRIQARFNRLVRRFGGARNKGAAKRAIIAIARTLLKIAYHVLKAGKPYADLGAGFYDTRESAQARQDYLVRQLQKLNPGCVITITPPEAA

SEQ ID NO: 385718 - protein, 277 aa, unidentified
MEHYAGLDVSVKETSVCVVDGAGQVVREVKVASEPGAILGVLADEAFTLKRIGLEAGPLSQWLYGALAEADLPAICVETRHMKAALSAQVNKSDRNDARGITQMMRVGLYRPVPVKTLASQKRRMLLTSRQLLQAKAHDIESDLRGTLRNFGLKVDLVSRGKFEARIRELVVDCPDLAAITGPLLIAWRTLREQFAVLHRRLLAVVGDDAVCHRLMTVPGVGPVVALTFRATVDVPSRFANSKAVGAVFGLTPRQHQSGEVESSAGWWSDVVRRDDG

SEQ ID NO: 385719 - protein, 389 aa, unidentified
MPSLGPNGRAVGLDVHPDTFAAAIMHGRDPLNARVHHSVTRQPLDALCAWAARHTTKEDVLVIEASANTFAVAERLTAIDRQIFILESHRAGQIGKSYLANDRSDAAKIARIYLSGLAIKVWAPDPQTRQRRELLSVYQRCIKDSTRARQHLRSFLNEHALRLPAGFQLCRPYSLPRLLALKEWSPRQKVLLEEMHGSLIAARERRQRLRRMMALEIEQQPDFLRLYKLAGLSLITTYALIAIIGDIERFATSKNLVSYLGLNPSVVESGEFTGSGALRSHGRGALRALLIQAAKKLLTCQNPLQKWGLSIALRRGTNKAAVALARKLTVSVWHVLKGHWNKLLEETTTLLTKIFKLATELGVPVLRELGYPSKAAFQEKILGVLRTHP

SEQ ID NO: 385720 - protein, 333 aa, unidentified
MTYIGIDVSKATFVVAYSSAKDSKTKTYANTASGIHKFIQTLPPEAHCVMEATGNYSMLLLYLLDKANITVSMENPLKIKNFARVMLSVVKTDEIDAKLIALYGERMQPKPFKMRSDSLMLLKQKRTVLRQLKKQLVANTNLQESMEALPFVDSISKKVLEKTIKFLQKQIKQMEEELASLANIEYKKQMSLLTSIKGIGVTLATALIVATGGFTYFDNAKQLTRYLGLSPTYQQSGTSVNVKGRINHNGDSYLRSQLYVAAFSSLRCNKECKACFDRLRSNGKPGKVAVVAVANKLVRQAFAVVTKNKPYIDGCKSVKPENTPAEGAPAARG

SEQ ID NO: 385721 - protein, 317 aa, unidentified
MTIPGPVVGIDVAKAELVVAVRPGGDQWTVPNNEAGVACLRARLQQLVPTLVVLEATGGYERAAVAALAAVQLPVVVANPRQVRDFARATGQLAKTDSIDADLLALFAERVRPTPRPLADETSAALDALLTRRRQLIGMLGAERNRLEHAPPTVARGIRTHIRWLERQRGVVDRDLDDMIHQSPIWRAKEDLLRSVPGVGPVVSRTLLGELPELGQLNRRRIAALVGVAPFACDSGTQRGRRVVWGGRAPVRTALYMSTLVATRHNPAIRAFYLRLVAAGKPKKVALIACMRKLLTILNVMLRTNTPWREMNQQETA

SEQ ID NO: 385722 - protein, 340 aa, unidentified
MGEQYVGIDLHRRRSVIARMTPEGGVLETVRIDNDPVALSLELAKAGPDPEVVLEATYGWYWAADLLQACGATVHLAHPLGVKMFGYQRVKTDARDAANLGDLLRMGRLPEAWLAPPAVRELRELVRYRAKLVALRSGLKAQVHAVLAKQGVRVPMSDLFGVAGTRLLEELRLPRAYGLRVASLRELLGALDQQIAMLGREIGSALAGDVGYLAIQAIPGVGPVLAAIFVAEIGEVGRFAGAPQLCSWAGLTPRHRESDTTVRRGPITKQGSRLVRWAAVEAVQRLPGTTKQAADFHRIADRRGKGIGRVAVARRLLTLVYYGLRDGQVRCLAPAPAEAM

SEQ ID NO: 385723 - protein, 395 aa, unidentified
MYYCGIDIAKYKHEATVIDEAGKALLDSISFSNSKEGCEKLLNLFERLSIPQEDLLIGMEATGHYWLSVHGYLLEQGFEVKVINPIQSEAFRKMYIRQTKNDSKDSFIIAQIMRFGQFSATHLSEEVIVALRQLSRYRLALVDACGDCKRRIIALLDQVFPEYGTLFSDTFGVTSKEILSQYPTPEDMLTVSTRKLTGLLEKASRGRFGKEKAAQLKAAAANSFGVSFAKDAFAFQIRQLIEQLEFLEGQVQELEEQISVLLKQTGSYITTIPGIGDTLGAIILSEIGDIHRFDAPNKLVAFAGLDVKVSQSGEFTGTRQKISKRGSPYLRRAIWLAASRAAFCDPILSEYYQGLRARGKHHLTAIGAVSRKLCNTIYTILKEDRPWQPIPPRGK

SEQ ID NO: 385724 - protein, 334 aa, unidentified
MKQVTQVGVDVDSEELVCAMQRAGQRQPLARFANTAAGHKKFIRWATKGGRPARICLEATGIYSLEFALALHHAKNVEVMVVNPRAIKDFTRACMQRAKTDAVDAGGILDYLERMPFVAWQPPAAEVLQLQAINRRIVQLNTELAREKNRRHASEFAGACADAIAHDIEVNIHHLERRIERMHDSGLKLVRGVPALATKLAHLVSTKGIAEASAMRLLGELLVLPDELAAPQWVAHAGLDPRPYDSGTSVHRPRCISKVGNRHLRAALYMPALVAIQHEPNVKAFYDKLVAAGKKPMQAVVAVMRKLLHAIWGMLKHDQDFDGEKFSKIAAKNA

SEQ ID NO: 385725 - protein, 406 aa, unidentified
MDVIYPRCAGLDVHKQTVVACVRIADDGPPTQEVRTFETTTSGLLRLADWLESFGVQHVAMEATGVYWKPVWHVLEGHFELILANAAHVKNVPGRKTDVNDAMWLADLLAHGLIRASFVPPVAVQELRTLTRTRKQFVRERASHVQRIDKLLEDANIKLGTVLSDITGRSGRAVLQALIDGHTDPERLLSCIGRVKASRTELLEALRGRVSAHHRFMLKLHLSHIDALDRAIADIEKEVGLGLQPFRQAAKLLSTMPGISDVSAHVIVAEIGIDMSRFATPGHLLSWACLCPRNDESAGKRRSTRLRRGGKWLKTTLVQAAWSAVKVKGSYLQAQFHRLRARRGAKKAIIAVAASMLTAAWHMLRDGTEWHDLGAAHFDRADAAKTASRLIRRLQQIGYQVTAVPA

SEQ ID NO: 385726 - protein, 352 aa, unidentified
MKELTTIAVDLAKSVFEVAVSEVPGRVSQRRRVNRAGLVAFLANRPPAVVLMEACGSAHHFGREIQKLGHQVRLLPPSKSAKYRIGNKTDRTDTDALLEANRNERILPVPVKSIPQQTLASVHRLRVGWMGTRTARLNALRGVMRELGVVIPLGAKVVLPAVAEAMACGHVPEDLHPLLAASMAEIRQLEENVKECKRTLARMARSIPAAHALQKIPGIGLLRSTALIPAVGDPLRFKNGRKMSAFFGIVPSEHSSGNRRRLGSITKRGNTYVRTLAIHGGRSVLLAAHRRKNPDRLHRWALEVERRQGPNRAAVAVANKIIRIAWAVWARGTTYDGSLPGSTPKPPTSVPR

SEQ ID NO: 385727 - protein, 407 aa, unidentified
MEVIYPRCAGLDVHKQTVVACVRIAGDGPPLQEVRTFATTTSGLLALADWLDSFEVEVVAMEATGVYWKPVWHVLEGHFELVLANAAHVKNVPGRKTDVNDAMWLADLLAHGLIRASFVPPVAVQELRTLTRTRKQFVRERSAHVQRIDKILEDANLKLSVVISDILGKGGRAVLQAIIDGHSDPERLASCITTRVKASRAELLEALRGHVSAHHRFMLKLHLGHIDALDQAVAAIEKEVGLGLEPFRQAAKLLSTMPGLSTVSAHVVVAEIGIDMSRFATPGHLLSWACMCPRNDESAGKRRSTRLRRGGKWLKTTMVQAAWSAVKVKGSYLQAQFHRLRARRGAKKAIIAVAASMLTAAWHMLRDGTEWHDLGAAHFDRAHAHKTATRLIRRLQQMGYAVQLTPA

SEQ ID NO: 385728 - protein, 391 aa, unidentified
MPEDAPRPAQAAIRTDLGAIFVSLELSRRTWLITSLSPGAGEKMSKHSVPASDVSGLLRRFAELRRKAVARTGGDFPIIVIQEAGLDGFWIHRVLQSEGIESHVVDAASILTSRRGRRAKTDRIDGETLVRTLMAFKRGEPRVCSMARAPTPQEEDRRRVCRERRTLVGERVRHVNRIKGLLFAQGVFGYEPLRKSRRERLEDLRTGDGRPLPVHLKAQIIRELDRLEVVLEQLKTVEAERDALLKPANDEMPSPAAMLAQLKGIGSETAVLLWSEGLFRRFDNRRQVAAYAGLAPTPWQSGSIDHEQGVSKAGNPRLRATMVELAWLWLQNQPTSTLSLWFHERVQRLGGRMRKTIIVALARKLLIALWRYTTAGIVIEGAMMKPSSATT

SEQ ID NO: 385729 - protein, 352 aa, unidentified
MMIIGCDFHPRFQQISFLLEETGEFGQRRLTHPAEAEKYYRSLGGAKVRVGIEATGSYGWFRRLMSELGHELVVGDATQIRASNPRRQKTDKRDAEHILRLLMEDRFPAIWQPPAENEQLRQLLLHRSRLVRLRTRVTNQLDGIAKNEGLIAAGGWSGKRRKTIEALPLPGWYGERRKDLLALLDRLEERIAPLNKAVSQAAANHAEARLLMTHPGVGPVVSLAYVLTIGNWQRFPRGKQVGSYLGLIPSEDSSSDKRRLGHISKQGNTLLRWLLVEAASTAQRHDPSWHRQYVRLSIEKHHGVAKVAIAHKLAVRLYWMLRSGEDYRHVRERGSHARQSECPGGCSNGPIE

SEQ ID NO: 385730 - protein, 416 aa, unidentified
MKTRQRKHELVKGGVLVVGVDIGKFKHFAAFRVSGLVVKTVGFENDLAGFERLAREVDCWCKRLGLQRAVLGLEPTGHYWQPLAYWWEDHQGKVVLVNPMHTNRAKELEDNSPLKSDPKDAEVISGLVAQGKYLECHLPRGIFATLRNLIMQRSRCRTRETRLVNQLHQSVERIFPEIERAFSSFAVRSCRELLLRYADPAVLAQVSAEDLGAMLRKWSSGQLGKDRAAKIILLAQQSVGIHEGKPVINAEIQRLIKHLRVAEQERRELEVEIEKCLSTTPGAALLLTVPDFGPLTVAAILAHTGDLSNYEHPDQVIKLAGLNLYEISSGQHKGRVRITKRGRPHFRKILYMAALRASRRCGSLHAFYCGLVARGLAPTAALVAVMRKLLRISWALVRKSQNFDVEKLIPRVAKAA

SEQ ID NO: 385731 - protein, 371 aa, unidentified
MFGSQATFHQKGGPPMNYVGIDYHKKYSHVTAIDEEGRVIRSKRLDNRPESFQEFFGRLQGPSETVLEASRTWGVMYDLLEEIEGVESVELAHPQKVRAIAEAKIKTDKIDSHILAQLLRADLIPAAYIPGKQTRSYKEMIRQRVFLVRMRTRLKNRIHVLLDRLHVPLPSVTDIFGKRGTDYLRKLNLPGVDGEILRENLQLLEVFNTLIKEAEREIALLLGDNPLVKLLRTVPGLGPILAAVVALEIDRIERFASPSKLASYTGLVPSTYASGGKLFHGRLLPMSNKWLKWALVEAAWISIRTSPYCRAYFESHKRHKGPHTAAIALARRLSEIVWHVLKENRVYEERPFQRQRRVSIMAISPAALTAT

SEQ ID NO: 385732 - protein, 338 aa, unidentified
MKITTVGVDLAKSVFSVHGVDEHGRPALRKTVRRGKLLELFAQLPACVVGMEACSGAQHWARELRKLGHEPRIVAAEFVEPYRRGGKNDTNDAAAICEAVSRPQMRFVPIKSVEQQAVLAVHRLRQGLVEERTALANRIRGLLTEYGLVIGVGLDRLRKALPSILEDADNAVPGIAREVFADATRQLIELDARIGDYDRRIAALARASEPAQRRMKMEGVGPITATAIVASVGDANVFSNGRQFAAWLGLTPRQHSSGGKQRLGAMTKHGDVYLRTLLIHGARAVLRVTPMRHDAKSRWVENLRHRHCDNVAAVALAAKHARIIWALLAHRQDYEPAT

SEQ ID NO: 385733 - protein, 351 aa, unidentified
MGKGITVGMDMGDKKHNVCVLNAEGEVLKRTTVTNTAKAIREYFEEVEPCRVVMEAGTHSGWVSRILEELGHEVLVGNPRKLRVIWDSDEKGDDRDAEMLARIGRFDPHLLYPIHHRGRKAQDDLAVIKARNMLVKVRSILIAHARGAVKSTGQRISPCSTDCFHVRLLKEMPAELMPALEPIMKSIEELTCRIRHYDTLLEKLCTENYPETKGLRAISGVGPVTTLAFVLTLEESTRFDKSRAVGPFLGLTPKRDQSGQIDKQLGITKAGDAYLRRLVVGCAQYILGPFGPDCDLRRFGLKLAARGGKNAKRRAVVAVARKLAVLMHHLWKSGAAYDPFHQQNRKQAKAS

SEQ ID NO: 385734 - protein, 340 aa, unidentified
MHTTIIGLDIAKSVFQLHAEDASGKVLWKKRLRREELEPFLRKLPPGLIGMEACGSAHHWGRVISADGHEVRLMHAKYVKAYVKRGKSDVRDAEAICEAVQRPNMRFVPIKSVEQQIDRSLERARDLLVKQRTQLMNATRGLLAEFGVIARVGLRGFKTLSDKVDAGDAAIPKPLLTAVKPLLEQWRGLHASIDELEERLVKRARSDERMCRLMKIPGVGPFTAHALVTAIGDPRRFSTGRDFAAWAGLTPLTDSSAEKTRIGHISRQGDHSLRRLLVLGAANMARHAKAKPSEARAWLLGIIGRRPVKVAMVAQAAKTARIAWTLLRSGENYRGSMVAA

SEQ ID NO: 385735 - protein, 388 aa, unidentified
MPKPVDLSQSLAALDQDSTLIVVIEMSQSSWLVAARAPGLARDPLKKLPPEPEQLFKLIDRWREESRRAGRVVRRVCVAFEAGLDGFWLARLLRHHDIEAYVIHPTSIPVKRDHRRAKTDRLDTELLMRAFLGWLRGEADYCSMAAIPTLAEEDAKRPTRERESRVNARSRLVNRLKGALARLGIRGFNPKLRKAAEKLEALRTGAGEPLPPNTLAELRRDMAQLRFVSDQIKQIEKAREARLEKAPREGAHPMVLMLASIKGVGLETAEMLVAEVLSRKLRDRRAVARYGGLIGSPDESGSRSREKGLARSGNARVRRGMIQLAWRFLMFQKESALAKWFEARTANGPSGVRKTMIVALARKLLIDLWRFVEDGTVLVGVELFDSRA

SEQ ID NO: 385736 - protein, 412 aa, unidentified
MTNEMRRWFAGVDWGSEKHQVCLLDEAGTVVGERVFQHDAAGLAALCDWLVSVAGDTSSVAVAIEVPHGPVVDVLLDRGFAVHAINPKQLDRLRDRFSPAGAKDDRRDARVAAAGLRTDPHLFRPLQVGDPAVIELREWSRLAEELQQERVRLANRIRQQLWRYYPQLLALSDDLTAEWILALWTMAPTPAKAMRLHEATIAKLLSRHRIRRLDAAGVAEMLRQPAITVAAGVTEAAILHLRSLVARLRLANTEFHQAERKLDELCAQLSQNATAAADGPCDAAILRSVPGVGTVILATLLTEAGDPLARRDHTALRTLSGVAPVTKRSGKTCIVVMRYAAQARLRQAVFHWARVAVMHDPTSRSRYEALRARGHSYGRALRSVADRLLGVACVLLRRRTLFNPNHGTSAAA

SEQ ID NO: 385737 - protein, 359 aa, unidentified
MKIVGCDFHPSWQQVAVFDPETGEIAELKLVNGDGEAERFYGALEAPALVGIEACGNSQWFIELLERLGHEVWVGDAAQIRASYVRKQKTDRRDAGHILKLLMENRFPRLWTPTAEQRDLRQLLIHRHKLVEIRTRVKNGLQHLAMNKGYQKRFHQCGVRGRAFFEKLPLEGWTSRRREDLLKLLTELDRHVGQLDEAVTGAAQQHPQARLLMTQPGVGPITSLAFVLTIGDVSRFEHSNQVASYLGLIPREHSSGGKQRLGAITKQGNRFLRQLLVEAAQSVTRLDEGFRKEYQARCHHKPKGVAKVAAARKLAVRLYWMMRQNVGYPEIVHIESSPRVPRRGDCHPVTLNERSRIQQ

SEQ ID NO: 385738 - protein, 341 aa, unidentified
MSLVMGMDQHRAQISAEWTDTITGEISRARVAPADRAGVRTFVAQFKGVGLEVALEATTGWRFVVEELERIGAEVHLAEVVQTSGLKGRGKRAKSDWADARHLRELLLIGRLPESWIAPAHLLDLRARVRCRHTLLHQRTEWQQRMQAVLYHHGAPHARGLLKLENRERVAALKLPPAAREQLTIALSMIDAIDLQLAPFDLALRAYARTQPGCRTLTDEIYGIGELTSVTILPELGDTRRFQNSRDAVRYAGLDVTVHQSDQRRAVGHLSRQGPPALRWALYEAAQAARRPGSPDRDYYEQLAARIGSNRACIAISRKLLKRSYHLLRALGDQALEPVTT

SEQ ID NO: 385739 - protein, 345 aa, unidentified
MAIVETRPITGGIDTHLEVHVAAALDASGGVLGVESFATTPAGMVGLHAWLAAFGPVDRVGVEGTGAYGAGLARHLRAVGLEVIEVDRPNRQVRRQQGKSDTVDAVEAGRAVLSGRASGVAKTADGNAEAMRALLVAKRCGREARITCLNQLRHLGFCAPDELRERFRDVPGARLAEAAAALRPRADSDPVLYATKLAMRTLGRRVLTLGEDSEALDAVLAELVTVTAPSLLELYGVGVHTAAILLVAAGDNAERVHSEAAWAHLCGVAPLQASSGKTTRHRLNRGGNRQANHALWRIVFTRMGSEPRTRAYVARRIEEGRSKPEIIRVLKRYVAREVYRHLPRA

SEQ ID NO: 385740 - protein, 352 aa, unidentified
MLKGLLIALVIEPIGLCQICFPKFKFMKNFIIGIDVSKDTLDFCMLEKDSRRKLQQGVIANKEKEILTWLKNIDKENVVVALEHTGHYGALLSWLLEEQLFTYYLINPLDLQRSLGLQLGKSDIVDAYRIADYIITSHHKLSPFKLPCESLRKLKALMTARERYVKMSVQIQNSLKAEMILSEKVALKQLIKLEQKQLKSIKNTIQDLEKQMMEIVKSSQDLNTTYTKISSVIGVGTITSIKCIIETDNFTRFTDARKFNCHCGLAPFPYQSGSSIKGRTKTHFLRDKTLKSILFKAAGSAIQHDPQLKKYYEQKLEKGKHKLTALNAVANKIVLRIFAVAKRNEPFVKLIA

SEQ ID NO: 385741 - protein, 332 aa, unidentified
MVTKKEIIGIDVSKLTLDVFIHSLKFHYVVSNNPVGFSKLLQVIWKKLPDKKRDLFFCFEDTGKYSLPLCIFLNGENLSFSMVPALDIKRSMGMVRGKSDEKDASTIALYAWRKRDEIKPTIFPAGTIIRIKQLLSLRNKLVKHKRAYQTGISDVHDYFKDGDSQFYLDVNKRVIQSLSLEIEIIEKEIESIIKSDPEIQKNYKNLKTVPGIGKIIAFYLIGYTHNFTRFDNARKFCCYCGIAPFENSSGTSIRGRTKVNPLANKVIKALLNMGALSVTRHSQEFKSYYNKRVENGHNKMSTVNIIRNKIVFRAFSVVKRGSPYVNLHKFAA

SEQ ID NO: 385742 - protein, 349 aa, unidentified
MRFYTKQHRHYCGIDLHARTMYVCILDSAGQVLVHKNLPAKPEAFLETIAPYREDLVVAVECIFTWYWLADVCAAEGIVFVLGHALYMKAIHGGKAKHDRIDALKIATLLRGGMLPQAYVYPAGMRATRDLLRRRLHIVRKRGQLLAHIQMTSHQYNLLPLGKRIAYPSNREGVAEHFEDRVVRKSIEVDLALLERYDALVSDLESYLVRQAKQHDPQAFALLRSIPGIGKVLALTILYEIHDVHRFDRVQEFASYARLVKCAKESAGKRHGTSGAKMGNVHLKWAFSEAAVLFVRHSAQGKQLLARLEKRFGKGKALSILAHKLGRAAYYILLRGKAFEIERFAATAS

SEQ ID NO: 385743 - protein, 609 aa, unidentified
MVTRRQSTRQAASAPAPKLPPLTQGGSPESVRIGVGIDTARYGHYAAFVRPDLQPAAAELAFTENAAGYAALRARFDAIVQQHGRVHFEIRLDAAGQYADNLIHFLHGLGTPGADASGAPAFTVSLSCGDPQRNKNYRAALFGPHKSDPIEARAAARYALNERPQPLTPQAVELRQLRQIAGRLQAVTRQRTRLVNQLHQLLVHAFPELATLVKDVAAGWVLELLSRYPTAQLLAAATEQDLADIPYLPDKQITPLLEHGRTSIASLAGDLEEELVRDQVRQIRDVQARQKRLENLLIQAYRRLPEPNHLDTIPGLGDVTAAILTAFILDIHRFETPFKLVAYFGTLPIQASSGVERDGTPRGPRRYVMSQRGNDLVRRYLWMAALCAVRHNPAVRPLYLRVIAKHPEQRAIAIGHAMRKLLHLAFAIWSSGKPFDPKKYPWDKPNHVQGSDNAMSLVRETVPPSDNDASPNEQAAGHKRSAKPARKVVTAACPESLPDDEPIGDDAYLDFAHIKQQLPLAKLLDHLGLTGQLRGAGPQRRCTCPIHRADARGRTFSVNLDENVFACHHASCGKQGDVLDLWAALHHQKLREAALDLLRTFGLEPSPGA

SEQ ID NO: 385744 - protein, 341 aa, unidentified
MQITMIGLDIAKNVFQVHGIDAQEKVVVRKQLWRGQVIRFFEELSPCLVGLEACATSHYWARELTKLGHDVRLMPAKDVKAYIKRNKNDAADAEAICEAVRRPTMRFVQVKSAEQQSQLMQHRARDLLMRQRTQLINGMRSHLAELGIIAPQGREGVKELLAIIANDATTHLPNDARASLLVLAAQLQALQTTIGALEKRIVVQHRANKESKRLQTIPGIGPIGASAIAATVTNPKIFRSGRDFAAWIGLVPRQLSTGGKAKLGPISKQGDRYLRRMLVIGAISTLRRAKLNPQRYPWVTCLLARRPFKVVAVALANKMARIAWALLISDKTCRSAWFAAA

SEQ ID NO: 385745 - protein, 402 aa, unidentified
MNCVGIDVSKGKSMIAVMRPFGEVVVSPFEVRHTASELSELARLLKNLDGETRVVMESTGNYHAPVAWLLHGAGFYVSVVNAMLVHDYGNNSLRRGKTDKKDAVKLANYGLDHWLTLPRYVPEEDTRLMLKTCYRQYQQYSKVQTMLKNNLISLLDTAFPDANRLFTSPPRADGSEKWVDFVATFWHCECVCGLSKKAFTAKYQKWCRKHGYNFSEDKALDIYASACRHFGVIPKTDTAKLLVEQAISQLQTTSAALAALKQEMQSLAASLPEYPVVMEMFGVGPTLGPQLIAEIGDVRRFHSKKALVAFAGIDAPPYQSGQIDVRSRSISKRGSASLRRTLFLVMGVLLQCAPMDEPVYQFMNKKRSEGKPYRVYMMASANKFLRIYYASVKAYLESLEHD

SEQ ID NO: 385746 - protein, 432 aa, unidentified
MKHTQSSKQNQRILRISETTLVIGTDIAKRHHVARAFNYRGIELGKRCLFTNDDNGMNNLLAWARSLQEEYGMNDIIMGVEPTGHYWFPLYHFMKPCDVEVVLTNPHHVNKSKELDDNSPTKNDTKDAKVIGKLVIDGRYTKPQLPEGIYADLRVYMNQRDRLNKDLNRAKARIHNWLDRFFPEYTKVFKDWEGKASVITLEHFPTPHEVIQAGETSIVATWKKNGVQRAVGAKRAAQLYRTASKSIGLTEGVTAAKHELAMYLEQYTMLSRQLDQLMELVEALVKQIPGAEAMMSIPCVKLITVAGFLAEIGDLSDYEHSQQIVRHAGLSLRENSSGDHKGKTTISKRGRRRLRALLYRATLTLVAKNPEFRALHHYFTTRRDNALKKKQSMIALCNKLIRVLFELGRKQKHYDSSKVLGPHREAQMQIAA

SEQ ID NO: 385747 - protein, 354 aa, unidentified
MSQDITLTVDYHDRVCVIRRFEHATRREQTFTEVATTAESLKEVVERTRRDAGRDGRVIWVQESTTGWARVKDLLGTQVEFQLANVLQMPLPPKARRRKTDKVDTARMQREHLAGTLPLAHQPSPECRQLRRLVAYREDLVNRRTALRNWINRYLAHETWADRTGLWSPKGQQQLKAFVEGLPRTDSLVIGQKLEELARIDDQLNIALGELFTAYQSSPEARRVDAIRGIGVVAAVSIVARIGPVERFRNAEHLIGFAGLAPGVQESDRTRRDGHIGGGGTDTHLRHYVIEATVWARHLPRYKPTYDRISKRRGSKVGRLVVARMLLRSIYKILKEGVAFDPGAAAPEEVAATC

SEQ ID NO: 385748 - protein, 372 aa, unidentified
MPALWIEVKGRLISTMTQHQQAVEVTGGVDTHKDSHTAAALDGAGRLLGTAQFPATGAGYGQLLDWLRGFGTLVRVGVEGTGAYGAGLARHLAAAGVEVVEIDRPDRKTRRWQGKSDPVDAEAAARAALAGRRIGVPKDRDGQVEALRSLRVARRGGVQHRADVLKQMKALLVTAPEPVRAELSALTNARLVAACADADVPADRVGDPAVAVRLALRSLARRVQQLSTEIKELDKVIDRLVRTIAPKLVAVNGVGPDVAGQLLVSAGDNPDRLRSEAAFAMLCGVAPLPASSGKTNRHRLNRGGDRQANAALYRIVLCRLRWDPATRTYVERRTAEGRSKKEIIRCLKRYVAREIYTILTAPSTPKDLPMAA

SEQ ID NO: 385749 - protein, 403 aa, unidentified
MEVTKEHLDIHQFLIVGIDVHKDNHALVAANGFNQIFFEKEISNQYSDFQQIVDQIQLIARKENLRPLIALEDSYGYGQALARFFFSKGLEVKTVNPVLTRRERGYMTHPEKSDISDAKGVVKATILEGIGRLPTFRITSESEFSKDLRILVYDRDFLIKEQTRLKNQLHRLLHQSYSGYYDKIFKDPFSKKALKLWQEFPSLLELKRTKRRITKPDWLKKINTLTLLSISNLQENQIKRKVRRLLQIREELKEMDQDLEQLLSNSNQYLETLPGCARILAAGTLAEVKDVSRFNSKDAFAKYAGLSPRPWESGKKKRNKKSLSGNRRLNRIIHQIALSQIGNRGYQPAKDYFQKKIAEGKSKKQALRCLKRQISDVIYPVRSLLNSSLKLKLFSNFYNFWSF

SEQ ID NO: 385750 - protein, 343 aa, unidentified
MKHTTIAVDIAKNVFELAVSYYPGQVAETHRLSRSRFLRFFAQRDAADVVMEACGMAHCWARQIQHLGHSVVLLPHQYVRPYVRRNKTDRTDAKGLLEAHRNKDIHPVPIKSVEQQTLASLHRFRSAWLATRTAHINTVRGILRELGIFIPLGAQHVVPHVRSLIEDADSEIPMALRHSLHQACEEIHRLGSLLHDADHQIRALGTQIPTVDRLLTIPGIGILTATALVAFVGDVQRFRSCRHFASYLGLTPRERSSGTTRRLGRISKQGDVYLRMLLTHGARAVLWAASKLSQPDRLRSWALELQQRRGHNKATIALANKLARIVWAVWKRGTEFQSLPKAA

SEQ ID NO: 385751 - protein, 351 aa, unidentified
MPQKTDAVVASTIGIDTGKNTLHLVGLDDQGTIVLREKLSRSRIASRLANVPRCLIGIEAGMATHYVARELIALGHDVRQVPPAYARPFRQAHKNDFRDANAIAEAVQRPSTRFVPVKTDDQLDLQALHRVRSRLISERTAVINQIRGFLLERGISVRQGLRFLRQQLPEILAKRIDVLSPRMIRIIEDLSGEWRHLDERIEHVTKEIEVLAYGTESCRQLMTVPGIGPIIASAMVAAIGNGVAFAKGRDFAAWLGLVPKQMSTGDRTILGRISKRGNRYLRMLFMQGARVILLRPANWTKHSFGPWLTAAAKRLHPNVLATALANKLARIAWTILAQRRSYEARIVADAA

SEQ ID NO: 385752 - protein, 328 aa, unidentified
MNSYKIVIGVDVSKNSFTATVLYDNKKETFEVKSDPVEFEMKVKPFLKKFKKSDMLIIMEHTGVYHLKLANYLYENDYNVAVINPFSIKKFMEAKMTRVKTDKADSFFIAEYGRTFFDGELYKPKSDVEKEIEVKLKILEDLQQQLTMLRNKRESLTYVPMKKLKENLEYYDELIRKIEKNIKELEKEIKELSKKNYQEEYKLLKSIPGISDRTIGMIISVYGNFERFKSVKDISSFIGINPSPYESAACVKKSVRIKKMGNPYARKILYMAALSAIRFNKYCRELYERLVSKGKAKKLALVAVAHKLLRQAYGVLKSRRPFDENFCT

SEQ ID NO: 385753 - protein, 367 aa, unidentified
MKNANKAVSNRIGDESIEEKAAARILNLGLDLHYRQVTAGMQEDGGRIKPLGKMCYERFAHWVQKKLAEGWEIHSCYEAGASGYWLHRDLVAKGVKNLVVAPKPMDKAGKKQKSDKRDGMQLCDALDRYLRGHDKALSVVSVPTPEQEQNRALIRYHRQIISDRVRCEARGKGLLCAQGIEIQGQWWQGAGWDQVQKHSGLRAWMKEQLDGWQAKMLSSIEEEKPLRERVQALAPAVLPVGLGAYSAAVLEYEMRGWARFKNARAVASYTGLCPGVHLSDGRGKEGTINRCGNARVRWILVEAIWRLGTWQPQYEPVRRLAEGLVKSKRAKKRLVVIAARRLAIDLWLLNTGRCSASELGLKLRHNR

SEQ ID NO: 385754 - protein, 344 aa, unidentified
MTVATIGLDIAKSVFQVHGVDSAGQVVVRQRLTRRRVLAFFEKLAPCLIGIESCSSSHYWARELIARGHEVRLMPAQYVKPYVKRGKNDAADAEAICEAVTRPTMRFVPVKTPEQQSVMMLHRVRLMLNRQRTQLSNSIRAHLSEFGIVAPIGRRGLDQLLAIVADEDDARVPADARLCLQMLAAQLAVVKQQILENDRRVRASARETELGRRLMEVPGVGPLLASALVATVADPAAFKTGRDLAAWIGLVPKQNSSGGKERLGSISKAGNRYLRQMLVVGAMAVIRYAERHGTRRPWLVQLMQRRSAKVAAVALANKMARIIWALMTSGERYREPATVSAMAA

SEQ ID NO: 385755 - protein, 342 aa, unidentified
MKIIGCDFHPSFQQIAMVDLQTGEYTERKLTPEEARQFYAELKGPVLVGMEACGNTLWFERLLASLGIKLRLGDAGKIRALELRKQKTDRRDAQLLLQLLLEDRFPEVWVPTVQQRDLRQLLLRRHKLVAMRRQVKNELQHLALNQGVQQKRKLWSASGRQRLEELPLEGWTALRREDSLQLLDELDRRVAKLDIAAQQEADRDAVARLLQTHPGVGPITALAFSLTLGTIERFARSRQVVSYLGLNPAEYSSGGRQHLGAISKQGNPMLRSLLVEAGQSAARCVPELKRAYQRLKHRKHSGVGKVMVARKLAVRLFWMWKTQQPYAAARTQGSPSHHVVAV

SEQ ID NO: 385756 - protein, 460 aa, unidentified
MILRMGIDIAVRAPHQASLADDRGELLWSGHRFRTTVRDSERLWALLPEGSSPSQITIVMEPTRNAWVPLAAWFRRRGAHVVLVSAERSSDLRAYYAKHTKSDRLDSVLLARLPMLHPEGLHPERGLGPGDPLRRATKLHSTLVKRRTTSLARLDALLEILGPGWHAAFGAHLGNNTPLRFLAAGYADPHTVKRLGRARLARFLYRHSRGAFGDDLADQLLAAATATVDLWAEDLPFPDLAEDIAIEARLALRLTEEIKELDERIAVLVRDRDPNGIITSAPGVGAITGAVILGRLGDASRFQSLAAARAFSGLVPSLDASGVSGRHGGPTKRGDALLREALFISANQARRLDPTLAAKYHRLMVDTGKHHNSALCHIATTLLTRVVACWNNHTPYQLRDLDGRPIDPAEARSIIAERYQIPDQLRRARATTATGRRNKESQRAPSTGPSTAHARRPGAT

SEQ ID NO: 385757 - protein, 362 aa, unidentified
MNTLAPETPTAQIEVAGGVDTHQDTHTAAVVDQAGRMLGHRTFPTTEAGYRQLLAWLGGFGTLQVVGVEGTGAYGAGLARYLMAQGQAVVEVDRPDRKARRAAGKSDPIDAESAARAALNRVRTGLPKQRDGMVEALRNLRVARRSAVSQRADCMRQIKTLIITAPQELREQLRDLSDTRLPRACAGLRPDLSLVCEPEQATKVALRALGRRHAALTEEIAELEALITPLVEQINPALLALYGVGPDSAGQLLITAGQNTERLHSEGAFAMLCGVAPIPASSGKTNRHRLNRGGDRQANAALYRVVLSRMRWDPRTRDYVARRTTEGLSKKEIIRCLKRLMAREIYYVLHQPTVTLVSGHAR

SEQ ID NO: 385758 - protein, 487 aa, unidentified
MGLPSIGETPVGERFRRLSLEDCHETASPADGLGGLTPTTVSSLEDWSISTVLCLRCQGSTSEGVAMLGVGIDWAEEFHLVALGRPGEGVFDVARVEHNPRSLDALIARIAELEPDPAEVRVVLETSYGMLVERLLDAGYAVVPVNPDLVARRRGPAKTKDDAEDARIACRIALDRFERLRVLVPHGDQAAELRAITRDDERAARDERRLLNRLRADLIATFPAALTIAGDDMGTPTFLRMLERWPAANALAAASRDEIVGFARSGRHGWPDRFADQVQTAVEVDNFVARDWLVRAKTDTIRLLATQLLTLGAQRRVWERRMGELLLGAPRHGRTKQPKGDQRGPAVPGGEIYLSFPGLGDRLAARVAAEIGDITNFDTPNGLQCYAGKAPVTRRSGKHELVVANRLACNGHLRDAVQQWAFCSLRGSGWAREFYDTQRTRGKGHHAALRALGNRWLEVLWHCLTHHLAYNENAHVANRNRALNKAA

SEQ ID NO: 385759 - protein, 410 aa, unidentified
MTDATIAQTEPVLVAIDIAKARHEVLIAVPGRKRRRRLTVLNQLDEFNRLISTLSEYDRPVRAAFEATGNYHRALAYRLGVAGFDVKLVSSVALARTREALNNSWDKNDPKDAQVILHMMLIGNEQFYHDPMLSGTNDLQELSKTHDIVSRSKTELWHRVLTHYLPLYWPEADRFHRSSRSDWFFAFLERYPSPHFISAMDQEAFIADAWDVVGRKVSKERLLADIYQTAKFSVGLPIAPDSDAARMFRLVLGEGRGLIAKRNEIEDRAVELLKTNDDYQLLTSIPGIGLINALTILAEAGDLRRFRHHRQFLKFCGMDLATIQSGTFRGQTKLSKYGNARLRRTLWMAGQVAIMQKTNSFRDKFERYIAKDRQNTHLRRKAYTAIAAKMARTVHGIINRGEPYRPFFEG

SEQ ID NO: 385760 - protein, 416 aa, unidentified
MKKTSSSQTRSDRAGKTGKARGPVRRDAKEVMAELLEKLSQKLDPQAPPAADAAEERQPGIPVPNRDRLTVGVDLGDKWSSYCILGLDGEKLTEGELATTPQEFAEFFQEMAPVRVVMEVGTHSAWAREAVAGCGHEVLVANPRQMDGPKRRKRKNDRIDAHKLARVGRMDPQSLCPVEHRSAEVRQDLVALRARDALVAVRTELINTTRGLVKSMGARLPKCSSGSFSKKVEGALPLALSEALMPLVHLVESLSDGIKAYDEQIEKLATEKYPQTELLRQVKGVGGLTALTYVLTLEDPKRFAKSRDVGPYLGLVPKQEDSGDRQPQLRITKMGDMMLRRLLVGSAHYILGPFGPDTDLRRYGIRLCERGGKNAKKRAVVAVARKLGVLLHRLWVSGEVYEPLRQPLPAAAQEAA

SEQ ID NO: 385761 - protein, 416 aa, unidentified
MLIVGCDIGSETHYIRAIDVRGRELSRGAFEFSNTSESFENAKAWMLELAAKNDKKQIVLGLEPTGRYWFALAAWMISNGISVVQVNPYAVKQSKEIEDNSQLKDDRKDPKLIANLVKDGNYGMPYLPEKVYADMRRLSMFRDQLTEDRIRNINRLHRELKIYFPEYMDAFGKIDGAFTLEVLKVTAIPSEIKALGAEGLKNIWHNAKLRGRGYSRAGEIVSCAEKSVGLTDGTDVGREAVRWYAEQILKLDGQLATVESILHRKCREIPYAENILAINGVGENILSGILAEMGDVSRFDDVKEIQKLSGMGLVACSSGKHKGQTKISHRGRKRLRYWLFQAAKSAVSHADEFKQLHEYYTTRPDNPLKKMQSLIVIACKILRVIYTILKTGTTYDPQKLLKDIKRPVEVQAPMAA

SEQ ID NO: 385762 - protein, 357 aa, unidentified
MQVTTLGIDLAKNVFRVHGCDARGKVAVSRSLTRRQLQMFVATLPPCLVGMEACATAHYWAREIKKHGHEVRLMAPQYVRPYVKTNKNDTRDAEAICEAVRRPTMRFVTVKSPAQQDVQALHRVRQQLVKEQTALSNQVRGLLAEYGLVIPRGIAALRPALSKIVAEQDNGLSGLMRELVLDLSERLDRTQQRVRWYNQRIVQLLHHDERCQRLAALPGVGPLTATAVVAAVGNAGDFRSGRELAAYFGLVPRHRASGGRTVMLGISKRGDCYLRTLLVHGARAAIRNLERRRDPRSMWAGRLKARRGANIATVALANKNARVMWALLTRGEKYCAAPHPAPDRAAPDGAEIIRTGN

SEQ ID NO: 385763 - protein, 518 aa, unidentified
MSVGKRQAARARTLQQPLQAAPTTTVINTPPINSPAERPTQQRQAAAAVRRAARGAEHLRAEAEHCARLAALPVQHPHAAGIDVGDASHWVCVDTTPDGSDTVREFPAHTPGLRQLVAWLRQCAVTTIALEATGVYGHVLYLTLMEAGFQVITAPPQFARQIKGRPKTDKRDCQWIQRLHKIGLLPSVFQPNEATHALRDYVRQRANLVRLSGQHIQRMQKALESMNLKLTKVLGDVTGVTGLKVIRAILAGQRDPQELAKLRDRRCQHTAAEMAQALDGRYRPEFLSELRCCLILWDKYQEVIAALDMEIAGYLRAMARQVDLPPLRPRPRVRGRKPHDPRFDVRTALYYATGVDLTAIEGIDELHALTLVSELGSDFTKWPTVKHFTCWLGLCPNWQKTGGKVKSSRVRRGKNRAALALRLAAWSLMRSQSYLGAYLRRQRGRLGAPKAITATAHKLARIVYHVMRFGVAYMKQTEEAYAAQVRERLEKQLQRRARELGYTLTKIEPAAAATATAE

SEQ ID NO: 385764 - protein, 404 aa, unidentified
MEDESGLTPPLFCAERLYGARLGRKRREGSRAAARLPSVRRQLDGKRGRRRPLSSVRPSHASIEPEQSFGPKSPHHKTGSPIMLDSTPVSATLRCVGLDVSMEHVDFFFSTGEDALSGRVPRPAEPLASLAQQLRDAGAELVVLEATGGLETLPWSVFEQAGLCVAVVNPRRVRYFARSLGLQAKTDRLDAILLAQFGQRLRPAPTPLPDAHTRGFQQLLRHLAEVVDQRARWRTTLHRAEEPARASLLRLIAAISAEIRLLERQLDEAASSSPELLALTRRLQSAPGVGPKTAWTLAAELPELGSLSARQAASLAGLAPRARDSGAYRGPRTIGGGRPRVRRALFVAAWHARRRDPGVAAFYDRLLAAGKPRKAINIAVARKLLVALNSMLQHHSDWRSSLSC

SEQ ID NO: 385765 - protein, 342 aa, unidentified
MNHYAGIDVSLECSSVCVVEANGKILREAKVASEPEALIAWFRSCGFNLERIGLEAGPLSQWLFAAMRQVGLAVELLETRHVRKAFEAMPVKSDRNDARGIAQLMRLGWFRPVHCKSISAQETRSLLTARKLVQSKLLDVENSLRGILRGFGLKVGKTTELKFADRIEVLVVGHPHLQMIAKALLAVRAVLRKEFAAFEKQARKMAQSDARTRLLMSTPAVGPIVSLTYVSAIDDPGRFKSSKQAGAHFGLTPKKHQSGETDYTGRISKIGDSSVRTALYEAAHIMLTKPLKGCTQLKSWAMRIARRAGMSKAKVALARRLAVIMHRMLADGTPFNSAAAAA

SEQ ID NO: 385766 - protein, 416 aa, unidentified
METEREVVCGADIHKQFLLATILTKDGRKFQDRFDSNFEGLLNFRQWLLDHDCQRLAVESTANYWQPIYFVVGKDVEFVLANAYQIKHIPGRKTDVLDSEWIAELCLKDLISPSRIFSEDDRDLRSMTRTRENYVKMRSQIKNRIHQELESACIKLSSVLSDIFGKSGIHIIRGILNGLSIDDILDRIPSKKLKAKRGEIQDAIQANISPVQIDLISLLLDSVDFLNREIESIDKQIQSLISTRQEDLKIAMSIPGMGFTSASTILAEIGNLKDFNNGEKLAAYCGLVPSVYQSAGKLITGHITKHGSPHVRRMLIEVAHAISRTKADSKLKRFYFRIKSRHGAKVAVVALARKVLCILHHLIVNREMFEDGISSKSKREKTGRSSSSTEMIIEDAIQILVRAGYLVQKRSEKEGG

SEQ ID NO: 385767 - protein, 343 aa, unidentified
MKHIGIDLHTNSFTACYLEKDKPERIETFRLEESSLQKFINTLGEEDEIALEATGNSFFFRDQVSGYVSRVVVIAPWQFEVVRRSVKKTDKNDARSIAFFLSKDMLPEARLKKVEHTQLASLIQTRDQLVRLRVSLINKAHGLFNRHGIKIKKETLTTKKGFEASLKKHSWDSLEQVEFEVITQQLESLKSSIHKLEKEITSFAQTLPGFKNLISIKGIGALSAAVLLSTIGDINDFEKTGNLAAYLGIVPRVSQSNDQHLVGRITKRGSKIARKTLVQCTLIAKRYSPYLDKFYHRIKEKRGGGKAIIATARKFLNTIFYTLKNDWVFEDFTQFKIYTGQSS

SEQ ID NO: 385768 - protein, 459 aa, unidentified
MNHLPALLVTQSEPIRIPDAIWPGMGSLPLGRLPAKLPHGYLSTPCPHSWGRLGNWGTPPNPRQGCIPCILIVGKFVIMLFIACDVASKGTTDRKSLGLERPQCSEGRRAQMVEEPEQLPGPVEPVSRKEGPDRRRRRPMGTEKVYVGIDVSKETLDMAVHASAQRWRFANSDEGITETLSCLEELCPTLVVLEATGGFQDPLAAALAVAGVPMVVVNPRQVRDFARATGRLAKTDTIDARVLAHFAAAVHPPFRLLPDTQGQELKAILTRRRQLIEMLTAERNRLHSARSRFAKAHIQAHISWLEEEMAHIDHDLRHSIRQSPVWQEKDDLLKSVPGVGPVLSTTLLADLPELGLLNRREIAALVGVAPFNRDSGHFRGQRTIWGGRAVVRSALYMATLVATRYNPIIRDFYRHLLSAGKPKKLALTACMRKLLTILNAMLKHKTSWHYPISGISQTS

SEQ ID NO: 385769 - protein, 401 aa, unidentified
MKRLSGGIDVGSESHHILILDEEDNVLYNQKVAHKLNEFAENIKLFKQIEKKEGGKISFALEGKNGYSNPLDRILLNQGFTLYNIDNLKLKRFREAFAGEWRDDERDSLMLSKMLKLKEHINSPREKVFIKIEQPSLVTESLKLLSRHQQTLINEKIRLINRLGKKLLEVCPQILELGKLKNKKIIAILAKYPDFSKYKRITHKSLLKIKGIGKKQAPFLLKRLNHLEYMPGQTDIYKTIISSYAKRILELQEEISDIDKKLDETGEKSKEVKHLKTIPGVATKLASRFIGEIGNIDRFPSEKKLAVYCGVACVDNNSGKVTKAKAVYKANKICKKTLITMAGCSIRFSPQCKAYYLKKRAEGKTHNHTLRCLARQLIKVIYRMLTEDREYIVRKELRKVA

SEQ ID NO: 385770 - protein, 363 aa, unidentified
MIIIGVDFHPSMQEIAFLDQETGEYVERQLNHSDGEAEKFYREMAARGVRVRVGMEATGYSHWLERLLAELGIEVWIGDAAKIKAKRVRKQKNDREDARLMLRLLRENNFPRIWVPTPENRDLRQLLWHRHRLVQMRTRIMNQLQAVAMNEGYRWKKKLFSQQGRALLEKLSLAPWASRRRKELLELLDQLDPKIRELTAAAQQEAQQRPEVLRLMTHPGVGPITGLAYVQVIGTPDRFSCGKQIGSYLGLIPCEASSAGKQRLGHISKQGNILLRYLLGEASQAAARCNPDWRRRYMHLAMRRHKNIAKAAMARKLGVRLYWMWRNGWDYSQLVSFGSHAGKLATGHGVKSSVVHMIGHPAP

SEQ ID NO: 385771 - protein, 312 aa, unidentified
MARTVDIVYPVCCGMDVHKNFLVACIATTNELSHTTHQIRRFSTFTGDLRKLANWLEQNNCKDVCMESSGKYWIPVFNALEKTCNVCLTHPKYVKAIKGKKTDKKDAKWISELFKCDLVRSSFIPPPDIRQLRDLCRYYVKLTYVNSGEKNRVQNCLTMSSFKLDDVFSDVFGASATRVLNNLLEHRNADFDIAPLIHGRCKTSVEEVRAALDGEFSLAQSEKLKLIRQHMDSINSIKSELESLILQLAAPYQSQINLLMTVPGISEPLTAIRILAEIGVDMSVFETSKQLCSWAGLTPQNQESAGKKKTLV

SEQ ID NO: 385772 - protein, 418 aa, unidentified
MKVVYPICCGVDVHKSFLVATIITSDGITPKYSKKRFPTFNNSILKFKQWLIDSNCFDVCMESTGKYWVPVYNILEGIIHVTIANPKWVKAVKGNKDDTKDSKWIGELFRLGLVPSSFIPEKPIRILREYTRYRSKLVSCKSSEKNRFQNAFTVCNVALDAVVSDMFGKSASSITDYLISTESFDPNHCISLLHHSMMKKAASIVESIEGYSITAEQKQRMLMVREHLEFVENSISKLDKKLDAMVAPYESAISLLKTIPGIDRTSAITIISEIGTNMSQFTSSKRLCCWAGLTPGNNESAGKKKSVRITRAGVYLKPALVQVAHASVKSTKSTYYKGKYERICKRRGKKRAIIAIARMILTAIYHMLTNGEEFNPSDLYKIDMPTEMLEKQKSKAINQALKLLMSQGVIKYSDILVK

SEQ ID NO: 385773 - protein, 408 aa, unidentified
MVVREAELEQVSAVWAGVDAGKEHHHVAVLDPEGSVVLSRRVANDEPALRAVIAEVAGLAGRARWAIDLRDGAAALLLALLAAAGAEIVYVPGRVVHRMTGAYRGEGKTDAKDARVIADQARMRADLAPLVPGEELVTELRMLTARRADLVTDRTRAINRLRAGLLEISPALERALDFTCTGPLILIRGYPTPAAIRQAGEQQLTAWLRGQHARNAARLAAAAVAAAASQTVRLPAEDVAAELVTELAGEVMTPGARIRQIDLRIQDRFRRHRAAAVITSLPGIGTLLGAEFLVATGGDMAAFASADHLAGYAGLAPAPRDSGRRTGNLHRPRRYNRQLNRVFYTSALVSITCSPQSRAFYDRKRAEGKKHTQAVLALARRRVNVLWALLRDNRPYMPPAPVIAAEAA

SEQ ID NO: 385774 - protein, 266 aa, unidentified
MDAFCGIDWAEDHHDIALVDRDGGLLARQRINDDAAGLARLPELLAGHGDSAEDPVPVAIETPRGLLTACLRATGRPVCPVNPMAVARYRDRHSAAGRKSGHGDAVVLANILRTDRHAHRPLPADSELAQAIAVLFPGIGALTGARVLAEIGDDRSRFTDTRGLKAYASAAPVTRASGKTRSVTRRHVKNNRLAQAGYIWAFSAITASPGARDHYDRRRDAGDRHAAAQRNLFSRLLGCLHHCLVTGQHYDEATAFPAKAATPAAA

SEQ ID NO: 385775 - protein, 410 aa, unidentified
MFSMEVIIENACGMDVHKDSITACAITPKGKEIETFSTKTIYLIELVDWVKKHNCTHVAMESTSVYWKPIVNLLEAEGIEFLVVNAQHIKAVPGRKTDVKDAEWIAKLLRHGLLKASYIPNRNQRELRELVRYRRSIIEERARQYNRIQKVLEGANIKLGSVVSDIMGVSSRDMLRSIAEGNEDLEELTNFARGVMKKKKDELKLALQGYIQEHQRFMIKTIMDHIDFLTDQINKLDKEIEQRMEDDQEDIDRLDSIPGIGRKMAEQMLAEIGPNIKEQFPTAPQLCSWAGLVPGNNQSAGKRKSSKTMKGNKYLKSALIEAAHSVRGSKNYLGALYRRTASRKGKKRAAVVVAHAMLRISYYLLTRKEMYVDLGEDYFDKQRQQSIVRHSLRRLENLGYTVTIVEPKVS

SEQ ID NO: 385776 - protein, 412 aa, unidentified
MKDLLEISCGLDVHKEKIVACILTGQLGKPTRSEIREFTTLIPDMIALRDWIVSQNCHHIAMESTGIYWMPIYEILEDAFSGDITLLVVNARHMKNVPGKKTDMRDSEWISTLLRAGLLNGSFIPEKRIREFRDLNRYRKSVIRDITSQKNRIEKFLQSSGFRLSSFISDIFGASGRNIILHLIEYGQIDKAALDSCLKAKTRNRIDEILMSVNGTLSEHQKAFLRILMTHYDSLKEHLTEIETSLKEDMAPFTLQVEQLSSIYGISTTASCAIIAEIGIDMKPFKTAEHICSWAGLCPGNNESAGKRKSTSVTKGNPYIKSMLCEIAWVIAGKRNTYLSAWYWRIKQKKGAKKAIVALARKLLVIIYTMLKQGTLFDESCFETRRKHCEQKQLSRYIRELEKHGYHVEAQS

SEQ ID NO: 385777 - protein, 355 aa, unidentified
MDLPLLAVDVSCKTLDVVLRRDDGDTVGQFANDKSGFARIRAWVREHGVTSPLVCLECTGTYGDAFATYAFRRGWRVAMIPPAMARNFARCRNARTKNDPYDAYLLAELAQRMDLRLWSPPSPQELLLRQLTRFRRELVDERAGHRIRLHTPGMLPAIKAAIDHVVAALSEEIAALERQIAEVIASDPVMAHNYELLLTIPCLGTVVAPELLAEIGDVGRFHNARQLAAFFGLTPAENRSGSSLHARPRLCKIGNSRGRRALFLPAMNAMQGWSPLRAFAERLLLRGKARKAVVAALMRKLLHIVFGVLHHQTPFDPDWELHRGGGLEGRLGGVGEPALRASRVVQNCYPITTSP

SEQ ID NO: 385778 - protein, 387 aa, unidentified
MVTLQRMLEVLTSHRRRRPQMEAYVGQQFVGMDLHRRRSVLVRMTAAGEVLETARIVNDVDRLTEVIARAGEAPEVVLEAMYGWYWAVDALRAAGAGVHLAHPLGVKAFEYRRVKNDVRDASDLADLLRMGRLPEAWIAPPATRELRELVRHRAKLVALRSHCKAEVHAVLAKCGIAVAMSDLFGLAGGLLLDGLALPKPYAARIASLRRVMDALDFEIDLFSGLVRGQLVRDPGYIAVQTIPGIGPVLGAVMVAEIGDVTRFASADKLTCWAGMTPKHHESDTKVRRGRITKQGSRLVRWAAVESVQLLPKTTRLGQFRDQVAVRRGHNIAVVAAARRQLEYVYYALRDHHVRDLHPAPSPHTGSRPGQGLMSTTPELVGAKSRRS

SEQ ID NO: 385779 - protein, 403 aa, unidentified
MTRHSTFVRSLLLIGWKLLATAKGADDVTKIGADRPDTEVETILGVDTHLDFHVAVAIDHLGRRLGELSVPTTVKGYERLLRWAEGFGPVRCAGVEGTSSYGAGLARHLRIRGIEVLEVERPEPRRRSSRRNLQKSDSSDAEAAARAVLAGEASGVPKSGDGTVEMIRTLRAARRSAVKARTQAANQLQGLRVTAPEELRNRLRGLSTKELVSVASRFRLGDGPRDVPTATKFALRSVARRYEALSTEIDELEVHLDRLVGQVAPELVSLPRIGTDNAATLLIVAGDNPQRLRSEASFASLCGVAPIEASSGKVVRHRLNRGGNREANRALYMICLARIRRDRRTQEYVARRTTEGKSKREIIRCLKRYVAREIYRVLITCGPRSSPTGAKAEVHIASGSSAA

SEQ ID NO: 385780 - protein, 368 aa, unidentified
MSDCTWVGLDVHAESITAAILEGERDHAEIITLSGDLMKVRRLFRQLATKGPVRSCYEASGAGFVLHRVLSEDGFHCEVIAPSLIPRKPGDRRKTDRIDAVNLVRLYRSGHLTPVHVPSHEQEALRRLIRLRYTYQCYTTATKHRISGMLRNHGHVFTDRRTAWTKTHRQWLAHLRDQLTGPLQTALAAENEHLEYLEMQRNAFDAELERFAQSSPYRGRVEALCCLRGVKTLTAMTLLAEIDDVRRFRSPRALMSYFGLVPSERSSGERERRGPITKAGNTHVRRILVEAAWNNRHRGGADLILNRRRQGQPADVVAIALKAQHRLYKKFWRLDQKKHRHVAITAVARELTGFVWAILNAAPHSDGA

SEQ ID NO: 385781 - protein, 321 aa, unidentified
MARRREVTPVWVGIDVAKKMIDVARGADGKLERVERAVGPLEQWARTLPPHARVVLEATGGLERLVTTVLRARGIVVCVVNPRQVRDFAKATGQLAKTDRLDARVLAHFGAALTPRATVAQAIDVDALPALLERGRQLVETRTAEKNRRHTAPEAVIGSIDEHITWLDEQIAQLDHAIEGAVTACATLAEPLGRLQAIPGVGRVVALTLVTHLPELGTLDRKRIAALAGLAPFARESGLQRGRRAIWGGRGDARAMLFLAAQSAARWNAPLRIFYERLVGRGKPKKAALAAVARKLLVAINAMIRDRRPWEPAVVLEPSCC

SEQ ID NO: 385782 - protein, 300 aa, unidentified
MSKVQRVCRWTGRAIGLDLHRDFCEIAICEEGVTHSAGRVVMTAEGIEALADSLLPTDRVVMEVSSGASEVARRLEGRCQRVVVVSPDDTGIAQARAKTDKLDARTLASLLWRGELEAVWTPDDRVRVLRRRLHRREQLVRARTRAKNEVHAVLMRTLQGKPPCSDMFGVKGRRWLEQLQQKLAVEEAETLESALRQIDFLDREIEQVERTVAQQMLDSPEAKRLLTVPGVNVIAAATFLAAVGDITRFRDSRKLIAYLGLDPRVRQSGDHPVRPGRISKRGSAQGMKIPPAGISSPPAY

SEQ ID NO: 385783 - protein, 467 aa, unidentified
MSSSATTSNNYRCGSSYQAQLTVTKSTYTYTWISDSFVKGKSSQGIGASLLLRKEFPPMLKIVYPNCCGIDVHKTFVVAVIAIANNQGITEYHRKHFSTFTNGLTQLRDWLEYYSCFDVCMESTGKYWIPVFNILEEQTNVCLAHPKYVKAIRGKKTDKKDAQWIADLFKHDLVASSFIPPLKIRQLRDLFRYRMKLTQLQVGEKNRYQNCLTWSNLQIASVVSDVFGKSAQAIIKSILDNPQDKPNIEQLVHKRMKNKVQDLEIAMEGALTPEQAEKIRVIKAHYDALAICKEDLEQMIRELGQDYQHQVKLIQTVPGFKEDLSALRIISEIGCDMTVFDSAAKLCSWAGLVPANNESAGKKFSTRISKGGKYLKPFLVQVANAVVKSDKHPELRNKYLKLKKRRGHRKAISAICRRLLVSVYQVLRKQEDYNPVLQGLTEIRNPDKTMSVQDAVRFAQQHGFNVA

SEQ ID NO: 385784 - protein, 368 aa, unidentified
MEVTTIGIDLAKSVFAVCGADSSGRVVMRRQLRRPQVLSFMRGLPRCVVGMEASGGAHYWARQLTALGHEVRLMSPALVIPYRKGNKTDRNDADAILEAVTRPSMRFAMVKSVAQQDLLALHRVRAQLVKSRTALCNQLRGLLRERGVVVRTGAAALKRSLPAALADDRSELSGEMRELLCEMSQWLRTLEQRIASCEARITRKFKHDERCQRLAAVPGVGPLTATALVAAVGNAQRFRNGRELSAYLGLVPRQHSSGGKTVLLGITKRGDRYLRTLLIHGARSALRQCKDDARSGWVRRIRAERGPNVAAVALANKNARVLWALLARGDRYRSTNVATHAVLRSGSPPAVKRARSAKLRVRKDCVGS

SEQ ID NO: 385785 - protein, 388 aa, unidentified
MQVIGDRPEAASAIRTNLGAIFVSLELSQSTWLITSLLPGSSEKMSKHVVHGGDIAGLLERFARLQEKARARTGRNFPIIVIHEAGLDGFWIDRALKNEGIESHVVDPASVATSRRRRRAKTDKIDGEALVRTLLAYKRGEPRVCAMVKAPTPEEEDRRRLCRERKVLITERVKHVNRLKGLLFSQGVCGYEPLRRNRRRRLDELRTGDGRPLPKNLKAQISRELDRLELLLEQIKVVETERDALLAAQQIAAPTSAAMLLAIKGIGPDFAAILWSEGLFRHFDNRRQIASYAGLAPTPWKSGSIDREQGVSKAGNPRLRTTLIQLAWLWLRHQPQSALALWFKERVVRNGGRLKKVTIVALARKLLVALWKYVTAGVVIEGAVMKVA

SEQ ID NO: 385786 - protein, 428 aa, unidentified
MKNRNTQKLEAITPGTLIVGVDIAKETQWAQFVNYRGLELRKFLKFKNHKNGFDSILASIEAICKNRRLDNIIVGMEPTGHYWKPLANYLLKNKVNVVMVNPYHTKRAKELDDNSQTKSDKKDALTIARLVRDGRYYEVYMPQDIFAELRVLSNSRISLMKRSNALKNTITAVMDEYFPEIVTVFKHPLKGKAAMQILKSCPFPSLILELGIDGVLVEIKKAVKKTVGRKKASQLVKTAKSSIGVGYGLVSVKLKLGLMIEELELLTKQLKQLEKAMEKALTDTGHDELILSIPGTGVVTAASFLGEIGDPMRFDHPRQICKMAGYNLIENSSGKNKSRTVISKRGRKNLRSILYQMAMTMVAVNHEMKELYRYLKTRPHNSLKKKQALVVISKKIVTVIYNLIKKQTEYRAELVLGEFRKKQIKQAA

SEQ ID NO: 385787 - protein, 345 aa, unidentified
MHTTRVGVDLAKDVIQVCVYKRKKVQSNIEMTPEEFLCWLNTSKPSTIIFEACSTSNYWKQKALQAGHDARLISAKLVSVVRQNQKTDKNDALAIVQAALLPDVTFIGGKTVEQQQLQSIKRLRELTIKQRDASQNQIVALLSELNLRIAKSRGSIIHSIEGILEDASNGLSAECRAAISIAKEQFSSLVDAVQRYDDCLEKSASLHPDCKKLLKLEGVGTLNAINLYLALGCAEIGAFSKGKDASACIGLTPIQHSSGGVVKLGSIGKFSRNSALRSQLICGAMAAIIQIVKREAKTEKEVWLKALVERRGKKCAAVALANKTVRTAYALLTQGTEYKAELLTA

SEQ ID NO: 385788 - protein, 342 aa, unidentified
MLYVGIDVAKNKHDVTALNVPGKTVLKPLTFSNNKAGFELLDLSFRQLNQDCLIALEDTGHYAFNLLNFLHEQGYKVYTYTPLLIKEFAKSLSLRKTKKDKKDAHGIALKLLSDPNREQFQHDNRQVELKILARHIHRLKKKQSDWKVQYTRCLDIIFPELDKIVGKHSEYTYQLLTCYPNPQKRLEAGFDKLIEIKRLTASKIQDILSVAPRSIGTTSPAREFEIIEIIKHYKRLIDKAETCVNDLMAEFNSVITTVTGIGGRLGAVILAEIRNIHAFDNPAQLQAFAGLDSSIYQSGQIDLAGRMIKRGSPHLRWALIQAAKACARFSPAFKAYLKTKLE

SEQ ID NO: 385789 - protein, 421 aa, unidentified
MPYKVAAIDIHKKVLMVVVAAVADEVLDTVGATVEFEGRKFGTGAQERHHLASWLKERQVHEVVMESTAQYWKPIWLDLEPHFGKLHLAQAQSNRAPKGRKNDFRDAKRLGRRFLAGELMLSFVPEPEQRLWRLMTRGRLQLVRDRVRLQSQLEALLEEARIKLSSVVSDLLGSSGRRILKALSQGETDPEKLAELGDDRLRCSKEELVDALRGPAEAGHLELLKLHLERLELLDAQIDQLSAKAAEALKPHQDAVVRLAEVPGLGVQSAQQLIAEIGVDAGTFSSAREFASWVGVCPGDNISAEENHSSRSPKGNRYVRRALAEAAHAAVKSKRSHFEGVFRKFLPKLGYKGAIWVVAHRLARLIWKILHDGIQYREQGNEINPRAKQRRAQKLSQALRKLGYAVTLTAINPEPAIGSAG

SEQ ID NO: 385790 - protein, 340 aa, unidentified
MCVYIGLDLSRKRLDWYGCRVDGTRVDAGAVPPDLDGLRQLAHRLGDAEVIAVVETMNGARFVHDQLELAGWDVRIADAQRARALAPLACKTDRIDAQVLAELARRDLVPEVWLPDPRVRGERERARFRLHLVKHRTMLKNRINQTLVAHGLGRPTRHLFGPKGRLALERLPVPEPWHGTLSASLLLIETLDEQIAELERELRALGADHPYVPLLMTAPGIAWILAYTIASEIGDIARFPTARKLIGYSGLCPRVYQSGQTDRRGPLAKNGPNYLRWALIEAAHTAGRTAHYRGLVERMRDRHGRRRGSALASVEIARRLSEAIWWMLTRNQPFAPAGAL

SEQ ID NO: 385791 - protein, 427 aa, unidentified
MSTLFVGIDVSSKSNAVYAMDFEENKYISSSFGNNQPGADELADMIAKCMQKHKNLDTIIVALESTSVYSVHIANFLSTCETLMPYKPYVFCVNPKATSNYRKSYIGMEKTDPIDAFLIADFARVGRTKKLEPWRGGQFIALKRLTRHRMHLSECITREKTYMVSNLYLKFSELQLLEGDNKPFSNIYGATSSAILTEFLSPQEIIDLSEEELLSFLAEKSRNRISDISRTSELLRKAARDSYRLDQCMYEPLNISLASSFNCIQAYQKEIKLIEQAIEKCINGMNPNAFLILKSIPGIGPVWASGMLSEIGDITAFHSSDALAKYAGLYWLKNDSGDFISEDNQVSKVGNPYLRYYLGEAANSVRKHVPEYTEYYAKKYAEVTKHQHKRALALTSRKLVRLVFGLLVKNQLYTGEKLDTQSNINKN

SEQ ID NO: 385792 - protein, 318 aa, unidentified
MSDKTTIGIDVAKNTLEVFIDTTGQLLHLENSAAGILELQAALSGLSVTGIIMEATSRYHCTAELMLSAAGLPVAVINPRQIKNFARAMGKVAKSDPIDARIICEYGRRMTPQFRPAKNEQQQDLAVLLTRRRQLVQNRVMESNRCKERCGAYVEQGIMRYIEWLDVEINMLDAEIKQRLRQDDDLAAKRLLLDKVKGIGPITQATLLIQLPELGCLTRRQISALVGVCPYDRDSGQLRGKRAIWGGKSGLRATLFMAMLSAVRYNPQIKAFFNGLLARGKPKKVALTACIRKFVTILNAMFRDQKDWVYEGVSSLTP

SEQ ID NO: 385793 - protein, 410 aa, unidentified
MDMLHRRCAGLDVHKKTVVAAMRLAVENKLVSEVRTFATTTAGLLALSDWLTENSCTHAAMEATGVYWRPVWHVLCDGELELIVANAAHVRNVPGRKTDVSDAAWLAELLAHGLIRGSFVPDAATQELRTLLRTRKQLVRERSRHVQRIHKALEDANIKLEAELSDVLGKSGRAMLDAMVAGETDPVRLAALAHPGVKSSQARLQEALHGRLTRHHRFLLQLHLGQIDGLDAAVTTLDREVDVNLAPFRTAVELVSTIPGVSKLSAEVIVSEIGLDMSRFPTVGHLLSWAGLCPRNDQSAGKRRSTRLRKGAPWLKTALVQCAWAAKNKKASYLQAQFRRLLGRRGPQKAICAVAASILTAAYHMLKDGTVYQDLGPDHFNRRSNTTQSQRLVKRLQQLGYAVDIKPLAV

SEQ ID NO: 385794 - protein, 345 aa, unidentified
MQSMYYIGLDVHKKTISYCVKDGSGIVHGEGAIPATRWDLDRWMKMLPQPWTAAMEATIFTGWIYDHLKPHAAALKVAHPLMLRAIAAAKKKNDRIDANKIADCLRCDFLPECYMASTEIRERRRTLRYRNLLVHQAVQLKNKISGLLMEAGVSYNKQKLHKVGYFKELLATNPDINEGLRPLLRLCRETLVRLQKTESALVRSLQRDSLLAERVQRLMTIPAVGPITALTWVLEVGDVKRFSSIKKAISYCGLCGAEKSSADTVKRTPISKQRNKHLQSVLVEAAKMAPRLSPELALIYDREKQKGNANRASLAVARKLVAYLVAIDRSQRDFLVVEKENCAAA

SEQ ID NO: 385795 - protein, 394 aa, unidentified
MAFKIFRKNCCGLDVHKTWIYACMGITDTNGRTEYKQARFSSFTKGLQELADWLAKYDSNDVCMESTGKFWIPVFNILEKTCWVTLAYPKYTKPQKGNKTDHKDAKWICDLYMCDMVNPSFIPPPDIRQLRDLMRYRSKLTNIMTSEKNRALNCLTVSNLKLDDVFSDVFGKSSRSVIRYILEHPGETFQVAPFIDRRCKHPVEEIQAVIDGTISHQQAVKLRECLQHLDELEVHKTNVEKEILCLVQQYPYQLELLQTVLGFSGNIMTAIALISEIGADMSVFPSAKHLVSWAGCCPRNDQSSKKVKSTRISRAGVYLKPLLVQVAIQPFTANADKLSAAGALEIRCQICDGRFLSMWAALFIFLGCPLPPCQKDLHVHNGRIVILVSVAWIF

SEQ ID NO: 385796 - protein, 406 aa, unidentified
MEVCYPRCCGIDVHKETLVVCLRLHEGRRVHKEVQTFQTTTSEILRLRTWLTAQGCTHVAMESTGVYWRPVFNLLEDCLVVVLANAQHIKAVPGRKTDVRDCEWLAELLAHGLIRASFIPPADIRALRDLTRHRKSLLRDRVKATNRIHKLLETANIKLATVLSDIVGVSGRAMLRALADGDTDPDRLAALARGSLVRKKAALTEALRGRFTSHHAFLLRQLLAQLDHFATLIEACDQQIASVAAPLQPHLERLQTIVGVGPRSAEVIVSEIGVDMARFASSAHLASWARICPGTHESAGKRRSAGTGTGNNWLRTTLLESAWAASHQRSSYLGARYRRLSKRRGPKRAAIAVAHTILVIAYHILRDETTFQDLGPDYFDRADAGRQKRYYLRRLEALGCDVSQVA

SEQ ID NO: 385797 - protein, 342 aa, unidentified
MNDMIIGVDLAKSVFQLHGVSLAEGEVFRKKLTRTQFEKFLKDTAPCLIVMEACGSANFWARQLAEMGHEVRLIAPQYVRPFVKRQKNDAADAEALVIAARQPEMRYVEPKSREQQAQAVLFRSRERLVRQRTELVNALRATLFEFGFTLPQGPAAMKRAKELLDDPTVDLSDLVVTECRDMLCQIVEKTDRINKRSKEIKQLAEQTEALRRLTSMPGLGPITAFAIGAFAPAMTEFRRGRDFAAWLGLVPRQNSTGGKARLGSVSKAGQSDIRRLLIIGAMSRLNWLGRKTIPDGGWIDRLMQRKPKMLVAIALANRMARQIWAMTTRGELYNEPAKAVAT

SEQ ID NO: 385798 - protein, 505 aa, unidentified
MTTPSIPGQTASASSASGPQTQARAQRQAYRRRQTRAKAKSEALRHKEAAHVEALPVLHPHAAGIDIGSRSHWVCVGFTSEAPSCLIREFPAHTAGLKAIAAFLREHQVTTIAMESTGIYWVALYELLQAEGFEVLLVDPSYSHQLRGRPKTDRRDCQWIYRLHSVGLLAAAFRPDEKTCQLRVYLRQRANLIRQASRHVQHMQKALEQMNLKLTEVLSDITGVTGRTILRAILRGTRAAEKLAKYRDKQCKASEEQIAQALTGSYRDEHLFELKLAYEAWQFTLGQVEKVDTQIALQLGQMKCDRALPPLKPKARPKRRVNSPRFEVRMALYYVVGLDLTEIEGISELTALTVISEIGPGVSRFATVKKFCSWLGLCPNWKKTGGRVQSSRTRRGVNRAALALRLSAQSLHHSQGALGGFLRRMKGRLGTQAALTATAHKLARIVYLALKHGMTYVRQSQQEYEAHMKEKQIKALRRKARQLGLEIVEKTSGSVAAAEAASAQG

SEQ ID NO: 385799 - protein, 353 aa, unidentified
METAYDGRQVVGMDLHRRRSVLVRMTEDGQRLGVARITNSPAGLRRVIAQAGASPRVVLEGTYGWYWAADTLAAAGAEVHLAHPLGVKAFTYRRVKNDERDAADLADLLRMGRLPEAWIAPPEVRELRELTRYRHKLVGLRTSCRNQVHGVLGKLGVPVTCADIFGVAGSAWLDELRLPQPYAGKVTSLRQLAGELTTEITMLSEVIADLLAGHRDYQVIQQLPGIGPALAAVIVAEIGEVSRFGSAAQLCSWAGLTPRHRESDTKVTRGHVTKQGSRLLRWALIEAVQHVPAGSLPGATKAAIIARRGKQAKNIAKVAAARRLLTLVYYGMRDGQVRCLSQNPAGSPPARAA

SEQ ID NO: 385800 - protein, 403 aa, unidentified
MNSVGIDISKGRSTVAVMRPFGEVVISPFEVRHTGSELSELARRLKSLDGETRVVMEATGNYHAPVAKLLHDAGLYVSVVNAKLVHGYGNNDLRRVKTDRKDAVKLANYGLDRWLSLPKYVPEEDTRLLLKNCYRQYRQYSKVQTLLKNNLISLLDTVFPNANRLFSSPIRGDGSEKWVDFVAEFWHCKCVCERSERAFINKYQRWCRKHGYNFSETKAQTIHAVASGHIGVMPKSETTKLLVEQAVAQLRATSAALAALKHEMQTLASQLPEYPVVMDMFGVGPTLGPQLIAEIGDVRRFYSKKALVAYAGLDAPPNDSGDMTGRHKSMSKVGASSLRRTLFLVMSVYLQNAPLAEPVYQFMDKKRAEGKPYRVYMMASANKFLRIYYATVKAYLESLEHTA

SEQ ID NO: 385801 - protein, 404 aa, unidentified
MFKFGIDWSEDHHNLCIRNDKGAIVSQVEFKHTLEGFQRFDDERRKLGVPACECLVAIETAHNLLVDFLLDRSYVVYLVPPQATRGYRNRRSSTGAHTDDSDAALLSSILHTDLDSHRRIQPNSPLTQHILAQVRLIDLLRRSIQRQGNQLRAILFRVYPQALGLFGKLTAHISLQFLMAFPTAEEAQALSLPAFEAFCREHRYSRASLISRRYAHLMDPAPQANPIAVAAHRDQIRILSELLLPQVQRRAEALTSLAHLFSQHPDAFLFDSLPGVGELLAPALLAKFGDHRDRFPTPASVQALAGTCPVTQQSGKRKVVLFRRGCDREFRRIAQQFAKASVRQSGWALAYWRDVRPRCRSDSDAYRRLANRWLAIIWKMWQERKPYDESYHIQQRAQRRRPKS

SEQ ID NO: 385802 - protein, 363 aa, unidentified
MYDSTTVTIGLDVHARSIRLAAVRADELLEERTLPYDEEAVERVLRRWPGVRCCYEAGPTGFGLYRHLVERGIDCAVVAPGLVPQRPGDRVKTDSRDARKLARLFAGGLLEPIHVPSPEQESARDLVRAREDARLDRMRDRHRLSKFCLRHGRLLPTSSWTVVRRKWLSEQRFEFVAEQITFDAYLHTVDLVDARIEALERAIRVVAEQEPWKQLVARLRCLRGIDTLTALALVSEIGNFSRFRTAEEFMAFVGLVPSEHSSGEQRRQGSITKVGNSHVRRLLVESAWHARRRPKVGYDLSRRQRGQDAVVIERAWRCQQRLYQRWQRMAGRGKPQQKIVVACARELAGFVWAIATNQPLRST

SEQ ID NO: 385803 - protein, 428 aa, unidentified
MNEGERIRLEDFRQMKKEIRGSERHLIVGIDIAKHQHKAFFGTATGKTLLRVLVFENTIEGFNRLRSRTEALKVQHCLSKVIYGMEPTANYHKPLAEYLIKCGHHVVLVSGVAVNKNRELLDGRWDKHDSKDAANVADLISQGKCLYYDYPSGRLRDLRSLLSLKRRLKKQEHGVKVRIRNHLLAQYFPEFDRYFAKGCSESLAIVKWCLHPSMIAGMEYDEFIEVVAPRMKTLGQEKRLKSIWELAIDSIGCDGGQSLNFEAKLMVEDLQQTRDSIRAVDERIEAICLHFREYRYLLSIPGFGPDISSKVLGAIGNPFRFNSGKQVLKLTGYDLSAHRSGKGSDSAVPVISKRGKAYLRYALYQAAFIASTSNPHFIAYYTNKLRGREREKGIKTKMRVKLAAKMLIIAWTLMKRKEPFNPDYLKVD

SEQ ID NO: 385804 - protein, 462 aa, unidentified
MTIDKKLWRNRKERKELARRLRSEDPGLAIVHPHAAGIDVGNGAHYVAVPPDRDLLPVRRFECFTADLHRLADWLKNCRIKTVALQSTGVYWIPLYDILEERGFEVYLVNARHTKNLPGRKSDVQESQWLLKLHTYGLLNNSFQPTSEIRVLRTYWRQRAEHVRGVTMCIQRMQKAFTQMNVQLANVISDLSGVTGQMIVRAIVAGERDPWKLAELSNPRIRASKEEIAKSLEGNWRQELLFVLQQELQMFDTYQQRIAECDQELQKHLARLADTVLPPAKNEAKKNKPNKHHPQFHLADELQRISGVDLTRIDGIDVMVAQTLVSEIGLDMDRWKTEAHFASWLGLCPDNRVSGDKVLARGTRHVVNRAATALRMAATTLLKSQTYLGAQYRRLRSKLGAPKAITAMAHRLARLAYRMLKYGQQYVDKGAAYYEQRNRQQQIEFLQKKAAQLGLQVTTTHS

SEQ ID NO: 385805 - protein, 430 aa, unidentified
MKSNTQNAKIEAITEKTLVLGIDVGSETHYARAFDYRGIEYSKKPFKFSNTEAGFVTFKEWILDLKERHEKDKVVPGMEPTGHYWFNLGKFLQDNEMKPVLVNPHHVKKSKELDDNNPTKNDRKDPKVIAGLVREGRYMIPYLPDGVYADLRTASNIRFQLQAELTRIQNRISRWFNIYFPEYKTVYGKPDAKSGMLILKAAPFPEDILTLGINGVNQIWRDAKLRAVGKARAKTLIEAAEHSVGSKEGAVAARMEIRMLLEDYESRNIRLQEVMTLIEGLVKQIPMAEKLLEIKGVGIRTVSGFLAEVGDISRFNNPKELQKLAGLALVENSSGKHKGETTISRRGRKRLRYLLFEVAMSLVAKNPEFRELHNYYTTRRLNPLKKMQSLMAIAAKLIRVFYAMLTKGVDYDPKKMVSDIKRPAVYLQAA

SEQ ID NO: 385806 - protein, 350 aa, unidentified
MSEHITIGMDLGDRHHIIVVFDNKGNEIAIKRITNTKLALRRYFQRYTGATVAIEAGTHSPWISRELEQLGLVVYVGNPRKLRLIWDSHDKSDEKDARILAMVCRVEPRLLWPVKHRNAQAYSDLELIKARDMLVQSRTKLINHVRCVVKSHGDRLPGCSAASFARRVAGLLPAQLNAALSYLIETIADMSQRIVQLEHKIEQLSKLRYPETQGLRQVAGVGPLTAMAYVLTIEDPSRFNKSRMVGAYLGLTPRRDQSGASDKQLRISKAGNRYLRKLLVNCAHYILGRFGPDCDLRRFGLAIAARGGKNAKKRATVAVARKLAVLLHRLWASQCCYEPFYAMGGHRKAA

SEQ ID NO: 385807 - protein, 350 aa, unidentified
MKRILKQSVGIDVAQKELVVQVGRLYEDLSTELYAYKCFANTAKGFISLIQWVLKLTEPTVSIRYVMEATGVYHESLACYLADHGYSVSIVLPNKISNYFRTLSVKTITDKSASEAIALFGLERNLEDWKRPKPVFKYLRQLTRERDQLVQERTMIKNQLHAEKAESDPNSSSLKRIKQRIDLLNKQEKVIKEEIATLSKKEKELKDELALLCTIPGIGILTAATILAETNGFELVRNKRQLASYAGFDVQEKQSGTSVKGKTRISKKGNKNLRKAMHLPSLTAIRHDPRFKAIFARLVSKHGIKMKAAVAVQRKLLELSYTIFKTQRPYNKSQLQEAIAAAQKNEMQIA

SEQ ID NO: 385808 - protein, 313 aa, unidentified
MAGKVTETAVVGGVDTHKDLHVAAVVDQNNKVLGTQFFSTTRQGYRQMLAWMTSFGALKRIGVECTGTYGSGLLRYLQNAGLEVLEVTAPDRMERRKRGKSDTTDAECAAHAAFSGIRTVTPKTRNGMIESLRVLKTCRKTAISARRVALQIIHSNIISAPDELREQLRNMTLMQLIRTLGAWRPDASEYRNVTNVYRISLTSLARRYLELHDEIADLDVMIAAIVDELAPELIKRNAVGYESASQLLITAGDNPQRLRSESGFAALCGVSPVPVSSGKTNRYRLNRGGDRAANSALHIIAIGRLRTDDKTKE

SEQ ID NO: 385809 - protein, 347 aa, unidentified
MRFYTKQHKMYCGIDLHARTMYVCILSQAGEIMVHQNFTANPETFLKVIAPYRDDVVVAVECIFTWYWLADLCVREGIPFVLGHALYMKAIHGGKAKNDRIDAQKVAVLLRGGMLPQAYVYPAEMRATRDLLRRRIHLMRKRAELLTHVQQTNSQYNLPDIGKKIAYKTNRAGVAERFADPAVQKSVEVDLALIDYYDQLLRDLELAIVKTAKQHDANTLYLLQTVPGIGKILSLVLLYEMHDIARFPRVQDFVSYCRLVKCAKESAGKRYGTSGTKIGNAYLKWAFSEAAVLFLRNNPVGQKYLTRLEKKHGKGKALTVLAHKLARAVYYMLKRGMAFDMDQFLHH

SEQ ID NO: 385810 - protein, 337 aa, unidentified
MQVMKKIYVGIDISKEKCSLCYREGLETVLEEEYVNAIKTLKKGFTEALKTLGATVDEVLVCAEYTGRYIYPLTIACQELGIFLWMDDPTRIKNSMGLTRGKNDKIDAARIAEYACRYSDKAVRYTIEEDAMVSMKNLLADREFLLIDKKRYQSQITDQKKYMAPGDFKHKNSRWKKVIKAIDDQIKAIDAEIEGIIAADPVLTRQKELLTSIDGIGDRIAINMIAITGGFTRFQNARQFCSFAGLTPYKYDSGTSIHSKAKISKRANQTLKPLLHLAAVCVATHKKDGEYKYYFDRKTKEGKHAMCVLNVIRAKLVHRMFSVIIRNDFYTKQYNPA

SEQ ID NO: 385811 - protein, 386 aa, unidentified
MQTLNDFSRSLIALKPARTLIAVIEMSLSSWLVAGIVPGIERQPLKKIAVDESALLRLLYRWREEAEKAGCRIERIVVAFEAGRDGFWLARWLKARSIEAHVIHAASVAVSREHRRAKTDRLDAELLKRAFLGWLRGERDHCKVVAIPTLKDEDAKRPNRERESLVGEQSRIVNRMKAALIRLGIRGFNPKLKRAAGRLDSLRTPEGEPIPPNTLAELRRDMERRRLVRDQIRQIEEARLERLDHAPGDGPHAMVRLLVRVIGVGIETADMLVHEVLSRNMRDRRAVARYAGLTGSPDESGRKRREKGLARSGNGRVRRGMIQLAWRFLMHQKDSALAHWFRARTENARGTRKSMIVALARKLLIALWQLVRQGVVPDGVVLRPAQ

SEQ ID NO: 385812 - protein, 378 aa, unidentified
MRIVCGLDVHKDSVYLCILSSTGEIVEKVFGVLTFQLAKMRDLMLKHHVQEVGMESTSVYWIPIWRVLEPHFKLKLVNPYFIKQLPGHKSDVKDAQWIAECMLKELVRGSFVPPERIQQLRQYDRRIFDLDDEINRKLSKLDAALQRCNIRLSNYVSNTDSKSYKEVVARISEGITDPKVLVEEIHGRIINRHGRKTIIAALTGVITQADSDMMRQIREEIDIAERHKQECIDKMQEICEKKYSDQLRNLQTIPGVKLRAATSLIAEIGIDMSHFETANHLASWSGLKPRNDESNKVIKSKRITHGNRYLRRTIIECSWAASRTQGCFFSRFSYHQTQVRKKTKMKVQIAISRKLLICAWHILSKNVPYLDFCEHEIS

SEQ ID NO: 385813 - protein, 338 aa, unidentified
MSIKVVGVDLAKNVFQLHGVDDLGYAQLRRRVTREKLLETVAQLEPCVIGIEASNSAYYWASQFERFGHQVRIISPQYVKPFRRNQKNDGNDAEAICVAVQQPNMRFVPKRSVEQQDVQALHRARQRLVSHRTALASQIRGFLRDRGIVFPRNISYTRRLLPQILEDAENGLTGSARETIAELFDFLREVDRRIAVFDRRIDEAFRASELAQRIARIEGVGPKISTAVVAAIGDGREFKNGRHMAAWLGLVPRQHSSGDRTQLFGISKRGDQHLRTLIVHGARAVVRTASRKTDPKSVWVNSLRERRGFNRAVVAVANKNTRIMWAVLRREEPYRRVA

SEQ ID NO: 385814 - protein, 341 aa, unidentified
MQITTIGLDIAKNVFQVHGIDAAENVVVRKQLRRGQVIAFFKALPPCLIGMEACATSHYWARELAKLGHEVRLMPAKDVKAYIKRNKNDAADAEAICEAVRRPTMRFVEVKSAEQQAQLMQHRARDLLMRQRTQLINAMRSHLAELGIIAPQGREGVKELLAIISIEDDKHLPNDARASLIVLAAQLQALQTTIGAIEKRIVVQHRAKKESRRLQTVPGIGIIGASAIAATVTNPKIFRSGRDFAAWIGLVPRQMSTGGKPKLGPISKQGDRYLRRILVVGAVSVLRRAKLHPDKFPWITQMLTRRPFKVVAVALANKMARVAWALMMSGNTCRAARFATT

SEQ ID NO: 385815 - protein, 353 aa, unidentified
MSQVTTIGLDIAKSIFQVHGVDAAGRSVLRQRLSRRRVLEFFGKLPRCLVGLEACASSHYWARELMALGHEVKLMPAQYVKPYVKRGKNDVADAEAICEAVTRPTMRFVAVKTPEQQSIMMLHRVRLILMRQRTQLSNALRSHLAEFGIVSPIGREGLDRLLTIVADTDDGRVPAEARASLEMLAVQLAGVKAQILANDRRVIASARATEVGRRLLEVPGIGPVLASAFVASVADPATFKSGRDLAAWIGLVPRQNSSGGKERLGRITKAGNRYLRQMLMVGAIAVIRYAQRNSARRPWLVQLMGRRPTKVAAIALANKTARTVWALMSSGERYRDPQAIQAAVSANGIETPH

SEQ ID NO: 385816 - protein, 315 aa, unidentified
MRNCIGIDVAKSFFDLHVPASSQSQCFPNEMQGIQACLKLCRDVRPELIIMEATGGYESLLAATLQAEGWPVAVVNPRRIRDFAKAIGQMAKTDKLDARIIAQYGATLEPLPSGQIDNNCRKLKALVTRRQQLVDMHTAESNRTEHAIDKEVKNSIAAIVGTIEKHIEKIDKQIKDHIDNQPQLRQKAEYLKSVPGIGDTTANLLVTELPELGCFNRRQIAALVGVAPINRDSGMFRGKRMTGGGRRNIRSRLFMPTLVAVRYNPILKKYYLRLIEKEGKCKMVALVAAMRKLLCIMNSMLKNNQYWQQNLIKNA

SEQ ID NO: 385817 - protein, 344 aa, unidentified
MATYYIGADVHSNNTELAIEQKGQIVARYSVPTSIPSISAVLNSIQGKKILAMEEGPMAGWLYRNLHEKVDKLVVSEPRRNKLITCEGDKDDRIDSGKLAVLLRGNYLKAVHHTCDSHRAHLKHWVNLYHDRVRDAVRDINKIRACCRMHGVRIPRKVVRNPVRRRAWLSELDNSVLKAQLHMLWIGYDATKEQVKIAKKQFSSYARKYPIIKSWSALPGIGIIRAATIFAYLDTPWRFKNRAKLHRYCGVGLVRISSGKDKKGRPKPARLKLPWAVNRRLKNAVMGAATTAIERGDNAFKDYYKRMVSNGITPANARHSVARKMVSTMSAMWKTGNEYDETLV

SEQ ID NO: 385818 - protein, 344 aa, unidentified
MSTIRVVGIDIAKSVFQVCVWMVDGSVAWNKKISRSKLLDTIRQFEPGTLVAMEACATSHFWGRTFASMGYCVRLIPAQHVKAFVRSQKNDANDALAICETAFRPGIHFVSVKTTEQQDIKALRNTRQLMVEQRTALANQLRSLLAEYGFTIPVGILRLQQQLPELIEDASNSLTFTLRRLLSSLREDMQALNERITSLDSEIAALSSQQIAYRHLLTIPGVGPLIAAAFISEVDATQFSSGRELSAWCGLVPRQHSSGGKQRLSSVTKNGNRSLRTLIIHGARSVMRCVKKRDDSLSIWLQRLEARRGFLKTTVALANKLTRIIWRVLTDGIDFNMQKAVAMN

SEQ ID NO: 385819 - protein, 339 aa, unidentified
MKLYTAFDLHSTNSYLAIINERGERVFKKKLTNDPEKILTVLKPFKRDVIGIAIESTYNWYWLVDMLMEEGYHVHLANPAKIQQYRGLKHSDDQHDAFWLAEMLRYNILPEGYIYPSEQRPIRDLLRKRGQLVRLRTSLIISLENIISRNNGSSVKVNDVKALKTDRVTPFLECNEDLMLAGKASKETIDFLTRQIRSIESVVESKIELKEQYKKLLTIPGVGKILGLTIMLETGPIERFAKAGHYASYCRQVPSEWVSNGKTKGSGNKKCGNRYLAWAFSEAAECARRYYPEPRSYYNRKKQKTNSMIAHKALSSKLTKAGKMWGSGLEISGLEISVY

SEQ ID NO: 385820 - protein, 317 aa, unidentified
MSIQESKVYVGVDVASKHLDLFFPDTGKSERIKNDAEEVKALCVRIQGQSQYMFVMEASGGYESLLCAQLGSHGILHAVVNARRVREFARSMGADAKTDQIDAKVISQFASVLKPIASEAQSEEERSHAALVTRRTQLVDLITQERNRLKQTWDAYAKKSVQKTLKHLENELESIDRLLVKMLQQDKKNQRKIEILQSAKGIGQVSTSVLLAHLPELGKLNREQIAKLVGVAPMNRDSGNTMGKRFIMGGRGNVRAILYMATLVAIRHNEKIRAYYAHLKSHKKESKVAIVACMRKFITILNHLIKTDQTWEEKRAC

SEQ ID NO: 385821 - protein, 344 aa, unidentified
MLKSTIFGIDLAKNIIQVCQISKHGELVSNKAVSRQKLKELLAKAKPAVVAIEGCGSSHYWGRYAQSFNHDVRIISPKKVKGFLQGHKTDANDALAIANASLQIGMKSSKPKTEQQQTIQTLETSRFHLSRSITSLSNHLRAMLYEYGIVSARGVKALTTVVLDTLNDADSMPECLRSTVNQLWLTYLRLKEELAQLIKTRNALIRQLQPCKKLMDLEGVAEVCAGLLYSSIGDGKQFKNGREASAFVGLTPKQHSSGGKIFMTGIDRAGGIRELRSALYQGALSYICNLPDEPKTAKQAWLIKLVQRAGIKRSCIALANKTVRTAWAMLRHENKYKQQPLLAI

SEQ ID NO: 385822 - protein, 315 aa, unidentified
MTSVGIDVAKATLRVAVVPDGRQWEVANTPGGITTLVEALGPIAPTVVVLEATGGYETAAVAGLTAAGLPVVVANPKQVRDFARAAGRLAKTDALDAQVLADFGWKMQPTPRPLPDAQTRELQALVVRRQQLMEMRVAEMLRLAQADSPRVQQAVREHLDWLEARLRDFDRDLRAFLRQTPAWREQDDLLRSVPGVGPRTSACLIASLPELPRLTRGQLAALVGVAPFNVDSGTWRGQRRIHGGRGRVRQALYMATLTAIRYNDRVAPFYQRLVAAGKPKKVALVAAMHKLLTILHAILRSRTPYQPASTSASPC

SEQ ID NO: 385823 - protein, 412 aa, unidentified
MKDLLEISCGLDVHKEKIVACILTGPLGKPTRSEIREFSTLIPDMIALRNWIVSKNCHHVAMESTGIYWMPIYEILEDAFSGDITLLVVNARHMKNVPGKKTDMRDSEWISTLLRAGLLNGSFIPQKRIREFRDLNRYRKSVIRDITSQKNRIEKFLQSSGFRLSSFISDIFGASGRNIILHLIEHGQIDKTTLDSCLKTKTRKHIDEILMSVNGTLSEHQKAFLRILMTHYNSLKKHLTEIETSLEEDMPPFALQVEQLNSIYGISTTASCAIIAEIGIDMNPFKTAEHICSWAGLCSGNNESAGKRKSTSVTKGNPYIKSMLCEIAWVIAGKRNTYLSAWYWRIKQKKGAKKAIVALARKLLVIIYTMLKQGTLFDESCFETRRKNCEQKQLSRYIRELEKHGYHVKAQS

SEQ ID NO: 385824 - protein, 383 aa, unidentified
MPSLRHGRRAVGEDRTVCVGLDTHKAKMAVAVAEPGRSGEVRFQGEITNQPDAVRRLIERLGAKHGRLRVCYEAGPCGYGLQRQITALGHDCMVVAPSLVPRKPGDRVKTNRRDAVTLARLHRAGELTAVWVPDPTHEAMRDLVRARTGAMEAVRRARQQLQGFLLRHGRVFTGRKTWSPAHRRWLAGLRFAHPAQQIVLQEQIDMIEEAERRRDRLDQQIRELVPDWSLAPVVTALQAMRGIAFLSAVALVAEVGDFRRFANPRQLMAWLGLVPSEHSSGAKVERGGITKAGNGRARRVLVEGAWSYRFPARITSPIQARLDGVSDTVRAIAWKAQVRLCARFRRLVAAGKNVNVVTTAIAREMAAFAWAIACQVQPKEAAA

SEQ ID NO: 385825 - protein, 347 aa, unidentified
MNFYNSSHPYYCGIDLHARLLYVCIIDLQGEIIVHTKIKADKSQLLGLLEPYIGNIVVGVECMHCWYWVCDWCEQQGIDFVLGHALYMKAIHGGKAKNDKIDSFKIAALLRGGNFPLAYAYPHEMRATRDLLRRRTKIVRHGAMLKGHVVNTNSQYNLPATELNLKNTSARKQLRSQFKDPIVQRNIDLDIVLLDCYAKELAQVEWFIEQKAKQHNPVFYELLKTVSGIGRILALTILYEIGDIKRFETVQNFASYARLVKCKAESAGKTYGTQGNKIGNAHLKWAFSEAAVLYLRGNDKARNYINKLQKRMSKAKALSALAHKLGRCIFFMLKNKTVFDEERFLKG

SEQ ID NO: 385826 - protein, 397 aa, unidentified
MYIVGIDIAKRKHEAAVIDGDGAVIIKPFSFTNNCSGYNRLLAMLAKAKLPLDEVSFAMEATGHYWLALFTRLQKEGFRVQVINPVQTNSIRSFYIRQAKTDPRDALLIAEVIRFGHFSESTLHPENIYELRELCRGRHAIVSMQADVKRKVVALLDQVFPEYETAFTNMFGDTSMAILQTCPTPKELSEMPLEELCHLIEVSSHKRFRMAKARELQELARNSFGFAMAGDVFSTMIRLYAKHLDFLKQQVREMDRKIAEIMETLDTPITTITGIGPTLGAYILSEIGDISRFSSAAKLAAYAGIDPTMRQSGEYNGVRNRMSKRGSPYLRHAIWLATSSAVLHDPALKLYFQKKRDEGKPYMASVGHACRKMVSIIYAVMRDHKAYTPHIPNEISA

SEQ ID NO: 385827 - protein, 319 aa, unidentified
MSRRPRAVYVGIDVARDQLVGHVRPLDQRFVFANDPAGHRLLVKMLKGLRPHRIVLEPTGGYERRLLTALRHAGLPAFLVNPHKLRAFAQSTRGLAKTDPLDAAALAHYAEIWEPPAPIPREPVAERLAEYLSWRTLLVERRTALLNRSAQLLDPTLRRRARITLAQLDAEIALTETMLRRIVAEHRGLAELWRRLKTAPGIGDLSAFALIAKLPELGRLDGKRIASLVGVAPHPWDSGRLSGRRIIQGGRFELRRTLYMAILAAVRRPGCLRTFFLKLHANGKPAKVALMAALRKLLCRLNAMIRDQRDWHEPRTLAA

SEQ ID NO: 385828 - protein, 370 aa, unidentified
MASVSHLAPIHLGLDVHRDTISVGVLAPGEQVPVVDKLPHDEPSVRRLVGRLGDPRRLRACYEAGPTGFELARLLEGMGVSCQVIAPSLIPKAPGDRVKTDKRDCRRLARLHRAGELVAIRIPSPTEEAVRDLCRTRGDMVQDRMRARHRLSKFLLRHGRVWRAGKAWTLGHERWLVTQRFVEPALQTTYDHYRAVLASRDVQLAAIEADLAVWYDQDPFAEQVARLAAYRGVTRLGALHLAAEVGDWRRFARASQFMGFCGLTPSEYSSGPTTRRGHITKAGNVHLRTQLVESAWAYQHHPSVGIHLARRQQGLDSQVLARAWAAQLRLCGRFRRLRAHKPSTNIVAAAIARELAGFLWAEMTTDRPCC

SEQ ID NO: 385829 - protein, 350 aa, unidentified
MIVGIDVHKHNHAVALIDDRGGEIATLTIANAPKGYRALIDWLVDHGAAKAVIGVESPGSYGRCLVTALVGAGFEVLQVPAWRTHRERHRRGPGKTDPGDALSIAHVVRTKREDLGPAEEPEIVRALGMLELQRRRFVRDRTQAIQRLRADWVQHDPVAESGVIRCDRQRELKKLKRLQLGESLAERTAARCIRELARDVEDLNARITQLDREIAQLLAEHGNPLEDLHGAGSNLAATIIAQAGDVRRFRNASAFARFCGVAPIPCGSGQTAGRYRLHRGGNRQLNAALYRIAVVQQRHHPQGRTFLARKIAEGKTPREARRALKRHLANVLYRRLYAWANTAPSMNLLT

SEQ ID NO: 385830 - protein, 347 aa, unidentified
MEKYSRIGMDTSKQIFQLHGVDEAERAVLRRKLKRREVVKFFRGLLPTIVGIEACGGAHYWARELAQLGHEVRLIAPQYVKPYVKRGKNDAADAEAICEAMSRPTMRFVPVKSAPSQAALMLAGLRERLVRNRVQLANAIRGYAAEFGLVAAKGRAKLEPLLLRLQTDESLPALARELFVVQAEEYAQLQAQIAAVDAKLLAWHRANETSRRLAWIPGVGPIIASLLVMKTPDPGAFRSGRQFAAWIGLTPKDHSTAGKTRPGVITRAGDETLRSLLVVGATAVIWQARRGSSRSASPWLLALLKRKPPKLAAVALANKIARIAWKLMTTGETYKAQYTLGAASAGV

SEQ ID NO: 385831 - protein, 359 aa, unidentified
MQTQVNKKLDFSGQNIYVGLDTHKKQITVTIMGEHLHHKTFSQPPDAGVLVKYLNKNFPGANYYAAYEAGYSGFWLQENLQAQGINCIVVHAADVPTKDKERKQKRDPLDSKKIAKSLKSGELDAIYVPSKDCQQDRSLLRARQQIVGNQTRCRNRIKALLSYFGISYPEQFTRSGTHWSKRFMEWLRKVDIGKSGNNTLAIYLAEAEFCRNTLAGITKQIHALSGEGKYARQVELLISVPGIGRLTAMTVLTELEDIKRFKSRDTLCSYIGLVPNTSSSGESEHTGNITQRGNKTLRKCFIESAWVAARTDPALTMKYNQLCSRMKGNKAIIRIARMLLGRVRCVLINEMEYKLGVAA

SEQ ID NO: 385832 - protein, 346 aa, unidentified
MLYAGLDLSRQRLDVHVLDEEGRTVEVMAVHPDADALRTLATHVLRHGQEVTAAVESMTGGRFVHDQLERWGWDVAIADAVKVKGLAPLAAKTDRIDARVLAELARRDLVPAIWLPDPTIRAERERARFRLHLVRHRTALKNRIHATLMTFGYSVSVSDLFGTQGREILGRLVIPEPWATTLTTSLRMIDDLNVEIAACEADLRRLGADHPYIPLLLTVPGVGPLLAYTIASEIGRIGRFESPKKLAGYTGLCPIVRQSGPKDRRGPLAKNGPKYLRWALIEAATHAARDVRYRDRYERTKHRLGRQRGAKVARVDIARQLAEAIWHVLTKNEPFAPAGPAITLVA

SEQ ID NO: 385833 - protein, 310 aa, unidentified
MRIICGVDVSRAWLDAWVTPKAYQRFANNPDGFEALTSFCREHGVELVVMEASGGFEQAAYLALWQLGQPSAIANPVSVRHFAKAMGYLEKTDRIDARIIAGYAEAKRLGPTQPPSPDQQRLTALAARLRQVTADLSVQKQRLHFTRDEQALTSLREAIAFFKGQAKALAAEIAALVESDPLWTALDRTLRSVKAVADRTVAVILADLPEIGTVTNKAIAKLVGLAPIANESGKRTGKRPIRGGRDTVRSILFLVADLARKFDPSLADFRQRLLDQGKPKMVVRIALARKLLVRLNAKARDARAQMPNAL

SEQ ID NO: 385834 - protein, 330 aa, unidentified
MGFPYFLGIDVAKAKLDCLMLDSVEQRRRSKVIANTPEGFQHLVKWLSKQGVGSDEVHAILEPTGVYHERALFALAQAGIAVSLVNPAQLRRFAQGLGIHTKTDACDSAVLARFGEMIKPAHWQPAPSKARELRALLARRDAVAQDLQRERNRCEKLVVEDTPERVRQSLADAITFLERELKALQKSIDQHIDDDPDLKRIWDLLQSIPGVGQRVADHFTALLAGRDFKSAEQLAAYLGLVPAEWQSGTSIKGRPRMSKAGSATLRQLLYMPAVVATRHNPHVKALYQRMLAKGKAKMSAIGAAMHKLAHLCFGVVHNGQPYRADWSGRA

SEQ ID NO: 385835 - protein, 343 aa, unidentified
MENTIVGVDLAKNVIQVCVFTNKKVLSNTEMTPSEFIGFLANSQALTIVFESCGTSNYWKRTANDLGHDARLISAKLVSAVRQNQKTDKNDALAIVQATLLPEVTFISGKSIEQQQLQSIMRLRELAVKQKTAAGNQIKSLLLELNIKVSNRGGGMKSAIERTLEDAENGLTAEFRSALDIAWQQYILILKSINEYDNCLEKSIESHSECKKLLKLEGVGTLNAINLYIALGCAELGVFEKGKDASACIGLTPIQYSSGGKTKLGSIGKYVKNSLLRSQLITGAMSAVSHASNREPITTKDRWIQSMVERRGKKCTAVALANKTVRTAYAMLTQNTEYKAELI

SEQ ID NO: 385836 - protein, 342 aa, unidentified
MSIVTVGIDLAKNVFAVHGVDASGKPALVRPSVARDKLLELIASLPPCLIGMEACSGAHHWAREFAKHGHSVRLMAPKFVAPYRLSGKRGKNDAADAAAICEAVTRPHMRFVPIKTIEQQGQLMVHRARQGFVEQRTATLNRIRGLLSELGIVLPLKAATVRRQALARLEELPGWANTVIGDLLSEVDRLDERIAQYDRHIALMARQSTQAQQLMQLAGIGETTATALISTVGGGHDFASGRSFSAWLGLVPGQYSSGGKQRLGRITKAGDSYLRSLLVMGARAVLAAAMNTRTPKQDSVSRWARSLAERRGYWRAVVAIAAKNARMCWAVLQRGEGFKMPA

SEQ ID NO: 385837 - protein, 332 aa, unidentified
MSQDGEMLVHRNMQAAPEPFLKAIAPYRDGLVVAVACIFTWYWLADLCAQEGLPFVLGHALSRKAMHGGKAKNDKIDSQKIATLLRGGRLPKAYVYPAEMRATRDWLRRRTHLMRKRAELLAHVQNTNAPYNLPEIGKQIAYKANRAGVAERFDDPAVQKTIEVDLALLTYDDQMRSNLELFILKTAKHHDAQTLYLLQTVPGIGKILRLVLLYEMHQIDRFPRVQDFASYCRLVKCAKASGGKRLGTSGNKSGNAHLTWAFSEAATLFLRGNEPGQKYLARLEKKHDKGKALSILAHKLARAVYGMLKRKTAFDLEQFLRTSGSRAGEPGA

SEQ ID NO: 385838 - protein, 331 aa, unidentified
MNTRAASESAREVIVGIDVAKAKLDIALKRPAGKWKSKVVPNTAVGCEQLRLWLSKNDVTCAHVCMEATGVYWERVAQDLVDHGFAVSVINPAQIKDFAGAMGLRTKTDAVDAKLIAEFCASRAPAVWQPPSKSIRRLRALVGRRDALLDLRTQEKCRLEVAATEEVRSSIEQVIAHLNEQIVQIERQIAKDVDDDPTLRQQRDLLASIPGIGDTTIAMFLSHYGGELRFEKTRQAVAFAGLDTQKHESGSSVRGKPHLSKKGHSAIRRALYMPAITAMSRTVWGKAFSSRLLAAGKPKKLILGALMRKILAIAYGVLKSGTPFNPALHGG

SEQ ID NO: 385839 - protein, 413 aa, unidentified
MEVWLGGTSCLISEGGGGMDSLWVGIDVSKEFFSVAGIDSGGNESFSGSYSMGFNGFGEFLKTITSHCEDLSKVIIAMESTGCYHINLYSFLTSQEIRTMVINPLLITNYAKLSLRKTKTDKKDARTIAKFLLDHQQEISQLSVSQDLQDLMDLARERESLCHLISATKVEIKRVLRTTFPELESIGDLYTRVMLRLLQEYPSARLVRAAKPKAIAKALKQPYVGDKLSFSAEDILRAAQRSVATVSPAKEIILRGKIATLLHLQERLDEVTKLLTDLCKRTRVEDLKILRSIKGVGPKTAAPFLAEMGEVNNYSSHKKIIAYAGMDPSVHQSGKFIGMSKLSKRGNRHLRRAIYLMTASVVSKNTFFKAYFLKRKREGLAPQKALFATAHKLIRVIFAMLSQRTYFKLKEAL

SEQ ID NO: 385840 - protein, 312 aa, unidentified
MEKLSYGGIDVSKDRLDVVVLPEGWFFSVSNDTAGWAELVARLRPLAVCAIGLEPSGGYERGIIRALLAAGLSVRRINPNKLRQFARARGVLAKNDRLDARLIAEYVAIMPTRVVQRDGAVERLAEVVTMRRQLCDEHVAVENQAAHLQDAMLRRLSKRRLVRLEADIRLLDKRLAEMVATNAAFAQLYELLTSMPGVGPVLAFTLIALLPELGKMSRKQIAALVGLAPYDFDSGKLRGHRSIYGGRMPIRNVLYMAALSASRYNPALKTFSNRLAHANKKSKVIIVAVMRKMITILNAMLRDNAAWQPRSA

SEQ ID NO: 385841 - protein, 356 aa, unidentified
MTSNIKYIGMDVHKESISACVRNSVGKVVMECLIETKASMILQFIDGLRGDLQVTFEEGTSAAWLYDLLKPHVTKLVVCDPRKNKSMREGNQNDKIDARRLAELLRVDHLTPVYHGEHGLRTLKELVRSYLTITKDLGRVMTRVKAIYRSWAIPCTGKQVYARCHRAEWLGKITEPGVRRRAEFYYQQLDALRVLRQEARRDLLAESKKHKAWKRLCEIPSIGPIRAAVLLGILQTPHRFRSKRPLWNYGGLAIEMHSSADHRRVDGQLQRSRKNVLVRGLNRNCNHDLKNLFKGAAAVAFSKPGPFQEFYTALVAKGMRPEMARLTLARKIATIVLIVWKKGVCFDANHLKPQTA

SEQ ID NO: 385842 - protein, 454 aa, unidentified
MPRRQRRTTRAVTTPVLHPHAAGIDIGATELYVCVPLDRDPQPIRRFGTFTEDLRAVATWLTQCGVTTVAMESTGVYWIPLYQILETRGVAVCLVNARHVKNVPGRKTDVQDCQWLQYLHAVGLLRASFRPPETVCAVRSLLRHRDSLVQLAATHTQHLQKALTQMNLQIHHVLSDITGVTGLAILDAILAGERDPQVLAGHRDRRIKASSETIAKALVGDYRSEHLFTLRQSLVSYRHYQQLIGACDAEVRTHLGTFASQIDPAVSPLPPSTGSRRTPRSTPSSPRFDLRTELYRILGTDLTQVPGLQTPTVHAIFSELGADLSAFPSGAHFASWLGLCPDNRISGGKVLSVKTRHVKHRVAYALRLAAQSLSRSQSVLGGFFRRMRAKLGAPKAITATAHKLARIVYHLLTTRQPYEESRLAAAEADHRRRTESRLRAQARVLGFQLVPVIE

SEQ ID NO: 385843 - protein, 411 aa, unidentified
MRGQIWEPIDSLDVHKETVVACLRLVADGKVTTEVRTFQTTTADLLRLSAWLAENECTHVAMEATGVYWKPVWHILDDGDFVLVLANAAHVKNVPGRKTDVNDAMWLAELLAHGLIRASFVPDSQTQEMRNLLRTRKQLVREQSSHVLRVQKTLEDANIKLDSVLTDLMGKSGRAMLEALIAGETNPAKLAGLADRRVKASPEEIREALRGRVTKHHRFLLRLHLNQIDALDAAMTTVDAQVEANLGPFRTAVEQIISIPGIKNLGAHVIVSEIGIDMSRFPSAAHLLSWACICPRNDESAGKRRSNRVRKGAVWLKTTLVQCAWAAVKKKGSYLQAQFYRIKARRGPKKAIMAVVASILTAIYHMLKDGTMYKDLGREHFVRRSTDQQKNRLVKRLADLGYTVAIKPIAA

SEQ ID NO: 385844 - protein, 323 aa, unidentified
MTCVIGIDIAKHTFDIAKPLERDKYRTKAKVANTPEGFKQFDQWLEKHAEPHCWVLMEATSVYHEALATHLHQQGYQVCVINPARIAKYAQSELRRVKTDKTDAKLIARYAQRHLEELRPWEPEPESIRQLRGLVRRLADLKELAQMERNRLDVSAESAQASIRIHLEHLDGQIALISKAINDHIDNDPGLREQKQLMKSIDGVSDGTSALLLAELGNPLRFDSARQMVAFCGLNPRLQESGRYKGKTIISRTGSGRLRAALYMPALSAMTYNPVIKAMKVRLAERGKTGRLVVCAAMRKLLHIIYGVLKSGQPFDPIRALAH

SEQ ID NO: 385845 - protein, 475 aa, unidentified
MNGKGRKAKKQANLNNSMNVLSQEELDRRSAAIESGMKALTWRDLEIGGKFTKNDKLTFISEDMLILGCDVGSDFHYIRAIDVRGRELSKEAFKFSNTAEGFQSALTWAKQIAAERNKNQIVLGLEPTGHYWFCLTAWMITNRISVVQVNPYAVKQTKELEDNSQLKDDRKDPKLIANLVKDGNYGMPYLPEGIYAELRRLSTLKDQLTEDRIRNLNRLHREMKMCFPEYLDAFGKLDGTFTLEALRKAPVPEDILALGAEGLRKLWHEARLKGRGYSRADQIVKLAAESIGLKQGTEGSREAVRWFVEQILSLGKELDRIEKKLHEKCREIPCAENLLAIEGIGENILSGIMAEMGDVSRFDDAKEIQKLSGLGLVACSSGKHKGETKISHRGRKRLRYWLFQAAKSAVSHAEEFKILHVYYTTRQENPLKKMQSLIAIACKILRIIYTILRTGQKYDPEKMLKDIKYPNPAAA

SEQ ID NO: 385846 - protein, 359 aa, unidentified
MNATTMAVDLAKNVFEIAVCDANWKLVERARLTRGQFERGFHNRAVGQVVMEACGSAHHWARWLQGQGIAVKLLPPRYVRPYVKRNKTDAADASALLEALRCSEIAPVRVKSLEQQALQSLHRMRSAWMSTRTSRINSLRGFCREFGIAISEGARVGTEQIARVLADPDSAVPTLLRETMRLVLEEVRLLEARITQLEQQLSSVARESTACQTLLSVPGVGLLTATAMVAATGGNVAHFKSARHFASWFGLTPKEHSSGQKRHLGRISKRGDRYLRMLLTHGARSVLRAALLTQRCGKPLDPLRTWALALHSRTHHNKATCAVANKLARICYATLRDQQPFTGTPTTRKSGRSSYAAAN

SEQ ID NO: 385847 - protein, 347 aa, unidentified
MKHYVGLDVSQKEVSLCVVDGDGAVIAEGKVATDPALVLSWIEDRVGAVERIVHESGPLSIWLTRALARLGAPVVCIDARAAHKALSARMNKSDRADAEALAQLARTGWYREVHIKSEASDRLRLLLGARERMIRIRQDIEGQARGILKTYGIRLGPVAQSRERAGFREQLQAAASGDPLIEAVAASLIAVHDTACAEAATIEEELQAIARDSALARRLMTVPGVGPMVALNFIATVDDVKRFAKATDVGAYLGLTPRRYQSGEVDYSGRISKRGDGAMRALLYEAASVLINRVQRFSPLKAWAVRLAARKGFKKAAVAAARKIAIVMLRLWRDGTTFAWTREELPA

SEQ ID NO: 385848 - protein, 402 aa, unidentified
MNAVGIDVSKGKSMVAIMRPFGEIVSAPFEIKHTASGINSLVELINSVEGESRIVMEHTGRYYEVLAHQLSEANLFVSAINPKLIKDFDNDSLRKVKSDKADAVKIARYTLDKWQNLKQYNVMDELRNQLKTMNRQFGFYMKHKTAMKNNLIGILDQTYPGVNTYFDSPARSDGSQKWVDFASTYWHVDCVRKMSLNAFIDHYQNWCKRKKYNFSQSKAEEIYGKAKELVPVLPKDAITKLIIKQAVDQLNSASTTVESLRTLMNETASKLPEYPVVMAMKGVGTSLGPQLIAEIGDVSRFTHKSAITAFAGVDPGVNESGTYEQKSVPTSKRGSADLRKTLFQVMDVLIKTHPQDDPVYQFLDKKRAQGKPYYVYMTAGANKFLRIYYGRVKEYLSSLPES

SEQ ID NO: 385849 - protein, 467 aa, unidentified
MAASKRFKRLWGNGKERKEWARRLQSEDPGLEVVHPHAAGIDVGNSAHYAAVRPDRDVEPVRRFECFTADLYRLADWLRSCGVKTVAMQSTGVYWIPLYEILEERGFEVYLVNARHTKNLPGRKSDVQESQWLLKLHTYGLLSNSFQPSAEIRMLRTYWRQRGTHVAGAATCIQRMQKALTQMNVQLANVISDISGLTGQAIIRAIIAGERDPYKLAALCDPRIQASQDEIASSLEGNWRPELLFILQQEVEMYDTYQRRVAECDERLQKHLASFADTLSVRATMDKPKRKKAAKNAPHFDLSSELQRITGVDLTRIDGIDVMVSQTILSEVELDMSRWKTEAHFASWLGLCPDNRISGDKVLGKGTRRVVNRAATALRQAANTLIRSRSYLGAQYRRLRTKLGAPKAITAMAHRLARLVYRMLKYGQTYVDKGTEYYEERLRQQQIQLLRKRAAKLGLHVVMETQA

SEQ ID NO: 385850 - protein, 357 aa, unidentified
MREYIAFDSHKRYTIMERENQQTGVARQRRIEHAPGAICGALRDCEPGTPVAVEATGNWYWIISEIEQAGLRPLLVHPRKAKLMMGLINKTDQLDVHGLNRLQRNGTLPTVWIPPAELRDLRELTRVRMVLAAQRTRLKNRISATLAKYGLAVTAASDPYSQKGREQLLGLLGQLPPQTQWAARTLLAQLDFIEGQIREQEQRVKALIAVTPEMRLLMSLPGVGVILAAVLWLEIGNVERFASAEHLASYAGTTPRVHASGGMVRYGRLRPDVNRYLRWALVEAGNSVAVNHLRCPQRHVSELYRRLKTRKGHAKAIGAVARHLAEATYHVLYRNEPYQEPSVCAGALQGGVSAGLS

SEQ ID NO: 385851 - protein, 344 aa, unidentified
MTYYAGLDISLRSANICVVDNQGELIAEGKTDTDVANIVAYLDELDVEITEVGLEAGTLTQYLTYGLQFAGYEVICMEARQVKSALSAMRNKTDKHDARGIAQLLRSGWYSRVHIKSMESHRVRALLTSRKAVLTKCIDLEQEIRGIFKIYGIKLPPRLGHGSFDPHVRPLIEADEVLSLSLLPMLDARLVLYRTFRELDNRTRKLALSDPICQRLMTAPGVGFVTALTFKAGVDDPARFKHSRTVAAHFGLTPRRFQSGELDLEGHISRCGDASVRATLYTAANAMLTRSSKWSSLKAWGMQLAKTRGHRRAVIAVARKLAVILHRMWIDDTQFRWGTEAARS

SEQ ID NO: 385852 - protein, 352 aa, unidentified
MIIIGVDYHPEFQQIALLDQDTGELQEKRLSHPGEAEKFYRALAVSQKVRVGMEASGHARWFERLLGELQFELWIGDAAAIQSQRGRKQKTDRQDAEHILKLMLKDDFPRIWVPSGENRDLRQLLWHRHRMVQARTRIMNQLQAVAINEGLRCKKRLWRTGRQQLALLRLAPWASRRRHDLLELLDRLNPTIAELSQAIEQEAAKCAEARRLMTHPGVGALTALAFVLIIGDTERFQCGKQVASYLGLVPLEKSSGNRRRLGHITKQGNSLLRFLLVEAAQVTVRSLPEWRSHYFHLLMRRGRKTAKVAMARRLGVDLYWMWREQRDYQSKSSVRTQDSPEQAMVCNRTPRN

SEQ ID NO: 385853 - protein, 419 aa, unidentified
MDNNLNKVCGIDVHKKFLVATMLCRDGTSTTERFSSSPQELFRFRDWVIENGCQRVAMESTGRLWIPIYVVLEGSTEVILANPYKIKHTPGKKTDTKDSEWIAQLCLNDMIDPSRIFPKGDRELRDLTRARESYVRDLTKLKNRVHQILDSGFIPISSVISDLFGKTGMYILHCLVMGKTTDEIIEHLPATRLLKKSDQIREALLCKLTEAQLLLLKGILEIMASIEKRIADIEKEIVSRIRHRRSHLKIIMSVPGIGFIAAVTILAEIGNFMDFKKPEQLAAWAGLVPSVYQSADKLVTGKITKHGSRHLRWILVQVAQSIAHLNNSYLKTFFLRIRGRKGYNVAIVAVARKLICILHHLLVNNEPYIENGVSPERKISFQGRIMTLDDFLNQMDTIVNMNRCKFSIGWMDMGGSNVD

SEQ ID NO: 385854 - protein, 349 aa, unidentified
MPIVADSYRFVTGVDTHARTHTLAILDTALKGQVDAAAFPATAAGCARAAAWLTRRTNDPSGVLVAMEGTNSYGAKLRQHLTTSGYRVVEAPAPSRSRRRLKGKSDRLDALHAAQATLPLASDRLNEPKAGEVVTALRILSAASEAMTRQRTAAINALTALLRSVELGIDARKPLTQNQIQEVASWRARQEGIAARVSRNEAVRLARLIIALRTLLAENAEQSTELVTDLAPQILDLPGVGGVNAAIILSSWSHPGRIRNEAAFAALAGTCPIPASSGNTVRHRLNRSGDRRLNRAIHSVAIVRMRCDSRTKAYVARRTQEGRTKKEITRCLKRYITREIYKTLNRPQA

SEQ ID NO: 385855 - protein, 415 aa, unidentified
MALKIVYKICCGIDIHKNFVVACIAKTDMQGVTTYERHHFSTYTKGLKQLLKWLLDRNCKDVCMESTGKYWIPVYNVLEHDCSIVLAHPKYVKAIRGKKTDKKDAKWIADLFKHDLVAGSFMPPADLSHLRDLMRYRFKLPCFKSSEKNRYQNCLTVSNIQLGNVVSDTFGKSSQKIIAKILENPDDTSFDIGSLIHGSMKDKLPELELAIDGYITPEQAAKLKIIKEHFDNLEARKAELEELTLALANPYQQEISIILTAPGFKNTFTAIGIISEIGTNMEAFPSAKHLCSWAGLTPTNNESAGKKKSVRVSKAGCYIKPLLVQCANAAIKSKKHPEIRDRYLRIKKRRGHKKAIIAIARMLLTALYHMLKNGENYNSDLYQKSDILPITREITVEQAILMAQFQGYRIKSATE

SEQ ID NO: 385856 - protein, 370 aa, unidentified
MVIDGDGQRLLSRRVANDEAALLELIAAVTTLADGGEVTWAIDLNAGGAALLITLLIAAEQRLLYIPGRTVYHAAGSYRGDGKTDAKDAAIIADQARMRRDLQPLRAGDDIAVELRILTSRRTDLVADRTRAINRLHAQLLEYFPALERAFDYSKSRASLVLLTGYQTPDGLRRAGGARVAAFLRKRKARNAETIAATAIDAANAQHSIVPGQQLAATVVARLAEEVMALDSKIGDTDAMIEDRFRRHRHAEIILSMPGFGVILGAEFIAATGGDMAAFASVDRLAGVAGLAPVPRDSGRVSGNLKRPRRYDRRLLRACYLSALASIRSDPASRTYYNRKVRHEALDVRGEVEDLRRLAVAAVGLKLGAA

SEQ ID NO: 385857 - protein, 343 aa, unidentified
MQSTKADELYAGADLHGNNVFLSVCNAQGKSVFRRRVQNSLGAVDEALVPYWPDIRKIGIESTYNWYWLVDGLRDLGHNATLGNPAQMKQYEGLKNTNDASDADWLAEMLRLGIFPESYIYPRETRSVRDALRRRQMFVRRRTQAMLSLQSLLARYGADAPGARHLLKWTQRDVEATGLDMFVQIQLLTLLEATRTSDRLAGEIEQAVMAFLKPMKELDRIRQVPGIGATLGMMILLESGEFARFPNAGRYASYCRAVKSERSSNGKSKGQNNKRNGNPYLAWAFIEAASFAPRFYPEIQSWYDRKKKQRNAIVARKALAAKLAKAVWHVMNAEGFKMEMMFG

SEQ ID NO: 385858 - protein, 462 aa, unidentified
MTGKHEGERWESNRRELQGLPVIRRNVAGIDLGSERHWVCAPTPDGSGREIANFGATTAELIRLGEWLKARQVESVAMESTGVYWIAPHEVWEAQGFEVLLVDTRQLARVPGRDKKTDPTDCEWIQRLHSCGLLRGSFRPEEAVCMLRTLVRDKANLVAERGDWLRRMQKSLDQMNVRVHRAVSDIDGATGMAILRAIAGGERDALKLAKLRDPRCSKTEQEIAEQLSGHWREDHLFSLQQALKMYDAVEEQIAAYEQEILRKLGEMERAEQRGQTAPPLKNSNKANMIKKRGQEPTRQALYRMSGVDATHIDAIGVETLEVVLSEYGPDLSRFPTEKQFVAHVTLAPHVPTSGGKPLRKRKRNSASTRVAAALRMAALSLRHSQTALGAYYRRMAQRLGGDIAVFATARKLATLIYRLLRWGQPYVDEGAKAYEARYHQQRIGRLAATAKQLGYQLAPINT

SEQ ID NO: 385859 - protein, 416 aa, unidentified
MVSRGSGWKLLFVGDDWAEDHHDVCLQDAAGRVLAARRLPGGVAGITRLHELVAGHQDGDDPSQVVVAIETDRGPWVRALVAAGYRVYAVNPKQAARHREVVAVSGKKDDAFDAAALADMGRTRRHQLREVAADSDEAEAVKVAARAHQKLVRERTRQALRMRSALREYFPAALDAYAPLTLTGPDTLELLAKAPGPAAAARLTIAQISAALKRARRHDVAGKARQIRAALREQHLGQPEIVTEAYAAGVRASAAVITVLNEQVKVMEAMVESLFRRHPDAGIYLSQPGIGVITGARMPGEFGDAPGRYADARARRNYAATSPLTIASGKKKTVHARFIHNDHLVNAMHDQAFAAISASPGARAYYDELRSREIDHTGALRRVANRQAGILHGCLKTGTGYDEHTAWGHRSQPAAA

SEQ ID NO: 385860 - protein, 331 aa, unidentified
MNYFGIDVSKKKVDCAWLRDPVTGKIKTRVFLNTPQGFQQLLKWSLAQTHAVVEELHFSLEATGVYHEALAHALHEGGAQVAVLNPLQVKRYAESLGRRSKTDKNDSVVLARYGATQQPRRWQPEPMEIRTLKALIVRLEAVEKDLQREQNRQEKAEISQASLDIITSIETMLGHLGEEKKRLLQRINEHIDRHPGLKSDQQLLESIPGVGPVVGRYLMALLRSRVFDSASQAAAYVGLVPLHHQSGSSVCGRSSISKTGNATLRAKLYMAAVVATRHNAVIRAQYQRLIKNGKAKMLALIAAMRKLVHICFGVLKHQTPFQTQTPAETGA

SEQ ID NO: 385861 - protein, 442 aa, unidentified
MRKMYKRVAGLDVHKKSVVATRMRITAEECVEWETETFGTTTPELLELHDWLQEWDSSHVAMESTGDYWKSVHNLLEDSFEVLLVNAQHVKRVPGRKTDVSDSECLAELQMHGLLKASFIPPKPQRALRELTRYRTRLIQERARTVNRVQKLLEGANIKLASVVSDIQGVSAQAMLTQLANGQQDAQVLAQLARGRLRKKIPELQKALTGLVQPHHRFLLAQQLEHIDFLDEQIAEIGAEIARQVEEMSSPPEPPEDCGTGSSTAEEPSQRESVTWDKAVALLDTIPGIDRQIAEMILAETGVDMRQFPTANHLAAWAGVAPGNHESGGKRYSGRTRKGNRHLQTILVQAAWAAVRTKDTFLKARYHRLAARRGKKRAIVAIAHSILVSIWHMLSQAVVYNELGADYFNQRNKEAKVKYLTRQLEKLTGGEVLVTTQSAAAR

SEQ ID NO: 385862 - protein, 417 aa, unidentified
MKKHNNSAMKSEPTSKRAKSRGPVQRDTKEALAELVETLRKKLDPKVEAGSTGEEDRRGKFRPNLDRLTVGVDLGDQWSHYCILGLEGETLAEGQLRTTPQDVAEFFEALNAARVVVEVGTHSAWVQEVICGYGHEVLVANPRLMEGSKRRKRKNDRIDANKLARLGRVDPQSLHPIQHRSREVRQDLVVLRARDALVAARTELINATRGLVKSMGTRLPKSSSPSFAQKVEEAVPVEIREALLPLVRIAAALTDCIQGYDEKIEKLGREKYGHTALLRQVKGVGPITALAYVLTLENPKRFAKSRDVGPYLGLVPKQEDSGESQPQLGISKTGDTMLRKLLVGSAHYILGPFGPDTDLRRYGLRLCERGGKNAKKRAAVAVARKLAVLLHCLWVSGEVYEPLRQGMSATIAPAVAA

SEQ ID NO: 385863 - protein, 417 aa, unidentified
MKLSNTEFTAFVGLDWADAKHDICVQAAGCEEREFGRFPHQVAAIEQWARSMQQRFGGRIAVALELTKGPIVYALQKYDFFVLFPINPSMLAKYRQAFKPSRAKDDPTDAELALDLLLRHRERFQPLKPQSVPMRKLCMLVEQRRRLVGDKTRCVNRLGNALKQYYPQALQWFEQRDTVLFCDFITRWPTLLQVKRARKATLTAFFKAHNVRFERVIETRLCAIKAATALTQDVAVIEAHRLQAEVLVEQLRVTLKAIDRFDDAIATTAAKLPDYARLFKPLPGAGPVLAPRLLAGFGEDRQRYAGAEEIQQYAGVAPVTERSGNKTWVHWRWQCPTFLRQTFVEWAGQTVNKSFWAGAYYRQQMDKGSSHQAAVRALAFKWVRILYRCWQTRTPYDESKYLEALRRRGSPLLKQLG

SEQ ID NO: 385864 - protein, 509 aa, unidentified
MAQTKRSRKSRDFSTVHPAAAAIDIGATIHVAAVGPDRDMEPVRTFRTFTNDLHRLADWFAGCGVKTVVMESTGVYWIPVFEILEQRGFEVMVVNARDAKHVPGRKTDVSDAQWLQRLHEYGLLRASFRPQAEIAGLRAYLRQRERLLDHAAAHIQHMQKALTQMNLQLHHVISDITGVTGMAIIRAIVAGERDPTVLASHRERGCHASIGTMCQALVGNYREEHVFALTQALELYDVYQTKVAACDKQIQAILTRLKQNATPPANKLLPARRTTRQPNAPAFDARAALHAILGVDLTQIDGLGPYLALKLVGECGTNLTAWPSAKHFTSWLALAPHNKISGGKVLSSKTRRTSNRAASLLRLAAGTVGRTDTALGAFYRRLSARVGKAKAITATARKIAVLFYSMLRHGMTYADPGAAYYEADISSACCTTFEDGRSHWDSPCTKWSRIPHGLVFLRKLRRPGSRGVAGLCGRQASGGVVPGRSQGRPEGVAPLPVGADRLTAACGTR

SEQ ID NO: 385865 - protein, 405 aa, unidentified
MHYEELFVGIDVSKYKHDVAVMTADEKRLGKTFSIAESAAGFNQLVAKLLHLRERYGTKRFYIGLEATGDYWKNLYHCLRNQSEAWHVTVINPFQTKHFAKSELRRAKTDPVDAQDIARFMAQKRPRATACRNMISDAIKDLDKQIYYYQKLRTMAMSKLRIELAKVAPELEQATRVIAGSQILALLASYPTAEAIALASESELRQVRYSPREYRLPQKFVKELKMLCENSIAYKKGVGSGYVVQSLVRQILECQKEVKLLKTNIKELYLCINESESLLATIHSIGKETAIVLEAYIGDVQRFPSAKQMVAYFGMNPVVSQSGKSRGTSRLEKKGSGLVRHKLFMAVLNMIRTKAEPIYSYYKRLVDAGKPKLVAICACMRKLLVIIYTMLKKQQPFDPKKNENG

SEQ ID NO: 385866 - protein, 410 aa, unidentified
MKLFCGIDWAEAHHDVAIIDGDGHLVAKKRITDDPEGFAELIEVLTAAGDEAEDPIPVAIETPRGLLVAALRATGRAVYAINPLVVARYRERHSVARSKSDHADAMTLAHILRVDAHLHRQLPKDSELCQAIAVLARAHQDAIWARTKAHNQLRSVLREFYPTFLAVFTGRFALGISSPEARAVLGIAPTPAAAAKLSVRRIAAALRRAGRSRNIDPTAADLKAALRKPQLRQPVLVETAMGRQTVALLAALDTACASVVDLGRAAAESFQAHPDYAVITSFPGLADSTGARVLAEIGDDRSRFVDARALKAYAGSAPVTRASGRSISISHRRIKNDRLANTGWVWAFAAATHCEPARLHYRRRREHGDRHAAANRHLFNKLLGQLYHCLQQGSAFDEAKAFAQTVDAAA

SEQ ID NO: 385867 - protein, 397 aa, unidentified
MYIVGIDIAKRKHEAAVIDGEGTVIIKPFSFTNNCSGYNRLLAMLAKAKLPLDEVSFAMEATGHYWLALFTRLQKEGFRVQVINPVQTNSIRSFYIRQAKTDPRDALLIAEVIRFGHFSESTLHPENIYELRELCRGRHAIVSMQADVKRKVVALLDQVFPEYETAFTNLFGDTSMAILQTCPTPKELSEMPLEELCHLIEVPSHKRFRMAKARELQALARNSFGFAMAGDVFSTMIRLYAKHLVFLKQQVQEMDRKIAEIMDTLDTPITTITGIGPTLGAYILSEIGDISRFSSAAKLAAYAGIDPTMRQSGEYNGVRNRMSKRGSPYLRHAIWLAASSAVLHDPALKLYFQKKRDEGKPYMASVGHACRKMVSIIYAVMRDNKAYTPCIQNEISA

SEQ ID NO: 385868 - protein, 348 aa, unidentified
MIAIGADVHKQQCTLAVQRPDGKLSMLPSMENTRENWLDLLTQLPPEAQIAREVSTSGHFVMSVLEEAGWRDRAHWVHTAGIDSLRKQKTDRLDAQRLARKLSVMEQDPLPEAWFPPRPIRELRLRARQRCWVAVLRTRVKNRVRSLLQMSGRCAGTNPFTAAGRTWLKEQKLSEATRESVEQLLRFHDFLTTEREKSETSLRGMEKDFPEIARLQTLPGLGHILSAVIWSEIGELKRFDSPRALVNYTGLAPSLYESGERSVRGGITRQGPVWLRWALITAVNAATHGQNAFARRYRRLRRHKLPNVAKTAVARSIARCAYGVLKHGVDYQEQRWGRKAGIEMEQEA

SEQ ID NO: 385869 - protein, 316 aa, unidentified
MAEQETFVGIDVSKDRLDIASCPTGGCWSVSNDDAGIATLVAHLEAHPPVLVVLEATGGYETLAAGAMVAAGMPVAVVNPRQARDFARSMGYLAKTDPIDARVLARFAQAIRPEPRGIPDEEMQLVRALMARRRQLTEMITAEQNRLKLSKEPVRGRIQKHIAYLEEEKAAVDKELAEHIRRTPAWREKDDLLQSVPGIGSTASCALIVELPELGHLNRKKIAALVGVAPLNRDSGRWRGTRGVWGGRAHVRSILYMATLTAVRYNPVIRAFYQRLLAEGKATKVALTACMRKLLTILNAMVRTHTRWSPKAFARQ

SEQ ID NO: 385870 - protein, 375 aa, unidentified
MHYVNNTELSSHEETRCQFNGGPGAIKFAEGRIRPVCGLGIDVHQDFYVVVEQMGGSNPKPPQRFQKEAFLHWAARLKKKSGAQVYAVYEACGFGFSLQRKLSALSIKCYVVCPQKLDEQNRRVKTDGLDAKALCLKLDRFVQGNRDALAIVRVPSEEEEQARAIHRQREQLVKARKQLEAQGRSLMVNHGLEPVQNWWKPRTFTALPAPQWMKELLANSQPILVALQQKIVALTVQLRSAASPDQPCGLGKMTSVIIDREIGDWNRFNNRRQIASYTGLCPGEYSSGNTRLQSCVTKHGNPRLRAALVELAWRLVRFQPNYKPILKWRATLAKGALATGATRKKAIVAVARQLAVDLWRIKTGRLRAEELGLIN

SEQ ID NO: 385871 - protein, 442 aa, unidentified
MGTQSTYTALTDYRGGTAPAGSRLYVGIDAGRRQHVVAGIVLERMENGSWERAAVHRIHTTGEGFRDLIAWVEAFGHTPTQVRIGCEPTGLWCAETVVAWLERHGYEVQWLQTWALHERRRLAIGKQTKTDALDARLIARLLYEREFHAQNRGFLKTGPRSTDGLRLLVRSRVRLIEQRTRLRLQLTNVEDALFPELKEYFKSSITSPAVRRLLEAFPTPKSMAGGPPEDVYRVLVVQGRSRIHAARVNELRQLAAESAGLLEVEPILHAQGWLLRQLNAVDEQIEDLERSIVSALQSWPAEQRAVLASFPFMSQMRQAVLFAAIGDVNTFRDDGQLRKLLAWYPEARESGTTVSTHRLGDSGNRLGRREVWFWAMQLITPRQAATPFAAYYRRLRTRGVTGHAAVGHLAGKLISVLFFCLRSSRPYDPVQHARALGLGDAK

SEQ ID NO: 385872 - protein, 359 aa, unidentified
MSELTFIGLDVHARSVAAGILEGSTGEVHGGPAPVVVDELVSWLRQQGESVSVAYEAGPTGFGLARACSAAGIPCLVAAPSKILRAPGERVKTDRRDALRLARLLRLGELTAVRVPTPSEEAARDLVRAREDARGDLMRARHRLSKLLLRQGLVWEAKAWTQAHERWLATQRFEERGLALAYEEGLAALSSVRARRDALDRAICEEAAKEPWAGVVGRLACMRGVSTLTAFGLATEIGDWQRFDGRSIGAYLGLVPSESSSGERRRQGAITKTGNGHARRLLVEAAWQQRRPSSHPSRELMRRREGQPALVRERAEAAGRRLQRRWRRFDARGKRSTVAAVAVARELAGWCWSLAIMED

SEQ ID NO: 385873 - protein, 464 aa, unidentified
MAGKSKNMKSGNRKRVPQSLNVIQPNAAGIDLGSQEHWVAAPPLEDGTPNVESFGTTTPELFRLADWLKEQSVVTVAMESTGVYWIPIYEILESRGFEVLLVNARQIVNVPGRKTDIIDCQWIQILHACGLLRGSFRPSDEICRLRALIRERNTMVEQRSDWVRRMQKCLDQMNVCVHHAVTDITGVTGMAIIRSIVEGERDPQVLAGLRDRRCGKSEDQIAKELTGNWRSEHLFNLRQTLKMYDQLRAVIEEYDSEILSYIKAIQPEETAEKSAPPPVSKAKTKNLIKKGQEPMRQALYGLSGFDLTTIDGIGVDTASVIISELGLDFTVFPDERHFVSYLRLAPNLSISAGKKVPGKAKATTCTRVAKALRMAALTLKNSRTALGAYYRRVSRRKGASVAVFATARKLAQLIYRLVCYGQAYVDVGQEAYEARFNQRRLNVYTKILKEMGYNLQPATDHEAM

SEQ ID NO: 385874 - protein, 278 aa, unidentified
MYSIGVDFHKAYSHMTVMDAQGQVVRVGKVSNTVEAVHAFVAPYRDDAQAVLEATRNWTVMYDMLEQELRAVYLAHPLKVRAIAEARIKTDRIDSKILAHLLRCDLLPTAYVRPREQRVSQQILRQRMFMVRVRTMVKNRIHVLIDRQLDVREVAMQFSDLFGGAGLAWLRTVGLADIERRLLNAELALFEAVQERIAESDSLVRNLAAGDPRVRWVRTIPGFGRFFAVLVVHEIGTIRRFSTPEKLSAYAGLVPSVHASGGKVFHGLCRSETSWANR

SEQ ID NO: 385875 - protein, 403 aa, unidentified
MNAAGIDVSKGKSMVSVMRPLGEVVAKPFTVCHTGSELKELADYLKSLDGETRVIMEHTGRYYEPVAQFLHDAGLYVSAVNPKLIKDYGNNSLRKVKTDKADSKKIAKYGLDNWGELRQYASMDTIRYQLKTLNRQHTLYTKMKTAMKNNLIALLDQTYPGVNALFGSPAREDGTQKWVDFAASFWHADCVRGMSQATFTERYRKWCKRNRYNFSSDKAAEIYTGAKDQIAMIPKDDLTKRLIRQAIDSLNTVSKTVEQLKAEMLKLASQLPEFPVVMEMHGVGDSLGPQLMAEIGDVTRFAHRGSITAFAGVDPGANQSSEREAKSVRTSKSGPPELRRTLFLVMDGLLKSMPQDDPVYQFIDKKRAEGKPYLVYMTAGANKFLRIYYGRVKEYLASLETAD

SEQ ID NO: 385876 - protein, 328 aa, unidentified
MDAPASARIFTSMSQTNKNIIYAGIDVAKRTLALDGPGGRCLLANELGGHRGVVKLLGKSIEPVHVIVEASGGYEQGLVRALHEAQLRVSVVEPGRVRAFARAKGLRAKTDPIDAGVLRAFGEAIQPEPTLPPSQEQLRLGELVTRRSQLIDSLVAESNRSAHYRDALLRHQATAYRRLLQRQIEQCEETIAQLIAADPAMEQRSLRLQQVKGVEAITAAILLADMPELGSLRDESAAALAGVAPYNDDSGPIRGIRRIRGGRASVRRALYMAALSAVRHDPVFQRFYQRLRSAGKKPLVALVAVMRKLIILLNRLLKNPALVLQHAT

SEQ ID NO: 385877 - protein, 368 aa, unidentified
MLKQSHYKIGCDAHKHYSLFAVLDHRGWPVEQTRVNHEPGAIRAFVSRFPPGTPVALETVGNWYWIVDEIEQAGCVPLLAHAQMAKKMMGHVHKTDKLDAQGLAILQHLGSLPTVWIAPGEIRDERELPRTRMALSKVRTALKNRMHSTLAKYALSLGTQSDIYAPKWRPQLIELVRSLPDETRRCMEQELELLDQVQEQIHRLEARILERVQMTPTIQLIQSVPGPAEILSIVIDREVGSIDRFPSPHHFASYSGLVPKVMASGGKTHYGKMIKAANNYLKWAFIEAANVIVRQQHHPRWRQKYVVALFERTRQRKGHAVAVGAVARYLAEATYWVLKKGEPYREPVPQHPAGRKSAVSVKQGQVRT

SEQ ID NO: 385878 - protein, 348 aa, unidentified
MMIIGCDYHPSWQQICWLDTTTGETAEQKLEHASGEAEKFYRQLSGPALIGMESTGNCQWFVEMVRTLGHDLWIGDAAKIRASEVRQQKHDRRDAALILKLLLEKRFPRIWVPSGEEKDLRQLLIHRYKLVRIRAQVKNELQHLAMNQGVTRKNKLWSQKGERVLRELPLAPWASRRREDLLKVKGMLNEQIAPLDQAVADAALKDEKARLLMTQPGVGQITSMAFVLTMGDVSRFPRGKQVASYLGLIPREYSSGGKQRLGPISKQGNRFLRMLLVEAAQVAVRHDPGFRNEYLHRCHAKPKGVAKVAAARKLAIRLYWMLRTNRGYPEVVRVESSSRVPLVIRHGG

SEQ ID NO: 385879 - protein, 367 aa, unidentified
MKKVSTAVAKQSRNFSQQKLTIGLDLGDRSSWYCVIDESGTVQLEQKLSTTPKAVREMFGGLPHCRIALETGMHSPWVSRVLNELGHEVIVAHARSVRLIGESRKKDDRLDAQMLARLARIDPQLLCPVKHRSAKAQADLTVVRARAGLVRARTALVNTARGLAKSYGERLRGCNVRNMNPEKAEALSPELQTALEPLLAGIESLSERIREYNERIEALAQQSYPQVALLKQIKGVGTLIALTFLLTLGDPHRFRKSRDVGCYLGLQPGRRNSGQSEPQMHISKEGDPYLRTLLVQGAQHILGPFGVDCDLRRWGLKLAERGGRNGKKRAIIATARKLAVLLHHLWVSGEVYEPLHNSQPTTMTVAA

SEQ ID NO: 385880 - protein, 347 aa, unidentified
MVIVGSARSIVGGVDTHRDVNVAAVIDSNGGLLGVESFPTTPAGYRDVHAWMNGFGELDRVGIEGTGAYGAGLARHLMSQGVIVIEVDRPNRQQRRRFGKSDQIDAIEAARAVLSGRCHGRAKSGDGSAEAFRTLMVVKRSARSARIRTIVQLRHLTFTAPEALRERFRGLNAARMVDEAARLRPRAGGDPVVQTTKAAAVTLARRIQALDAELAALDAQIEPLVKAAAPALVNIYGVGIDTAAELLIAAGDNPERIRNEAAWAMICGVAPVPVHSGLSSSRFRLNHGGNRRANNALWRIAITRLGQHEPRTVAYMERRLADGKNKAEIIRCLKRAIARETFRALPR

SEQ ID NO: 385881 - protein, 338 aa, unidentified
MRLYCGIDLHSNNSVVSVIDDEDRIHFEKRLANDLAVIEAALLPYRETLVGVVVESTYNWYWLVDGLQASGFDVRLANTVAMKQYSGLKYTDDQTDARFLGQLLRLGILPEGYIYPKAERGVRDLLRRRLLLVGQRTAQNLSLQSLFARHRGERMKAADVKRLDTSRFSELFSDDAVKLAASTAVAVMDSLSRHIDELERYVRGHCRDMAYYRLLTSVPGIGVILGQTIALETGTIERFPKVGNYASYARCVKTEKLSNAKRKGQGNAKNGNRYLAMAFMEAAHYAAIWNPTMKRFYQRKRAKSPVMVAKKALANKIARAVYHMLKHQQPFDITRAFS

SEQ ID NO: 385882 - protein, 354 aa, unidentified
MLYAGIDYHKRYSQVHVVDEGGRTRASARLANDLMTVSRFFAGLGEPCRAVIEAGWNWGVMYDWLDTIENVSGVELAHPYRVRAIAAAQVKTDAIDAHTLAQLLRVNLIPRAYVPGSATRQLREVVRQRVFLVRMRTMVKNRIQALLARHHVPLPAVSDIFGKRGRDYLSKVQLEAAAQELLRQDLELLTALGAEIRATEKWLQRATQGDRRVELLLTIPGLGALLAAVVALEIDQIARFESPAKLAAYAGLVPTTYSSGGHTFHGGLIAQSNKWLRWALVEAAWVAVRLDPYFRTHFANRRAHKPAQSAIIATARRLLEVVWHVLKENRPYQSRPPAGSRGGLQTSSAAFATS

SEQ ID NO: 385883 - protein, 342 aa, unidentified
MTFVGCDLHTRMQQVAVLDTRTGEVSERQLAHDGSAVEEFYAACPGPVTVGIESTGYATWFHTLIQRLGHTLLVGDAAKIRAMVVRKTKTDRRDALHILDLLRHDRFPAVWVPDPATRDLRALLAHRMRLVRIRTMVKNGVHAIALNYRLARGSKLLRQAGLAQLHALALPPHTAQRRDQSLELLAGLTTQIRALDEAITTAALAHPDGPRLITHPGVGALTALATIVVLGPVARFHDSKHVVSYVGLAPALNASADKRHLGHITKQGSPLLRFALGQAAAHAARMDADLKRTYFTLVHRRGRPKAKVAVARKLLVRLFIMLRDQIDYDEFRRRGRPAPASA

SEQ ID NO: 385884 - protein, 360 aa, unidentified
MTTTPGSVIGGFDTHKDTHHAAVIAVTGQLLADRQFPATAAGHRSALEWMQSFGVVDAIGVEGTGSYGAGLARFLTAQGHRVVEVNRPSRAARRLDGKSDRLDSEQAARSVLAAADAVPKSKSGPVEVIRMLRIARSTAVKARTQTMNALQAIIVTAPEELRAMLRDLRKRTLITRCARLRPETAVLTGPASHPDRLLIAGAKTALRGLAVRWQTLDTEIKQLTDQISTLVQDTAPSLTALPGVGPEIAGQLLITAGDNPDRLRNEAGFAKLCGVAPQPASSGKTTGRHRLSRGGDRAANSALYLIAITRLRRHEPTRAYVARRTTEGLSKREIIRCLKRYIAREVYAALPTTAQRSLPA

SEQ ID NO: 385885 - protein, 358 aa, unidentified
MIGNTDIIIANVGVDIGKNAFHICAMNAKGTIVLRERLTRTALPKRLANILPCLIGMEACAGAHHIGRKLASLGHDVRLMPAKYVKPFLKGHKNDYRDAEAIAEAVQRPTMRFVPFKSDEQLDLQALHRVRSRLVGQRTAVINQIRAFLLEHGVPVRQGPGALRQALPSILAQRTDTLSSRIIRLIEGLIDDWRRFDQRIADVTSEVEQLAKQSENCKGLMSVPGIGPITASAMVAAIGDGSAFSKGRDFAAWLGLVPKQISTGDRTILGGISRRGNSYLRTLFIQGARSVLQRFEGWEKKSFGRWLIAASKRLHKNVLAVALANKLARIAWSVLYNARGYDATYAKSGMTTVAASQK

SEQ ID NO: 385886 - protein, 429 aa, unidentified
MNHSASATPPIVAWVGLDWADQQHDICLQASGSTDLEHAVVEQQSQALQLWVAELRRRFPQGAVAIALEQSRGALFYALMHYEFLLLYPIPPKALADYRRALYPSGSKDDPTDAQLLLEFLRKHPERFRPWVADDVETRQIALLSDHRRQLVDDGTALSNHLTALLKGYFPQALEWAGDLTAPLAWDFLAQFPSLEQAQRTSRVELLKLYRAHTRRTPEQLEALGVQIRTALPLTTDRAVIESSVLVVQTLLGQLRVVQAGVKGLERKLRDLFAAHPDQAIFQSFPGAGKALAPRLLAAWGSNRQRFEGADNMQCFGGPAPVTVRSGKTQWVHRRFACSTFLNQTFHEFAAQSRLHSPWAKAYYQQRREGGAGHHAAVRALAFKWIRIMFRCWKDGTPYDESRYQQALKLRGSPLAITLSRLATPPARA

SEQ ID NO: 385887 - protein, 344 aa, unidentified
MNVMIGVDPHKGSHTATMLDRDERELRRIKVRAGNGQVNELLAWADGDRPRMWAVESAAGMGYLLAQQLVAAGETVLDVPATLASRVRVLASGQSTKTDPNDARSVAVAALRAPSLAQVRAADHTAVCRLLVKHHTDLARWRNKLCCRLHALVAELTPGGISKEVVVNQARSLLDELTPTGAAAVERHRLALELVAEIEHLDTVLRASRTRITVAVAASETTLREVFGVGPIVAAMLIGYSGDPTRFTTAARYAAYTGAAPVEFSSGGRITHRLSRRGNRRLNHALHIAAITQVRNRHSVGRGFYERKLAEGHTPREAIRALKRRLSDIVWRHLIADAQRSTSR

SEQ ID NO: 385888 - protein, 340 aa, unidentified
MKYIGMDAHSQNSYFVVLSRSGKVIRREKVTTQEGTLLEFVRSVTGPKKLSYEEGVMSQWLYILLKDEVDELIVCQPPKSKGAKNDWLDAAEIADLLRVNRLKSVFHSDDVIMNLRVLISGYDDLLQEIVRTKNRYKALYREAGISIKYEDIYEDQEPLLQLDTEQRQLVGSSLYDQLQLLELHKQKYVKQLDQNVQSYKPVKLLRGIPGIGTIRANHVVAVMVTPYRFARKGNLVAYSRLTKHGRMSDGKLYGRRRSLGQPILKDAFRGAALSAIRGNNAFRREYDKQRTAGRNDKEARNKIAKMVAATVLGVWKSAKPYDDNYWEVTRKSNQSCCKHM

SEQ ID NO: 385889 - protein, 356 aa, unidentified
MSHHAMSAAIPNVTIGLDLGDRTSRTYEVSAAGECVREATVVTTVAGITRYFEQRPRCRVVVEVGTHSPWVSRLLEQLGHACVVANPSAMFVGRPRRRRNDRLDARFLARQGRTDVELLYPLTHRSADAQRDLEYLRARDQLVAVRSKLINHVRGTVKSSGARLAKCSAEAFAKRAPSELPAAIAPALMPLVDVIADLTRRIAAAETQLAALIRERHPVAERLQQPAGVGPITALAFVLLIEDPTRFQKSRDVGPYFGLVPRLDESGTSSPQLRISKTGDAFGRRLLVSAAHYILGPFGPECDLRRYGVAIAQRGGKNAKKRAVVAVARKLAVLLHQLWVSGATYDPDYQRTRRAA

SEQ ID NO: 385890 - protein, 414 aa, unidentified
MRIVYKKVAGLDVHKKLVVAATSVLEPDGRITQEKRNFETMTADLLGLSDWLMSHGITHVAMESTGEYWKPVFNILENNFEVLVVNAQHISKVPGRKTDQSDAEWISELMQFGLLKASFIPPVTQRELRELTRYRSTFIRERVNLVNRVQKVLESANIKLASVASDVMGISGRAMLEAIVQGNINPEAAAELAKGRLRQKREQLAKALEGRVKPYHQFVLSELLCQIDSLEETIARFDEQIEVYCRPFEEAVQHLDTIPGVSRQAAEVIISEIGTDMSRFETADHLAAWAGVAPGNNESAGKRYSGKTRKGNKPLGIILNQVAHAAVHAKNTYLSAQYHRLAGRIGKKKAIVAVEHSILIIAYHIIQRKEPYQDLGGDYFDKRRPEATAKRLIQRLEKLGYQVMLQQQPINSIT

SEQ ID NO: 385891 - protein, 360 aa, unidentified
MSKQVTKDSPKLFIGLDIHKKSWRFHFTTDLFSGSGHTFPPGSELIKNYVRKNYPNYEVSVAYEVGCFGYNPARDFESFGWDTFVVNPADIPRPSKSKFMKTDKIDAKNIAQQLKSGNLKKITIPEPVRESLRALTRQRTALVRDYRRIKSRIKSLLLYYHIAIPEGMDSPKWSKRFLEWLAVLDLEHTNTERTFRSMLNQYHFIDKEIKELSNDIRRYCKKHHKEDYMLLRSVPGIAGLTAAYILSELGDLRRFTSFKKLASYVGFIPSMQQSGEGLYTGGSTPRANRHVRNMIIEASWQAVRKDPVMQNYYRSHAGKNSKAVIFKVGRKLLSKIHAVIRTAPPLQCRSNNLSIGATNA

SEQ ID NO: 385892 - protein, 423 aa, unidentified
MENTAARKRKQVPEGYLIIGIDPHKKRHAAVAITQDFTTRDKSKFDNTREGLETMLRRARTEMVASGCRGVMFAIETGGHYWRNVAYFLDEQGIPFRFINQFTLKRRREGKDLNRRKNDYRDSEVAAQLLCTGEFTESKIPQGVYAELRAAHNAYRRLVKERTRIINLVKGLLDALFPEFTHVFKDPCGLTALSVLSTCSIPSVIAGMTENEFVAAIGAKHQGRLMRKKLRALHCSARTSIGIDAGARSVSSEISFLVEKLELIRRHIRVIEGTLVKLVDETEEGKYLLSIRGLNYISVAGLLAELGCFKAYQSAKQMIKMAGSNPTESESAGKRGTHTPMSKQGRPVLRYCAWTAVIPMLRFNPDFRAWAKQRRERPAHANPLNGREVVGAALNRLLRLAFALVKNQTYYQVSKPELTLVAV

SEQ ID NO: 385893 - protein, 390 aa, unidentified
MLCIGVDISKYKHDCIVIDESGVIIRNVFSFDNSRTGFDQFMEMYRSLDPLEIKKIGFEATGHYQDNFKVYLERSEIEFMELNALLVHKFKNSQTLRGVKTDKTDARLIANYLSSIEFKPYPKISYHTLALRSLCKRHFDLINERTKYLIRITNFLDRTFPEFKEFIKGNIKSKTAMYILHNYGIPNKIMNINIQSYENLKKESHGRFSVAKFTELRELAKKTIGFSYETDLFEIKSLLRVYDTLQDEISLVENEITTIMSKINSHIPSILGIGKVSTATIIAEIEDISRFDNPNKLLAFAGLDPRIYQSGTQEFKGRMNKKGSVVLRRVLMNCAESILMYNPAFYTYYRKKRDEGKSHRVAISHVARKLVRIIYKLETKHIDFDLSFVK

SEQ ID NO: 385894 - protein, 403 aa, unidentified
MTVRPLVWVGIDVGKTSHHACAVDETGKVLWNQKVSNEQRAIEQLIARAHKGADEARWAIDLTSPMALMLITVLLGAEQSVVYVPGHVVNTMTGAFRGEGKTDAKDARVIAETARMRSDLSEVAMPDELVVELAQLTGYRTDVMADWVRGVNRLRSLLGSIFPGLEAAFDYSNRTPLILVAHLCTPAEIRAAGIKGVTAYLSDKGGWPTAIAKTAATAVAAAKQQPLALPGEAGTAALVKRLARKLLDLDHEIKDIDKTITERFRDHPYAHIIESLPGFGPGLGAEFVVVTGGDLASFATAGRLASYAGLVPVPRDSGRISGNLHRPKRYNRRLRRVFYMAALSSIRGDGPSRQFYDRKRGERLIHSQALLALARRLVDVLWALLRDGREFTPDKPTPATAAA

SEQ ID NO: 385895 - protein, 369 aa, unidentified
MSTHKYVGLDVHKDTVTIAIADGRREGEVRLYGEVSNDLEAIDRVLRKLRADGSTLHVVYEAGPTGFVLYRRMRQWNLECIVVAPSKTPQEKGGRQKSDQRDALQLARLHRAGELKGIHVPEEADEAIRDLTRARADAVDDLRRAKQRLKGFLLRHGYRYKGKANWSEAHQRYLRELVLPLPALKAVVEEALVTITQATERIARLEALIEVQVPQWRMYPAVQALMCLRGFQLTAAAVLVAELGDIPLRPSAAHLMAFLGLIPRQRSSGEKLRLSGITKMGNAHARWILVEAVQHALLPPKVSSHLAVRQEGQRTEYRTIAWKAQVRLHQRGWHLLQRGLMKAKVLIALARELCGFVWDLLRAVPIPAN

SEQ ID NO: 385896 - protein, 349 aa, unidentified
MKYFAGLDVSLEETAICVVDEMGRIVKEVRAASEPDALIEALQGMGLVLERIGLEACSLTAWLHEGLTQAGLSAICIETRQANAAMKTMPNKTDRNDARALAQIMRTGWFREVHVKSRQCRLWRSLLVARRTVLNEMRSIENVVRAILREAGIKLGTPSRTAFADRVRELAGCDALVMPLVEPLLAILSTMLRELARLTKQVLDIVREEKVCRRLMSVPGVGPITALAFRATIDRPDRFRRSRQVGAHLGLTPARYQSGETDIQGKVSRCGDELARTALYEAAHTLLVRSRKWSSLRAWGMKIAKHRGMARARVAVARKLAVVLHRMWIDETEFRFGKEPGTTARLAMA

SEQ ID NO: 385897 - protein, 346 aa, unidentified
MEHYVGLDVSLKLTAICIVDRTGKIQREGVVHSDPEAIAAFIKSNAPHVARIGLETGATSTWLWTELNKMGLPVICIDARHAKAVLKMQINKSDRNDAVGIARIMQCGWYKEVRVKDLDSHAVKALLVSRALLVKIKRDLENQVRGLLKNLGLVIGPAKMNAFALRAAELTEDRPELAAAVAPLLNARAAIELQIADLDRKVMKLARSNAQVRQFMTAPGIGPVTALCFLATIDDPGRFKRSRSVGAYVGLTTRRYASGEIDWTGRISKCGGKMLRSYLYEAANVLLTRVAKWSALKAWGIRLANRSGLRKAKVAVARKLAVILHRTWIDGTDFKWSSKETADQTA

SEQ ID NO: 385898 - protein, 348 aa, unidentified
MLGFRAFLQWIQNLQESFGKTNVIIGMEPTGHYWLPLAHMLEDHGLHYVTVNTMHVSRSKELDDNSPSKNDVKDAKVIAQLVKDGRFSEPVLPENVYAELRQGMNVHGWLTERHNRIKAKIQNWFDRYFPEFTEVFKDWEGKAALQILEMNLLPHELAGVNDDTILDEMKKGVSRAVGLKRVRALKEAASTSIGIRTGSRMAKRELALLLQEYHELGQELSLLEEELHGLIEPIPGAKQMLAIKGVGAMTVAGFFAEVGDLNNYDDPRQLLKLAGLNLRRNESGTHKGQTRISKRGRRKLRALLFRVAMPLSAKNQAFKKLHDYYRNRPANPLIGKQSLVANYYASFL

SEQ ID NO: 385899 - protein, 342 aa, unidentified
MSEIITVGLDLAKNVFQAHGADGSGRAVLCKKLRRAQVLEFFTQLPRCVVAMEACGGSHFWGREIGKLGHEVRLIPPAYVKPFVKRQKNDAADAEAICEAALRPTMRFVPVKSEETQGAAMVFRVRELLIRQRTQAIGSLRGHLSEFGQVVPQGAANATKLIAIIEDPECDLPSDAIPTLKVLVAALAQLEAEIGKLDTEIARRAKENELARRLMTVPGIGPLIATAIETLAPPPETFRKARDFAAWLGLTPRQHSTGGKQRLGATTKMGERSLRRLLIIGANSVIIKRHTHAAAQPGTWLGGMLSRKPPMLVRVALANKMARIVWALMARGGVYQSPTPAA

SEQ ID NO: 385900 - protein, 341 aa, unidentified
MRKTLYCGVDLHSNNAMYVITDRRDKQLFKQRLPNELPMVLERLEPFRERLKVVAVESTYNWYWLVDGLQDHGYPVVLAQPSKMDQYDGIKEADDLTDAAFLARLSRLNILPTGYIYPREDRPVRDLLRRRMLIVQQRTALKLSLQNMAMRQTGRSLGWRTLGKLSDADRTELLGDHDCLTFVTEQQVDLIERLSDTIERFEEKILEHTQLKPTYACLLTMPGVGVILALTIMLETGDIGRFKRVGDYTSYCRCVRAIHTSNGKNKSKNNGKNGNAYLAWAFVEAVHHAIRVCPKAKSFYDRKRVKRNGALATKALAAKWSKAAYYMMKRQEPFAVARVFG

SEQ ID NO: 385901 - protein, 433 aa, unidentified
MLKLNYMSTLFVGIDVSSKTNAVYAMDFEENKYISSSFGNNQPGADKLVNMIAECMHKHKNLDTVLIVLESTSVYSVHISNFLSTSEVLMPYKPYVFCVNPKATSNYRKSYIGMEKTDPTDAYLIADFGRVGRTKKLEPWRGGQFIALKRLTRHRMHLSECITREKTYMVSNLYLKFSELQLLEGDDKPFGSLYGATSSAVLTEFLSPQEIIDMPEEELLTFLAGKSRNRISDLSKTSELLRKAARDSYRLDKCMYEPLNVSLASSFNCIHAYQKEIKLIEQAIEKCINGMNPNALLILQSIPGIGPIWASGILSEIGDITVFHSSDALAKYAGLYWPKGDSGDFTSEDNKMSKAGSPYLRYYLGEAANSVRKHIPEYADFYARKYAEVTKHQHKRALALTSRKFVRLVFGLLAKNQLYTGEKLDAEYNIKSN

SEQ ID NO: 385902 - protein, 341 aa, unidentified
MPIVTIGLDLAKQVFQVHGIDAEGRLEVRRQLRREGVEGFFKGLAPCLVGIEACSSAHYWARRIAALGHEVRLISPTRVKAYVQRGKKNDANDAAGIAEAVTRPQMAFVPVKSEEQQAILMVHRTRELLVRQRTMLINALRAHLAEFGIVAAKGRGKVKALIEDLPEAAIPPLARTALTEIGAQIESFSQRIEALEKQIVLWHRSCEASRNLATIPGIGPITASVLAATVPEPALFRNGRHLASWLGLVPGQNSSGGKDRLGRITKVGNPYIRRLLVIGATSVIRYARDKAPGEAMWLKRLLERKPPRLASVALANKMARIAWSVLTRGEVYRQLCPATAS

SEQ ID NO: 385903 - protein, 306 aa, unidentified
MAIQSPGRPQPSIYRIKGGDAAGLMAQLLIARDRCTKATGEVLSITLCYEIGCDAFWLARFLMARGVECLVVDPASLKVDRRGRRAKTDRIDVGMLLRALMAWLRGDRHVWSNVRVPSVDEEDVRRSHRERGRLIHERSSHINRIKGPLFAQGIRDINIKTQYRKLKLEELVTGDGRPSPSRLKAEIAREISRLAVLQEQIAAINRERDEAPTPCKAKEKKRVLLTQLKSIGPAISAVMSRAVYYRQFDNRRQVASFLGLATSPYDSGDMERSQGISRTGRGQVRALMIQAAWLWIKHQPKSTLTR

SEQ ID NO: 385904 - protein, 337 aa, unidentified
MTIIRIGLDIAKHVFQVHGVDENEVTVLRRQLRRSEMKKFFNKLAPTRIGLEACGASHYWARLLRVLGHEVVLLPPQYIKPYVKRGKDDANDAEAICEAISRPGMRFVPMKSAESQAELMPLGGRDLLIKQRTAVINTIRGYAAEFGVIATKGPVKVAELLQQAHAEEASVPALALDMLRLLAAQLDALDAKLKLIETWLMALHRENPVSQCLASQPGIGPIGAVSFALRVTDPKSFRSGRHFAAWLGLTPKDNSSGGKRRQGRISRQGNEALRKLVVLGATAVIRFAKPGRASPWLLNLLARKPKKLAAIALANKMARTLWAMMKSGEVYRRPLPV

SEQ ID NO: 385905 - protein, 357 aa, unidentified
MTMAIGIDVHKKTSTFFAYDGDGEPLNDFNQRFKKVPSNREGYLEVLAWLGDSDCEFLIENSTKTHDVYWILQGLGYSRLYVAHSVDLKRITKSNKKTDQFDAEKLATYMRVKQQNIDQFRTCYICTPEDMQIRRLCRIAKQELFEIGRIRRRIRSHLLLTGRDWPGSLSTKWECEILMTKEEDPGLRHLGRQLNDCRLRCDAAEKAVVEAIERNERMSAIFERLKEIPRFGNITAAYLSATIVDIGRFDNPKKLAAYLGVVPRMRDSGETEDHSGLTRSGDPAARWLLIQATFRLVNSSAPDSHLKAFFAKKNGGSIEELREADSSSLLKRPALVAAANKLIHIVFALLTHPDRHW

SEQ ID NO: 385906 - protein, 347 aa, unidentified
MLADQLDYIVGVDPHRDSHAIAVVEVVSGAVVFEAIVDANSDGYARALKLVDEHGLARRAFAVEGTGSFGAGLTRFLTGRGERVFEVGRLRRERRSGGKTDALDAVRAARSVLSQQRPAIPRAGGERQALQALVAAREGAVNAKRAGLCQLRDLLVTTPEPLRSELRPLTRARLLQRLVATRPHGRSDAELRGSMLALRSLARRVLQLTAEERELAREIETLTRRLAPQLLEQPGVGPHAAAQLVLSWSHHGRISSEAAFARLAGAAPIPASSGQTIRYRLDRSGDRKLNRALHMILVTRKRSHPATIAYIQRRLEDGKTRREANRCLKRYLARNLYRLLEHPPMTT

SEQ ID NO: 385907 - protein, 422 aa, unidentified
MNEDLYYERCCGIDVHKKFLMVCLRIGRKTELKRIGTLTHELRDMVAWLKANGCQMAAMESSGSYWKPVYNIFEQEELPVMVCNAYHIKNVPGRKTDVNDAQWIAKCLSQGMLNPSFVPDREQRELRDMTRFRKSQIEERSRNINRLQKFLEGANIKMGDFLSDVEGKSATQLLELIIGKPDFTVEDVAARMHGKMKATADEMFRSLEGYMSPIQREFFAHIMSIIREQTAQIEKTDAMIKRSLNENYKAAVAALDAIPGIGEISAEQIVAETGVDMSRFRNQHSLSKWAGVCPGNNESAGKRKTGKTPPGNKTLKSTLTQSAKSAKRNKSSFFSAQYNRLVSHRGKNRATMAVAHSILIAVYFVLSGHQFKDLGADYYNQFNREKKINSHIKQLSKLGLNISDDALREAFLNLSEPLSNSA

SEQ ID NO: 385908 - protein, 346 aa, unidentified
MEIVHQILWFLGIDIGKCSFVVCRVGLDGKAVSRTFSNDEFGIAELVRWLGAEVRSCRAVMEATSRYHRLCERALLSAGICVDLVNPRRARALALGLGYCDKDDKVDAQALAQAARLLQTNDQKVPSVKAQDLRDHSRTIDTVKREAANFLKRMEGLEPGSDAYKACAKAVKALKDVAALEEKIWTQAVQVEPETLRRYKLAKTVPDVGHVTARVVSVELPADLDKAARKLTAYSGLVPRRHQSGNQELPPEIQGGNPWLRTGVFMAAMHSVYQGKRFLPWYETLKARSNVCVKTKGGRHLKAIVAVMRKILANILAVIKRNSAWTTERPVHQVRALVPAAQTNAT

SEQ ID NO: 385909 - protein, 352 aa, unidentified
MEMVGGLDLHRSQITFRTVDLRTGELQRGKIYPGAREAVREWLDQFQSGTDAHFALEGTTGWRFVVEEIEGRGFTAHLADPAELSERRGPKRRAKTDHADCELMVNLLLEGRLPGSWIPPAHILELRALVRLRKTLVDQRIEWQQRLQAQLFHQGVVPGLRLRNPSDRRRLAGMEMSPAGRQTMQTGLIMLDDFDAQLGPLSAQLVALAKTQPGCRALESQLFGVGWLTAVAIVAELGECRRFHSADQAVRSSGLDITVHESNGRRPGGHLARQGPAVLRWALFEAAQCAARRSSPDHAYYLKVRDHIDHNRACLSVARKLCRRACHILKDLGEAGMAPPKPPSVRRESSAA

SEQ ID NO: 385910 - protein, 416 aa, unidentified
MEEEVYYERCAGIDVHKKLLVVCLRIGRKSEVREFGTLTHEIREIVAWLRDNGCQMAAMESTGSYWKPLYNIFEQEGLPAMVCNAYHIKNVPGRKTDVGDAQWIARCLSQGLLNPSFVPDREQRELRDMTRFRKSQIEERSRNINRLQKFLEGANVKLGSWVSDIEGKSATQLLELVIGKPDFTVDDVAARMHGKLQASAEELFRSLEGSITPTQREFFAHIMAVIREQTAQIERTDQMIQRSLNANYRAAIAALDAIPGIGRVSAEQIIAETGTDMTHFRNQHSLCKWAGVCPGNNESAGKRKSGQTPPGNKTLKSTLTQCAKSAKRNKNSFFHAQYNRLVSHRGKNRATMAVAHSMLIAIFFVLQGQHFKDLGADYYTQFNREKKINSHFKQLSKLGVVIPDDVLRSAVLHLAG

SEQ ID NO: 385911 - protein, 391 aa, unidentified
MPMYFVGIDISKYKHDCCIISAADQQIISKFTITNDKDGFEQLLTALNSLSNPEDIKIGFESTAHYALNLELFLENAHHSFMEVNPVLIKEYKKSTTLRRTKTDSVDCESIARWLITVEYKPHSKGFYHAYSLKSLTRLRDRLIRQRSFYLVKITNVLDHTFPEFKPFFNERLSKTALYLLENYGSAEKMARMNSASYDKLRCISRGKFSIQQFLRLKELAANTVGVNNSIFDLELNTLLTLYKSLSDEINTLETEIIKLIEEVHPHYMSIPGIGPISSAVIYAEYGDISNFSNPSQMLAFAGIEPGINDSGTESHGGRMVKHGSSQLRYVLLNACLPLIRFDLTFATYYEKKRAEGKKHRVAITHVAKKLIRVIYALERQDVDFNAQKLR

SEQ ID NO: 385912 - protein, 385 aa, unidentified
MKGQTFKPTDYDVFAGLDVDKRSISVTFTNHQGFIRSLRMPYNVEHLVNHVRKHFGDQKVAFAYEAGPTGYGLYDGLVAKAYPCLIASPSMIPKAPGQRVKTNRLDSRGLSENLRGGQLKSIHVPSAVYRELRHLTQLRDTFVSEMVGMKQRIKSLLLFEGIEFPPAPAGRQFSFMVKDKLRKLECSQTVRFKLDQLLDSLEFSEKQVLKTTREIRRFCRNDTELSQCIGYLMTIPGIGWIVASQLVARIGDWRELKNIRQLAGFLGLVPTEYSTGDRTDRGSITHSGDGRLRSKLIQASWSAIRQDEELREFFRSVCRTHARHLASRVAIVAVARKLSVRVSVVLMKQRPYEVREKVQSAPLTQEETSPQGTTRRVPEPGEKNS

SEQ ID NO: 385913 - protein, 428 aa, unidentified
MKYNTQNAKIKSITEKTLIVGIDVGSETHFARAFDWRNYEYSKKPLEFSNTEAGFMTLKAWMADFAEKYGKNVVIPGMEPTGHYWFNLGAYLQDNGMKPVHVNPHHVKKSKELDDNNPNKNDRKDPKTIAALVNEGRFSYPYIPTGIYAEIRSLSNLRLQTQEEITRIKNRIARWFSIYFPEIKDVYRNPDSVSGLMILKEAPLPQDIVKLGVDGINKIWRDAKLRAAGLKRTKTLVTAAEHSIGSQEAPDSARIELKNLLNDYEIYKNREEDLMSLTEEKLSEIPHIDKLLEIKGVGLKTVSGFVAEVGDITRFDNPKQLQKLAGYAIVECSSGKHKGESHISYRGRKRLRYVLYEAAISLIARNEEFKEVHRYYRTRKENPLKKMQSVIAVACKVLRIFYTILTKGVTYDGAKMMQDIKRPQMLAA

SEQ ID NO: 385914 - protein, 311 aa, unidentified
MTEDTIGIDISKATLDVHRLSDGTAAQFGNDKAGFRALKFWLKGRDIARVVYEPTGPYHRDFEISLEADYPLVKVNPLQARRFAQSLGTKAKTDPVDAHMLAKMGAAFSLLPQLRTSAKQRDLKELHVTRLALIKDRARILNRQRSLTIALLKRQAKARFKLVIAQIAQVDAEIQELLQNAPDTTRATEIICSVPGLSKVSSAAILTEIPEIGTLSKKQVASLAGLAPMTRQSGQWRGKSFIQGGRKLLRDALYMPALVAMRHNPDLKTKYTALIKAGKPAKVALVALMRRLIILVNTLIREDREWEKNRA

SEQ ID NO: 385915 - protein, 347 aa, unidentified
MSNTHVATIGIDLGKNIFHVVGLDATGAIALRKKRSRNQLEQSLANISPCLIGMEACAGAHHLGRKLEKLGHKVRLLPAQYVKPYLKGHKNDFRDAEAIAEAVQRPTMRFVPLKSAEQLDLQALHRARSRLVTQRTAVINQIRGFLLERGLPVRQGAAALRLVLPRLLSMLTDDLSPRIVRLIHDLAEDWRYLDWRVACITKEIDELADQDAHCRRLMSAPGVGPIISSAMVAAIGTGDAFAKGRDFAAWLGLVPKQISTGDRTILGRISRRGNRYLRTLFIQGARSVLLRRQSWPKHGFGAWLEAASKRLHSNVLVVALAAKLARMAWSMLAKGRDYDANFLGHAA

SEQ ID NO: 385916 - protein, 343 aa, unidentified
MGEVSTIGLDIAKSVFQIHGVDVDGAVVVRKRISRAKLLEFFAALPACLVGIEACPTAHYWSRQLGVLGHTVRLLPPSYVKAYVKRSKNDANDAAAICEAVTRPSMRFVATKSEEQQSGLMLHRSRQLLVCQRTMLSNAIRGHMAELGIISAKGRNGTAELLKIIADEQDDRIPVAARFSLEVLARQYAAVRAEIAAIEKRIHVWHRSSEESRRLEEIPGVGPIIATALVAEVGDWKVFSSGRSLAAWIGLVPRQHSTGGKERLGRISKQGNRHLRWLLVAGAMAVIRYARQHGTKRPWLARLMDRRPIKIAAVALANKIARMAWAMMVRGERFKEPKLLPAA

SEQ ID NO: 385917 - protein, 339 aa, unidentified
MQEKKKMIWAGFDVGKETFSASLDQVTENGKAKITSLPCRDFKRTPEGLTKFFQWADGIISGMDLHIVMETTGCYSQQLTDWINLNYPEVKVTIENARNIHAFIESLNLPHKTDKLDAQAIARFGTERQPHPTKRPSKTILTIRELSRERTALIKNRVDLQNRRDTITSSVVRKINAQTIATLTMQIEKIEQEIKACIVEDEEILTEIHIMTTMPGVKFVSAYSILAEIGSLKQYSIKELSAISGLAPRIRQSGSSVHSSFMSRRSSGRLRQILYLDSLPGVPKIPVLQDFQQRLLAKGKTKMTVRCACMRKMLLMLRSMVVHNRAFDEKFLKNLSIRT

SEQ ID NO: 385918 - protein, 343 aa, unidentified
MKISRVGVDLAKNVFQIHGADAHGNTVWKRKLTREKWIEAICTRAPDGCEIGMEACAGAHHWARRLSEYGYQVKLIAPQFVTPYVKSNKNDANDAEAICEAMSRPNMRFVKAKTVEQQDIQAIHRVRSEIMSQRVAKMNQIRGLVSEYGLVAPKQVCALRKALPLWLEDAENGLTDRFRHLLSDLWCDVKYLEERLSNLDAEIKVIAETDPMAIRLQQLRGVGPLVATALIASVGNGEQFTKGRQMAAAIGLTPKQFSSGGKDRLLGISKRGDAYLRTILIHGARSIIGHAKHREDRLSIWVTDLAKRSHTNVAAVALANKTVRMAWAMMRNETDYDPERAAA

SEQ ID NO: 385919 - protein, 373 aa, unidentified
MPRYSTAFGMDVHLRSTTVCALDAETGEAVTRRFRGNPWGEVAEWMSGFPGPSLAAYESGYLGFAPQRELSGLGVDCVVAAVSKIPRSVADSASKNDRNDAARMAKAILAHDISPVWVPSPEVEGIRDLAGAYDGATARLATAKQRLLAFLAKRGFVYGGTTPAGNPRKYWTYDFLRWLDKVRPEDDGGVRTLAALRNEVEAAAEARADLLSEYRAAVDASPIAAEVAALQSIKGCAFALAAAFSAEVGDFTRFRSGRQVTAYFGLAPSQRSSGDSVRPGGISGAGNALVRKLAVEGSWCYAAARHQPKLMPRDTGVPLEIRMHGRKGSERLLRRREGMLARGMPAAKANAATAAELVRWLWALGMMCREGAE

SEQ ID NO: 385920 - protein, 368 aa, unidentified
MCFMEWPAPPSGVVGSPANQEEEEMDISVLGIDLGKNVCSVVGLDASGAVVMRRKVRRETLIALAEKLPPCVVGMEACCGAHHLGRVFAAHGHDVRLMSPEYVRPYIKAQKNDDRDAEGIAEAATRPTMRFVELKSQDQLDMQTLHRSRDRLVGERTALINQLRAILLERGMVAPQGKRKLEQFLAVLMDEQGGAGLSPRMIVLVADARTQWAELDRRIAAFDAELVRWVKENEEARRLTTIPGVGAIVASALVAAVGRAESFDRGRDLAAWLGLVPRQFTTGGKPKLLGISKRGNKYLRKQLIHGARAALPYVAERDTPLGRWAKGLMNRAHRNVAVVAFANKLARIAWAVLRRGERFAVTGMPVAA

SEQ ID NO: 385921 - protein, 342 aa, unidentified
MKEYVGFDVSKEETSFCVMDEAGTLLARGKARSDPDSLFEMLKEHTLCPDRIVLETGTLSNWLARGLRRHGMPVDIIDARQAHAVMKLQHNKTDANDAHLLAEIARTGFCRPVAVSSEAAQTQRILIKARKHLVSQRSATHNAIRGFLSSLGLRFAKGSGKLGERVRAALVARPDLSPLIEPLLLSVEALAREIARFDQEIKARADGMAACRLLMTVPGVAQNTALAFVATMDDPSRFTCSRAVGAYLGLTSRRYQSGEMDYTGRISKNGDGLLRSLLYEAANVLLTVVRKSHPIKDWARRIRKRSSHKKACVALARKLAVIMHRMLITGEAFRWPEKEAAV

SEQ ID NO: 385922 - protein, 340 aa, unidentified
MALYGGLDLHGDNVYLGLMDAAFNRVFERRLPNKLPVILAALEPYRERLAGLVVESTYNWYWLVDGLQAKQYPTKLANPARMQENIGLKHANDRTDAFFLAKQEAMGVLPQAYVYPKEERPVRDLMRRRMRLSRVRTAEWLSLESLVARHSGQGLGIQALSHLEEGELSTLLGGERLVIEAAQICYRHIAFLDREIAKMEKSVEGRVKLRPEYERLMTVVPGIGRILTLAIMLETGPIGRFAGPGNYASYCRAVKAEHTSNERKKRAGNRKSGNRYLAWAYVEAAIYAVRYSPELRKWYQRKEARTNRAVAIKALANKLAKACFFILRDGVAFDVKKLVG

SEQ ID NO: 385923 - protein, 410 aa, unidentified
MKIAGIDVHKKVLMAVVVDASTAEEKPARRRFATMPSELHRLLTWLREQGVEEAVMESTAQYWRSVWLELEPHMRLHLAQAFSNRAPRGRKHDFKDAERLVRRLIADELILSFVPSGEQRIWRSLTRMKLQLTRDRVRLQNQIECLLEEMRIKLSIVVSNLLGASGLRILYALANGETDPKKLAQLGGERLQCTEEQLVDALTGRAQPVHGAMLALQLERLQLIDQQMAQLNTMIATAMKPHQDAVIRLAEVPGLGVDSAQQIIAEVGAQASTFGSAAELTSWVGTCPGKEESAEQNHSSRSAKGNKYLRRVLNQAAHAAVAKKGSHFQIVFRRLLPRLGYQSAIWAIAHRLCRLVWKILHERVRFIEQGREVDPREKKKRAQMLVRALRRLGYEVTITLINQLVPNPAA

SEQ ID NO: 385924 - protein, 317 aa, unidentified
MRKHNMICAGIDTSKRKLDAALDGQSERLQVDNTPDGHRHLSAWLRRHRAKRVGIEASGGYEQAVVSQLRRDRFLVIVFQPVQVRAYAKFHLQRAKNDKIDASLIAACARQVEKIHSPPDPRLAPFAEHLTLIEQITEDIARLKTRRASSRDPHNTSHWDAEIARLKGVLRGELKGLVAAIRAHRDLAERLDLIVSVDGVGLRTAVAILVRMPEIGRVTREQAAALAGLAPYDDDSGEEVGARHIEGGRERLRKSLYVAALPAAFRWNHQLTTIYKRLTSAGKPHKLALIACARKLLIFVNTVVARATPWITTQAAI

SEQ ID NO: 385925 - protein, 394 aa, unidentified
MFYCGIDVAKMKHAVTVLDEHGLAQIPVFTTENTHAGMEYLLNALKPFGESICIGLEATGHYWLSLYDVLTRHEYKVMVLNPLQISAYRRSGVRKVKNDRTDAVWIADFVRISNLPAYNRDIPNLLKLRELSRFRFWLSEQIGDCKRKLVTILDRVFPEYESLFSSVFVHSSRAMLQEAVSAQEFAELDLQELTELLWKTSRGRFGEEKAQQIQEQARKSIGISFLTDAVHVEMRCLLAQIDLLDEQQEEVDKALEKLMEAIPQYITTIPGIALPTGAAILAEIGDVSRFESEDKLVAYAGIDATVHQSGQFNAHQMHMSKRGSPYLRLALWLAASMAIRHNDELKAYYHKKREEGKAHGTALGAVCRKLLIRIYVILKENRPYVVRESAPSNP

SEQ ID NO: 385926 - protein, 337 aa, unidentified
MMYSGIDLHSNNSVIAIIDDGDRVVAQRRLPNDVTRIVGFLVRWQEQLAGVVVESTYNWYWLVDGLQDAGFHVHLANTAAIKQYEGLKHSGDETDAQHLAHLLRLGILPTGTILPREQRAVRDLARKRMQLVQSCTAHVLAVENIMARQLGGRMTSNQIKRLTNDAVDNLSLAADVGLAIKANVAVIATLQSQIEVLEKRLQERVKPRPQYGLLTSVPGIGQTLATVILLETGPIERFADVGNFASYARCVDSVLTSNRKKKGEGNVKNGNKYLAWAFVEAANFARRFCPEAKRFHERKKARTNNIVATKALAHKLARACYHILKEGKPFDATRCFA

SEQ ID NO: 385927 - protein, 345 aa, unidentified
MTKLIAGMDLHSNNVVIGLMDLDGKRVAHQKVECRLSEVVRFLAPYKKRFEQIAVESTYNWYWLVDGLQALRYPVVLANPAGMEQYSGIKHADDTNDAFFLAELLRLKILPTGYIYDPHLRPVRDLLRRRMTLVHQRTALMLSFKSLYTRTTGQEMTLSRLKELEIKEAQDLYDHPANQLIAGMQIKHIEQLTESIEKVEKVVLDCAQELPFYSKLTTLPGVGKILGMTITMEVGDIKRFAEPGNFASYCRTVEAKRTSNNKKKGENNSKCGNKYLAWAFVEGANFARRYDPQCRKWYDRKVAKTSNVIATKALACKLAKAAWHAMAEGTDYDSQRMFGQAASTG

SEQ ID NO: 385928 - protein, 356 aa, unidentified
MSHDVKYIGMDVHQEAIVIAVLNESGKLVLESVIETQASSILQFLHGLRGELHVTWEEGTWAAWLYDLLQPQVQHMVVCNPRRNALLKEGSKSDKVDAGKLADLLRSGMLRPVYHGENGLRTLRELGRSYQTISKDLTRVMNRLKALYRGWGIPCAGTQVYAVRCREEWLSKIPHAGVRRRAELLYQQLDGLQVLRRELRPEFLAESRKHKAAKLLRQIPCIGPIRAARLIGLMQTPHRFRSKRQLWTYSGLGIETHDSAQYRFVRGQVQRSKKPQQVRGLNRNHNHEMKEIFKSAATRASCGTGPFHDFYTGLLAKGMKPEMARLTLARKIAAITLTLWKKEERFDVEQLKTQAA

SEQ ID NO: 385929 - protein, 344 aa, unidentified
MHIASVGIDLGKNTFHLVALGERSKILLRKKFSRAQLLAYTANLPSSLIGLEAGAGAHGLASVLREQGHQVRLIPAQFVKPYRKSNKNDFLDAEAIAEAVTKENMRFVPIKTEEQLDVQAMHRVRDRLVQRRTALINEIRGFLLERGITFAVRPIHLRKNLLAVIEDAEQNLSSRLRWLLERLWQEWKQLESDIQAISDGIERISEENALCRRLCQIPGFGPLVSTATVAAIGNGAAFRRGRDFAAWVGVVPRQYSTGGKQKLLGIGKRGNIYLRRMLIHGARAVLFRVKYDTGGFGQWVHRLMQRAPRNKVVVAIANKLARMAWAVLTSGKDYKHPGVQMTAA

SEQ ID NO: 385930 - protein, 352 aa, unidentified
MAATAQSAIAVIGIDIGKNSFHVVGLDGRGAIVLRQKWSRGQVEARFANMSPCLIGMEACVGAHHLSRKLKALGHDARLMPARYVRPYSKGQKNDFRDAEAIAEAVQRPTMKFVVTKTADQLDLQALHRVRERLVSQRTGIINQIRAFLLERGIAVRQGQRFLRVELPRILATPPDVLSPRMVRVIEGLASDWHRLDERIEGFSSEIEELAKRDAGCERLMSIPGIGPIISSAMVAAIGTGDSFSKGRDFAAWLGLVPRQISTGDRTILGKISKRGNRYLRVLFVQAAWVVLVKVKPTRWQGHGLRPWIEAAKKRLHHNVLAIALANKLARIAWSVLAHGRAFETNKLQAAA

SEQ ID NO: 385931 - protein, 375 aa, unidentified
MGEITRALIARVGVDLAKRVIQVHAVDAAGRRVVSRAFKRDQFIAWCVQLPAGCLVAMEACSSAHHWARKLRVLGLDARLIAANFVSPYRMQGKSGKNDATDAAAICEAASRPSMRFVPVKTCEQQGVMSLHRVREGLKEERTGCINRIRGVLAEFGLVFGQGPKLLRAELADVIEDASNELSAMARRVLQRAFDHWRELDEHMRWCDRQVGQHVRSSPAAQRAAKITGIGELGASALTAGVGDFNQFKGGHQFGAWLGIVPSQNSSGGKTVLGRITKRGDDYLRTLLIQGAKAALMSAGKRDDPISHWLVQLVARVGWQKACVAMANKNARILWAVMTRDQGFDPRHVSEKPQAKKPANERIAAVAPPQAGCLA

SEQ ID NO: 385932 - protein, 424 aa, unidentified
MDRLQQFRELRSTIRGNESILVVGVDIAKEKHYAFFGTANGRTLKKKLIFGNCIQDFNGLRSLASDLQVQNNLNSCVYGLEPTASYHKPLAEYLVRHGEQVVYVSNVVAKNNRALLDGRWDKNDTKDAANIADLVGQSRCQFYDLAENDVLELRSLITYRAKLKKQEHGLRMRIRNNLLAQYFPELDKQMPQSGADGLVLDIIANDFDPVQIAKLSLAEFRQQYQMQKRHIVQENRLCSIWEASRESIGCALPEAAAWEGRMLVEQLRQTRTIRRELEKRLKEVGQRSPAYACLLTIPGFGPIVSAMTLAAISDAGRFTSRKQILRLAGLDLSASRSGKTSHAAIPVISKQGKAGLRYALVQAAQIASYSDATIRSYYTNMLKGRELERGIKLKMRVKLAAKMLIVAWTLMKRNEPYDSDHFRT

SEQ ID NO: 385933 - protein, 313 aa, unidentified
MSQNTMTTIYVGLDIAKLNLQLHLAGRVHDLPNIAAGQRRLLKLLASQPGVHVVCEATGGYERDVVAALHEAHVPVSVLNPARVRHFARATGQRAKTDHIDAAVLSAYGQALQPKPTAPRTQQEQQLAELVRRRVQVLEVLVAQRQQAERLTVPALRRQAQSLVRRLERDQAQIEEQLQALRTQAPTLDERVQKLEAITGVGTITALGVLAELPELGTLNRRQAAALAGLAPHPRESGQWHGRRSIGGGRAPVRRALYMAALVAARSNRQLKEFYQRLRAAGKPAKVALTAVMRKLIVLMNHTLKHPNFVPQN

SEQ ID NO: 385934 - protein, 447 aa, unidentified
MGCNGSGLSRGDRRRNERLAGLRAVVSPQRAVVAIDLADDKQVVVVTDHDSRVLARRRVRARAWQLGPTLEWARAQALAAGFEAAVVACEPTGHRWRVLDQLAAGLGMPLVCVQPLLVGRAREGEDFTRDKTDDKDAVLIARLVTELRCYVPERPDETWARLRHLGARRARLITESTACVQQLRDLLECAWPAVLDAAAQPFRSRSWQASLAVILDRAEGDLDRVRRMGWERFARAVRRELPRWDTTRWFSPIVRAAFDALTDPTGVASQRPGALERALLVLEDWHDCRRHLADVEARMTRILDELDLTDLVMSIPGLSAVGAAQILAECGEPSRFSNPRALVKHAGLCPRENTSGNHHGNSRLSGRGRPGLRLAAWRAVWGAMHANPVYAARFAHLTTRADNPLSAGQARAAIAAALLRQLHVVVTRRVRWDPALAAPPASHATAA

SEQ ID NO: 385935 - protein, 317 aa, unidentified
MLCAGIDVSKPHLDLALVSTTAKPTRLRFPNTPEGRQALLAALAHHRPTWVALEPTGVYHLPLLQLLAEKGLQVALVNPYHLAAFRRATGERHKTDRQDALLLARYAQVCGESLRAYTLPPKALQELKALVGYREDLAQRERAILNQLEAARWAGSEEILVLLQRELACVEGLLGEVEARIQALLAALPEAEVLMGLPGVGPQVAAAVLALLPPHLWGRAKAAAAYAGLIPEREESGKSLERSRLSRKGPPLLRRKLFMGALVAVRHDPEMGAFYRRLLSRGKRKKQALVAVAHKLLRRMMGRLREYYAGQSLQGVA

SEQ ID NO: 385936 - protein, 306 aa, unidentified
MKEEIKFPQVVKVGCGIDVHRDIIVATIRKSNDEFETREFGAYTSSLTSLRDWCKTEKVTYVAMESTGVYWKPVFNVLEEDFEIILVNARHVKNVPGHKTDKKDSRWISKLLLSGLLKGSFIPPVDIRKLRDLVRYKKKVVAQAASEQNRIIKILEDANIKLSSVVSKVDGAVGTKIINSLIQGQTEPDELVKFYHGKMKVSKTEFRMALEGRISNHHRMMLQFHQESIADKERLIERIDAAIEVAIKAYQVEIDLLQTIPGVGKDSAISIISEIGVDMSKFPNENHLSSWAGVSPGNNETGGKKK

SEQ ID NO: 385937 - protein, 538 aa, unidentified
MDWFGFGWRVSEVGHRGKRKLAPVDNSAPEVIPDAEHELVLERVAAVDVAKAAGKVCVRLPANSGRRISRVWDVPARTGAIIELGEQLTELGVQKVTVESTSDYWRIWYYLLEAAGLDAQLVNARDVKNVPGRPKTDKLDAVWLAKLTEKGLLRPSFVPPAEIRRLRDYTRLREDLTHERTRYWQRLEKLLEDALIKVSAVASRLDTMSTRDMIEALIAGERDPRRLAELARGKMRTKRSELITALDGRFDDHHGELARMLLAQIDALSAQINTLTGRIADLIAELPEAAAADHGIGEDTDTDAPGAGDRSDAGPQPTRRVDSATEAECARLSAIERLDEITGLGEHNAQVIIAEIGLDMTRFPTPAHLVAWAKLCPRTIQSGPVTRGGRTGKGNPYLKGALGQAAAAAARTDTFLGQRYRRIVKRRGKLKALVAVARSILVIVWHLLADPLARFHDLGPDYHITRINIERRMRNTSPNSPRWASESPSNPPPEPPTTHHHNLIRLRKLRRRLSRVWSPWVIYRSAVPQVSPYVIGKP

SEQ ID NO: 385938 - protein, 358 aa, unidentified
MAVNEGTRRIVGGVDTHKDLHVAAVVDEQDRVIETRSFATTRQGYRQMLAWMRAFGDLQRIGVESTGSYGAGLLRFMQQAGIAVLEVTTPDKQDRRRRGKNDDLDAQNAAHAAFAGQRTVTPRSRDGMIESLRVLMACRKTAVSARRVALQMIHNTIVCAPDGLRDQLRSLTRMQLVRTLGSWRPDLTAYRDLESAYRIGLKSLARRYLELHDEIADLDAMIAAIVDELAPNLIARNSIGHVGAAQLLLTAGGNPERLRSEASFASLCGVSPVPASSGKTVRHRLNRGGDRAANSALHIIAIGRLRTDQRTKDYVARRIAEGHSKLDAIRALKRYLAREVFTLITQRRREINATRIAA

SEQ ID NO: 385939 - protein, 425 aa, unidentified
MKRDLSVENQFSVYVGLDWGTEFHRACVLNSRGEILRECRIDHSGQAITDFVRSLNEMGNGKPDHVAVAIEVPRGPVVEALLESGLVVFSINPKQLDRFRDRYTVAGAKDDSRDAYVAADSLRTDQHCFRRIAADHPDVVRLRELSRTEESLGEDFRRVVNQLYQLLLRYYPQLLQLNSTPDEPWIWALLELAPIPQRGARLTVARLKALLSKHRIRRWTAEALREAIATPPLPLAAGSADAISEHALLLLPQLRLLYSRRKEVRDRIEALLNRMTLLGSERSECREHRDVGLLLSLPGLGYLIAANLFTEASDPLAQRDYYALRAHSGIAPVTRQSGKSRQVVMRRGCSERLRNAMYHWARCSVQHDPLSKLHYARLRKIGHKHGRALRGVADRLSSILIAMLKSGQPYDAKRRQTAAASADTA

SEQ ID NO: 385940 - protein, 350 aa, unidentified
MNFYNPQKLFYCGIDLHARNIYICIMNKAREVLVHRKLGNNSTDLFLKILQPYKHDLVVGAETTFAWYWLADFCADNDIDFVLGHALYMKAIHGGKAKNDRIDSKKIALLLQGGMFPLAYVYPKEKRALRDLLRRRLHFVRLRGELFAHVQIVNYQNNNSPLPRLGNNKSIRDDVPNLFENETTRKIVESDLDLIKYYDEFIPKLEWHIFSKTTQLYQKELAILSSARGMGRIIALTILFEVDSIDRFPSVQDFASYARVVKCTHESAGKKYGTGGAKIGNPYLKYVFSEAACLMAKYNPRIKTYLQKMERKHGKGKGKIILAHKIARAVYYMLKRNTVFDINKFLSIKG

SEQ ID NO: 385941 - protein, 425 aa, unidentified
MENNIRFVGFDVHAATIAVAVAEGSGEVSSLGVIPNQPDAVRKLIRRLGPADRLWVCYEAGPCGYALYWQMIELGVKCEVVAPTLIPVKPGERVKTDRRDARKLARSYRAGDLTAVWVPDRAHEALRDLVRAREVAKADQLRARHRLLKLLLRQGRRPPAGVRAWSAKWWAWIKEQRFEYPLQQTVLLDYIGEVEHAAARIQRLEQALDLAVETAPEKMRAVIEGLQALRGIARLSALTIVSEVGQLSRFARARQLMAYSGLVPSEHSSGEKIRRGSITKTGNAHLRRVLLEAAWTYRHRPAVGASLRARQERISPEVKAIAWKAQQRLCNRYQRLLMRGKPACKVASAVARELLGFIWAIGVRLEREPGTPTARPSASKPSAGRCGARRSGARLVLKIATPIQRAVNHTSSPTALLSPSRPLGG

SEQ ID NO: 385942 - protein, 343 aa, unidentified
MEVAIGVDSHKGSLAAAVVDEVGKLIEAREFPNHPKGHDAFRGWVRAQVTDRRIGVEGSLNYGAALTKRLLSCAEDVREVPASLTHAERRKRRSQGKSDLIDAVAIARVVAREEDLPSARRTAQLSDLKLLVDYRDQLARARTQVANRAHADLAGIRPGYERSIPKLLTKGQLAKARRMVRGDHSLRAELLRRRLTEIARLDRSIAQAGEEIRTAVRRTGTTLTEIPGVGPLIAAKILGEVGEVSRIRSKAAFAVMSGTAPLLASSGQTNRHQLSRGGNRQLNRALHFVAFIQTRSTPEAKEYLARQRAAGKSPKESMRCLKRHLSNVVFRRLVADAGIEMAA

SEQ ID NO: 385943 - protein, 347 aa, unidentified
MEHFVGLDVSVKETSVCVVDAAGGVILEQKVPTEPVDIVTLLSAIGVSFCRIGIEAGPLSQWLVNALTAADLPVICVETRHMKALLTAQQINKTDRNDARGIAQMMRVGLFKPVHVKTLVAQEQRMLLTSRKLLQRKLLDLESDLRGTLRNFGLKIGIVGGGRYEARVRELVADFPRLAAIVGPLLNVRRVMRQQLAVLHKMLLDTVRDDPVCRRLMTAPGVGAVVALTYRATIDQPQRFVHSRAVGAHVGLTPKRYQSGETDYDGRVSKCGDTLLRTMLYEAAQVLLTHGKWSWLKAWGVRVAQRRGMRRAIVAVARRLAVVLHRMWVDGSEFRWSKDSAAVSTAA

SEQ ID NO: 385944 - protein, 346 aa, unidentified
MHYIGMDCHITTLDFAVVNEAGRLVKAKRIPTSVNGFMEFVKTVPRPRTVYMEESTLAAWALETCVRYGEKLVITDAKKNHWIGSSGQKDDSIDALKLAQLARGGYIKEIHHPVGQRRRFRELMIAYHDAVRSTTRIKNKIKARFRQNGIQCTGTTVYSETHREEWKGKLPQEMTLLLILDNLWRQLEQSERTEKELLAAARAQAKHYPEIRLFQDVPGIGFIHAATIFAILETPYRFATKRKVWMYAGLGIMTRSSGGKTYSEKLSTDYNRLLKCSIKQAAESAIRAEDNPFRRKYLDMTLLHGIAPHRAKLTIARDMLATMWAMWRKGEKYNPEIRGKAACKQG

SEQ ID NO: 385945 - protein, 372 aa, unidentified
MNYNTVYVGMDVHKESFSLCAYTIEAEKASHYQRTEADYKKVLNYLEFLRTIYGDDANFICGYEAGCFGYTLYHQLTANNVKCIILAPTTMLEQRSKKRIKTDRRDAEIIAKCLAQHNYSPVHIPTAKDEETKEFLRMRDDHKLALKKVKQQILAFCLRHNYRYDGKSHWTAAHLKWLKALTPEALYKEILDEYLLTYQTLSDKIERLDKRIEELATQDEYKEAVKKLCCFIGVKTHTALSVLVEVGDFKRFASAQHFASYLGLVPGEDSSGDDQNRLGITKAGNRHVRLLLTEASQCYARGQVGFKSKELKSRQSGNTPAVIAYADKANERLRRRYYKMVLNKYKKHNVAKTAIARELACFMWSMMTDNIA

SEQ ID NO: 385946 - protein, 427 aa, unidentified
MLKHNPEPNPDEEFAAFLALDWADEEHAFHLQVVGQSKIETGTLEQKPHVLGPWVAQLRERFGGRPIAVGLEQSRGALIHALMAYDFLVLYPIHPTTVAKYREAFKSSGAKSDPLDAAQILEILTKHQDRLHRFNPDTVETRLLGRLVEDRRKAVNLRTTHVQALGANLKEYFPQALELTSGNLSSRLACNLLLKWPTFADFQQAKPSTVKSFYYGHNVRSPEVLERVLALAQKSQALTTDTAIVESGSRLTQMYVGLIQALNPVIVKYDERIQEVFDAHPEVKIFTGLPGAGPALAPRLLAFFGTDRSRYAAALNVQSFTGVAPVTKSSGKSQVVYARAACPKFDRQTFHEFSRLSVTHCQWARNYVQYYTDKGKKYHTIIRALAYKWIRILHKCWKERTPYNEDLYMEVLKKRGSIFATLHLQTK

SEQ ID NO: 385947 - protein, 364 aa, unidentified
MHSINNTELSSLEETRCQFNGGPGAIKLGIDVHQDFYTVVMQMGGANPKPPQRFQKEAFLHWAGRLKRKSGAEVYAVYEACGFGFGLQRKLSALSIQCYVVCPQKLDEGNKRVKTDGLDAKALCLRLDRFVQGNREALALVRVPSEQEEQLRAIHRQREQLVKVRKELEAQGRSLMVNHGLEPVKHWWKRGNFAALGVPEWLKELLQNSQPLLIGLQEKIGALTLQLETAASSNQPRGLGKMTSVIIDREIGDWNRFNNRRQVASYTGLCPGEYSSGNTRLQSCVTKHGNPRLRAALVELAWRLVRFQPNYYPVRKWRQILAKGALATGAARKKAIVAVARQLAVDLWRIKTGRLRAGELGLIK

SEQ ID NO: 385948 - protein, 300 aa, unidentified
MNTNTLQNINVGVDTGKSQLDIYIRPLDIYFTVPNTEKDIRDAIKTIKKHKPQRIVIEATGRLEMPFILECDKAKLPYVIANPLRIKKFAGAIGQRAKNDRLDAALIAHYAERMQPELTKLKSENIRLMSDLVARRNQLLTMQTMERNRLQILPKNISSTITPILTALKNQIEKVEAKIAKLIDSCPEYQAKNTILQSMPGVGKVLAASLISNVPELGFISNKQASSLIGVAPITRESGRFKGKRMIQGGRAQVRTVMYMAMMSAIQCNPVFKVTYERLLAAGKPKKVAIVACMRKMVVI

SEQ ID NO: 385949 - protein, 425 aa, unidentified
MTARREVTPAATWVAIDIAKHSHAVLIEAPDGKQKRFRMNSSQEDHRRLVDLLHTCSAPVRVALEATGDYHRTLAYRLLQEGFEVCLVSSVAGARYREAMFNSWDKNDPKDAGVILALLKQGITQRFVDPLIAGHHGLQELSKTHYQISLARTRLQHSLLTHYLPLYFPEIERYFHTTQAAWLAQFLLRFPTAASIRALPFETFQREAWNIVGRKVNKRTWILELYDAARTSVGLPVADDDVAIETFRLQLRRYQQLIEQRDALVETARRLLQGRPDYGSLCSLPGIGPVLALTILAEVGDLRRFAHHRQFLKYCGLDLAKCQSGQFRGQEKLSKRGNARLRFAFWFAATVAVRMRENSFREKYERYIQTDPLNADRKRKALTAVAAKMARVAYSLVKHQASYRCYFETSLPRGSIPLCRAVGTS

SEQ ID NO: 385950 - protein, 345 aa, unidentified
MKQYAGIDVSLEYSSVCVVDADGRIVREAKVHSEPDALIAWFGEQGAAMERIGLEAGLLSQWLYAEMAKADLAVELIETRHVRAAFKTMPVKTDKKDARGIAQLMRLGWFRPVHCKSLPAQEVRALLTARKLIQGKLHDIEMSLRGILRGFGLKVGPTTRRTYAARIRELIEGHPTLEAITVSLLKVRDALMDEFAGFERKLRVMARQDDNARRLMTTPGVGVLVALTFVSAVDAPERFRSSRAVGPHFGLTPKKYQSGETDYSGRISKIGDAGVRTALYEAANVILTRPVKGSDLKSWALAVARRAGPRKARVALARKLAVVLHHMLRDKTNFIPHKAASAMTA

SEQ ID NO: 385951 - protein, 414 aa, unidentified
MDGEINKSCGLDIHKHFLIATILSRSGEIKQQRFSRDDNGILDLKNWVTSEECDVVACESTSDFWVPIYDFLINHLPFIVGNARDMKAFTHKKTDKIDSEVIAKLALNQMIQPSRVFPKSHREFRSYVRLRLTLVRKRTDIKNEAHAVLSSEMLHLGDVLTDIFGKNGRAILSGISSGKNIDQIIESLSPNVRKKAVQIRNILDREISQSAAIRLQTCLNLIKHLDEEIQILEREIFNYAYKNHKREMEVLMSVPGIGELGAATLIAEISNFKDFPSGDKLASWLGIVPNVYQSADKYHNGRITKRGSKVARWILTQIAQAAARKKNSKLKEFFNRKKKSIGHAKAIIALARKIATIIWHLITNDEIYEDETGYKKGEIQKRKIIEIEMISVDERIKIISGIFAIMGKEDREST

SEQ ID NO: 385952 - protein, 348 aa, unidentified
MESQRHIGIDLHRNQFTCCVRLENGRNYLTDWRVEDLPRFIKKLRPDDEIAVEVTGNTRLFRDAVAPHVARVVAVDPNQFKVISHSVKKTDPNDARNLALYLEKDLLPEVRMKDKAQAQLASLTQTRDTLVKLRTSLKNKVNNILSAHGINLQKEALSSEKQLREILAMKFDAMVSIELEVIIDEIRSLNQRVAKLEKTITEEGSKLEGHKNLTSIKGIGPLSGSILLSVIGDIDDFEDEGKLAAYFGIVPRISNSNETERSGRITKRGSKLGRTALVQCALIAQRYSPYLKRYYEKIKARRGTGKAIIALARKLLGIIYRTLKNNWVFADFPNFVLAEEGRCGAAIA

SEQ ID NO: 385953 - protein, 340 aa, unidentified
MMMSSFVGVDLHRNNFTYCIRENGEEKKIGKCEISELKCFASMLGKNTAMAVEATGNTFMFCRFLKAHVGRLVVVNPSQFKVISMSTKKTDRHDAKVLAEFLEKDMLPEVRMKDDLQAKISSLTQTREKLVQLRTILKNKVNNLLAANFIVLKREELSTETGLRKALSFHFDPITDTEMFVVVEQIRSLNQSIEKLDKAIEDHGSKMDGFKNLKSIKGIGSKGAATLLSTIGNIHDFRSSKQLAAYIGIVPRVSNSNDTVCHGRITKNGSKIARTTLVQCALVAKRYSPYLHAFHESVKSRRGGAKANIALARKFLDIVYRTLKNNWMFEEFTQFKLVKN

SEQ ID NO: 385954 - protein, 425 aa, unidentified
MSCYLGVDLHRNCFTVCTLKEDGQSELRKWSIHALGEFAQTVQATDAVAVEATGNTRYFCQSLKDRGCRLVVVNPQQFQVISRSVKKTDTHDAKTLAQFLARDLLPEVRQKDALLAEIASLLQTRDKLVKLRTTLKNKINNLLAGRGILIRRESLSSDKGLEQVLQASVIGLERVELEVLIGQIRHLNGSIQKLEAAIKKQGPKLPGYQNLKSIKGLGDIGSSTLLSTIGDINDFASEGKLAAYFGIVPRVTNSNATARSGRITKRGNKLGRTTLVQCALIARRYSPYLAHYYARIKAARGTGKAIIALARKFLGIIYRTLKNGWVFEDFPRFVIAPAEGVWWGLATTPPGFIAFVPELIWAAGARVARSRSVPAPGSALRSHPCLALSSAPATGEFTVACEEKEAVQLKVLDILNVPVGGRSPR

SEQ ID NO: 385955 - protein, 364 aa, unidentified
MKRKVYVGMDVHKETIQIAILPSNTKALVKEQQIKHEEGQIKKFIQKLKSEGTEIHCCYEAGVTGYPLYRYLKTLGVNCIIAAPGKIPRQSSDKIKTDKRDAIKLARLLRSGDLESIHVPSEEDEAVRDYLRSRDSLRLDLGRNRQRLMKFLLRKGITYSTTKYWTASHYKWLNNLHFENEILQATFNDYYSRVRVQEENLKAMDQKIQEIAKSEPYREKVGILRCFRGVDYLTAMFLLSEVNDFKRFKIAGSFMSFLGLVPGEYSSGSKRKQTGITKTGSPRLRRILVEAAWQHRFPGTGSKVVVARRVGQSALVVSLAEKASLRLHKKFKSMQLRGKTPQVMITAVSRELSGFLWAAMNLVA

SEQ ID NO: 385956 - protein, 313 aa, unidentified
MPENRAPAHVWYVGVDVSKAELEIAFETGTSKTLPRTASRWRAWLESQADQTLHVIVEATGGLEHVVLEQCHALGIACSVVNPLRARRFAEAIGKLAKTDPIDAQVLASFGRATRPRPTEPPTPERRHLRLLVERRIDLLRIRTAEKNRLKSPGALLEPIQRHIDWLDQEVELLEEHIQDAVEADVEMAEQARRMKDIKGVGAVTVATLLALLPELRQLDRRAIAALVGLAPFASDSGPRRGDRRIYGGRASVRTVLYMAAMVASRWNPHLKAFADRLRARGKPTKVVFTAVARKLLVSLNAMVRDDAVWSPT

SEQ ID NO: 385957 - protein, 370 aa, unidentified
MLDTTTFVGLDVHARSIKAVSLDVMTGEVRAATFGYDAGAVAGWVRSVDPRARCVYESGVTGFDLQKRLSGLGVGCVVGAVSKMIKPSADRRRKNDRNDAEFLARMLSVGNVVEVWVPDDECEAARDLTRALEDARDDLSRSKQRLSKFLLRHGLVFDERTPTGRRKGNWTRAHWSWIESIRFAEGADNDVLAYYVDAVRRAAEEKARLEGLVEAEARKPRWRRRVDSLRCLKGVDTATAADLVFEAGEFSRFRNARSFAAWVGLTPSEHSSGESDRRGAITKAGNKHLRKALVEAAWHYLTCSGRPKDLAKGQARDRGARRHAAKGVRRLVERREALLARGVHGNKANVATARELACWVWAVGLMAEEA

SEQ ID NO: 385958 - protein, 323 aa, unidentified
MTFVGCDLHTRMQQVAVLDTETGEISERQLPHDGMAVEEFYAALPRPVTIGIESTGYATWFHTLIQRLGHTLLVGDAAKIRAMVVRKTKTDRRDALHLLDLLRHDRFPTVWVPDPATRDLRALLAHRMRLVRIRTMVKNGLHAIALNYRLARGSKLLRQAGLAQLHALALPPHTAQRRDQSLELLAGLTAQIRALDEAITTAALAHPDAPRLITHPGVGALTALATIVVLGPVARFHDSKHVVSYVGLAPALNASADKYHLGHITKQGSPLLRFALGQAAAHAARMDADLKRTYFTLVHRRGRPASQSRRRPQAPRAAVHYAA

SEQ ID NO: 385959 - protein, 353 aa, unidentified
MEKVSKLDFTGQHIYIGLDVHKKSWSVSIRTPQLEHKTFTQPPEVEKLTNYLEKTFPKATYHTVYEAGSSGFWLHDRLKEKGVDCMVVNPADVPTKDKERTGKTDRIDCRKLARGLCNGELKGIYVPSRKQVEDRSLVRTRQSMVRKQTRCKNQITSILYFYGITIPEETRWTKQFLNWLESIQMERASGDFTLKTHLEELKHLRQLIANLNRAILSLSRTEEYRHNVILLKSIPGISTLTAMILLTEIGDVSRFSSLDKLASYAGMVPDIRSSGETEYSNGITYRRNAALRSLLIESAWVAARKDPALMMVFNKHSLKMKKSQAIVHVARRLLSRIRFVLKNQQKYVLATVN

SEQ ID NO: 385960 - protein, 339 aa, unidentified
MQIRSVGIDLGKTTFHLVALNAAGKVLVRKKFTQKQLITFTANMQTSLVGMEACSGAHFLGRVLRTQGHDVKLIPAQFVKPFVKSNKNDFLDAEAIAEAVDRQNMRFVPIKTDDQLDLQATHRVRDRLVARRTSVINQLRAFLLERGMVFAKTPYKLKQAMPEILENADANLTPRMRNLVGLLWSEWKGLEQQIAAMNEEVEEIASSDPACQRLRQIPGIGPLVATAIVAAIGNGAAFHKGREFSSWLGLVPRQHSTGGKARLFGISKRGNCYLRKLLIHGARSAVLRVKRERSPFGSRLDSLERRSPVKIVITAAANKLARIAWAVLSSGNDYRPVPA

SEQ ID NO: 385961 - protein, 421 aa, unidentified
MQVLFERCAAVDVGKDVIAVVARLPGDGPDGRQTVKRTFKTFYGVLAEAARWLSSLGVTHVAMEATGVYSMPVYHALIEHGRFAQVLVCNAGHVKNVPGRKTDLADAEWLAHLLECGLLRGSFIPPAEIKAARDVVRYRTKVVQSRTSEVQRLGAVLQDAGIKIDSVASSIATKSGRAMIEALIDGERRPRVLADLAKGKMRAKIPDLELALEGRFGDHHALMCRLHLDHIAHLDTMITRLDAQIEAMMTPFRAARDLLTTAPGIGPLAAAAVISEIGAAPAEFFTTAAHLASWTGLCPGNHESAGKRHHGRRRPGNQHLQSLLVECAWAAVRHEGYLKSLYHRHVMKWGGYRSPPAKKKAIIVVAHALIVIIWHILATAKPYHELGAGYLTTRLDPERETRRLIAKLQALGHNVTLQPAA

SEQ ID NO: 385962 - protein, 416 aa, unidentified
MDAIVERCAGLDVHLDTVVACVSYGKLDIKPKKEVKTFSTTTKGLLELLDFINQKECTHVAMESTGIYWKPVWNILESGAFELIVANAKKIKNVPGRKTDVKDAEWIASLLRCGLIEKSFVPPERIRDLRDLTRLRKELLGEVNRNKNRIHKVLQDANIKISSVLSDVFGETGKSILNQIIGNQCITEEFIYSLYEGRGKSKLKSTPMEMYEALNGKIRGHHVILLGMHNSNIVFLEKQINELEKEIDILLQKERDSLELLETIPGISKISASSIIAEIGTSMDVFKTEKHISSWAGLCPKNNESAGKKKRSGIKSGNNWLRSMLCECAWSATKKKDSRFKNKYWSMVPRMGRKKALIAIANMMLRLIYHLLKTKSTYKELEIQYFIDKDKRREDRIIKELKSKGYLVEKDSLQMA

SEQ ID NO: 385963 - protein, 365 aa, unidentified
MTTTTNATAASPILAIDLGKYKSVACLVDASGDPRFTTIRTSRAEITHVLSKHRPAVVLIEACLLCGWVHDLCVEHGVPCLVANTASEAWKFKHLKRKTDKDDAQRLTEVYRLGKFPTVAVPVKEVREKRGLIETRQKLVSRRVALQNRIRAVLVSQGLPAPCGVKAWSALGLAGIAAYAQPLAECALADLWRGRLDLALTELAQVKELLKVAEKKLDELAKHDAGMKLLDSIPGVGPRTAEAVVAFLPDPQRFRTTKQVSAYGGFVPRQYQSTDTDHRGRITKRGPKTLRKLLVECAWVMLRYNAWARAIYERLTHGGKTRKKQAIVALARKLLVRCWAMLRDGTVWRADPVPPAETSPPAVPA

SEQ ID NO: 385964 - protein, 416 aa, unidentified
MKLFVGLDVSSEKLDACFMTDDSTCSVLKEASYGNSQLGASQIKEYILEFSQKFEIESLVIGMEATSLYSFHPAMFFKEDLELNQLNLIVSVEQPNKLKKYRDIFEENKNDQIDAFYIADYFRIQRQVNSIIKEEEYLALQHLTRTRYQLIKQLVRTKQHFIENIYYKCNTLSKELKAEGGSVLSATLVTLMTEDYTMDQLAELSLEEFANLIQKLGKYRFKNPEGIAKAISKAIRSSYRLGKVHQDSVDIVLGVLAKEIRSLEKLIKDLDKAIDDLVVVLPEYQCLTSIPGIGPVYAAGILAEIGPINRFSDESKLAKYAGLYWRQNQSGNSEYENTPMAKRGNRYLRYYLVEATNSVRRYEPEYHAYYKKKYAETPKHKHKRAIVLTARKFTRLVDTLLRNHQLYMPPRSVIDK

SEQ ID NO: 385965 - protein, 339 aa, unidentified
MQHTIVGVDIAKNVIQLHWVDLDTGEIVNKPVKRAAFLEHFANRLPCRIGMEACGGAQHWARRLVEMGHEVKLMPAKFVKAFNTGNKNDAADARAIWMATQMPSKAVAVKTEAQQAVLALHRMRQQLVKFRTMQINSLRGLLTEYGEVMGQGRTALDKAIPSVLERLVDRLPAILIDTLREQWNGLITLDKQIVEIERRLQAWMKEDKACKAISAIPGVGLLTATAAVATMGDAKAFKSGREFAAWLGLVPGQTGSGGKVQLLGISKRGDTYVRTLLIHGARSVLFHAKEPGRWIEEMKKRRPLNVVTVALANKMARTIWAILAHDTPYRKDHLSVKPA

SEQ ID NO: 385966 - protein, 286 aa, unidentified
MPQSRTLYVGFDVHKESIAVAYIAQAPHAEVVSLGNSGTRQCDIDKLIRRLQSKSPHLVFVYEAGPCGYWLYRYLTKKGQGCWVVAPSLIPKKPGDRGKTNRWDAITLARLMRSGDLTPIYVPAIEDEAIRDLCRARAEAIRDLKTAQFRLKAFLLRHAIRYTGRATWGPAHLRWRSEVVCPTPQVQTWRLAPVVDALQALRGVQFTVAVTAVAELGDLTRFENPRQLMNYLGLTPSEYSTGERRRQGGITKTGNSHARRALVEGAWAYRYPAKVSRQRHCALPRQ

SEQ ID NO: 385967 - protein, 415 aa, unidentified
MALKIVYQICCGIDVHKTFVVACIASTNKQGVTTYKRHRFSTFTQGLKELLQWLLDNHCKDVCMESTGKYWIPIYNILEKDCNIVLAHPKYVKAIRGKKTDKKDAKWIADLFKHDLVAGSFMPPADIRQLRDLMRYRFKLTCFMSSEKNRLQNCLTVSNIQLASVVSDTFGKSSQRILDKILENPDDTAFDIEPLIHGSMKKKLPELELAIDGFITPEQAGKLKVIKKHFEDLESRKAELEKLILALASPYQQELDLILTAPSFKNKFTAIGIISEIGVNMEAFPSAKHLCSWAGLTPTNNESAGKKKSVRVSKAGCYIKPLLVQCANSVVKSEKHPEIRNRYLRLRKRRGHKKAIIAIARMLLTALYNMLKNKEPYNAELYRKSDALPVNREITIEQAILIAQFQGYKIKSATE

SEQ ID NO: 385968 - protein, 351 aa, unidentified
MMIIGVDYHPGFQQIAFLVEETGACGERRLNHSDGEAENFYRDLKARGISVRVGMETTGFSRWFERLLAELGFEVWIGDAAEIKTRRAKKQKTDRLDAELLLKLLLEDRFPRIWVPSPENRDLRQLLWHRHRLVQMRTRIMNQLQALAMNENRYWKGKLWSERGRAELEKLPLAPWTSRRRQELLEPLDRMNPTIEELTAAATLEAKKRPEALRRMTHPGVGPLTALAFVLIIGTPERFGCAKQICNYVGLIPSEDSSGGRQRLGHISKQGSSLLRFLLVEAAQAAVRCNADWRRRYRHLAMRRQRNIAKVAMGRRMGARLYWMWRNGREYSPSLEFGSHAGKLGTGNGGQ

SEQ ID NO: 385969 - protein, 421 aa, unidentified
MEVMFTRCAGIDVHKRTVVVCRVVLTDDGEWLRETRTYATTTDDLLRLSDWLTAGGCTHVGLESTGEYWKPVFNLLEGSCEVWLLNAQHIQAVPGRKTDVRDAEWIAELLRHGLVRPSFIPPRHQRDLRELTRHRTTFVRERATLANRVQKVLEGTNLKLAAVVTNVLGVSGRAILAALLAGEEDVAVLADLAKGKLRKKRDELERALRGQLRPHHRFLLTALLAQIDGLDATIARFDAEIARLCTVNEEEQVVTLLDTIPGIGRAMAELLVAEVGIDMGRFPTPAHLAAWAGVAPGNNESGGRQRAGKTRKGNTWLKTALVQAAHGAARMQGTALAARYRRIAGRRGAKRAIMAVAHRLLIIVYHVIAHRVPYRELGADYLDHRRPAATADHLLRRLRQLGVEVQVLASASANATAIVAT

SEQ ID NO: 385970 - protein, 319 aa, unidentified
MNCSSDHHHIFVGIDVSKAFFDVAATHSKIELRFDYDPKGMANLVRHLRPLRPHQVVLEATGGLERRLANYLIEKGFNVAIVNPRQVRDHARSLNQLAKTDRIDARMIASFATHANLRSYEKPGEIEAKLQALVNRRRQVIEQRVRESNRLGRLDEPETATMIEQAIALYNRQLDTINRRIEEIIRKNSALQKRAAILQSAPGIGPVTTAALITELPELGRLNRQQIAKLIGVAPFNRDSGQMRGRRTTGGGRSRMRKNLYMATLVATQYNPTIRAFYLRLQAQGKPKMVALVAAMRKLIIILNIMIRENQPWRPPANA

SEQ ID NO: 385971 - protein, 346 aa, unidentified
MRFYNRQHRHYCGIDLHVKTMYVCILDAAGQVLVHRNVNSTPEAFLEIVGPYRDDLVVAAECMFTWYWLADVCAAEGIAFVLGHALAMKAIHGGKAKNDRIDSHKIAVLLRGGMLPQAYVYPAAMRSTRDLIRRRLHLVRKRGQLLAHIQNTRAQYNLPVFGRKLAYRTNREGVVEHFPDPNVQKSIAVDLALIDQYDALVIDIELTIVREAKRHNADAFHRLRSVPGIGKVLALTILYEIHDITRFDRVQEFASYARLVKCKKQSGGKTLGTSGAKMGNVHLKWAFSEAAVLFLRHTEGKKLIARIEKRHGKGKALSILAHKIGRAVFYMLSRGTVFSMEKFLAA

SEQ ID NO: 385972 - protein, 369 aa, unidentified
MVQNACKRQAAGSRRARLETDHKEVSMYAFYYIGLDIHKRVIAYCIKALDGRLIGQGKIDADRKTLGEWVQGLPGPWIGAMEATIFTGWIYDFLKPHAVDLKVAHPEMLKAITAAKKKNDRADAEMIADLLRVNLLPECHMLSEEIRELRRILRYRNHIVRTAVKMQNKMSGLLMEVGASYSKKRLHGKKYFNELLERVEEIPPSVKELLKLSRASFEMFRAVQKRLVEALRTNSLIRDRVQRLMTIQGIGEVTALTWALEIGDPERFGSIRKAISYCGLCSAQRESAGKEQRGPISKKRNKHLQTMLIEAAKIAPLWNPQLAAVHERELKKGNRNRATLAVARRLVAYMMAVDKNQTDFRLREEEKAA

SEQ ID NO: 385973 - protein, 360 aa, unidentified
MMQPPAVSLPPTNIIVGVDTHKYVHVAVAIDRLGTRIGAYTVSADRAGYAELVAWARTLGPIDAFGIEGTGSYGVGLASYVRRHAIRVVEVSHCDRRKRRNNGKSDTLDAETAARAVLGGIATAVPKSADGAAEMVRQIKVARDTAVKARSAAIITLKTLIVNAPGELRETLEPLTDRKLVDRCAGLRPGTMGDTTASTKHALRALAARWLALSAEIDTHDDALGTITQAAAPTLREAFGIGADSAAEMMIVAGDNPTRLRSEAAFAKLCGACPIPASSGVTNRHRLFRGGHRQANAALYRIATVRMRWHEPTIAYFSRRISQGLTKKDIIRCLKRFIAREIYNALLHDHHARTAAHAAA

SEQ ID NO: 385974 - protein, 357 aa, unidentified
MPSIAEHVRPVTGGVDTHAEVHVAAVVDQVGRVLGTETFSATAPGYQAALAWMGGFGELGTVGIEGTGSYGAGLARHLAAQGVAVVEVIRPNRQARRRRGKSDTADAIAAAVAALNGDASGIPKSQAGDVEAIRALQVARRSAVKASTQAANQLRDLIVTGPQVLRAQLGALSTRQRVARAARFRARDRAEPLRGTMQAMAVLARRYQRLQAEISELDTALDELVARAAPALLDRQGIATHGAAALLTTVGDNPDRLGREASFAALCGASPVDASSGKQRRHRLNRGGDRQANSALWRVVFVRMSHDPRTKAYVAKRTAEGKTTKEIMRCLKRYVAREVYKILVRPARNAATVSTAA

SEQ ID NO: 385975 - protein, 355 aa, unidentified
MKQEKYIGMDVHQATISVAVMDSSGKLIMECILETKAATILEFIAGLRGTLSVTFEEGTSAAWLHDLLKPHVSHLVVCDPRRNALLKDGSKSDRIDARKLAELLHGNKLHAVYHGEHGMRTLKELGRSYLTITKDLTRVMSRIKALYRSWAIPCNGATVYAPRHRAEWLAKILEPGVRLRAERLYQQLDLLQPVRQEARRDLLVESHKHHAVKLLRQIPSIGPIRAALLVALLQTPHRFRTKRQLWAYSGFAVETHDSGEYRFVRGKLVRNRERITVRGLNRNHNHDLKNLFKGAALSASTRPGPLCDFYVALIEKGMRPTMARLTLARKMAAITLTIWKKGVEFDGKQLDRQAA

SEQ ID NO: 385976 - protein, 352 aa, unidentified
MRIIGCDLHARQQTLAVLDTTTGEVMEKTLTHSGTNVEEFYSTLPGPVRVGIEATGTMQWFLSLMEELGIECQVGHPAKIRAAEPRKQKHDRRDADLILKLLVENRFPSIWRPSKDLVDLRALLLHRHQWVRMRTRIQNALQAIALANGLRRGPSLWSQAGQCAIASLPLAPHTAHRHNELQAMYAKFEVEIEKLNQRVAEQAGERPGARLLMSHPGVGPITALATDVFLGDPTRFADGKALASYVGIIPSEYSSGGRQRLGGLSKQGNPLLRFLWCEAAAHAVRRDPELQRFYRRKLIQKGLGKARVAAARKLGIRLWILLRDQIDYHEFCRRGQMQQNSGDARAGMPGTR

SEQ ID NO: 385977 - protein, 318 aa, unidentified
MSSIVGIDVAKATLAVVLITPAGKALQKSCANNAAGHTDLIRWLARRAVPPVSVGLEATGGYQDAVALALHDAGHHVSVLNPSAVAAYGQSQLRRAKTDPTDAALIADYIRTQQPARWVPPPPEARQLQALVRRLDALLEMQTQETNRLELAATIVRPSIEGTLAHLHDEIDVIKRQIAAHIDQFPTLRTQRDLIVSIPGIGNTTAAIVLGELLDIARFTSARQLAAFAGLVPQIRQSGTSVRGRGTLSKLGASRLRKALYWPAIAAMRHNAPLQRFATRLRDAGKPTMVVVAAVMRKLLHQIYGVLHSKRAFDPTCA

SEQ ID NO: 385978 - protein, 377 aa, unidentified
MTATTRPQFRSVSEPTLYVAFELSAKQWKLAMTSGVGVEPWLRHVVAGDLRGVERAIQQARTRFRVAPGTPAESCYEAGRDGFWIHRALTQLGIANRVVDSASIAVNRRARRAKTDRLDALKLVRMLVRACGGERDVWREVRVPSQADEAARHVSRERTALVQEQTRVMNQMRSWLVTWGCALPSRRSSGWWTTVRDWAGAPLADTVQARLARAAARVTVLEAQIAELDTAQKTAMRGAPADSALGRLVQLKGVATTGASVLLDEGLVWRAFRNRREIGGLLGFAPTPYQSGEVTHDQGISRAGNDRLQAISIQLAWSWVRWQPASALTQWYHQRFAGGGKRARRIGIVAVARKLVIALWRYATTGVLPTGAMVKVA

SEQ ID NO: 385979 - protein, 347 aa, unidentified
MALATISVLGVDLGKNVCSVVGLDASGAVVMRRKMRRETLIGLAEKLPACVVGMEACCGAHHLGRVFAAHGHDVRLMSPEYVRPYVKAQKNDDRDAEGIAEAATRPTMRFVDLKSQDQLDIQTLHRSRDRLVGERTALINQLRAILLERGMVAPQGKRKLEQFLTVLMDEQGGEGLSSRMILLVADARAQWAELDRRIAAFDTEFIRWAKENDNARRLTTIPGFGAIVASALVAAVGHAESFDHGRDLAAWLGLVPRQFTTGGKPKLLGISKRGNKYLRKQLIHGARAALPYVAERDTPLGRWAKALMARTHHNVAVVAFANKLARIAWAVLRRGEPFAATGIPAAG

SEQ ID NO: 385980 - protein, 470 aa, unidentified
MNHYMGIDVSLESASVCVVDGSGKIVREDKVASEPEALISWCASLGLSLARIGLEAGPLSQWLFAAMRQSGLAVELLETRHVRDAFKAMPVKTDRNDARGIAQLMRLGWFRPVHCKSMEAQETRALLTARKLVQQKLHDVEMSLRGILRGFGLKVGKTTPRGFEGRVRELVAGHSSLEVVAAALLSVRAVLSREFNAFEKRVRAMARCDTRARLLMSTPGVGAIVALTFASAIDDPARFKSSKSVGAHFGATPKKYQSGETDVSGRISKIGDQGVRTAALRGRPLHSDQAAQRLLALEELGDEARQARRPAKGEGGAGSQAHGDHAPDVGRWNDVRRPASLAPCSAPSRTLRAACGGGQAAILDGACARRCAELQVGTEEPSVAVEQRNRTKQKENIDGFRAGHGHQPPRSDVPSPGRRIRSDRNPSSGPTTTLRRLVGLSSQDTIRRRPLRRPRTEACTRRSDDVKGGA

SEQ ID NO: 385981 - protein, 473 aa, unidentified
MSKDTLNEPWRSKGKRLSTAKYVKLPKHLEHINQMAAGIDIGSKSHFVCVPEGCDAVSVREFQSFTADLYELVSWLKQCRIETVAMESTGVYWIALYELLESEGFEVKLVDARHVKNVSGRKTDVMDCQWLQQLHTYGLLSGAFRPEQQVCALRAYLRQRNMLIEQAGSHIQHMQKALSQMNIQLHNVISDITGDTGMKIIRAMVSGERDPALLAKYRDPRCKNSVETIKKSLTGYYREEHLFALTQAVELYEVYQAKIAACDREIEKQLGQFKEIARQVPEIEKTVREKRKSRSHCKNELSFDVKTHLIRLTGVDLTAIPGIEASSALKIVSEIGLDLTRWKTSKQFASWLGLCPGNKVSGGKRLSGKSKRTANYASKTLRMAASTLHRSQTALGAFFRRLKSRLGAPKAITAAAHKLATIIFNMLKKGVEYVETGQNYYEEKYHERLVKSLSLRAKTLGFDLVKTPMNSVA

SEQ ID NO: 385982 - protein, 366 aa, unidentified
MMYLGIDQHARQITISLRDEAGDVLQARQVSTQPEKITTFFRQLTDGRLYADASFVAVLEVCGFNDWLIRLLRDYRCHKVILIQPEDRKKCKTDRRDASALSELLWVNRDRLLHGKPVRGLRQVDIASSTDQENRRLTTLRKEAGQARTRLVNKVRHVLRRHNLQWQMPTKRFPTKAAIAWLKQVALPEIDRLEMNHLLCDVERIQQRVKELEQVIAQRCGVSAEAVLLSSMPGVSFFTATSLACRIGRVERFPRAQSLANYWGLTPGCRNSGENTQRLGNITKAGSGMARWLLAQVTHKVLRKDARLREWFKRIKRRRGSTIARVAVMRKLATIIWHMLSKRKTYAECRTLAEVGAKEREEQPCG

SEQ ID NO: 385983 - protein, 452 aa, unidentified
MERSKSGALSMVNPRAAAIDIGSTMHMAAINPDADDNPVRAFGTFTGDLHDMARWFKTYGVTTVAMESTGVYWIPAYEVLEGHGFEVILVNARYAKNVPGRKTDVSDAAWLQRLHSYGLLRGSFRPEAGVATMRAYLRQRERLIEYAASHIQHMQKALMEMNVQLHHVVSDITGVTGMRIIRAIVSGERTPNTLAQMRDVRCHATIETICAALSGNWRDEHIFALGQSLALFDFYQTKVLECDRKLEVALQALEIDEGHDVRQLPKVRTKRRQVNTPDFEVRSALYRVLGVDLTQIHGIGPSLALKLVGECGTDLAAWPSSKHFTSWLCLAPGNKISGGKLLSSKTRRSSSRAAALLRLAATTIGRSDTALGAFYRRLSARAGKAKAVTATARKIAVLFYNSLRHGMAYHDPGASQYEERYRSRVIGNLQRRAKAFGFILHEMPAEPDMAVS

SEQ ID NO: 385984 - protein, 342 aa, unidentified
MENIGIDVHKKESQLCIITEAGEVLELRIRTERGRFKEVLGARGKAKVLMEASTESEWVARCLEEMGHEVVVADPNFAPMYGMRTRRVKTDKRDARALADACASGTYREAHRTSEARRQTKALLAVRDALVRARAKNLTLMGALVRQQGLRVATGAAEKFLQRLAKVELPASLKESLEPLMEVVTLLNKQVAVVDEKLSVMVEADEEMKRLCTMPSVGPVTAAAFVATIDDADRFDGPHQVQAYLGLVPSERSSGEKQQRGRITKTGNGKVRRLLVQVALSTMRLKKASSKPLWEWAGRIEEKRGRKVAAVALARKTAGILFAMLRDEAPFKARGQAEPATA

SEQ ID NO: 385985 - protein, 438 aa, unidentified
MPQDPNDEPASVLLERLRGSNRQTTTRRLRARTKEPFSHPSLPGLMGWMAPERHLCAKLGMQLQQRGPSMAQVTTIGLDLAKRVFQVHGVDATGTVVVRRSLRRRQVLAFFAKLPSCLVGIEACATAHCWAREITKLGHDVRLIPPAYAKAYVRRNKNDPADAAAIWEAVSRPSMRFVAIKTEAQQAAAGIHKVRAMLVKQRTMLINTLRGLMAEFGIVVADGRQHVEELIAVLTDPAEARIAAPLHDGLMAIVDSLRSLEQRIERIEKQILGWGRSNPTCRHLTTIPGYGPILSSAMAAMVVEPTAFASARHFAASLGLVPRQDGTGGKVKLGPISKRGNGYLRRLLVNGAMSVLCSKRAKEDPWLMKLLASKPRKVAACALANKLARIGWGVMMRQEDFRSRRMISRTPDPSQPDVVLTALKTASRAPLAVACGQS

SEQ ID NO: 385986 - protein, 391 aa, unidentified
MILVGIDVAKDKHDCFIMNSDGEILAKAFTFSNTLEGFNFLYEKICSVSSHQDKIKVGLEATGHYSYNILGFLLDKGLPTFVINPLHTNLYRKSLSLRKTKTDKVDSRTIAMMLLSDVDLKPYSETSYHNEQLKSLSRYRFTKVKERAKLKTSVSRLVQILFPELGQLVSTLHMASVYRLLEEYPGSSYIASAHLSRLTNIIFESSKGKYNRDTAITFREVARKSIGSVIPAKSLELKHTIKLIRELSSEIDEIDAEIKIMMEEIASPITTIPGIGYNMGAMIISEIGDFSRFSSPDKILAYAGVSPSTYQSGKIDNCYSHMEKRGSRYLRYALFIAAQKVCHWDNTFSEYLSKKRSEGKHYYVAISHAVKKLVRVIFHLERTRQPYLKAA

SEQ ID NO: 385987 - protein, 412 aa, unidentified
MQVIIERCAGLDVHQETVVACVLFGAPGDRPAKEVRTFRTMTRDLEALRDWFQALGVTSVGMESTGVYWRPVYAVLEGLFDLIVGNARHIRNVPGRKTDVKDAEWIADLVRHGLVAKSFVPPAPQRELRELLRYRRKLVESQAAERNRPLKLLETANIKLASVASDVFGVSGRAMLKALIEGSASAEEMADLAKGQLRRKRADLVLALEGRMEEYHRFLLSTQLRRLEAAEQDIAALDDRIETKLVPYSVQHALLMQIPGVDWVVAAVLIAEIGVDMSVFLSVYHLSAWAGVCPGNHESAGKQKSGRARKCNLHLRTMLVGAAISAARTKGSYLKDKFHGLKARRGAMRAALAIAHKMLVAAYHMLAKGLPYKELGEAYLDQISQTRTVANLKRRIERLGYNVTLEPQAKAA

SEQ ID NO: 385988 - protein, 351 aa, unidentified
MMIIGVDYHPSFQEIAFLVEETGEYGEQKLNHSEGEAERFYRDLHARGIHVRVGMEATGFSRWFERLLAALDFELWIGDPAEIKAKRVKKQKYDREDARLLLRLMRENNFPKIWVPSPENRDLRQLLWHRHRLVQMRTRIMNQLQALAMNEGKRYKTKLWSTQGRTELEKLPLAPWASRRRRELLELLDRLDPSIEELSKAVEREARKQPDVLRLMTHPGVGALTALAFVLIIGTTERFQRGKQIGTYVGMIPSEDSSAGKQRLGHISKQGNSLLRFLLVEAAQAAARINPHWRRRYMHLAMRRHKSIAKVAMGRRLGVRLYWMWRNGCEYSSSFEFGSYVGQLGTGHGEK

SEQ ID NO: 385989 - protein, 345 aa, unidentified
MNQVSTLSIDLAKNVFQLLAVDKHGKPCFSRRVNRQKLKETIQNIPPCRVVMVACGCAHYWGRMCIKAGHKAHLVRAQHVFPIVRGNKNDKNDCLAIYEASQRPYIRFVPVKSESQQAVLLLHRMRERLMKARTACLNQTRSFLLEFGIETPKSYRAFYNHIQTLLDQQLQPVILLLIHETCAELRAFERQLRQLDSLFRGANQRSPAAEIMQSLPGVGPIIASAFSASIDKGQAFNNAKEFGVWLGLTPRQYASADKSVLSHITKRGDRYLRKQLIHGARTVVTHAHKKDDDLNRWVTALRERVGVNKTIVATAHRLARLMWILLQKNEPYQPQYTQSGATQCI

SEQ ID NO: 385990 - protein, 339 aa, unidentified
MKLYGGDDLHSTNNYLAISDEKDKRIFKKKLPNDPEIILKTLEPYKEDLVGIAVESTFNWYWLVDLLMEEGYRIHLANPSAMKKYEGLKHSDDNNDAFWLAQMLRLGILPEGYIYPKEERPVRDLLRKRGHLVKLRTSLILSLQSIVNRNCGFKINVNNIKRIRENKVAPLLAGQEDLELSGRVSKEAIDFFTRKIWEIESAAQSKMKLKEPFNHLKTICGIGKVLSLTIMLETGPIGRFPKVGDYVSYCRKVPTRWTSNGKKKGKGNKKNGNRYLAWAYSEAAELARRYDEYARSYYNRKSAKTNFMVAHNALAHKIARAAYYVMKDCVPFDPDKVFA

SEQ ID NO: 385991 - protein, 338 aa, unidentified
MYYTGIDLHKFTSYLTTVDSTGAIVKQENIKNIAHNFVQYFGSIPGQHKTTVESTMTWYWLNDLLTSMNIPLVLAHAKYVKAIAYAKVKTDKVDSHTLAQLLRMDYIPSAYKISNENRLLRDALRARLKIVQRHTSVTNSMQLLLAKYNYDSPTQLTGIPEFQYEQLSEVEELLDSQMLELEKQLYPFLIPNDDIQRMLWIPGIGKMNAFTILLEIDDINRFPDVKNFFSYCRLVPSARNSAGKAKQRSSKDGNKYLKGVFTDAAIHAVQYYPVIKKYHNSLFRKKNKFVTRTIIAKEIARVIFYTLKYKTDFNNKFKGKELKHTKSLQWPRITSPCA

SEQ ID NO: 385992 - protein, 420 aa, unidentified
MRGMRGKKVRAVKEGMLIVTVDIGMASNTGYCTTVDGRDIKPFRFENSREGFEKFWHIIMAGKNRFSCNEVMVGYESTGPYAEPLAHYLMDKPVTIVQVNPLHTKRIKEVNGNSPLKTDDKDPRVIADVLRLGHALSVVVPEGDAAYLRRLNNARERHVGERTALLNQLQQLVFLIFPEFKTVFNDIAKTAQHVLKNYTTPEKIGALNKDSLGEEIRKRSMGKFGLREAELLINLARDTVGIKEGVAGIVLDIRHILVQLEALCGFVHEAETEMAKTLERIPCSARILSIKGLGVVTVAGLIGEVGDFRKFRTQSEIMKLAGLDLYEISSGKRKGQRRISKRGRSLLRKILYYAAVSMVRKNGIMYTQYANLIARGMVRTSALIVIAKKLLRIIHAIVRDDRDYVPDYASQKRMVIKKAA

SEQ ID NO: 385993 - protein, 339 aa, unidentified
MKYTPVGVDIAKHLIQVHFIDEYTGELIDKQLRRQDFLMFFCNREPCLIGMEACGGSQHWARELTKQGHKVRLLQARFVKAFVMGNKNDVMDARAIWMAVQQPGKEIAVKTEEQQSVLVLHRSRRQLVKFRTMQINSLHGTLLEFGETIHKGRAAMEREFPEALERMKERLPPYLITVLENQYNRLNELDSLIEDIEKQLASVAKQNETCKRLLDIPGVGPLIATAAVATMGEASAFKSGREFAAYVGLVPKQTGSGGKIRLLGISKRGDTYLRALFIHGARAAALLTKEPGPWITELKKRRPASVAIVAMANKLARTVWAIAAHGSKYDKNHVSIRPY

SEQ ID NO: 385994 - protein, 391 aa, unidentified
MTYFIGLDIAKYKHDCFIMDENGVVIKDSFSFKNDQSGFNTLLDVLKTLDPIQEKRIGLEATGHYGSNLKIFLEENSYSFMEINPILIARFSKATTLRRTKTDKIDARLIALFLLSADYKPYPLKSYHVRNLKSLCRARESLVKERSLQLVKLTNVLDLLFPEFKPFFKGNLKSSTVLYILENYGAASKMARMNVDSYDKMSSALRKTISYAKFLELKKLAKNTVGKEDAILTFELELYLELFKELDLKIAEIESLILKEYGEMNSHIHTIPGIGIISAAGILSEVGNFDKFNNADQLLAYAGLEPSKNESGTHDGGGHMVKHGSSYLRQYLMNVSEMQLVHNPRMYEYYLKKKNEGKAHRVALSHVARRLVRIIFSLEKNDTDFDMNKMR

SEQ ID NO: 385995 - protein, 347 aa, unidentified
MRFYTKQHKHYCGIDLHARTMYVCIMNQAGEVLLHEDFRANPDAFLKAVAKYREDLVVSVECIFTWYWLADLCRRENIHFVLGHALYMKAIHGGKAKNDRIDPHKIAVLLRGGNVPQAYVYPPEMRATRDLLRRRLHFTRKRAELLAHIENTNSQYNLPAFQKKLTYPSNRGEASGRFTDLVVQRNIDVDLGLIAYYDQMLRDLENFILRTAKNHDANTLYRLRTVPGIGKILSLVILYEIHDLSRFKRPQELASYSRLVRCSRESAGKVSGAGGKKIGNVHLKWAFSEAAVGFLRKNEEGKKFYSRLVQKHGKGKALTVLAHKLARAVYHIWKHDTVFDQERFLTH

SEQ ID NO: 385996 - protein, 350 aa, unidentified
MYIGVDTHKKQHVLVAIDEQGRRHGMHHSLNTPEGWAQSVAWARAQGSACYWGIENSGSLGKGFAQFLLAQGETAVHEVSPHRTAQYRRRGRTQDKTDETDALAIARLMLAEGDQLPRVRRDDTSTELRLLSDHRDNMLVERTRLINQLHGQMLQIDPSYKEKSGRLTAEAAVIYCRDLTIADVDDLIRTRLLIVRQLAAQILRLDTDIAAVTAELERRVQESQTPLLALRGVGTIVAARVIGELGTTPRIPSAPALAALAGIAPVAVSSGGRGGYRLNRGGNRQLNRAIHIIALTQRRCDPRAQAYYAKKRAEGKSARAAMRCLKRRLVDVLYRLLPQEPAETAKQAAA

SEQ ID NO: 385997 - protein, 451 aa, unidentified
MNKKVSMQIINPNAAGIDVGSRSHFVAIGQGKEDVKEFGVYNEDLQAIAAWLLLHKVTTVAMESTGTYWQSLFAVLQNAGIQVILCNGKFTKNIKGKKTDVQDCQWIQKLHTIGLLSGSFLPDEATEQLRTYCRHRANLLDNAADTTRKMQKYLRLLNLRLDVVVKDITGLTGLAIIEAICKGEVNAQVLASLRHGNCKKSEEEIAKALQTNGRKDYLFELKHEYKMYQSLQSAITSCDVEIEKMLTEQINNNDDKRQHIIDKKIHKRINKNSPKNIDINLMAYQYFEGVDLLAIEGVSHSTVLSIMSEVGPEGLKKFDTAKQFASWLRLVPNNKISGGKVLSSKIPKGSNRLKIALRNAANAIGNLKDTPLSNFFNRINFRKGRVSAISATARKLAIIIWNMIIKKQPYNNEHGYEFLDQKRKRKVKEMRKLIHKFDIKTDELGLQLSGL

SEQ ID NO: 385998 - protein, 355 aa, unidentified
MESLKYVGLDVHRDTISVVVLEESGKMVMQTILATHAAALLDFVGGLRGSVHITFEEGTHSAWLHDLLVRRVARVVVCDPRQNALLKAGNKSDRIDARKLAELLRAELLSPVYHGETSTVTLKHLCRSYAALTEDTTRVMGRLKALYRSQAIRSAGKKPFGRRHRDEWLAQLTQAGMHRRAERLYEELDALQSLRRAARRELIVESHKHDAVKLLCTVPFLGPIRAAVLLGRVQTPHRFRTKRPFWAYCGLALETRSSADYHFKEGQLVRAKKPVFIRGLNVNHNHDLKNLFKSAATTASAMPGPFHSFYQTLLAKGMQPAMARLTLARKIAAIALCVWKKGEPFDAEYLKPQAA

SEQ ID NO: 385999 - protein, 341 aa, unidentified
MEISTIGFDTAKNVFQIHGVDSSGNVVLRRQLRRAEVLKTFGKLPPCLVGMEACASSHYWAREIGVLGHDVRLIPPRRVKAYVTWGKKNDATDAEAICEAVSRPNMQFVALKTVEQQSALMLHKVRRLLVEMRTKTENALRSHMAEFGHIAAKGDAGRTALIALVDKGGEWLPTIAQQALSALVRQIRELSDQIAALDASIKVWHQHNAQSQLLATIPQIGPVTASALVATIGDASRFKNGRQLAAWIGLVPSQNSSGGKERLGGITKCGDRYLRTLLVLSATGMIRRIRKDPSLWPWFAKTLARKPPKVAAVALANKLARTVWAMLVSGEIFSDQSAMAQ

SEQ ID NO: 386000 - protein, 347 aa, unidentified
MSIAMIGLDTAKSVFQVHAVDEAGTTEVRRKLRRSDLIMFFEKQEACTVVMEACGAAHHWARVLIGLGHEVKLVAPEAIKPFVKKGKKNDAADAAAICQAACRPDIRFVPVKSLEQQGILAVHSARSLLVKQKTMLANAMRGLATEFGVTVPRGIGRLEELVALADVGNTLPGRARRVIRELLEHCRILAASIEVLEAEIVAHARQDEAARRLATIPGVGPITASLMAATVADIGLFKSARQFAAWLRLVPRQYSTGGKTRLGRITKAGNRELRKSLVLGATSMVYRAAAWNSAAGVWTRAILERRPVRLVTVALANKMARIAWALMTRKEIYHPKAPVTVEAQAVA

SEQ ID NO: 386001 - protein, 320 aa, unidentified
MMAQNDLVVVGIDVAKGKVDACIRRFTLRQTFPNTAQGHRKLVAWLRKYQVSKAVMEASGGYEREWRNVLHDAGIEVRIVDPRRVRNFALSAGRLAKNDPIDAEMIAWFAETFRQAPGQIPDAAREELAALAKARKALVDVKIRLLAQNEHAAPEPARKAHARVIKSLAAEIAKLEAAISARVKAVPEFAELAEIIESVPGLAQATSAILIAGMPELGQVSDEVAAALIGVAPYDDDSGKRRGERHIKGGRRWVRNAIYMPCLGAATQNNPVLKAFYQRLLAKGKEPKVALIACMRKLIIILNTMIARRQKWNPGRHAVA

SEQ ID NO: 386002 - protein, 436 aa, unidentified
MLSCLNLNAAGIDIGATEIYIAVPGDRDPQPVRCFATFTEDLHAAADWLKACHIETVAMESTGVYWIPLFQILEARGFKVFLVNAHHVKNVPGRKSDVSDCQWLQYLHAVGLLRGSFRPEQAVCTVRSILRHRDGLVQMASTHVQHMQKALDQMNLQLHHVISDITGLTGVSILEAILAGERNPHTLAALRDRRIKATADTIAKSLVGDYRREHLFTLRQSLTAFRHYQELIAACDREIAQYLEAFESKLDPPPGPPSPSRDEQKPSGSGEFNLRTHFHRIFGVDLTKVPGIQILTTQTLLAEIGPDLSKFFDGPAFACWLGLCPDNRITGGKVLSSKTRKVNNRAATALRMAALSLHRSQSFLGHFYRRMRAKLGAPKAITATAHKLARIIYHMITTGHAYDETICAQNELQNRQRLEARLRKQARELGFQVVAL

SEQ ID NO: 386003 - protein, 415 aa, unidentified
MEGRIRYCVGIDWASDKHDVCVVEADGSVRDDFVVAHTADGLADLVRRLERLAQRGALAISIERPSGLLVDTLVEAGHTVVPIHPNALKATRPRYAAATGKSDPGDAYILADVLRTDGHRFRSLRPPSDHTKALRAAVRTRDDLVATRVALANQLRSLLETFWAGASAIFADVDSPIALAFLDRYPTPDSAARLGPKRLERFLKTHAYSGRRSPQTLLERLRSAPRAHAAELERETKGHLVRSLVRVLSPLVVQIRQLDGLIAALLAQHPDGAIIQSFPRSGTINAAQILAELGDDRLRFPTFQQLAAEAGVAPVTYASGKHKGVACRFACNKRLRRALTTWADNSRHSHPWAFAVYRSARRRGCKHPHAIRILARSWLRVLWRCWNDHTPYDIHNHGRARPFLEKPPITPSAAA

SEQ ID NO: 386004 - protein, 344 aa, unidentified
MTKMTVAVLGIDLGKNSCSLAGLDATGAVVLRKRMTRAGVVQFASALPACVIAMEACCGAHVLGRTLAGQGHTIRLMSPEYVQPYVKAQKTDDRDAEAIAEAATRPTMRFVSLKSEAQLDLQVLHRARERLVLARTALINQLRAVLLERGVIFPKGRRILMRRLDEFMAGDLALSVRADRLLKELREEWAGLDRRIKAYDDEFVALTRDDAQARRLATIPGIGAINATALLAAVGDASAFAKGRDLAAWLGLTPRQHSTGGKTKLLGISKRGNRYLRKQLIHGARAAMPHLAAKPDGLGAWLPHLLTRAHPNVVVVALAAKLARIAWAVLRHEKDFDQQAVMAA

SEQ ID NO: 386005 - protein, 331 aa, unidentified
MNKKNFNYFIGIDISKKCFDIAIIENDRTTSYVFENTKKGTNAFIRLLKNQKIPLDNTLICMEHTGVYGKLIITKLVEKQANFCVEMPIQITKSIGLQRGKNDKVDAKRIAFYASKNYPELELYKPIAEVLEKMKILLKIRKKLVNTRADINKYPNELERFSPEIGKLARKNLKRINKNLEDEIKRIEAEIKKLILSDDKLNKTVGLVTSVTGIGQITALHLTVFTNFFTRYDNPKQLACYSGVVPFEYTSGSSIHRKSRIHPMANRTLKKHLHMSALAAINHDPDIRAYFLRKVEEGKNKMLIVNNVRNKLVHRVCAVIKRQQPYVKNIA

SEQ ID NO: 386006 - protein, 419 aa, unidentified
MTETYATATKPVLVGIDVAKSRHEVLIEVPGSTRRRRVTMLNTRADFERLTALLREHGRPVRVAFEATGNYHRALAYHLTRAGFETKLVSSVGLARTREALHNGWDKNDPKDAQVILHMLRIGAEQFYHDPLIQGTNDVQELSKTHDIVSKSKTELWHRILTHYLPLYFPEADRFHRSSRSDWFLSFLDRYPSPHFISAMSREAFIADAWEVVGRKVSKERLLSDIYDTAASSVGLPVERDSDAIRMFRMVLAEGRGLIEQRNRIEVRAVELLSDNPDYRLLCTIPGIGPINALTILAEAGDLRRFRHHRQFLKFCGMDLATIRSGTFRGQTKLSQYGNARLRRTFWIAGQVAIMQRANSFRDKFERYITKDRHNAHLRRKAYTAIAAKMARTAHAVVKGGEPYRPFFEGTIHGGRTFL

SEQ ID NO: 386007 - protein, 380 aa, unidentified
MAEITRGLIARVGVDLAKLVIQVHAVDTAGHRLVARAFKRDQFLAWCAQLPAGCVVAMEACSSAHHWGRKLIALGLQPKLIAASFVSPYRMEGRSGKNDMTDAAAICEAASRPTMRFVRIKSCEQQGVMSLHRFREGYKEERTACINRIRGVLAEHGLVFGKSPKVLRAALADVIEDASNELSGRARLVVQRAFEHWRELDEHMGWSDGQVGQHVRGSPQAKRAAKVMGIGELGASALVGGVGEFKQFKSGHQFGAWLGLVPSQNSSGGKASLGRITKRGDDYLRTLLIQGAKSAVMSAGKRDDPISKWLQQLILRVGWQKACVAMANKNARILWAVMTREAAFDAEYVSVKPAGKCKAPSAPTKPIPTVKSAQVAACMA

SEQ ID NO: 386008 - protein, 351 aa, unidentified
MMIIGVDYHPSFQQVAFLIEETGEYDEQRLNHEGGEAERFYRDLKRKGIRVRVGMEATGYSRWFERLLAELDFELWIGDPAEIEAKRVKKRKTDREDARLLLRLMREDRFPQIWVPSPENRDLRQLLWHRHRLVQMRTRIMNQLQALAMNEGKRWKSKLFSQKGRAEFEKLALGPWASRRRSELLELLDRLTPSIEELTTAVQQEVNKRPEALRLMTHPGVGPITALAFVLIIGTPERFARGKQIGTYVGMIPIEESSGGKQRLGHISKQGSSLLRYLLVEAAQAAARYNPHWRRRYIRLAIRRHRSIAKVAMGRRMAIRLYWMWRNGCEYSPSFEFGSYAGQLEKRHGGN

SEQ ID NO: 386009 - protein, 321 aa, unidentified
MINRLYVGVDISKNWFDVCTSLDEKVPVERFSNDSDGHAQFIKAVSPLARKIHVCMEHTGGYETPLALACIAANLIVSLLDGAKLADYRKSHGHARAKTDKQDARYIARFASERKPVQWLPVPDEYRTLRELVRHRQSLIQARTAWGCRASHTALSEIVTAQRKTLREILALQIKELNKAIAAHIKASPSLKEALKLLLSIPGIAGVAAARILAETGPISNYKSAREYALAAGLNPIVIHSGQRTPPGKLPVYGNADLRCALYHPTITCKSHKIGVSNFMERVKDNGDKLKMTVITAGMRKLAHIVYGVLSSKSTYDKNKL

SEQ ID NO: 386010 - protein, 332 aa, unidentified
MIIIGCDYHPSFQQIAFVDTDTGEFQERQLQHREQAEKFYRDLAAQGMEVRVGMEASGHARWFERLLAELQFELWMGDAAEISSRRVRKQKTDRQDAQLILRLMLKDDFPQIWVPSWENRDLRQLLWHRHRMVQARTRMMNQLQAVALNEGLRCKKKLWREAGREQLEAFPLAPWASQRRGDLLELLDRLNPTIAKLTQAIEEEVEKCPAARRLQTHPGVGPLTALAFVLIIGRADRFQCGKQIASYLGLVPLEKSSGNQRRLGHITKQGNSLLRFLLVEAAQVTARSLPEWRSKYVHLTLRRGRKIAKVPWRGDWRFACTGCYARDGIMGS

SEQ ID NO: 386011 - protein, 443 aa, unidentified
MINPDAAGIDIGHREHWCAVPADRSAMPVQRFGTFTEDLEKLADWLKECGIKTVAMESTGVYWIPAFQILERRGFEVRLVNARAVKNVSGRKTDVLDCQWLQRLHSYGLLSASFRPADQMCVLRSYLRYRDELVCARSAQCQHMQKALQQMNVQLHQVLSDITGLSGLRMIEAILAGERDAQKLANLADRRVHASKATIQKALKGDYRSEHMFLLKVAFELHGTYERKIRECDEQIINEMAKLPTRVDPKQKPLPPRKPGRALIHDLVAGKDLREELYRWTGVDLTAIEGIGVLSAQVILSEIGTDMSRWRTEKHFTSWLGLCPDNRISGGKILSSHTRHVINPVADALRIAATTLERNKSALGAFYRRMKGRLGPASAITATAHKLARLIYRLLKHGDAYVRQGMELYEQRYRERLIYNLKKTAASFGFQLTQTKELTQGVS

SEQ ID NO: 386012 - protein, 420 aa, unidentified
MLEVSPDDGVIIERVAALDVGKAEVVCCVRVPGPAGRRLQEVRTWTTMTRSLSGLGDWLHGLGVTRVVMEATSDYWKSPFYLLEAAGFEVWLVNARDVKHLPGRPKTDKLDAVWLCKVAERQMLRPSFVPPEPIRRLRDLTRYRVDLVGERGREKNRVEKLLEDAGIKMSVVASDIFGVSGRAMMAALIAGERDPFMLAGMARTAMRKKIPELRQAFEGRFNEHHAFLLSRMLAHVDRLDADIAAVEDRIEEVIAPFADAAARLDQIPGVGPVAAWVLIAEIGTDMTRFPTAAHLCSWAKFSPGVKESAGRTLGRGSTGHGNRYLARVLGEAAVGTRQTDTFLGERYRRIVRRRGKKKAAVAVGRSILVIVWHLLNDPAAEFVDLGPDHYDQRRGTQRAIRSHIRQLQALGYQVILQPAA

SEQ ID NO: 386013 - protein, 344 aa, unidentified
MSEVIIIGLDIAKHVFHAHGADERGRAIFSKRISRGKLLDFFAAQPSCMVALEACGGAHHWARQLTQLGHEVRLIPPAYVKPFVKRQKNDAIDAEAICEAAQRPSMRFVAVKSEQQQAAGLVFRTRDLLVRQRTQLINAIRGHLTEYGWVAPKGPSHVTMLADLIEEEEMARSLPEAAHAMFRLMLDLFASLNGKIADLDKEIARRAREDEVSRRLMTVPGIGPISATAIAALAPPVETFAKGRDFAAWLGLTPLQRSTGGKQKLGATSKMGERTLRRLLIIGSSAVVQQVSKRGAPKGSWLEQMLARKPRMLVTVALANKMARIVWALLVKQENYRAPVAAKA

SEQ ID NO: 386014 - protein, 358 aa, unidentified
MKTKVKRISFKGQKIYVGIDVHLKSWTVSILLENIFYRKFRQNASAAELSRYLRKHFPEGEYYSAYESGFCGFSIHRELESVGIHNIIVNAADVPTTDKERKQKEDGRDSMKLAKSLRSGDLTGIYIPQISTIEFRGLVRFRRTTVKEISRNKSRTKSYLHFNGIAIPQELDGASRYWPGRFSQWLSEVRLTTPEGQMVLEKTLENVHHLRTQLLDINRALRRMAKQGKYAKALQLLMGIPGIGFVSAVTLLSELEDICRFGNLGRFCSYVGLVPSTCSSGENEGVRGITPRSNNYLRTVIIECAWIAVRQDPTLALRFTELCNRMKKNDAIVRIAKKLLNRIRYVMKNEKEYVNAVA

SEQ ID NO: 386015 - protein, 405 aa, unidentified
MDGPIITVDVSKGNCHYQPFLEKGKPLRKPKILYDTQEGFEQLSECLQKTKEKSGSEVSVVFEATGVYHRCLQKYLDDHDIPYFIISPLLSAKYRQTDLHANKTDALDCGHIAKAYYDDEKLYQFKKQEDRFVFLQRLNRMYEDELQHLRKRKVAFRSVLDIIYPRLDKCFKGKASLYDPVVMEILKKYPHPKLLLKYKEETIAKAIERRTDHNVLFISKIVHKVCECALQCYSGCDVDDIEVLKFPDMIEELQDQMERCESLLSELVKKVSEIEYFNNVASIIGIGVNLASRIIAELGDISRFKNRKAISAYAGLNPKILQSGDKDGIHLKISKKGNRHLRCLLYLGATCNYRLKKHDPLYEFNKKKRQQSISPLKSKAANIAAAHKLLVIIYVLCKNGEQYRF

SEQ ID NO: 386016 - protein, 488 aa, unidentified
MSRASKQRGKKDPTLKARAPKRKARGSHSPQGKGNRRGSKLTITNPDAAGIDIGSQIHYVAVPEGRAEISVRSFGAYTAQLDELVQWLKDCRIKTVAMESTGVYWIPLYQKLEEAGFEVLLVDAHQAKHVPGRKSDVQDCQWLQQLHSYGLLRAAFRPEDSVCRLRTLQRHRKNLVESGAMWVQHMQKALNEMNLHLHHVLSDISGLSGLRILDAILAGERDPAKLASLAHHRVQKSQAQIEAALTGDYRPEQLFVLSQSLQNYRQVQQQITQCDLGIEKQLAKMTDCQNPSQAAKPMPQSLDLGAEKPRKRKPPVALEISLAGHLKRILGVDLTTIPGLNVLTILTLVSEIGTNMTKWRNEKAFVSWLGLSPNNKISGQRVLSSRTRKVVNRAATILRLAAMILGKTNTPLGSFYRRKRAQLGGPKAVTATARKLAGLVYRLIKNGQGYNEPDLHTYELKYKDQILNSLRKRAITLGFDLVELPKAA

SEQ ID NO: 386017 - protein, 479 aa, unidentified
MRIISEGISTLSFFQIKYFGDMREKKLPNGKRKELIDYFIKMPVVNPHAAGIDVGSRKHLVCVAQNKAFTFGVTTDDFELIDACFKKHGITSVALESTGYYWKNLYVFLISRGYEVVVVNGGHVKNVKGKKTDVVDCKWIQLLHSVGLLSGSFQPDDFTETLRVYARHRQKLIEELNRYASVMNKNLVLLNIQSKTIFSDITGKSSMAVIKAIIDGERDPHKLVTHVNSYVQAPKEDQLKAMRGNWRQEYVYELTQAYNTYLHFKSQLEEVDRQIENQLSQNLDENPERKVFKDNYKTPGKQVMHKNSPNVDVLGYSNAFYEGVDLSVINGVGPSTVLSILSELGRGIDKFPSGKHFVSWLGFSPNNKITGGKVIKSRTKKHRNPLAQAILKAANAIGRTDCPLGNFFRGISFRRGWMVAKTATARKLALVIYKMLTEKVSFDYKIAQDQQEKVREKRIRNIQKSIKDLKINKSELAFC

SEQ ID NO: 386018 - protein, 326 aa, unidentified
MTAIVGIDIAKDKFDVCLLNEAGKAQEASFANSKQGINQLHHWLKKQGAKQAQVCLEATGIYGDLVAETLHSRKYQVSVVNPARIKAYADSQMRRNKTDALDAALIADYCRTQQPDPWTPPPPELKELRSLIRHLDDLKQEKQRAANRLDVQTSSQAVIQHLEAQMALLEKQIQHTLRLIHDHIDHYPDLKQQRDLLDSIPGIGDLTASYLIAELGDISRFQDVGQVVAFVGLNPRQHQSGKKQTTHGISRMGRAALRAALYMPAIVAKRCNRRLGAWATQLSQRGLTGKQVIVALMRKLIHLAYGILKSGRAFDPHFNDLPLAPA

SEQ ID NO: 386019 - protein, 310 aa, unidentified
MDVFIGIDVAKDRLDICLRPSGETFVVTRDDQGLERLVERLRAVAPVLVALEATGGYETVVASALAAAHLPLAVVNPRQIRDFARSTGKLAKTDRLDAAAIAHFAEAIRPPARRVADGEAQALGELVARRRQVIEMIVAEKNRRRLAGQPRVLKAIDRHVDLLQAELSELDRDIDGAIRKSAAWQADADLLASVPGVGKATLRTLIAELPELGRLDRRKIAALVGVAPINRDSGAQRGRKTIAGGRAPVRTALYMAALVASRANPVIAAHYQKLRAAGKAAKQALTACIRKLLVILNAILRDRKPWTLPA

SEQ ID NO: 386020 - protein, 413 aa, unidentified
MSVTLHSRASRVCAGVDWAKDDHAIAIIDSEGKVMDRFAVNHDAAGLKSLVRRLLTAGVSEVGIERGDGPIVEALLQAELTVLVIPPGQLKNLRSRYGSAGNKDDRYDAYILADVVRTDRHRLRPLVRDTTATTALRGTVRARRDLVEHRVAAANQLRAHLQIVFPAAANLFAAIDSAISLTFLERFTTQSKADWLSPKRLSTWLSTVSYTGRTTPDVLHTHLLAAPRGTTSTDAATHTKTTLAFVAILRALNTQIQALATSIGEQLAIHPDAHIITSLPRSGTVRAARLLAEIGDARGRFPTADSLACLAGVAPSTRQSGKVKAVTFRWGANRELRDAVCDFAGDSRHANPWAADLYTKARARGHDHPHAVRILGRAWIHIIWRAWQDNTAYDPTKHQALQTLLNTTTEKAA

SEQ ID NO: 386021 - protein, 456 aa, unidentified
MEIPMAKQSHRRCDQLPVLHPDAAGIDVGASELFVAVGADRDPQPVRRFPTFTRDLHVLADWLQQCGVRSVAMESTSVYWIPIHQILEARGLEVCLVNAQHVKNVPGRKTDVSDCQWLQYLHSVGLLRASFRPPGAICAVRALWRHRGSLVQMAAEHIMHIQKALDQMNLQVHRVLTEITGLSGLRILDAILGGERDPLTLARLCHKRVKSSESTVAKSLEGDYRPEHIFALRQSLAAYRYYQQLVLETDQEIQRQMVELEAADNALAKMPKRTKRLPYQRQGHEPRVFDLRSELYRIFGVDLTNVPGISAMTSQTILCEAGTDVSRFRNASAFASWLGLCPEKKISGGKVLFTKSRRVRSRVAIALRLAARSLHHAKDYMGEFFRRICRKLGKPQAITATAHKLARIVYYLLSTREAYDQSVFHKCEEEALKRAEMRLRRQAAHLGFRIIPAAEG

SEQ ID NO: 386022 - protein, 424 aa, unidentified
MSKKNSSPAGLQALYGRVCGLDLHKKLIVACVRILNAKDGTVQSRLRKFGTMTADLMELRQWLSEQKVTHVAMESTGIYWQPVFNLFEGHFQLLLVNAQHLKKVPGRKTDMKDAEWIAQLLQCGLLRPSFVPDRQQRELRDLTRQQTKLVQQRNAVDNRIQKVLETANIKLGSVASDVMGASGRKMIEALIAGEKDVTVLADLAQRQLRGKIPELQRALEGELNDHHRFLLRQLLEQYDFLANKIASVSERLGAIAPPSFCAAVEQLDAVAGVGERGAQALLAETGTDMSRFPTHKHFASWAGQCPGNHESAGKRRSGKTPAANRHIDAVLTEMAHAAKRTKNSYFKAQYHHLAGRRGKKRATGAVKHSLLVTVYFMLRDNKSYKDLGVDYFDKLNPQQRIRYHVRRLRELGQEVELSPMADAA

SEQ ID NO: 386023 - protein, 372 aa, unidentified
MTQSNILFIGMDVHKESIVISLADDDRSEVRRYGAIGGTLDDFKKLLRKLVSTGKELFFCYEAGPCGYELYRYITSQEHQCIVVAPSLIPKKAGDKVKTDKRDADNLTRLLRSGDLTSVYVPNAEDEAIRDVSRAREDAVLVLKSAKQRLKSFLLRHGIRFNGSANWSEKHLRWLAEDVNMPYPAQKIVFQEYVHSVTEGDARVKRLEKEILYHTKQWRLYPIVECLMALRGVRMVVAVTIMAELGDLTRFDNPKQLMSFLGLTPSEHSSGDKKKKGAITKTGNQHARRVLVEAGWAYRFPAKISKEIQKRQEHIPLAIRDIAWKAQLRLTKRFRIMANKGKLKNVIVVAMAREIAAFMWSIAQEVPIVVHD

SEQ ID NO: 386024 - protein, 412 aa, unidentified
MEVVHAVCAGMDVSKTDAKVCVRVAGAGRRKTVETVTTWGAMTGQILDLREHLAAAQVTCVVMEATGDYWKPFYYLLQDLPGVEVMLVNARHVKNLPGRKTDVADATWLAQLGAHGLVRGSFVPPAPIRRLRDLTRTRTAITRERGREAQRLEKLLEDAGIKLSVVASDILGVSGRAMLEALIAGQRDPGVLADLAKRRLRPKIPELTQALQGRFEEHHAFTARVHLDLIDQHTAAIEALTARIEQVIEPFRGFRDLICTIPGISTLTADVIIAEIGDDMSRFPTAAHLASWAGTTPGSNESAGKVKSSKTRPGNPYLQGALGAAAMSCAQHPGTYLNAKYRRVATRRGPQKANVAVQHAMLVAIWNMGTNGTLYDDPGADYFTRLNPERARTRAVQQLESLGYAVTLANAS

SEQ ID NO: 386025 - protein, 321 aa, unidentified
MSTVQFEQLISRGCGLDVHQKTVVATIDGEGLKRSTREYGTFTSSLTELKDWLLENGITHVAMESTGVYWKPVYHILEPSGIKVWIVNARHVKNVPGHKTDKKDSAWLCKLLLAGLLKPSYIPPKEQRELRDLTRYRKKLIQDIASNKNRIIRILEDCNVKLSSVLSSTSGVTATKLIDKLCEGNPVTMQDIDSVYHKKIEASKEELWEACNGIVSSHHVYLLETIRANTRHIETLIQELNQKIREMLSPYEKTLEHLREIPGLSHKTVEDLIAEIGLDMNVFPNEQHLCSWVGVSPGNNESAGKKKAVELRTEISKPNPL

SEQ ID NO: 386026 - protein, 379 aa, unidentified
MGKDSRHLGFDVDSDKIVVALAEAGGEVRSLGTIPYCFDAVRRLVKKLGPASGLRVCYEAGPHGYVLYWWLSKLGVHCDVVAPTLVPVKAGDRVKTNRRDALKLARSYRSGDLTAVWVPDAEHEALRDLVRGREAAKKDQLRARHRLGKFLLRRGLRAAAGVKSWTVKHLLWVKTLRFEHPAQEATFLDYLHEVEHAAERVVRLEHAIDQAIAAAPAEMQAVIAGLQALRGIKKVSAATIVAEVGPLSRFARPKQLMGYSGMVSSEDSTGNRVRRGAITKTGNAHVRRIAGEAAWAYQHRPAMSPLLKKRQQGLSEEVKEIAWKAQHRLCSRYRRLMAKGKLRQKVATAIGRELLGFIWAIGVQVEKEQRSQKKASRAA

SEQ ID NO: 386027 - protein, 360 aa, unidentified
MSNLTTTTSPIVVGGVDTHKELHVVAVVDAHDRVIGTESFSTTRAGYRALVRWMRTYGDIARVGVECTGSYGAGLMRHLDTAGIDVLEVTAGDKVDRRKRGKDDTIDAEQAAHAAYARVWTVTPRAHDGMVESLRALKIARSSAISARRVALQLIHATIISAPEELRDQLRNMTRMQLIRTLASWRPDLSGYRDPVTATKISLRSLARRYLELHDEIADLQVPMHALVDELAPDLLARVGIGYESAAQLLITAGDNPERLASEASFAMLCGAAPLPASSGMTTRHRLNRGGDRAANSALHMIAISRWRIDPTTQAYVARKKTEQHSNPEILRCLKRYIAREVYYLLRNQQRAIHQIAPAA

SEQ ID NO: 386028 - protein, 396 aa, unidentified
MTTIGIDIGGRSHAVARCRDGQPRADREVLRVSQDRAGFTVLDTWLERQAEPVTLVTMESSGHYWMPLASHLGRRDIPVAVVNPLAAKYFARSRLARTKSDPADARSLAEMAMRDTPPARDPLAGVELRQAARFAMTLVTEQARVCQRLVRLVELGFPELGELFEDPTCRTAREVLRVAPTARAAARRRTATLANANAGPGHRRLGTAKAERLQAAAADSIAVPELDAEVAFEVGLLLDQYDLLERQIEDADRRVAGLLDGETARRLQTIPGVGPSIAATLLAEIGDIERFDDFDQLLAYAGVHPAERSSGRKGANPETAWHMSKAGNSHLRAAAYRMAVVGVQHNPVIAAHYARKRAAGKSKMNALGHCMRKALSIVWGVWRNGTDFDPDWGVGA

SEQ ID NO: 386029 - protein, 316 aa, unidentified
MEAIFENCCGIDVHKKTLTACIMIGGEGKITKKEIRTYSTMTEDIEGLRDWLKSEGVTHVAMESTGIYWRPVYNILEEGFEIMLVNARHIKNVPGRKTDVADSEWLCRLLRNGLLNGSFIPPIYIRQLRDLTRYRSKLNNNIAAEKNRLQKYLEDANIKLSSVATDTLGVSGRLMIRDIIKGNTDAVGLSELAKGRLKNKKEELKKSFNSRVTEHHRMLIEMSLKHIEYIEGMMAKLEGEMDELVKKQDLAKDLELLDTIPGVDKIGATAIVAEIGADMSKFPTDAHISSWAGMSPGNNESAGKKKAQGPRLETSG

SEQ ID NO: 386030 - protein, 344 aa, unidentified
MTYYVGLDVALRSVSACVIDEQGEIVKEAKLDSEVEPIVAWLASIRSEIEIVGLEAGTLTQYLTYGFQAAGYPIVCMESRGVHAALKAMRNKTDKNDARGIAQILRTGWYRSVHVKSIESHHIRALLSSRKAILNKCIDLENEVRGLFKIFGFKLPGKLKHGAFDGAVRGIIEADPALSLALLPLLDARLVLYRTFLVLDLRARKMAQQDEVCRRLMTAPGVGAISSLTFKAAVDDPKRFKRSRTVGAHFGMTPRRFQSGEMDNMGHISKAGDRAVRIVLYAAANALLTRTTGWSSLKAWGMRLMKTKGRKRALVAVSRKLAVILHRMWIDGNDFQWGTEGGQS

SEQ ID NO: 386031 - protein, 344 aa, unidentified
MKITAIGFDLAKSVFQVHGVDEDGHVIVKKKLRRAQVSMFFTNVAPCLVGIEACSSAHHWARKLQAFGHTVRLMAPQFVKPYVKANKTDAADAEGICEAVTRPGMRFVPIKSVENQTLLALHRARQGFIKSRVAQTNQIRGLLAEFGIVIPQGPKNVEPQLPSILEDAENGLPSSFRQLLQRLLENARQLRIQAEEIEAEIKRWHENNEESRRLAEIPGIGALTASALVASIGDAKAFANGRQLAAWIGLVPRQYSSGGKAKLLGISKRGDKYLRTLMVHGARSVILRARAKAGYAESWLGRLLARRHKNVAACALANRSARVVWALLAHNRQYQTSYTRTEAA

SEQ ID NO: 386032 - protein, 342 aa, unidentified
MQRVYVGVDLGSSSFQQVGVNEPGVVVMKREFQTSAVHLVKAFSGLKGEIHVHLEAGELAPWAMEIIRPLVHRVVCSHPQSNAWIAKDADKCDRVDAYKLADLLRVNRFKEVHYPREQLRRDFKTLVQHYDELTQQQARLKTKVKARLRMQGVIVRGERVFSAPGRQAVLAAVKSVAVRTAIKQLYQVLDQSLASQTEARLLMLRTAQALPEIKWFKTAPGVGPIGACRFSAYVHTPQRFSSTRKLWKYCRLSISHRSSNGKPLRRPRLDRSGCGRLKDVSRKAFEAALRTHGDNAFKRTYQRALETTHDQTHARLTVQRKIISTLRAMWINQTPYSEQMTP

SEQ ID NO: 386033 - protein, 343 aa, unidentified
MQTVTTIGLDIAKSVFQVHGVDAAGQVIIRRQLKRRYMLAFFEKLPPCLIGIEACASSHHWSRELQALGHSVRLMPPAYVKPYVKRQKNDAADAEAICEAVSRANMRFVATKTSEQQSGLMLHRTRQLFIRQQTSVINAIRSHLAEFGIVAPVGRNGVEELLNVVMDTHDKRVPEVARVCLAALGAQLRRFKEQILEFDRLITAWHRSNEMSRRLDEIPGVGPVLATALVASVADPKAFRSGRNFSAWIGLVPKQHSSGGKDRLGSISKQGDRYLRSLFVIGALAVVRYAKIHGTKHRPWLAALLARRPTKVAAIALANKIVRMAWAMMAKGERYKEPVALAA

SEQ ID NO: 386034 - protein, 377 aa, unidentified
MSYCELSQGQVVQRVTVSDIHSLEHLLGLDQPPAIVAIEASREAWFVHDVLTSWSNEVVVVDTTRSHQLGIGQHGRKTDRIDAEVLARALESGRIPKAHVLSPKRRELRRVVMVRRALVETRVQLVTTVRGLAREQGARIPSCAVENFVGKVRAQQLAPEVAQLVEPLLSLVQGINTQLDNADEQLAVLCAQEPTISVLATTPGIGTVVAAAFVSVVDDAHRFRNAHQVESYIGLVPSENSSGGKRRLGAISKQGNCYLRSLLVQAAWIILRSSDKSDPLVVWVKKLVERRGKSIAVVALARRLVGVLWAMWRDGTVYDAQHLAQQGIRGLRGAVQSLEQQQAALVAAAKKGSVKHPATHPMAKTHRLSKTSAVKAA

SEQ ID NO: 386035 - protein, 348 aa, unidentified
MVAVMIGVDPHKGSHTAVAISPAEEPLGELRVRACAGQAERLLAWAAAWPQRTWAIEGASGLGHLLAQQLLAAGEQVVDIQPKLGARVRLLATGAVNKNDPNDARSVAVAALRSPARRQVQPEDHAAVLKVWAKRHRDLGRARTQVVCRLHAVLCELVPGGVSKRISAPQAGRLLEGIRPAGAVEGARCELAAELLADLRRIDAQIREAKKRLTAAVRASGTTLTSLFGVGPVVAATVIGEVRDVSRFADRNNFAAYNGTAPIEVSSGPRKIYRLSRRGNRRLNHAIHMAAVTQVSHRHSDGRAYYERKRAEGKTPKEALRSLKRRVSDAVFAQLQADARRAAANPRG

SEQ ID NO: 386036 - protein, 360 aa, unidentified
MRLQSNELNFEGQNIYVGIDVHLKSWTVTILTERLHHKTFSQASNVDALVSYLRNHFPGGNYVSAYEAGFSGFWVHYKLLSMGVKNIIINPADVPTSQKEDLQKTDSVDSRKIARSLRAGELVGIYIPKANTLETRTLLRSRDAIVRDLSRMKQRVKSLLYYYGISYPSDFERSGTHWSRKFMKWLREDVRLSTPAGMDGLKLLLDSVDNQRKLLLEATRKLRQLSLTEEYATDYELLRSVPGVGMITAMSLATEMEDIKRFCCSDKLAGYIGLVPTSHSSGEKDKKGEMTFRGQMQLRSKIIECSWFAARIDPTLHMAFLKLIQRMEPNKAIVRIARKVLNRIFYVLKYRTKYECAVVK

SEQ ID NO: 386037 - protein, 346 aa, unidentified
MMHVGLDLSRKRLDVQLLTEQGDRVQRLAAIPTADGLQDLVSQVAMYRQPVRAAIESMTGARFVHDQLELAGWDVAIADGVKVKGLAPLACKTDKIDAWVLAELSRRDLVPAIWLPDPGVRAERERARWRLHLVHHRTALKNRIHQTLITFGHPCPVSDLFSVGGRKLLAGFALPEPWLGSVTAALKLIDDLNRQIADRERELRELGADHPYIPLLRTVPGIGWVLSYTIAAEIGDIHRFPSATNLIGYTGLCPAVRQSGEHDRRGPLTKHGPRFLRWALIEAAQHAARTPAYRTRYQTMKRRLGRQRGAKVATVDVARRLTNAIWHMLIRNQPFAPGGAALALTA

SEQ ID NO: 386038 - protein, 316 aa, unidentified
MTGTKYIGMDVHKESISIAVRNDAGKLVMECVIETKANVILDFIHGLRGELHVTFEEGTWATWLYDLLKPYVTKLVVCDPRKNSRQGNKNDRIDARELADRLYMNKLSSVYHGGAGVRTLKELARSYLTISKDLGRVMSRVKAIYRSWGIPCAGKQVYAPRHRAEWLAKITEVGVLRQIPSIGPIRAALLIALIQTPHRFRTKRPFWKYSGFAIEMHSSADYRTVKGELQKSKKQISVRGLNRDCNHDLKNLFKSAATIASVKPGPFQEFYAALVAKGMRSEMARLTLARKIATIVLIVWKRGVSFDAKYLKSQTA

SEQ ID NO: 386039 - protein, 315 aa, unidentified
MTEHTPFFVGIDVAKLTLDMHLLPIQQSFQFTNDEAGHDALVTRLKADPVHLIVLEATGGFQVPVAAKLANAGLPVAIVNPRQVRDFAKALGKLAKTDGIDAQVLALFARAIEPQPRPLPDTDTRHLAALITRRRQLIDMRTAEQNRLAGTHVTLRNDIQAHIHWLNQRVNDVDNDLDQTLRQSPLWLEQARLLESAKGIGSTTSATLLALLPELGQLNRREISALVGVCPFNRDSGEMRGKRTIFGGRAAVRAALYMATLSAIRYNPSIKTFHSRLIAAGKRPKVAIVACMRKLLTILNAMLRDHKPWNLATNP

SEQ ID NO: 386040 - protein, 366 aa, unidentified
MRKPSTTAVRGRGKLQSEQLTIGLDLGDRSSFYCVLNGAGEVIVEERVATSPEAMKKTFGKMPRSRIALETGTHSPWVSRLLSDLGHEAIVAHARNVRLIGQSRRKDDRLDAQALARLARIDPQLLSPIQHRSAQAQADLSVIRSRYALVRTRTALICSARGLTKSFGERIHSRYVRGFKPAMGETLSPQLQVALAPMLSALEAITARIREYDAQIEKLAEESYPDVALLKQVKGVGTLIALTYILTLEDPRRFRKSRDAGCYIGLQPGRRNSGQSEPQLHITREGDSYLRMVLVQGAQHILGPFGEDSDLRRWGLKLAERGGKRGKRRAIIAVARKLAVLLHHLWISCEAYEPLHNVQKRRLAAA

SEQ ID NO: 386041 - protein, 452 aa, unidentified
MSRKKTRLQAVTEAAQMRPGAAGIDISPEVIYVAVDPQKDGRPVRSFGTFTGELYHIANWLKACGTRTVAMESTGVYWIPLFQVLEERGLEVFLVNARHYKNVPGRKTDVCDSAWLQYLHAVGLLQGSFRPTQEVCAIRTVLRHRGGLVQAASEEIQHMQKSLDQMNVQIHRVLSDLTGVSGLAIIDAILAGERDAHQLAGLRDGRVRASEETILAALEGDYRAEHLFTLRQSLESYRHYQKLIEECDRQIREMLDQFENRADGQEPPVARKKMRTSTDEELRREFHRVLGVDLTAIPGMNVGTVQILLGEVGPDLSRFRSAGSFASWLGLCPDNRITGGKVLSSKTRKVENRLAGALRMAAESLCRDQSYLGQFYRRMKSALKGGAPEAITAAAHKLARIAYTLITRQQEYDESRFEAAEKRNADKQRQRIIKQARKWGLVLVPGTPVPVV

SEQ ID NO: 386042 - protein, 392 aa, unidentified
MYIVGIDIGKNHHEASIVSPKGKQIGRSLRFATTHKGADSLMNFIFKNIGNSPCVFGMEATGHYWYPIYSFLKAKGYTIYVINPIQSDSLRKMYIRQTKNDSIDSFLIAEVIRFGQFGTTSMADENILAMRQLCRYRDSVISSRTEIKLRIGTIMEQIFPKYEKQFSSLWVSTSIGILEKYLTPENIENAPIDEHFEIIKDKSHNRLTRAKAISIKEAAADTFGIKIAQDAFSFQLKQLIDRMNFLDKQIEALDCQILEYYEKFDCYLHTIPGIGMIAAATILAEIGDINRFKSSSALVAFAGIDPTVRQSGEFSSTHNHMSKRGSPYLRHAIFLAATTCSFHNSPLNAYYKKKSDQGKHHLTATGAVARKLTSVIYAVLRDSKPYEPKSFC

SEQ ID NO: 386043 - protein, 369 aa, unidentified
MEDYSEAFVAFDVAKTKHAVAIAAGGRGSEVRFVGEIASSPAAVERLIGKLARRHGKLHFCYEAGPTGYGLYRQIQALGHACLVVAPALIPKRPGERVKTNRRDAVTLARLHRAGELTGVWVPDATHEAVRDLVRAREAAADDRRRKRQQLLSFLLRHGRVYSGSGHWTLTHRRWLAQQSFEHPAQQIVFQEAIDAIADADQRLHRLEQQLAAIVPSWSMAPVVEAYQAMRGASFIVAVTFAAEIGDVRRFDNPRQLMSFLGLVPAESSTGQTVRRKGLTLAGNRRARRVLVEAAWTYRYPARVSETLRARLEGLPKAIRDIAWKGQVRLCARYRRLSATGKKLPVVVAAIAREMAAFLWAIGREVAPA

SEQ ID NO: 386044 - protein, 353 aa, unidentified
MLRSDVQINPRRCRMKLYVGDDLHANNNFLAIVDLEGKRVNQKKLPNDLFVLRDFLKPYQKDIIGIAVESTFNWYWLVDGLMDSGYKVHLANPSAIQQYSGLKHSDDKHDAFWLGQMLRLGILPEGYIYPKEDRPIRDLLRKRRHLVKLRTSLMVSLQNIISRNCGVSFRANEIKRLKEDRVSPLLESNQDLALAGQTSKEMIDQLTRQIQKIEGVIVQRVQLKEAYRYLLTLPGVGKILSLTVMLETGPIGRFAEVGHYASYCRKVPSRWTSNEKTKGKGNQKNGNKYLAWAFSEAAEFARRYDDQARSYYTRKMRQTNFMVAHSALAHKLARAAYYLMKDQVPFMPEKLFS

SEQ ID NO: 386045 - protein, 350 aa, unidentified
MTFVGCDLHSRSHQVAVLNTDTGELQEQRLAHEGQVVEQFYRALPCPVTIGVESVGYAQWFHALIQREGPTLLVGDAAKIRAMVPRKTKTDRRDAAHLLKLLGEDRFPTIWVPDPGVRDRRALVAHRMRLVRTRTMVKNGLHAIALNYRLAAGAALFTRRGRAQWQALALPPHLTQRRDESLELLSWLDAHIDPLDGQIAAAAAADDQARRLMTHPGVGPLTALATVLVLGPVTRFATHKHVVSYIGLAPAVAASAEKCRLGHITKQGNALLRYVLGQAGQVAARSDPDLRRLYLMVMHRHGRPKAKVAVARKLLIRLSIILRDQIDYAEFRDRGRRPRVPPRAEGPERA

SEQ ID NO: 386046 - protein, 430 aa, unidentified
MKSNTQNAKIKAITETTLVLGIDVGSETHYARAFDYRGIEYSKKPFKFSNDEAGFVTFKAWILDIKEKHGKDKVVPGMEPTGHYWFNLGKFLQDNEMKPVLVNPHHVKKSKELDDNNPTKNDRKDPKVIAGLVREGRYMIPYLPEGVYADLRTASNMRFQLQAELTRIQNRISRWFNIYFPEYKTVYGQPDAKSGMLILKVAPLPEDIMTLGIDGVNQIWRDAKVRAVGKARAKTLIEAAEHSVGSKEGEISARMEIRMLLEDYESRNTRLQEVVALIEELVKKIPMAEKLLEIKGVGIKTVSGFLAEVGDISRFNNPKELQKLAGLALVENSSGKHKGETTISRRGRKRLRYLLFEVAMSLVSKNPEFRELHSYYTNRKLNPLKKMQSLMAVAAKLLRVFFTMLTKGVDYDPKKLVGDIKRLAVYLQVA

SEQ ID NO: 386047 - protein, 420 aa, unidentified
MPNIEIGVDFMVKENFIYVGIDLHKETHTAVMIDCYNQKLGEITFPNRPADFPKLVTKVKKCNTDAKEVVYGLENAYGYGRPLAVWLIDKGYFVKDVNTAISHRQAKHRGAMYRKSDSDDAEAIALATLNMLDKLPDACPNDAYWSLGQLVHRRDNIMKQRTRLVNQLHEQLCIAYPSYKQFFNDISRPTALYFWEHYPSRKYLKGKSVEDLRTELVPVSHNRCSTKNCEKILDAVASDKVKNNAYQDARDMVTLSIVSDLQHYDSQLAEVDKMLEQMYKMLGCTLTTIPGVNVITAVKILAEIGDIKRFSNANKLAQFAGIAPLHLSSSGKGKNVATKQGNRRLQATIYFLAIQMVQVSSKGTPRNSVVRAYYEKRKAEGKTSQQALICISRRLISIIYGMLKHGTEYRMPVVESAGEK

SEQ ID NO: 386048 - protein, 343 aa, unidentified
MEVVIGIDPHKASHHAFAVDEREVELAQLSVRATRTQTQRLLAWAEPFEQRVWAVEGADGLGYLLSQQLVAAGERVVNVPATLAARTRVLGSTKSNKTDPNDARSVALTALCHDDLREAQAVGHAEVLRLLAKRNMDIGDRRTQVVCRMHALLVELAPGGIAKEINASDVDGFLARLSPASPVEQIRFDLAVELLAEIRSLDAQLKVSHKRIEIAVRASGTTLTDLFGIGPIIAAMLIGYAGDIRRFANRDHYAAYNGTAPVEFSSGGRTVHRLSQRGNRILNHALHMAAICQLRQPHSEGRAFFERKVAAGKTKREGIRALKRQISNAAYRQLLIDARRADH

SEQ ID NO: 386049 - protein, 344 aa, unidentified
MLIIGCDFHSSFQQVAIFDNQTGEIQERKLGHPEEAVAFYRSLKGAVQVGMEAGVPCQWLRRLLEECGHELWVGDAAKIRAAEPRKQKTDRRDADLILKLMRHGQFPRIWVPSEEERDVRQLLMDRHHRMRARTQVKNQLQSLALNQGMQKGRKLWSEAGMQALRELPMMEHAGRRRDQLLRTVCDLDAQIAELDVLVRRQAEGREDARRLMTHPGVGPQTALGMVLTLGDVSRFECSKQVGSYLGLIPGEYSSGNKQTLGHISKQGSSLMRFLLVEAGQTAVRGDAPLRRAYARLAAKKSRAVAKVMVARRLAVRLYWMLRNQWTYTELARHAGEPGSFCGAK

SEQ ID NO: 386050 - protein, 581 aa, unidentified
MVLCVSSVHVNVFPGNFTTEFDYPSRRRAFRVMKLCSSIVDPESKLSYAPVVGREGRLIIGALCPSQSLVSGVSVFNIGDVFIRQSEGDPVKEIAGVSAPLRPQLLAQSLVAKTRKREQIISQPQKQSQRATHNSVSNLPPHLQHININAAGIDVGSDRHLVAVPEGRDTISVRQFGTFTADLQSIADWLEQCGVTTVAMESTGVYWIPLYEILEQRGFEVYLVDARRVKNVSGRKSDVLDCQWVQELHTYGLLAKAFRPAEEVCVLRGYMRQKEMLVQTAAMHIQHMQKALQQMNLLLHNVVSDITGVTGMKILKAIIAGERNPQVLAKERDPRCRNSTETIAKSLVGNYRPEHLFALRQAVELYEIYQTKIADCEAAIVAYLEQQDHRTEDEPPAPPKPISARDRMRGGTDVRAKLYKMSAVDLFAIPGLAADTLLTLASEVGLDISPWQSEKHFTSWLALCPGTRRSGRRVLSSKTRPSANRAAQAFRMAAATQARAKTALGAFYRRIRARSGGREAITATAHKIARIFYSMLKNQTEYVEIGQAAYEQKFKERRLRSLNHQATALGYQLTPITAGSF

SEQ ID NO: 386051 - protein, 394 aa, unidentified
MVDMWYAGLDVHHAATVISVRNSRGAIVRRGTIPTTAAALRRFFASHRGKGMLVCESSAMAPWVVRTLSTRMREVIVGDARKAHLLTSGAKHDRIDADRLSELLRLGAVSAVYVGDDATRELRQLVAHYRRMIGDRTRIIQRLRSTFRECGIRVIGKKGDPESVPIRRLPQTRVRHIVHAQLRHLAVATKLKEEARTEMLRVAGARPEFELLQSIPYIGEIRAAELIAIVDDPWRFRSLRRFWSYAGLAVIQRTSSDQTVGDSISTKVSKPRGVRLNRACQPRLRRLLREVAMYASVGSGPLRLMYECYIARGLRPSVARIALARKVAAVLLCVWRYGESFSAKKFGAKMQRKARGEHPGASSVTQRTRRRRPVANHMPPRALHASERDRLTPH

SEQ ID NO: 386052 - protein, 399 aa, unidentified
MDNITYVGLDVHKATVCVAIAEGGRGGEVRQVGVFENRPDILCKLAARLDKGNRRLSFCYEAGPCGYGLQRLLTSRGHDCIVVAPSLIPVKSGDRVKTDRRDAMMLAKLHRAGELTAVWVPDAAHEAMRDLVRARATAGRVLAKARQHLQGFLLRHERIYRGPRAWTLAYRRWLTTVRLDHPAQQIVLQDYIHAVEDAEARRDRLTRQIEELLPSWSMAPVVEALQAMRGVGLVVAVTVAAEVGDFRRFANARQLMAYLGLVPSEHSSGAAIRRGGITKAGNALARRVLIEGAWTYRMKARVSRKLHDRLEPLSTEIRDIAWKAQVRLCARYRRLAALGKPSVVATTAIAREMVGFIWAIARRVQSAVEDQRTHSAHAEAPMLTAAAKPCGFAAALGRR

SEQ ID NO: 386053 - protein, 384 aa, unidentified
MKNDLSRSLVAFEQDSTLVAVVELSLKRWLVAGLVPGLRRQPLKTLGADHHALLRVVHRWRDEAVKAGSRIERIVVAYEAGRDGFWLARWLQGQGIEAHVIHPTSIPVSREHRRAKSDRIDTALLMRSLLGWLRGERKHCSMAAIPSLAEEDARRPNREHESLVGERSRIVNRLKATMIRLGICGFNVKLRTAANQLAQLRTPEGEPIPPNTLAELGREIARYRVVCDQIKAIEQERLERLKRAPRQATHAMLLMLAKILGIGIETADMLVHEVLSRHLRDSRAVGRYAGITGAPDESGKRRREKGLAKAGNARVRRGMIQLAWRWLLFQKDSALTQWFVARTAGARANIRKTMIVALARKLLVALWRYVTTGEVPAGAVLRAA

SEQ ID NO: 386054 - protein, 391 aa, unidentified
MTKPKVKTVNDLSRCLDPLDMDATVIAVIEMSQSSWLVAGIVPGVERQPLKKLAIDEHALLKLLSRWRAEAEKKGHRITRIAVAFEAGHDGFWLARWLAAQGIESHVIHASSVAVTREHRRAKSDRLDTELLKRGFLGWLRGERGHCKMVAVPTLAEEDAKRPSRDRETLVGEASRIITRVKAAFVRLGIRSFNPKLKAAAARLGTLRTPEGEPIPPNTLAALKRDLERHRIVKQQIREIERTRLALLEKAPAKGPNAMVLLLARVVGIGVETADMLVQEVLSRNMRDRRAVARYGGLTGSPNESGAKRREKGLARSGNARVRHGMIQLAWRFLLFQKDSALAQWYRQRTADAPSTRKTLIVALARKLLIALWRLARDGVVPEGVRLRPAA

SEQ ID NO: 386055 - protein, 406 aa, unidentified
MVRYIGMDVHREFAQLAVVEDGMLRDDGRIGVTPEALRQWAAGLRCDDQVALEATGNSDAIANLLAPLVSRVVVSNPSKTRAIAEAKVKTDKVDARILAQLLAADFLPPVWLPDERTRLLRRQVTRRDHIVRARTRIKNQVHAILARNLAPTPPVSDLFGVTGRHWLSRQDLPADERAAVQALLRQLDFHDGELAAVNRELAVEALSDDVVARLMTIPGVDALTAICIVAAVGDFTRFASPGQLVSYLGLNPKVRQSGNSAAVHGRISKAGRSQVRGILVEAAWSACRTPGPLRAFYQRIYARRGYQTAVVATARKLTVLAWHLAARDEDYAFARPGLVAHKRRKLELTAGYPSRQGSRSQPPAAYSSKQRRDQERQAAEQAERAYQILVAHWQQKKPAITRGRPA

SEQ ID NO: 386056 - protein, 384 aa, unidentified
MSSGRRGPGPSSVLLTPDSAGNVVGVDPHKRTLSATVVDPRGGVLASEHFRVSGDGHRAVEAWARQFGPIVRWGVEGAASWGRHTAMFLVGRGYDVRDVCANRTPRHDRARQRGKSDTLDSERIARETLAHPLLPRAFKRAGQDQGPDELHELLALWHNQRRSILASRQHLLNEGETMLSALPLELREQLPDSKAVRPRLAALARRNRRRRYDPPTRLRLALLDGHLARIAKLDAEEKAVCRQLSILVQASGSTLGELCGLDTRSVAELLVEVGDVRRFTERGFARFNGTAPLAASTAEGPGEPVRHRYNPGGNRRVNAILYRMAITQLRCEPRAQRLYAQARANGHTKKEARRILKRHLSDVVYRRMLRDAVRLSAELPLLAA

SEQ ID NO: 386057 - protein, 339 aa, unidentified
MQQVTTVGLGLAKNLFQVHGADAQGRPVLKRRLAREKVLEFFANLPACLVGLEACAAAHHWARELAKLGHEVRLMPPQYVRPYVKTNKHDAADAEACREAVTRPGMRFVPVKGEEQQSLLMPHRVREQLLKQRTATTNALRAHLAEFGIVAAQRRTGLRALLAVVADQEDRRLPPLARELLQVLADHLRVLEERTAALDRRLVETARADAACARLAGVPGIGPVIATALVAAVADAKTFGSGRHLAAWLGLVPRQHSSGGKERLLGISKRGDAYLRRQLMHGARALVAVGKGREGGSWSWINGLLARRPFNVVVAAVANKLARVAWALLSRGEDYRVAA

SEQ ID NO: 386058 - protein, 338 aa, unidentified
MKKIVIGIDISKKKLDWCVMVDKEIAGFHDTANRMDDNYNKFAEVLEYGKIDIGEVLVCAEYTGKYIYPLVLACHKCRVDLWLESGYNIKCEARKERGKDDRTDARRIAEYGRKNQDDARIYRLPAESIATLRGLLSERAMYCSQRAAHKGQLRDMRGFMSPEAYTARAVRQLSLIKELDRLIEEVDNSMAEIVASDPELLRQQRLLLSVPGIGMVCAAALIAVTARFSLFDNGRELCCFAGLAPFAYTSGTSIRSKRRVSCRADHQLKALLHMCALVAATCMKSGRFAEYYQRKTAEGKNKMSVLNAVRAKLMLTAFAVVRDNTPYDKNFKINLAES

SEQ ID NO: 386059 - protein, 339 aa, unidentified
MYLGIDVHKRDAQVAVIDEAGEIVEEVRVANANLDDLAQRYAGAEAVIEATTNYYHIHDMLSEHLDVTVAHPGKLSLIANADKKTDRVDAKELARMGRLNSVPESYVPTDEIREARALVRGRQKLVENRTDYANKIHGLLSEHGITQEIKPLSVSGRESLRDLSLPTPWDSLLESYLEVIETLTEEIETLTEEIESLEETIEERAGSLEETQLLMTIPGVSYYSALMIYGEVGEIERFDRDKEVVSYAGLNPVIRKSGDSRIEGGISKRGSRQLRWILVQCARTAVHTCKDAYLKRFYDRLAGKKGSQKAIVATARKLLVSIFHMLNREEVYDPPGVSA

SEQ ID NO: 386060 - protein, 343 aa, unidentified
MDHFAGLDVSVKDTSVCIVDDTGKSVREVKVASEPDALLAVLTNPAYRFKRIGLEAGPLSQWLFSALAEAGLPVICVETRHMRAVLKAQINKTDRNDARGIAQMMRVGLYRPVHVKTLRSQKLRMLLTHRKLLQSKAIAIENDLRATLRNFGLKVGVMGTVKFETRIKELVENVPDLAMLVEPLLIVRRALREQIGILHRRLLVIVRDDDVCRRLMTVPGVGPVVALTYRATVDVPARFRNSKAVGAVFGLTPSKYQSGEVDRTGAISKCGDEMMRMMLYEAAHIMLVRSTKWSWLKAWAMKIARRRGLKKAIVALARRLAVILHRIWVDGTEFRWTRETAAA

SEQ ID NO: 386061 - protein, 411 aa, unidentified
MRRCIGLDVHREFAEVAIWEDGVVRSAGQIKTTPEALRLFAESLCAYDEVALEATRNTHAIARLLERHVGRVVVSNPTKTRAIAEAKVKTDKVDAQVLAQLLAAGFLPSVWLADEETHALRRQVARRAHIVRQRTRLKNRVQSILHRNLVPRCPAADLFGHKGRAWLAEQDLPVDERQAVEALLRQLDFHGEELKLIDAELARVALRREEVKRLMTIPGVDATVALSIVAAVGAFARFRSPDKLVSYLGLNPRVRQSGGQPASHGRITKQGRAHARGMLVEAAWAAAKTPGPLHAFYERVRARRGMQIAVVATARKLAVLCWHLITRGEDYAYGRPSLLTQKLRRLELRAGMPSRRGQRGSTHAYNLKQVRARERALSEQGEIAYKQLVTEWQAKARTAKTGAGAATGVRL

SEQ ID NO: 386062 - protein, 453 aa, unidentified
MSEPSNESKGTSLEIVHPNAAGIDIGNAAHYVAVPPDRDPQAVRRFECFTEDLKKMADWLIQCGIDTVAMQSTGVYWLPAYEILTERGLRVFLVNAAHTRNLPGRKSDVQECQWLMKLHTYGLLSNSFRPTEEICVLRTYWRQRDAQVKAASMTIQRMQKVLTEMNVQIANVISDISGVTGMAILDAILQGERDRYKLAELAHPRIQASQEEIAKSLEGNWRSELVFVLRQERDIYREYQKKIGECDEAIQAHLKTMEDKAEPGSKPGTPKAGKRAGGNAPRFDLRGELYRISGIDLTRIDGINIMVAQTILAEVGLDMSKWPTEAHFASWLGLCPNHQITGGKVYHRGSRHVENRAATAFRMAATSLWRSKTYLGAKFKRLRAQLGAPKAITAMAHNLARLVYRMLRYGKEYVDKGMEFYQQRYQQQQIKWIEKKARDLGLVITLAPAGTVN

SEQ ID NO: 386063 - protein, 347 aa, unidentified
MRFYNQQHDFYCGIDLHARILYVCILDSTGNKVLHKKINADPDELLDILQPYQDQIVVGVECMHCWYWVSDLCLDYAVDFVLGHALYMKAIHGGKTKNDRIDAYKIAALLRGGNFPIAYVYPKAMRATRDLLRRRSKIVRHGADLKAHVSNTFTQYNQPSPNLQLRYPYARDEVRQRFDQASVNRNIDLDLNIIAFYTKELASLEHFIEMNAKQHNAQDYHLLQTVPGIGRILALTILYEIGHIERFPTVQQFASYARLVKCKAQSAGKTYGTSGNKIGNAHLKWAFSEAAVLYLRGNDKARRYLNSLQKRMSKAKALSVLAHKLGRCVYFMLRNKTVFDDRRFLSE

SEQ ID NO: 386064 - protein, 332 aa, unidentified
MLIENYVGIDVSKLSIDVFIRESHAHRQFKNEVTGFEQFIHWLKKQVGNSLDSVLICFEHTGLYSLPLALFLEQERIAYAMLPALEIKRSLGITRGKNDLIDSKRIAEFAYRFSDKISTTQLPAADIRKIHSLLTLRDRLMTNMKGYIVSRNEMLRTMHKDDFPELFSTYENTISALSCEIHNLEQAIKTIIMENEQLRSTFELITTIKGIGFIVASFLIVYTYNFTRFENWRKFACYSGIAPFEYQSGTSVRGKTKVSSIANQQVKKLLHLAAIAAAHFDTELHDYYIRRQAEGKPKMAIINIIRNKLVARVFAVAKRRTPFVDIKRYAVK

SEQ ID NO: 386065 - protein, 452 aa, unidentified
MTEKDKISMDIVNPRAAGIDIGSRSHWVAVGQGPNDFKEFGVYNEDLYSIAQWLRENEIKTVAMESTGTYWQSLYAVLIAEGFQVILCNGKFTKNIKGKKTDIQDCQWIQKLHSIGLLSGSFLPDQATEQLRTLCRHRANLLDSAAAASKKMQKYLRLLNLRLDVVVNDICGLTGMTIIKAICNGEKNPERLAELRHHNCKKSKEEIAKALHSNGRQDYIFALKQELEMYEMFQVKIAQCDIEIEKMLNDTIDNDENKKQHYIEKKPYKKVNKNTPKNIDLNLMAYQHFEGVDLMAIEGMSYSTILSLISEVGVDGIKRFSTAKHFASWLRLAPNNKISGGKVLSSKIPKGSNRLKIALRNAANAIGNLKDSTPLRDFFQRINFRKGRVSAISATARKLAVIIWNMVVKGVPYHNPEEYLFRDQKKKLGLLRKIQKQITKFELESTDFQFSN

SEQ ID NO: 386066 - protein, 387 aa, unidentified
MRSVGLDLGSRKIAYCIVDKGRITARGVVGGLDELASVLGPGTPPAQVAFEACREAWHVHATVSDWGKTALLIDTTRVRRIGVGQHGRKTDRLDAEAIAWAVERDQIPLAHLLSPERQQLRVEILTRRGLMETRSQMITTVRGIVRGQGLRIAPCDAERFLDKVQATKLPQTVQALIDPLLAVVLVAHRQLCTLDERIEALCASEPAIQKLATVPGVGLLIAAMFVSVIDEAQRFRSARHVASYLGLVPLEKSSGLPGQRLGAITKHGNGYMRALLVQAAWVLLRTAPASDPLACWGRHLVKRRGKRVAAVAVARRIACVMWALWKRDVAYDPEHVAELSARGLERSAEVIASQALALQRQATRATERSSFLKRRRTAALRWEATMP

SEQ ID NO: 386067 - protein, 343 aa, unidentified
MGEVSTIGLDIAKSVFQIHGVDAAGAVVIRKRITRAKLLEFFAALPPCLVGIEACPTAHYWSRRLQELGHTVRLLPPSYVKAYLKRSKNDANDAAAICEAVTRPSMRFVATKSEQQQSDLMLHRSRQLLVCQRTMLSNAIRGHLAELGIISAKGRNGTAELLEIIADEQDDRIPAAARFSLDVLARQYAVVRAEIVAIEKRIHAWHRSSEQSRRLEEIPGVGPIVATALLAEVGDWKTFASGRNLAAWIGLVPRQHSTGGKERLGRISKQGDRHLRWLLVAGAMAVIRYARQHGTKRLWLARLMDRRPIKVAAVALANKIARMAWAMMVRGERFKEPKLLPAA

SEQ ID NO: 386068 - protein, 360 aa, unidentified
MGEITRVGVDLAKRVIQVHAVDESGRVIVAKQLQRDGFTAWCAQLPPGCLVAMEACSGSHHWGRRLRAMGMEVKLIAPHFVSPYRLSGKTGKNDAADAAAICEAASRPSMRFVPVKSVEQQSMMALHRLREGYKEERTACINRIRGLLAEFGLVFAQRPEVLRAALAEVIEDAGNELGAVARMALQRAHLHWIELECHIAWCDERIARHVRSDEQAKAAAQLCGIGPVTASALVATVDDFKQFKNGRQFSAWMGLVPRQSSSGGKSVLGEITKRGDEYLRTLLIQGAKSAVFTAHRRSDRLSRWIVQLRERVGWQKAAVALANKHARILWSMLVNGQSFDPEHVPTKHLMRPTAALPAAG

SEQ ID NO: 386069 - protein, 447 aa, unidentified
MKALPVLDPKAAAIDVGSEKLHVSIAGDTPKVFGTFTGELERLREWFDAEGIRSVAMEATGVYWLYIYEVLEAAGLELVVVNGRHVQNVPGRKTDMADCQWLATLHAHGLLRGGFVPSAHIRQLQDYQRLRADHLVGAASQVQKMQQALERMNIKFHDVISDLVGVSGLKVIRAILKGERRPGELLRLCDEQIQKKKSDRVKESLRGSWKKEHLFALRQGLELWETYQQKITDCDREMEALLGEMASPQPPEGGSGNVVAIGPVALAPAKPAGKNAPVIDRMQELVVRLCGGRDATQIPGLSMYLVLQLISEVGTDMTKWKTEKHFTSWLGLAGGRKQSGKRKGRVKAHRNRAGRLFSAAARALAQSVDKALGGFYRRLRGRLGGLAANVALARKLALLFYRLLRYGMEYVEKGLKSYEAKVLETETRLLRKLARKQGFQLIPNKAH

SEQ ID NO: 386070 - protein, 309 aa, unidentified
MKEELVYLGVDIAKSYLDGAIGNEKRRFANERVGHRELIKWIKQLKAPVQVICESSGGYERALVQALVGAQMKVSLVQANRVRQFARAAGILAKTDRIDAKLLCDFAKAMQPGTVSASQLEQQHLRELESQRRHLTHLLVMEQNRAARASDGCVRRLNRSLLNQIKKQIQQLDLLIKEHIEASPELSAKAQKLTAINGVGARTAALLLAQMPELGQLNRREVAALVGVAPFNRDSGKMRGKRAIYGGRRPVRHGLYMAALVAAHHNPILRAFYLRLRAAGKPAKLALTATMRKLLIVLNSALKSHLNYA

SEQ ID NO: 386071 - protein, 415 aa, unidentified
MKVHRNCCGLDVHKQTIAACLIREDGMGNTCKEKRLFGTMTRDLRELAQWLRGAEVSAVAMEATGVYWVPVWNVLEREGLHLLLINPEHYKAVRGKKTDLKDGERIAELLQDGRLEGSFVPSTPLRILRDLTRYRVKLVEHQSAVACRIQKLLEQCNIKLASLASNVLGVSGTAMLQALARGETNPERLAELAKKQLRKKIPALRLALDGHLLPHHRFLLRDMLDELAHIEGQLARLEAEIERNMPPFQKTLQAWMSIPGIKQRVAWTLVAEIGPDMQVFPSPAHIASWVGVCPGNNESAGKRKSGKTRKGNCWARRALCEAAWVAAKAQKTYLAAQFRRLAATRGSKRAIIAVAHTILTIGYHILQRGTLYQELGANYFDQRHVLRTTKRLVKRLQALGHRVILESPLPNTRIA

SEQ ID NO: 386072 - protein, 419 aa, unidentified
MTFYFERGYIRQMGLWSTSSVKQTKGGATMVYVGIDVAKDTHECLIVNGDGSIVSQPFAIANNHVGFEHLISKLESCHNDLSDIKVGLEATGHYSDNLLAFLVSKGLTTIVINPLHTNLYRKSLSLRKTKTDRIDAHSIVTLLRTETLKPYSPMSSHIRELKSLTRYRFSLVQDLAQIKSSYARLCVILFPELEKMVPTLHLISVYTMLAELPTAETIAACHLTHLENILSASSKGRYGKDKAVEIHKAAMESIGSHSDAKALELQQTIQRILCLEAQIEAVEAKINPIIDSLQSPIMTVPGISYRMAAIIIAETENFTNFTHAEQVLAFAGLEPSVYQSGQLTSTHAKMVKRGSKYLRYALFNAAKYVCRWDPHFGAYLAKKRSEGKPYNVAVSHAAKKLVRVLFHLVKTNQSFISQA

SEQ ID NO: 386073 - protein, 366 aa, unidentified
MKKISTVAKRGNQIFKEPKRTIGLDLGDRTSHYCILDEAGNVILEHSLPTTPKGIQQVFSRIPRSRIALETGTHSPWVSRQLTQLGHEVIVAHARNVRLIGESRRKDDRLDARTLARLARIDPQLLSPVQHRSAKAQIHLTVIRARAGLVSARTALVNAARGLVKSYGERLRKCGTQQVSREMAAGLSAELREALEPLLREVESLNERIKEYDRRIEQIAKKDYPEVELLQQVKGVGDLIALTYILTIEDPHRFRKSRDVGCFLGLRPGRGNSGQSEPQMHISKEGDRYLRTLMVQGAHYILGPFGEDSDLRRWGRKLTERGGKNTKKRAVIAVARKLAILLHRLWVSGEVYEPLRNSQRVVQAVA

SEQ ID NO: 386074 - protein, 365 aa, unidentified
MPSVSHLTPVHLGLDVHKDTISVAILAPDRDGPDVERITHDEVSVRRLVGRLGDPRWLRACYEAGPTGYDLARLLHTMGVRCEVIAPSLIPKAPGDKVKTDRRDCRRLARLHRAGELVAIRIPSIEEEAVRDLCRARTDIVEDRTRARHRLSKFLLRHGRPWRGGNAWTLTHERWLLAQRFDNPALAATYGHYRAVLDARDAALEAIEADLAAWHDLPPFADAVHRLAAYRGITRLGALTLASEVCDWRRSPRAAAFAGFCGLVPSEYSSGTSTRRGHITKCGNAHLRAQLVESAWAYQYRPAVGLQLRERQQGLDPQVVARAWAAQLRLCGRFRRLAAHKDSKNVVVTAIARELAGFLWAEMAA

SEQ ID NO: 386075 - protein, 421 aa, unidentified
MNDSEQWQQHRAFGALDWASQKHSVIVVNQTGKVIEDFEIEHSALGWKNFRERLQAYGPIPFAIETSQGAAVEQLLEAGMMVYPLNPKSAQAYRERKAPSGVKDDRLDAWSFADALRVDGQGWKALRPEEPLIKELRLLCRDEVALIEQRTAFIQQLRHALAEYYPAALEAFKDWTSVSAWMFLQRFPTPESLAQAGKRKWQNFLHSRRLWGSEEGPRRMEIFAHALEFAGTAPTVKAKSLLALSLVQMLFAVEKQLAVYRHRIEELFARHPDHDLFGSLPGAGPKLAPRLLSEIGEDRGRFDGDPQALQCLGGTAPVTKRSGKKRKYCHVHQRWACDKHLRHAIHLFAEQSLSRCVWAELYYQHHRQKNCSHANALRRLGHRWLKIIHKMWLDRTPYNAEFHHRNQVKHGSWIFQLQPNQ

SEQ ID NO: 386076 - protein, 313 aa, unidentified
MEEFAATPAGYAQLLGWLGGFGTVCLVGVEGTGSYGAGLARHLAVAGIRVVEAGRADRQDRRRQGKSDPLDAVSAARAALSGRARGAPKGRDGQVEAIRALMVAKRSARAGRTQTINQARALIVTGPEDIRTRFARYATADLVAGLASLRPRPGSMVRYHSLLSLRELGRRAQFLDGQLERLDELIVALVTARAPGLLSLYGVGPDTAAKLLIAAGDHPERLRSEAAWAQLCAAAPIPASSGKDGRHRLNPHGDRQANHALWQIVITRMSSHPPTRAYVARRSKNGLSTKEIIRCLKRYVAREVYPHLRPGPG

SEQ ID NO: 386077 - protein, 409 aa, unidentified
MRVMHERCAGLDVHQKTVVACVLRGAAGSEAQQEKRTFSTVTSDLLKLGDWLEECEVTHVAMESSGVYWKPVWAILEGQFDLTLANAAHIKNVPGRKTDQKDAEWIAELLRHGLIEKSFVPPVAVQDLRELTRYRAQVTGERSSVGNRIRKLLEGANIKLGSVASDVMGVSGQRMLDALVAGESDAVRLAELALGQLRKKQAQLEVALDGRVREHHRRLLRLQLANWRFLDRLTEELDVEIDRELGPVREAAALVETIPGISALTAWNVVAEIGADMSQFPSAAHLGSWAGLCPGNNESAGKHYSGKTRSGNIWLKRALCQAAWAASHTRDTYFAAQFRRLAAKRGKKRAIIAVAHSLLVAIYTMLKQGKGYLELGADYFEKLHADDFKRYLVRKLEAQGYKVTLEAAA

SEQ ID NO: 386078 - protein, 396 aa, unidentified
MPRIWAGVDIGKEHHHCVVINSDGERLLSRRVLNDESALLELIGDVLALDEDVLWAVDLNHGGAALLIGLLLGHSQPMVYITGLTVHRASASYRGEGKTDAKDAFVIAGQARMRRDLGLLRPGDEIAVDLRTLTTRRTDLVCDRTRQINRLRAQLLEIFPALERALDLTNKGPVLLLTGYQTPAAIRRAGVKRIEAWLKNRKVRGAAALAKAAVEAAEAQHTALPGEQLAAAMVVRLSKGVMALDEEIAELEALIEARFREHPHAEVIVSLPGMGKLMGAVFLAATGGDMDAFGSADRLAGYAGLAPAPRDSGRVSGNLRRPRRFHRGLLNAMYLSALSSLKSCPASKAYYQRKRAEGKGHKQALLALARRRVNVLWAMIRDGACYQATPPVTAAA

SEQ ID NO: 386079 - protein, 408 aa, unidentified
MEVRYPRCAGLDVHKKTVVAAVRIAEGRQVRTEVRRFATTTTALLALGDWLAAEEVTHVAMEATGVSWKPVWHVLEDAVELVLANAAHIRQVPGRKSDVPDAQWIAELLAHGVIRGSFGPPAPVQELRDLTRTRKQLGRELTQHNLRIQRVLEDATIKLGSVISEVLGVSGRAILDALVAGETDPGRLAAAAKGRLKCAPEDLVEARRGRVTVPHRFRVGQPLQLGASLRARMAAFDAESERRREPFPPAVERLTTIPGVSEGAAQAIVAELGVDMTRFPTVSQLRSWAGLCPRLDESAGKRRSTRIRKGAPWLKAMLGQCAKAAARAKGTYRQAQYQRLKSRRGGKKAAVAVAASILTAVYYRLRDGVEYRDLGADPFTRRDKVKIAARLARRIRDLGYEVDIRQAA

SEQ ID NO: 386080 - protein, 419 aa, unidentified
MSNHVAKHLAAIPAGTLFAGVDLGLDDFVVVVLNATANRLDRFRCDNNAEGYAEFRQRVQRTVAKQGAAGVWVGMEPTNYYWKQLGYDLERHQIPFRLVNALTVKRHREGDQLDRSKDDWRDAFTIADLLRQGKFTETRLPHGVYAELQAGYTAYQRLRRDRGRQATLLVNTVRQLFPEFEQVFKDVSGATAAAVIGAGLLPHVIGTNSEDLFLASVRSHYTGRRLSVRQVRRLYALAQDSYGDREATLALRLMAQHQVEAIRLLDRQAEQLLAALLGLFHTLPETPYLLSIQGLTARSALGLVAYTGDLHQYHGGGALIKLAGTQPTPNTSGRKTYSPTPFSHQGRSGLRTVAYFITLRLIRQNDALHYHYQRLTTRAEHPLPKMQAIGACMNKLLWYVWHVAKRRDRYDCQRWRTLN

SEQ ID NO: 386081 - protein, 440 aa, unidentified
MKREAYRAVDVKQVFVESLVADKAGVAAVVGLDIAKSDFLGTVRWSDGRFERPWRAKSPEEIPDMIHRLQRLADGRPLTIAMESTGTYGDALRQALTDAKLTVHRVSGKAVHDYAEIFDGVPSQHDGKDAAMVAELAAMGKSSPWPYEPLTEFDQELRYLVERMDVQQRIGMLWLGRLESLLARHWPEATQYLELNSETLLQILVEYGGPAALAADAKAAKRIKGWGGSFLKSEKIERFLQVSVSSVGVRQTAVDRRRMEECARAALLAKQEVQKASRTLEKLAQGHAIIARHAAVLGWATACVLWVYLGNPANYHCAEAYRKAMGLNLKERSSGRYQGQLKITKRGPGAVRRWLYFAAMRLIQQPDLVEWYEVKKGQCPKGGKRALIAVMRKLALGLYVVGVGTEPFDARRLFSPTVGKRSRRGVRQAKKNEKKQRQKV

SEQ ID NO: 386082 - protein, 338 aa, unidentified
MKSYAGIDLHSSNNFIGIIDEQDQRLYQKRLPNRLEHILQALEPFKESLEGVVVESTYNWYWMVDGLQEEGYKVHLANPSAIKQYEGLKHTDDKWDSFWLAHMRRLNILKEGYIYPKEERPVRDLLRRRLLFVKHRTAHILSLQSMISRNLGIQMSCRAIKGLDEEAPETLFDSPHLLLAAKSNIAVIHFLKERIKSIEKAVKSHIKLRDEFKYLLTVPGIGDILTLTIMLEVGDINRFPQVGNYSSYCRCVKSERLSNGKKKDENNRKNGNRYLSWAYVEAANFARRFCPYAQAFYQRKMAKTNGIVAIKALSNKLARASYYIMRDQVPYDPKKLFS

SEQ ID NO: 386083 - protein, 415 aa, unidentified
MEDLGLRALYRRVAGIDVHRMLHVVTVLIEQADGSMQRQTREFGGFRRDCRALAAWLGELGVELVVMESTGIYWKSVHAHLENAGIAAWVVNAHMIKHVPGRKTDMADSEWLAVLGRFGLVRASFIPPKDLRELRLVSRYRRKLSSMCASEINRLHKVLDDGGIKLGGVVSDINGVSARAMVSALIEGKPIEHMLGLARGRLKQRRDDLGASLEGDLSARHLFVLRHIHAHVEMLQREIAEIDVYLLAAMQPYAWAHLLLQTIPGIDEIAAAMILIEIGDDMDRFGCAGRLASWAALSPGNNESAGKRKSGRTRHGNSIIRFILCECANAARMTKSTLAAKYRSLTVRKSHKRAIVAVAHKMIRLIFVMLSRRQPYIDQSIDYAAISAKKNAPRWIKQLKIIGRWPTAKTAAAVH

SEQ ID NO: 386084 - protein, 354 aa, unidentified
MAVADSSGDEVRYVGEIANNADALMKLVKQLRKGEASLSFCYEAGPCGYGLHRQLTDMGWDCQVIAPSLIPRKAGDRVKTDRRDSVAQARLHRAGELTPVWVPDDAQEALRDATRAREDLKHLQTQAKQRLAAFLLRHDRRYPGKDTWTQLYHRWLESLKFAHPTQQIVFQEYVDTVAVLGRRVAALDAQIDEAAAASVFWPVIEALMALRGVKLLTATTIVAELGDLKRFSGAPQLMAYLGLVPSEHSGGARKVRGAITKTGNGHVRRVLVEAAWTYRFQARKTGHLQQRARLAPEAAQEIAWSAQKRLCGRYRQLSERGKLKVQVCTAVARELVGFIWAIGQQINAPARARA

SEQ ID NO: 386085 - protein, 391 aa, unidentified
MDKVWAGIDAGKELHWAHVLDASGQGIFSRSVRNDEADLSGLIDEVLALAEEAVWAVDQPGGSAALLLALLWEREQRVLYLPGLAVDRARDAYPGESKTDARDAYIIAEQARVRSNLAQIVPGEDALAELQLLLARRRDLVADRTRSINRLRDVLLSLFPALERALDLSAKGALILVRHYQTPSAIRRVGHRRLATFLKNRGVKGAEDIARKAITAAKAQSVSLPAEDVAATICAELAEETLALKESIDNLDRELGQRFFARPEARILASLPGMGPILGAEFLVSVGDLSAFESADQLAAYAGLVPAAQDSGKRVGNNRRMRGGNKVLKRVFYQSAFASLRGSPHSRAFYDRKRREGKKHTQALIALARRRVNVLWAMLRDETTFEARPAA

SEQ ID NO: 386086 - protein, 339 aa, unidentified
MPQVATLGIDAAKNLFQLHGVDAHGKIVLKKRLVRHKVLAFVAGLAPCLMGLAASGSAHYWARALTKLGHTVQLISPQFVKPYVKGNKNDPNDAEALCEAVSRPHMRFVPIKSVAQQDMQALHRIRERQIKARTALVHQIRGLLAEYGVVMPKGVAQVRQKLPFILEDAGNGLTMLAREWLQALAAELLALEQRIQETNTRIQRVFEHHEACQRLAQLEGVGPLTATAFVAAVGEATTCKNGREFAAWLGVVPRQHSTGGKPLLLGISKRGDRSLRKLLIHGARSVVRTAEGKQDGRSRWLQGLIVRRGKNRAGVAQANKTARVAWVLLAKGERYRPAA

SEQ ID NO: 386087 - protein, 369 aa, unidentified
MADRITYVGLDVHKESIVVAVAEGGLRGEVREYGRIANTAAARDRLLRKLGGDGMTLRFCYEAGPCGYGIQRRLSAQGQECVVVAPSLIPKRAGDRVKTDRRDAASLAKLHRAGELTAVWVPDARHEAMRDLVRARLDAVHSLRRARQQLCGFLLRQGCHYGRPAWTKLHRRWLADLKFDQAVHHLVLEDYIAAVEAAAARRDRLTAQIEAMLPDWNLAAVVAALQTMRGMALVNAATLIAELGDLSRFADPRQLMAYLGLVPSEHSSGASVKRGGITKAGNGTARRLLIEAAWSYRFPARLSRELLLRQENQPRPIRDIAWKGQVRLCARYRRLARAGKPANVVTTAIARELSGFVWAIARQVTVTAG

SEQ ID NO: 386088 - protein, 483 aa, unidentified
MQTIVERPAALDVHKAQVTACARVPDGRGRRGQHVAEFPTTVRGLLALPDWLAGHAVTQVVMEATGVYWKAPWAILEDEFKCMLVNARHVKQVPGRKTDVSDAAWLCQLAEAGLLKANFVPPKPIRELRNLTRYRKTQIQERAREVNRLHKALEDAGIKLDTVAADILGKSGRDMLDALVAGETDPAVLAELARRQMRKKIPALREALAGHFDAHHRLWVGAILRHIDFLDCQIEQLTGMIEEQIRPFAPAVELVCTMTGIQRRGAQCIIGEIGTDMTCFATARHLASWAGRCPGNDKSAGKRRSGKTRNGSKWLDFALEEAAMAAIRVKGHYLEAQYRRLKPRRGHKRALGAVKHTMICAIWHMLATGETYRDLGGDYFTNRDPERQTRRLVAQLERLGHHVTLTEEAAATGANFPVRQKKQRRASRSGDRYQAEGAGEIGALQLAELPTAGSSHERYCRRCQSRTSPSPADGSSSSTTAAT

SEQ ID NO: 386089 - protein, 317 aa, unidentified
MPCSSRPPARFIGCDVGKTSITVFDSATGLSRCLANRPSLLRSFARTLDATCLVVCEATGGYEAKLLAAMLAAEVPAHRADARKVKAFIRSFGTLGKSDAIDAAALARYGAERHHGLARWQAPDPVREVLQTLVLTRRDLVEQRHGHSNRLQAPGAGAVAAALRSLMRALDAQLRALDARIAALLQRHPALQRDVRVLRDMHGIGPVTAATLLALMPELGHLSGRQAASLAGVAPHPHDSGQRNGYRKTRGGRPEVKRTLFMAALSASRGTGKLAETYRSLVARGKKPIVAITAVMRKLIVISNAKLRDARAIPATN

SEQ ID NO: 386090 - protein, 339 aa, unidentified
MIVMGLDQHRAQITAEWIDTETGEVSRMRVSPAHRTGVRRFLARFDGAELEVALEATTGWRFVVEELRAVGARVHLAEPAETSARRGNKKHAKTDRGDARHLRELVMIGRVPECWIAPDHLLDLRAKVRLRHTLVDQRGEWQQRIRAVLYHHGLPARQELQLLTKQGRAWLDGLEVPAVAREQITVALAVIEALEAQIAPIDGELRRYAAHQPGCRALMGHYGIGALTAVAIVAELGDARRFSSSRQAVRYAGLDITVHESDRRRAPGHLSRQGPPVLRWALYEAAQVARRPSSPDRAYYDQAAERLGGNRACLAVARKLCQRSYHTLRELGDDALQPA

SEQ ID NO: 386091 - protein, 370 aa, unidentified
MLDTTTFVGLDVHARSIKAVSLDVMTGEVRCATFGYDAGAVAEWVRSVDPRARCVYESGVTGFDLQKRLSGLGVDCVVGAVSKMIKPSADRRRKNDRNDAEFLARMLSVGNVVEVWVPDDECEAARDLTRALEDARDDLSRSKQRLSKFLLRHGLAFDERTPTGRRKGNWTRAHWSWIESIRFAERADNDVLAYYVDAVRRAAEEKARLEGLVEAEARKPRWRRRVDSLRCLKGVDTASAADLVFEAGEFSRFRNARSFAAWVGLTPSEHSSGESDRRGAITKAGNKHLRKTLVEAAWHYLTCSGRPKGLAKGQAPDRGARRHAAKGVRRLVERREALLARGVHGNKANVATARELACWVWAVGLMAEEA

SEQ ID NO: 386092 - protein, 338 aa, unidentified
MRCYVGIDLHATNSVVVVLDDADRVLYQKRLRNDLALVLTTLEPYRATIHGVVVESTYNWYWLVDGLMEAGYSVHWAHAPALPQYSGLKHADDQHDAQWLAHLLRLGLLPTGYIYPKAERAVRDLLRKRSQLVRHKTMVVLSLQSLLTRLTGTRLSLPRLRALTPDGIQALVSFPEQAQSIRSSLTILQCLEQEIRRMEETVREAGRTQPGYALLQTVPGIGPILAGTILLEVGDIRRFVTVGHFASYCRCVGSEHLSNGKRKGAGNTKNGNKYLSWAFIEAAHFAIRYEAVIRNYYQRKQVRTHPLVALKTVAHKLARACYHMLREQVPFDLHRAFG

SEQ ID NO: 386093 - protein, 390 aa, unidentified
MGIWVGIDIAKHIHWATAIDDLGQVVLDQRVPNDPAALQQLIEALAGLGDEPVIGLDVVGGIAALAQALLGAAGFRLVHVSGLAVNRARQGTTGGEHKSDPRDARVIAEQVRTRRDLRPIEPVSELDLELRLLVGRRGDLQVEQTRRLARLHDLLVGIHPGLERVLDLTTKGGLWLVSRYVTPAEVRAAGRQGLIEHLQGAGGLSARQVQTLADRALAAAAAQHLTVPGERLAASLVREALACRQRVGELDRDLARLLERHPDAALIRSLPGMGAVLTAEFIAMAGPLTRFRSADALAAAAGLAPVLRQSGKVRFQRRPSGGNKALKRVFYQSAFCSLSSPDSRAFYARKRREGKRHHQALIALARRRIDVLWAMLHTRQPFQPNYPKAA

SEQ ID NO: 386094 - protein, 341 aa, unidentified
MYYIGLDVHKKTISYCVKDASGLVHQEGKIGATRRELDGWIKALPQPRIVAMEATIFTGWIYDHLLPHAAQVKVAHPLMLRAIAAAKKKNDRIDAGKIADCLRCDFLPECHMAPIEIRDRRRTLRYRQLLVRQMVQMKNRISGLLMETGVEYNKRRLHKVGYFGELLSTNEEIKESIRPLLKLSRETIVRLQKTEYALVSSLQRDPLLAERIRRLRTVPGVGPITALTWALEMGDVSRFRSVKQAISYCGLCGDEKSSADKVMRTPLSKQRNKHIQRVLVEAAKLAPREDHKLALVYETEKQKGNANRATLAVARKMVSYLLAVDRGARSFVPAEEHSTAA

SEQ ID NO: 386095 - protein, 318 aa, unidentified
MNTKMNQSINIGVDTGKFQLDIYIRPLDIYFTITNDDKGISEAIKEIKKHKPERIVIEATGRLEMPFIIACAKANLPFVIANPVHIKRFAGAIGQRAKTDKLDAQLIAHYGEAIKPKLSALKPDVMQAMSDLVARRSQLLVMQTMEKNRMQILPQSLAMTIKPVLTVFKNQIDKIEKKIVSLIESCPDYQGKNIILQSMKGIGKIASASIISNLPELGYISSKQASALVGVAPMNRESGRFKGHRKIQGGRHQVRTVLYMAMMSAIQSNPVFKDTYQRLVAAGKPKKVAIIACIRKMVVILNSMLRDGVMWEAPKAKN

SEQ ID NO: 386096 - protein, 347 aa, unidentified
MTAIGIDTHKATLAACTVDELGRAIGEATFANDPAGHVAFIAWARSIASEATIGIEGSSSFGAPLAWAVHHAGLSVREVPPHLSRAERQRTRRPGKSDPGDALAIARVTARETNLPPIRLPDRTSELKLLLEAREDLVAETTRVRNRLHAHLLALVPGYGGTVANLVAARHRITVGRLLRGNTAVQAELARALLARLARLERETGALTRRIGALVDGHPLLGLPGAGPITVARLIAEVGDVRRFRTADAFAALAGVAPIPASSGQIQRMRLNRGANRQLNRALYVIAVSQSRFHPPAKAYVTRRIEVDGKTWREAIRALKRLLVRPVFRLLVQGSIVPADSCVTAGW

SEQ ID NO: 386097 - protein, 338 aa, unidentified
MDKPSEGVTGVCGIDISAQTLAVAVQRAGASPWVLGEVANTAAGHQQLLAQLQGMGGRVRVVMEASGVYGLDLAVRLAATPGIELAVLNPKTARRFAESLGERSKTDPVDARVLGEYAARMPFTPWQAPRTVVLELRAITRRIASLKVQHGQESNRLHAQESSEQLPACVRRELRSSLLRVERAVEKLTRAARALVAHDPPLAAALALLQSAPGVGETSALQILGEVSALPSQLGVKQWVAHCGLDVRQHLSGSSVHRPARISKAGNRRLRRALFMPALVAVRHDPHLRAFYLQLLRRGKAKLQALVAVMRKLLHAFYGMLRLHQPYCGARLHPALIL

SEQ ID NO: 386098 - protein, 360 aa, unidentified
MKFYLQQHQFYCGVDLHANTLHACVLNSSGEKLLHKNFQCQDTAVFLEQLQPFRNDLIVACESTFNWYWFADFLEDHQLPFLLGHALYMKAIHGGKTKSDPIDSEKIARILRGGTFPVAFAYPRQDRATRDLMRRRTFLVRRRAEALGHVQLVHLQHNHTKPTNIKYKANRIGVGESLPHPHAKLIVDVDMRLIEAYDLQIARLEAELTQSAKKDHPQTFYRLQTIPGIGPVLALTLMHEIYSIDRFPKVGDFLSYSRLVKGSHTSAGKNYGSPNSKIGNAHLRWAFGEAVSLFKRQSSEATLYCQRMEKKHGKGRAMNMLAVKLGRAVYYMLRRNEAFDIKRMWNLSESTPSIEPAATN

SEQ ID NO: 386099 - protein, 463 aa, unidentified
MTVRIIGIDLAVTASHRAIVLDLASNSFVSKLLSFHANPAEMNGVLQAARANAPENVRLVAVLEATAMSWFPVSCYLLSQGVEVYRVTGQQTADQRRVYQRHAKSDRIDARLLARLYVTLPERLHRLHLPSGWQLELQRACRERLRLTAQIAAIKNRLLATDRLAWLELRDILPPYEPAARWIRNYWYNPWRVLETDAMAMAQAWRAQYPTQDTAPSWLYDLRQKAAQVVALYGAPQCLDYERLQASVVREQARLAELEAQLRHLRLKVIRPLYRQLHPQRHLETLYGVGPDSAAIYVAFIGDVRRFPSLRQFRGWSGLIPFSDQSGNAQAKGWPVTQSGPDPIKTTAFLDANIARLYDPQIAAVYHDQMVNKGKHHLQAICACATHLLDRVYVILHENRPYELRDVDGTPIDARQARQICKLRYQVPEETRRRNNYRVRMARAQRRVEQRYQQRERKQRSKG

SEQ ID NO: 386100 - protein, 342 aa, unidentified
MTFVGCDLHTRMQQVAVLDTRTGEVSERQLAHDGSAVEEFYAALPGPVTVGIESTGYAVWFHTLMQRLGHTVLVGDAAKIRAMVVRKTKTDRRDALHLLDLLRHDRFPTIWVPDPATRDLRALLTHRMRLVRIRTMVKNGLHAIALNYRLARGSKLLRQAGLVQLHALALPPHTAQRRDQSLELLAGLTTQIRALDDAITTAALAHPDGPRLITHPGVGALTALATIVVLGPVARFHDSKHVVSYVGLAPALNASADKYHLGHITKQGSPLLRFALGQAAAHAARMDADLKRTYFTLVHRRGRPKAKVAVARKLLVRLFIMLRDQIDYDEFRRRGRPAPASA

SEQ ID NO: 386101 - protein, 416 aa, unidentified
MKKHNNSPKKSEPTSKRAKSRGPVQRDPKEVLAELVGKLREKLDPRVVAASAGEEDSRGVRPNLDRLTVGVDLGDQWSHYCILGLEGETLAEGQLRTTAQDITEFFEALNAARVVVEVGTHSAWVRDVICRYGHEVLVANPRLMEGSKRRKRKNDRIDANKLARLGRVDPQSLHPMQHRSREVRQDLVVLRARDALVAARTELINATRGLVKSMGSRLPKCSSPSFAQKIEETVPVELRDALMPVVRMAAALSDCIQGYDEKIEKLGREKYEHTALLRQVKGVGPITSLAYVLTLENPDRFVKSRDVGPYLGLVPKQEDSGESQPQLGISKAGDTMMRRLLVGSAQYSLGPFGPDTDLRRYGLRLCERGGKNAKKRAAVAVARKLAVLLHCLWVSGEVDEPLRQGMSATMTPAAAA

SEQ ID NO: 386102 - protein, 359 aa, unidentified
MNKNSIYFVGLDLGDKHSYIAILDQDGELIEETRLPTTKTSFQQRFSMLPPCRVAMEVGTHSRWSSHLLTELGHDVLVANARKLRAIYHNPRKDDRADAETLARLARLDPELLSPIYHRSPQAQADLAVLRSRDAITRSRTLLVNHARSIVKSSGDRLPSCSANCFASKAAPAIPAALHPALSPILETIASLTQQIREYDRQIEQLCQDNYPETKLLRKVSGVGPITALAYVLTLEDPKRFLKSRDVGPAIGLVPRRDQSGDRDPQLRITKTGDAYLRRLLVGSAQYILGPFGPDCDLRRWGLKLAERGGKNAKKRAVVSVARKLAVLLHCLWKTGEIYDPFYLDRKHDQAPEAVPAAA

SEQ ID NO: 386103 - protein, 337 aa, unidentified
MKYSGIDLHSNNSVVVVSDEADRVLVRRRVPNDAAAILALLAGHREELVGVVVESTYNWYWLVDALQAAGYRVHLANTAAIKRYEGLKHSGDEDDAAYLAQLLRLEILPCGYICPPAARAVRDLARKRVQLVRSRTAQVLSVENMLSRQTGTGMRSYAVQRLTAQAVAGLGFNPEVEQAMCANVAVIKTLNREIDKLEQRLHQCVRLRPEFGLLTSVPGIGPTLATLIMLEVGTIERFAAVGNFASYARCVDSARISNGKKKGQGNVKNGNAYLAWAFVEAANFARRYCVEAQRFYERKKARTNGVVATKALAHKLARACYHMLKEQKPFDVKRCFA

SEQ ID NO: 386104 - protein, 330 aa, unidentified
MTDSAPVSQPLVNLLVGIDVAKEKLDLARSDSSKAVVFDNQPAGIGRIVELMRSIKPTLIVVEATGGLERPLIAALLDAHQPVALVNPGRVRHLAIALGILAKTDKVDAGVLVEFARHAQPRLAQKLSQNQIELDALVTCRKQLCDLRTAQFNQRDTTSSKAALKSINAVIKTLEKQIQSLDEQIKKLIESDDDMNSIDKLLRSAPGVGPVLSSTLLSGMIELGALGRRQISALVGVAPYNHDSGRHAGKRSIYGGRADIRAVLYMATVAATVHNPIIKNFYQRLLAKGKLKMVALVASMRKLISMLNAMLREEITWEQLNVVKNLTQTA

SEQ ID NO: 386105 - protein, 342 aa, unidentified
MDTIGLDLHKRESQLCILTEEGEILERRIVTSRERFSAVLGGRPRARILLEASTESEWVARHLESLGHEVVVADPNFAPMYATRSRRVKTDRRDARTLMEALRLGAYRAIHRASAAQRHVRAQLAVRDALIRTRTRYVNVVRALTRRDGLRLPSGGPEHLEAKLAALPLPALLDAEVAPLRVLLGPLNGEIVAADARLASVVAGDPVVTQLCTAPGIGPVTAVAFVATLDDVTRFRTAHQVEGYLGLTPREYSSGERQHRGRISKTGNGRMRSLLVEAAWRLLRTKDPAAALLRAWAEGIAQRRGRSIAAVALARRLAGVLYAMWRDGTDYRAPRPAAVAVA

SEQ ID NO: 386106 - protein, 354 aa, unidentified
MSQSLNSAVAVIGIDIGKNSFHIVGLDSRGAIVLRQKWSRGQVEARFANMPPCLIGMEACVGAHHLSRKLKALGHDARLMPAKYVRPYSKGQKNDFRDAEAIAEAVQRPTMKFVATKTADQLDLQALHRVRERLVSQRTGIINQIRAFLLERGIAVRQGQRFLRAELPRILATPPDVLSPRMVRLIEDLAGDWRRLDERVESLSDEIEAVARQDADCERLMSVPGIGPIISSAMVAAIGRGEVFSKGRDFGAWLGLVPKQTSTGDRTILGKISKRGNRYLRVLFVQAAWVVLIRPKSWERHGLKPWIEAAKKRLHPNVLAIALANKLARIAWGVLARGRNFEARTNTNATAQAA

SEQ ID NO: 386107 - protein, 351 aa, unidentified
MVTVGIDPHKHLHVAVAVGSDGRQVGKPLAVRNDALMLPTLLTWIRSITDGTATWAIEDGRGFARRLADGLLLAGQEVVWVPSRLTAAHRKLHAATGAKSDPIDAIAAAHAAMATPGLDRHRIDERVRELRVLVDYRADLVKRRSMVINQLKAQLHLWLGHTPADLTRARHLATVTARTSTARLSPHVRRALADMTAEIAELNRHVTELDSTIRELVTPLAPALLQITGISYNSAAVLITEVGDITRFPTSAKLARYTGCAPIPVYSSGKERHRLHRGGNRRLNSVLYTAAIVQNRRSPAAQQLLARHEDRKGARGARRILKRHMVDVIHRAMTADQAAWEHPITRHQLAA

SEQ ID NO: 386108 - protein, 392 aa, unidentified
MSSKSERVVIGMDPHKRSATIEVMTCDETIHGGGRYGTDRDGYAAMLRYAKQWSERVWAIEGCAGIGKHIANRLLADGEQVVDVPPKLSARTRVFATGQGRKTDATDAHSVALVGTRMSGLRPVVNDEQLAVLRILVDRRRSLGEDHTRMVSQLHQLLLELIPGGAKKDLSARQAKALLAKVRPRDAAGKTRRRVAAELISDLERVYARKKAANKELTELLAATDTSLLDLPGIGPSGAARLLVEVGDITRFPSKAHFASWNGTAPIDASSGDQVRHRLSRGGNRQINRVLHIMARVQIRNPSTGRDYYDRKKADGKAPMEAMRCVKRRLSDIVFQQMLNDAIRHSGTGPGGQLGNDSDSSAAGSHPDAGSSDKPLPGPAKAKPKTPLRRAS

SEQ ID NO: 386109 - protein, 344 aa, unidentified
MGEVSTIGLDIAKSVFQVHGVDGAGAVMIRKRVSRGKVVEFFAELSPCLVGIEACPSAHYWGRELTELGHTVKLMPPSYVKAYLKRSKNDANDAAAICEAVTRPSMRFVPIKTKEQQTALMLHRTRQLLVRQRTMLSNALRGHLAELGIVSAKGRNGTGELLRIIADGADNRVPAAVRGILDVLARQYGAIGTEILSIDKNILALHRSCEASRRLAEIPGIGPIVATALVAEIGDWKTFSSGRNLAAWIGLVPKQHTTGGKDRLGSITKQGNRYLRWLLVVGAMAVIRYARKHGTQKRPWLGRLMERRPLKVAAVALANKIARMAWAIMVRGERYKEPKLLLAA

SEQ ID NO: 386110 - protein, 431 aa, unidentified
MSKFFYRPTVGIDISADFSVVAILAPDGEVYRKSFKIMHNRNGFDYLVDQIKKAEEEFNMKTAIFMESTGVYHLTLFHFLKDTFEVCILNPLITNCNKNGDIRKVKNDKKDALTIATIGKFQNVKYSSNFDVEIYTLKSLCRDYYKFTDSKSTFKKKLSTDLRVIFPSYSSVFSDITGKTSIAILKKYSSPEAVLSADRDELINLISTTSRKGLAHSEKTYKKLYDAAEEAAYIGLKSPSLFVKIINTIAVIEALEIQIGNLLTEIHLLMRSNRISDEFKKNVRLLYSIPGVGELTAITIMSEIGNIKGFVKPKHLVAYFGLDSSVSQSGKFNSDRNAMSKRGTRIGRRALYAVALASIRKNRNGEPINRVLLNFYNENMKDKKKKVGLVAIMHKLINYIFSILKNQKEYELRDPKIHSKMYLNNNSKQAA

SEQ ID NO: 386111 - protein, 359 aa, unidentified
MTENTNVESPLLWIGVDVSKKTFTAAAMLPWEEKAVYPKDCADFENNRGGARRFCKWLGELEKEFGGPFGAAMEATGPYSIRLHDNLKRLRPGLHVSICNPLSVSYYMRSLGTNKTDRADAAIIARFAAHRRPARYAEPSADQSELRRLSRDRSFLVDSRTEYKNRIECESDPSSRRRMRSVVATIDKQINDIDAEIEKYLLTKASLECRHEIELMQTMPGVGRLSAAIIYGELGSLARYSRKQLSAMSGVCPTTIQSGTSLHKGGLSRRGSRWLRRILYLDSQQSIARSPAMAAFHGRMLSKQDSSKMSARVACMRKLLLVLRGMVVSGKPFDPNHISTRPTFPVKITNDQEKSEVTA

SEQ ID NO: 386112 - protein, 350 aa, unidentified
MRHVIGCDVHKRYSVFVAINAHGKLSKPTRVEHDRDTFRTFLQSLPPHCEIAVEATGHWYWIIDEMEKAGHQPHLADPHESKKRMGKPNKHDALDAGGLAILLHNGTLPESWIPPGELRDVRELLRTRMALRDLRTALKHRIHAAIDRYGLHNDAISDLFGKAGREFLLHQLSGLPPETHAMLLLELDAMDDLTPRIESIEARVAEVIVPSPEVQILLTLPGAGQILAPLLWLEIGDVERFPRAENLASYAGLVPRVFSSGGHTVLGHTNRYVNHYLRWAFVEAATCAAHLHAYRESHIGVLFQRLLPTRGYGRAIVAVARHLAEASYWMLRKRQPYRPPTPKLPSSRIG

SEQ ID NO: 386113 - protein, 356 aa, unidentified
MNKRSKLNFSGQAIYLGLDVHKKSWSVSIFTKYGEYKTFSQPPEAEVLIQYLQRHFPGARYHSVYEAGYCGFWIHDQLRERGIDNIVANPADIPTQDKERRNKRDRIDCRKLARGLRGGDIKGIYTPPRWRLEDRSLIRTRLSMGRKQARCKNQIKSMLLFYGVAIPEQREMGHWSRRFIRWIEEIRMERSSGDVALKLHLEELCHLRQILAKLNRSILALARTQEYRLWISLLKTIPGISTLTAMIVLTELHEITRFRSLDQLSSYVGLIPDTRGSGEKEHVGGMTQRHHWSLRWLLIEASWIAVRKDPVMMEAFNEYCKRMRKTKAIIKIARKLLNRIRYVLKNQAEYVAGVIE

SEQ ID NO: 386114 - protein, 337 aa, unidentified
MLTAEADKRKTKVVVNTAAGVQALLAWCAKHGAQPAQLHAILEPTGLYHEQAATALPQVRVSLVNPAQARDFAKALALRSKNDALDSYVLARYGQTLSPALWHPAPLHARQLRALLTRREALSKDLLRELNRKEKSQFSPSAPLVDGSIDKAIAFLREQIKQIERAIDQHIDNHPDLKQDCELLNSIPAIGPQAGNAILAVMHNRHIDSAQSLAAYLGVVPVQRQSGSSLNSCARPVQSRPLPGARHVIHGGPGWDPPQPPHPRPLPAPAQSRKKQKGRAGRGHEKTGASVLRGPQKPHPLPAQLRHEWLTAKTVSVPAGRVPVPAGTGTLLYAIDA

SEQ ID NO: 386115 - protein, 345 aa, unidentified
MTYFVGLDVSVQETAVCVVDEVGKVICERKVPTEPDDIAALLSTIGGDYVRVGIEAGPLSQWLVNGLCETGLPVVCAETRHMKALLKAQEINKSDRNDARGIAQMMRVGLFKPVHVKTLAAQEQRMLLTSRKLLQRKLLDIECDMRGTLRNFGLKVGVVSTKTYETRVRELVESFPRLAAIVDPLLKVRQVMRQQLATLHKMLLNMVRDDPVCRRFMTMPGVGPVVALTYRASVDQPHRFVHSRDVGAHAGLTPKRYQSGEIDYDGGISKCGDAMLRTMLYEAAQSMLTQSKKWSWLKAWAMRVAQRRGLRRATVALARRIAVILHRMWIDGTDFRFSNSAAKRA

SEQ ID NO: 386116 - protein, 343 aa, unidentified
MRIVGITGGVDTHADVHVAAAIDHNGGLLGIESFPADEVGYEGLLGWLVGFGPVTRIGVEGTGSWGVGLTRFLTGQDIIVVEVDRPNRQTRRKQGKSDPTDAVSAARAALSGEATVTPKSRDGRVEEMRVLLVARRSAREQRIQTLNQLRHLVFTAPEEIRVRFKDRPKRGLVTEAANMRPRRGSDPVTYRTNLVIRNLARRIKSLDTEMRTIDRTLRSLIEETAPALLEMYGVGVDTAATLLVTAGDNPDRLSSEGSWAHLCGVTPLPASSGKVTRHRLNRGGDRQANAALYRVVLTRMSSDPDTRRYVARRREKGLSTAEIMRCLKRYVARQTYKQLPHMI

SEQ ID NO: 386117 - protein, 336 aa, unidentified
MSKKYSRVIGIDVSQETLEISDSKSKLASQIENLPADIQRLLIAKIQDKANTLVVCEATGGLEIDLVDLLQENNVDVVIANPAQVRHFAKGHGFLEKTDTIDAKVIRLFGEQVQATPAKPRTVEQKKLTALTRRRAQVIDLINQEKNRSKQCRDKDALGWVKESIKQLETQLNTVDSAITSLLDKMAEDDPEIEILLSVPGIGYTTTAIIKGELPEIGKISRNKIAKLVGVAPLANQSGTQDGKRSIRGGRSIVRTALYMPTMSAMRHNPTIAAYAMRLRRHGKPHKVVVTACMRKLVTIMNLMVKQGTKWGEKWDDTKKGDERVTSSSPTCSTGS

SEQ ID NO: 386118 - protein, 367 aa, unidentified
MIVNEVAKNVEKIISIDTAKNSFQVLVVNQKTGKKKNTKVQRSKFVEYILKQGPCLIFMESCSASQHWARLFESFGFTVKLIAAQHVKAFLRNRRVKNDERDAEAIYTCGIQPDTKFVRIKTVEEQTVALLHTLRKAAVSQRVELSNRIRGILAEFGIVVARGKGSFNSEIEAMFNECEKIHDVYLRSAISSLFEDYHRLEQREKELSEKIESLNKDNELVKIALTCPGVGSLTASAIVAEVGDASQFRNGREMAAWNGVVPSQHSTGGRSTLGGITKTGNRYLRTLLAQCACAVIQKASRHLEQGKDTHLDRFALRLKLNGKPAKKIMIAVANKIIRILWAMLTQRKTFKNKADETSDISAELQLA

SEQ ID NO: 386119 - protein, 342 aa, unidentified
MNEVTIIGVDLAKQVFQLHGAAADGTVVFRKKLSRAQFPRFMASLPPCIVAMEACGTSHYWGRELSRMGHNVRLIPPIYVKPFVKRHKSDAADAEAVAEAAMRPTMRTVAVKTVDQQARAMLFRTRELLVGQRTQLVNALRGHLGEHGIVIAKGISNMPRLVAIIADDKVPLPDLVRAMCNVYLDQIASVNEKLDAIECRIAAEAKQSITARRLQKMPGIGPVCAMAVMTFAPPMENFRRGRDFAAWLGLVPRQHSSGGKQKLGRTSKMGQRDIRRLLIVGAMSVVHWKGRGGGRPGSWLARMLAKKPKMLVAIALANKMARMIWAMLVRDEDYRNPKGAVC

SEQ ID NO: 386120 - protein, 354 aa, unidentified
MPDEYATVTVTVKVTVGVDTHADTHTAVALDELGRRLDTVEVTADETGYGDLLDWARTLGVVRAVGIEGTGSYGAGLARFLTAAGLNVIEVGRANRQHRRRHGKSDPADAEGAARAVLAGEATAVPKSHDGIVESIRALHVVKRSAIKARTQAANQMTALALTAPEATRAELGGLTPLKRARRAAGWRPGAGHDPVTVTRRAIRALARRWLDLTAEINTHNGELDELTAVAAPGLVAEQGVSRDVAAKLLIAAGDNPERIRTEAGFAALCGASPVKASSGKTNRHRLNQSGDRQANNALWTIARVRLSHDPETRAYAQRREDEGLSHREIVRCPKRYLARRLYPILIADLAKLT

SEQ ID NO: 386121 - protein, 346 aa, unidentified
MVTLGVDAHKRTHTIVAVDDQGRQLAVTTIGTNTRDHLGLLKWAEQFGSDELLWAVEDCRHLSRRLERDLLAARQSIVRVPPKLMAHVRDSARTYGKSDPIDALAVARAALREPDLPVARLDGPDRDVRLLVDHRESLVAERTRMINRLRWYLHEIDPGWEPKARSLDRRSAYDVVDEHLVGADGVVARLARNLVDRLRPLTVEINQVDQDITELIEKLAPSLIAIIGCGTLTAAKILGETAGVARFKSKDAYARHNGTAPLPVWSSNKARHRLSRTGNRQLNTALHRIAMTQAHWHPAAKAMMERRKAGGDSGLEALRVLKRRLSDVVYAALRADLAIEPKLAAA

SEQ ID NO: 386122 - protein, 375 aa, unidentified
MNNNNTLYVGLDVHKESITVAYAINSEPVELMGKIGTSPTDIQNLCKRLRSKSSQVSIVYEAGSCGYGLYRRLVKSGFDCMVCAPSLIPKKPGERVKTDRRDAIRLVRSLRAGDLSAVYVPGIEDEAFRDLARAWASARDDLRHARQRLKSFLLVHGVHYVGRADWGPAHRRWLSKYSFESPWRQLAFDEHRRTIEDRQAQCERLESALKEAVTEWRLYPVVEALQAMRGIQFITAVGLISELGDLTRFEHPRQLMSWFGITPSEYSSGGSRHQGSITKAGNSYARKLLVEAAWSYRHPARISPAIQKRQENLPRPVIDRAWDAQLRLCKRYRKLQAKGKNVNITIVAVARELAGFIWDMGRIAMSVAQQPQCHK

SEQ ID NO: 386123 - protein, 352 aa, unidentified
MRILALDLGKYKTVACEYEAESGRHRFATVLTTPKALHDLIVDREPQRVVIEICSIAGWVADLVRSLGIELQVANTSDERWQWRKVKQKNDRRDALKAAQLSAVNQLCPVHVPELQMRQWRALIAYRSKLVQRRTKVKNHIRDLLLREGQLLPRGRMAWTQVGLTTLAAMVKPFSELSADELWRGELGIELAQLKELQQQIMTVHAKLDEMGAADPRVQLLRTIPGVGARLAEAIVTMFDDVTRFDTAGQVGAYIGMVPKQFDSGEMARSGRITRHGNRLVRSLLVEIAWASLRHNPWARQTFQRLSGGKQSRRKIAIVAVGRKLLVRCWGMLRHQTPWHWQTSVATQSSGG

SEQ ID NO: 386124 - protein, 480 aa, unidentified
MAKRTHAHPDLKAVPMLLNESLYIGIDIGKGKHVAGFLSQTLLSRHDRFEACPALVFENSREGFRLLIERIRSYSPLEHVFILMERTGHYHRALEQYLQDLDIPVYVMHVQSRPAGMLKTDKRDALTLANQLYSQLELGVQVANKLQLIRRIVPPTEAAAQLKGLVRHRYELIRESTQRKNKLTAHCDEVFPELTRVVKDPNALVALALREKFPTPQALATASLTTLQQIRGGARSLSDAKLLELQRLAAQSIGAKDLARQRGLVLEQTQLIKELRLLREHVEQLETEIVSIVEQAREGQILRSFPGIGPVMAATIIAAVGSIHNFPSASALKSYFGWAPVVVQSGSTLDHARLTRGGTRTMKQMLFLAVLQAIRLHDNEWAKLYERLVKTKCPYDERTQSYVGKTRVIGRVAGQMTEAIYALLKRDAEVLSKVLPGQEPPAPLLYDPEVHRKHRQGQYRPLKSTPLPNTITVLHPRSPQ

SEQ ID NO: 386125 - protein, 344 aa, unidentified
MQTMYYIGLDVHKRTISYCVKDGSGTIHAEGTIAATRFDLDRWMKTLPQPWTAAMEATVFTGWIYDHLQPHATALKVAHPLMLRAIAAAKKKNDRIDASKICDCLRCDFLPECYMASTAIRERRRTLRYRNLLVRQMVQMKNKISGLLMEAGVNYNKQRLHKAGYFRELLATNPDISEGLCSLLRLCRETVVRVGKTESALVRSLERDSLLMERVERLMTIPAVGPITALTWALEVGDPKRFSSIKKAISYCGLCGAEKSSANTVQRTPLSKQRNKHLQTTLIEAAKMAPRNSPELAMLYDQEKQKGNANRATLAVARKLVAYLMAVDRGQRNFEVVETNCIAA

SEQ ID NO: 386126 - protein, 400 aa, unidentified
MIDIGDIDVFLGLDVGKGEHHATAVTPAGKKAFDKRLPNTEPKLRELFAKLQAKHGTVLVVVDQPASIGTLPLVVARDMGCPVAYLPGLTMRRIADLCPGEAKTDARDAFIIADAARAMPHTLRSVDLEDETIAELEMIVGFDDDLTGEVTRVANRLHGLLSQIHPSLERVLGPRLQHPAVLTLLERFGSPAQIRKAGRRRLVTLLRPKAPRMAERLVEDIFTALDEQTVVVPGTEAAALIVPSLATSLAAVLDQRKLLAGRIEELLEAHPLTQILISMPGVGIRTGARILIEVGDGSSFPSAAHLAAYAGLAPATRNSGSSIRGEQPSRRGNKQLKRAFFLSAFAALGDPASRAYYDKKIAQGKHHTQALLCLARRRADVLFAMLRDGTFYEPQPARTA

SEQ ID NO: 386127 - protein, 304 aa, unidentified
MNGIGIDVSKRQLDIGTTDGETLQVSNNRSGFSELDVWLKKRPTRQIVLEATGGYEQPVLDFLHKAGHPVARANALRARKLAQGLGQIAKTDRLDAYALAQMAALVKLPPYQTLQSWQQKMREFVRARRQAMDALTIARQQQEMVLDRELRRLLQGNITRLQTLVERLGKQIVEQVGQQPQLKMLKSMKGVGPVLQAVLASYLPELGRITGKRIASLVGVAPMSHDSGTMRGKRSIHGGRAEIRQVLYMAAMSAMRHEPRLRDFYQSLRARGKEGKVAIVAVMRKMLVILNARVRDAESGLVPA

SEQ ID NO: 386128 - protein, 351 aa, unidentified
MRNLAAPESDRRLGRKLTLVGVHPDCLTLHRRGLVMQTVRDLGADVDSRTFVVVCAARSVAPQRVANERRAILAWLRTVPPASRLGLEATGVHHELLADLAHRAGLQVFVLNARDVRRYAQGLGRRGKTDRVDAEVIARYVAHEHSELHAYLPPSKEQRALSRLIKRRAKLVAIKGALTQSLRGVPGVRQELHQVSARLERLIAQVEALMQCALHQLPAAHQAAQRIATVPGYGPLGSTCLGYTFTRVPYLNSDAVIAHTGFDPRPADSGQKRGRRRLSKRGPGELRRVLFNCAMAAAKTTLWRPYYQAQRRKRLSSTAALVILARKMTRVAFAVYQRDQPFDATLLRFSA

SEQ ID NO: 386129 - protein, 356 aa, unidentified
MGNSNRLDFTGQPIYIGMDVHKKSWSVSIHSAVCEHKTFTQPPEVDILVNYLRRNFPGATYRSVYEAGYSGFWVHDQLVEKGVACTVANPADVPTKDKERRTKRDQIDCRKLARSLRAGEIEGIYVPCRKKLEDRSLVRTRQSMVRKQTRCKNQIKSILFFYGIAIPEEWAERRWSGPFVRWLESLPMERASGEVALRIHLEELRHLRQILARLDREIRVLAQTEEYQTQVRLLRTIPGISTLTAMILLTELQKISRFRSLDELASYVGLIPDTRSSGETEHTGELTKRRHAQLRASLVEAAWTAVRKDPALLMAFQESCQRMRKTRAIVKIARKLLNRVRYVLKNQTPYRMGVVQ

SEQ ID NO: 386130 - protein, 386 aa, unidentified
MMLIGIDPHKATHTATAVEPGTNREVASIRIDASLQEYRRMLTWAARWPQRRWAIENAEGLGRHLASWLLARGEDVIDVPSTATARVRQLSRGGGRKNDRINAAAAACVAALQGDARPLAAEGAADALAVLDERRVNLSQARVRAVNQLHALLRALIAGGAPTDLSAATAAALLRTIRPSGDVERIRKAVAVDLVAEIRSLDTRLRASTKAIAELVDKSDSTLTDTVGIGPIVAGRLIARTGRPSRFPNSAAYANYVGAAPVEVASAGTMRHRLSRTGDRQLNSALHTAAITQIRISGSQGNLYYKAKIAEGKTPREAKRCLKRRLADHVWRVMTADERRQAASPGGHPGATLQSSATGSTPTTSSSDKSLPRPANRNSTTPRPAA

SEQ ID NO: 386131 - protein, 410 aa, unidentified
MRLQCDRVAGLDVHRDSVVACARLGRGDEPEIQRASFSTTTAGVSELAGWLADLEVTRVVMESTGVYWKCVYYPLEGLFAELWLCNARHVQNVPGRKTDVADAEWLADVAAHGMVRPSFVPPPEVRALRNLTRYRKTQVTIRGQEVQRLEKLLQDAGIKISSVASRVLGKSQRAMIEALIAGERDPVVLAGKALGRMRPKIPELTEALVGRFAADHGAVARVILDHIDFLDAAIARLDQEVADRLAPFRAAVDLLQTIPGVGATVAQVIVAETGADMSRFPSPAHLAAWAGVAPANHESAGKRQPAGTRHGGTWLRRALIEAARSAAGSKGTYLAAQYRQIAARRGPNKAAVAVAHSILVAAWHMLSTGQTFEDLGADYLTSRRDPQAETRRLVKRLQTLGHTVTLTPAA

SEQ ID NO: 386132 - protein, 354 aa, unidentified
MKRTTKYVALDVHQATTSASVREESGRVIARSVLPTDGAAITEFVRGMRGAVHVALEEGTQAQWLHDLLAPLVDRVVVCDRRGTPRPGNKADQVDADQLSEQLRRGGLRAVYHGSADRATLKELTRTYRNLVEDATRVMLRLKALFRARGIPASGKHVYHPRARAQWLAQLQDPGARLRAETRYAELDVLRHLRPTAKAAMVTEARRDPAWSVLRTIPFFGSVRVALLLATMQTPWRFRTKRNLWAYAGLAVVTRSSADYALVAGQPVRRRRAPMTRGLNRNHNRVLKDVFKGAATAATARPGPLQDVYHNVIARGTREELARLTLTRKLAALTLRLWKKGERYDPTKLTTPAR

SEQ ID NO: 386133 - protein, 348 aa, unidentified
MTMVGGLDVHRQQITFDYVDDDGLVHWGQIRAATRKSLRDWLAERCPDRDAEFALEGCTGWRYVVEELAGAGVVAHLGDPAEIAGLRGRKKRAKTDRADARLLRTLLLDGRFPESWIPPAHVLEVRTLGRLYCTLMDERRSWQQRIHAQLFHQGCPPIRALLTEAGRDALARAELSAAGRQYVDTALRRIDELSAEIEPLRTQLISFARRQAGCQALQRHYGIGWLCAVIIWAEIGDARRFSSSDQLVRFAGVDVTVYSSDGKRSPGHLSRQGSPELRWAAFEAAKSAARRGSPDHNYYRRLAARRDSGKKPTLAVERKLLRRCYHSLRALGDAALAPPAPEPHKDAA

SEQ ID NO: 386134 - protein, 412 aa, unidentified
MNIIHRCCCGLDVHAKTVVACLIKHGKKQIRTYSTMTDDLLRLSDWLVSEGCRQVAIESTGVYWKPVFNILEGVLEVVLVNARHVKGVPGRKTDVRDCEWLADLLRHGLLRASFIPPLPIRELRELTRHRHTLVRDQTAVSNRIIKLVESANIKLAEVASNALGVSGRAMLRALAKGEEDAAKMAGLARGRLKVKQGQLTRALQGRLTRSQRFVLTELLDQLDQLEAAVTRVSAEICEQIEESSDPFVKEAVELLQTIPGVGEQIAEVIVSEIGTDMTRFPSDKHLASWAGVCPGNNESAGKRKSGKTTKGSNYLRAGLTQASWAASHTKLTYLAAQHKRLIRRMGKKKALVAVGHSILVIAYHILKNRASYHELGGDYFDRQNVELLRARYIRKLETLGLKVSIEVFSEAA

SEQ ID NO: 386135 - protein, 350 aa, unidentified
MLIIGCDYHPSFQQIAFVETETGELQQRRLGHREEAEQFYRALATAGTEVRVGMEASGHAGWFERLLAELTFELWMGDAAKIAAKRVRKQKTDRLDAQHILTLMVKDDFPKIWVPSWDNRDVRQLLWHRHRMVQTRTRIMNQLQAAALNEGLRYKKKLWRESGRQQLESLPLAPWASRRRHDLLDVLDRINPTIAELTHAIEQEAKKCPEAQRLMTHPGVGALTALAFVLIVGEAQRFGCGKQIASYLGLVPEEDSSGERRRLGHISKQGNSLLRFLLVEAAQATVRSDVRWRSRFFHLAQRRGRKIAKVAMARRLAVRLYWMWRRGWNYEQLESFGSHAGQLGNPHGVQ

SEQ ID NO: 386136 - protein, 381 aa, unidentified
MGEHSAVFVGMDVSKSNIAVALAEGSDRGEARFWGEIAASEDAVGKLVRRLSAQHGELRFCYEAGPTGYDLHRQIVALGHPCSVVAPSLIPRRPGDRVKTNRRDAVSLARLLRAGELTAVWVPDEPHEAMRDLIRARAAAATDLRVKRQQIGAFLLRHSRLYPRKKTWGGAHKRWLASQTFAHLAQQTAFAEMRIAMGEVEARIKRLDQAIGEAVASWSLASFVEALMAMRGFDLVNAVTVVAELGDLSRFASPRELMAFLGLVPSEASTGDKVKRGGLTKAGNSRARRALIESAWCYRYPARVGPAKLKRFEAAPRAARDIAWKAQTRLCARYRALIRRGKLKGVAIAAVARELAGFVWAIHRALADQRAASGFMPLSPP

SEQ ID NO: 386137 - protein, 350 aa, unidentified
MKICTIGIDLGKTVFHLIGLDEHGKVIGKKKCSRSQLLAYTANIPAALIGMEACCGSHHLGAALAVQGHQVRLIPPQFVKPFVKSNKNDYNDAEAIAEAVLRPRMRFVPIKTNDQLDLQALHRVRDRLVRRRTGIINQIRAFLLERGIAFRAGRVYLRSHMAAILEDAELNLSPLLRGLLEQLWEEWKITESRIEEVTDQLEVIADQDTSCKRLQSVPGVGPLVSTALVAAIGNGSAFTKGREFSAWLGLVPRQVSTGGKPRLLGISKRGNSYLRRLFIHGARAILIRERKKYAFGGWMTQLESRAHANVVAVAVANKLARIAWAVLVKGVNYRQTPTLSGSNCEGNMAA

SEQ ID NO: 386138 - protein, 283 aa, unidentified
MPPAAPTFVGIDVAKAELVIAIRPSGDRWTVTNDEAGIQTLVKRLDRHAPALVVLEATGGYERAAIAALAAAQLPLVVANPRQVRDFARATGQLAKTDRIDADTLALFAERVRPNPRALPDEAARALDALLTRRRQVLEMLIAERNRLEHALPAVRRGITQHIRWLERQLQDVDRDLDDNIQASPVWRAKENLLRSAPGVGPVLSRTLIGELPELGTLPRKQIAALVGVAPLARDSGTLKGKRLVWGGRAPVRATLYMAVLVGTRCNPVIRAFYLRLLAAGKP

SEQ ID NO: 386139 - protein, 362 aa, unidentified
MNKNLQRTEHNAPTPGNQKTIGIDLGDRWSRYCILGGDGQIVEEDRIPTSTGALERAFKKMPATRVVVEAGTHSPWVCRLLEKLGHEVVVANARKVRLIYESDSKNDRLDARMLARLGRVDVNLLAPIRHRGAETQADLAVIRGRDCLVAARTQLINAVRGMVKSVGGRLPKSTTAAFAGKVSSLIPSELKVALEPLLSSIAALTEQIAKADEQIAQLAEAKYPETKLLRQVKGVGPLIALTYVLTVGDPHRFAKSRTVGSYLGLRPRQRESGSSAPQLGISKAGNNHLRWLLIQAAHYILGPLAPDSGLRRWGLGLAGKGGKSGKRKAVVAVARKLAVLLHRLWVTAEVYEPLYGIESEAA

SEQ ID NO: 386140 - protein, 328 aa, unidentified
MTTFYLGIDIAKDKFDICLLHDVQKWSGIFTNNENGFRKLDEWLDNRVDGKLQTCMEATGRYGEKLAAHLHQAGHRVAVVNPSRIKHYAQSQLRRNKTDKIDAAIIADFCRSQKTHEWHPPNEAEMILRQLVRRYDNLVTDQTREKNRLKAGDLAEVVQASIEAHLTFLNEQIKIVLVQIQDHIDQYPDLKSKQELLESIPGIGKKTAAILLAEMPDTQQMSAKQIAAFAGLTPEQLSSGNYRRRQDTLSKLGSVSLRTALFMPALSAMRFNPITQALAERLEKKGKLPMTIIVAVMRKLLVLAFGVLKSGQPFDPDFVTKRKLELDF

SEQ ID NO: 386141 - protein, 369 aa, unidentified
MRESTTFIGLDVHQGSVMAAVWRPGAAGPEVGAAPVELPKLVRWVARVAADGPVHVAYEAGPCGYPLVRALQQAGLRCTVVAPSLIPQVAGGRRQRIKTDRRDAAQLVRYLRDGALTAVTVPSEADEALRELTRARQQLQRDVVRARHRVSKLLLRHGQRWTQSKPWTHAYRAWLRDRVWAEPGVAVVCRTYLAALESAEVRLKDLDAQLRAWPLPAALTAPVGALQCFRGIDRLSALMLAAEIGDGRRFPTARAFMHYTGLTCWEWSSGAQRRQGSISKMGNTHLRRVLSEAAWHYRYRPAVGVRLRRSQRGQSAEACALAWRAQERLHHKMQTLTRRGKRPTVATTAVARELAGFVWAVWRLEAPAR

SEQ ID NO: 386142 - protein, 386 aa, unidentified
MQASHVSTPIKSNVSTIFVAIELSQRSWLVTMHCPDKDKISHHKLEGGDHAGLLTLIERMRERAARTLGAVPAVVSCYEAGYDGFWLHRLLMAAGVTNHVFDPASIAVDQRARRVKTDRIDGEKMLRTLMAYLRGEPRVVRIVRVPTPEQEDARRASRDRGRLTKEQTAHTNRIKALLRLLGMAIGNPRRRDWLSWLATQKDWQGQAVPPQIMAEIKREHARLMLVREQLEALARPLAAADLTPAAAQMAQRSELLLRLKSLGPAFATTLTHEVFYKDFRNRREVASYFGLTPSPWQSGGTDRDQGISKAGNPRARCAAIEMAWLWVRHQPDSKLTQDYRRRTLNASKRIKRIAIVALARKLIVALWRYLTTGLVPEGAMLKAVEM

SEQ ID NO: 386143 - protein, 433 aa, unidentified
MEEAADEPLFCERAAGIDIGKQAVMVTVRVPSETRRGGRAQETREFGTTRRQLLELADWLRSWGVERAGMESTSDYWKPVFFLLEQQGLECVLYKAAQVKALPGRPKSDKLDSVWLAKVTERGSLAGSFVPPEDIRRLRTHTRYRRRLTQARTAEKQRAEKLLEDGHLKLSSVISDIHGVSGREMLRAVIAGERSPLVLAEMARGVMRRKLAALREALDCSFFTQEHAFVLSMMLDNIDHYSAQIAVLDAKIAVLCEPYQRQVAQLDQIPGFGVTTAQDLIAEIGVDMTVFPTAGHLCSWARVAPRPKESGGRRKGGSATGKGSPYIGAALGEAAASAGRTQTFFGAKLRRLYRHMPKKKAQVAVMRAQLVTAHALLSDPEASYRDLGPGYYDQRAGIERQARGHVRSLARLGYKVTIEPVDPGTGELTAKAG

SEQ ID NO: 386144 - protein, 402 aa, unidentified
MDIEDIDVFIGIDVGKSEHWATALSRDGQKVLDRALPNDEDRLREVYQRLQAKGQVLVVVDQPATIGALAVAVAQDMGITVGYLPGLSMRRIADLTPGSAKTDAKDAAVIAGAARTMPHTLRAVSASEEEAAALSMLTGFDLDLARQVNQTANRIRGLYTQIHPALEAVVGPWLEHDAVLEVVAAWPTPADLKRAGKARIDARLKKHGCRRHATWAGQIVSALEHQTVVVAGTDAAAVVLPHLARQLISLHAQRADVAAQVETLVQAHPLYQVLTSMPGIGVRTAAVFLAETLGKTFDAGAQLASYAGLAPVTRRSGSSIRGEHVSHGGNKRLKRAMFLSAFASLRSDPVSRAYYQRKRNQGKRHNQAVLALAHRRILTLHAMIRNGALYDPQPATKLPTAA

SEQ ID NO: 386145 - protein, 421 aa, unidentified
MKNSLARKLKQVPEGYLVVGVDPHKKRHAAVAINEDLVVQTKFKFVNSRDGFDEALEKARVEMVKAGCRGVMFAIETGGHFWRNFAYFLEERGIPFRLISQFTLKRMRDGRDLNRRKNDFRDAEMAAGVLRTGDFTETKLPQGVYAELRSTHSAYYRLVKERSRIINLLKGLLDGLFPEFTQVFKNPCGLTALVVLSICPAPAAIAGMNEDVFMDIIRSGRPGRLMKKKLRALHQAAQTSIGIKPGADAVATEITLLVSRYCLIEQQVDRLVESLMRLVDKTEEGKYLLSIPGINYLSAAALLAELGSFRSYNNAKQLIKMAGTNPIESESGGKRLGKTPMSKKGRPRLRYSAWSAVIPLFRHNPDFRAWAKQLRERPAHENPLNGKEVVGAALNRLLRLVYTLVKKQEFYRSPQLALVAN

SEQ ID NO: 386146 - protein, 407 aa, unidentified
MGVIIERACGMDVHKDNITACVMTTEGKEIRTFSTKTVFLLQLIDWIKEHKCTHVAMESTSVYWKPIVNLLEAEGIEFLVVNAQHMKALPGRKTDVKDAEWIAQLLRHGLLKPSYIPNRNQRELRELVRYRRSIIEERARQINRIQKVLEGANIKLGSVVSDIMGVSAKDMLRAIADGEEDPEKLANFARRTLKKKKEELELSLNGYIHNHQRLMLKTILKHIDFLTEQIDMLDQEVAQRLSSYQEDIERLDSIPGIATRMAEQMMAELGNNIKEQFPTAAHMCSWAGLVPGHNESAGKRKSSKTKKGNKYLKSALIEAAHSVRGSKNYLGALYRRTASRKGTKKAGIVVAHAILRIAYYLLTRKEMYVDLGEDYFDKKRQQSIVRHSLRRLESFGYIVSIKEPEAS

SEQ ID NO: 386147 - protein, 439 aa, unidentified
MQVVHTRCAGLDVHKKSVVAAARLLSADGTLTTHVRTFGTTTAALLELVAWLLSLEITHVAMESTGEFWKPIYNLVEGSFTVLVVNAAHIKYVPGRKTDVKDAEWIAELLAHGLLRPSFVPPPPQRALRDLTRQRTHLIRERASEVNRMQKVLEWANIKLSSVVTDITGVSARAMLEALVAGQSDVTALAQLAKGRLRTKLTELEQALRGTLEPHHAFMIGQHLALLDVFDEQIAAFDDRISAAIEATGAANPPDGDTTAAGSDADAPSAPTGAWTAQAILDAIPGIGLRVAEIILAELGTDMSRFVDAAHVSSWAGLAPGQHESAGKRKATHIRDGNKYLRATLVQAAWAAVKQRDTFLAAFFRRLAARRGKQKAIIAVAHKILVIVYSLLKTGQVYEERGAAAVDEQQKERIVHRLERRIAQLGYKVNLEPISAAAS

SEQ ID NO: 386148 - protein, 402 aa, unidentified
MIFINCLGIDIGKSQSVVAHDKDEVLVKERVIQNNQNGYRYIKNYIKHLDSLFILFESTGIYSRGMKRFCEIHKIDYLEMNPLEAKFKMSSLRSWKTGKSDAHKLALFAFRMKDSKVQRQSEEIYFELRERARFHLEMEINQNRLKVELVETLHQTFPGLEKLFTNRYSKIALNIAKAFPHPDFVSTLTHDELVEKVLHSTDKGISVNKAHKYVQKLIEIKNNSFPNVHKSSFLLQKVQYLCDKLLIGIEEMKEFDQEMIDLTKNTTEFENIISIPGIGELTAALLIGELGNIREFKTNKQLNAFVGIDIKRYQSGTSKSRDTINKRGNKKTRRLLYLIIMNIIRGRNHYQSHIVDYYYKLREQPHGKPHKTAVIASINRLLKTIHYLIVNDKLYDYQKAPH

SEQ ID NO: 386149 - protein, 376 aa, unidentified
MGEKLRFLGMDVHAETIAVAIAEPDGEVRSLGTIANREESIRKFIRKLGPVEHLRACYEAGPTGFVLYWQLAQFGVDCAVVAPTLVPKKSGDRVKTDRRDALKLARSHRSGDLTAVWVPDEDSEALRDLVRAREAAKQDQLRARHRLTKFLLRTGRRPLLGVKAWTVRYVTWLQQIHYTQPAQEATFEDCLHEVQHMDERVKRLEQVIVEVMKVAPPLMQALIRGLQALRGVAHISAITIAAELGNISSRFENARKLMGYCGAIPSEDSSGKRKRKGSITKAGNAHLRRIAIESAWSYLHRPSIGAALRKRQEGVSAEIQEIAWKAQNRLHKRYMKMAMVGKEQRKIITAIGRELLGFIWAIGIKAEAACTQQMAA

SEQ ID NO: 386150 - protein, 356 aa, unidentified
MSRDLKYIGMDVHKEAVVIAVLNSNGKLGMESIVETKDSRLLQLIHGLGGELHITWEEGTWAAWLYDLLQPHLQQVLVCDARGNALLKEGNKSDKIDARKLADLLRTGMLRPVYPGEHGLRTLRELGRSYQTISQDLNRVMNGIKALYRGWSIPCPGTQVYAPRYREEWLQKIEHAGVRRRAELLYPQWDGLQTLRRTLRAELLAESRKHKASKLLRQIPCIGPIRAARLIARMQTPHRFRSQRQLWTYSGLGMETHDSAQYCYVQGQLQRTKKPQQIRGLNRNHNHEMKEIFKGAATRARCGVGPLRDFYVALLAKGMKPEMARLTLARKIAAIALTLWKKEERFDALPLKPQAA

SEQ ID NO: 386151 - protein, 423 aa, unidentified
MKIVYQICCGIDVHAKMLVACLIRADGQKEIRSFSTMTADLLRLRDWLVAAGCTHVAIESTGVYWKPVFNLLEDKLEVILVNPEHVRALRGRKTDVKDAERLADLLRHDLLQPSFIPPPEIRELRELTRYRDSLVRERSSVANRIQKVMESGNIKLSQVASDALGASGRAMLRAMAKGESDPLRLADLARGKLKEKRPELIRALTGRLTSSQRFVIGELLAQLEQLEAAEERVNKQIDQYLGSADHPQMARAREILDSIPGIGPRAAEVIIAEIGVRMEEVFPTDAHLASWAGICPGNKASGGKRLSGRTRKGNTYLRAALVQAAWAAIKKKDCYLSAQYSRLAGRLGRKKALIAIAHSLLIIIYHVLDQDQSYTELGGDYFDRQHTEQQRAYFLRRLQMLGLKVSIEESSEETAEKDLLKAA

SEQ ID NO: 386152 - protein, 483 aa, unidentified
MAKRKMSTFERLNSGEMNRRQRRELARKVAADDPELLIVNPNAAGIDVGNESHFVSVAPDRDPHPVREFGCWTAALRQMAEWLKSCGIDTVSMQATGVYWIALYDMLEQYGIRVVVSNAQHTKNVPGRKSDVQECQWLRKLHTYGLVRDSFRLAEQMQSVRTIWRVRDRLVKDAGRAIQHMQKALTKMNIQLANVLSDINGVTGQAIIGAILKGERDPYKLADLKNYRAKASREEVARSLEGNWREDVLFELQQAVDSYHFLHQQMQECDRKLEGYMASLPTRTLNAPAQPESAPAGTPPKKKKAKKPRGNEPAWDLSAELARIYGVDLTTIDGINVMTAQTVLSEIGTDMSRFENEHHLASWLGLTPSKDKSGKTVRKGKKKVKNRVAEALRMAATTLLKSDSYLGARYRHLRRQLPTAAAAVKAMAHYLALLVYRMLTRGEAWVDRGRQHFERKRNQRELASLKSKARVHGFQLIPISQAS

SEQ ID NO: 386153 - protein, 326 aa, unidentified
MDFLGIDLAKLTFDATLLSSTGAQPYHSFPNTPEGFMALQTWLEEHNVTELHVCMEATNIYWEALASWLHECGYTVSVVNPARIKGYAQATMQRNKTDKLDSAIIASFCATHRPSAWQPLSEAHKRLRALVRHREDLLQTQLQQQNRLRDTTDALVRASLQAVLSTIAAQLEAVDRTIKEHVAAHAELAANLGLLTTMVGRGVVTAAKVLGEFAEMGEYETAKAAAADAGLTPSHFESGTSVRRRPRLSKVGKAGIRAALYWPAITAMRRCPACKAYAERLAARGKPKKVIIGAVMRKLVNIIYGVLNHRIASDPAKVLGPTAATT

SEQ ID NO: 386154 - protein, 312 aa, unidentified
MIKLTIGVDVSKDTLDVHLHPAGDHRQFSNDPRGFRSIVRWIAARPVARLVFEATGPYHRAFEHAMGEAGLPLCKVNPRQAKRFGEALGQLAKTDRMDAGMLARFGALLEPDVRPAPSKIISDLKDLHVARTALIKDRTAAKNREKNLTSPLLRRQIRQRLSSIESHLKEVETAIRILIDRDESLRRKIAILVSIPGIAERSASALLIDMPELGTLAAQEAAALSGTAPLTRQSGKWAGKAFVSGGRVNVRKALYMPALVAARFNPDLKEKYICLTSRGKPPKVALTAVMRKLIILANALIRDDRDWSPERA

SEQ ID NO: 386155 - protein, 482 aa, unidentified
MMEEAVGPEVGHHSGAGEPELEFDRAVQSTLDCRHGSPCGPGARLLDFMTRTATPTAHPQLEASMEVLHERCAGLDVHKNTVVACVRVLQADKVEREVRTFKTMTRDLLALSDWLDGHGVRHVVMEATGVYWKPVWHILSDGEFELVLANAAHVKNVPGRKSDVSDAQWLADLEAHGLIRPSFVPDAATQELRSLLRTRKQLVRERTSHTLRLQKTLEDANVKLDSTISNIIGLNGRRMIEAMVAGESNPETLAGLADRRIKASPQELCEALRGRVTKHHRFLLGLHLGHIDAINAAIDRIDGEIEADLQPFRDAVELLTTIPGVSDLAAQGIVAEIGLDMSRFPTVGHLISWAGLCPRSDQSAGKRRSTRVRKGAGWLKTLLVQCAWAASKTKATYLHSQFARIRARRGEKKAIVAVAASILTAAYHMLSTGTVYHDLGPAHFDRRRKDARVRSLLTSLRRLGYVTNLAPLQPEPLPVVSC

SEQ ID NO: 386156 - protein, 438 aa, unidentified
MSNKVIFNLDELFISVGIDVGADFSWMSIALPNQQFVGKPYKILHSSIDSLTTAVSKIKEAEELYSLESRIFLESTGIYHYPLFCYLRDKGFNCSVINPIITKNSTNINIRKVHNDRFDSKKAALVGLKPDLKVSLMPSDLALNCRNLCREYYDLMDNRGAYVNKLQGELRMAFPQYLGIFSKVTINTSLTLLETYTSPSAFLKVDKQEIIDIIKSTARFGLTYAQNKYNAIIQAATDANQFGYIIDSNIKRIRLYISFIRKYDEEINSILESLHELVDANEDSDFVKQIHLIETFKGAGFLSAVSIMGEIGDFSAFSKPKQLFAYFGLDPSVKQSGKFEGTKVQMSKRGSAIARRVIHTLTLQSISISRNREAKNPVLREYYLKKCDSKPKLVAMGAVSHKVCNMIFAILRDNKPFKIIAPQEHIKQYNSAKCDIAA

SEQ ID NO: 386157 - protein, 472 aa, unidentified
MSKLSHRKPNSQPGSQIEVRPFDGLARIQPHAAGMDIGAHEIVVCVPGPDNTQIVCSFGNYTADLYAIADWLLEYGIQSVAMESTGVYWTPIFETRETRGFKRCLIAATAIKRFPGRKTDVLDCQWIQTLHSYGLLADSFRPEADLVALRTLLRYWAQLIQHRSPHILHMQKALLQMNIQLSQVLSDITGGTGQLIVRAIVAGERDPHKLAALRNYRCKKNEDEIAKALTGTWREEHLFVLQQSLALFDFYTTQIQACDAEIERTYATIRPDWGSPESENQDPLPPKKPRSHSKNAPKDVSVRVHLKRIAGIDIVAVHGISASLAQTIIAEIGTDMTKFPNEKHFCSWLGLAPHNDITGGKIIRSRTLKTHNRAGQAFRQAAASVIRADCAFGAFYRRLKSRLGPAQAVVATAHKIAQVVYHMLKFKLDYQAVSAQEYDQRFREREIRYLQRKAAKWGFTLSSSTTPVLAVS

SEQ ID NO: 386158 - protein, 431 aa, unidentified
MEEVEDEPLFCERVAGIDIGKKMIMVTIRVPSDTRKGGRAQETREFGTTRKELLALADWLRCWQVEKAGMESTSDYWKPVYFLLEREGFDCTLYRASQVKALPGRPKTDKLDSAWLARITERGSLAGSFVPPEDIRRLRTHTRYRRKLVQMRTAQKERCEKLLEDGHLKLSSVISDIHGVSGRDMLGAIAAGERNPKVLADKARGVMRGKIARLEEALDCSFFTPEHAFVLQMMLDSIDQLTAQIEVLDGKIADMCQPYEQQIDQLDGIPGFGVTTAQDLIAEIGVDMSAFPTAGHLASWARTAPRVSESAGKRKGKNATGRGNPYIGGTLGEASISTGRTQTFLGAQYRRMCKRMPKMKAQGAIMRKQLVIAHALLSDPEARYEDLGPDYHERRKDTHRRVRSLLRELERLGYPATAIDPGTGELLPAAS

SEQ ID NO: 386159 - protein, 430 aa, unidentified
MNTNTQNAKIEAISETTLVLGIDVGSETHYARAFDFRGIEYSKKPFKFSNTEVGFMTFKAWILDIKEKHGKDKVVPGMEPTGHYWFNLGKFIQDNEMKPVLVNPHHVKKSKELDDNNPTKNDRKDPKVIAGLVREGRYMIPYLPDGVYADLRIASNMRFQLQAELTRIQNRISRWFSIYFPEYKTVYGQPDAKSGMLILKKAPLPEDILTLGVDGVNQIWRDAKIRAVGKARAKILVEAAEHSVGSKEGAVSARMEIRMLLEDYESRNIRLQEVMTLIEGLVKQIPMAEKLLEIKGVGIRTVSGFLAEVGDISRFNNPKELQKLAGLALVENSSGKHKGETTISRRGRKRLRYLLFEVAMSLVAKNPEFRELHNYYTTRRLNPLKKMQSLMAIAAKLIRVFYVMLTKGVNYDPKKMVNDIKRPAVYLQTA

SEQ ID NO: 386160 - protein, 387 aa, unidentified
MIYVGIDIAKKIHAASVLSSDGEILVEPFKFSNDDDGFCRLISSIESFDKDSLIIGLESTAHYGINLVSYLYDLHFKVCVINPIEVSALRKNNIRKTKTDKVDTFLIAKALMFKQHRFVTKHDIEIMRLRDFCRFRRKLIKSRSSLKVQLTSYVDQIFPELQYFFKSGIHGKACYALLKEAATPHEIASMHLTHLTHLLEVASRGHFKKDTATDLRVLARKSVGIYDTTISMQVAQTIEQIELLDRQLDEVHENIEFIMKTLDSVIMTVPGIGYLNGAMILGEIGDIHRFKTPSKLLAFAGLDPVVYQSGNFKARNTRMSKRGSRLLRYALVNAAHNVVKNNKTFSDYYNLKISQGRIHYNALGHCAGKLVRILHKILIDNVPFNLE

SEQ ID NO: 386161 - protein, 369 aa, unidentified
MADHTLFVGLDVHKRTIAVATAPDTAGTSCTYYGTIANTPDALRRLCKKLAAAGAELHFAYEAGPCGYVVQRRLSRLGHRCDVVAPTLIPRKAGDRVKNDRRDAMTLAQNLRAGHLVEVWVPDEAHEAMRDLVRMRALAKRDQRRARQQLQSFLLRHGRSYSGSSWSKAHRGWLADLSFAHPAQHLVLQEHVQRIERADELCERVNQAIVDLLPAWTLAPVVEALQALRGVSVVNAATLVAEIGCFGRFDHPRQLMAYLGLVPSEHSSGQTIRRGPITKSGNTLARTCLVEAAWTYRFPARVSRIIQGRSAHLPEPIRATAWKAQVRLTRRYRQLMTAGKVAPKVITAIARELLGFIWAIARMVEPKTA

SEQ ID NO: 386162 - protein, 439 aa, unidentified
MNKRRDRVCGADVHKDLIVATITGDDVPTIRENFGTTKAELKKFRNWLVANKCEQVAFEATGVYWMPIYDALSQTIDTIIANPLQIKTIPNDKSDSKDSKRIATLCLNGQIKRSRVFAEEDRDLRMMTRARSGYVKTRTQFRNRIHKYLSSSGIKLSSTMDDIFCKSGRYILDGLAEEKPIEEILKGIPSGKIRKKQDLIRAALENALNDTNRMLVRDALEILDNLESKIEKLSHEVLKKVQQKSKDLAIVMSIPGIGFVSASVILSEIGNYRDFQTPDQLAKWCGLNPGENESAGKKKKCGITKKGSKHIRVILVQAAQTISNMNKTALSRFFQRLNKKKEHNVAIIAVARKLICLIYHLLINQELYQEDEYRKRRSSQGKSCQAPSFKEEHLTDRVAAIVDAFFHLKESSRKNALMREIADISGIKVGQKRPSKGGG

SEQ ID NO: 386163 - protein, 349 aa, unidentified
MFAGVDTHKDTLAVAVIDHAGRVVSQLELPNQDSGYVRLLALLTSHNVVRVGIEGSGNFGWPAAIYLLKRDVSVVEVPPLMTSRERLSRPGQGKTDPVDAIAIARITAREDALPPVRPMTGHAADLRVLSEYRDQLVNERTATANRVHTDLLWLRPGYQHQLPHLTNISHLHAALQLLDGEDSVRAAVTRARLDRMLTLTEQLAELRIQIDALVKASSSTLPELYGVGPVVAATIIGHVVDVRRYPTRHHFATANGTAPIPASSGRTVPHRLNRGGNRQLNRAIYTIAITQIRADTEGRAYYQHKRAEGKTSREALRCLKRRLSDLIYRRLRADLANAAQPNPSLSIAA

SEQ ID NO: 386164 - protein, 379 aa, unidentified
MDLRGTAIAAGDILYGALELSKNSWLLAIQFPDRAQPSLYPIPGGDTRGLIAKLMAARNRWAKLNGEAPSIVLCYEAGYDGFWLARLLKAHGIECLVIDAASLKVNRRGRRAKTDRIDVVMLLRSLIAWWRGERHVFSAVRIPSVEEEDLRRSHRERSRLVQERTAHINRIKGLLFGQGIRGIKVLSRREPLKIDKLLTGEGRPLPPRLANEIARELERLTLVQKQLVAIERELDEATTPCQATEKKRRQLMLLKGIGPTFSAVMAREVYYRQFNNRRQVAGFLGLATSAFDSGEVTRSQGISRAGSGLVRSAMIQASWLWLRHQPKSALTLWFQQRTQGQGGRIRPIMIIAVARKLAIALWRYLERGLVPQGAILAGR

SEQ ID NO: 386165 - protein, 427 aa, unidentified
MNSTQNEKLKQLSERSLVIGADIASELHYARAFDWRGVELGKVFKFENSAEGFKDFYAWIERLKKQAEKDCIVVGAEPTGHYWFGLASYLKEQSIKLVLVNPFHVKRSKELDDNHPSKTDAKDPKTIAKLVIEGRYNEPYIPEGIYAELRIAMVCRMRIQKDLNSIKNRIQRWLKIYFPEHERVFGKFDATSSMLVLQVAPLPKDIERLGVEGINRIWRDNKLRAVGMKRAKSLYEAAQKSIGCTEGESCSRMEIQLLLQDYHTKTAHYQVVTETIDGLCRQIPEVAKLLEIKGVGLVTVAGFLSEVGDIKRFHSPKQIQKLAGLALRESSSGKHKGQTTISKRGRARLRAILFQAVMPLVAKNAEFAEIHNYYTTRTKNPLKKKQSLIALSCKLIRVFYAILTKGTDYDPKKLMTDIHRPVEYLAA

SEQ ID NO: 386166 - protein, 402 aa, unidentified
MDIEDIEVFIGIDVGKSEHWATALSREGRKILDRALPNDEDRLREVYQRLQAKGQVLVVVDQPATIGALAVAVAQDMGITVGYLPGLSMRRIADLTPGSAKTDAKDAAVIAGAARSMPHTLRAVSASDENAAALSMLTGFDLDLARQVNQSANRIRGLYTQIHPALEAVLGPHLEHDAVLEAIAAWPTPTALRKAGKARIDARLKKHGARRHAAWAQQVCEALKKQTVTVAGTDAAGAVLPHLARQLISLHAQRADIADRVETLVEAHPLYPVLTSMPGIGVRTAAVFLAETLGRTFTTGAQLASYAGLAPVTRRSGSSIRGEHVSHAGNKRLKRAMFLSAFASLRSDPVSRAYYQRKRDQGKRHNQAVIALAHRRVLTLHAMIRNGTLYDPQPAAQLPTAA

SEQ ID NO: 386167 - protein, 298 aa, unidentified
MAQNDCVVVGIDVAKDKVDASIRSLSQRQTFPSTTEGRRTLIRWLRKHKVGKAAMEASGGYERDWAKALREARIEVRIVDPKRVRSFARSAGRLAKNDAIDAEMIAWFAETFGEAPSQAYDAARDKLVQIVRARQSLLDLQTSLQNRGEHAAPEVVQKMQARLLKTIALEVAKLEAAITAMIKATPHLAELAEIIESVPGLGKITSAGLVAAMPELGQVSNNIAAALLGVAPYDDDSGQRRGDRHIKGGRRKVRNLFYMACLGAATRHNPMLKAFYDRLIAKGKEPKVALTACTSSTP

SEQ ID NO: 386168 - protein, 359 aa, unidentified
MKIYKAAHKKENRVREVQPLLFIGIDLHRVTWHVTIRDQNDEMFSGGIPGNWDSLKKLLDRYRNHQLNVVYEAGYFGFWLHDRLVAYGAECIVTPPSLIPQEYGNHVKTDRRDSRKLAYFLAKGLLKRVWVPTEEERYHRQVVRRRHQLVGDRVRVQNRIKAELRFYGIDLPDVVGKWTRGYVENLRRLRFNNRWMQESFQRLIEEYDFISAEVLKQTKVLRELAEVDMYRDRVKILRSVPGIGLIAAMEYLLELQDVERFRRSKQLAAYVGLTPSQYSSADKVRMGRITCIGKNTLRGTLVEVAWRVIGKDPAMRQKYDALKARCGSKRAIVAIARIMLLRTRRMLIDRKPYVLGLAA

SEQ ID NO: 386169 - protein, 354 aa, unidentified
MSAKKTKIDELMSIGVDIGKDVFHLVGFDPNGERILRKKIKRHQLEQVFEDFPRCIVGMEACLSAHFVSRLLRKMGFEPRIIPAIYVKPFNKGQKNDYNDAEAIAEAALRPNLKTVSEKTQDQLDLQALHRVRARLVSRRTATVNQIRAFLIEQGITVRRGLSALRNSLLIILKNRADEISPRMHKLILNLHQDWIGLDERVKMTSSEIEAVSKAEAGCQHLMTIPGIGPLISTAMVAAIGKGEAFDRGRDFAAWLGLVPRQHSTGGRTVLGRITKRGSRYLRMLFVQAAQVIMMRPKNWPKFSFGIWLEAASTRMQHNKLGVALANKLARIAWSVLNSERDFDWKDNTIATAV

SEQ ID NO: 386170 - protein, 403 aa, unidentified
MNAVGIDVSKGKSMVAILRPYGELVEAPFEVKHTSSEIQSLIQTVQSIDGESRIVMEHTGRYYEPLFCQLAGAGLFVTAVNPKLIKDFGTNSLRKVKSDKADAIKIAKYALDSWSDLKQYSVMDEIRKQLKTMNRQLDFYMKHKTSMKNNFIGLLDQTFPGVNNYFSSPAREDGSQKWVDFATTYWHVDCVRNMSRSAFISHYQNWRKRKEYNFSQSKAEEIYEAAKELVPVLPKDDVTKFIVKQAAGQLADASERVAQLKVKMDETASKLPEYPIVMAMYGVGSSLGPQLMAEIGDVSRFTHKGALTAFAGVDPGVNESGTYEQKSVPVSKRGSAPLRKALFQVMDCLIKHMPQDDPVYLFMDKKRTEGKPYYVYMTAGANKFLRIYYGRVKEYLLSLKQPE

SEQ ID NO: 386171 - protein, 357 aa, unidentified
MRMKYYASTTEFNCGIDLHARQMYVCLMDRQGTLLLHTNIRNNDFEFFLKRIEPYRHDLTVCCECMFGWYWLADACQAAGLTFVLAHALYLKAIHGGKNKNDRIDSEKLAHLLRTNLIPPAYVYPADKRPLRALLRQRLFFVWQRSALLARIQSHQLAHNRTPVKQTRRNRDPWATQLLAQEAHPLRQLALQNELALIGHYDQHITALEAQLHRLTKQTLPRQYALIQTVPGIGEHLGLTILYEIGDIERFPTVKDFVSYCRLVKGTVASAGKIKGLRGAKLGNPYLRWAFGEAAVIAKRDSHLIGPLAQRLEARMNGNKFKANTVLALKLARAVYFMLKNNTVFDPERLAMALAKG

SEQ ID NO: 386172 - protein, 411 aa, unidentified
MVKENFIYVGIDLHKETHTAVMIDCYNQKLGEITFPNRPAAFPKLVTKVKKCNTDGKEVVYGLENAYGYGRALAVWLIDKGYLVKDVNTAISHRQAKHRGAMYRKSDSDDAKAIALATLNMLDKLPDACPNDAYWSLGQLVHRRDNIMKQRTRLVNQLHEQLCIVYPSYKQFFNDISRPTALYFWEHYPSRKYLKGKSVEDLRAELVPVSHNKCSTKTCEKILDAIAGDKVKNNAYQDARDMVTLSIVSDLQHYDKQLAEVDKMLEQMYKMLGCTLTTIPGVNVITAVKILAEIGDIKRFSNANKLAQFAGIAPLHLSSSGKGKDVATKQGNRRLQVTIYFLAIQMVQLSSKGTPRNPVVRAYYEKRKAEGKTSQQALICISRRLISIIYGMLKNGTEYRMPVVENAGEKL

SEQ ID NO: 386173 - protein, 421 aa, unidentified
MGEKVERYVGFDTAQERHEAVLLSSDGAEEIRVKCKNRRQAIEDVFGKLLVRLAPNERLVVVLEAPRAHGRLVFAVAAIFGCTVIQVNTVALNHFRDCEGQPKKDDHWDAFLAGRMAFVNMKGCRVVSDPKPEERMLCRLTRTRAKQLQQRVAAINQLRAIMLELAPIVLDGEWDGPDLDSVAMRKVLKKYPGFVGLKRARKSTLEGILSSCRYRRDTREKTILALLRLEDEIMIPDDERSVVSTEIELLIEQVKFNELAISKLENQIQLLVNQNPICIRLMEMPGVGLITAAVLVGELLPVMRNVTEASSATYSGLTPLSRKSGKSLNRSRLGRGSNKHILSAFFMSCVQALQWSALDRAYYDKKRADYQGHPRPHTAAILALARQRHKVIYNIMVNGARYDKELLIASHLERQKRAAVA

SEQ ID NO: 386174 - protein, 382 aa, unidentified
MTGTEPHAWGTGLMDDIIFVGLDVHKATVCIAVAEGGRGGDVRQLGVFENRPEILNKVVSRLSKGGRRLSFCYEAGPCGYGLHRLLTGYGHECVVIAPSLIPMKAGDRVKTDRRDALMLAKLHRAGELTAIWIPDAAHEAMRDLVRARATAVRVLVKARQHLQGFLLRHDRIYRGARAWTLAYRRWLSTVRFEHPAQQIVLQDYIHAVQEAETRRDRLTQQIEELLPNWSMAPVVAALQSMRGVALIVAVTVVAEVGDFRRFANARQLMAYLGLVPSEHSSGSSVRRGGITKAGNALARRVLIEGAWTYRMSARVSRKLYDRLEPLPAAVRDIAWKAQLRLCARYRRLAATGRPKVVVTTAIAREMVGFIWAIARLAQPALV

SEQ ID NO: 386175 - protein, 419 aa, unidentified
MERYYLGVDWADKFHQVWVSDAQGQKVAENKVVENKEGLAEFSRWLNESRARGIELWAAIEKPQGRIVDFLLDHGVVVYPVNPKALDRARDRFRMSQSKSDSFDAHVLAEFLRTDHGHLRALEPNSDDAQELKLLTRDQHRLGRQKTRLLNQIRVTLKEYYPRPLEVFSDLEAQIARDFLKQYPTPRALSDLTQRKWNRFAKREHHLGEGRCKELWEKLNQPQLQVPDHVVRAKAQLLLVLLAQLEASSDAVQTYNERVKHFFASMPAAKLVKTLPGAKTGTIVAMLWAELGDSNNRWESFHHLQAEAGVVPVTKASGKSHVVHFRFSCNKVMRHASYWLAFVSLNQSEWANHYYRDQRAKGHNHHQALRALGAKWLKIIFVMWRDHKPYDENYHLDCAPLTGEKIREFEGGAIGSTSG

SEQ ID NO: 386176 - protein, 387 aa, unidentified
MAQVNDLSRSLTAFDPISTLVVVVEMSKASWLVSGAVPGVERQPLKKLEPDATALLRLIERWRNEAMRSGRPISRITLAYEAGRDGFWLARWLITRGIEAHVIHSASVAVSRERKRAKTDRLDAAMLMRVFLGWLRGERGHCGMVVIPTMEEEAGRRPSRERESLVNERSRITNRMKSALARLGIRGFKPHLRKAPERLAGLRTAEGTGLPANVIEEFRRDMARLALVREQISSIEKTRAERLERAPDTGPHAMVRLLARVIGIGIETADMLVREILSRRLRDRRAVARYAGLTGSPDESGLKRREKGLAKAGNARVRRGLIQLAWRFLMFQKDSALARWYRTRTEGPSGARKTTMIVALARKLLIALWRLVTTGEVPDGVELRPAA

SEQ ID NO: 386177 - protein, 341 aa, unidentified
MNIITVGIDLAKNVFAVHGVNDSGKAALVKPKVQRADLLPLIAQLPPCLIGMEACSGAHHWARLFRQYGHTVKLMAPKFVAPYRMTGKRGKNDAADAAAICEAVTRPNMLFVPVKEEHQQIILCLHRTRQGFVEERTASYNRLRGLIAEFGIVLPQKVVCLRREIGAHLEELPGYANLCVGDLLAHADELDKKISEYDRAIAKAAREDARSKRLMQRPGIGPVTASALLASIGCGHDFSSGRQVAAWIGLVPGQYSSGGKARLGRITKAGDGYLRSLLVMGARAVLNSLGDKQDRFSRWARSLQERRGYWRAVIAIAAKNARLAWAVLKYGEDFKGEPGKD

SEQ ID NO: 386178 - protein, 356 aa, unidentified
MSRDIKYIGMDVHKEAIVIAVLNGSGKLVMESIVETKASSILEFIHGLRGELHVTWEEGTWASWLYDLLQPQVKQVLVCNPRRNALLKEGSKSDKVDARKLAELLRTGMLRPVYHGENGLRTLRELARSYQTISKDLNRVMNRLKALYRGWGIACAGTQVYAPRYREEWLNKIPHAGVRRRAELLYQQLDGLQGLRRTLRPELLAESRKHKAVKLLRQIPCIGPIRAARLMALMQTPHRFRSKRQLWTYSGLGIETHDSAQYRYVGGQLQRSKKPQQIRGLNQNHNHEMKEIFKGAATRASCGRGPFHDFYAALLAKGMKPEMARLTLARKIAAITLTLWKRGERFDAEQLKAQAA

SEQ ID NO: 386179 - protein, 366 aa, unidentified
MPSTAHPVHQHRDDDVADEVILGVDTHKDLHVAAVVTPLGALVDTRCFPTTAAGYRQLLGWAGTFGTVRQAGVECTGSYGAALARHLRSESVEVIEVNQPDKATRRRRGKTDTIDAEAAAHAVLAGRATARAKAGDGPVEMVRMFKLAKTSAIKARTQTINQLKAVLVAADTDVREGLSGLSNTVLFRRCAELDAGTPHDVTTAATYTLRLLARRILELSTEIRDLERRITDVIAGHAPTLLERRGIGPDSAATLLITAGDNPDRLHSEASFAALCGVSPIEASSGKTTRRRLNRGGDRQANAALYRIALSRLRWDARTGDYLARRIAEGKSRREVIRCLKRYIAREVHQIITEPRPDATPHRSAA

SEQ ID NO: 386180 - protein, 412 aa, unidentified
MEKVCGIDVHRDLLVATILDGQSSQTRDFQNGLDDINKLKDWLRRHQCKRAVMESTSIYWVPLYLALEEAEFEVTLANAYVVKAIPGRKTDQSDSQWLAHLHMAGLIKPSYVPEKRLRELRELNRLRIKYVQARTAFKNRCHKVLNRVNIRLGSRLKDIFGKAGTEILNGLMAGKTVDYILENTENHWLKKRSDEVKAVARGALSEIDILELKDLTDTIKHLDEKIGGLDGRIAAIIAVPEAKVVNEKELSIVRSVPGIGARIGAAILGEIGDARRFSSGRHLASWAGLVPSVYQSAGMSVSGHITKRGSKWLRWSMVEVAHVAVRVRGCRFRALFLRVAARKGRKVAYVAVARKILTVVWHLLVNGERFVEDGFSKAVGKCKAGLAGHVSLDEMVAVLRGAGYVVIRDLSG

SEQ ID NO: 386181 - protein, 408 aa, unidentified
MNPLYVGIDVSSKSNVVYLMLPDGSKHSNFSVANSHDGSTQLVKRILSAITSLSLDTVIIGLEATSVYGDNLVYFLKEDATLVPYDKKIHVLNPKQVKNFKEAYNDLPKNDYVDSYVIADCLRFGRINKEVYQSDYRYKALQNLTRARFFAVQNLVKEKQRFINVLFKKYSTMTQEKVFHDTFSTTALAVYEEFESAEALASMDLQELTDFIMEKGKNRFPDPDAVAKAIQKAARSSYRLPKTVNDSVNQVLSISITSIKALDAQIKEFDKAIKAQMELLPNVLTSIPGIGPVYSAGIIAEIGDINRFPSQAQLGKYAGLAWTQNQSGDFEAENTRLIRSGNRFLRYYLCEGALSLVRCDTEYSNFYHSKYKEVNRHQHKRALALTARKFVRLVFRLLKDNRLYRAAE

SEQ ID NO: 386182 - protein, 480 aa, unidentified
MRIRETCRAGGVRLESELYMATIIRKKGKPRSNQSGFPGLRPNVAGIDVSSHQLHVCGPAETDDKRRLAVFETTTAGIEECAKWLHSLGVESIAMESTGVYWIAPFEILESHGFEVLLVDTRPLSRVPGRKTDVSDCEWIQSLHRCGLLQGCFRPAEAINRLRSVIRMKAVVNSSQADWQRRMQKCLDQMNVRVHHAVSDINGTTGMAIVRAIVEGQRDPHKLAELRDPRCRKSKDQIAAHLTGHWEEAHRFHLAACLRMFDTLAAELARYEKEISRRLCELTPPEAENKTAPPLPNPGKMKAMRTRGELEKRQELFRMAGADLTTIDGIGVETAEAIVSEYGIDLSKFATERQFVAHLQLAPRMAVSGGKPLPKGRRKTTGTRAGRALRMAATGLRRSPTALGAYYRRISRHKGGNVAVFSTARKLAVLVYRLLRWGHAYVDEGQQAYEARYQASRLRSLVATAEQFGMHLLPNNQLSD

SEQ ID NO: 386183 - protein, 407 aa, unidentified
MIVAVMIGVDPHKGSHTAMAIGGAEQSLGKLRVDASAGQASELVAWAAEWPERTWAVEGAAGLGKLLAQQLVAAGERVVDVPPKLASRVRLLEAGDTNKNDPNDARSVAVAALRSRAVRDVAAEDHGAVLKIWARRHRDLARARNQVTCRLHAVICDLVPGGVRKEITAGHAAKVLDQITPAGPVETARRDLAAQFLDDLRRLDAQLAETKKKLATAVRASGTTVTQVFGIGPVNAGTVIGDTGDIARFPSRDHFAAYNGTAPVEVSSGNRKIYRLSLRGNRRMNHAIHMAAITQIRHARSDGRAYYDKKIAEGKTSKEALRCLKRQISDAIYARLRADARKTATAISAGPGEQTGNGSDSSAASSHPARQLFGQATPGPATTLRPLARTPRQQPRTRRPKDLETIP

SEQ ID NO: 386184 - protein, 325 aa, unidentified
MNPNTVQIQSASIQFALGCDVSKATVTLFDSSNGRTVTVENTAVALKATLKPYARRIDTLAICEATGGYEDALLGVLEDLAIPAHRADAARVKAFIRVCGAKAKTDPIDARHIAEYGLSRAHSLPRWRPSQPHEAKMKLLVLRRSDLVSMRVQEENRLKAPRNKPIAGEIAGHIAEIKRRIEAIDKQIETIVAHNKRMKDRKAILQTVPGIGRVIAPVLLAIMPELGLIDRKQAASLAGCAPHARDSGAHKGRRFATGGRRQLRPLLFTAAMAASQSNSHLATTYRRLLSAGKSKLTALGAIMRHIVVIANAKLKEYENIQTRLT

SEQ ID NO: 386185 - protein, 430 aa, unidentified
MNSISNKKINQVTDQTLVIETLVIGMDIAKKKHYACFVDERGRVLKKSFPVPQSREGLEWLYQCIVKAMEEFEKTEVILGIEPTGHYWLNLAYFLDERGIPLVMTNPMHVKRSKELDDNLPTKHDAKDALVIARLVKDGRFSYPRILKGMEAELRTGATFRSKLVEEQGAVRNQMIRWLDRYFPEFTQVFPSFGKMALAALEQTPFPSDLAGKEIEEVLTLYRQSEGLQSPQKPKAKKLMELAQHSIGVTEGQQMARIEIATLVRRYRQLEEEIEALTHQLTELVQTSVEYEWLQTVPGLGDATIVELLSEIGSFSHYQDPRQLLKLAGLTLRENSSGQHKGQKRISKRGRRRLRALLFRVMMPMIRHNEAFRQLHEYYTTRPDHPLRKKQSIVVLCGNLLKVLHAVCTKHQAFDAKRMMQDIFGLETVA

SEQ ID NO: 386186 - protein, 402 aa, unidentified
MNCVGIDVSKGKSMIAVMRPFGEVVVSPFEVRHTASELSKLAGLLKSLDGETRVVMESTGNYHAPVAWLLHDAGLYVSVVNAMLVHDYGNNSLRRGKTDKKDAVKLANYGLDHWLTLPRYVPEEDTRLMLKTCYRQYQQYSKVQTMLKNNLISLLDTTFPDANRLFTSPPRTDGSEKWVDFVAAFWHCECVCGLSEKAFAAKYQKWCRKHGYHFSEDKALDIYASACGHFAVMPKTDTAKLLVEQAIFQLRATSAALAALKQEMQSLAASLPEYPVVMEMFGVGPTLGPQLMAEIGDVRRFHSKKALVAFAGIDAPPYQSGQMDVRSRSISKRGSAALRRTLFLVMGVYLQSAPMGEPVYQFMDKKRSEGKPYRVYMMASANKFLRIYYASVTAYLNTQTQA

SEQ ID NO: 386187 - protein, 385 aa, unidentified
MSQLNDLSRSLTSLEQDNAIIAVIEMSQSSWLVAGIVPGIERHPLKKLEPNEGELLRLLMRWRAEATKMGCTITRIAVAYEAGRDGFWLARWLRAHDIETYVIHPTSVAVSREHRRAKTDRLDTRLLKRVFIGWLRGEPDHCHMVTIPTLAEEDAKRPNREREGLVRERTRIVNRMKSCLARFGVRSFKPTLRKAPERLAMLVTPEGVPLPANTLLELRRDMARLRFIMDQIKEVEEARGQRLEQAPQEKSHAMVRLLARVIGVGIETADMLVHEILSRSLRDRRAVARYAGLTGAPDESGSRRQEKGLAKAGNARVRRGMIQLAWRFLLFQKDSALAQWYRTRTESAGKKRKTMIVALARKLLIALWRLVTIGEVPAGVVLRAA

SEQ ID NO: 386188 - protein, 324 aa, unidentified
MQGKDTPEAKAEVQVYVGLDVSKAAIDVYLHPLGHVFRIANTNQGLRQLKSRLACLKVVLVTIEATGKFHRQAHRTLHAAGYPVAVVNPLRSRLFAEAIGKLAKTDPIDARTLAVMGESLKLAASPPPAALIAELQELVLARRAAVTEKTALENRLGAAQSRFLIAGIKKLLKAVERHVAHLDTEIDRLIAGDPALARRQEILTSIPGIGRVVASTLVACLAELGMLSSKAIAMLAGLAPVACDSGESKGRRRIRGGREHVRSPLYLAAVSAVRCNPDLKAFYRRLRDEKAKPAKQALTAVARKLVTLANTLVHEDRLWVEKPA

SEQ ID NO: 386189 - protein, 382 aa, unidentified
MKPKSDTTTKLYIGLDVHKEQTSVALAEPGAKGEIRSYGSVATTQIALERMVRRIAKANKIAPAELHVCYEAGGCGMWIARLFARIKVRCTVVAPSLIPSKAGDQVKTDKKDAIKLARLLRAGELVAVHVPDETDEAIRDLCRARVDAVDDMRRAKTRLLALFRRLGFNYSGKSHWTEAHKRYLRELKLPFAAHRIILEELLAQIDQLEARISRIESHMELLYADWSRKELVDGIMALKGFQIIASMMVVSEVGDFVRFTHPKQLMSYLGLTPAEYSSGGKQRQSGITKCGNSHARWMLVECATHYRTDPKVSSALSKRQENQPRWIREISWKAQNRLSARFKKLQQRLMHHNKIKVSVARELAAFIWEIGYKMQSAQTKSA

SEQ ID NO: 386190 - protein, 411 aa, unidentified
MRSIALDVHRDFCEVAIKDESGLRLAGRVKSSVSELELFAQSLAPDDEVALEATGGALQIARILEGHVARVLIANTRKLSAIAESKVKTDKVDAKTLCELLAAGFLPAVFSPDEFTRALRRRLQRRSKLVRSRTRAKNECHAVLARNLKGRPPVTDVFGKRGREWLAAIELPADERETVECCLREVDFIDSEVGLIERELARQALSSPQIRRLMTVPGVSLVSAAAFVAAVGDIHRFDSPKQLVSYVGLDARVRQSGEAPARHGRISKQGSAEARHMLCEAAWVLVRTPGPLHAFYERLRARRGAQIALVATARKLGVLFWHLLTREEDYAFGRPSLTRRKLRALELKTEQGWRRGRYSGPRVHETKKDRDQEAEFAEQMETAYRRLVADWQPKPPRAVRARHGDAHLKSR

SEQ ID NO: 386191 - protein, 353 aa, unidentified
MHIGVDTHKKQHVLVALDERGQICGTHSVANTPAGWAAALQWAHDRDATCIWGIENSGSLGKGFAQFLLSSGESAVHEIVPHRTAQYRKRGRNQDKTDHTDALAMARLLQAEPEHLPLVQRDDVSTELRLLSDHRDNLVAERTRLVNQLHAQMLQIDPCYAERSGALTSRTGIRYCHALDLPHADGVVLTRLLIVRQLTDQLLRLWEEIETVETAIAARVRETETPLLELCGVGVIVAARLIGELGCTPRIRSAAALAALAGIAPVAVSSGGRNGHRLNRGGNRQLNRTFHMIAVCQLRCEPLAQAYYAKKRAEGKTARSALRCLKRRLVDVVYRLLPISTSAALEISMRTAA

SEQ ID NO: 386192 - protein, 437 aa, unidentified
MKALAVLDPRAAFVDVGSEHMHVSVAGDEPAVFGTVTSQLHALRDWLKSQDVRSVAMEATGVYWLPLYGVLEAAGFEVRMVNGRQTRNVPGRKTDMKDCQWGATLHMHGLLKAGFVPPADIRRLQDYLRLRADHVASAGAHVQHMQKALERMNIKLHDVIASLAGMSGLAVVRAIIAGERSPDALLALCDQQIRRAKAEQVKEALRGTWEAEHIFALRQAVQSWDHYQQQIAECDRQIQSVLPPLDPDQPALPRPKTPKRGGVNSPDIPMLREIMAQMCGGRDLTQLPAHTHYGVLQIVGEVGTDLTKWATEKHFTAWTGLAPGNHDSGKRKGRAKRGRNRTGQLFCMMAQSLVRSKNIALGGFYRRMAARRGGLIATMALARKLAAWYWRVMVKGDDYVEKGLANYDAQVLQTKQRALKRLAKELGQQLVPIAQPV

SEQ ID NO: 386193 - protein, 371 aa, unidentified
MNYNAYVGLDVHKATIAIAIAEADAGGEVRFFGEIANSPDAVASTVKKLAQRRGQLHFAYEAGPCGYGLYRQLVEAGHACDVVSPAHTPRRAGDRVKTDRRDAIMLARLSRAGELTKVWVPDCAHEAMRDLIRAREVASKDVRQARQRIQGFLLRYGRRYVGAVWKRKHRVWLGNQTFEHPAQQIAFQTHLNAMDQAVERKEAIEAQITALLPNWSLAPVVTALQALRGVALAVAAGVMAEIGDITRFDNPRQLMAYLGLVPGERSSGEKRRPTGITKAGSIIARKLIVEAAWAYRMPAKVGQGMQRRHEGLSGEIRSIAWKAQVRLCARYRQMLARRKKAPIAITAVARELVGFIWAIGCLASPTIPAAG

SEQ ID NO: 386194 - protein, 343 aa, unidentified
MEDTLYDHYIAIDWSIENMAIARMTKKSNKITAIDVPSDITDLQAYLKNLKGTKILATEETTTTQWLYTELKDHVDRIFICDPTRNKLLNEGPKNDKIDARKLVHLLKAGLMKEVYHSNDKFLYLRRLVSGYEDLVKAGVRAKNQRYALLRACGKKGKEKKNLNLDSRGAKFVLECLDRQIGAYEEEKKNFEKEFDRLAKKYPVIRHQKSLAGIGVINAVKIVARVVTPYRFADKGHYLSYTGLIKLKKESGGKIYGKKNPRYCRQLKSVYKAGVMAAIGGNNPINDYYEYLIQEKGYPECNARHKACRRLAILSLGVFKSCKKYQPYRRDHVKESKENTSSL

SEQ ID NO: 386195 - protein, 327 aa, unidentified
MNTQYIGLDAHSSTCTFCVMDPQGVEIDNKTIVTNGRLLVDYVQSMGNKSILAFEECDLSCWLFDILHKHVREVVVCNPAQNAQYKRAKTDKLDARNLANLLRGGYLKPVFHDASAREKLRMLVSSYQDNLQEVVRIKNRLKTIKRRVRLYPKKDAPVHAAFIQEQLISHLEQLLISHKEYQQQITRCVQRFKETTILMSIPGIGYIHSAKIIAQVIDPERFKSKYKFFAYCGLVKHPRISANRNYGSTRIWGNRTLKCVFKMAAHSAIGGHNALNVLYGHLLDKGVSDRNARNAIARKIATLTLSLWKNNQRFSNEIILEGLPVKV

SEQ ID NO: 386196 - protein, 347 aa, unidentified
MRFYTKQYPYYCGIDLHARSLYVCIIDQAGNTCVHKEISANPDKLHALLKPYLGHIVVGVECMHCWYWVADFCDEIGVDFILGHALYMRAIHGGKAKNDRIDSYKIANLIRGGNFPLAYVYPKAMRASRDLLRRRMKLVRHGADLKAHVANTTSQYNLPPNKVNLKNVGAREQLKTAFPDPVVQKNIDLNMAVLDCYAKELSKVEWFIEQQAKQHNPVHLHLLKTVSGIGRILALTIIYEIGNIERFDSVQTFASYARLVKCKAESAGKSYGTQGNKIGNAHLKWAFSELAVLFLRGNDDAQRYLQRLQKRMSKAKALTALAHKLGRCVYFMLKNETVFDEKKFLSG

SEQ ID NO: 386197 - protein, 344 aa, unidentified
MDHFAGLDVSVKETSVCIVDDTGRIVREVKVASEPDALLAVLTNPAYQLKRIGLEAGPLSQWLFSALAEAELPVVCVETRHMQAVLKAQINKTDRNDARGIAQMMRVGIYRPVHVKTLRSQKLRMLLTHRKLLQSKAIAIENDLRGTLRNFGLKVGIVGKVRFEARIKELVENLPDLAVLVEPLLLVRRVLREQIIILHRHLLAIVRDDDVCRRLMTTPGVGPVVALTYRATVDVPARFRKSKAVGAVFGLTCSRYQSGETDRSGRISRCGDEMMRVMLYEAAQSMLRSKKWSWLKAWAMQVARRRGMKKAIVALARRLAVIMHRIWVDGTEFRWTREQAPAAA

SEQ ID NO: 386198 - protein, 365 aa, unidentified
MTTIARSGVGCRVLGGVDTHKEVHVAAVIDDVGRILATAEFPATRHGYRRLLAWLSGFGELVVVGVEGCGSWGAGLARYLSSRGVQVVEVNRPNRQHRRRRGKSDTVDAEAAARAVLAGEATVTPKTGTGPIEALRQLRVVRAGAMKARTAAANQLHSLVDTAPDRVRAQLRDLTFKKKVTVAAGWRPTITASPEGASRYALASVARRWRALALEIAELDRRIKTILDDVATPLIAVHGVGYDTAGQLLVTAGDNPERLRHERSYAALCGSSPVQVSSGKTDRHRLNRGGDRHANSALWRIVIVRMTSHQPTKDYIARRTAQGRTKQEIIRCLKRYIARELFPHINNVITPTAIEPAPTDQQIAA

SEQ ID NO: 386199 - protein, 353 aa, unidentified
MNRDKYMGIDLHQATSVVVVLDSEGKQVLETIVASEAPAMIRLFQSLSGPLHVTFEETTQAAWLYEVTRAHVADVIVCDPRRNKLLSEGSKADKPDARKLAELLRAGMLRSVYHGHEGTRTLKELVRAYETLSTDCTRIMVRIKALYRGRGIRTPGRGVYQAAERQEWLKRLAEPGLRQRVELLYDELDHLRPLRKRAKQAMLMESRKHRAATLLQTIPELGAIRCALIVATVDNPHRFRTKHQFWSYIGLAVVTHMSSEYDIRDGRVVRKKKPLATRGLNRNCNRRLKEVFISSATGGPQTEPYHSYLQGLESRGVRPQMARLTLARHIAAIALRIWKKGETFDPTKLNWAK

SEQ ID NO: 386200 - protein, 380 aa, unidentified
MTKGATRGRESNRAGAVLHVAFELDDQGWKLALGTRLGKQPWLRRVSPRDREGILAVIEAAKARFRLGDNARVVSCYEAGREGFWLHRWLKAEGVENRVVDSSSIEVDRRARRAKTDRLDAKKLLRQLMRHEAGERKVWSVLRVPSEAAEDARHLHRELVAVKRDRVRVTNRIRGLLATQGVKLELTRGFLDRLDGVERWDGSALPPGLRRRVERAWEQRRWLTERIRGLEGERRELLRTSDAEDVEKVRQLMELSGIGENGAWTFVTELFGWREFRNRREVAAAVGLVPTPYDSGSTRREQGISKAGNRTVRWMAVQIAWAWLRHQPDSELSRWYNRRFGEGGRRMKKVGVVALARKLVIELWRYVETGALPEGATLKA

SEQ ID NO: 386201 - protein, 340 aa, unidentified
MIHVGVDLDKRSSQIAVLSEDGEIAQHRLANDAARLEKFFADLPPQTPIALEASGTWWWLVDLLERLGHRPVLSNPKQTKAIAAARLKNDRVDAERLALLLRGDLLPTVWIPPAPLREARELVRHRIQLVWLRSVVRNRLQAMLARRNLQPMSGKSWLTQRGQRELKQLPLTEAPSRIREDCATLLPILDGQIRRLDTELVTRWGRDPRVQRLTTIPGIGPFIAIVLVLELGDIQRFASAKRVASYVGLTPRVRGSAGRVRAGHITKEGNRLLRWVLVLAATQAGRKPGPLRTWFHAVKKRRGKKVARVALARRLAEIVFHVWQQECDYFTVVRHGVVRG

SEQ ID NO: 386202 - protein, 419 aa, unidentified
MEPSRDPVAEVVHPRCCGLDVHKRTVAACVLLPGPGGMPLQEVRTFGTMTDDLVALRDWLSGHGVSQVGMESTGSYWKPVWNILEGHFQLLLVNPQYAKGVPGRKTDVQDCAWLAHLLRHGLLRASFVPDRGQRELREVSRYRRTLVQERTREVNRLQKVLEGGNIKLAAVATDVMGKSARQMLVGLLAGSSDTQALAELAKGRMREKIPQLQRALSGRFGAHQRFLVAEILAHIDTLDACIDRVTAEIDERLRPFEPLVQRLDAVTGVGRTVAQGILAEVGTDVARFATSGHLSSWAGMCPGNRESGGKRRSGRTRRGNRWLRLLLIQAAHAAGKTKATYLADQYHRLAARRGSKRAAVAVGHSILVIAYHLLRDPDRNFSDLGPDYFIRRNPERAVHHYVKQLIARGYEVTLRQTVA

SEQ ID NO: 386203 - protein, 342 aa, unidentified
MERYAGIDVSLERSSVCVVDGMGQIVRETKVASEPEALVGFFRQLGVAVTRIGLEAGPLSQWLHAGLTAAGFEAVLLETRHVKAALSAMVVKTDRKDARGIAQLLRMGWYRPVHRKSPAAQEVRALLVGRKLLQAKLRDVELSIRGILRGFGLKVGEVSKGRFAARINELVAGHEMLETVIGAMLQAREGLQREFMRLHRRMLAIVRGDAVCRRLMTAPGVGALVAVTFKTAVDDPERFRTAKAVGAHFGLTPKRYQSGETDVSGGISKVGDGMVRTALYEAANAMLTRTVRVSALKRWALEVARRRGTKRAKVALARKLAGVLHRMWANGTDFRWGKEVAA

SEQ ID NO: 386204 - protein, 414 aa, unidentified
MAVFCGIDWSEEYHDVAVVDDSGTLVVRGRVANSAAGLAELLGMLAPCGDAPGALVPVAIERPNGLLVSCLRGTGRPIYPINPLAVSRYRDRHGVSGKKSDPGDALVLAHILRTDMAAHRPLPADSELARAITVLARAQQDAVWDRQQLSNRLRSLLLDFFPAALVAFAGLAHGGLTRPDARAILTLAPTPGAAAALTRTQLKSALVRAGRRRNVDTDVERLRGIFRAEHLRPPATIERAFGRQLSALLGQLAAACTAENELAGAVEEAFTTHHDAGILTSFPGVGPIVGARILAEIGDDRNRFADARAVKAYAGSAPVTRASGRSRSVNSRRVKNQRLAATGYIWAFASLRPSPGARAHYDRRRATGDTHTEALRNLTNRMIGCLHHCLQTRATYSETTAFRILATADTAAAA

SEQ ID NO: 386205 - protein, 391 aa, unidentified
MVCVGIDVAKDKHDCCILASDGTVRADCFTIPNNMDGFKRPLQTIQGCTKKSDKIKVGLEATGHYSYNILGFLLDNDLTVYVMNPLHTNLYRKSLSLRKTKTDRVDARTIATMLLSDVDLKSYTDTAYHNEELKSLTRYRFEKVRERAKLKQSVSRLVTILFPELEKLVSSLHGASVYALLSEYPGAKQISEVHLTKLTNLLKTASKGRHGKENAIQIRDAVRASIGSVMPAKSLELKHTIKLIQELDSEINEIEDSIQKIMDELNPPILSIPGMGVNSAALILAEIGDFSNFSSPDKILAYAACSPSTYQSGKLTNCYAHMEKRGSRYLRYALYNATKYVCQWNPVFAEYLAKKRAEGKHYNVALSHATKKLVRLIYALQKSGKVYLAAA

SEQ ID NO: 386206 - protein, 347 aa, unidentified
MLADQVDYVVGVDPHRDVHALAVVEVRTGAVVLEAAIAASTAGYRRALELAEEYAPGRRAFAVEGSGSFGSGLTRFLTARGESVFEVGRLRRERRSGGKTDALDAIRAARVVLAQEWPAKPRAGGEREALRALMAARDGAVNARRAALCQLRDLIVTAPEPLRSELRPLTRGQLLKRLAAVHPSRHRDAELRGTLYALRSVARRIEHLTAEERELETEISALTRKLAPHLLDQPGVGTLAAAQLLLSWSHPGRVRSEAAFARLAGCAPIPASSGQTIRYRLDRSGDRQLNRALHMILITRRRWHQPTIDYIARRRADGKSSREANRCLKRYLARNLYRLLEHPPTAT

SEQ ID NO: 386207 - protein, 412 aa, unidentified
MLFIGDDWAEGHHDVVAQDEAGKTLARRRLPEGADGIARFHELVASCLGEDAEPDPARVIVVIETDRGPWVKALAAAGYRVYPANPRQAARHKETVANSGKKDDFFDAGCLADMGRTRRHQMRELAADSDIAEAVKIAARAHQKLVWERTRHLLRMRSALREYFPAALEAYKDLTLAGKDALELLQKAPDPASAAKLTAAQITAALRRAGRRGDLAQRARDIQAALRAEHLAQPDVVAEAYAASVQAGAAVIAALNEQVKIMEAKVSGLFRRHPDAGVYLSQPGIGDITGARILGEFGDAPGRYASAKARKNYAGTSPLTIASGKKKTVHARYIRNKHLIDALHAQALSALSVSPGARAYYDELRAHDAGHDDALRRVASRLVGILHGCVKTGREYDETTAWSHRAEFPQAA

SEQ ID NO: 386208 - protein, 351 aa, unidentified
MSHKSAPPTVSTIGIDLGKNSFHLVGLDQRGAIVWQLKCSRAQLERRLANIPCCLIGMEACSGAHYIARQLAALGHDVRLIPAQYVKPFLKGHKNDYRDAEAIAEAVQRPTMHFVAIKTPEQMDLLALHRVRSRLVGQRTGVINQIRGFLIERGITVRQGVVPLRKALPDILSSNNDALSPRMVNLIAELAQDWRRLDERIAAVSDEIESLAEQDEACQRVMTVPGVGPIISSAVVAAIGNGAGFTQGRDFGAWLGLVPKQESTGDRTILRKISKRGNKYLRTLFVQAAHVVLTRRPNAAMRGLWPWIEQLSRRLHRNMLAIALANKLARIVWAVLARGRSYQPRIAADVA

SEQ ID NO: 386209 - protein, 356 aa, unidentified
MAKYSLSALQTFVSSHQSEPFWVGVDVHKRSYHVALLRADNKTTTFTTTASPEAFVEQLQRWNISVAGVVYESGPTGFSLARALMTQGIPVTVAAPSKIPRSARPGAKTDRLDCLKLAHYAAKGLIRSIAIPTAEEEAQRALLRRRHQLVDRVRQCKQRIKGFLLYHGFKETTVIRNWCSGYEEQIAAFPLMPEGRLTIDSHLRELTFLQQELSEVAEQLGHLTGQSEHHAAIRALTSVPGVGTVVATSFRLELFRPERFHRKEEVTSYLGLAPTVRHSGETTPRGYLVPVGQKRLRSLLIEAAWMWRAKDVRAGELYNKLLGKTGVPQKAIAALARRLAIILWRLSIEQRTYRPA

SEQ ID NO: 386210 - protein, 412 aa, unidentified
MDVVNTRCCGLDVHLKTVVACVLLTQDDGTVVRKTHTFKTMTEELLALRDWLDHWSVTHVAMESTGVYWRPVYNVLEDEGRTLLLVNAQHIKSVPGRKTDVKDAEWLADLLRHGLLAPSFIPPQPIRELRELTRYRATLLRERTAEINRLQKTLEGANIKLGVVASDVLGASGRDMLQALVAGERDPEILAELARGRLRAKLPELRQALTGRMQPHHATLLAHILAHIDFLEQTIAALQEEIAHRLGPYDEEIALAQTLPGIKATAAATILAEIGTDMTRFPTHRHFASWAGVCPGNKQSGGRRLSGKTTPGNAWLRAVLGEVAWAVIRTKDSYFRAQYYRLARRRGKNKALMAVAHSMLVALYHVLREKRPFQDLGADYFDQLDTTRIERHHVRRLEQLGFKVDLTPVAAA

SEQ ID NO: 386211 - protein, 369 aa, unidentified
MGDRITYVGLDVHKADIVVAVAEGGLRGEVREYGRIVNRPAALERLARKLGHDGVKLRFCYEAGPCGYGIQRQLSALGHECVVVVPSLIPKRAGDRIKTDRRDAANLARLDRAGELTPVWVPDAGHEAMRDLVRARLDAVQALRRARQQLSGFLLRQGCHYGRPAWTKLHRRWLAALKFEQPVHHVVLEDYIAAVEAAEVRCDRLTAQIEVMLPDWSLAPLVAALQTMRGIALVNAASLAAELGDLSRFANPRQLMAYLGPVPSEHSSGVSIKRGGLTKAGNGTARRLLIEAAWCYRFPARVSRELRLRQEAQPIPIREIAWKGQLRLCARYRKLGRTGKPATVVTAAIARELAGFVWAIARQVAIPAG

SEQ ID NO: 386212 - protein, 460 aa, unidentified
MNPKRSKSRNSSKMPMVHPNAAAIDVGATMHMAAVRADRAPEPVRSFGTFTADLHRLVYWFTECGVETVVMESTSVYWIPIFELLDARGFTVFLVNARDAKHVPGRKTDVSDAQWLQRLHSFGLLRASFRPKGQIAELRAYVRQRERLLEYAASHIQHMQKALTEMNLQLHHVVADITGATGLRIIRAILAGERDPEALACLRHYSCHSSAETIAKALTGSYRAEHLFALEQALALYDSYHEKASACDVRIEAVLKELSIHRGHGHGSAPRASRRRNRTDQANALAFDVREALFALLGKDITTIDGLGPYLSLKLIAECGDDLSSWPSAKHFTSWLGLAPSNKVSGGKMLSSRTRRSGGRAAALLRLAAVTVGRTDTALGAFYRRLSARIGKAKAVTATARKIAVLFYNAVRYGMDYVDPGASSYETRYRTRVVNNLHRRAKAFGFVLQPLEPKVGAAVS

SEQ ID NO: 386213 - protein, 328 aa, unidentified
MFYLGIDVSKLKLDCTLLLDPDNDKRKSKVVPNSRDGVRELVKWCAKHGVTVDQVHVVLEATGPYHEQAATTLHDSGVSVSIANPANVHDFGRALAVHSKTDALDSLVLARYGIAMKPARWEPPPAHVRELRALIAQVDALSKDRLRTMNRQEKAEASAAPELVERSISNTLSFYDEEIARLEKAIDDHIDRHPDHKDDATLLSTIPGVGPKVARTMLRVIRTHQFKRAEDLAAYLGLVPVQRQSGTSLRGRSRLSKAGPADVRALVYMAGVVAAKHNPHVRALYQRLLAAGKTKMSAIGACMRKVVHLCFGVLKTRQAYRPDYTFSA

SEQ ID NO: 386214 - protein, 415 aa, unidentified
MRKKKNKANKRIHLQSLPLINPNAAGIDVGAKQHLVAVPPDRDPQPVRTFQAFTPDLHELARWLKRCGIETVALESTGIYWISLYEVLEQYGFEVRVVNARHVKNVPGRTKTDVLDCQWIQKLRLRDNLVVERTQAIHHMQKALFEMNVQLSNVISDIVGETGLRIIEAILAGERDPEQLAAFCSTRIKSSRQTVAKSLHGNWDEALLFCLKTALETYRFNENKIQECDHCIERQLATFDSRAQLSQQGESLRSQLHRVCGVDLTKIPGIKEQAAQIIISEVGLDMGPWKTEKQFSSFLGLCPNNLITGGKVLRRATRKVYNRAADTLRLCAQSLTHSKSALGAKYRRLRARLGAPKAIVAMAHHLARLVYRMLRYGQNYVEKGIEHYEEKFRLQRIKWLKKEAQSLNLQLVATQ

SEQ ID NO: 386215 - protein, 369 aa, unidentified
MLYLGIDQHKRQLTVNVRGEDGKVVLKRQVSTQWEKVRAFFADLAEKAGPEGGFWAIVEVCGMNGWLLEMLAEYGCGEIVVTQPTSRSKQKTDRRDASQLSHGLWVHREQLAGGGHPSGLRRVEPATAQQAEDRQLTTLRAMLTKKRTAVLNGIHKILRKHNREQECPTKVFQTKKVRRWLAEMELPRMDRLELDLLLPQWELFDQQLEVVEAKIAERAEADQQAKLLESMPGMGHYSAVAIASRIGDIERFRRPGSLANYFGLTPGCRNSGEATNRLGSITKRGSKLVRYLLGQAVVKVLRFDAGMRDWYKRIKRRRGSKIARVAVMRRMVTILWHMLKKKQRYHYELRSKSTRNLWLLKGRLDEAED

SEQ ID NO: 386216 - protein, 313 aa, unidentified
MNILKQTVGIDIASKTFDARFGTIDTQQNTAISQAKSFKNSPQGFNLFLKWLKFLVLSQDIPLVFVMEATGVYYEHLAHFLVQKGFQVAVVLPNKIRNYAKSLQSKSKTDPIDAATITRFGLERQLSPWTPPSESMKTLRDLCREYHCLKANCTQIKNQLHALNSSFKPNRESFKRKSQLFKFLERQVTFITKELRALVKSDPVLSQHLKQIKTAKGLGDITILTVLAETRCFQLISNHKQLTSYAGLDIVFNDSGMKKGKSSISKKGNTFIRKAIFMPALSACRANPQLKQFYQRLLAKGKNKKLAIIAVAR

SEQ ID NO: 386217 - protein, 323 aa, unidentified
MAKHNTICAGIDTGKRKLDVALDGPREQLQVENTSEGHAVLLAWLRRRRVKRVGIEASGGYEQPVVTELRRQRFVVVVFQPAQVRAYAKFHLQRAKNDKIDAALIAACTAAVRKIHAAPDPRLLPFAEQLTMIDQINEDIARLKNRIESCRNAQIKKLWNEDIARLEKREKAELKALVASIRKHPDLAKRLGLINSVHGIGLPTAVAILVRLPEIGRTTREQAVALAGLAPYDDDSGEQVGVRHIEGGRKRLRRALYTASLAASFRWNQQLIQLYQRLTAAGKEHKRALVACARKMLIFANTVVARGTPWQDCAPEKAALTTG

SEQ ID NO: 386218 - protein, 341 aa, unidentified
MKKFIRTAVDLGKNYFQFHGLEGEGGLSVSRKLKRTKVLEFYSRIEPCRVGMEACGSSHYWARELTAMGHEVVLIPPAYIKPYVKRGKNDAVDAAAICEAMSRPGMRFVPIKRADQQAVLMLHKTRELLVKQRTMSVNALRGHLAEFGIVAAKGIGRVDELLALAQADAALPQIVKSAVAGLAQHLEGLDQSIEAVEDEIARAHKNNLTSCLLDEIPGIGTLTASVISASVPDPGVFKSGRDFAAWLGLTPRQNSSGGKEKLGAITKQGNRYIRKMLVTGATSVLRVVAKRKGALADWVNALRARKPERLAAVALANKLARICWAIMTTGESFRTDTYLKA

SEQ ID NO: 386219 - protein, 440 aa, unidentified
MKLKIVNPNAAGIDIAYGEMQVCVPEDRDGENNRCFGSFTCDYEEIASWLKACGITTVAMESTGSYWVGLYFFLEEKGFDVLLANAKDVKNVSGKKTDEADAEWIMLMHSYGLLKPSFHPDAAARSIRELARHRDNMLRSASKEVQHMQKSLVLMNIKVDTVISDILGKSGKAIIEAILNGNHDPKSLVQLVDPRCKASKETIEKSLEGTWDVVHLFELKQSYDLYKYIHIQIADCEAEMDRLLGEYTDGCGTDMQGYTATKKRVAKKNAISFDAEKHAFSMWGVNAMEIPGMSLGALAVLMGELGSGFTEKFTSAKSFCKWCNLVPNNKISGGKLLSSKVPKQKNRVGQVFRLCANSVKSVKTGLGIYFRRQKSKGGHLQAIVATANKIAKIFYTMVVTKNHYDESKVGLDEKQLLERKIIMAQRTLDRLNLKLSVAQG

SEQ ID NO: 386220 - protein, 319 aa, unidentified
MFVGIDVAKAELVVAVHPSHERWTVANDERGVRTLVDRLVALAPTLIVLEATGGYELLGVAALGAAALPVVVANPRHVRDFARATGQLAKTDRLDADLLALFAERVRPPIRPLPTAEAQELDALLTRRRQLIEMLSAERNRLGQVFGKGRRLVKKSLKAHITYLERELRIADRDLDEAVRHSPLWREQDDLLQSVPGVGPVLSRTLLGALPELGRLSRRQIAKLVGIAPLSRDSGTMRGRRFVKGGRAAVRAVLYMGALVAVRYNPVIRAFYLRLVAVGKPKKLALVACMRKLLTILNVMLRTKTRWRVDAPAIALVPA

SEQ ID NO: 386221 - protein, 343 aa, unidentified
MQTVTTIGLDIAKSVFQVHGVDAAGNVIVRRQLKRRYVLPFFQKLPPCLIGIEACASSHHWSRELGALGHTVRLMPAAYVKPYVKRQKNDAADAEAICEAVTRANMRFVATKTLEQQSCLMLHRSRHLFIRQQTAVINAIRAHLAEFGIVAPVGRNGVEQLLDVVADTSDKRLPDVARTCVSALGAQLRMLKARILEFDRLIIAWHRSSEASKRLDEIPGVGPALATALIASVADPKAFRSGRNFSAWIGLVPKQHSSGGKDKLGSISKQGDRYLRSLFTTGALAVIRYAKIHGTNHRPWLTALLARRPTKVAAIALANKIARMAWAMMARGDRYKEPVALAA

SEQ ID NO: 386222 - protein, 435 aa, unidentified
MSSLQKINPTCAGIDIGSDAIFIGLEEKEVASFGTFTDDYLKAIAHLKEHHITSAAMEATGVYWITLFDMLEAAGIKVTLVNGKQVKYLPGRKSDAADCQWLQQLHSFGLLRPCFIPDDITRTLRTYTRLRNDHLSMASAHIQHIHKALTLMNIKVQNVISQIHGVSGMRIITAIVLGERNLERLADLCEPSILKTKRDRVVASLKGNFKAEHIFALKQALCAYDFYQNQITECDKQIEALLDDHTDDMPTPSNLTPPKPIRHNAPNIDDLHTKLMKMTGGNDPSQITGLTDTTLLELIAETGTDLQKHWITEKHFSSWAALSPSMHQSGKTNKRRKIKKNSRAGQIFREAALSISASKHSALSAFYKRMKAKKGFLHALKATARKIAVLYYRIMTKGLAFVEQGINLYQQKLKEQQLRLLHKKAKSLGLQLVPS

SEQ ID NO: 386223 - protein, 343 aa, unidentified
MYIQVIGIDLGKSSFHLVGHDRQGRSQFRKKLSRSKLCEFLSNHPLTTIAFEACGGAHWLGRYCKKLGHQVKLIPPQYVKPYVKSHKNDFIDADAIAEASQRPSMRFVEVKSEQAQVIGAIHRIRSGYIKERTACMCRIGSLLLEFGISLPTGHSIMKRLFAWLATQRQSVPPMLMEELIELHEHYSDLNTRIDRQDRKLARLVKNHQDGELLKTIPGIGDLTASQCLSEFESVNQFKNGRSLAAWLGLVPHQHSTGGKARLLGISKRGDKHLRTLLIHGARSILSRPDTVGAVFGEWLVKLRQSKPFNVACVALANKLARIVWSVLKYKKVFNAEKLHPQFA

SEQ ID NO: 386224 - protein, 394 aa, unidentified
MKKVFIGIDVAKASSNGHGLNASGETLFTMSFAMNEEGFTKLLDEIKSRSQDLSEVLVAMESTACYHINLFSFLTANGINAVVINPLLIANFARLSLRKTKTDKKDAGTIAQFAMIHNDSISQLGVTQDQQDLRDLARESESLCKLISIYKTEIKRLLQTLFPELETICDLSTKVMLDFLQEYSSAHLVRAAKPTAVAKVLKRKGVGTRLTYTAADLIQAAQHSVATVSPAKELILRGKVTTLRHLYEKRHELTEALAAYCKVTMIEELDIITSIPGINNKTATAFLAEIGNVRHYPTSKNLIAFAGIDPSVYQSGKYEGSSRISKRGNRHLRRAIWLMTTCVIQHNDTFRAHFARKRQTGQPYKKAVLSTAHKLVRVIYSMLSQRTHFREDCI

SEQ ID NO: 386225 - protein, 370 aa, unidentified
MGKSVLYVGLDVHKMSIDVAIAEAGPGAEVRFYGQIGGDLDSLDRVIRKLRATGAQLQFAYEAGPCGYVVYRHLTAQGWPCLVAAPSLIPRRPGDRIKCDRRDALTLARLFRAGELTSVKVPDADDEAMRDLTRAREDAVSVERRAKQRTGALLLRHGRRYPGKTTWGRGHWRWLLQQAMDHPAQQIVLQEYLDAVREASVRVQRLTGQIQELLPQWRRAPFVAAYQALRGVSLIVAATMVAELGDLNRFNNPKELMAYLGLVPSEHSSGASVRRGRITKTGNGHARRVLVEAAWAYRLRARVTRPLLQRQEGLPESIRQISWKAQLRLCARYRRFLAQGKHKNTIVTAIARELAAYIWAIGQAVEPVTA

SEQ ID NO: 386226 - protein, 366 aa, unidentified
MAITHVALDDSKRVIVAGILRGEAVHPELREIPNDPRQIRRLFQRLLHDGPVRACYEAGVSGYDLYRQLTALGVACAVIAPALTPRKPGERVKTDRRDAAKLVRLFRAGELTEIHVPTETQEGVRDLTRCRDDIRADIVRWRHRVLKLLARHGRVYQGGKNWSQAHWAWIRAQRFDDLALARTLETSLDALEHALQRRIALDRVIEELATDAPYREAVNTLRCFRGINTLSAITLVAEIVDFQRFRRPRALMAYLGLVPSEYSSGERHRRGALTKAGNAQARRVLVEAAWHYRHRPSLGDRLARHTAHQPSAIVAEAWRAQQRLHRRYRHLIGHGKRPTVAVAAVARELAGFVWAAMTQAPTRAAA

SEQ ID NO: 386227 - protein, 391 aa, unidentified
MICVGIDVAKDKHDCFILSSEGVTLADVFTIPNNLEGFNTLLDKLHACSTPQDSIKVGLEATGHYSYNILGFLLDNGLATYVLNPLRTNLYRKSLSLRKTKTDRVDARTIAAMLLSDAGLKPYTDTAYHNEELKSLTRYRFDKVKERAKLKTSVSRLVCILFPELEKLVPTLHMASVYALLSEFPGAKQIAAAHLTRLKALLMDASRGRYGRDMAAEIRDAARCSVGSKMPAKSLELQHTIRLIRELDAEIEEIEAAIQAIMGELHSPITTIPGIGYRMGAMILAEIGDFSRFASPDKLLAYAGMSPSTYQSGQLKNCYPHMEKRGSRYLRYALYNAAKYVCQWDPTFAAYLAKKRAEGKHYNVALSHAAKKLVRLIFALEKSRQPYCPAI

SEQ ID NO: 386228 - protein, 325 aa, unidentified
MPLWVGLDVHKQSCHATVLDERGEVVLQKRVPNEPEVLEELFGELKPEAVAMEATYAWEPVYELLERMGLEVHLAHPTKTRVIADARLKTDVRDSEALARLLQLNWLPEAYVPPREVRELRRLVRLRAYLVRKRTSAANRLRAELVRLGLKAVGNPFSREWREVLKGTSRTAREALELYEFLTLRIRRLEAEIEREASGNPQARLLMTIPGVGAYSALTILAEIGDISRFRSPEHLCAYAGLVPSLHQSGSTVRLGPITKEGSRRLRWILIQCAWMHLYHGESRLTEFFWRLARRKGRKRAIVAMARKLLVAVYWMLVRGEPFKG

SEQ ID NO: 386229 - protein, 415 aa, unidentified
MPTIRTAHESTKLQQRIIKQLGQCPGVPIHIGLDVHKSSIHAAIHQDGTTLTDWRTSANYDALADQLQPLLPFTKAISYEAGPTGFSLARILQKHGFHVIVCAPAHTPQARVRQNKSDRIDAAKLARFASLGLLKAVTIPTEREEQERLVLRHRNALVDKLRRAKQHIKAGFLFTGAGEVVSWSKAEIERLASLPCPENQRFALDSLLREMSMLDGELKATTARIEHIMRENHAEAKDILESHPGVGPVTAATFALELFRPGRFRSGRAVARFLGLAPGLDQTGESDRPQPLMKTGQARLRSQLVEAAWRWIRLDPAGRAVYGRLLRNTGNAKKAIAGMARRLAVRLWTMWVRGEKYDSGKAEPSATQAKDRQRVAERMARREAREAAPSPNAIPEGETAEAAMCVAPKVEVAGY

SEQ ID NO: 386230 - protein, 357 aa, unidentified
MTEHFAGLDVSVKTTAVCVVDDAGEVVLRGEVATEPEAIAQVLAPFAATLRRAGHEAGSLSPWLQPELRRAGVPALCLETRHVRAALAAQRNKTDATDALGLAHIVRTGWYRTAHVKTDGAYRLRLLLTQRRSLKRKCLDLENTIRHSLKAFGVKLGGVSRGRFEAAVREACADDALTAELMECMLTARRTLWEQYVKLHGMVVRIVSREALCRRFMQVPGVGPVCALAFASAIDDPTRFKRSRDVGAYFGLTSKRRQSGTSIDIKGRVSKAGDPAVRDALYESAAVMLTRYRGTTALKTWGLKLVKTKGFKKAIVAVARKLAVLLHAMWRSGCDYADAPTGAAAQMKARKLAAACG

SEQ ID NO: 386231 - protein, 313 aa, unidentified
MTAMCAAGIDAGKLYLDVGIEPSRGRFRVANAPKGIACLIDRLHQAGVHRVVLEAIGPYGQAVIAGLHEAGFAVGMVNPRRIKAFREAEGKRAKTDRLDAGLIARFAVKMSDELRAIPSANQQTLKSLATRRRQLVEMIAMEKTRLKQAMDPVLCDSHRSTIAALSAQRALIEGQIATRLDDETALARRMVILRSLPGVGAAIATTLVVDLPELGSVDRRAIASLAGIAPHPSQSGLAPGRNQIAGGRPCVRTALYMAGLVASRCDPRFKAEYQAMRNAGKPAKVAIIAVARKLLVLANAMIKQDCLYDPTHV

SEQ ID NO: 386232 - protein, 370 aa, unidentified
MEMVIGLDVHSKQSVYAAQEEETGKLCGRGDVPTSWEGLGEMIDKLGAPVGTRVALETGTQAMWLARMLSTMGMVPVVLNAQEVRKKALRPRQKSDRRDAFELCDGLRRGIYQTTIYVPDGATLRLRAILSRRRHFVTAATRETNAARFVLRAVGLSSEAASLTTKAAWEKLMSRPAVVNQREHISMHATLWAVAREQASRLEAELAEALVPFAAPARRLLTTPGVGPITAATFIATLGTPTRFPDSHAVVSYLGLAPSTYDSGETVRHGRITKQGSSEMRFLLCEAAQQAGRVHHPLHPYWTKLCSKKGRHKAVVAVAARLARILWRLWRDDAEFDVRELNVVADRKVRTKTTYYRLRTPDEARQPAQE

SEQ ID NO: 386233 - protein, 314 aa, unidentified
MIIPLRCVGIDVSKRMLDIFDDALGAPERIANAPQAITEQVARWRCGNVFIVFEATGVYDRELAGALRQSGIRFARINPARARDFARADGRLAKTDAIDARMLASFARAMAPAADQASDPVRNALALLAKRRDQLVHMRAQEKNRRSEAYDRAMIERITGHLGFLDDEIKAIEVEIKTLIKAEPEISEQARLMRSTPGIGPVACMQLIAQMPELGRIGPKQVAALAGLAPLNVDSGSYRGKRTIGGGRKRIRDALYMAALNTVRRNGPFKTFYQKLRSAGKPAKLALIAVARKLLTTLNAMLRDRKTYLRSQPS

SEQ ID NO: 386234 - protein, 367 aa, unidentified
MKKVSIAASKQSRNISQQKLTIGLDLGDRNSWYCVVDEAGQIQLEQRVRTNAKALQEVFAAMPRSRIALEIGTHSPWISRLLSELGHEVIVANARKVRLIGESRKKDDRLDAQTLARLARIDPELLYPVKHRSAQAQADLMTIRARAGLVRARTALVNTARGLAKSYGERLHGGNVRNMNPEKAEGLSPELQAALEPLLNAIESLSERIVEYNDRIENLAQQSYPQVALLKQIKGVGTLIALTYMLTLEDPHRFRKSRDVGCYLGLQPGRRNSGQSEPQLHISKEGDPYLRTLLVQGAQHILGPFGIDCDLRRWGLKLAERGGKNGKKRAIVATARKLAVLLHHLWVSGEVYEPLHNSRRTTVAAAA

SEQ ID NO: 386235 - protein, 354 aa, unidentified
MDTRRYIGLDVHQANISVAVLDSTGKSIIDCVLETKAATIVEFIRGLRGSLSITFEEGTSAEWLHGLLKPHVAHLIVRNPRKNALLKAGNKNDRVDARKLANLLRAGRLSPVYHGECGLRTLQELARSYLTITKDLTRVMNRLKAVFRSWAIPCAGQTLYSPRHRSDGLQKLPEPGVRRRAEQTYEQLDNLMTIRRKARIELLAESRKHPATHLLQGIPRVGPIRAALLMALLQTPHRFRTKRQLWAYSGLALQTQISGEYRLSGGELQRGKKPFVRGLNINYNRDLKAVFKSAATRGGRSSDAFGVFYQGLLDKGMKPSLARLTVARKIAAIVLKVWKKGERFDPAQVKQPAA

SEQ ID NO: 386236 - protein, 340 aa, unidentified
MGHVATIGLDIAKSVFQVHGVDAEGGVVIRQKLTRARLLKFFEKLGPCLVGIEACGTAHHWARELIGLGHDVRLMPPSYVKPYVKRQKNDMADAEAICEAVTRPTMRFVPVKSPEQQSVMVLHRTRSILIRQRIQISNAIRSHMAEFGMAAAVGRQGLHSLIEVVHDAADERVPVEARGCLAMLAAQLQLVNEQVLETDRLIRTNARSTEVGRRLMEIPGVGPLLASALVGTIADPRAFKTGRNLAAWIGLVPKQNSSGGKERLGGITKQGDRYLRQMLVVGALAVVRYAVRNGTRRPWLVQLLARRTPKVAAVALANKTARMVWAIMTSGKRYREPLAA

SEQ ID NO: 386237 - protein, 411 aa, unidentified
MIKENYIYVGIDLHKETHTAVMIDCYNQKLGEITFPNRPADFPKLVAKVKKCNTDGKTIVFGLENAYGYGRALAVWLIDKGYLVKDVNTAISHRQAKHRGAMYRKSDSDDAEAIALATLNMLDKLPDAYPNDAYWSLGQLVHRRDNIMKQRTRLVNQLHEQLCIAYPSYKQFFNNISRPTALYFWEHYPSRKYLKGKSVEDLRAELVPVSHNKCSTRTCEKILDAIAGDKVKNNAYQDARDMVTLSIVSDLQHYDKQLAEVDKMLEQMYKMLGCTLTTIPGVNVITAVKILAEIGDIKRFSNANKLAQFAGIAPLHLSSSGKGKDLATKQGNRRLQATIYFLAIQMVQISSKGTPRNPVVRAYYEKRKAEGKTSQQALICISRRLISIIYGMLKSGTEYRMPVMENTGETV

SEQ ID NO: 386238 - protein, 313 aa, unidentified
MKRYIGIDVSKARLDVAVHESAQCFSCDNTEAGVEALIKQMKELEPELIVMEATGGYERLCAAMLAAAGLALSVVNPRQVRDFAKSKGILAKTDRLDARVLAHFGAAIKPEPRALPDAQQQLLDELMLRRRQIVAGLVAEKNRLGMAHTEAVKKSLREAIAFYERLLADVDRQVGEHIERSPLWRAREDLLRSFKGVGPVSSRTLIGDLPELGSLDRKRIAALVGVAPIAHDSGKRKGVRTIFGGRGQVRAALYMVAITAIRANDPIRQFYQRLRAAGKPAKVAIVACMRKILIILNAMLRTQSRWNEHLVIS

SEQ ID NO: 386239 - protein, 372 aa, unidentified
MTNRNTNSAHVSIGLDLGDKKSRYCVMQPQEKILSERRHTKPQEKILSEGSVSMNKTDLKRCFSRFPGAAVIMEASTHSAWVSEFLESLVDEVVVANPYEVGRKYLSKTKKNDKSDARTLAHLGMASRFFLAPIKHRSRASQLDLTLIRARDALLKARTELINHVRSVVKIFGERLPSCTPGAFGKRARLELERFPEFHDALLPLVENITRITEQLKEYDKKVERLSTEKYPETKVLMQIPGVGFLTALAYVLTLEDPKRFPKSRKVGAFLGMVPRQHQSGEAAPQLRITKAGNEHLRRLMVMSAHYILGHFGTDSALRRHGERIVATGGKAAKKRAVIAVARKLSVVLHRLWTTGEQYEPFPHSTTKKKAS

SEQ ID NO: 386240 - protein, 347 aa, unidentified
MKRIAVDLAKSVYQVAESVRFGQVVQRKRLNREAFRRYIQEQAEPVEWVMEACGTAHYWGRLAQSLGHQVKLLHPRYVRPYRRRNKTDRNDCDAMLEAARCTDIHPVPVKSHDQQQLQQLHGLRETWKKSRTQRINLLRGMLREAGIEAPTSTAAFIRAASELVDQPELASLSRLLHIVLAEINLYEQCMAECEQQLKRWHADDDIVRKLDEVSGIGLLTASALTAAVGKPERFANGRQLSAWLGMTPCEFSSGNSRKLGHISRQGNVYVRTLLIHGSRAALLAAQRCQARTPEKLTQLQRWAVQTAARIGHNKAAVALANKLVRICWAVWCHERRFSGNWQSVRPA

SEQ ID NO: 386241 - protein, 482 aa, unidentified
MTPRRQKNGRVVASPEPLRVANPHAAGIDVHAVVHWVAVPPNHVAAAKCMDAGAGDAANLPPHVRKFGTCTADLELLADWLHQCGITSVAMESTGVYWIPLFELLERRGFQVYLVDPRQTKHAPGRPKTDVLDCQWIQRLHSYGLLTASFRPEDQVVVLRGYLRQRHMLIRYAGQHVQHMQKALEQMNVKLPEVVSDITGVTGLAIIKAILAGERAPRKLAKLRDERCKRTEAEIARALQGNWREEHLFALKQALELYQDYEHLLRECDVKLEAHLATFADKSGGQKLEPKPRRCGRRHNEAAFAVRSALHRMSGHDLTVLEGIDDNTALVILSEIGMDMSKWPTEKHFTSWLGLCPQHQGSAGKIKSRRVRRGSNLAARAFRLAAQGCHHAKNALGAFYRRIRARCGGIKAVFATARKIAERVYRLLKYGTEYVRQGIEAYEKAYRERLLKGLTYRAKSLGYALIALPEAPPSTEATPATL

SEQ ID NO: 386242 - protein, 410 aa, unidentified
MEVLYRHCAGLDVHKDTVVACVRHMANGAVRRAVRTFKTTTKDLLALSEWLAGEGCSPIAMEATGIYWKPVWHILSDGEFALVLANAAHVKNVPGRKTDINDAAWLADLLAHGLIRASFVPDAATQEMRSLLRTRKQLVRERSSHIQRLQKTLEDGNIKLDSVISDVMGLSGRAMVEALIAGESDPDRLAELAHRRIKAPPEELHDALRGRVTKHHRFLLRLHLQQIDAIDGAIGEIDREVDANVEPFRAAIQLLNTIPGISDLSARVILAEIGRDMSRFPTEGHLISWAGLCPKNDESAGKRRSTRMRKGALWLKTTLIQCAWAAARKKGSYLQAQFHRLRSRRGAKKAIGALAASILTAAYHMLIDGTFYHDLGPDHFDRRTKAAQTRRLLARLQNLGFAVQITPMPA

SEQ ID NO: 386243 - protein, 406 aa, unidentified
MRYYIGVDWADREHAVCVQDESGARVTQRMVAHRAEGFADWGRWLEERRAEGIELGAAIERPDGRVVDFLLDHGVVVFPLNPKALDRARDRFRMSGAKSDPFDAQVAADFLRTDHAHLAPLRPSSEAAQELKAVTRDYARQVRQQTRVLNQLTVTLKEYYPRALEVCPDLKSRWAQEFLAAYPAPAALHGLSERQWTRWARGHRLSAARAAELWLVIGGAQLPVPAQVVRVNARRLAVLLEQLAVTGRAVAAYREAVEVFFARMPAAQWAATLPGGRSGTTVPAVWAELGDAPGRWQTAQHLQGHAGMVPVTARSGKAHIVRFRFACNTHLRAAVQQLAFVSLRHSPWARTYYQQCRARGHAHQHAVRALGAKWLKIIFAMWTRSVPYDEQYHLASIGRHHVGQPA

SEQ ID NO: 386244 - protein, 341 aa, unidentified
MEEYIGLDVSMKETSVSIRRAGERIWRGKCASDPRIIAELIRKRAPSVKRVVFETGPLSIWFYHSLRTEGLPAICIDARHAKAALDMAANKTDANDADGLAQLAEVGFFREVRVKGFDSMLTRTLVAARTRLVRITTELSNQIRGVMKTFGLLVPAGKGSTFEKNVRGLLADQNGLASIVLPMLEVWRGIRIRAAELGRQLVRDARQSQACRILMSIPGIGAITATAFTTAIERPANFKKSRSVGAWIGLTTRRYQSGEVDYDGHISRRGDHHLRGLLYEAAAVILTRSSTDSTLRTWGLKLRERIGFKRAAVAVARKLAVIMHTMLKTGELFNPNAGATA

SEQ ID NO: 386245 - protein, 316 aa, unidentified
MSAQELWIGVDVAKAWLDVTGTSEETVRRFANDEPGIAALVADLAARGPRLVVLEATGGYETAVTAALAAAGLAVAVVNPRQVRDFARATGRLAKTDALDAQILARFAQRVQPPARPLPDATTQELASLLARRRQLIEMRSAERNRRPGLPPRLQPGLDEHLALLERQIAALDDELDQTLRDSPVWREKEALLRSIPGIGPVVARTLLGELPELGTLSRQEAAALAGVAPLNHDSGQRRGARRIWGGRAPVRAALYMAVVSATRFNPAIRALHDRLRRAGKPPKVAFVACMRKLLTIANAVLRDGTPWTPHPVPSA

SEQ ID NO: 386246 - protein, 416 aa, unidentified
MEQPAHFAAYIGLDWSDQKHDLCLVDTATGAQELSVIKQQPEALDEWARSLRVRFRGGRIAICLEQSRGPLIYALLKYDFLVLYPINPKTLARFREAFTPSRAKDDPRDAEYLVELLIHHRDRLTAWTPDDERTRTLQLLVEYRRRLVSDQTRISNRLTALLKGYLPQVLQWFPDIRTELVCDFLLRWPSLEALKGVHRTTLLKFFRAHNSHRQETLETRLAAIKGASALVTDRAVINSSVLIVKALAAQMKTTLRAVHEFDAEIEELCRSHEDFDLFTSLPGAGKVYASRLLTAIGSNRERWASADELLRFSGVAPVVERSGKSSWTRWRYFCPKFCRQSFVEYAGESIRHSEWAKAFYLSQKAKGKGHQAAVRALAYKWIRIIWKCWQTRAKYDEARYIECLRKKGSALISATA

SEQ ID NO: 386247 - protein, 406 aa, unidentified
MELVALHKRVIGLDVHQAQITACAILEEADGTTRIEQRQFGAFKRDRRALADWAASLAPDQVVMESTGIYWKSPYAALEAVGIRGQVVNARHVKNVPGRKTDVGDAQWLATLSRAGLLRGSFVPPARLRELRLISRQRQKLVGLLASEKNRLHKVLTDGGIRLGVVVSDLHGQSARAMVKAIIEGHSPNEVLKFASRRLKASREEIFDALQGELTDSHRFVLDELMRHIEEIEARIARFDTRLLDGLKDERNTLALLQTLPGVDLIGAAMLLVEIGTDMDAFGSADRLASWVGICPGNNESAGKRKSGRLRKGNLYVRRLLCEFAHAASRTKSALQSKFQSLIVRRGHKRAIVALAHKILRTLFFMLKRGEHYRDSATDYEALSVQRNAPRWIKALTRFGFIPVAA

SEQ ID NO: 386248 - protein, 401 aa, unidentified
MPSIESNAIRVKRFRELKATLRTNRTRLLVGMDIAQAAHVVQLRHAHTRIVVPRLTIPNTTKGFAALWTQITQAQRATGCREVVCGLEPTGTYHQAVAAFLEAKGATVVLVSGAVAAWNRRTQDGTWDKNDPKDAANCADLLEQGKVLFYSQPDGPLAELRHLVRCLRRARGELAACKARWRTTLRPALGPMGESLPNRLRAERPAVLQAWEPAAAGRPAVAKGRLPLGLATACADLGAQVTAVQARIAVIEQACTPLAERLPAYALLRTIPGIGPTVGAILLAEIGDIAWFTQFSQLRKLAGLDIIRVQTGQFAGQWRISKCGRGLLRWALYQAAVGMARTAAGRARLAALKAKRHGDRYAGFKAIVELAAKLLRVVWGVWRSGCPYDPRRTGGLQRQPR

SEQ ID NO: 386249 - protein, 454 aa, unidentified
MEMVMEHGMTQQDKPNKRGPRLEVTHPNAAGIDIGCASHYVAVPADRDDEPVREFKSFTVDVHKLADWLEACGVDTVAMESTGVYWIPVYEILERRGFTVLLVNARHVKNVAGRKSDVLDCQWLQQLHSYGLLRGAFRPDDQICVLRSLSRQRAMLLRMQARHIQHMQKALVQMNIQLANVISDVVGETGQKILRAVVAGERNPYVLAAMRNVRIKASEEEIVQSLRGNWRDEHVFSLKQALELFDEYARKVADCDELMEQQMVRLHKHDGVPSKARKQSGRNKPKFDLRTRLYQMCGVDLTRIDGIDVGTAMTVLAEVGVDMSKFPTVKHFAAWLGLCPGTKISGGKVLGSKTQKCANKTAQALRQAAVALKNSQSALGAYYRRMCAKMDKPKAITAAAHKLARLIYTMITKGEEYVDQGQAYYEERYRQRVEINLRRKAESLGLRIVPMEAA

SEQ ID NO: 386250 - protein, 340 aa, unidentified
MHATTYGLDVAKRVSQMYWVDGDTGEIVNRRFGRDDLIGYLSRRPPGRVALEACGSAHWWARKIKALGHDVVLLHAKFIRPFVQTNKTDAADARAIWTAVQQPGMRTVAAKTEDQQAMLSLHRIRSLLIKFRTMQVNQLRGLLYEFGASFRAGRVAGLAEIRSRMVELEEALPGALMSCLQDQLKRIEGLQTEIDQLEHRIGAWQKQDAACRAISDVPGIGRLTATALVATMGDAATFKSGREFAAFLGLVPRQSGTGGKVRLGAISKRGDPYLRTLLIHGARSVLCHTKAPTPWQSAIQKRRPANVATVAVANKMARTAWAILARGQAYRRDYVSLRPA

SEQ ID NO: 386251 - protein, 455 aa, unidentified
MKVKTVSALRSKRGLHRVNGAEPQVVGLASVTTDERKTDTMKTYILRHSQAVQPQKSPRLLHPKPAALAATTAILGRPEVRAKGPVLFTGLDVHNDSIAVSLAPSDSIEVRRYGIIGGEHEDVLKLAKKLAEAHPGMFLKFCYEAGPRGFALCRCLQAHGWDCMLVCPSKIPRKPGERVKTDRRDADDLARLYRAGELTGIYVPEPVDEAMRDLIRARFQVGRQQHRSRQQLKMYLLRHNFRYGGQTSWNAAHLRYLAKIKMPFPTQQIVFQEMLDVITEATARLERYDREIERAVPGWRWEPAVRALMSLRGMALLHAATLVAELGDFNRFEHPGQLMGYLGLVPSEHTTGKDRQQGGITKMGNAPARRALVEAAWQYRVPARLSPHLKKRQEGLPSAITDIAWEAQRRLYHRYTHLTRVGKKKSQVAVTAVARELAGFVWAIARQVKPVATTP

SEQ ID NO: 386252 - protein, 420 aa, unidentified
MSFKIFKFNCCGLDVHKTWIYACIGITDSNNRTEYKQARFSSFSKGLHQLCVWLAKYNCNDVCMESTGKYWIPVFNILEQHKIRVTLSHPKYTKPMKGNKTDRKDAKWICDLYMCGMVKPSFIPPADIRELRDLVRYRFKLTCMITGEKNRAQNCLTVSNLKLDDVFSDVFGKSSRSITEQILQHPGEKFDVSPFVDSRCKTPIEEIQAAVDGNISKEQDVKLRQCLDHIDELQKHISEVEQEILRLSDKYEAALNLIRTVPGFDKNPMTAIQVLSEIGGDMSVFLTAKHLVSWAGCCPRNDKSDRKIKSTRISCAGSYFKPVLVQIANALIKSKKHPEFTNRYRRIKARRGHKKAIIAICRMILTAIWHILTDLKPYTPEGFLESRPVNEAKVLTASQALNLMRQRGYIIKDDMSPVMN

SEQ ID NO: 386253 - protein, 346 aa, unidentified
MKKIFIGIDFSKEKFDATLIKAEGLKECAPSVHEVFANKTSGFRRLVKWVKGESDGLPVDSWLFCGENTGGYSIALSNYLYGSGYEMWLECAYKIKHSVGIQRVKNDKSDSRAIAEYAMRNYDKMLPYKPMSPSLTCLREVFLYRHSLVKEKVALTVRRDEKRLTQAKSDVSAFMSFTSKHLITEVNKAIAKCDQKIKEIIAADGELREVFDIITSMPGIGIQNATCLMVYTDNFRRFDLNSRKIGCYYGIAPFGRQSGTSVCGRPQVSPFANRMIKSLLSQAALAAIKFDVNVYNYYQRLIGRGKHPLLVHNNIKNKMLHILVAMVRDRMKYNPDYVYRANKNIA

SEQ ID NO: 386254 - protein, 520 aa, unidentified
MATSRTRRRSSPRRPSASVGKPRGVLHPRVQQVGPEHFGIVCFDCAKARSKFLLADFYGRVLIPPTTVGHNRPDLDAAVAQVRHAFASHQLQDGLVAIERTGRYHRLVQRTFAAAGFETRILHPFVTKQYRQPVDPGTKTDDTDLAAIHRATVTGCALLEATRDEAWTTLQLVIRHRRDLVGKGAALNCQIRDHLDAALPGYAACFDKLWESQIPWHLLRHFPTAEQLRTAGLTTLCHSLRQAGIRFQQRTVQAVLDWAEQAAPGDVAASQHRRIALALYDDRQRKTQEIHALERDIAGRLVQTPYVLLLSFPGINVVSAADYGGEAGPMEHYANPKSITGRAGLRPSRYQSDAVDKANGPLVRNCNRALRAAILGIADNLIVCNHHFQHLARQWARQGKDPRDIRVRVADRFCRISFQMVAGRQVFRHPCIQGRHYILDKLMAFHRAHDTPMPEVLQDLQAAIGHLSPREHAAEARPLHEELQRIQQGRRRGPQLLGDILPIVLARLGVGAVQSTESGE

SEQ ID NO: 386255 - protein, 414 aa, unidentified
MEVVHPRCAGIDVSKRDVKVCVRIAGVGRRKANSTVTTWGAVTNQVLALRDHLVDAGVTLVVMEATSDYWKPFYYLLEDGPFEVMLVNARHARNLPGRKSDVSDAAWLADLGAHGLVRGSFVPPEPIRQLRDLTRTRTMVARARGHEVQRLEKLLEDAGIKLSSVASDITGVSGRAMLEALIAGERDPVVLAELAKRRMRSKIPQLTEALTGRFSEHHGFLARLHLNLIDQHSAAIDELNARIEVMIEPFRSVRDLLVSIPGISTVVADVVIAETGGDMARFPSAGHLASWAGTCPGSNESAGRVKSTHTRPGNPYLKGALGAAAMSAAHSHDTYFGAKYRRIASRRGPVKAIVAIEHAMLIAIWHMLTTGAFYDDPGGDFYARLDPERGKRRAVDQLHRMGFAVTLEPMAVAG

SEQ ID NO: 386256 - protein, 331 aa, unidentified
MDNQIDLKYYIWRYSHALCGIDVAKNKHDVTALNVSGKTVLKPLTFSNNKAGFELLDLSLRQLNQDYLIALEDTGHYAFNLLNFLHEQGYKVYTYNPLLIKKFAKSLLLRKTKTDKKDAHGIALKLLSDPNREQFQHDNRQVELKILARHIHRLKKKQSDWKVQYTRCLDIIFPELDKIVGKHSEYTYQLLTCYPNPQKRLEAGFDKLIEIKRLTASKIQDILSVAPRSIGTTSPAREFEIIENIKHYKRLIDKAEKCVNDLMAEFNSVITTVTGIGNRLGAVILAEIQNIHAFDNPAQLQAFAGLDSSIYQSGQIDLAGRMVKRGSPHLR

SEQ ID NO: 386257 - protein, 343 aa, unidentified
MDHFAGLDVSVKETSVCIVDDTGRIVREVKVESEPDALLAVLKNPTYHFKRIGLEAGPLSQWLFSAVAEAGLPVICVETRHMRAVLKAQINKTDRNDARGMAQMMRAGLYRPVHVKTLRSQKLRMLLTHRKLLQSKAIAIDNDLRGTLRNFGLKVGMVGTVKFEARIKELVENLPDLAVLVEPLLIVRRVLREQIGILHRRLLAIVRDDDVCRRLMTVPGVGPVVALTYRATVDVPARFRNSKAVGAVFGLTPSKYQSGEINRTGAISRCGDEMMRVMLYEAAQVMLTRTIKWSWLKAWAMKIARHRGMKKAIVALARRLAVIMHRIWVDGTEFRWTRDVATA

SEQ ID NO: 386258 - protein, 379 aa, unidentified
MGDCSEVFVGIDTSKLRNAVAIADGGRDGEVRFLGEIENSEAATAKLVRKLASQYQRLTFCYEAGPTGYGLYRQITELGHECIVAAPSLIPKRPGDRVKTNRRDAVGLAKLLRAGELTAVWVPDRHHEAMRDLTRARETAMLDLRRKRQQITGLLLRQGRHYQEGNQERRKPWTKIHKAWLMRQKFEHPERRLVFEEMMLAMREAEERLARLEQAIRVAVADWSLAEVCTGLMAMRGIDLVSSAGFLAEMGDLNRFPTPSELMANLGMVPSEKSTGETIKRGPITKAGNRRARRLLVECAWAYRHPPRVGVTKQAKVAAAPRAVREIAWKAQHRLYGRYRTLIRRGKLKNVAITAVARELAGFIWAVNREITVAGAAAR

SEQ ID NO: 386259 - protein, 426 aa, unidentified
MTTPAGDSLQPDQMHVAHPRAAGLDVHKLQITASVRLCQPGGGVESATRQFSALPPGLSSLTQWLESHRVTAAAMEATGIFWQAPWEALEAAGITPQLLHAQFVKQVQGRKSDVADSLWLARICQFDLCRPSYVPPRKFRQLRQLSRYRRKLVGERSRARNRIHKTLDHDGLRLGGALSDIFGLNGRKILAGLAEGRPQAEILASLSGHVRHKRELLEQVLEAQLDAHAVWKLGDLLRAHEAANTSIAELDARMEEGLAEMAEQVRLLETVPGIDRGSACAILVELGPDLSAFDNTANVAAWAGLAPGNNESAGKRRSGRLRRGNATLRATLAECAHGAVRTKGSQFHGYHNTLKARMPYKKAILATAHKLLRTIVAMLRDQSPYIDPGIDYDKLLVDRNAARWLRKLDEHGYLERIRSGSQPAAA

SEQ ID NO: 386260 - protein, 335 aa, unidentified
MNNDKYVAMDVHKASVVIGMRDAAGKMIGRAVVETKAQTLKDYVRGLSGTIHLTFEEGTQSAWLYDLLKPLVADCIVCDPRRNKLLESGNKSDDIDVEKLSELLYLGRLRAVYHGHQGTRALKELAHNYEALVKDNTRIKNRLKAIFRGRGISYEGGEIYDSKQREAWLEKLNERGVRERARQLYEQLAQLEGWVVTARQQMLRESRKQKGKKILQQIPTLGEISVAQLIATVDTPFRFRSKRQFWTYCGLAVVRHTSADYRFEQGELRRRTKPGPTRGLNRNYNRRLKKLFKSAALAGSVKGPFKPYYQRLLERGLDPELAQVTLARKIAAVSL

SEQ ID NO: 386261 - protein, 312 aa, unidentified
MAMLSFCGIDVSKDRLDVVVLPEGWFFSVSNDTAGWAELVVRLRPLTVSAIGLEPSGGYERGIIRALLAAGMSVRRINPNKLRQFARARGVLAKNDRLDARLIAEYVAIMPTRVVQRDAAVERLAEIVTMRRQLCDEHVAAENQAAHLEDAMLRRLSKRRQMRLEADIRLLDKRLAEMVAANVALAQRYELLISMPGVGPVLAFTLIALLPELGKMSRKQIAALVGLAPYDFDSGKLKGHRSIYGGRMPVRNVLYMAALSASRYSPALKTFHKRLAAADIKSKVIIVAVMRKMITTLNAMLRDSAAWQPRSA

SEQ ID NO: 386262 - protein, 362 aa, unidentified
MPKMIWLGMDVHAASITVAQYEDQAPTATVQTIANDPAQVRRLVRRLPAGSDVRACYEAGSCGYGLHRQLTALGVHCDVIAPALIPRSPGERIKTDRRDAEKLGRFYRSGELTTITVPTPSQEGVRDLVRAREDVRRDRTAARQRLAKFLLRHGHRYPGSHWTKRHWEWVCGHTFDGPARTVFVHYCDHVLALNERLAHLEREIRTLAESAAYQPVVTRLSCLRGLATLSALVLIAELYDLRRFRTPRELMAYLGLVPSEHSSGARERRGRITKTGNALARRLLIEAAWAYRHPARQTRRVHQALTTQPPEVHAISDRALHRLTARYRRLLSRGKTPHHAVTAIARELCGFVWAIALVPDLA

SEQ ID NO: 386263 - protein, 412 aa, unidentified
MFKIFRNNCCGLDVHKTWIYACIGITDPNGRTEYKQARFSSFSKGLRELAAWLAKYSCIEVCMESTGKYWIPVFNILEKSCFVTLAHPKYTKPQKGNKTDRKDAKWICDLFMCDMIKPSFIPSPEIRQLRDLVRYRVKLTNMLTGEKNRAQNCLTVSNLKLDDVFSDVFGKSARSITNYILEHPGETFDVSPFVDPRCKTPVSEIQAAVDGAISPEQAVKLRQCLAHIDELEAHRKEIESEILQIAEPFSAVLDLLYTLPGLDKNPMTAIAILSEIGPDMSVFPSSKHLVSWAGCCPRNDQSNQKVKSRRISRAGSYLKPLLVQVANALIKSKKHPEFKERYYRIKSRRGHKKAIIAVCKMLLTAIWNMLSKLEPYNPDGFLEHRPVKQEKILTVSQALELLRLRGYTITNQ

SEQ ID NO: 386264 - protein, 420 aa, unidentified
MTRRKSTPPEAALVAIDVAKQRNEVLIEAVRGGRRRRMTILNTRADHDKLITTLQAMQMPVVVGLEPTGNYHRVLAHRLIGAGFTVRLISSMALARTREALHNGWDKNDPKDAQVILHMVGIGATMVYQDPLASGINDLQELSKTHEVVSKAKTEIWHRLLTHYLPLYFPEIERFVGNSRSDWFLAFLERFPTPASVTAMAKEDFVEAAWDAVGRKVSKARLLGDIYETACSSAALPVALDSPAIAMFRLVLAEARSLIQQRNIIEAHAHELLREQPDYLRLRQVPGIGPIHALTILAEAGDLRRFRHHRQFLKFCGLDLATHQSGQFRGQTRLSKYGNARLRRTFWLAAQVAIRQRDNSLRDYFGRHVAKDRENKDLRRKATVAVATKMARVAHALIKTGADYRPFPEAPVPSGRTHPL

SEQ ID NO: 386265 - protein, 354 aa, unidentified
MKRTTKYVGLDVHQATTVASVREQSGRVIARTVLPTEAGALVEFFAGMRGSVHVAFEEGTQAQWLHDLLVPITHRVLVCDRRGERRRGNKADEPDADHLSHRLRTGDLRAVYHGRADRRTLQEFTRTYTNVVGDSTRVMQRTKALFRARAIAAKGTALYAPAHRHEWLAKLEERGARFRAEVLLAELDLLRELRPKAKRAMVAEARKDPAYAVLRQIPFLGPVRISLILATMKTPWRFRTKRNLWAYAGLAVVTESSADYEFVRGRPQRRRRKPLTRGLNKNHNPVLKDVFKGAATAALGRPGPFRDLYDGMLARGMREEMARLTLARKFAALTLRLWKRGEAFDPTMLSVPSP

SEQ ID NO: 386266 - protein, 424 aa, unidentified
MNIVYPICCGVDVHKRFFVATLIITKDGINANYEKRRFSTFNKEILKFKSWLLENNCRNVCMESTGKYWVPVSNLLEDSINVTIANPKWVRSVKGHKDDAKDSKWIGDLFRIGLVRGSFIPSKDIRILREYMRYRFKLVSCKSSEKNRYQNVFTVCNVALDAVVSDMFGKSAVSITAYIINSDTFDSAHCVSLLKKSLKKKADEVVESIEGFQMTDSQKKRAKIVKEHYDYLLEHIQKLDAVVDELVKPFESAITLLCTTPGIKRDSAITIISEIGTDMSQFGSSKRLCSWAGLTPGNNESAGKKKSVRITRAGVYLKPALVQVAHAAVKDNKNPYYRIKYERIAKRRGKKRAIIAIARMILTAVFNMLTTGEVWNPVDLNQIDMPPELREKEIQKSLRRAAKLLVAHGILAPDIVQFPEAASE

SEQ ID NO: 386267 - protein, 466 aa, unidentified
MAFTLTEETAMPRGRRQTTRAATPPVLNPNAAGIDIGATEIYVCVPLERDPQPIRRFGTFTQDLLAVATWLTQCGVTSVAMESTGVYWIPLYQILEARGLEVCLVNARHVKNVPGRKTDVLDCQWLQYLHAVGLLRASFRPPETVCAVRSLLRHRDNLVRLAAVHTQHLQKALNQMNLQLHHVLSDITGVTGLAILDALLAGERDPHVLAGHRDHRIKASAETIAKALVGDYRREHLFTLRQSLGAYRHYQQLISECDREVQGLLATFESVSDPAVSPLSPATTTHRKPQGNAPRFDLRTELYRILGIDLTQVAGLNTATVYTLFAELGSDLGKFPSAKHFASWLGLCPDNRISGGKVLSVQTRHVKHRVAQALRMAAQSLYRSHSALGAFFRRMRAKLGAPKAITATAHKLARIVYHLLTTREPYAESQLAKHEGMYRKRLESRLYAQARALGFQLVPAAGQSVS

SEQ ID NO: 386268 - protein, 314 aa, unidentified
MSAAIFVGMDVSQDTVDVAVQPGTTFHLANDESGVAEAVTRLQAVQPTLIVLEATGGLEVPLAGALAAAGLPVVVINPRQVRDFARATGQLAKTDRLDAQILARFAEAIRPPVRPIPNEQTQALAALVARRRQLIEMLTAEKNRVRLAARPIQKRVQAHITWLEKELEGINTDLTTTMHHSPAWREKEEVLRSVPGVGPVLTTTLFANLPELGTLTRKEVAALAGVAPFPRDSGTLKGRRAIWGGRAHVRAALYMAALVATRKNPVIRTFYQRLCQAGKAKKLALTACMRKLLTILNAMVKSRTPWRVAVTQPA

SEQ ID NO: 386269 - protein, 428 aa, unidentified
MNNVDNVRLEQYRQMKKDVRGSGEYLIAGIDVAKSKHYAFFGTATGKTLLKRIIFENNIAGFDKILTHEDSLKVKYGLGKVIYGLEATGNYHKPLGEHLIKCCRNVVLVPGVAVKNNRQMMDRRWDKNDTKDAAVIADLVSQGKFVFYEYASMPLRDLRNLLSLKKRLKKQEHSQKVRIRNNLLAQYFPELDEYYGTWGKEGLAIVRWCLDPSVIVGLEYDEFTRRVAPHARGGIPQQKRLRAVWKKAIESIGCMVGESLEVEAKLMVEGLQYTREAIKYVEEKIKEICLDIPEYQYILSIPGFGPDISSKVIGAIGYPFRFNNGRQVLKMAGMDLSASRSGKNSDNVTPKLSKSGKADLRYALYQAAMIASFKNIHFMKYYTEKLRGREKEKGIKTKMRVKLAAKLLIIAWTLMKKQEYFVPGYLRI

SEQ ID NO: 386270 - protein, 340 aa, unidentified
MEHVGIDLHQKYSEICCLSGEGEVILRRRIPTTEASLRRVFARREPCRIVIESCSQAPWVARLLGSLGQEVVVVNPRRVRLIAESTLKNDAFDAEILARLGRFDLELLGPVHQRSEASQLLRTRLRVRGTLVKSRTAMINMVRGSLRSAGIRMGSSTAAGFVARFTQTTLPKHLLEVLDPVIETIAELSARIAGLDEELVREARSDELLRRLQTVPGVGPLVSLAYVGWMDQPERFRKSRDVGACLGLRPRIRDSGGRQRRGHITREGDKEMRRLLVQAAHASLQCQKDSALKRWTESLAERVGKKKAVVATARKIAVLLHRLWVTGDCFQPFPNVTAAQ

SEQ ID NO: 386271 - protein, 337 aa, unidentified
MRLHYLGIDLAKNVFQLHGEDAEGNVVYRKRLGRSRLLEDVGRLPACQIGIEACTGAFYWQREFEALGHSVRIIAPQYVKPFARHQKNDQNDAAAICTALRQPNMRFVPPKSLGQQDIQALHRGRQRLVNHRTALVSQMRGLLLDRGLAFGLSITRARREIPRLLTMERGRLGDLFASLLEQLFEMLCELDRRVAWFDREINRVFRSNEACQRIAKIRGVGPKTATAIVAAIGDGTEFKNGRHLAAWLGLVPKQHSSGNRQMLLGISKRGDRHLRTLLVHGARAVLRTAPKHHDAVSQWAIGLQERRGAAKAIVAIANKNARIIFAMLRQNTEFRTA

SEQ ID NO: 386272 - protein, 348 aa, unidentified
MVVLGADLHKRSHTVVAVDGTGRKLDVKTVAATTEGHLELRRWAEQWPERRWALEDCRQLSRRLEADLVRSGETVVRVPPKLMAGARRSVREPGKSDPIDAVAVARAALREPDLPIARLDGPERALRLLVDHREDLVAERTRHINRVRWLLVELDIAEPPARSLNRPAVIAQLSTELAGRSEPAARFARDLVVRIAGLTSSIKALATEIGQLVPTLAPALLAMPGCGPLTAAKIVGEVAGITRFRSSAAFARHNGTAPVPVWSANRERHRLSRGGNRQLNAALHRIAITQLRLGGAGAAYRAKRLAMQNTATEAVRALRRRVSDEVFRRLRSDEGARMAPPGALAGAA

SEQ ID NO: 386273 - protein, 323 aa, unidentified
MHYTQFVGIDVSKEWLEVAVCDEQGDRAAQSERFRNRGEGWAALSRRFAADWSKTLVVMEATGGYEAALLAHLLAEGAAVHRADPLTAKHFLRSLRRAKTDALDAASLARYGAERGAQLPPFHPADVHTAQLAVLLTRRTDLVQLRAAELTRRQHPRYAALQDSLRAVLRTLDREIAKIETRMRALLQQSPQLRARRDVLHSVPGVAEKTTWTLLAAMPELGTLTRRQAASLAGCAPHPRDSGQHHGYRRTGGGRDPVKRALFLACWSAVRYHPALKLFYDRLRSNGKKSMVALVAAMRKLITILNAKLRDALAVPSPLGCAV

SEQ ID NO: 386274 - protein, 367 aa, unidentified
MGVLFVGLDVHKETISVAVAEDGRHGEVHSLPTISNTPQAIEKMLAKLSGKAGRLSFCYEAGPCGYGLYRQIVESGHDCMVVAPSCIPTKPGERVKTDRLDSIKLARLLRAGDLTAVWVPDAAHEAMRDLLRSRTDAMHQLKTAKQQLFAFLLRQGRVYSGRKLWGRAHLRWLSEQKFEQEAHRMVFQDYINAVQDGQQRHGALIKIVEGMIPQWSMRPLHEALCVMRGIDTISAATILCATGDLRRFDSPGKLSAYFGLIPAEHSSGGSVKRGGITKTGNNEVRRILDQSAWCYRFPARVTRAKEKIASETEKKVRDVAWRAQVRLCGRYRKLLAAGKCAPLVCMAVARELAAFIWEMGRVVPLTT

SEQ ID NO: 386275 - protein, 378 aa, unidentified
MPSSVNFWVGLDVHKDSITAAIFRNRDPEPMRVDRLPYDLRKIRRYFQRLLAEGSVRVCYEASGAGYVLQRSLTEWGVECHLAAPSLIPRRPGEHRKTDRRDAIKIARDFRDHRLVLIHIPSEEDERVRDLVRCRETFQREIVKSRHYILKFMRRRGFVFREGVHWTVRHFNWIRRVLAPGTLAAEDQVVLSEYLALLEYKLQRRDHLDERICALALSPRYQPAVDRICCFRGFKTQAAMVIATELGDLRRFENPRQLMAYVGLVPSEHSSGDRRRLGSITKAGNARVRHILIQSAWHYRKRPAVGAALRKRQHGQDPGVIRHAWKCQHRLYKLFHRLAVKKPNQVAATAVAREMVGFLWAVLRDIDVASLQEVNAAA

SEQ ID NO: 386276 - protein, 346 aa, unidentified
MKLIKKVTGIDISKDSITVCFGTLDDALNQKFSKSFTFSNDIKGFKSLIKSVKNIDMFRTEDSDIPLWFVVEATGVYYENLAYFLAENNYSVAVILPNKTKNFFKTLENKSKTDSLDAAGLTQFGLEKTLKPWETPLAIFKELKELTREHLSTTAMLSQLKNKLHAKKHSHEANTQTVNRLKKQITFFKLQLKLINKQIKDLVKSDKDLDDRVKKVTTAKGIGFQTAITVISETNGFNLIQNEKQLTSYAGYDPRQQQSGIHKGKTPISKKGNKYIRTAVYLPALSAARWNENLKRVYKRLCISKNNKKVALVAVARKLLILIYTLWKNNQEFNLNYNGPNTKIST

SEQ ID NO: 386277 - protein, 344 aa, unidentified
MKLYGGIDLHSNNSVIALLDGEDQAVYQRRLGNDLQTILEALEPYRGNIQGLAVESTYNWYWLVDGLMEAGYQVHLVNTAAVKQYEGMKHGDDHTDARWLAHLLRLGILPQGYIYPKEGRAVRDLLRKRGQLVQMRTTNLLSIQTLITRNTGSSLSANKVKQLQSEQVAELLPCEDTALAVNSNLGIMNALQKQIKILEKVVQKRAKLRAEYAALKTVPGIGIILALTIMLETGPIQRFAKVGNYASYCRCVGTTRLSNGKKKGKGNAKNGNRYLSWAFVEAANFAIRYNDNIKAYYQRKQAKTNRVIALKTVAHKLARACYYILRDQVEFDLKRPSEGGGERR

SEQ ID NO: 386278 - protein, 349 aa, unidentified
MSIIGGLDVHRGQITFDWVDADSGEARRGRIMPATRARLGEWLAGLPGDGGAFAVEACTGWRFVVEELQRAGLAAHLAEPADTASLRGRKRRAKTDRADARLLRELLTQGRLPTAWIGPGWILDLRTTVRLRKTLVDQRTAWQQRIHAVLFHHGLPRPSAELLCAPTRSWLEQVTLPPASRQLLQIALRQADQIDAELDPIDRWLGALARRQPGCRALQRTHFGIGAVTAPTILAELGDARRFPSGDQVVRYTGLDITVYASDDKRSPGHLSRQGPEVLRWALFEAAKAAARPSSPDYDLYQQVKARQGGNRATLTVARKLARRVRHTLLALGDQALAPVTDLPLPTAA

SEQ ID NO: 386279 - protein, 417 aa, unidentified
MNLISENPFTAFVGIDWADSKHDICIQAADSLQREFGRLPHKVDDIEQWAQSLHQRFSGPIAIALELSKGPIVYALQKYDYFVIFPINPSTLAKYREAFQPSGAKDDPRDAELALELLLTHPEHFERLQPQSTEIRALTTLVEHRRSLVNERVRITNRLRNTLKQYYPQALEWFGRIDTRLFCDFIERWPTLTQVKRARRSTLGNFFNSHNARRADLLETRIEAIKLAKSLTFDEAVISPNKLQAQVLVDILRLLLCSIKKYDKEIAELASTHSDYDLFSSLPGAGPSLAPRLLVAFGEQRDRFSSAAELQKYCGVAPVTERSGKKHWVHWRWQCPTFIRQTFVEWAAQTITKSFWAGEYYHQQREKGSTHQAAVRSLAYKWIRILYRCWQTKTPYNEAVYLKALERRGSPLLKTAA

SEQ ID NO: 386280 - protein, 315 aa, unidentified
MDVLSVGIDVSKATLVIAVSPTGESWSSATTPAAIDALVARLQGLTPTIIVVEATGGYERALVAACVAVGLPVAVVNPRQVRAFAQALGRTAKTDDIDGHVLAEFGARMQPTARAISDGETQALAALVVRRRQLVEMIGMERRRLEQAPPTGKITRDLRNHIRWLERRVEHVDEEIGTAIQASAVWRVQDDLLRSVPGIGPTTARTLLAELPELGRLDRRCIAALVGVAPFNCDSGQQRGQRHIWGGRAAVRAVLYMAAVSGTRHNPVLRAFYRRLRDAGKPAKVALVATMRKLLTIVNTMIKHQTKWNPEVRTV

SEQ ID NO: 386281 - protein, 366 aa, unidentified
MKKISTVAIERMQIFKEHQLTIGLDMGDRTSHYCILNEAGEVIWESNLATTPKGIDEVFSRIPRSRIALETGTHSPWVSRQLAQLGHEVIVAHARNVRLIWDSSRKDDRLDARTLARLARIDPGLLSPVRHRSAKAQIHLTVIRARAALVSSRTALVNAVRGLTKSYGERLRKCGTEQMNRENAHGLSQELRDVLDPLLAEIESLTERIAEYDRRIEQIAKEVYPQVAVLKQVKGVGPLIALTFVLTLDDPHRFGRSRDVGCFLGLRPGRRNSGMSEPQLHISKEGDRYLRTLLVQGAHYILGPFGQDSDLRRWGLRLAERGGKNAKKRAVVAVARKLAVLLHKLWVSGEVYEPLRNNRKAIAAVA

SEQ ID NO: 386282 - protein, 345 aa, unidentified
MKVLKQVLGIDVAQKELVVTLGRLNDDLSIELCAYSVFKNTDKGFLKLSQWIDKLTDKTTKVRYVMEATGVYHEKFAHYLDEKKEDLSIVLPNKISNYIRTLEIKTITDKTCSEAIARFGLERKLDNWKKPKAIYRTLKQLTRERRQITDERTIVKNQLHAEEAEAMPHISSIERSNRRIHFLNTLEKEIKNEIESSIKENKELSKDISNICTIPGISILTAATVIGETNGFELIRSKKQLTSYAGLDVKEKLSGTSVKGKPSISKRGNRYLRSCLHLPALSSIKWDDNFRDQYSRIVAKHGIKMKGCVAVQRKLLELIYILYKNKAVYDKDFESKKIACQHKNA

SEQ ID NO: 386283 - protein, 407 aa, unidentified
MEVLYPRCAGLDVHKETVVACVRLAKGRKVTRTTRTFGTHTEDLLALLEWLQAERVTHAAMEATGVYWKPVWHVLEGSLSLILANAREIKHVPGRKSDVTDAEWIADLVAHGLIRSSFVPPAAIQELRDLTRSRKQLTREHTRHVQRLQKVLEDANIKLDSVITDLMGASGRAMMEAISRGETDAEKLAHLGSPRLKATHQQLVRALTGRITEHHCFMLRLHLAQADSVELAIEALDRRISEQLSPFRGEYERLQQIPGVAETAAAAIIAETGGDMSAFATSARLVAWAGLCPRLDESGGKRKSTRTRRQNWIKTMLVQAAWAAIKQKGSYFRSLFLRLKARRGAKKAIVAVAASMLTAAYHIMRDGADYIELGPDFFRKRNREHTKIQLIRHLQRLGYQVQLQAAA

SEQ ID NO: 386284 - protein, 407 aa, unidentified
MNAVGIDVSKGKSTVAVLRPFGEIVVSPFDVSHSPKELSKLVTLLKTLNGDTKVVMEYTGNYYLPIALFLRNNGFFVSVVNPILVKDYSTKSLTVRKVKTDKKDALKIASFALDRWNELSPFSAQSEARLLLKSYNRQYNQYNKLKIILKNNLIALLDQTFPGANTLFSTPTRKSDGHEKWVDFVLKFSHSECISKKSFSFFLKSYLSWCKKFGYKFSKSKAQAVYDFACNCSPSLSFSDSSALLVSNAIIQLNSINETLASLASEMNKIAATLPEYDSVMSMFGVGSVLGSQLIAEIGDVSRFPNKKALVGFAGLDASPFQSGNFNPQSRSISKRCSAALRKTLFQVMSVVLQRAPTNNVIFQFMDKKRSEGKHFYVYMTAAANKFLRIYYARVTEHLNLFTTTTA

SEQ ID NO: 386285 - protein, 408 aa, unidentified
MARKTALLYVLEKILPHIFYLLESEQNVRNIAKHYIQNIQTGEKTEKGYSLEVIINSKMMTNIVKQAAGIDVAQNELVVSLGRVDQDTTVEIFAYKTFANNLKGFQALKHWAQKAFDSEIKICYVMEATGVYHEKLAYYLSDHQQQVSIVLPNKISNYFRTLDIKTITDKTASQAICQFGLERKLEVWQKPKKIFKELKQLTRERDQLIADRTVLKNQLHAEQAEAFPNESSVKRVIKRIQLINKQELEIKAEIAELIKKDIDLVKKINAITTIPGVGKLTAAIVLAETNGFELIKSAKQLVSFSGLDIKLKDSGTSVKSKPRISKKGNRHLRKAMHMPALSAMRVNDHHKAVFVRLVTRHGIKMKAVVAVQRKILELIYVIYKTGKAFDKDYATTSVKERAEMLQNS

SEQ ID NO: 386286 - protein, 424 aa, unidentified
MNCNQNFKISQVTEGTLVLGIDIGSNTHYARAFDWRGLELSKVFKFKNSFEGFQSFVLWVNDLCCKYNKSKVIAGLEPTGHYWFSLGELLKENNITIAIVNPYHVKQSKELDDNLQTKNDSKDPKIIAKLVIDGRYSFPYIPEGIYGELRVADKLKNDITQQIISIKNKIHRWLSIYFPEYEKIYSSIDSKSGFLLLKETPLPKDIVELGSEGIVERWKQTKLRAVGLDKAKKLEEAAKKSIGCKNITSSARFEIKLLIEDYEYKQNQLNSITEELNKLCEKIPMIKEIAEIKGIGIATAISFVAEVGDIRRFKSAKQVQKYAGLALKENSSGKHKGLTRISKRGRKKLRTILFRATIPLIGFNKEFSSIYNYYIERKDNPLKKKQALTAICCKMIRIFFTILSKGIKYDETKMLHDIKRPVAA

SEQ ID NO: 386287 - protein, 341 aa, unidentified
MSELALVGIDLGKHSFHLHGQDKPGRELFRKKLSRQQMMRFFSNLPACTVVMEACAGAHFVARQLLGMGHQAKLISPQFVRPFVKGNKNDFVDAEAICEAASRPSMRFVSPKTEAQQTLSVLHRLRESLVRDRTKSVNQLHGFLLEFGISLPKGLAIMKRLPSVLAEHELPVRLTVLLQRLHEHFVYLDEQIKALDKELAGQLAEDDLGRRLLGMPCVGPITASLLAVEMGDGKQYGCSRDFAASVGLVPRQYSTGGKANLLGISKRGDKNLRRLLVQCARVYMQRLEQQTGPLADWVRSLLMRRHSNVVACALANKLARIAWAMSVRHTEFAAGPGTLNA

SEQ ID NO: 386288 - protein, 342 aa, unidentified
MEKVSIIGIDLAKRSFQAHGARADGGAAFRKKLSREKVLGFLAEQPRCVVAMEACGSAHHWGRAIGDLGHEVRLVPPAYVKPFVKRQKNDAADAEAICEAASRPTMRFVEVKTEEQQARAMLFRTRELLVRQRTQLINALRGHLAEHGVVAPQGPANVKELALAVEEEKTSLPLLVVELSRVFLEQIGGLSKKIGELEKAMVHEAKHGAASQRLQTMPGVGPITAMAIETFAPPMAVFKRGRDFAAWLGLVPRQHSTGGKQVLGKTSKMGQRDIRRLLIIGAMAVVRWASRKGAPDGTWLHRMLARKPRMLVAIALANKMARSMWAMLTKDEDYRDPAAAAI

SEQ ID NO: 386289 - protein, 419 aa, unidentified
MKRQRVEDLAVLHTSCCGIDVYQKSVSACVLIADRRGKLTSEVREFATTTHELLAMADWLAEHKVTHVAMESTGVYWKPVFNLLDGQVEVVLANAAHLKNVPGRKTDTADCVWIATLLRHGLIKASFVPPRPIRELRDLTRSRTTLMRERGAVVNRIQKVLEDANIKLASVVTDILGVSGRAMLKRICEGEVDATVLAGMAKGRLRSKSTALTFALEGRVSVHHRFLLRRLLAQAEWLEAEVNIFEREIERHAAQFAEQVALLDTIPGIDRIAACALIAEIGANMAQFPSARHLASWAGLCPGNHESASKRLSGRTRHGSPWLRGLIAQVAWIASRAKSTYLASVFRRVMVHRGKKRALIAVAHSVLVIAWHMLTNRTPYQDLGPNYFERSRSEQTKRYTRKLEHLGYAVTLQNQNATA

SEQ ID NO: 386290 - protein, 340 aa, unidentified
MNYKAISVDLAKNVFQVCGIDKRIKPIFNQKIRRNQLETFMAQQSPTTVYMEACYSSNYWGRVFQQLGHEVKLIPAQHVTPFVRGNKNDHNDALAIIEASQRPHIKFVPVKSEHQQEISCLHRIRERLIKNKTAISNQTRGLLSEFGIALKLGKTSFVNGLYEVIDSDKYSSQLKKMMSNQLTEYLALQTKITEIDKELKSSVNTSPNGRLLLSIPGIGVIIASAILATIDKGQAFNNPREFSVWLGLTPRQYASGNNSKMGKITKRGNCYLRKQLIHGARTVVNNAKNKNDQLSQWINNLRNRKSYNQTAVATAHRLARLLWILLQRQESYSPQAVIAE

SEQ ID NO: 386291 - protein, 341 aa, unidentified
MSIVGAFDVHRRQLTFEYLDTGTGELNRGRVVPADREHLRQWLARFGGQDDVHFALEGCTGWRYVVEELAAAGIMPHLAEPADTAALRGRKRHAKTDKTDSRHLRSHLLAGDLPESWIPPGHVLEARAVVRLYKDLLDERGAWHQRIAATLFHQGVPVSASMATPAGRAAVAQMDLSAAGWQAVETGLRQVDRLTGELEPLRRQLQMISRRQPGCRALRATQFGVGAVTSVAIWAELGDVRRFGKSDDVIRHTGLDITVYSSDAKRSAGHLSRQGPGLLRWALYESAKCAARPAAPDYDYYTAFRARRGAGLATLSVARKLARRCYHTLRELGEEALAPAA

SEQ ID NO: 386292 - protein, 353 aa, unidentified
MISELTASPKLYIGIDIHKKTWSVSMRTDLFDHKTFSIPPDSHNLFHYVESHFKYHEVHVTYEACCCGFVAARDFLNFGWRVTIVNPADVPTSDKHQYQKTDSIDSRHLCKQLSLGNLRPIYIRTEQEDLLRSLLTQRDQITKQLRKVKTHIKSFLLLHGIQVPEEYDNSNWSKGFISWLKRLEWTHSTGLISLQSKLRSLEFHHKEYLLIGNELRSYCRKYHKKDYYLLKSIPGIGGFLSAAIIAELGDIRRFQNESQLASYIGIIPGIRQSGNSETKLGITPRSRELLRSYLIEAAWIAIRKDPEIQSYYRKHAHKNPKSVIVKVAHKMVRRILSIIKQEKTYEINTNQKD

SEQ ID NO: 386293 - protein, 409 aa, unidentified
MNAVGIDVSKGKSMVAIMRPFGEVVASPTEVAHTDSALSELAASLKSLKGETKVIMEYTGHYFHPIAHALREAGLYVSAVHAKLIHNYGNNTIRKVKTDKKDAVKIANYGLSNWLELPEYVPADDIRQMLKAFSRQYTKYGKVKTMLKNNFIALTDQTFPGVNNLFSSQPRKSDGHEKWLDFAMKFWHCGCVCALTAKAFSARYQKWCKKEGYQFCQEKADEVYASAYGHVSVIPKNDSSKLLITQAVKQLNAVSESIAVVATEMMRLAEMLPEYPVVLQFFGVGDILGPQLMAEIGDVLRFRNKGSLVCFAGLEAPPYQSGQFESTNRNISKKGSPHLRKTLFQVMTCYLQQAPEGEPVYQFLDRKRAEGKHYYSYMTAASAKFLRIYYARVKEYLNQDCNGSQPEEM

SEQ ID NO: 386294 - protein, 337 aa, unidentified
MRIIRIGVDTAKHVFQVHGVDESETAVLRAQLRRGAVAKFFATLPPTRVGLEACGASHHWARLLRGLGHEVVLLPPQYIKPYVKRGKNDAIDAAAICEAMSRPGMRFVPVKSAESQAALMLLRMRDLLIKQRTMLSNAMRGHAAEFGVVAAKGPLGVAELLQHARSEAAGVPALAQELLALLADQLETIAVRLKALEGQLLAWHRQDPVIRCLATQPGIGPIAAVSFTLKVPDPKTFRSGRHFAAWLGLTPKENSTGGRRRPGRISRQGDQSLRKLLVLGATAVIQFARPGRGSPWLINLLARRPKKLAAVALANKMARVLWAMMASGETYHRPQPA

SEQ ID NO: 386295 - protein, 346 aa, unidentified
MDHDVVIGIDPHKNSWFAAVVDARHQLLGQLRGSANRAGYRELQRLARRWPNIHWAIEGCNGLGRPLTQRLIADQITPVDVPSKLSSRIRQLTTGHGRKTDQVDAYSVAVAALTGADRPHHQDEQAETLRLLSEHRDELVRRRTQVINRLHVLLSQLLDGGAPASLTADQAARLLGRIRRPQGTQATRRALAADLVAEIRHLDKKITAAEKQISDALSESETSLLQLPGCGPILTARIIGRVGSLARFPNADHFASYCGTAPLEVSSGDVTRHRLSRAGDRQLNHALHLIALSQIRFHSPARAYYHRKRAAGKGHREAMRCLKRRLATVIYRHLAADQPPDTHPTA

SEQ ID NO: 386296 - protein, 408 aa, unidentified
MSKTCGIDWSERHHDVAIVDDQARVVGRARVSDDAAGFTRLLELLAEHRDGEDGPIEIAIETDKGLFVAGLFAAGFTVFAINPRAVARYRERYGQAGGKSDPGDAGVLANILRTDRHVHRPLPADSELVRAVKTCARQHQEAIWARQQAMNRLRSLLHDYYPQALQAFPNLAHRAAASVLRAVPTPQTAQRLTLNRVVALLKKAGRRNDPGLAETIRTTLRAPALRQPAPIEHALGVAAVGLIDVITAMSDAITALEAELATVFDEHRQAAIITSQPGLGPVLGARVLGELGDDPHRFTDTAGLRSFAGTAPITRASGRSRVVTSRRICNRRLGDACHWWAFAAITKSPGARAHYDHRRAAGDTHNAALRNLANKLLAKLWHCLQTGTLYNEATAWPAPTDTPEQAAA

SEQ ID NO: 386297 - protein, 447 aa, unidentified
MQILYSRCCGIDVHKDSVTACVLVYSDTPEPQVRKKEFSTHSKGLGSLRLWLFSQKVTHVAMESTGVYWKPVWQALEGHFQLILANPQQVKNIPGQKTDARDSQWLAELLAHGLIRPSFVPPRPTRELRDLTRYRVKLTEERNRVHNRIHKVLEDACIKLDTVASDILGATGRAIIRAIVDGVESPNFLAERAKGRLVGKIPELRLALRGRITDHHRLMLRELMEDLEFVERKIVRLEQTIASRVDLEAAARLCSVPGIDLITAWTILAELGSEMRVFASPHHAASWAGLCPGNHESGGKRLSNRTRKGNRWVRRAFCQAAWGATRQKNCYLAAFFYRNAGKHGIRKAIVATAHRLLVIAFCMLRDGTEYREIGGDYFDQLHPERTRNRLVRRLQRLGHDVVLQPKSDAQPSSAERSSPALDQPVSRRRRGRPCLCAQRNIPCIHKR

SEQ ID NO: 386298 - protein, 433 aa, unidentified
MNTPHPYDLVIGLDRSDRKADLCLIDTHTGQRCSQTIDTAPEALWEWLLQLRQEHPQARVALCLEQPAVHLIAFLEAYEWITLYPINPITLQKYREAFVTSRAKDDTRDADYLADLLYTHYAKLKPWAPEDSQTRAVQQLVFHRRAVVDERTGLTNRLQALLKQYFPQALVLCGEDLWRPLASRFLLKWPSLQALRKAKPASLKAFYYLNGSRSAKLLDQRLALVQKAVPVTDQRALIESFVLRVQLIARQLQLLQQTIGNFDQQIAQTYGAHEDYPIFASLPGAGPTLGPRLLASMGSQRQRFPSNSNLQCYSGVAPVTKKSGGSCYIHRRYLCPKFHKQSFHEYAKESVLWCRWAAAYYLQQRMKGSSHHTAVRALAFKWQRVIWKCWQDRTPYRDQLYEAALRRSGSDLVNLFDRVQLGKSPVKNPAKKN

SEQ ID NO: 386299 - protein, 337 aa, unidentified
MNLFCAIDLHSNNSVAVIIDHQDNVVFQRRLPNDIEVIRSALLPFQADLHAVAVESTFNWYWLVDGLQAAGFELMLVNPQAVQQYKGLKHTDDVSDARWLANLMRLGILPTGYIYPFEERTLRDLLRKRLLLVRERAMHLISAQSQIWRSTSQRVDSTELKRAQPELLKVFEHPNLRRALHCHLVMIRSLNEQIHMLERQISQQMRFNTAFQMLLTVDGVGPTLGLTIALETGDITRFPTVGRYASYCRCVNSQRLSNGKAKGQNNTRNGNKYLGWAFVELAHSIIRHNKTAHRFYQRKRAQRNGALATKALAHKMARACYYVMRDEVPFDQTKLFA

SEQ ID NO: 386300 - protein, 369 aa, unidentified
MKRNIRYVGLDVHKNTIDVAIAEDCGEGEVRSYGKINSSLEALNKLIRKIKAKGSKLQFVYEAGPCGYEIYRYLTSKGHTCSVVAPSMIPRRSGSRIKTDRRDAVNLVRLFRAGELTSIYIPTQEDEAMRDLLRCRDDIRRLERKSRQRLLAFLLRHGFDYPKKNWSKGHLNWLAGIKPDHPAQQIVLQEYIDAAQECTDRLKRITEQIQALVPQWSRAPYVKAYQALRGVSLIVATTVASEIGDMNRFENPKELMAYLGLVPSEHSSGNTVHRGSITRTGNGHVRRVLVEAGWTYKLRARKTRTILKRQEGLPKSIQDISWKAQTRLCARYQRLFAKGKSKQTIVTAIARELSAFIWAIDREVQQTMA

SEQ ID NO: 386301 - protein, 390 aa, unidentified
MRKPKQRKPNDLSRSLAALDVDHTLVAVVEMSLSSWLVAGIVPGVERQPLKKLKTDACALLELLHRWRTEAVRAGHKITRVAVAFEAGRDGFWLARWLKAHGIEAHVIHASSIAVSREHRRAKTDRLDTDLLKRSFLGWLRGERDHCKTVAIPTLEEEDAKRPNRERESLVGEQSRLVNRMKATLVRLGIRGFNPKLKRAAGDLEALRTPEGAPIPPNTLAELKRDMERRRFICDQIRKIEQARIERLQRAPNTGPNAMVRLLARVIGIGVETAELLVHEVLLRNMRDRRAVARYGGLTGSPDRSGIISREKGIARSGNARVRRGMVQLAWRFLLFQKDSALAQWYRHRTENAPRSRKTMIVALARKLLIALWRLAREGVIPEGIIMRPA

SEQ ID NO: 386302 - protein, 368 aa, unidentified
MKKNITFVGLDVHKNSIDVALADAGREGDIRFYGTIGGDLESLHKVVRKLQSTGSELRFVYEAGPCGYDIYRALTTQGFDCIVVAPSKIPRKSGDRIKTDRRDALNLARLHRSGELTAVYVPTAEDEAMRDLTRSREDAVKALRVARQVLLSFLLRHGHRYSGQSYWTKAHQNWIADIKMPHRAQQIALQEYVHAAQEQLERVQRLTRQIQELVPSWQLAPLVTALQALRGVSLIIAATTVAELGDLTRFDSAKQLMAYLGLVPTEHSSGSTTRRGSITKTGNGHVRRALTEAAHTYCHPARESRVLLARLDGLPQEVRKIAWKAQVRLCGRFRKLLVRGKNRNTVITATARELAAFMWAIACATLPA

SEQ ID NO: 386303 - protein, 341 aa, unidentified
MNTTTYGLDIAKTVFQLYWVEPSGKCFNRRLNRTKLIEFLARREPGRVALEACASAHWWARQLQGLGHKPVLLHARYVRPFVQTNKTDAADAKAIWTAAQQPGMREVAPKSETQQCVLAVHAMRSLRIKMRTMLVNQLRGMLVEFGIHFRRGRRAGLDEIVQSLQDIESRVPPKLFEAVHQQLRSLESLDHEIAEYDRQITAWGRQDRACQVISAIPGIGMLTATALVATIGEARTFKSGRQLAAFLGLVPKQAGTGGKVRLGGISKRGNPYLRTLLIHGARAVLGHLRRKNQGGWSQALAQKRPTNVVAVAMGNKTVRTVWALLVHQRTYDRDYVSVRPA

SEQ ID NO: 386304 - protein, 337 aa, unidentified
MKHTVIAVDIAKHVFQVHAVDAQTGEIERVKLRREAVREFFARRTPSLVAMEACGSAHYWARELRGLGHEVRLLAPKSVRPFVRSNKTDAADAQAIWTAIQQPEARLVAIKSEAQQAILTLHRMRAQLLKFRVMQSNALRGFLCEFGQVLPEGHRAMAKAWPTALAALAEQLPAMLLDSLREQWRRVQLVDSEMAALERRLAGALRVNASCQQIAAIPGVGLLTATAAVAAMGDPATFKSGREFAAWVGLVPRQTGTGGRVRQLGLSKRGDTYLRTLLIHGARSILARGKPSPWLEALLRRRPYSVAVAALANKLARTIWAVLARGRPLDPAAFGVA

SEQ ID NO: 386305 - protein, 344 aa, unidentified
MTTIDYIGFDIHKKTISFCAKAPDGAILEEGTIPSLRNRLLAWAKARPRPWIGAMEATLFTGWIYDFLKPLAQELKVAHPPMLKAIAVAKKKNDKVDARMIADLLRCNLLPECYMAPVAIRDLRRVLRYRNLVVRQATRIKNRIAGLLMETGTAYNKERLHGKAYFSELLGSLQEMPPSVVELLKLSRGQLELFAVIQRRLLKGLNEHPDLSERVMRLQTIPGVGEILALSWALEVGEVGRFASIGQAASYCGLTSAQHSSAGKEQRGPISKQRNKHLQTILIEAAKLAPRRNPQLAVVHERELQRGDRNRATLAVARKLVAYLMAVDKGGKRFAMRARTEVAA

SEQ ID NO: 386306 - protein, 346 aa, unidentified
MSKHNVPAGDICALLTRFSDLQQKAVARTGKSFPIIVIQEAGLDGFWIHRVLQKEGIESHVVDPASVATSRRRRRAKTDRIDGEALVRTLLAYKRGEPRVCAMVKAPAPEEEDRRRLCRERKVLTNERVLHVNRIKGLLFSQGVSDYEPLRRDRRQRLDELRTGDCHPLPPHLKAQINRELDRVELLLEQIKAVEAERDALLAPQQVATPVPASMLLAIKGIGPEFAAVLWSEGLFRHFDNRRQIASYAGLAPTPWQSGSVDREQGVSKAGNPRLRTALIQLAWLWLRHQPQSALAQWFQERVRRNGGRLKKMTIVALARKLLVALWKYVSAGVVIEGAVMKTVKQ

SEQ ID NO: 386307 - protein, 340 aa, unidentified
MTITTIGIDLAKNVFAVHGVDQNGKTVLVKSRVTRAALPGLIAGLPPCVIGMEACSGAHYWARLFRQYGHEPRLMAAKFVSPYRMAGKSGKNDAADAQAICEAVRRPHMRFVPVKDESQQAMQCLHRTRQGFIEEKTATYNRLRGLISEFGVIAPQSTDALRHMVSAQKNSLPLQVQQCVDDLLEHVDRIEANITEYDQILSRMARTDHRSQRLMKLKGVGPTTACALVACIGNAHDFKNGRQLAAWLGLTPSQYSSGGKSKLGRITKAGDSYLRTLLVQGARSVLIGAEKRTDSFSRWVCSLVERRGYWRAVVAIAAKNARLCWASLHYGDDFRLYSAS

SEQ ID NO: 386308 - protein, 402 aa, unidentified
MNAVGIDVSKGKSMVAIMRPFGEIVSTPFEIKHTSSDINSLVKLIKSIEGESRIVMEHTGRYYEVLAHQLSEANLFVSAINPKLIKDFDNDSLRKVKTDKADSVKIARYALDKWQNLKQYSVMDELRNQLKTMNRQFGFYMKHKTAMKNNLIGILDQTYPGVNTYFDSPARSDGSQKWVDFASTYWHVDCVRKMSINAFIDHYENWCKRKKYNFSKSKSEEIYGKAKELVPVLPKDDITKLIIKQAVDQLNSASITVESLRTLMNETASKLPEYPVVMAMKGVGTSLGPQLMAEIGDVSSFTHKGAITAFAGVDPGVNESGSYEQKSVPTSKRGSSDLRKTLFQVMDVLIKTHPQDDPVYQFLDKKRAQKKPYYVYMTAGANKFLRIYYGRVKEYLASLPES

SEQ ID NO: 386309 - protein, 349 aa, unidentified
MLIIGCDFHSRFQQIAMVDTETGELIERRLEHGNGEAKKFYAELQQPGRVGMEATGYAQWFEGMLAKLGHELWVGDAAEIRAAMVRKQKTDSRDALHILDLLLTNRFPRIWIASPEERDVRQLLRHRHKLVCLRTSLRNQLQALAMGQGVCRKKKLWASSGRAELEALGLDPWARRRRQELLEILDRLDPSLAELDRAVAQEAEHRPAARYLMQQPGVGPVTALMFVLTIGPIERFQRSKQVVSYLGLNPRESSSGGRQRLGAISKQGNSLARFLLVEAAQTASRYDEGLRRDYQRLKFRRGSAVAKVAIARKLAVRRYWKLREYSSPAPSTRTQGSPETSVVGASLSS

SEQ ID NO: 386310 - protein, 340 aa, unidentified
MGEVSTVGIDLAKSVFQVHGADTSGVVVFRKKLRRDQVLTFFSTLPRCVVAMEACASAHYWAREIALAGHETRLIPPAYVKPFVKRQKNDMADAEAICEAAQRPTMRFVQGKSAQAQASAVVFRTRDLLVRQRTQLINALRGHLTEFGYVVRQGVGHVGQLVAIVRDPTSDVPAEARPALAIIAGSLEALQAQIALLDREIAQRAKDDAVAKRLMTIPGVGPVIATALVALAPAASTFRRGRDFAAWLGLVPRQHSSGGKERLGRTTKMGERSLRRLLILGASSATKVAARDPDKAGAWLAGMLSRKPRMLITVALANKMARIVWALMAHGGSYRAPATA

SEQ ID NO: 386311 - protein, 488 aa, unidentified
MLWIGDDWAEDHHDVEVQDDTGRKLAAARLPEGVEGIAKLHDLIARHGGKDLEPSDVTIGIETDRGAWVQALIGAGYRVYAVNPRQAARFKERYATSGAKSDKGDAHALADMVRIDHAQLRPVAGDSNQAQAVKVVARAHQTLIWERTRTFQRMRSALREYYPAALIAYADLALTSTDALELLVKAPTPQAGAKLTRTQITSVLARHRRHHRDAKANTIQTALREKQLALPEPVTAAYAATVVAHARILIALNEQIQAMEAQVKAHFLAHPDAEIYLSMPGIAEITGARVLAEFGDDPTRYTSAKARKNYAGTSPITRASGKVRTVQARFVRNNRLADALQRQTFCALRSSPGARRYYDKQRDRDLEYNPALRQLGNRLVGILHGCLKTRTRYNEATAWAHHTPPTCARLTRNEMRCLTRSNGARWYRQSSKTACSRRSSVARSLCPAVTTGDHHPYGHCGRESVRAGPSGGADVGRGLPLIVWRRPL

SEQ ID NO: 386312 - protein, 373 aa, unidentified
MRFYNGQHPFYCGIDLHARSMHLCILDQAGAVVFDRNLSCRPETFLRAIAPFRDGLVVGVECMFAWYWVADLCKHEGIAFVLGHALYMKAIHGGKAKNDKIDAGKIARLFRGGTFPLAYAYPKGMRETRDLLRRRTYLVRKRAELLTHVQILNAQYNLAPFPKKLSFATNRTEMNIAARFADASVQKSAAVDLAVVDRLDELIGELELYLTRTAQVDDVQTYHRLRTIPGVGKVLALILLYEMHDVQRFERAGQFLSYARLVRCAHESAGKKLGSGGKKIGNAHLRWAFAEAACLFLRSSERAKQWKQRQAAQRGEGKALAILAARLGRAVYHMLRKREAFDEERFWQGGTRRNGTGSSSRSPAEACHAGTMT

SEQ ID NO: 386313 - protein, 338 aa, unidentified
MELSVIGMDIAKNVFQLHCVDRQTGEIERIKLRRNEVLPYFARRTPALVAMEACGGAHWWARQLQQLSHPVRLLPAKAVRPFVLRNKTDAADARAIWTAVQQPEMKTVAIKTEYQQSILALHRMRAQLLKFRHMQTNAIRGLLLEFGHPLPESYLALRKAFPTVMATLDKQLPGILIETLREQWARVQSLDNEIALIEGRLKRALAETPTCQMISDIPGVGLMTATAAVATMGDPASFKTGREFAAWLGLVPRQTGTGGRIRQLGISKRGDAYLRTLLMHGARAIIARRTYSDWVAGLIARRPYSVVIAAIANKLARTIWAVLATGKRYDGAAFAAAI

SEQ ID NO: 386314 - protein, 364 aa, unidentified
MTEHITHVAFDMHQDSITAAWLRPGATTPEVRKIPNEAKPLRRLVEQVLKAGPARACYEAGPLGYEPQRQLAAWGLPCEVIAPSLIPRRPGVRIKTDKRDAKKLVGLYRAGELTAIRVPTPAEENARELVRCREVAGEDALRAQHRLRKFLLRHGLRCPAGRAGSQAWWRWVQALRLSDPPAQRTLDEYLLAATTGRARWKALDPEVAALAAGEPWVRPVGWLRCFRGIDTLTAATLVLEVFDFRRFGTPRPFMSFVGLVPSEASSGVRLRRGSITKTGNAHLRRVLVEAAWHYQHRPGPSALIRARRAGQPPAVVAVGEPAEVRLHRRFARLVARGKLRTVAATAVARELCGFLWAAMLAAPA

SEQ ID NO: 386315 - protein, 452 aa, unidentified
MAKRQSKKQKSKGVQLHVLQANAAGIDVGASEIYIAVPEDRSDKPVRRFETFTDDLHQAAKWLKKCGIKSIAMESTGVYWIPVFQILDAYGFDVVLVNARHVKNVPGRKTDVQDCQWLQYLHSVGLLRGSFRPAQEICAVRSLFRHRDAMIKSSSSHIQHIQKSLTQMNLQIHNVISNIVGVTGMAIIDAILGGERNPETLAQLKDRRIKADHQTIAKSLTGDYRAEHLFTLKQSVQAYRNYRQMIQDCDAEIERHLKEFESRINPDKPTGPPSKPARKKIRQNEPSFDLKTHMHRILGTDLTQIDGISDLTAHVYFTEVGPDLSKFKTDGHFCSWLGLCPNNKISGGKILSANTRPVSNRLAQALRISANSLWNSKSYLGNFFRRMRARHGAPKAITATAHKLARIIYHLVKNQKAFDESVFAQEEKNHQDRLKKRLISQAKSLGLQVVPA

SEQ ID NO: 386316 - protein, 461 aa, unidentified
MFIEQNTRQARSARSETKTIRVMTNPLDLPIINPHAAGVDVGSEKFFASVAGKEPKVYLTVTEQMKKLCEDFKSEGVNTVAMEATGVYWINLYGVLEEAGMKVMVVNGAHCRNIPGRKTDMKDSQWLAVLHAHGLLHGGFVPPEDIRRLRDYVRVRGDLVSMASQHVQHMQKAMDRLNVKIHVVISNITGVSGMRIMKAILEGKRDPEKLVELCDDQILKTKRAPMVEALKGIWRKEHLFALELAMDSYESYQKQIARCDDRIAEIIKEISANKPTPDLGKPKELRNNAIIIPELQKDIAQIYGKDLTRLPCLNESTVTLLLAEIGSDMSKWKDWRHFGSWLGLAPIVAQSGRRRKREKKHLTRAAQILCRSVQCMAVGKHTWLASFYRRIRAKRGAKVAIKAAAYKLAKLIYLVLTQGWEYVEQGIVQYEKSLREMQQKVLRKLAKKLNYTLIANDESNS

SEQ ID NO: 386317 - protein, 367 aa, unidentified
MRVSIGCDYHPSVQQIAWVDTETGECDEKRLMHSDGEAERFYRELNRKGVQVRVGMEATGHSRWFERLLAELGFELWVGDPAEISARRVRKQRNDRRDAEHILKLLMEDRFPKIWTPSPENRDVRQLLLHRHRLVGMRTRVMNQLQAIAMNEGMRRKKGLWSKKGRARLESFSLAPWASRRRQELLELLDRLRPMIDELSKAIEQEAEQRTEVRLLMTHPGVGSITALAFVLIIGTPERFHCGRQIASYLGLIPCEDSSADHWRLGHLSKQGNALMRFLLVEAAQTVARCEPEWRQYYFHLVQRRGRAIAKVALARKLAVRLFWMWRKGQDYQQVKKFGSHTGQLETPNGVKSITVKLIEHPAPSMA

SEQ ID NO: 386318 - protein, 338 aa, unidentified
MIMYAGLDVSDKSTHVCVVDADGTVLRRDVIASDPEVLAKWFSKHCSGLARAVLETGPLSTFLYHGLVERAVPIECICARHAKGVLATRVNKSDVHDAEGLAQLARTGWFKRVHMKASATHIDRAALRIRTQLITARNSMANQMRGLLKLFGLRLGAEKTPGRRADRLATLYRQRPDLEPLFAPLVASMEAIEKQLHASNRLLEERAAADPVCSRLMSVPGVGPITSLTFTASIEDPRRFARSEDVGAYAGLAPRRSQSGERDVRGNISKAGDPMLRRALYEAANIMLCRVQRPFAMQIWGTRIAEAKGQKRARIAVARKLAVLLHSLWLNETEFRWA

SEQ ID NO: 386319 - protein, 352 aa, unidentified
MSKIYAGIDLHKTQFTVCILRNGLYEKEGQYPTSKEGYKAFVSDIQAMDDPPDEVELAIESTGNARHFKTVMEDAGFKVTVVNTLKFKVVNLSTRKTDKNDARTLADFLSKEMLPTSHLCSPMNEGIRRILKCRSLMVQDCVALKNQAHAIMLAYGKVTKPTQFQSRKNRSSLLGSLLKRDADLKYSLETLFETLNVIEGQVRNMERRLNEITKADTNVRLLMTIPGIGIVNACTISAYIDDIGRFETAGHFSSFCGIVPWVQSSNESSYYGRITKRGPQELRTALVQCVVAMIRMGDKTRNTRLMKQYAVLKENKSSGKAIIATARKLSTIIYVMLRDSVPFDISRLSVTC

SEQ ID NO: 386320 - protein, 402 aa, unidentified
MLDVTCGVDVHRDSFVATILSSGGCRTRKFEKDVEGIEEFKTWLRDNRCSAVVMESTGVYWIPLYAGLEEEFNVKLANAKRTRKIDGRKTDQSDSEWLAYLLRADLIKACYVPDRKIRVLRELTRLRTKMVQNRTDYKNRVHKVLQRCNIRLGSRLRSVFGKSGMEVLEGLMAGKRLNEIVSQSRSRVLKERLSDLEGVVRNSLDEEDVFVLKRCLRMIERLDEELSEVDVRIASLMGSCKDDLRRITGVPGVAQVSASAILAEIGDAKRFENGKKIASWAGLCPSVYQTADKNLTGRVKQGSKNLRRMMVQVAHVAARSGDSRLRCFYLRVAARRGKKKAIVALARKILCIIHHLLVNGEDYVEKGFVKSPRLRVRALSHVSLEEMTEVLRASGYVVQSRG

SEQ ID NO: 386321 - protein, 413 aa, unidentified
MPQKTDYVYVGMDIHKETHTAVLMTYMEERLGKIKITNNIAGYRRLQAYVEKYRRNLIPIYGLEDVSHYGRDLAIYLLDQDYTVKEVNSALSFMERNSYATVKKSDEWDAQCISAVLSRRSETLPDANPQDYYWTKKHLVGRRDALVKNTASLIQQFHEQIQKQYPGYKQFFHDIECRTSLAFFERYPSAGHLQGVTVEELGAFLREKSHNTCSDKRAELILNLVEQEQTKEREYQSGRDLILQSISRQIYFNQQEMKQLERMQGELLEELGYHLETIPGISTVTASALVAHIGNIKRFKNADKLANYAGVAPICHSSAGKGKDLQNKSLGNRNLYNVLYLLAMQQIQINRDGKARNPLLRAYFECKVSHGKTKIQAMICIMRRLVSIIYSMMKNRTPYRMPEIEESKDQVIS

SEQ ID NO: 386322 - protein, 346 aa, unidentified
MMIIGCDFHPSWQQIAWLDTETGETGEQKLVHASGDAKRYYAQVPGPALIGMEATGNSQWFVELAQELGHQIWIGDAAQIRASYVRKQKTDRRDAAHILKLVVEGRFPKLWTPDQEQRDLRQLVLHRHKLVEIRSRVKNELQHLSLNKGMQRKAKLWSQAGQKLLRELPLQPWATCRREDLLGLLGMLNEQIGKLDEAVQQAADEHPQARLLMTQPGVGPNTALAFVLTMGDVSRFPRGKQVASYLGLIPREESSGGRQKLGAITKQGNRLVRSLLVEAAQIAVRLDPGMKKQYLHRCHQKTKGVAKVAAARRLAVRLYWMLRTEKAYPEIVRIESSPRVALVGAS

SEQ ID NO: 386323 - protein, 329 aa, unidentified
MNDISEDRQWIGIDVSKRCLDVYIRPLGRALQVTNSELGLVELRQQLNGLVIGLIVLEATGGYQTLAARTLMEQGYPTVVVNPRQVRDFAKATGRLAKTDKIDAEVLAHFADAIRPEVRAMASEDGQRLQALVTRRQQLVEMRSAEKTRQRTARPTVQANIDTHIEWLDEQIKALDSDIEALIQQSEQWQRTRDLLTSVPGLGPATIGVLVSQLPELGRLPAKPLASLCGLAPMNRDSGQMRGKRQIVGGRAAVRTALYMATLVATRHNPVIRTFYQQLLQRGKPKKVALIASMRKLLTILNAMVAHDTLWQAPACSLPPAATPVAATT

SEQ ID NO: 386324 - protein, 344 aa, unidentified
MSKHSVPGGDFAGLMERFAQLQEKARLRTGQSFRIIVVQEAGLDGFWIHRALQNEGIESHVVDAASIATSRRRRRAKTDKIDGETLVRALLAYKRGEPRVCAMVKAPTPGEEDRRHLCRERKALTAERVRHVNRIKGLLFSQGISGYQPLRRDRRQRLEELQTGDGRAFPQHLKALVNRELDRLELLLKQIKTVEAARDALLAVGQTAKPAPAAMLLDIRGIGPEFAAILWSEGLFRHFENRRQIAAYAGLAPTPWQSGAVDREQGVSKAGNPRLRTTLIQLAWLWLRNQPRSALSLWFHERVSRNGGRLRKTTIVALARKLLVALWKYVTAGVVIEGVTMKVA

SEQ ID NO: 386325 - protein, 434 aa, unidentified
MQTEFAALVAIDWADRKHAWALQISGSPERETGTIDHTPEAVEVWASELRLRFGGQRIAVALEQSRGPLVFTLTKYEHLVIFPVHPTVLVNYRKSFCPSGAKYDPSDPRLLLDILMLHRDKLRQLTADTSETRTLQFLVEERRKLVHEKTRYSNRLTAHLKMYFPQALAWFDEIGSNIAAEFLERRPSLDKLQRARPATIERFFIDHNSRDRERITERLEQIRKAIPATTDAAVLTSCSAAVAAWAALLKQDLAAIATYDDKIDALARAHPDYALMNSFPGAGPALTPRLIAAKGSQRERYETAHEIECYSGIAPVVASSGQQRWVHWRWACPKFLRQAFHEWALHSIAYSQWAREYYEQQRAKGKRRNTAIRSLAFKWIRILFRCWKERKPYDEAVYQRTLDAHRPKKQPSAQPVELQWKNVAGLSKIVVSEA

SEQ ID NO: 386326 - protein, 432 aa, unidentified
MDQIVERPGALDVHKASVTACVRVPGHEGGRVQEVREFKTTVRGLLGLRDWLAGHGVTTVAMEATGVYWKPLFAILEDDFELLLCNAAHVKNVPGRKTDVGDAQWLCRLLECGLLKASFVPPKTVRELRELTRRRKTLVRDRQREAGRLHKTLEDTGIKLDCVATDILGVSGRAMLKALIDGTRDPAVLAELARGRLRAKLPDLREALEGRFTIQHALLVGGILRHIDFLDAEIDALGTAIEAHIDAQSKQAREAKQAGADAGAENPFDSAVQIACSLDGIQQRTAENLIGEFGTDMSRFATDKHFVSWAAQCPGNHESAGKRRSGRSRKGPEHLNRALNDAAMGAIRVKDGHFARKYRRVKARSCHGVALGAVKHSILIALYHMLKTGELYKPPTPNPDAERRARERATKRLLAQLEGLGHTVTLQGAAAA

SEQ ID NO: 386327 - protein, 349 aa, unidentified
MNKHKIIGIDLAKRVFQVCVVDTHSSRVQVNKELKRHQVLDFMRRQPACRVFMEACGGSHYWARQLQALGHTVALISPQFVTPFRKGHKTDANDALAIVEAGLRPDMRFVPLKSVEQQDIQSLHRIRERYIHQRTQLINQVHGLLQEYGIISGRGQKALKQRVWLALEDADNELSMLMRDLIAEQMAELDRLNERIQSLDKRVEQMSRAVMPCRQLLAIEGVGPVVATQLYSALGNGDAFKKGRQASAYLGLTPTQHSSGGIAKIKGIGRTGQISLKAALIRGAHSVINTVGDKQDAKSRWLRSLVARVGKNKAAVALANKTVRTAWAVLHSGQSYCREFNDGSALMVS

SEQ ID NO: 386328 - protein, 356 aa, unidentified
MYGLKHQKEKRSMEHFAGLDVSVKETSICIVDDTGKIVREVKVASEPDALLQVLKNNAYHFKRIGLEAGPLSQWLYSAFAEVNLPVICVETRHMRAVLKAQINKTDRNDARGIAQMMRAGLYRPVHVKTLRSQKLRMLLTHRKLLQSKAIAIENDLRGTLRNFGLKVGIVGKLKFETRIRELVENLPDLAVLVEPLLVVCRVLREQIAVLHRRLLVIVRDDDVCRRLMTVPGVGPVVALTFRATLDVPARFRNSRAVGAALGLTPGKYQSGESDHTGGISRCGDEMMRVMLYEAAQVMLVRSTRWSWLKAWAMQVARRRGMKKAIVALARRLAVIMHRIWVDGTEFSWSRQEAAEA

SEQ ID NO: 386329 - protein, 396 aa, unidentified
MVNNSLIGVAGGGEASGAKPREKRSAASRADTGRRREFVSVRASEAVTKQEPRRPRGNSPNSRLNRQQPARLASSHSQERESTMSESIYVGIDIAKDTFCVAAYPNVLKLDLPNTPQGHHQVCQVLQKHPVALIVMEATGGYERPLTAELLAASLPVVVVNPRQVRDFARGIGQYAKTDPIDAQLLAQFAHMVKPAAKTQATPQTKELAELVRRRRQLNDLRTQESNRLPLICHVKVKKSIRKMIKTLDFQILEIDQLIQDQIESDENFKNKDRIIQSTPGVGPQTSAMLIGSLPELGLLNRQEITALVGLAPWDRSSGKWDGKAHIWGGRKEVRCGLYMAAFNARHWNPIIRELAIRLEQKGKPYKVIMTACMHKLLIILNTMIRNQTVWTQKIS

SEQ ID NO: 386330 - protein, 292 aa, unidentified
MSDVKCIGLDVHKTSISAAVLDESGKLVMQAVFMTKAAAILGFLGGLSGSLRVTFEEGTHAAWMHSLLQSQVSEVRVCNPRKNALLKSGNQSDQIDARQLAELLRSGMLSRVYHDDTQTLTLKELGRSYRSLTDDTTRVMRRLKALYRSLTIASDGKKLYTRCRREQWLSQVQQTGQGYRAERMFEQLDSLQALRRQIRCDLIEEGRKHAATAVLSSIPFVGAIRSALLIARVQTPFRFRTKRQFWADCGLALETRSSADHQVIDGELRRKSKPVFIRGLNLNHNHDLKNIF

SEQ ID NO: 386331 - protein, 337 aa, unidentified
MDHFVGIDLHSNNSYIAVIDTDNNRTFKKKARNNLSEILKLLAPFKKQIKGIVVESTYNWYWLVDGLIENGYQLHLANPSAIKQYEGLKHSDDTTDAFHLANLLRLDILPEGYIYPKHERAVRDLLRKRMHLVHHRTAQILSFENLVARNLGSKMHVSTINKMNEEDLEDLFEDEHLILSGKASIATIHFLRSRIIQLEKAIHKAAKLKKEYKLLKTAPGIWNTLALTIMLETGPIERFKKVGNYASYCRCVQSNRFSNSKSKGKGNRKNGNKYLSWAYVEAANHALWNYDYVKRYHQRKMAKTNNVVAIKAIAHKLARACYYIIRDQKEFDPLKAF

SEQ ID NO: 386332 - protein, 350 aa, unidentified
MLMIGVDYHPSFQQVAFLEEETGECGEQQLNHSDGEAERFYRNLHQRGIRVRVGMEATGYSRWFERLLAELGFELWIGDPAEIKTRRVKKQKTDRKDAQLLLRLMREDNFPKIWVPNPENRDLRQLLWHRHRLVQMRTRIMNQLQAIAMNEGKRRKTKLWSEQGRAELEKLRLAPWASRRRQELLELLDRMDPVIQELTAAAEQEARKHPDVARLMTHPGVGPLTALAYVLIIGTPERFHCGKQVGTYVGMIPSEDSSGGKQRLGHISKQGNSLLRFLLVEAAQAAARINPEWRRRYVHLAMRRHKSIAKVAMGRRLAVRLYWMWRNGCEYSPSLEFGSYAGQLGTGHGG

SEQ ID NO: 386333 - protein, 391 aa, unidentified
MSMYFVGIDISKYKHDCCIISAADQKVVSKFTFQNDKAGFEELLTVLNSLSNPEDIKIGFESTAHYALNLELFLENAHHSFMEVNPVFIKEYKKSTTLRRTKTDSVDCESIARWLMTVEYKPHSKGFYHSYSLKSLTRLRDRLIRQRSFYLVKITNVLDHTFPEFKPFFNERLSKTALYLLENYGSAEKMARMNSASYDKLRCISRGKFSIQQFLRLKELAANTVGVNNSIFDIELNSLLTLYKSLVKEIDTLESEIHKLIEEVHPHYLTILGIDPISAAVIYAEYGDISNFSNPGQMLAFAGIEPGVNDSGTESHGGRMVKHGSSQLRYVLLNACLPLIRFDLTFATYYAKKRAEGKKHRVAVTHVAKKLIRVIYALERQDIDFNTQKLR

SEQ ID NO: 386334 - protein, 342 aa, unidentified
MQQYVGLDVSQKETAVCVIDDAGRIVFEGKARSEPGALAKVIRKRAPHALRIGFETGAMASWLWHELKRIDLPVVCIDARHAHAALSVRINKSDPNDARGLAELMRMGWYREVRVKSAESQVVRSLMVARARLVSIRRDLENQVRSLLKENGQLFPRAIGRQFRDYVRELLSDSHPLRAIIESLLVVHERASQEQATLDARVRTLAKSDQTTRRLMTVPGIGVVTALTFRHTIDDPSRFRSATSVGAYLGLTPRRKQSGELDLTGRISRWGDRLLRTYLFEAASVLIHRTKRWSPLQAWRLRLVKRIGLKKAKVAIARKMAIILHCIWSDGTEFDWGVPKAA

SEQ ID NO: 386335 - protein, 355 aa, unidentified
MDSVKYIGMDVHKEAIVIAVLNSSGKLVMECVIETKANTILDFLKGLRGSLHVTFEEGTWAAWLYDLIKPHVTELMVCNPRRNALLKEGSKSDRIDARKLAELLRSNLLKPVYHGEHGVRKLKELARSYLAISKDVGRVMSRVKAIYRSWGIPCAGKQVYAPRYRPEWLGKIQEAGVRRRAEFYYQQFDALRTLRQEVRRELLAEAQKHDAWKLLREIPFIGPIRAAVLIALIQTPHRFRTKRQLWTYSGFGIETHSSAEQRFINGELRRAKKPVSIRGLNRNHNHDLKNLFKGAATVAAAKAGPFKEFYDALVAKGIRPEMARLTLARKIAAVTLVVWKKGVRFDAKHLKPQTA

SEQ ID NO: 386336 - protein, 448 aa, unidentified
MSTHQSAAELAIVHPDAAGIDIGAQFHVVAVSPERDDQPVRSFRSFTQDLHALASWLKAVGITSVAMESTGVYWVPAYEVLEAHGFEVFLVNAREAKNVPGRKTDVNDAQWLQKLHQFGLLRASFQPHQELAALRSYLRQRERLLEYAAAHIQHMQKALMQMNLQLQHVVTDMTGATGMRIVRAILAGEHRPEVLASFRDSRCKASEETIRQALIGNYRTEHLFALQQAVTLYDCYQEQVAQCDQHIEQVLHDLATCHTAPPKARHRCMRQRNGFAFDARVALYAMLGQDLTRIHGMGPYLALKLVAECGNDMTRWPSAKHFTSWLCLAPGNKISGGKVLSSKTRRSSSRAAAALRLAATTIGKTETALGAFYRRLSARVGKAKAVTATARKIAVLFYNALRYGMDYVDPGAGYYEARYRERVVKQLTRRAASLGYELQAMTEPVGVS

SEQ ID NO: 386337 - protein, 347 aa, unidentified
MRFYTTSHKHYCGIDLHAKTMYVCILNQEGDVVLHRNMKTKPEIFLRAIEPFREDLVVAVECIFTWYWLSDLCVEEGIHFVLGHALYMKAIHGGKAKNDRIDSLKIATILRGGMLPQAYVYPAEWRSTRDLLRRRLRFSRERARLLSHVRNSHYQYNLEEPKGRVTYRANREGVAEQFTDTSASKSIATDLELVGHYDTLIRDLELYLTQRIKGHDSDGFYLLRSVPGIGKVLSLTILYEIHTIDRFESVGDFASYSRLVKCEKNSGGKKQGTSGAKIGNVHLKWAFSEAAVLFLRGNPQGQKYLKRIENKHGKRKALSILAHKLGRTVYYMLKRKQTFSMEAFLKV

SEQ ID NO: 386338 - protein, 362 aa, unidentified
MGLDVHKDSIAVAYAPEDRGAEVRSLGAIGARQCDIDKLIRRLESKGAALVFVYEAGPCGYGLYRYLTGKGFACHVVAPSLIPRKAGDRVKTDRRDAMTLARLRRSGDLSSIYVPGIEDEALRDLSRGRDDAMQDLKRSKRRLKSFLLRQDIRYEGRATWNAAHLRWLSEVVCPTPPPQIVFQEYLRAVSEQHERRQRMEHELHEAVQGWRLYPMVQAIQALRGLELTSAVIVMTELGDLTRFDNPRQLMSYLGLTPSEYSSGARRHQGGITKAGNSHARRALVEGAWAYRYPAKVSRHLQLRLETLPAEVQAISWKAQVRLCKRYRQLTARGKHVNQVVVAIAREMAAFAWAIARLVPLAS

SEQ ID NO: 386339 - protein, 437 aa, unidentified
MSGIKVVRFNCCGMDVHKDIIVATVAITNQDTLITEYFQKSFGTLNDDLDELVQWLLSFNCSDVCMESTGKYWIPIWNVLEEHLFHVCLVHPKYTKAIKGKKTDKRDSKWITDLFKCDLVRGSFIPPADIRALREIARYYFKLVNMRSSETNRYQNCLTVSNIGIGSIFSDVNGKSAKKIMSFLLNCEDSSIIEEKDLLSLVHKSCKKKDKILSAVKNSRLQDDQRFKIQHISEHQKELANHIEACTIEMITRASIYFDKFFHITGIPGISVISAILIISEIGVDMSIWESSKQLCSWAGLVPASNESANKKKSTRITKAGQYLKPLLVQCALNAVKDPKGYFGIKYRRIKKRRGHKKAIIAIARMMMTCIFNMILTGESFNPTDYDELMNPKPRTYRTSITTDTAIEFLKNSGMSLEDIQGIWNSEVITPVPSTTS

SEQ ID NO: 386340 - protein, 434 aa, unidentified
MSLKKRSSEFSVVHPHAAGIDIGATFHVVAVSPEFDPNPVREFKSFTTDLHRLSRWLLDVGVTSVAMESTGVYWIPIFEILESDGFEVILVNARDVKQVPGRKTDYNDAQWLQKLHQFGLLRASFRPSEHIASLRAYMRHRERLIEYAAAHIQHMQKALMQMNVQLHHVVRDITGVTGMRIIRAIICGQRDAAGLATYRDVRDEHIFGLKQAVELYDFYQELINKCDKEIEKSVAKLNHQKKTPDNPLPKARHKTRQRHEPDFAVRDALYTFTGVDITQINGFGPYTALRLIGECGSDMSKWPTEKHFTSWLCLSPGNKKSGGKILSQKTMSTKSRASTLLRIAAVNVGKTDTALGAFYRRLAARVGKAKAVIATARKLAILFYSLLKNGGIYVERGAAHYEEQYRNRVIINLKKRAKRLGYDLVTQPPSIEVS

SEQ ID NO: 386341 - protein, 353 aa, unidentified
MDTEVLISVGPHKASSTLVVFDPVTRTPIDGARFANTTAGYRDLVRFAHRWRQRRWAIEGCHGAGRSLAQRLVADGERVVDVPAKLAARVRVFSTGHGRKTDHDDAISIGFAALDATGLHEVALDDATVTLGLLSDRRQELVALRTQAVCRLHRLLAELTPGGVSGELSATKAVAVLARLRPGDEPGRIRRQLAKEHLADIRTLDRRIKAIGVQIAAVVTATGTSLVDIFGVGPVLAARILAEVGDVTRFPDKDHFASYNGTAPIDASSGEQQRHRLSRAGNRRINHALHMIAVTQLRNHTSTGRAYYDRKLADGKTRKEALRCLRRRLSDVVFRQLTDDHQRLETLPLATTA

SEQ ID NO: 386342 - protein, 393 aa, unidentified
MRNDVTIYVGIDFSKEKFNACLLMDQGVMGESEFPNTKTGYLKLTKWVKNTSELGRSFDSSLVLFCGEHTGTCSIGLCEYLYAKGMKIWLESALKIKYGSGLKRIKDDKADAEMIAYYAKRFYEPGSCALFEPDSADLKTLRTLYQFRNRVVCDRVAIGNRISSGAFDCSTLVRNRMVKHHKEAQKDEKDIEKEMVKLMETSEELASNYQILISFKGIGPITAAALIIYTSNFKKFDNPRKFACYCGIAPFGKQSGTSINTKPHVSRFAHIGIKAAMVQACKSAMQHNAVIKAYAQRLYAKGKHEGIVMNNVKNKVMHIIFKMIQTQTLWEQEYQQKHTKECKPIPGKNGIGATEAAPIINATLKTSSSVVECTFLEKHSFQKNSKKLQVFLA

SEQ ID NO: 386343 - protein, 352 aa, unidentified
MRKYYVGLDVHKVTIAIAVLDAYGKLITRTVIETSTETVRTFLRNLGGEIHLTFEEGNHAAWLYDIVEPLVKRVVACNPNHNRIEGSRRDRVDAVMLAELLRLNALKPVYHGEHGTRTLKHLMRCYECLVKDITRVKNRLKALYNSQAIKQRGRELYHASKRQSWLEKLPNQGQRTRAELFFQQLDELKVIKRAAQKAMVAESKRHPAYRVLSQVAELGPVRIAQIIPTVETPWRFRTKRPFWHYSGLAVVTRSTADHEIEDGRVRKRKKQIIQTRGLNEDYNRRLKLIFKSAATHACHCGAYREYYEGLLKTGMREEMARLAVARKLSATVLAVWKSGESFDARRILKTAV

SEQ ID NO: 386344 - protein, 343 aa, unidentified
MQVVTTIGLDIAKSVFQVHGVDAAGQVLIRRQLKRRAVLAFFQKLPVCLVGIEACASSHYWSRELQALGHSVRLMPPAYVKPYVKRQKNDMADAEAICEAVARANMRFVPTKTPEQQSCLMLHRTRHLFIRQQTAVINSIRAHLAEFGIVAPVGRKGVTELLHIVADPSDKRVPEVARACLAALGNQLLSLKEQIVEFDRMIMVWHRSNETSKRLHYIPGVGPMLATALVASVADPRTFRSGRNFSAWIGLVPTQHSSGGKDRLGSISKQGDRYLRSLFVAGALAVIRYAKIHGTKHRPWLTALLARRPTKVAAIALANKLARMAWAMMAKGERYRQPVALAA

SEQ ID NO: 386345 - protein, 311 aa, unidentified
MTKENLTIEQVIEKGFGIDVHKEMLMVTIMGKGIKKQTREFNTFTEDLELCRHWIESQGIRQGAMESTGVYWKPVFNILTESLDIKLVNARHIKNVPGRKTDVKDSEWICKLLLSGLLNGSFVPPELTRETRDIFRYKVKMTQAVAAEKNRIQRILEDANIKLSSVVSDMSGVTAIKLIDGIIAGCTDISELVEKNYHGKLNASKADLKKAMTGRVTEHHKYMLLEIKDHIKYLEEKIENLEQKLEEKLSAYKTERDLLDTIPGVDIEAAIGIISEIGTDMSVFADEQKFASWAGMCPGNNESAGKKKVQE

SEQ ID NO: 386346 - protein, 428 aa, unidentified
MNCNTQNAKIASITEKTLIVGIDVGSETHFARAFDWRNYEYTKKPLEFSNTEAGFMMFKAWVEDIAEKQGKTAVIPGMEPTGHYWFALGKFLQDSGMKPVHVNPHHVKKSKELDDNNPNKNDRKDPKTIAALVNEGRFSYPYIPTSIYAEIRSLSNLRFQTQEELTRIKNRIARWFAIYFPEYKDVYGDLMAVSGRMILKEAPLPEDIRILGVNGVNQIWRNAKLRGTGMKRAKILVSAAEHSVGSKEAPEAARIELKNLLNDMDVYVSRMEELLQTIEEKLKTIPYVDKLMEIKGIGLITVSGFIAEVGDIGRFDNPKQLQKLAGYAIVANDSGKHNGESRISYRGRKRLRYVLYEAAISLVGKNAEFKEIHEYYRTRKENPLKKMQSVVAVACKIIRVFYTILTKGVDYDPMKLMSDIRRPQLQAA

SEQ ID NO: 386347 - protein, 341 aa, unidentified
MDKRDFSGIEVGAKELVVSLQREGRRMALKTFDNNPQGHQAILRYLRRVGRSVRVCLESTGVYGLDLALALARAGLEVMVANPRAVRHFATAMMQRSKNDRLDAVVLLEFALRMPFRAWVPPCPAVLHLHALARRLEALKEMQAGEKSRLHAADATETTSSALRRDLERSLRSLRRAIARLSAEAVKIIDQDPDLKLRFDLLISAHGAIAQTSAIQILAELALVPPDLDVRQQVAYAGLDPREHSSGTSVHKKVRISKHGNAHLRRALYMPALVAIRRQPNLRAFYQHLRARGKLKMVALVAVMRKLLHAIYGMFKHRQAFDGSKVYALPAPEISTKEAAA

SEQ ID NO: 386348 - protein, 363 aa, unidentified
MFSERTSVGLDVHARSVVAAAIDGVTGEVTRTRLTPSYEHIQSWIADLPGPAAVAYEAGPTGFGLYRALTDAGVRCEVVAPSKLQRPAGDRVKTDARDALHLARLLRLDEVTSVSIPSVYQEACRDLVRAREDCRGDLMRARHRLSKLLLRHGIVYCEGAAWTDAHDRWLRAQAAPQLLTVATRMAFDADYEHVLMLQARRRGLDSAIEGIAADCEFTPVVRRLSCLRGVGTLTAFALAVEIGDWNRFTGNTIGAFIGLVPSESSSGSTRSQGPITKTGNTHVRRLLVEAAWHHRTKYQARAVMRARWDKAPAAARARGHEGNRRLHNRWVDFLARRKRSTVANVAIARELAGWCWSLAVMDD

SEQ ID NO: 386349 - protein, 366 aa, unidentified
MKKLSTATAHGIDKLQTHQLTIGLDLGDRSSYYCVLDEAGNIVLEEKVATTPKALDTRFAAMPRSRIALETGMHSPWVSRLLSGLGHETIVAHARNVRLIGESRRKDDRLDAQTLARLARIDPQLLSPVKHRSAQAQADLTVIRARAGLVRARTALINTARGLTKSYGERLRGCNPRNMNPEKASALSPELQRALEPLLAGIESLSQQIREYNERIEQLAQESYPQVALLKQVKGVGTLIALTYLLTLEDAHRFRKSRDVGCYLGLQPGRRNSGQSQPQLHISKQGDPYLRTLLVQGAQHILGPFGADSDLRRWGLKLAERGGRSGKKRAIIGVARKLAVLLHRLWISGEVYEPLRNSRQLVPAAA

SEQ ID NO: 386350 - protein, 397 aa, unidentified
MYIVGIDIAKRKHEAAVIDGEGAVIIKPFSFTNNCSGYNRLLAMLTKAKLPLDEVSFAMEATGHYWLALFTRLQKEGFRVQVINPVQTNSIRSFYIRQAKTDPRDALLIAEVIRFGHFSESTLHPENIYELRELCRGRHAIVSMQADVKRKVVALLDQVFPEYETAFTNMFSDTSMAILQTCPTPKELSEMPLEELCHLIEVSSRKRFRMAKAQELQTLARGSFGFAMAGDVFSTMIRLYAKHLDFLKQQVREMDRKIAEIMETLDTPITTITGIGPTLGAYILSEIGDISRFSSAAKLAAYAGIDPTMRQSGEYNGVRNRMSKRGSPYLRHAIWLAASSAVLHDPALKLYFQKKRDEGKPYMASVGHACRKMVSIIYAVMRDNKAYTPCIPNEISA

SEQ ID NO: 386351 - protein, 342 aa, unidentified
MDTHGEVHVAAVISPLGKILGTESVPATAAGYRQMLLWARMRGPVRRAGVEGTGTFGAGLSRYLMVQQIQVFEVNRPDRSARRLLGKSDPLDAQAAARAVLSGRAQARAKSGDGPVHRARLFKLAKDSAVKARTQAINQLKAVLVIADPVLREQLSSLGNAELYRTCARLAPYDGGGDEDAMAQATHLTLRMLAERIEQLTAQIDELNQRLTRLVERHAPQLLEPVGIGPDSAVTLLITMGDNPDRLNTEASFAALCGVSPIEYSSGRRSTHRLNYGGDRQANAALHRIVFTRLRHDPRTQAYYERRTQEGKTRREIIRCLKRYAAREVFNLVRPVARTPAL

SEQ ID NO: 386352 - protein, 412 aa, unidentified
MNVVYEKCAGLDVHKKTVVGCASILDAKGHRHKERQTFRTMMPDLLRLRQWLKELEVTHVAMESTASYWKPIFNILEGHMEVLVVNAQHIKAVPGRKTDVRDAEWIADLLQHGLLRPSFVPPTWQREVRELTRYRMSLTEERTRLINRLQKTLEDTNIKLASVASDVMGRSARDMLTALLAGEADPAVLAELARGRMRSKRELLSQALHGQLKPHHCILIGEQLADIDALDEAIERMSKAIAERLRPYEHQIQRLSTIPGIKRRLAEVILAEIGVDMSRFPDARHLASWAGMCPGNKESGGKRLSGKTRKGSPWLRSALVEAAHAALHCKNSYLSAQYQRLVLRRGGKKATIAVGHTLLVVIYHILSDDKDYEELGGNYFDEWDRQAVQKRLVRRLEKLGYEVKLEPASPAA

SEQ ID NO: 386353 - protein, 426 aa, unidentified
MLKAFGLTPYLAQGSDAFQMSGLQSKLSKEGEVVFYLGIDIAKRTHVASVMDGEGKVLLKGFSFANSSEGAQSLLTRLHAISDNPADFLTGMEATGHYWLALFSFLDEAGYLVHVINPIQTDGWRKGTEIRKRKTDIIDSVLIADLIRYGSFDDTALANENMFSLRQLTRYRSYLVGTASDFKRKIIAVLDQVFPEYDTVFSKVGLFGKASKAALFEYSTPDAFNEITADVLAETLQLASRNKVGLAKAEALKKVAANSFGIRFAQDAFTFQLRSMIEQLNFLETQIKQTEDEIGQLMASIQSVIETIPGIGPITGATILGEIGDIHKFSNPKKLVAYAGIDASVSQSGQFEGTHNVMSKRGSPYLRKALFQAALVASRTDPVFKTFYDKKRSEGKHHLTAIGAVSRKLCYVIHAILTKNEPYEIR

SEQ ID NO: 386354 - protein, 334 aa, unidentified
MKVLKQSVGIDVSKDNFSCCFSYMDLDQNEFFSKCKSFPNTETGFEMLEKWVNEKSFGKNIWYVMEATGVYYENLAYWLLENRVKVSVLLPSKVFHFAKTLEIKTKTDSVDAMIISKIGLERKLCEWAVPSPTMRQIKILTRECRESKTKLVMAKNQLHAKTHGYKCLNSSLRRLKKQIRLIENQLIEIEAELRILIMNDSPLADKIEKIESIPGIGFMTIVCVLGETNGFALVSNSKQLTSYAGLDIRHNQSGKKEGKAKISKRGNSFIRNALYMPALCSTLHNPDMKQFYHRVNEGKPSKKIGVTAVARKLLILMYTLWKNNTEFIPNYNTV

SEQ ID NO: 386355 - protein, 415 aa, unidentified
MDVIHERCAGLDIHKKTVVACVLRSLPGGVPERQVRTFGTMTAELEQLREWLIECGCSHVAMEATGVYWKPVYNVLEERGDLQLLVFNSQHLKTVPGRKTDVKDAEWIATLLRHGLVRASFIPERGQRELRELTRYRTALIRERANEVNRLQKTLEGANIKLAAVLSDITGVSGQRIIEALLEGQTDPEQLAELAHTRVLLHKRAALEQALVGRLSTVLRFVVRQQLQHLHDLEAQIEACDAELQELLRPFEELLQRLCGVTGVGPRTAEIIMVEVGLAIQRFPTARHVAAWAGMCPGNRQSGGKRQHARARKGSPWLRAALAEAAWGASKSKRGGYLPALFRRLAARRGNKRAIVAVGHSILVTCYYLLTRGGAYEDLGETHFDERDRQAVVRRSVRRLQALGYSVHLEQSEAA

SEQ ID NO: 386356 - protein, 392 aa, unidentified
MIYVGIDVAKDKHDCFAMNSDGEILIEKLTITKNLDGFETLYNSLMNFSDSLDNIKVGLEATGHYSNNILNFLTEKGFNIYLINPLQTNLYVKCQSLRKTKTDKLDAHVIATMLVSDNLKPYIPVSYHISELKSLTRHRFRLVKENSKFKTSLVRLVDIVFPELPKIVSSVAQKSCLALLYELPSAKDIAECNLTHLTHLLSDNSNKKFDREKALQIRDLARKSIGLNSNSVSFELKQTINIIQFIQEQLDDVEKRIKEILKEINSPILTIPGISFKTAGSILAEIGDISRFDSPAKLLAFAGLDPSMYQSGKFFSTHSVMVKRGSKYLRFALMTAARMVCLNDATFCAFKDRKMAEGKHYMVTMGHVAKKLVRVIYYLLKTNNVYQASKVA

SEQ ID NO: 386357 - protein, 341 aa, unidentified
MNIITVGIDLAKNVFAVHGVNDSGKAALVKPKVQRADLLPLIAQLPPCLIGMEACSGAHHWARLFRQYGHTVKLMAPKFVAPYRMTGKRGKNDAADAAAICEAVTRPNMLFVPVKEEHQQIILCLHRTRQGFVEERTASYNRLRGLIAEFGIVLPQKVTCLRREIGAHLEDLPGYANLCVGDLLAHADELDKRVDEYDRAIAKAAREDARSKRLMKLPGIGPVTASAMLASIGSGHDFDSGRQVAAWIGLVPGQYSSGGKARLGRITKAGDSYLRSLLVMGARAVLNSIGDKQDRFSRWARALQERRGYWRAVIAIAAKNARLAWAVLKYGEDFKLELIKE

SEQ ID NO: 386358 - protein, 400 aa, unidentified
MISVGIDVSKGKSTVCILKPYGEVVCKPFELQHNKKSLESLDELLQKLDGEVKIVMEATGIYNLPVLTFLDEKGYFVSVINPCVMKKYARNNNFRNVKTDKMDSITIANYGIEKWFKLKRYEASESAYTELKLLGRRYRHYMEMHIQALQELTHVLDYVMPGIKGLFNSWTESNNRDKLSDFVERFWHYDLITSMSCEEFIEAYNEWAGEKKYHQSKSKAVQVYELASNGIPTLPSSFPSTKMQVLVAINTLRAVDSSLHNILSRMKELAKSLPEYSTVRAMGGVGDTLAPKLIAEIGDVRRMHSAKALIAFAGIDPPPYESGQFIGSKRQISKKGSSTLRKVGYEVMRVLKSHKAPKDSAVYEYIVKKENEGKSKKQAKIAGLNKFLRIYYARVMAVYQ

SEQ ID NO: 386359 - protein, 425 aa, unidentified
MQEKILRVTSQTIIVGVDIAKKEHWARITDYRGVDLVKPVKVQNNEESFERLMARIEKIRIDKGCEKVMIGLEPSGHYWKAFGWYLYLHQSNPVLVGVNPYHTKQAKELDDNSPTKSDKKDALIIAHLVRDGRYFDVYLPEGAYAELRVLCNERKRLQKQVSRANNTIVALMDEYFPEYDEVWGKVTGQTSRKILRTLPFPSDILKTGEKNLANTLSIFSSGKEGKVRAARLFEAANRSIGVTEGKESARLRLRNLLEELELYERKVDGIEEAMEAIMDDMEMGELLCSMKGVGPIISAVFLGEVGDVSRFDNWKQVRKLAGLNLVEQSSGQHKGKTKISKRGRPYLRWILFLAGKDGVLHNPEMRGYYRCLRERKQNPLSGYQAYVATGLKVMRILFHMAKNRVPYDPAKALGAVREQQIAALA

SEQ ID NO: 386360 - protein, 341 aa, unidentified
MEKRYIGIDLHRNRFTCCIRLENERTYVTEWALENLGRFVNKQLRPSDEVAVEITSNTRLFYEAVAPQVARVAVVDTNQFGVIVRSVKKTDSNDARLLALYLSKGLLPEVRMKDKELAQLASLTHTRDTLVKQRSALKNKVNNILSARGLNLAKEALSSEKKLSEVLELPFDAIVRTELRVIVEQIRSLNKSIAELEKTIGEEGSKLEGHKGLTSIKGIGKITSAILLSVIGDVNDFPDESRLASYFGIVPRVSNSNETEHSGRIHKRGTKLGRTALVQSALIAANYSPYLKRFYERVKARRGAGKAIIALARKFLGIIYRTLKNKWVFEDFPNFVLAEES

SEQ ID NO: 386361 - protein, 405 aa, unidentified
MYEVVAGLDWASQKHDVLICDTDGHKLCERVVAHDEDGIAGLCRLLVEHAVCRVAIERPDGLLIDRLTDAGIAVMAIHPNQVKAARPRFSAAGGKSDRFDAMVLCELARTDSHRFRLICPDSDATRALRTLTRGRQDLVEQRVALTNQLKAQLDAFWPAGANVFAELASPISLAFLAAHPTPADCQGLGPARMQAFLKRHGYSGRKTPELLLARLNNGGPSGRTGPLELAARRTITLALVGTLQILVSQIAALNTQITTALHDHAAGDVFRSFFANPKTTICPAGLLAEIGDDHDRYPDRDTLSADAGMSPIAIESGKHRHATFRRACDKRLRTQISVLADASRHTNPWAADVYNRARARGQNHPRAIRTLGRAWTRILWTCWHTNQPYNINNHRAAQHLIQQQG

SEQ ID NO: 386362 - protein, 341 aa, unidentified
MEKFIRTAIDLGKNYFQVHGLESEGGRSISRKVKRSKMHEVYSQIEPCRVGMEACGSAHYWARQLTAMGHEVVLIPPAYIKPYIKRGKNDVVDAAAICEAMSRPDMRFVPIKSADQQAVLMLHKTRELLVKQRTMAVNALRGHLAEFGIVAAKGIGRVDELLALAKADAALPHIAGAAVACMARHLEGLDLSIETVDEEIAKAHRQNPISRLLDEIPGIGTLIASATAASVPDPGVFKSGRDFAAWLGLTPRQNSSGGKEKLGAITKQGNRYIRKMLVTGATSVLRVAGKRKGALADWINALRARKPERLVAVALANKLARICWAIMTTGEGFRTDTYVKA

SEQ ID NO: 386363 - protein, 341 aa, unidentified
MDEYIGLDVSMKETAVSIRRAGERIWRGKCASDPSIVAELIRKRAPSVKRVVFETGPLSVWFYHSLRIEGLPAICIDARHAKAALDMATNKTDANDADGLAQLAEVGFFREVRVKGFDSMLTRTLVAARTRLVRITTELSNQIRGVMKTFGLLVPAGKGSIFEKNVRSLLADQDRLASIVLPMLEAWRGIRVRAAELGRQLVRDARQSRSCRILMSIPGIGAITATSFTTAIEEPDNFRKSRSVGAWIGLTTRRYQSGEVDYDGHISRRGDRSLRGLLYEAAAVILTRSSTHSTLRTWGLQLRERIGFKRAAVAVARKLAVIMHTMLKTGELFNPNAGAVA

SEQ ID NO: 386364 - protein, 338 aa, unidentified
MSLYCGIDLHSTNCYLAVLDEQLRPVLGRRVANSLETILAALAPHQEQITAVAVESTFNWYWLVDGLMEAGYHVELVNTSAVRQYEGLKYVDDRHDARWLARLLQLGILPTGYIYPKEQRALRDLLRRRTFLVNQRTANLLSIKNLYSRLTGAQVPTKDLKRLTAEQVAEQFPDPLLAQAITCGVTVADSLKTEIAKLEKTILAQARQRPEYALLESIPGIGQTLAMTILYETGSLSRFPDAAHFCSYCRCVPSKHLSNGKVKGKGNTRNGNRYLSWAFMEAAHFAIRFEPLAKKYYERKKARTNPVLALRAVAHKMARACFYVLRDQVPFQAAQAFG

SEQ ID NO: 386365 - protein, 344 aa, unidentified
MRIASIGIDLGKTTFHLVALGERNKVLVRKKFSRGQLLAYTANLPSSLIGLEACAGSHFLGTTLREQGHQVRLIPAQFVKPYRKSNKNDFLDAEAIAEAVTKENMRFVPIKSQDQLDLQAMHRVRDRLVQRRTALINEIRGFLLERGIIFAAHPIHLRNNLPGVIEDAEQNLSPRLRWLLDRLWQEWKQIESDVQAISQEIERISDEDVRCRQLRQIPGFGPLVSTATVAAIGNGAAFRRGRDFAAWVGVVPRQYSTGGKARLYGISRRGNIYLRRMLIHGARAVLFRIKHDTGGFGQWVHRLAQRAPRNKVIVAIANKLARIAWAVLSSGKDYRHQPLRPAAA

SEQ ID NO: 386366 - protein, 326 aa, unidentified
MTLSHLTDNIFVGIDVGGVGLDVAWHRGDSAHYANRPDAIAALVERLRTGPRLTRIVLEPTGGYEKPLVKALRQAQLPVEIIHTTRFMAYRQLVGVKAKSDTSDARLLASYAAAPDEVRGRKAGHVELPEDAIREALSELASRRDQLKHMIHAETCRLGTVRMVELRQAIESHLETLKAEDKQVHQMMLELVRQRLDLRRDQRLLKTIKGIGPKSALAFLASVPELGRIDNKAAAALIGVAPFVRSSGTMIAPARIHGGRAAVRSILYMAAVTASRHNPVLRPFYERLIAKGKPPKVALIAILRRLVVFANAVIKSGQPWKGANAA

SEQ ID NO: 386367 - protein, 370 aa, unidentified
MENNITIVGLDTHKNSIDIVTAETGGCQEVRYYGKIGSDMASLDKAIRKLRSKGGELRFVYEAGPCGYGIYRHLTTQGFPCAVVAPSMTPRKSGDRIKNDRRDAENLARLERAGELTHIHVLREDDEAMRDLTRGREDAVKALRTARQILGAMLLRYGYRYPGKKTWGPSHMRWLSDIAMPHPAQQITFQEYIHSVMECTDRVRRLTEQIQKLLPEWRMAPVVKALQALRGVAQIVAVTTMAEIGDIHRFAKPRQLMTYLGLVPSEHSSGDSIMRGGITKTGNGHVRRALVEAAHAYSFPARVSRFLLKRQDDLPQHIRDIAWKAQIRLCGRFRRLMARGKLKTKVVTAIARELAGFIWAIAMEVQPQGA

SEQ ID NO: 386368 - protein, 376 aa, unidentified
MQEISKIHVGLDVHKDSIAVAVAEPGRAAAKVIGTIRHDVPKLLKLLVKLGNTEAVHVVYEAGPTGWGLQRALTAKGYSCEVIAPSKMPRRPGDRIKTDRRDCAQLAECSRAGQLRAVWVPRPEDEAIRDLARAREDALNDRRQLRQQLKALLLRHDVRFPGKTSWTQAHHAWLGKLNFSEVATQAAFMDYWMAVQASDERLKRLNSALLEYVKNWRFAPQVSALQALRGIDVTCAIALVAEIGDFSRFDHPRKLMGYLGLVPSERSSGERTARGSITKTGNAHARRMLSEAAWSYRFKPRLGERARRRQEGLSQQLCAIGWTAQLRLTQRFAKLDARGVHRNKVCVAVARELTGFVWAVAQAADTPLQATQGGTT

SEQ ID NO: 386369 - protein, 389 aa, unidentified
MLLDHPSDGLTAIRTHIAAIFVSLELSRSTWLVTSLSPGKGEKMSKHSVAAGNVAELMTLFADLRRRAETRTGQTFPLVTIQEAGLDGFWLHRVLQQQGVESHVVDPASIAVPRRRRRAKTDKIDGETLLRTLLAYNRGEPRVCAMVVAPSPEEEDRRRLCRERRTLIEERVRHGNRIKGLLFAQGICDYAPLRRDRRARLEALRTGDGRKLPSHLKAQIGRELDRIELLVEQIKSVEAAQEALLAAAKKPASEKTAPDPVTMLLALKGMGSNFTTVLWSEAFYRSFSNRRQVAAYAGLAATPWQSGGIRHEQGVSKAGNCRLRTTMIQIAWLWIRHQPQSALTRWFKQRSSQGRKRAIVALARKLLVALWKYVTQGVLIEGAVMKQAA

SEQ ID NO: 386370 - protein, 333 aa, unidentified
MAEICVLDGNGAVIEAKRVQTTRVGLVKALKGYRCARVAIEAGTHSRWVEEVLSAAGHQVVVANPRQVQLIWGRRKKTDRSDAMLLARLARVDVTLLAPVQHRSRGAQANLAVLRSRDLLVSLRTKLVNHVRGLLKQFGIRVENCSTPAFGKHAQAVIPADLRAALDPVLKTLVAVNEQIAVSDRGIEALVSRSSTAQKLGEVDGVGPITALAFTLTIEDPTKFEKSRIVPAFLGLVPAKDQSGESDPQKHISKAGNPFLRRLLVQCAHRLLGAFGTDCDLRRWGLALSARGGPAGKKRAVVAVARKLAVVMHRIWVTGLPYDPHFNLNAARA

SEQ ID NO: 386371 - protein, 395 aa, unidentified
MCCPPGPAVRAVPCRLHNERTAVSTMTDPISPVSAAHFDLVEVAGPGQVVGGVDTHLDTHTAACVDHLGRLLAHAQFPATTAGEKRLLAWLGGFGELAAVGVEGTGSYGASLARLLSAEHVRVVEVSRPNRQTRRRRGKSDPIDAEAAARAVLAGDATGTPKTRTGVVESIRVLRTARSGAVKARTAATNTLKHLVVTAPEPLRSQLAGLPTDQLVEATAALRPAADLTDPVQATKTALRRLARRCQHLTEEITDADTQLRALTTQTAPALLERCGVGPETAGQLLATAGDNPHRLHSNAAFAALCGTSPVPVASGRTHRVRLNRGGDRQANNALHTIVLVRMCHHQPTRAYVARRRAEGKTTKEIMRCLKRALCRELLPLITQALTPDLTASGL

SEQ ID NO: 386372 - protein, 347 aa, unidentified
MLDQKEYVGVDLHKRFFIAHFTDERGRQSQTRRYETNPEQLDVFMHDLHPQASIAVEPVSQWSWFCDTLESEGFDTHLAHPMQVKAIANARIKTDKIDAKVLADLLRCNMLPEAYQSPLHVRQWKELTRHRLTFVCQRTQNKNRIHAILFKNALAYEGKLWTKKGKAWLSEQEISEHHRMLINEHLQAIEELDGHIQQITTLIESAVENHEGAKLLMTIPGISYIWALTIMAEIGDVGRFKRASKLMGYAGLVPSTYSSGGTTRHGRITKRGSTWLRLAMVEVAHVQGRLRKSHGLRWYYDKMKLKKDSKTAAVATARKLLAVVWTVLTENRPYEDRPRSGKRETRT

SEQ ID NO: 386373 - protein, 539 aa, unidentified
MSHGRRLSRDDNRRNARLGRLREVLPREFAVLALDLADGKQVFALTDHNSKVLARRTVRCRPWRLAEAIRWGQQRAIAAGFAGVTLACEPTGHRWKVVDELAVRAGIDLVCVQPLLVHRAREAEDFTRDKSDDKDALLIARLATQLHVYLPERADPVWARLRHLGACRVEWVTRVGASRQQLRDLLECAWPAALTAARRPLDSLTWRAAMSVTGIDPARVRRLGLARLTRAVTRELPRWGGQRVRHQVLRNLHQAGIESGGVPSQRPGGLERAAFALADLRHAETQRDQVATLMVAVLDQLELTALVTSIPGLSAVGAAAILAESGDLHRFDSARALVKHAGLCPRENASGHYAGRTTISRPRPPAAPRRGVARGLGRLAAQPGPGRPAHPPHRPHRQPPHRRPSPRRSRRQPAAAAVRRGHHRHRVEPRHRPRRARSPNRGERLCRLSRRRRGRDELAGPGEHPATEHEQPRPPPTQARMKAVGVTPRLNARWSRETGHGPRRRHTVQRTPKINAMAAALAAHPHAQTALTQNLTSPS

SEQ ID NO: 386374 - protein, 434 aa, unidentified
MSTPSRFVHRKLLRAAVNPVPEEERMEQLIERGCGLDVHRDTVAACVRVPGPNRGPQQDVRTFGTTAAELLALRDWLEGHGVTHVAMESTGVYWKPVFYVLEDSFTCLLVNATHIKQVPGRKTDVRDCVWIAQLLEHGLLRGSFVPPAPIRELRDLTRHRKVLIQERSRAANRLHKLLQDAGIKLASVATDILGVSARAMLDALVEGTTDPDVLADLARGKLRKKLPALRQALTGRFRPHHAFLVSQLLAHVDYLNESITAVSEEVAVRITPFAAQVEQLDTIPGINTRTAEVIIAELGVDMHFFPSDRHLASWAALCPGNHESAGKHASGKTRQGNRWLRTALVEAAAAAIRTKDSALGARYRRIMRHRGHKKAVVAVAHAMLRSIYHLLAEGTTYHDPGADYFDRRHAQRVTRRAIQLLERQGFRVVLEPAA

SEQ ID NO: 386375 - protein, 430 aa, unidentified
MKSNTQNAKIEAITEKTLVLGIDVGSETHYARAFDYRGIEYSKKPFKFSNTEAGFVTFKEWILDLKERHEKDKVIPGMEPTGHYWFNLGKFLQDNEMKPVLVNPHHVKKSKELDDNNPTKNDRKDPKVIAGLVREGRYMIPYLPDGVYADLRTVSNIRFQLQAELTRIQNRISRWFNIYFPEYKTVYGKPDAKSGMLILKAAPLPEDILTLGIDGVNQIWRDAKLRAVGKARAKTLIEAAEHSVGSKEGAVSARMEIRMLLEDYESRNTRLQEVMVLIEELVRKIPMAEKLLEIKGVGIRTVSGFLAEVGDISRFNNPKELQKLAGLALVENSSGKHKGETTISRRGRKRLRYLLFEVAMSLVSKNQEFRELHNYYTTRRLNPLKKMQSLMAIAAKLIRVFYAMLTKGVDYDPKKMVSDIKRPAVYLQAA

SEQ ID NO: 386376 - protein, 318 aa, unidentified
MTALADKVDGVIGVDTHRDTLSAAAVTAVGGLLGQLVVAADAVGYRRLLAFARIHVPGRRCFAIEGAGSYGAGLARMLVDGGEWVVEVDRPTRPARRSGKTDALDAVRAAREVLVQERPAVPRRRGDREALRVLLATRHGALVARTCAINQLKALIVGAPEELRAELRSRSTSGQVAYCAALRDRPARSLEHRMTARALRATAQRTRALATEAAELHDDIGRLVQAVAPWLLELPGLGPISAARVLVSWSHAGRLRSEAAFAALAGVSPIPASSGQVTRHRLNRGGDRRLNRALHTVALVRLRDDPTTRAYAARRRAA

SEQ ID NO: 386377 - protein, 411 aa, unidentified
MDKIYDKCCGIDVHKKLIVACFRCGKQQEVREFGATTRELLELADWLKEGVCEMVAMESTASYWKPLYNILESSDLKAMVVNARHMKAVPGRKTDVKDAEWIADLLQHGLLQPSYIPGKDQRELRELVRYRKSLVGERTRELNRLQKMLEGANIKLSGTVSDINGKSARSILEYLLTGKSIDGSKYDEMYEQKIIAHNLKATKEQIVDDLNGVMSPLQRRMMKELLVHLDELNVHIKNLNDEIDNFMKPEEKQASQAIQDVTGIGNTSAQAIISVIGSDMSRFPTDRHISSWAGLCPGDNESAKKRKSGKTRKGNALLRTTLITCAHAAVKNKKSYFYAQYMRISAHRGPKRAYVAVAHSMLISIYHILKDGVMFKDLGADYYNQFNKERKINAYLKKLKTLGWEAPIVAA

SEQ ID NO: 386378 - protein, 345 aa, unidentified
MKKGITIGMDLGDKKHQVCILDKTGKIIAEEEVAGTRMAMASFFKQYRGAVVAMEMGAHSRWVSQIAAAAGLEVLVGNARKLRMIWQSRQKSDTRDAVMLARIARMDPALLCPIHHRGEQVQMDLEIIRARDLLVRERTRMVNHVRGVVKSMGERLTPSSAASFGHKVKIPEALNEAMKPMLEMIRELTKKIHGYDLMIKDAATKKYPETEQLCQVGGVGPLTALAYVLTLEEPERFAKSRMVGPYLGLVPRLDQSGQIDKQLRITKHGDGYLRRLLVGSAHYILGPFGPDCDLRTFGMKLMQRGGKNAKKRAVVAVARKLAVLLHALWRSGQQYEPKRIQPLAA

SEQ ID NO: 386379 - protein, 391 aa, unidentified
MVCVGIDVAKDKHDCCILDSDGIVRADCFTIPNNMDGFKQLLQTIRNCTKKSDKIKVGLEATGHYSYNILGFLLDNDLAVYVMNPLHTNLYRKSLSLRKTKTDRVDARTIATMLLSDVDLKSYTDTAYHNEELKSLTRYRFDKVRERAKLKQSVSRLVTILFPELEKLVPSLHIASVYALLSEYPGAKQISEIHLTKLTNLLATASKGRYGKDKAIQIRDAARTSIGSVMPAKFLELKHTIKLIRELTSEIDEIEVSIQKIMDELNPPILSIPGVGIQSAAMILAEIGDFSNFESPDKILAYAGCSPSTYQSGKLTNCYAHMEKRGSRYLRYALYNATKYVCHWNPVFAKYLAKKRAEGKHYNVALSHATKKLVRLIYALQKSGKAYLTAA

SEQ ID NO: 386380 - protein, 373 aa, unidentified
MQRNTLKDYSLEATPVARAKEIKDERAPKAKRIVVGADVHLRGYQAARKVDNAAIGAVANFRSETELLLYLEKQCEQAEEVVVVYEAGPLGYGLYRKLTARGVKCLVCVPDSTQQQKKRRKTNQIDARTLTSNLFNYLNGNEAALQLVRVPTPEQEQARLASRQHDQLVEERKRLGAKGNALLLSQGFGSCKNWWRPKAFSRLEQLLPAWLFEMLQTWVDLLRALDEKIQRAKAALSKRCSGPRPKGAGANSLVQLQSEVLDWGLYANRRKIACLAGMVPSEWSTGESQRQGSITKVGVPAIRRIITEMVWRIIQFQPQYPPVQKWQEVLRGTNRALKKKAVVAIGRQLMVDLWQLQTGRASAQQLNLVMIGG

SEQ ID NO: 386381 - protein, 386 aa, unidentified
MRGWLVLGNPQKGKVMDKITRIGVDLAKNIIQVHGVDSMERVVVRKAISRQKFLEWFANLEPCLVAMEACSAAHYWGRKLRALGHEVRLIAPQFAAPYRKGGKHVKNDRLDAEAICEAAGRPHMRFVAVKTADQQNVLVLHRMRDGFVEERTALVNRLRGELVEFGVFLPQGIDAFRAHFVEALEDGATELNGVARTALLRGWEHLQALDQQIAWCDAQVATHVKQDSNAQRVMAVIGIGPLTASATVATVGDARLFKNGRQFAAWVGTVPKQKSSGGKTRLGHITKQGNTYLRTLLFQGARSAVTSAHRRTDRLSRWIVQLQARVGWYRTLVAVANKHARILWAILAKGERFDPSYVSTPSTPGPATVGQQHEQVNSQRHPSVTS

SEQ ID NO: 386382 - protein, 423 aa, unidentified
MEVIHSRCAGLDVHKETVVACVRLAAGDKVTRETKTFETMTSGLLSLVAWLREQGCSHVAMEATGVYWKPVWNILSEGDFELLLANAAHIKNVPGRKTDVSDAAWIADLLAHGLIRSSFVPEQQVQELRELLRTRKQLIRQQTSHIQRLQKTLEAANIKLDSVITDIVGKSGRAIIGALIAGQTDTVKLAALADRRIKASHQELREALRGRLTHHHRFLLHVHLQHIDFADAAIRDIDQRVEALITHMDEEVKVGQAPFRTLIALLVKIPGIAPLAAHAILAEIGADMTRFPTAGHLLSWAGLCPGNNESAGKHRSTRLRKGNLWLKTMLVQCAWAARRKKDSYFRAQYYRLSGRGGPKKALCAVAASILTTVYHMIKDGTEFRDLGPDHFERRSNNARIKRLVSQLAGLGFDATLTPVAHAA

SEQ ID NO: 386383 - protein, 391 aa, unidentified
MIYVGIDVSKDKHDCTIVSSDGEVLANVFTIQNNLDGFKLLFQRIKSVAPDLSKVKVGLEATGHYSYNILGFLLDKGLATFVINPLHTNLFRKSTSLRRTKTDRVDARTIAAMMMSGVVLSSYTAISYHNEELKSLSRYRFDKVRERARLKQSVSRLVNILFPELERLVPTLHMTSVYALLAELPGAKQIASCHLAHLTSLLSTASKGRYDRSKAVALRDAARQSIGSVMPAKSLELQHTIRLIRELDAEINEIEAALKQMMDEIASPILTIPGISYRMGAMILAEIGDFSRFASPDKLLAYAGLSPSTYQSGKLDNAYAHMEKRGSRYLRYALYNATKYVCIWDNSFATYLAKKRAEGKHYNVAISHAAKKLVRLIFALQRSGKPYCSVT

SEQ ID NO: 386384 - protein, 333 aa, unidentified
MEKKWFIGIDISKKTLDVVIYVPTKKHANETNYERFLNKEEGYKSLLCWLKKKNMAKKRLVISMENTGIYSFDLCLFLEAASIDYCSFNPLHLKRSLGLVRGKNDRVDAERIAYFAYLHRDELSYSKLSGSSIIRLRDFAAERKRFVKQQAEYKGFLTDRKDCEMTSTIERAAHMVKILDEEIASVEEEMLQIINSDPSILRNYELLNSIKGIGTINAMNTIIHTNNFQAFETARQYACYLGIAPFEHSSGTSIKGKTRVYPTGAKLLKADLSQAANSAIVWDKEMKEYYERKRKEGKAYGVVLNAVKFKLVGRMFAVVKRGTPFVELMTYKK

SEQ ID NO: 386385 - protein, 416 aa, unidentified
MKRNKTKKLGKVNGNTLIAAIDIGKKANYGYFRAPDGQDVKPFAFYNLRDGFEKFWTKLLEFQKDHNLDEIVVGFESTGPYAEPLLHFLKIKEVTLVQTNPMHTKRLKELTGNSPNKTDEKDPKVIADVISLGHALTLVIPEGPAAQLRRLSQARERAIKSRTSMSNQLQHLLFVIFPELSWRMKSKSVLHLVENYPTPQSIVGMGLDALCAILKKVSKGKLGRERAREIFEAAQKSVGITEGRESILKEIGHLVSNIGNENRFIDGLEKEMKHYLGKVPYSHSILSIKGIGKVSAAGLIGEVGDFRKFSTISEITKLAGLDLYEISSGRKKGQKRISKRGRSYLRKILFFAAINVVRSEGILNAQYREMLGRGMAKIKALIAICRKLLRITFAIVRDNTVYVSDHQHGCQSKLAA

SEQ ID NO: 386386 - protein, 461 aa, unidentified
MIRRLVGVDLGIASAHTVRVLTEDGREVCRRRCEPTVDSLRRVEAAALAGAPAGTVLEVVMEPTGPAWLPIAVFFTARGHRVFRVSSAKAADLRRFLSRHAKSNGIDADTLARLPLVDPAGLHPLELPGTEAAALDRRVRATDRLTVLAAQHKVRIKDLTRQLLPCSPLTGDLGVADLAVLERWADPRALLAAGPARLTALIVKASNGHLGADRAQQWRAAAAAAVELYGDHPAIAWTDLAAEVGTEVRLLRATQAELATHAQERETAYRYADLGGLARSLPGVGDVGGPVLVAGMGRPGRFPNGAAFKSYTGLAPRASETGNTDRKGQPMSKAGSSLLRTTLIRAADTARKQDPQLARIYYTQMVERGAEHLKAVCVVAGALAERIWTVMNRQMPYVICDIDGTPVTPEQAKQIIAQNFTVPDEVRRRRRSSKTPSRKPAQQPTISSKGGRPLSKPHTAA

SEQ ID NO: 386387 - protein, 357 aa, unidentified
MDDGSWVGLDVHARKVVAGLLDGASGELRVLRVPWRSEETVAWLTGLPHPVRAAYEAGPTGFDLARACQAAGIACTVAAPSKIPRAPGERVKTDRRDAERLARLLRLGELTAVRVPSPAEEAARDLVRAREDVRGDLMRARHRLSKLLLRHGLVYEGSAWTGAHDAWLRRQRFDRRPLRLAFDDAYEAVAQVKARRDALDAAIAELAGEPAFAAVVGRLVCLRGVSTLTALALTVELGGWERFSPQSLGPFLGLVPSEDSSGERRRQGAITRTGNGHARRLLVEAAWQQRRPLRASPALEKRRRGQPAAVRACAEASARRLHQRWWALEDRGKRRTVVAVAVARELAGHCWALATMA

SEQ ID NO: 386388 - protein, 342 aa, unidentified
MEHYAGIDVSLERSSVCVVDGSGKIVRETKVASEPAALIGWLGSLGFGLGRIGLEAGPLSQWLYMAMKQAGLAVELLETRHVRDAFKAMPVKSDRNDARGIAQLMRLGWFRPVHCKSMAAQEVRALLTARKLVQSKLLDVENSLRGILRGFGLKVGKTTRKNFAGRIRELVKGHPNLKTIGEALLSVRAVLLGEFNTFEKQVRAMSRLNAIAKLLMSTPAVGHIVALTYASAIDDPARFRSSKRAGPLFGLTPRKHQSGETDRSGRISKIGDASVRAALYEAAHIILTKPIKGCSRLKSWAMRIAKRAGTNKAKVALARKLAVILHRMLVTATPFNDAAAAA

SEQ ID NO: 386389 - protein, 438 aa, unidentified
MGRKEKEAWWLGSDCGQEEHHFVLLDSAGEIRLSRRVAYRRTEVDSLLMEALEKAGGHPVRMAVEGTRSMGMALVLWAENLGVEIWQAPGLALNRYREVEGQPVKTDERDAYLLARMGLVKAKRCRPAMKATDPELNLYRLGRFRERLVHERTRAYNQLRAILVEVCPDYLSTPGMCQPTSATTLAVLSRWPGLEGLERAKVPSITECVRKASRGRFGEALARLLRRVAATIAWPKSLRFIATFEMTHCVEIIRRINELVAHIEQLMAQEVNTHPRGAAFLSVPGHGLVTTATLLGEWGPLARVAREAGCATYGGVTPTSRQSGKGRDRARRSGNVNKRVLNALYKGALASLRVSEIDQAYFQRKRLDYAGHPSPHIAALLALARQRHKLLYRLFHSGELYDPERVKQSTRERREHIPSLGATPVGRRPPSVAPKAPL

SEQ ID NO: 386390 - protein, 425 aa, unidentified
MNLLILKGVPMSLKIVYKICCGIDVHKTFVVACIASTNDKGITSYESHRFSTYTSGLKTLLQWLLKRNCKDVCMESTGKYWIPVYNILENDCSIVLAHPKYVKAIRGKKTDKKDAKWIADLFKHDLVAGSFMPPADIRQLRDLMRYRFKLTCFQSSEKNRLQNCLTVSNIQLGNVVSDTFGKSAQAILDKLLENPADTSFDLEPLVYKSLKKKLPELRDAIDGYITPEQAGKLKVIKSHYENLESRKAELEELILALAAPYQQELAILQTAPGIRSDFTAIGIISEIGTNMEAFPSAKHLCSWAGLTPTNNESAGKKKSVRVSKAGCYIKPLLVQCANAVVTSKKHPEIRNRYLRLKKRRGHKKAIIAIARMLLTALYHMLKNGENYNAELYRKSYLPPVDREITVEQAIIIARNQGYKIKSATA

SEQ ID NO: 386391 - protein, 425 aa, unidentified
MKNIDYLSTLFVGIDIGSQINVVSAIDFNQNYFIKMKAIPNKQGGAEILETMIAEILTNHHKFKSVIIALESTGLYGIHIANYLSDSSVLAPFSLRVYCLNPKEIAKYKASFNSLSKNDGVDSFVIADFARVGRITIQPWRGSQYLALQRLTRHRLHIAECIAREKTYLLNNIFLKFSEFAMLKNGQHPFSNKYGATAKAILTDFMTNEDLINADTNTLITFIKAKSKNRISFPDKTAELLKKAARDSYKLDKCLYEPITISISASFNCIKAFEKELKAIDQAINTTVKGLNPTEYQVLNSIPGIGKVFSAGILAEIGTIKAFKNNNALAKYCGIVWKEQQSGNFQADDTPMSKAGNRYLRYYVIEATSSVIRHCPEFKAFYDKKYNQVTKHQHKRALALTSRKFLRMLFGLLDKSQLYAYDKRR

SEQ ID NO: 386392 - protein, 394 aa, unidentified
MCAQALGWDIHRKFSKVSLVEKTAEGELRVVERARLEHDDRDAMRRWLSRLPAQTPVGLEAAFGWPWVADLLDAMGLDPHLGHPPALRVLAQHEAKTDRCDGDRLGKFQLQGIFPESYMAPPEVRQIRERTRYRMALSKIRGAMKSRTQALLHRFGILHNFSDLFGKQGRRFLQQLDPPPASRAVLDSSLELLDEVLRHIQELEKWMQKNLEEDAVIRLLQTIPGIGLILAHVIRAEIGEISRFPTPRHLRSYSGLAPLSNDSADRHGERHCGMACNHTLRWALIEAVTGVLKTTDERGQRLRRLHWRLTLGDKCNKNQAKVALAGRLAELVFIVWSKQKPYEETPPARPGSTPRVPARQPRRQENQVSANMRPDQSRHPIARRGTARAGQAHA

SEQ ID NO: 386393 - protein, 345 aa, unidentified
MKNLFIGIDFSKEKIDATIIIASGLEELYARVSETFYSTAAGYNKLLRWVEKNSNGIEQQDWLFCGEHTGDYSMPLSNYLYGKGYDMWLENAKCIKDASGLRRLKTDRADSMMIAEYAMRNHDRAELYVPLSKSLYQLRELFLFRQMLVRQRHGFQIRRAEKNLTLEKCPAKTRISQIEKHMVHECDKQIEKVEKLIKEIVDSDEELKHTYELITTVPGIGPQNAVCLLVFTNNFKRFDFNARKISCYYGIAPFGRESGTSVHSTPHVHYMANKLLKAILTQAALASVKFCATFRDYYNRLIDKGKKKQIALNNVKNKLIHTITAMVKNNKEFELNYVNINKTIV

SEQ ID NO: 386394 - protein, 370 aa, unidentified
MKQYNEAFVGIDTAKNKHAVAIADAGREGEIRYLGEIDSAPATVGRMIRKLAGRYKRLHFCYEAGPTGYGLYRQVRALGHDCIVVAPSLVPKRPGERVKTNRRDATTLARLLRAGDLTAVWVPDAVHEAVRDLVRARAAASQDLRRKRQQLLSFLLRHGRIYNARGHWTRAHLRWLAQQKFDHPTQQIVFQDAVDTIEDAATRLRRLDEQVAAIVPSWSMAPVVEAYQAMRGVSFVVAVTFVAEIGDLRRFDNPRQLMAFLGLVPSERSTGERVRRAGLTLAGNKRARRVLVEGAWSYRHPARVSQTLHARLDGLPKAVREIAWKAQIRLCARYRRLTAAGKKRPVVIAAIAREMAAFLWAIAQHVAPAA

SEQ ID NO: 386395 - protein, 402 aa, unidentified
MKKVCGLDVHKDSIFCAIYNGENYSQVKEFSTMTPNIYSMGEYLQSEDVEDVALESTGIYWIAVWDLLYEMGFNLTLVNPYFIKQMPGRKSDVKDAQWIATLLHKGMMRGSFVPPPVIQELRVYSRKQGKLKQQVTRVLTIMDGILVKSGIRASSCLSSISSKSFLCIVEALIAGWSDPGYLVSLVYGNRKNKQSGKLKEALTGNLKAYHRQELSWAKQEYEMYQVQISECLSEMRRICDEHFSVLVKLLQTIPGISQVAAMTIIAETGGDMSVFESSDKIVGWAGLRPRNDESAGKYKSTATTKGNKYLRSILVQVSWAASRMKGSFFKDKFQRLAMRKPRKKALIAIARKLLVVIWNVLQYAKEYNPRLVPVQDPVKMKARLAYHKKEYEKAANLLNITV

SEQ ID NO: 386396 - protein, 411 aa, unidentified
MEVVYKRCCGLDVHKEIVVACLLIREGGKVLKEIRTFFTMTVDLVVLRDWLKAHQVTHVAMESTGIYWRPVFNLLEEDFTVLLVNAAHIKTVPGRKTDVKDCEWIADLLSHGLLRGSFIPPEPIRDLRDLTRYRKTLTDERVREVNRLQKFLEAANIKLSSVATDVMGASGRAMLEALLSGSTDPQVLSELARGRLRKKLPELRKALEGRFRSHHRFMVAEVLTHLDFLDEAIERVSQEVSSRIAPFSKIVELMDLIPGINQRVAEGVLSEIGVDMSCFPTDGHAASWAGLCPGNHESAGKRKSGKIRKGDQWLRRYLTEAAWAAIRKKGSYLSALYHRLVVRRGKKKAIVAVAHRLLVIIYHMIKDQASYRELGSDHFNKLNAAYVQRHHVKRLESLGFKVILEPLSQAA

SEQ ID NO: 386397 - protein, 322 aa, unidentified
MAEGEVMVGVDVSMARLDVALWPSGENFSVSNDVRGVEQLLARMVQLGPQAVVIEASGGPEDLLVSELCAAQVPVAVVNPRQVREFARSLGQLAKTDRLDALVIAKYGHSAHSSGRLNLTQVRPEAEAELKALVRRRRQIIGMLVAETNRRQRASKVVKRSIVATIRGLKRALAELEQQLRETVKHSPAQKAKAAILQQVPGVGPRLAHSLIAEVPELGQLGRRQIASLIGVAPHAHESGKFKGRRMIWGGRAPVRSTLYMAMLSASRHNPLLAPFYRRLLERGKSKKLAYIACARKLLVILNAMFRDHTTWSPNLDFQHSR

SEQ ID NO: 386398 - protein, 406 aa, unidentified
MDYQSVAYIGFDTSKTKHAVAVAEGGREGEVRYLGEIEAAPAAVERLLRKLARQYKSLHVCYEAGPTGYGLYRHIRALGQVCDVIAPSLVPIRPGDHVKTNRRDAVTLARLLRAGELTAVWVPDEVHEAVRDLVRAREAAARDLRHKRQQVLSFLLRHGRIFTGHRHWSRAHLRWLAGQAFRHPAQQVVFQDQVDAVADAQARLERLDRHLAELVPTWSMAPVVAACQAMRGVSFLVAVTFVAEIGDVRRFESPRQLMAFLGLVPSERSTGDTVRRGGLTLAGNRRVRRALVEGAWSYRHPARVTETIRVRLEGLPKAVREIAWKAQVRLSARYRRLVAAGKGRLSRSQRSPARWPPSCGRSGGWSSQPELLAGSASKPTVRDRDGAAVGNARAALSGEAAPHARP

SEQ ID NO: 386399 - protein, 345 aa, unidentified
MRLYCGIDLHSTNSYVAILDEGLEVVGGRRLDNNLEEILKMLLPHKEKLEGIAVESTFNWYWLVDGLMDAGYRVHLVNTSQVKQYEGLKYADDRHDARWLARLLCLGILPEGFIYPKEQRPLRDLLRRRAFLMKKKASLLISMGGAFHCRTGIRVKADAIKKWTEDDLEQWLPDPDIQLGIACLLSPMRAMEEQINIIEKTVLPRARLRPEFRLLETVWGIGKILSLTIMYEVGDIRRFEDVGNYVSYCRLVESKYVTNNKRKGKGNAKNGNPHLSWAYSEAAHFANQYRDPAKKFIRRKTKQRNAMVAHRALAHKIARASYYVMRDHVEFDPERVFGPDRCKKT

SEQ ID NO: 386400 - protein, 409 aa, unidentified
MNGFRFYDRPVLAEGRNIVGIDIGKNKHSAVAISSRGEKLASLTSFTNDRDGIDRLEAQVLKPAGGPHKVLFALEATGHYWMAIYHELIRRGYRGVVLNPIQTNGEARTRIRKTKTDNRDAEGIARFILTGKAHATRIPDEAVAELRVLTRRRQQLLQMKGNIERGAQSLTDRVFPEYDRCFCKPFLASARAMIRTVGFSPREIAGQEETTREVLTRVGRGRLKTEIIDGLIQHARDSIGTRQAEQVVNNELRATINLIESFESQIAELDLELEKRMEIMKTPLFSLGIGASLAAMIHAESDPASDFPSGRQYAAYAGLDPSTYDSGEMHGTRTHISKRGSPYLRYALYLGAFSVYQKHDYFHKIYRRFCKTGHKHTDALIIVARHLALVVWRMLRDNRPFTKRPPKRN

SEQ ID NO: 386401 - protein, 412 aa, unidentified
MNIRVEKSCGIDVHKAFLSATILTQTGIKNTREFSTSLEGLLDLRNWIVENDCQRVAIESTGIYWIPTYTMLEGKVETIVANPLQIKNIPGRKNDILDSEWIAEICLNGQIKPSYIPPKEIREIRELTRSHVKLTQARTAFKNRAHKVLSRAGIHISGVLTDIFGKSGQIILNGILNGKTIDQTFVEIKNKRIKIKKTEIKESLKGELSQNDIFVIKECLESIKFFDKKIKEFDSKINQNLKGMSKEMKILMSIPGVGFTTAAAIMAEIGNIGVFSKPKKLVGWSGLAPSINESAGKSSNGHITKKGNKFLRTILVLAANSIAIGRPNKLRFFYQRIKGKKGHKKAIVALARKLVSIIHHLLTFKEVYSEEEGKQKQFKLPKFIPVKDFSIDDMIGILCEAGYSVNKTAANS

SEQ ID NO: 386402 - protein, 424 aa, unidentified
MNLTQNDRLKQVTSDTLIVGVDVGSQTHFCRAFDWRGFELSRRVFKFSNTGMGFLTFLRWTEELMNKTEMKKVIVGCEPTGCYWLTFQKFLQDHDIQLVTVNPFTVNRSMELDDNSPEKSDLKDPKTIALLVKDGRFSTSYLPSGVYAEIREASVCRDQIMKQHVRLSNQIQGWLQKFFPEYFECYADWDSTSGLMLLKEAPLPQDILKIGAGGVNQIWRDAKVRAAGIKRAQTLVEAAQNSVGLEAGEAARLEIWVLVNDYILKAEQLKRLDEYLEEKVKEVPNVEKLLAIKGVGMSTVVGFIAEVGDIGRFTDPKQIQKLAGLEIVKKSSGKKKGQPRISKRGRRKLRRTMYESAKALMLWNPAFQDVFLYYRNRTKNPLGGMQAKIAVACKAIRVFYVVLQTGCDFDEEKFRKDIIRPEAA

SEQ ID NO: 386403 - protein, 341 aa, unidentified
MDTVSLVGIDLGKHCFHLHAQDASGRMVFRKKLTRSQMFALLGNFPSCTVVMEACAGAHWIARRLQALGHEAKLISPHFVKPFRQGNKNDFADAQAICEAASRPSMRFVSPRNEAQQVVSALHRVREALVRERTGTINQIHAFLLEFGISLPRGMAVIRRLPAVLETQALPPRLVAVLERLQAHFKYLDEQIGQLEHELLTQLHEDERSERLLEIPGIGPITASVLMSELGDAHQYGSARQFAASIGLVPRQYSTGGKPTLLGISKRGDKGLRRLLVQCARVIMLGIERRTDSLGTWVRSLLARRHSNVVACALANKLARIAWATLAKGTHYRSAPAALAA

SEQ ID NO: 386404 - protein, 377 aa, unidentified
MGDYSEAFVGFDTSKLRNSIAIANGGRRGEVRFLGEIENTSAATAKLVRKLAAKYERLTFCYEAGPTGYGLHRQIKDLGFECVVVAPSLIPKRPGDKVKTNRRDALSLAKLLRADELTPVWVPDGPHEAMRDLTRARETAMLDLRTKRQHVSAFLLRLGRPYPESRKTWTKAHASWIASQKLEHPQQRLVLEEMMLAIRQAQERLARLEQAVAAAVPEWSLAPVVTALMAMRGMDLVSATTLLAEIGDLSRFQTPTELMAYLGLVPSENSTGDTVKRGPITKAGNRRARRMLVECSWSYQHPPRVGQAKQPKVDAAPPAVREIAWKAQCRLYRRYRALIRKGKRKTVAIVAIARELAGFIWAVARAVTTGRVAAATA

SEQ ID NO: 386405 - protein, 355 aa, unidentified
MKDQAIHYLGLDVHQATIVATSRNESGAIVLKATVPTEAKAIVGLVRGQGPRVHVAFEEGTQAQWLHDLLVPVAERVIVCNVRGKKELVNKNDDIDSGLLSERLRLGSLKGVYHGAASVLALKEMVRSYGNLVEDSTRVMQRIKAMFRARAIPTPGTGVYGTRQRADWMSKLKGSGVRLRAESLFAQLDALLPLRRKAKEAMIAEARRQPAWKILRSIPFLGPVRVAQIIAIVGTPFRFRGKRRFWPYIGLGVVTHSSADKEIVAGTIRRRRRAPLTRGLNRNHNPVLKDVFKGAATAAAHKDGPLKNLYKESLDRGVDPDMALLTLARKISSVALRLWKKGELWDPKKLTTQAT

SEQ ID NO: 386406 - protein, 432 aa, unidentified
MVAVMIGVDPHKASHTAVAIGATEEPLAELRVRASESQAERLLAWAQAWPERTWAVEGAGGVGHLLAQQLLAAGERVLDVPPKLAARVRLLQAGDTNKNDPNDARSVAVAALRSPGVREASRDDHAVVLKIWSKRYKDLGRTRTQVACRLHQVLCELIPGGVAKQITAGQAARILESVTPADAVAVARCELAAEFTQDLRGIDAAIRDTRKKLAIAVRAAGTSLTGLFGVGPVIAAAVIGDVRAVSRFPGRDHFAAYNGTAPIEVSSGGRKIYRLSRRGNRRLNHAIHMAAVTQIRNRHSQGRAYYERKLAEGKTPKEALRCLKRQISDAIYACLQADARRAAGAKSPGGQRGNDSLTSAAGSHPQHRLFGKATPGPATHPTTPADAAGDPASAAFPWPPSRASGRPGPGPGKARPRSGARRASLTQPPASR

SEQ ID NO: 386407 - protein, 458 aa, unidentified
MAPRHKGNRSKAKSVVTQLPTLHPHAAGIDVGAREVYVAVPPGSDPDPVRSFPTFTEDLHALRDWLKACGVTTVALESTGVYWIPLFQILEAAGFEVCLVNARHCKNLPGRKTDVQDCQWLQYLHSVGLLRGSFRPTDQVCAVRTILRHRDALVRGAGRCVSHLHKALTQMNVQLQHVISDLTGVTGQAILNAILAGERNPQTLAALKDHRIKASRDVIAKSLCGDWRAEHLFTLKQTHALWQQHQQLIAQCDAQIQQMLQGFDARVDLTLSPLPPQTKTSHKKPQKNQPQFDARTECYRALGVDLTLVPGFATPTVLVLLCELGPEFAEQFPTAKHFGSWLGLCPDNRITGGKIYSVRTRDVKSRVAEALRLAAQSLWQAKNYFGDLYRRWKARLGAPKAITAMAHKLARVLWHLLKYKQPFNPEVFAQAEAKMKRQKLARLQNLAASLNYQLIPQP

SEQ ID NO: 386408 - protein, 338 aa, unidentified
MYYTGIDLHKKTSFLTTVDESGKMVTKKNLLNDEKTILDYFGSLEQQSRVVIESTASWYWLYDLLEANGFDVVISNPVKTKAIASAKIKNDRVDSHMLAQLLRADLIPTVYVSPLKLRKLKELIRHRQRLVNDATRMKNRIHALLRKNNKIVAVSDLFGVRGLQYLEQVHLPQYHRDQVQSYLCLYQELMKQIEPLTETVNGAAKNDPIAKLLMSVPGIGAIVAMTIEAEVGDISRFRSYRNLASYAGLVPCLDASGGKQRMGSITKQGSRYLRTALVEAAHVIARMKKCRLNPFFRRRIVRGGYKKAIVATAHKLLKIVYYVWKNQTPYQETYPVCA

SEQ ID NO: 386409 - protein, 357 aa, unidentified
MTIIAGIDMHVKNIVCEIGYGKEFPYKKTFSNDLAGHKLLFSYIDTFKKALNINDVLIGYEASGLGYVLYDRSIEMGYRCSVLAPTELLRSATGFKKKTDKKDASYIYETLRGHVLAGNKLCNIWIPDKEFREDRDLVRTWFDISEKITRVKIQIQTLLKKYGLKRPDGIESWSKNFIQWIACEKHHLGKSFQISMDSLFRQLDFLNDESKHIENEVKLLSQKDKYKRMCEALLDIKGVGLKTAMTFIMEMGEMKRFQNRRQVGAYIGLVPSSFESGDSSDRKGRITRNGPYRLRSILNQAVWVHLRYNGEEKEYYDRIVSKNPKRKKKAVVACMRRLAIKMWHIASVADNESIKAA

SEQ ID NO: 386410 - protein, 347 aa, unidentified
MLYAGMDLSRQRLDVHVLDEAGRTVEVTAVRPDADALRTLAARILAHGQEVSGVIESMNGARFVHDTLERAGWDVAIADALKVKGLAPLAAKTDRIDARVLAELARRDLVPAIWLPDPETRAERERARFRLHLVRHRVALKNRIHATLIAFGHPVPVSDLFGTAGRALLERLDIPEPWATTLATSLRMVDDLERDIAACEVELRRLGADHPDVPLLMSVPGIAWVLGYTIASEIGDIGRFASPKKLAGYTGLCPFVRQSGGRDDRGPLALNGPKYLRWALIEAATHAARHPAYRARYERTKQRLGKQRGSKIARVDIARELASAIWHMLTKREPFRPGRPHASALVA

SEQ ID NO: 386411 - protein, 325 aa, unidentified
MNLSVVLGIDIAKLKFDVCLIKENGKAKHKIFANTKHGFEQLVIWLNSHTVSNLHACLEATGSYGEALALYLFDAGYRVSVVNPAQVKAFAASRLTRTKTDKVDAELIARFCLLQQPSAWQPPAPAVRGLQALVRRLESLIEMRVAEDNRLSSGISTDSVRLSLEAHIAYLAAEIKHTERLIRGHIDNHPDLKEQSDLLDSIPGIARTTAARLLAEITDFKQYQSARQVAAYAGLVPRERRSGSSVRGRTCLSKIGNARLRKALYFPAITALRCSTFFQQWASGMRERGKSKMAVIGAAMRKLIHLAYGVLKTGKPFDPNWAKTV

SEQ ID NO: 386412 - protein, 334 aa, unidentified
MEKITTVGIDLAKSVFSLHGVDGTGRVVLRRTVRRDQLLEVVAGIPQCLIGMEACSGAHEWGRRFQEHGHTVRLMAPKFVAPYRKSGKNDGNDAEAICEAVTRPSMRFVPVKSLEQQALLAIHRVRQGFVVERTATINRLRGLLSEFGVVLPLRSVTVRRHAAAAAEGLPELARRAIGDLLEQLRILDERIGAYDREIEAQARLSEPAQRLMKIRGIGATTALAIVATVGNAHEFRNGRQFAAWIGLVPGQYSTGGKTRLGHISKRGDAYLRNLLVQGARSVLNSAGMHQDRMSRWILELQPRRGYYRTLVAIANKNARIAWALLAKNEALRSA

SEQ ID NO: 386413 - protein, 421 aa, unidentified
MRGLRTKRVRTVKEGTLIATVDIGATTNTGYCTCADGRDMKVFKFGNTREGFEKFWHMVVAAQNRFTCTEVVVGYESTGPYAEPLVHYLMDKPANIVQVNPLHTKRLKEVNDNSPGKTDDKDPRVIADILRLGRALSVVVPEGDAAYLRRLNNARERHVGERIALLNQMQQLVFLIFPEFKTVIARMAGKTVRLILKKYTTPEKIGSMDTHVLGEEMRRRSWGKLGMKDAELLIKAARQTVGIKEGVAGIVLDIQHIIAQLEVVERFIAEIESEMALTLERIPCTARLLSIKGLGVISIAGLIGEVGDFSKFRTQSEIMKLAGLDLYEVSSGKRKGEKRITKRGRSLMRKILYFAAIQMIGKHGIMREYYERLTGRGTLKMRALVAVMRKLVRIIHAILRDDRDYVGQYCAPKRRVIKRAA

SEQ ID NO: 386414 - protein, 404 aa, unidentified
MSVHVAPVTSSTIVVAVDVGKTSAMLSVTDCARKRVLGPVEFSMTRSGLVATVHRVEAVVVASAQVKVGVEAAGHYHRPVLDYGWPTGWEVLELNPAHVAEQRRVVGRRRIKTDAIDLEAITDLLLAGRGQLITEREVLIGELSAWAGQRSRRVATRSATKNQLLAQLDRAFPGLTLALPDVLGTKIGRLITAEFADPARLCALGVSRLIRFAAARDIQLRRALAERLVTAAREALPTRDGVVARRVLAADLGLLADLDTQIETAERELAALLPASPYATLTSVPGWGVVRVSNYAAALGDPDRWPGPRQIYRASGLSPMQYESAGKRRDGTISREGSVALRRALIDLGLGLWLTEPAAKAYAAGLKSRGKPGGIIGCALAHRATRIAFAMVRDHTSYDPSRWA

SEQ ID NO: 386415 - protein, 345 aa, unidentified
MNILKQTVGIDISYKKFDARFGTIDTQQHNALSPSKSFKNSPAGFKLFLRWLKKLIVSDDIPLIFVMEATGVYYEHLAHFLLHNNYQVAVILPNKIRNYAKSLESKSKTDPIDAAVITRFGLERQLKIWTPPSDTLKALRDLCREYHGLKANITEIKNQLHALKSSFNPHRESFKRKTQLLKFLERQVVLINKELRALVKSDPALAQHLMQISTAKGLGDITILTVLAETRCFELVTNQKQLTSYAGLDVVFNDSGMKKGRTSISKKGNKFIRKALFMPALSACHANPKMKELYRRLVAKGKNKKLAIIAVARKLLLLIYTLWKTNSVYIPDYKPDHRVSSGLSS

SEQ ID NO: 386416 - protein, 330 aa, unidentified
MSVFVGVDIAAKTFDLVNRKGGKASKVESFSQSPQGHAKAIKRLHNLKPTLITMEATGIYYFDLAVALVQAGLPVAVINPKSFHHFAKLKLAGSKTDGVDAALLAEYGERMEPSLWTPPDEVRLALRDIGRQINRLTGTRTQAKNRLHALQAKNSTRSLLVEDEQEGIAYLDRRIERLSQAALALIAECETLSRYLTHMCAAKGVGKASALIVLAELCVLPSSLKAPQVSRFAGLDVRLTQSGSSVNRPARLSKAGNAYLRAALYMPAMSAIQHDPRVKAFYDALVSRGKKKIQALCAVMRKYLTGLWASIQTETAFDSAMLFSEEHLKA

SEQ ID NO: 386417 - protein, 335 aa, unidentified
MHYLYYVGLDVSKETFDASLVAFEDANEMAHRKFANSRKGICSCLHWVEKRHGILLDDVIFCAEDVGSYISEMAVCASDRTLNFNFSLISPLVIKYSMGIARGKTDRVDARRIAEYAITHYRKIALYLPAEKELCQLRTWLILRAHLAKQRVAKLVLLEKLDYKEKFADVSIQRSMLQEEIAYAEIHMKTIEREMKELIAADSNICRNYKLLTSIKGVGPITAIVMLCSTLNFTKITDLRKFACYCGLAPFEHSSGTSVRGGCHTSSMANRDIKVQLNRSALIAIRCDPQLKAYYERKVAEGKHKFSVLNAVRAKIAARCFAVVRRGTPYVALQI

SEQ ID NO: 386418 - protein, 312 aa, unidentified
MEQLHFVGIDVSKDRFDIHVRPDNIERSLSYDDPGFKALLDVVQQIRPTIIILEATGGFERRLVAFLLAHQLPVVVINPKRVRHFAKANGQLAKTDRIDAATLAHFAEVMQPPVRSIPDAFLEELRDLLARRHQLLDMIVAEKNRLTTASKSIRRQLLEHIHWMEKRLASLDQDLDDHIQSSPTWKAKDDLLQSVPSIGPASSRLLLIQLPELGELNRHQIASLVGVAPFNQDSGRFRGRRAIQGGRTSVRCALYMPTLVAIRHNPSIRAFYQRLVLSGKPKMVALIASMRKLLTILNSIIKNNRPWDLSYV

SEQ ID NO: 386419 - protein, 312 aa, unidentified
MLGIGIDVGKFWLDLARHGDPTIHRFSNTPVGIAQLIDALATAPDIFVVLEATGGYERSVLRALVQAEHAVCRVNPRQSRSFARATGQLAKTDALDALGLADMAHCWHARLPRYVEPQPWQSTLAAYVTRRAQLVIAVQQQEQQIAALTVPALGKSAKRTLRALQKERAELDQQIALLTAPRITPAWRSIKGLGPVAQATLLSLLPELGSLSRQQIAKLVGVAPLNRDSGTLRGHRRIFGGRARVRAVLYMAALVAVRWQPEFKAFYRQLRLRGKLAKIALVACMRKLLVVLNARIRDERRIAGTVVAAYPN

SEQ ID NO: 386420 - protein, 355 aa, unidentified
MKQIKQLDFSGQNIFCGIDVHKNSWKVCIRSEHMELKTFSQKPSASDLKNHLKQNYPSAIYNLVYEAGFCGFSYCREFSNDEMNCIIVHPADVPIMDKEKQRKSDIVDCRKLSKTLSDGSLSGIYIPSVEQQDDRSIIRAYQQLVKDQTRFKNRIKSWLLFQGIVIPGGDDRQYWSNNFLNWLKGLSLAASARISLDLLIHGYEESREMVLAATRQVRILSRQERHKKQIKLLRSIPGIGEIAALLFATEIGDISRFDGLDPLCDYIGLVPKIHSSGDKEAILGLTHRGHQKLRETLVEASWTAIRLDPAMTMAFNRYIKTMKKNRAIIKIARKLLNRIRFVMKNQTEYITGVVE

SEQ ID NO: 386421 - protein, 355 aa, unidentified
MIIIGVDFHPEFQQTASVDTETGEFQEKRLAHPEEAAKFYRALAMAGQRVRVGMEASGHARWLERLLAELQFELWIGDAARIQSKRGRKQKTDRQDAQHILQLMLKDDFPKIWVPSWENRDMRQLLWHRQRMVQTRTRIMNQLQAVALNEGVRCKKRLWRAGGRQQLESFRLAPWASRRRRDLLELLDRLNPTIAELSQAIEQEAAKCPEARRLMTHPGVGALTALAFVLIIGNAERFQCGKQVASYLGLVPLEKSSGNRRRLGHITKQGSSMMRFLLVEAAQVTVRSLPEWRSQYFRLMMRRGRKTAKVAMARRLATRLYWMWREGRDYQQQRSSVRTQDSPDQAMVCNRTPSN

SEQ ID NO: 386422 - protein, 348 aa, unidentified
MTVYIGVDFHARQQTISYLTTEDGAMQHLVLLHDNPLAVRAFYAQFAGQRVVVGFESSGYAAWFEELLEELGCEIWIGHATYIRQFAKRRQKNDRRDADLILELLHTGDFPRIHRYSRSTREMLQQLRYRQRLVKMRTMAMNMLLFMASSRGVSMRTQLQSKRGQAKLKQLPLPATLGTQRDELLSLLQTLDEKISTIERWLAKETKEDEAVQRLQTHPGIGLLTSICVRYTLEDASRFANSRKVSAFAGFDPMQDQSDERNRMGAISKQGSRWLRFYLVEAGQVAIRKDADLQRVYQRVSRRGGHAKAKVAVARRLLVRAFIMLRDEIDYAEFQRRGVAARSSRGSA

SEQ ID NO: 386423 - protein, 372 aa, unidentified
MEKDSELFIGLDTSKLKISVAVASGERNGEVRFLGDISAEPASVASMIAKLAKRGATLHFCYEAGPTGYELYRQIIGLGHDCEVVAPSLIPKRPGDRVKTNRRDAVSLARLHRAGELTSVWVPDETHEAVRDLVRAREVANDALKKARQHLQAFLLRHGRIYAGRAPWTRVHSRWLATQSFTHPAHHIVLAEYMQAIEDAAVRLDRLTKQVAEAMASWSMAPVVEAYQAMRGVALITAVTFVVEIGDVRRFETAPQLMAYLGLVPSESSTGERVIRGSITKAGNRRARRVLIEGAWTYRFPARVSRDIEARLDGLPRSVREIAWKAQIRLCARYRKLIIAGKTKTVAITAIAREMAAFLWAIGQEVAPATQA

SEQ ID NO: 386424 - protein, 346 aa, unidentified
MKDLMAGIDLHGNNIVVGIVDREGKRLVHQKLPCELKRIEEFLLPYKDRLHMLAVESTYNWYWLVDGLQAQGYPVVLANPAKIVQYSGIKHADDKNDAFFLAELLRLGILPTGYVYDAGRRPVRDLLRRRMSLVHQRTALMLSFKSLFTRTTGGQMSLSRLKTMEVAEAQKLYEHPANQLIAGLQMQHIEQLDASIGQLEKAVLQVARELPCYPKLKTLPGVGIILGLTITMEIGDIKRFAGPGQFASYCRTVAAQCTSNGKLKGENNRKCGNKYLAWAFVEAANFARRYDEQCRKWYDRKAARTSNVIATKALACKLAKAAWHVAAKETDYKPARVFGPAAGVVK

SEQ ID NO: 386425 - protein, 395 aa, unidentified
MDAALFLTEGAMAVKRKGVDPLEPERHQRARVEMSSNHSRDRGSAMNVTTYGLDLAKRVFQVHWVEPQTGEVKCKALARADVSAFFAGREPGLIAMEACGSAHHWGRVLSRLGHEVRLVAAQFVRPFVKTNKTDAADAEAIWEACQRPQMRFVAVKSEEQQAVLSLHRIRQQFVKVRTMQAHQVRGLLYEFGVVVPKGWRALLAQAGPILADETRCPVPELVRRELLTQLDGLRALTTRIGELERQIGSWQRRETECQRIAAVPGVGKLTATAVVATVGDARAFRSGREFAAFLGLVPRQSGTGGRVKLLGISKRGDPYLRTLLIHGARTVLNHQSRADRTLDPWLKELLSRRPKNVAIVALANKMARTIWALMAHGRTFDRSWGQSAMAAPAMS

SEQ ID NO: 386426 - protein, 348 aa, unidentified
MGGSDMNINLLGIDISKDIFQLHGINKTGQAILKKRIDRNKLAEYIANLPSTEIVMESCGGANYWARVFQRSGHAVKLISPQFVTPFVKTNKNDANDAEAIAEAASRPSMNFVPIKKVEQQDIQSLHRVRSRIVKNKTALINEIRGLNLEYGVTIPRGAQNVKKILRLIIDDNSNELTLSARELMEDLYVELQETEERLKNINNKIKLICKENELCQRILTIPGIGEITASAIVASVGNPNEFKNGRHMAAWLGLVPRQSSSGNKQMLLGISKRGDRYLRTLLIHGARAVLTRYKNGDNAYGRWVSQKRATHPFNKAAVAIANKNARIIFSLLKADQDFDPSLQLGAA

SEQ ID NO: 386427 - protein, 489 aa, unidentified
MTAVMIGVDPHKGSHTAVAVSTAEQPLGKLRVRASADQAGRLVEWAAKWPERTWAVEGAGGLGHLLAQQLVAAGELVLDVQPKLAARVRLLAAGDSNKNDPNDAASVAVAALRSRARRPVRADDHAEVLKVWSRRHRDLGRAKNQAACRLHAVLCELVPGGVPEEITAAQATRILGSAEPYGAAGQARLDLAAEILADMRRLNQQMLESKKKLASAVRASGTSLTEVFGVGPVVAATVIGDVADVSRFASRDHFAAYNGTAPIEVSSGNRKIYRLSRRGNRRINHAIHMAAITQIRHAHSDGRAYYEKKVAEGKTHKEALRSLKRRISDAIYARLRADARQAASSTNKGPGGQQGNDTKSSAAGSHPKHRLFGQATPEPDPRLRPATPASPIMPPEPASKKLRRSPCGFPLSAWRHPLKGEEFSDGRYTQEVRSGLPGGRGPAGPGNGQADRAGGPGPGDQRGNPGQLGQRRPAPPGRRGRVPERGRAG

SEQ ID NO: 386428 - protein, 323 aa, unidentified
MPSVIGVDIAKHTFDIATLQANGKYRTKAKLANSEAGFRTLQEWLNKHSEAGAWVVMEATGIHHEALAEWLLEQNYRVCVLNPAQIAHYARSQLQRVKTDKVDAKLIAEYGERHQDELRPWQPEPRAIRRLKALMRRLADLQEIQQMESNRLEVADTSVQESIRSVLRHIEQQIEETLKAINDHIDNDPDLRGKRDLLTSIDGIADKTAALILAELGDPHRFTSSRAITAFAGLNPRLQESGKYRGQTRISKMGSSRLRAGLYMPAVCALQHNGAIKAMRERLRAKGKTGMQIICAAMRKLLNIAYGVLKSGQPYDVKLALAH

SEQ ID NO: 386429 - protein, 316 aa, unidentified
MFIGIDVGLKHLDCAATAAAPDLPRRVPNTADGIARLVAALAAVAPALVVLEATGTYHCPLLAALLAADVPVSLANPAQVAAFRQSRLGRHKTDRADAQLLACFAQVHADELRRAAPDEPDLARLRTFVRYRDDLVAQRTAIRNRRHAARWTEAPAVVAWLEGDLAGIKARLREVEAEIAALLATRPETAALTAQAGVGLVTAAAVLAYLPAGVLGDAKAAAAYAGLHPRHEQSGQRDRSRLSKQGCPPLRRYLYLAAWTAVRRDPAMAAFHAKLLARGKAAKSALCAVAHKVLRQLMGKIKEMRHHQAHMPPLAA

SEQ ID NO: 386430 - protein, 411 aa, unidentified
MVERVAGLDVSKADVKACVRVPAESGARGYRQEVRTFGATTRQLLRLADWLAHSQVSLVVMEATGDYWKPVFYLLEQQFEVRLVNARDVKKVPGRKTDVKDAEWLAQLAQHGLVSASFVPPPPVRRLRDLTRQRANLVRERVRALNQLEKVLEDAGIKVSLVLSKTLTQSGRLMIEALVDGERDPYTLADLALGKARAKIGDLREALVGRFSDHHGFLARQALRHIDLLDAEITVFSSRIEQELRPSRHHQQLLITIPGVSDRVAEIILAETGGDMTRFPTAATLASWAGVAPGNNESAGKHLSGATTHGNTWLLGALGNAAAAAARTKNTYLGAYYKRLAKRRGPQRALVAVMHKIILAVWHMLTHDVAYHDLGPDYFRNRPDQIQRRKQRLIRELAELGVDTTSLAPTA

SEQ ID NO: 386431 - protein, 345 aa, unidentified
MEHYAGIDVSLESASLCVVDATGRIVREAKVASEPDVLIGWFRGLEFAVTRIGLEAGPLSQWLYAGMREAGLSVELLETRHVRDAFKAMPVKTDRKDARGIAQLIRLGWFRSVHCKSLPAQEVRVLLTARKLLQSKNHDVEMSLRGVLRGFGLKVGPTTPRNFPGRIRELVAGHATLSTVAEALLAARGTLFEQWQKLEKRLRSLAREDRRVRLLMTAPGVGTIVALTFVSAIDDPGRFRSSKAVGAHFGLTPKKYQSGETDVTGRISKIGDGGVRTALYEAANVILTRPVKGSTLKSWGMRLAARTGMRKAKVALARKLAVVLHRMLADGTSFLANKAAAAVAR

SEQ ID NO: 386432 - protein, 423 aa, unidentified
MPYRIAAIDVHKKMLAVVTADIAVEGEYDFERRQFSASPDQLRALTEWLVEQKIQEVVMESTAQYWRPVWQTLERYWKAECKKWEGAGPMSGTLHLAQAQSNRGPRGRKKDFVDAERLLKRLVAQELIMSFVPDAEQRLWRTVVRRKYQLTCDRVRLQNQLESLLEEAQLKLSSLVSDLLGTSAQRMLKALADGETSPSVLAALADRRLRATQQQLCDALGASKELHQVYRRLLKMALEGLQLIEQQMEQLDREIANLLSHYQDAVQRLAEVPGLGVDSAQQIIAEVGAAAATFPSEKHLASWVGVCPGQEESAGVSVSNRSPKGNRFMRRLLNQAANAAVKVKGSIFEIVFRRLLPRLGFKQAIWAIAHRLCRLIWKILHQSVRYDERGPAVSQKSRGARTAKMIRELRSLGYHVDLPVNPA

SEQ ID NO: 386433 - protein, 271 aa, unidentified
MEHYAGIDVSLESATLCVVDATGRIVREAKVASEPDVLIGWFGGLEFAVTRIGLEAGPLSQWLYAGMRDAGLAVELLETRHVWDAFKAMPVKTDRKDARGIAQLMRLGWFRSVHCKSLPAQEVRALLTARKLLQTKNHDVEMSLRGVLRGFGLKVGPTTPRTFVGRIRELAAGHGTLLTVAEALLVARSTLFEQCQKLEKHLRSLAREDGRVRLLMTAPGVGAIVALTYASAIDDPGRFRSSKAVGAHFGLTPKKYQVGRDRRHRSHFEDR

SEQ ID NO: 386434 - protein, 353 aa, unidentified
MNYIIGCDAHKHFSQFAVYEEQSKACKQVRVEHELGAICQFLERYPAGTPVALESIGNWYWIVDEIEEAGCHPMMAHAAKAKVMMGHVNKTDKLDARGLVTLLRNGTLPTVWIAPGETRDERELIRTRMALCKIRVGLKNRLHATFAKYNLSLGTDSDIFGEKWNEDLQRIIQGLPSETLKCVQQELKLLDQLQAQIDVLEKRMRELIPLTQQMLLLKTLPGIGDVLSIIIALEIGAIERFGRAEALASYSGTVPTVKSSGGKTRYGHLPAQSNHYLKWAFIEAGNVVARWRNHPKWRNKHVTLLYERTRQRKDHAVAVGAVARHLAEATFWVLTKNERYQEPVQKKVLPRQG

SEQ ID NO: 386435 - protein, 352 aa, unidentified
MIVLGADSHKRSHTIAAVAAGTGELLGDQTVQVGRRGSGVLLQWARALDSERVWALEDCRHVSGSLERFLIERGERVLRIPTHLTAKARRSARQRGKSDHIDALAVARAALQEALGSFPAAHLDGPELDLRLLVDHRERLVRHRVELNNTLQWHLHDLWPELQLPGGALFSTKWSTRIGRRLARAEQTMRVRIARDELRRLRELTQAINQFERDITELVGQIAPQLLAEPGFGPLIAAKLVGEIAGAGRFATPAKLARAAGVAPIPASSGSTQRHRLDSGGNRQINAALHRVIVTRARCHAETRDYIARRRSEGKSTREAIRCLKRYLARHVWRLLQPPHPEQRELPLSSNS

SEQ ID NO: 386436 - protein, 401 aa, unidentified
MSGIEGVKPFWFFAAEFPGVQFGQLDLKKKLHCWYACFMSNNKTNKELCMQKNSNTKISYCGEKVFIGIDVHKKTYTFSAWCGGMRVKVATVPAENATFITSLKKWFTGASIRSCYEAGFSGFKLHRDLVAAGIDNIVVNPESIEVAANENKTDKRDSNKMGEQLSTGRLRGIYVPTDEEERARLINRTREQFMKERNRTGHRIKSRLFQFGFIDKDDDRVLSEKYLCEIEALDLPQELKYSLGLLMNHWRYLNQQIDYIKTEMKAQSFDDSYNEAIYQSVPGIGDVSARILSNELGDLSKRFNNQGSLFKYVGLTPSEHSSGERQMRGNIDRQGAARLRKVLIECSWRAIDVDGVLKECFDRIASTRGKKRAIVAIARKLLGRIRACFVTKTEYCIGLVA

SEQ ID NO: 386437 - protein, 346 aa, unidentified
MNETTTIGLDIAKQVFQVHGVAVDGTVTVKRQLRRSEVIRFFDKLPRCRVGLEACGGAHFWARELTVLGHDVRLIPASYVKPYVKRGKTDAIDAEAICEAVSRPTMRFVPIKTVDCQAGVMLLKTRYLLVKQRTQSINSLRGHLSELGIIAARGTGKVETLIAIIRDKTDERIPAVARRALEMLAEQVEALVRRIATLENEIVSEVRRDDTMRRLATIPGVGPITAATIVALVPDPGAFNSGRHFAAWIGLTPKMHSTGGKERLGRISKMGNPVLRSLLVVGATAVSRHARRGATVSPWLTGLLARRPAKVAAIALANKMARVIWALLTKGGVFTRRPATAAQHAA

SEQ ID NO: 386438 - protein, 416 aa, unidentified
MKKHNNSGKKSEPTSKRTKSRGPVQRDTKEVLAELVGKLKAKLDPTKVAATSAGEKHQRGELRPNLDRLTVGVDLGDQWSHYCILGLEGERLAEGQLRTTQEDLATFFQGLNEARVVVEVGTHSAWVQEVIRGCGHEVLVANPRLMDGSKRRKRKNDRIDANKLARLGRVDPESLYPIQHRSREVRQDLVMLRARAALVRARTEIINTTRGLVKSMGTRLPKCSSRSFAQKGEEAVAVEMREALLPLVRLAATLSADIKEYDKKIEELGREKYGHTALLRQVKGVGPITALAYVLTLENPQRFAKSRDVGPYLGLVPKQEDSGESQPQLGISKAGDTMVRKLLVGSAQYILGPFGPDTDLRRYGLRLCERGGKNAKKRAAVAVARKLAVLLHRLWVSGEVYAPLHHAMSAPIVAAA

SEQ ID NO: 386439 - protein, 332 aa, unidentified
MNYELFVGIDISKSTIDVAVVTQACFDKPLHHVFKNSYDGFGLMLEWLSIHGIAPKKVLFCCEHTGIYICPITNFMHANDLSIWVENGLHIKRSIGLKRGKSDKADALAIASYAFSNQHKARPYLLPSATSSKLKHLLAHREQLVRHQTSFKCTCSELKGFDRENAGYCIADSQEMLALYAERIKKVDIELAALITEDQELNEQFSLVQSVHGIGKQTAMFILIHTEAFAAFSDYRKFASYCGIVPFPHSSGTSIRGRNRVSNLANKKLKALLTMCALNTIKKDNEFKRYYDRKKAEGKNAMCVLNVIKNKLLSRAFAAVKRGTPYLLEPAA

SEQ ID NO: 386440 - protein, 536 aa, unidentified
MIPFRRVFCLRPKAGLARTQTNNFNHGLIMAPQDTSKSVPRAGQIRPAKQMPIVHPHAAGIDLGNKAHFVCVPADSVPPGQSPVRQFGVFNPDLDQMVDMLKQCRVETVAMESTGVMWIPVFQKLEAAGLEVLLVNTKGLKHVPGRKSDMLDCQWIQLTHSYGLLSGSFRPADIICRLRTLMRQRENLIQGASSETQHMQKAMQEMGVHLHVVVSDVTGDTGLRIIDAILQGERDPEELVKLRDWRIRKSTVAEMKAALQGDWREELLFVLGQSRRVYAFFQEQLANLDAKIIALLAEIPEAPPPPAESSQVSSSGSGGPPEQSAGGESPASGSAERAPVPAQGKGQSRGRKKAKFKPKGAGNPLPRDVSPQLTKIYGTDLTLIPGLGILGVLIILSEIGADLKGRWRDGDTFAAWMGLCPGSKISGGKVLSSRTPHVVNRAAVLLRLAALAIGRTETCLGLFYRRIKARHGAPKATTATARKLAVLIYHLVTVGEEYHEPDLKKYDERARKNRIIRLSRQAKQLGFDLVPIEQAA

SEQ ID NO: 386441 - protein, 252 aa, unidentified
MPCCVGLEVATAQWDMALRPSGERWAVPNDASGVMTLVDRVPALHPPLMVLEATGGLARAVTSAVATAGLPVVVVHPRQVRDGARATGQVATTDAVEARARAHCADVIRPTPRPLPDAQTQELRALLGRRQPLIGMRTAAPHRLAGTNARLTKASAAHRTWRKAAIATLDDDLETIRRASPLWRANDDLVQRATGMGPVCARTVLLALPALGTRTRQQSAAVVGVAPRHGDSGTLRGRRMLWGGRAHVRTVL

SEQ ID NO: 386442 - protein, 362 aa, unidentified
MRIIGCDLHARQQTVAMLDTATGEVVNRTLTHEGNNVREFYSTLPRPVRVGIEATGSMHWFVNLMEELGIECRVGHPAEIRAAEPRKQKHDRRDADLILKLLTEDRFPAIWLPSKELQDLRSLLRHRHQWVRMRTRIQNALQSIALANGLRRGPTLWSHDGQNMIASLPLAPHTAYRRSELQAMYEKFEAEIEKLNQRVEEQACGRPGARLLMTHPGVGPVTALATDVFLGDPARFADSKALASYVGMIPREYSSGGRQRLGGLSKQGNPLLRFLWGEAGAHAVRRDPDLQRFYRRKLVQKGLGKASVAVARKLGIRLWIMLRDQIEYNEFCRRGQKQQKSSGACAGMPETPYGAKSHRPID

SEQ ID NO: 386443 - protein, 404 aa, unidentified
MWYAGIDWADTHHDALVIDEKGRQVGSLRVDHSPQGLSKLNTFLEQIIGTAPKEQMACIIETTHGLLIAHLLEAGWPVYPVNPRTVDRRRSASGAKTDTIDAYLLAKTGRADFADLHRLTPDSAKVAELKLLTRDQDALIQTQTRLVNQLTACLKAYYPVALELFSKLQQRTTLVFLQTYPTPQAAKSASTDQITQVLKQAGHPNPLAVAPTIVEHLQQPHLQADAVITRTKSRLLLALVGQLLPLIAQIAQYDKEITTLFLTHEDHEIFASLPCAGKRLAPRLLAEIGDDRTRDLDASSLQALGGTSPVLYQSGMYSKAHRRLGCIKPLRNVLHQFAWQTTQSEPWALDYYQRKRAEGKSHTVAVRALANVWVRIIFAIWMRHLTYETAIFEHAQQQHARPAA

SEQ ID NO: 386444 - protein, 413 aa, unidentified
MNPHHELSHYAGLDWAGEHHDVIIVDATGQLVADFRIEHSAAGWKLWSQKIAAYPKLGVAIETSFGMVVEQLLESGVIVYPVNPMASKRYRERQHPSGTKTDRHDAWALADALRTDGHAWRALGAKDPLVEELRVLCRDEVALIEERTALINQLRQALREYYPTALEAFEEWTTAASWAFIERFPSAEALGKAGARQWQKFLHLHKLAQPKTYEARLEAFAKAAEWKVNPGMVRAKSLYALAKVRQLRTLAAQLEEYRRRIEALFASHPDSGMFGSLPGAGPKLAPRLLGEIGSDRALYSDAQALQCMAGTAPVSYQSGKMCQVKVRRACNRSLRHAMHLFADKSRERSPWAGTYYEAQRQRGKSHAQALRALGQRWIKIIWKMWQTHSCYDAQLHLKNQLAHGSWVLQVQPS

SEQ ID NO: 386445 - protein, 322 aa, unidentified
MIGIDVSKDTLDYCIIQTENHEKKEHGVIKNTKHSINKFLEKIKLEDFELSLEHTGHYGALLTSMLSDKKASYFLINPLDLKKSLGIQRGKTDVLDAYRIASYTISNKHKLKPYNLPSRDLLKLKAFITARERLVKILVQLKNSLKANNILNKTVSIKLLLNQEKKLIRSIEKSISEVETQMKQTIESNPELGKSYNKIIKVIGVGPITAIKCIVETDNFTKFTNPRKFSCHCGLAPFPYQSGTSVKARTKTHYFRDKSLKSILFKASSTAIQHDPQLKNYYNRKTKQGKHKLTVINAVANKLVLRIFAVVNREEPFVKFVA

SEQ ID NO: 386446 - protein, 341 aa, unidentified
MEDYIGLDVSMKETAVSIRRGGQRVWRGKCVTDPAAIAALIRKRAPAVKRVVFETGPLSVWFYHALNARGLPAICIDARHAKAALDMAPNKTDAKDADGLAHLAEVGFFREVRVKGFDSMLTRTLVGARNQLVRMTTQLSNQIRGVMKTFGLLVPAGKGSKFERNVRHLLADRTELAAIVLPLLEAWRSLRTQAADLGTRLVATARQSPDCRLLMSIPGVGAVTATSFVAAIENPANFRTSRSVGAWAGLTPRRYQSGEVDYDGHISRRGDRHLRWLLYEAAAIILTRVRTESSLRTWGLGLRERLGFKRAAVAVARKLAVIMHAMLKTGEVFEPKPGPAT

SEQ ID NO: 386447 - protein, 348 aa, unidentified
MQVAIVGLDIAKNVFQLHGTDAYGKVVLRRKLRRQEVVPFFANLRPCTVGIEACGGAHYWARRLTAVGHTVRLMAPQFVKPFVKSNKNDANDAEAICEAVARPSMRFVPPKSVEQQDIQLLHRVRSRLVGARTQIANQVRGLLMEYGIVLPQHIGQLRRGLPEVLEDESNELTALSRRVVASLYGELAELDAKIEQLDAELKAVYAASEPCQRIAAVEGIGLLTATAAVAAMSDGRVFANGRQFAAWLGLVPRQHSSGGKARLFGISKRGDTYLRTLFIHGARSVVYRASRKTDPRSVWIADKQRRLGTTKACVAVANKNARIVWSLIARGERYRRSGEVLRTNERTA

SEQ ID NO: 386448 - protein, 342 aa, unidentified
MKIMTGIDLHSNNALCGLMDENGRRVLHKKLPCDLPAILQVLEPYKARIAQVAVESTYNWYWLVDGLEDHGYPVVLANPARMKQYDGLKHTDDVSDAYFLCELMRLGILPTSHLYDRQTRPVRDLLRRRMLLVQLRTSLILSFKSLNERTLGQRVPLARVKAMGLEEAQARFTAPADQLLSGEQIGLMGRLQESIAKIEKHILATAGQWKTFQRVQDVPGIGKILGLTIALETGDPKRFAGAGNFASYCRCVRSLRQSNSKKKGENNRKCGNRYLAWAFVEAAHFACQHDERCRRFYDCKKQKTNPVVATKALACKLAKASWHVMHGDVPYDPQRVFGGGTA

SEQ ID NO: 386449 - protein, 359 aa, unidentified
MSDICIIGLDTAKHVFQVHAVGKEKTILRRRLPRDRVLPFFASFAPCTVGLEACGAAHHWAREIAKFGHDVRLMPPSYVKPYVKRNKNDAADAEACCEAVGRPSMRFVPVKTEDQQAALVRHKVRDVLVRQRTQWVNALRGHLAEFGVTVRKGLSRVADLVAVIEDEADHRVPTVARAALRIIIDVLAGIDRKIEDLDREVATSAKADLVAKRLMTVPGVGPIIASRIAASFPNPGVFRSGRDFAASLGLVPRQNSTGGKSLLGGISKQGSGTLRRLLVGGAMAALFRSKEWRSDPWLVALRERKPTKVVAVALANKMARAIWAIMTHGGVWRSRPVDGTAVLALVKPEPPMAAAYGRA

SEQ ID NO: 386450 - protein, 394 aa, unidentified
MKLIGIDIGKNKHFFCVMDQQTGEIISQPVSFSNDKEGFDFLVQKIKSYPKDSILIGMEDTGHYHFALLKYLLDLQYTVALINPKTTDFNRKMQGGITKNDKIDTINICDVLDTPERKKQYRITKVDSFDLYEQKQLTRHHHNLKEEENVYKNRLQKCIDIVFPEFNKLFNSKYGIVYMNILKMFGSAENIANTDIRTIRKCFEIEGRGNRISLTPERLKECARSSIGISSSAEVIQIKHLTAQIELIEEQLTEIDKKIEEFSIQNNSPILSIPGISHFSGTSILAELGDISNYSKPSQIIKFAGVAPLHYESSQFNAQHTAITKKGSKYLRKTLYQIILPVIRHNPVFNKYYQLKISQGKGHRCAQGHCVRKLLRIIYHLLKTNQQFDPQLLR

SEQ ID NO: 386451 - protein, 409 aa, unidentified
MIYCGIDWAERTHDVALVDDSGQLLAKRHITDDSAGYKILLDLLVEYGDTEENPIPVAIETSRGLLVSVLRTGKRQVFAINPMAAARYRDRHSVSRKKSDPGDALVLANILRTDMAMHRPLPNDSDLGRAIAVLARAQQDSLWNRQQLANQLRSLLREYYPSALAAFEPWRNGLCRPEAREILRTAPTPTRAAKLTRTQLAAALKRAGRKRGIEEEADRLRDVFRADWAHQPPLVEEALGKQMLALLVQLEAACTAADDLAEAVEEAFPQHPDAEILLSFPGLGVQLGARVLAEVGDDRTRFADARGLKAYAGASPITRASGKKSSITRRRIKNDRLNHAGYLWAFASITASPGAKAHYRRRRDEHGDWHAAAQRNLFNRMLGQLYYCLRHRTLFDEQTAFPVELAAVA

SEQ ID NO: 386452 - protein, 339 aa, unidentified
MESYAGIDLHASNSYLGVIDSHDKRLFEKRLPNELDTIRSALKPFGKGLAGVVVESTYNWYWLVDGLQSAGFKVHLANPSAIKQYEGLKHTDDRWDSFWLAHMLRLGILPEGYIYPKQHRPMRDLLRRRLLFVRHRSAQILSLQSMASRNLGINLSSNEIKKMKQASAQHLFDDPDLAFTAENNISTINFLKTKIRSIEKRILAKTKLSPQFMILTTIPGIGNILGLTIMLEVGDISRFAKASNYSSYCRCVKSERTSNKKKKGEGNRKNGNKYLSWAYVEAAHFAMRYCPEARRFYQKKMAKSNGAVATKALANKLARASYYMMRDQVPFDKDKLFCW

SEQ ID NO: 386453 - protein, 353 aa, unidentified
MSSEKYVGLDVHKATIVAAVHDEAGKCLMTSIIETKAETIRAFIKGLTGAVHITFEEGTHATWLFDLIKPLVCEVVVCNPRHNILLQSGNKSDKIDANKLAELLRTGMLKPVYHESHGTQSLKQLAQCYETLVSDNIRVMNRIKALYRGRGIDCSGRGVYRESQRKDWLAKLKEPGTNSRAQLLYTQLESIKKLRGQARKELLKESRRQPASKLLTRVPGLGSVRVALIVATVVTPHRFRTKRQLWTYVGLAVVTKSSAEYELVGGQVRRRIKQTATRGLNRNYNRRLKKVFKGAALVATRSEPFASYYRDLIQKGTSPEIARVNIARKLAAIVLALWKRGEEYDQQKLKKSA

SEQ ID NO: 386454 - protein, 369 aa, unidentified
MGDRITYVGLDVHKDGIVVAVAEGGRRGEVREYGRIANTPAALQRLADKLGRDGVRLRFCYEAGPCGYGIQRQLSALGHECIVVAPSLIPKRPGDRVKTDRRDAASLAKLHRAGELTAVWVPDPGHEAMRDLVRARLDAVRALRRARQQLSGFLLRQGCHYGRPAWTKLHRRWLAGLKFEQAVHHIVLEDYIAAVEAAAARRDRLTAQIEAMLPDWTLAPVVAALQTMRGMALVNAATLVAELGDLSRFANPRQLMAYLGLVPSEHSSGASVKRGGLTKAGNSAARRLLIEAAWCYRFPARVSRELRLRQEAQPRPIREIAWKAQLRLCARYRKLARTGKPANVVTAAIARELAGFVWAIARRVPPTAS

SEQ ID NO: 386455 - protein, 343 aa, unidentified
MDQYIGLDVSLKETAISIRQDGKRIWRGKCASDPKLVAEMIRKHAPHARRVVFETGPLSTWFYHELTKEGVPAICIEARHAQKVLNETLNKTDANDADGLAHLAEAGFYKAVRVKAFDSMLMRTLVTARNQLLNISTQLSNQIRGVMKTFGLIVAQGKGRVFDNNVRQLLDGNDGLAKIILPLLEGWRDIRMRAADLGRQLVAAARESQATKRLMTIPGIGAVTAVSYVAAIEGPDNFKTSRSVGAWLGLTTRRYQSGEVDYDGHISRRGDPHLRGLLYEAATVILTRTSARNESRLKSWGLKLRERLGFKRAAVAVARKLAVIMHSMLKTGDVFNRLAGATA

SEQ ID NO: 386456 - protein, 458 aa, unidentified
MSKKSSKKAKSQRSRERALLNKVHLNAAGIDVGADTHWVAVPEDRDQRPVRNFGVFTSDLIALCQWLKACQIQSVAMESTGVYWIPLFQMLEREGFEVQLVNAKHVKNVPGRKTDVKDCQWLQQLHTFGMLGGSFRPQAQMCVVRSYLRLRDTLSKDCNSLVQRMQKALTEMNIQVHRVISDITGLTGMSILRAILAGERDCIKLAQLKHPQIKSSTQQIAKALEGDYCQEHLFALQTALELYDNYQLKIMECDKRVEEAMGVFEAKVQVAAPDLSRLRSAQKRQEALRRHHLEQMTGADLTKLPGLDLLAVQRILSEVGLDMSRWPSEKHFCAWLNVAPNNRISGGKILSSKPRKNANRAAAALRLAAQSAMQSKTAIGAFIRRMKVRLGAPTAINAGAHKLARLLYRMLKFGKAYVETGQEAYERLFKERTIRNLQRKARELCFHLTPATPGALVS

SEQ ID NO: 386457 - protein, 343 aa, unidentified
MPESTFQLELSSVCVVDAQGKIVRETKVASEPEALVAFFASLGFAVKRSGLEAGPLSAWLHAGLKRAGFDTVLLETRHVKAALSAMMVKTDRKDARGLAQLIRMGWFRPVHAKSMGSQEVRALLVARKQLLGRLIDVELSIRGILRGFGLKVGVVTRKGFEGRIRELVTGHITLERIAGAMLSARATLKVEYEKLHKIVLTIVREDAVCRRLMTVPSVGPLVAITYKSAMDDPNRIAKSKAAGALFGLTPKKYQSGEKDVTGGITRAGDEMVRTALYEAANVLLARITRFSKLKRWGMDVAKRRGSKRAKVALARKIAVILHRMWVDGTTYRWTDAQPTAVQV

SEQ ID NO: 386458 - protein, 347 aa, unidentified
MEKASQAEVQVFVGIDVSARELSVAVQCGIKEGIAITTFRNQAAGHKALLAYLLRAKGRARVCLEASGNYSLDLALTLQAHPQVEISVVNPRRARRFAESLGERSKTDPVDARVLCEYALRMPWVPWVPPSLAALRLRSITRAIEDLVAMQAQEKNRQHALLASDALPALLIRELEQHLRYLKLRITRLRREALRLIARNPELNRRFHLMLMTPGLGETSSLQILGELAVLPETLDARQWVAFSGLDPQQFSSGTSVEKKPRISRGGNRHLRRALYMPALVATRHEPFLRDFYQRLLRRGKAPLQGVVAVMRKLLHALFAMFRRDEAYDGSKLCPVEFARHTAVVCV

SEQ ID NO: 386459 - protein, 370 aa, unidentified
MGKRSMFVGLDVHKESIDISIAEEGRQREVRHYGVIAGDLEALAKVVRALRAPDRHLRFVYEAGPCGFGIHRYLTTHGEDCVVVNPSSMPKRSGDRIKTDRRDGEALARLHRAGELTAIYIPTPDDEAVRDLVRAREDAVGLSTQAKHRLKAFLLRQGRRYPGRAAWTTAYRRWLADLSFPLAPQHIALQEYRDTIDETERRVARLTDQLRQLTPMWRWAPVVDALQALRGVSFVTAVGLVAEVGDIRRFTHPRQLMAYLGLVPSEYSSGPSVRRGRITKAGNPHARRLLAEAAWAYQGVPRLGRQMLYRQEALPKSICDIAWKAQLRLTSRFRRLVARGKEKPKVATAVARELTGFIWAIAREVPAPVA

SEQ ID NO: 386460 - protein, 415 aa, unidentified
MDVVITRCAGLDVHQATVVATIRVPTDQGGRRIVTETFGTMAADLLALRDWLQAYGVTHVALESTGVYWKPVYYMLEDTFTLLLINMHALKRVPGRKTDVKDSEWLAQLLECGLLQSSFVPPPPIRELRDLTRYRVQQVRDRSREVNRLCKVLEDAGLKMTTVITDVMGVSGRAMLTALVAGTTDAVVLADLARGMLRKKLPELRRALQGQFRPHHAFLLQQILAKIDFLDETLERLTAEIDRRLVPFEPVLAALDTIPGVNRTSAISIVAETGADMHRFPTAGHLCSWAAMCPGHNESAGKRHSGKTRKGNRYLRAALIQTGLSATRKNGSALQARYHRVKRQRGHKKAVVAVGRQILEISFHIMRDGVTYEELGADYFDRRHAERATRRHVRYLEALGFRVTIEKGDAQPTSG

SEQ ID NO: 386461 - protein, 421 aa, unidentified
MRGPRRRKTRMPKEGTLLVTVDVGVASNTGYCATVDGQDIKPFKFENTREGFEKFWHMIVVTKNRFGCNEIIAGYESTGPYAEPLASYLMHKPVSIVQVNPMHTKRMKEVNDNAPLKTDDKDPRVIADVIRLGRTLAVVVPEGDAAYLRRLNNARERHVEEQTALLNQLQQLVFVIFPEFKTVLKNMKCKTARYLLTRYTTPEKISTASKETLGEEMRKRSRGKYGHKDAALLIDLATNTIGIKEGVMGIMLDIRHILTQLEAEARFITEIEAEMVVTLQRIPCSSRLLSIKGLGVVSVAGLIGEVGDFSKFRTRSEIMKLAGLDLYEVSSGKRKGQRRISKRGRSLLRKILYYAAIQMVKTNGIMYDYYTRLTNRGMLKMKALIAVARKLLGIIHAVVRDDRDYVGVYQAPKRRMIKKAA

SEQ ID NO: 386462 - protein, 411 aa, unidentified
MVSTESKYEGVETMYYCGIDIAKRKHEASVIGESGRLLAKSFPVVNSAEGAAVLFGFFKEHGIDKDGVIIGMEATGHYWLALYSYLTEAGYDVKVINPIQSDAFRKMYIRQTKNDSKDSFIIAQVMRFGEFKTTELSEERIIALRQLSRYRLNLVESIGDCKRRIISLLDQVFPEYADLFSDIFGMASLELLKKYPSPDELADVPTKQLTRFLSKVSKGRFKESKARELKAVARGSFGVSFAKDAFAFQIKQIVEQLVFLDEQTEALDGEIGVLMKELSSPITTITGIGPVLGAAILGEIGDINRFSHPSKLVAFSGLDAKVVQSGEFTGTQGKMSKRGSPYLRRAIWLAANVAASHDPTMSEYYSSLRNRGKHHYVAISALARKMCNIIFAIMTENKPYDPLYQKRIKEA

SEQ ID NO: 386463 - protein, 482 aa, unidentified
MKPKQKDKSKTATGRPTQPSWQEMNRKQRREMVRKIQSEELRLDVIHPDAAGIDIGNESHYVAVPPSRDSQPVRRFGCTTAELKVMAGWLHQCGIRTIAMQSTGVYWIAVYDILEEAGFEVYLVNARETKNLPGRKTDVQESQWLMKLHTYGLLRNSFRPPQEIRTMRTYWRQRNDSVQAGARHIQRIQKALTQMNIQLANVLSDVSGMTGQAIIKAILAGERDPHKLAELRDPRVKASEEQVERSLEGHWQEDLLFVLKQEQDGYEFCQDQMAECDRRLDQYLQQQKDRSQGASLPEEKRKERLKKKKGNKPRFDLRTGLFRMAGVDLTQIDCIDVMTAATILSEAGSDMSRWETEHHFVSWLRLCPDNRISGNKIIGKGRLPTSNRITSALKMAASTLRTSNTYLGAQFRRLRTKLGAPIAIKAMAAKLARLIYRMLRYGMKYVDQGAEFYEVQHRKLQIKHLKSKAAKLGFQIVQAPAA

SEQ ID NO: 386464 - protein, 433 aa, unidentified
MKSKAYRGTDVNRVDAGSLARGHEGQALVVGVDVGKFQLAAVGRWADGQFERPWRVANPGQVRDLVGLLGALASQRTVTVALEPSGTYGDPLRQALEEAGLAMRRVSPKAAHDYAEVFDGVPSQHDGKDAAVVAELAALGKATPWPYRPPSEWEQELAYWVEWMDAQTHILTTWQGRIEALLSRHWPEATRVLKVSSATLLRVLEAYGGPAALAADAEAAARVQRWGGRFLDAEKVRRLVGSAGATAGVRQGAWDRQRLQDYARQALQARREVRRAQGRLRQLATGQAILQAQGKVVGVPTACVLWSCVGDPRDYSCGAAYRKAMGLNLTERSSGTYQGKLKISKRGHPRARKWLYFAALRLVKQEAVALWYRAKKDPGGRDAKRAVVGVMRKLVLALYQVAVAGVAFEAGRLFPGCRQPEDAAQTAAAKRQR

SEQ ID NO: 386465 - protein, 413 aa, unidentified
MDVFCGIDWAEDHHDIALADRDGKLLARRRISDDAAGLALLLGLLTEHGDSADDPVPVAIETPRGLLTACLRATGRKVYPINPMAVARYRDRHSAAGRKSDHGDAIVLANILRTDRHVHRPLPADTELAQAIAVLARAQQDAVWARTGAHNKLRSHLREYYPAFLAAFADARGGITRPQARAILAVAPAPAAGAALTPTPLRALLRKAGRRRSIDAEAARLRETLRAPQMRQLPLVEDAMGRQALALLRQLDAACAAADDLEQAVIESFNQHPDAGIITSFPGLGPLTGARVLAETGDDRSRFADAKGLKAYAGAAPITRASGKTTAVLHRRVKNQRLAATGYIWAFAALTASPGARAHYDRRRNDGDRHAAAQRNLFGRLLGCLHHCLATRQAYDEKTAFPAPTPTANANTA

SEQ ID NO: 386466 - protein, 320 aa, unidentified
MNTLNKNQPLVYAGLDISKAQLYLHLHKEHHIFPNDPKGRAALLKKVRASGEVQIICEATGGYEAGIVAVLHAAAQPVSVLNPARVRHFALAQGQRAKNDPIDSAVLTEYGQALRPEPTEPTEPARAELRALVQWRDQIKEQLARVRQTTEHALVPYVARQHKKLLAHLEKQLADVEKECRKALVRTPTLQQQVRQLEQLDAVGTITAVSVLSHLPELGTLNRQQAAALAGLAPWVRQSGPWEGQRHIGGGRAAVRRALYMSAVVLARMKETSLGKFYARLRAAGKPAKVALTAVMRKLLLQMNRTLQQLALSIPAPQPV

SEQ ID NO: 386467 - protein, 347 aa, unidentified
MLAQRVDHVIGVDTHRDSHTAAVLDTTGGAVADVTVPADAFGYKRVLAFGRTHAPGRRAWAIEGTGSFGAGLTTFLLEQGEWVVEIDRPARPARRNGAKSDELDAARAAREALARDHLAQPRSRGEREAVRVLLVTRQGAVVSRTRAIAHLKALLVTAPEQLRNHFRNMSTDDQVVRCSRLRTSPTQAAEHRSTILALRSTARRILALEAEANDLESEIERLVKGLAPRLLEERGVGALSAAQVLCSWSHPGRLRSEAAFAALGGSAPVPASSGQTVRHRLNRGGDRQLNRALHTIVLSRLAHDDETKAYAAKRRAQGKTPREIKRCLKRHLARRLFKLLETSARGA

SEQ ID NO: 386468 - protein, 361 aa, unidentified
MKNQSQHLIAEVPRRQRRVERTIGIDLGDVWSHYCTLNEDGEVVDRGRFRTIPKAVETWFTDLPPARVAMEAGTHSIWISEQLEELGHEVIVANVRELRAISHSDRKSDQVDAEKLARYARLDPEILRPISHRTVEQQEALTLIRARDLMVRLRTAAVNAVRGLTKSCGHRMPASSTRCFAKRSVAVMPPGLAQALGPVLEQIAEMTLKIKQYDRQIRELGQAKYPETQALVKVTGVGHLTALTFVLTLGSKERFERSRDVGCYLGLRPRRSQSGDRDPQLGITKAGNVYLRSLLIECAGHILRPQGKDSSLRQWGLHLASRGGKQARNKAVVAVARKLAVLLHRIWITQEPYVPFYAKAA

SEQ ID NO: 386469 - protein, 317 aa, unidentified
MHTTPLFVGIDVSKDSFAVHVFPSGEAFSSPSTPEDIVTLVARLRTLDPQLIVLEATGGYERLLVAHLAAADLPIIVANPRQVRAFATGHGFLAKTDAIDAEVLARFAERTLPQLRPLPSADTRAFADLVVRRKQLIDLRTIESNRLPLAVHPRVQKGIRKLLATIKGQLNDLDEQMDQLIQSSPLWRAKDELLQSVPSIATHTSRTLLSLLPELGTLTGNKISALVGLAPFADDSGRIKNARHIRGGRMSVRNALYMATISAVRFNPVIKAFYQRLCAKGKAKKVALVACMRKLLTILNQILKTRTPWREIVIKNP

SEQ ID NO: 386470 - protein, 411 aa, unidentified
MGYRIAGIDVHKKVLMAVVLDVEAGQPEVGQRRRFGATTSELIRLRLWLEEQGVKEAVMESTAQYWRPVWMELEPHMDLQLAQAYSNRAPRGRKHDFKDAERLVRRRLADELILSFVPQPEQRAWRTMTRMKTQLARDRVRLHNQLEGLLEEMRIKLSSVVSDLLGASGQRILRALANGQTDAQKLAALGSSQLQCGQQQLIDALNGTPSAMHRQLLGLYLERLEVLDTQMDKLNHMIATAMKEHEEAVMRLAEVPGFGADSAQQVIAEVGPQARAFDSAAQFTSWAGTCPGKEESAEQNRSSRSAKGNKYLRRVLTEVAQAAVKTKGSHYQIVFRRLLPRLGYKQALWAVVHRLCRLVWKILHDRVNYIEQGLQRDPKANQQRARTLARQLRRLGYNVNIQPLQPNTAPA

SEQ ID NO: 386471 - protein, 472 aa, unidentified
MTEEKTLCVGIDVSSRHLDLACCDGWGVPVGRTRSFPNSPAGIEALCDVVVVSGQKLGSDLQIIAGLESTSDFHRPAAKALSAETRVSIEVHVLNPRKVKWFRHLELKDTKTDRVDAELIARFVAKIRPQPQAVVSEGCVQLQDATRTRRRCMEDRSRLKNRLHRLLRSYWPGWREAMSRHFGGRTLVALKACPSPHDALRRGAGRIAQLRNSDGKRIGRIFSDNFVAVAKVGPAPQLPIMVCISIQDAAARILQLNCLLKRLDAAIAEELAGVFPDNVLLSIPGLGPVSAASILAEIGDIRRFPNKEVFIGYCGLYPIAWESGNTKLRFGMTRKGNRMLKLSLLLASGPARQCNPFLRHFYTRLRERGKSAKAAGGAVARKLAEIVWVTLTRNEPWSEEIALRGIAKSERMTQTDQGERCLTRDAAGQTPVARPIKAASRSIAPHLDSTKSPGASQAPNHRLRPSRRLVAP

SEQ ID NO: 386472 - protein, 354 aa, unidentified
MAPPVPIIGIDPHKRSHTAVVLDDCEEVIAHLRIDAGHCQADQLLAWAPPDPARVWAIENANGLGYLLAQQLIARGETVVDVPATMAARARKLSGKSGTKTDAHDARSVAIAAAHHRSLRQIIPEDLTTVIGLLLDRRWQLVSQRQRTICQLHATLTDLTPAGAKTHLTCDKTVALLRRTRPVTAVEASRKQVAQELLEDWRWLNRRIPPAEDRLFRAVAAHGTTLTSIYGVGDVGAATIISIVGDVTRYPTAGHFAAFCGTAPLQASSGDVIRHRLSRRGNRQLNKVLHVAARCQVRNGAPGRAYFLRKIEEGNGHLEALRKLKRQLATVVYRRLLADQAVRGGQVGTRPKSA

SEQ ID NO: 386473 - protein, 404 aa, unidentified
MIFVGIDWAESHHDVCMLDADGSLLAKGRVPDGVEGVARLHEMVSSHADDPSEAIVGIEIDRGLLVGAIVAAGYEVHAINPLSVSRYRDRHRVSGAKSDPGDARVLADLVRTDRHLHRQVAGDTDLAEGVKVLARAHQGLIWSRQRHLNQLRSALREFYPAALGAFGTDLASADALGVLAAAPTPAQGRALSGSRIAAALKRAGRRRGVSKRAEEIRSALRSSQLEAPEVVSRAYGEVVRATVRIVAEMTQQIEALQRELEARFEEHPDAEILRSLPGLGPVLGARVLAEFGDDRTRYADPKARKNYAGTSPITKASGRSRVALARFARNRRLADALDMWAFCSLTTSAGARRHYDVNRARGKTHRQALRSLANRWVGILHGCLRHRQLYREEIAWPGSVEAAA

SEQ ID NO: 386474 - protein, 423 aa, unidentified
MEVMHERVAGLDVHKAMIVACVRIMADGKINRECRTFDTSTAGLKALLGWLTESGCTDVAMEATGVYWKPVWNILSDGEFELIVANAAHIKNVPGRKTDVNDAMWIGDLVACGLIKASFVPEQEIQELRSLLRARKQLTREQTSHIQRLQKTLEEANINPGLNPGDILGATGRRMIAAMIAGVTNPLQLAALADRRIKASPKALSDALHGRLTDHHRFMLKLYLGQHDCLSEAIARIDQQVHGLIIRMDEQLEAGQATLRALIILLCSIPGIGTLAATGILSEIGRDMSRFPTSGHLLAWAGLCPGQNESAGKRKSSRLRKGAPWLKTMLVQCAWAASRKKDSYYKVQFNRLRSRRGPKKAICAVAASMLTAIYHILKDGTEHQDLGADHFDRRSTEVKAKRLVEQLAKLGYQVELQPVAKAA

SEQ ID NO: 386475 - protein, 342 aa, unidentified
MKITTVGIDLAKNVIQVHGVNEQGKKVFNKQLQRKRMLTHFAQLPPCLIGMEACSSAHFWARKLQGMGHTVKLMAPQFVKPYVKTNKNDAADAEAICEAVTRPTMRFVPIKNGEQQAVLSLHRARQGFVKARTAQANQIRGLLMEYGITIPQGISHITKRIPELLEDAENELPGVFRQLLQRLGDHLKALDRQATELEEQIQTWHRESEASKTLARIPGIGPLTASALVASIGDASSFKNGRQLAAWLGLVPRQHSSGGKPRLQGISKRGDTYLRTLLIHGARSVIRVATGKTTPMHCWAVNLVERRNKNVAAVALANKNARIVWALMTQNREYQSDFVQTV

SEQ ID NO: 386476 - protein, 437 aa, unidentified
MRSRYAGVDWAAEKHDVVVQDQAGEELLMATFAHDEAGLRSLCRTLVRMNVSLVAIERPDGLLVERLLDAGLRLLPLHPNQVAAARPRFRAAGGKSDRFDAFVLCELARTDHHRFRVLEPDSEQTKALRAMTRAREDLVGARVALCNQLRSELEQFWPGPIGLFKDLDSPISLAFLARYPSPRDARALGPKRMQAFLAGQGYSGKKPAGELVAKLRSAPDGRAGQTEMTARRQVVLALVATLTPLVVQIRGLERQIAAAVRAHPDGEIFLSLFKGSTITAAELLAEIGDCRSRYPTRDALAGDAGQAAVAIESGKRKTACFRWACNKRLRDAFTTLANTSRQWHPWAADHYAAAIARGHDHPRAIRTLGRAWSRVIWQCWQNRVPYDPAKHRALQQRLTVIVPTTSGPVIDHAATARMAAGLLATNPADSLEVSVAQ

SEQ ID NO: 386477 - protein, 427 aa, unidentified
MRFYTKPHRYYCGIDLHARRMYICVLDAEGQIRVHRNGPATPEHFLTTVAAYREDLVVAVECIFTWYWLADLCAREGIAFVLGHALYMKAIHGGKAKNDKIDAHKIAVLVRGGMLPMAYVYPREMRATRDLLRRRCHFTRKRAELLTHIQNTASQYLLPTLGKIAYHGNRGGVAEQFRDPEVRKSVETNLALIDEYDRLLGALELHLTETAKVHDVNAFYRLRSVPGIGKILALVLLYEIHDIHRFPRVQDFVSYCRLVKCAKQSDGKHYGYSGTKIGNAHLKWAFSEAAVLCLRKNPPAQRYVARLAHKHGKGKALTILAHKLARAVYHMLRRGQAFEATKFFAQTTPGDRSARIESDRNTRDEVHDVDAVHDASRSGPTRHDREGGRYLDPPENERRRSRPRVHAGGPEHPARAAGAADRVEEAR

SEQ ID NO: 386478 - protein, 343 aa, unidentified
MHTPYHFIGLDVHKRTVAYCEKRADGKEIASGTFGMHKQDIEAWVTQRTRPWVGGMEATLFSGYLYDMLMPHAVEIQVGHPFRIKAISSAKHKSDELDAETLANLLRADLFPQCYMASSLVRELRRVLRYRNFLVRQAVCMKNKTTGILMETGVQYDGRRIHRESYFNELLSSLEDVPNSVRELLRTTRTGLEMFQATQKQLLNALIKHPELRERVERLMSIKGVGEITALTWVLEIDDPARFANLKRVQSYCGLCSGQNESAGKSKTGPLSKQRNPHLQTVLIEAAKLAPRWNPQLKQVYTTALEKDKNRNRATCAVARKLVAYLMAVDKSGKPFEAPVPKH

SEQ ID NO: 386479 - protein, 304 aa, unidentified
MNGIGIDVSKRRLDVGTSDGQTLQVSNDPSGFAELDLWLRERPSNQIVLEATGGYEQPVLDFLHKAGHPVVRANALRARKLAQGLGQRAKTDRLDAYALAQMATLVKLPAYQPLEPWQQKLREFVRARRQMIQALAVARQQQEMVGDRELRRLLQANITHLKTLVKRLGKQIAEQLAQQPQLTVLKSMKGVGPVVQAVLASYLPELGHISGKAIASLVGVAPMSHDSGTMRGKRSIHGGRAEIRQVLYMAGMSALQHEPRIRDFYRSLRARGKEAKVAIVAVMRKMLVILNARVRDAQSGPIPA

SEQ ID NO: 386480 - protein, 397 aa, unidentified
MYIVGIDIAKRKHEAAVIDGEGTVIIKPFSFTNNCSGYNRLLAMLAKAKLPLDEVSFAMEATGHYWLALFTRLQKEGFRVQVINPVQTNSIRSFYIRQAKTDPRDALLIAEVIRFGHFSESTLHPENIYELRELCRGRHAIVSMQADVKRKVVALLDQVFPEYETAFTNMFSDTSMAILQTCPTPKELSEMPLEELCHLIEVSSHKRFRMAKARELQELARNSFGFAMAGDVFSTMIRLYAKHLDFLKQQVREMDRKIAEIMETLDTPITTITGIGPTLGAYILSEIGDISRFSSAAKLAAYAGIDPTMRQSGKYNGVRNRMSKRGSPYLRHAIWLAASSAVLHDPALKLYFQKKRDEGKPYMASVGHACRKMVSIIYAVMRDNKAYVPYIPSKIFA

SEQ ID NO: 386481 - protein, 338 aa, unidentified
MTIVMGLDQHRGQVTAEWIETATGEVSRARVVPAHREPVRRFLSRFRGRELEVALEATTGWRFVVEELRAIGAGVHLAEPAETAARRGNKKRAKSDRADARHLRELLMIARLPESWIAPDHILDLRARVRLRHTLSQQRGEWQQRIQAVLYHHGLPQRRDLLTRENRAWVERAALPDSAREQVTVALAMIDALDVQLAPFDRELRAYARRQVGCRALMRHYGIGALTAITILVELGDCGRFSSSRLAVRYSGLDITVHQSDQRRAPGHLSRQGPPALRWALFEAAQVARRPGSPDRDYYEQAAARLGANRACLAVARRLLKRSYHTLRELGQEALAPA

SEQ ID NO: 386482 - protein, 411 aa, unidentified
MDVVNARCAGLDVHKATVVAGVRVPGPQPGARRGETKTFATTTRGLRDLTNWLLTHGVTAVAMESTGVYWRPVYEALEGSVQLVVVNARHVKMVPGRKTDVKDCEWLAQLLECGLLRGSFVPPRAVRDLRDLTRLRKALIRERGHHVNRIAKTLELAHLKLSCVVTDLMGKTGRAILHALSAGIDDPERLAECAQGSLRKKQAALREALVGRLTPHYAFLLQQHLSLIDGLDAHMATLDTRIEAAMAPFAEAAALVQTMPGVAARAAQAILAETGVDMDLFPTPAHFASWARLCPGNHESAGKRQSTTTGKGATWLRATLQEAAWAAVRSKKSYYRALYHRLKGRRGAKKAIVAVQHAMIVALWHMLKHRVAHHDLGADYFERHHTARIRRHHVRRLEQLGYDVVLVEKAA

SEQ ID NO: 386483 - protein, 355 aa, unidentified
MTASYDYHIGVDYHKSYSHLVVQDSAGKTLRSGRVKNDRQSLGGFLERYRENSHAVVEATRNWMVIYDWLDDICDDVVLAHPLKVKAIADAKIKTDKIDATVLAHLLRADLVPEAWAPSEKSRDLRVALRERMFYVRLRTMTKNRIVTVFDRYPEQTAQLKKLGDLFGKAGRVQLAQVNVSEIDRIQIDRGLAFIGDIDGRIKQSEATIRTMTKANGNVRLLKTIPGIGEFFARLIDAEIDDISRFRNAKKLAAYAGLVPSTYSSGGKTFHGKIIKQGNKWLRWAFVEAVTPAIVTDAQLRAQYEHLKFRGVNKARVAIARKLLTIAFQILRDQRAYEPRGASPTEGASTISRLS

SEQ ID NO: 386484 - protein, 416 aa, unidentified
MKKNTNSPMKKEPRAKRAKARRPVQREPKEVLAELVEKLQGKLEVKATSASAAEAGPRAELEPNLDRLTVGVDLGDQRSHFCVLGLQGETLSEGQLQTREAEVAAFFQALPPARVVMEVGTHSAWMQEIIAGEGHEVLVANPRLMEGSKRRKRKNDRIDAKKLARLGRVDPQSLHPIRHRSREVRQDLVVLRAREALVAARTELINATRGLVKSMGTRLPKCSSPSFEQKVKDAIPEKVREALLPLVQLTGVLSDCIRSYDQKIEELGSEKYGQTKLLRQVKGVGPITALAYVLTLENPEHFAKSRDVGPYLGLVPKQEDSGESQPQLGISKAGDTMVRKLLVGSAHYILGPFGPDSDLRSYGLRLCERGGKNAKKRAAVAVARKLAVLLHRLWVSGEVYEPLGYVASRAIVQQAA

SEQ ID NO: 386485 - protein, 312 aa, unidentified
MTNDTIGVDISKDHLDAHRMSDGASRRFANDEHGHRALLKWLGGKTGTRIVYEPTGAYHRAFERRLAEADLALVKVNPRQARRFAEATGRLAKTDPMDAAMLARMGALLDLQARPPRSPILNDLKDLHMAREALVKNRTAAKNRAKNLTLAILKRHNGAQLRQIERQIAAIETAIMALIKADSDLARRFAILVSIPGVSAITAFTLLIDMPELGSLENGQAASLAGLAPVARQSGKWTGRAFIRGGRANVRRALYMPALVAMRCNDQIKAKYDRLKAAGKAPKVAIVAIMRNLLVLANALLRDCRKWTPKMP

SEQ ID NO: 386486 - protein, 407 aa, unidentified
MLFIGVDLSDKTFDFCITNSEGDVLNISKSDFDDDGFSVFVFKIEQYEPDSQMCIIGLENPHSRLVDFLIQRGYNVIPTHPQSIAKYRESRIPSRAKSDPMDARIIADYIREHHKNLRTISLPDDTIRELSILLEDRDKLVEQKTRFSNQLTVTLKEYFPQALEAFGSITNKSALEFLSMFDTHQQVKALSSQELDKVLRNCGFFRTDSKERFQTAMSKKPSAISQAVIKAKSRLKNALVGHLLLLVQQIEDYEKQIQKILDSLIDGSIFRTLPGADYILGARLLVLYSSRDFSSASEAQAFWGTCPYTSRSGSVIAIGFRKGCNHFGRDTFHQLAFCSLKGSQWAKKQNAKKRKEGKGSNHALRCIANTWVKITYAMWINKTPYDESRHLASIARHIMNQPAFIQG

SEQ ID NO: 386487 - protein, 354 aa, unidentified
MLAELVDHVIGVDPDHDWITGAVVDAHTTGVVAKQKFPTDATGYNDAISWAEEFTVAGERAWAVEGTASYGRCLTAALARRGEWVIEFDRPREKACKDGAKSDELDAVRAAREALGRDRLHQPRAHDGHREALCVHTVTRAGVVRARTASINELKALVLTAPDDLRQELRHLTTRALVKRCAAFRDTPQRPVAARCARNTMRLIARRIICFNDEVAVHDTAMKQLIDEAAPQLVVEPGVGHVTAAMFYIAWSHPGRCRNEAAFARLGGAAPLPATSGQSQDRHRLNRSGDRQLNSALFVVALSRTRIHQPTRDYRDRRRSEGKTDREVRRCVRRYIARRVWRLTEHPPVLEITA

SEQ ID NO: 386488 - protein, 379 aa, unidentified
MKTTAKGVLQTGGEQVAVGVDPSRNALQLAILAPHGTTTKRFPLVPASLASIDAVLGQGQGVRIGIEGAATCGAMVLLHWLRQGYDIREVNPQISKRLRECLTESHTDISDAQGLAWSVRFHPHLPKVRLTVTTAAWKRLSRLRARLVKARTGLYNRLHSLLAESYGAVYKRLFPNLKSKRALEFFQAFPTLDDALDDLPQVRSLLGEERARLLEEAGRWGEGLYLETLRLEICLTIQLIFAHRTAIEGVEAKMAELSQADPQVGRLRAVPGMGTTLALTILGHSGDFSRFESHDAYAAYCGLAPAVWQSGQSRVYAKRRRRYSRPLKQAFLQLALTQLRLNPESRAYYERKRREGKPHWVALIALARQLCKKVYQADG

SEQ ID NO: 386489 - protein, 354 aa, unidentified
MDHVAIDLGSKESQICVRTMNGTVSSETRWPTRSLGKYLAKLPASRVVMETCAEAFQVADLARQAGHEVVVVPAMLVRALGVGARGLKNDVRDARNLSEASCRMAKLPSVHMPSSRSRELKTVCGMRDALVATRTKLVNTVRGWIRAQAFGQLTVGCVSTFPRRVKALLEKHTRPLPDFVVRQLMTIDFLTQQIAQADRELEHEAKSDPLCRRLMSVPGVGPITALRFLAAIDEIKRFPNAHAVQSYLGLTPGENSSSERQRTTSITKAGAKHLRWCLVQAAWTARRTRKDDPMSLWAMQIELRRGKAIATIALARKMAGILFALWRDDTSYQPSRTAAALAVTPALTAPAPTV

SEQ ID NO: 386490 - protein, 425 aa, unidentified
MNYKQNEKINQVKESTLVVGIDIGSTTQYARAFDWRGIELGKVFTFSNSREGFESFKAWMQHLQDKYKKLDAIVGIEPTGHYWFDLGAYLEDEGILLVMVNPYAVKQTKELDDNSQSKNDRKDPKVIAKLVTEGRYSAPYTPDGVYADLRIMVANRKRLIREMTQIKNRFARWFAIYFPEYTDVFGDYEAQSSMLLLKKVCTPEAIVELGAEKINQIWRDAKLRAVGMKRATTLRETAKRSIGLKKGSSAAQYEMKLLLEDYEYKKAQLDAVMEEIEKLCRKIPESEQMLAIKGIGVITVAGFLAEVGDVRRFESPRQIQKLAGLSLRENSSGKHKGQTTISKRGRSNLRAVLFNAAIPLIATNPEFKSLHEYYTTRANNPLKKKQSVIAISCKLIRVFYAILANGVTYDAQKMLSDIHRQPQAA

SEQ ID NO: 386491 - protein, 342 aa, unidentified
MKVIIGVDPHKATHQAVAVNDRETEIDRISVRATRTQTERLLSWSAPFTERVWAVEGAGGLGYLLAQQLVDAGETVVDVPATLAARTRVLASGRSNKTDPNDAWSVAVTALRSDALRQVAPASHTEVLRLLSKRNTDIGNQRCRLVSRLHSLLAELAAGGIAKEINASDVDRFLAGVTPTTPTEQTRFDLAVELLDDIRRLDTQLKASHRRIRVAVTASATTVTDLFGVGPIIAAGLIGYTGDIARFQNRDRYAAYNGTAPVEFSSGGRTVHRLSQRGNRQLNHALHMAAICQLRQPHSAGRAYFDRKVAEGKTNKEALRALKRQISNAVYRQLVVDARNSD

SEQ ID NO: 386492 - protein, 310 aa, unidentified
MGDCIGVDVSKHHFDWTVGGEGSVDRVTNTPTGVRRLVASIRKLDVELIVVESTGGYERSLTVALSEADLPVVLVNPWRVRRFGEGLGVLAKTDPLDARVLALYGERAQPERRPIPGPRQRQLTDLVRRRRQLIAMVVAEKNRLDTASAVVRRDIQALVKVLERRVLKIDERIDAAIASDAEKAENWERLQSAPCVGPGVARALIVDLPELGALSRKQITSLVGLAPFAKDSGKKTGQRRIRAGRSGPRTALYLAAMNGARFNPVLKVMYERLTAAGKPPKVAFIALARKLLTILNAMVRDGTNWQEATT

SEQ ID NO: 386493 - protein, 410 aa, unidentified
MNTHTLARTSPAELIGGVDTHADTHTLAILTGHGGVISTETFPATATGYDQMITALNDAGQVTAIGVEGTNSYGAGLTRALIGAGFTVKEVLRPTRQIRRMDGKSDPVDAIAAGRTILAGEGISETKDTTTPAEQIRFLLVARDKLINTGRAISNSIQSLLVTAPQALREQYQGLSTPMLIARLAACRPSTQITDVTDAAKHTFKHLAQAYLDTQKRAEELKTQIHAILATHYPGLLAVYGVGPIVAAQLVVTIGGNPHRVRNEAAFASLCGVAPIPASSGKTNRHRLNRGGDRRGNAALHRIVLIRMQREERTRQYVDRRTKEGKSKREIMRCLKRAVAREIYRVLTRPHTNQAPPTLTLRTLREDRGLTLTDAANALETWPARISDIETGRRPLPGLQQRYETWLKAS

SEQ ID NO: 386494 - protein, 354 aa, unidentified
MSNKSNLTVATMGIDIGKNAFHIVGLDRRGAIVLRQRWSRGQVEARLANMPPCLIGMEACVGAHHLSRRLQAQGHHARLMPAKYVRPYSKGQKNDFRDAEAIAEAVQRPTMKFVTTKTADQLDLQALHRVRERLVSQRTGIINQIRAFLLERGVAVRQGLRFLRAELPIILATRSDVLSPRMLRVIEELAGDWRRLDERIDGLSQEIEALAWQDPACERLMTVPGIGPIISSAMVAAIGNGAVFMKGRGFGAWLGLVPKQISTGDRTILGAISRRGNRYLRALFVQAAWVVLVRIKDWDRYGLKAWIDAAKKRLHHNVLAIALANKLARIAWAVLSKERAFECVKTRATSSQPA

SEQ ID NO: 386495 - protein, 339 aa, unidentified
MNEVSIIGLDIAKTVFQVHGVDCRGEVKVRRSLRRCQVVKWFSKLGPCLVGLEACATSHYWARELGQLGHEVRLIPPAYAKAYVRRNKNDAADAAGICEAVSRPGMRFVAIKTEVQQAAGGLHKVRELLQKQRTMQINHLRGLMAEFGIVVATGPQHVKELLAIVADAEDRRLPELLRGALVGMAEVLRGLEQRIEATERQIVAWGRSNATYQHLISAPGFGPILAGAFTALVVDPAAFCSGRDFSASLGLVPRQEGTGGKVRLGPISKRGNGYLRRLLVNGAMAVLGSKRGRQDPWIAKLLARKPRKLVAVALANKMARIGWAIMIRQEDFRTQPAAA

SEQ ID NO: 386496 - protein, 344 aa, unidentified
MTTIDYIGLDIHKKTISFCAKAQDGTILDEGTIPALRKTLLAWAQARPRPWIGAMEATLFTGWIYDFLKPWAQALKVAHPPMLKALTAAKKKNDKVDARTIADLLRCNLLPECHMAPCAIRDLRRVLRYRNLVVRQATRIKNRIAGLLMETGTPYNKRRLHGKAYFGELLGSLQEVPPSVVELLKLSRGQVEFFAAMQRRLLKGLREHAELNQRVMRLQTIPGVGEILALTWALEVGEVKRFSSIGHAVSYSGLTSAQRGSAGKEQRGPISKQRNKHLQVVLIEAAKLAPRHNPQLAAVHKRELQRGDRNQATLAVARKLVAYLMAVDQSGQPFTMRARTQEAA

SEQ ID NO: 386497 - protein, 354 aa, unidentified
MMYIGLDVHARTFAMVVVNGRGEEVFARQAQTSCESLREAVGMIAGRKRVVLEESTLADWVYRLLKGCAEEVVVAEPWHNRLIGKDEKLDDLKAARKLARLLRSGDIHPVHHTDELERQVFKELVGLYYDAVKETTRCKSRLKAKFEQHGVQCSGRELYHADRREQWAKRLESAGVCYQVELLWEALDQAQERRARLHARLRRQALTFEPIRRFMAVPGVGVIRAATFFAIVDTPHRFASRSRLWSYCGIGLARRTSGQTSQPPHLTRHGNPRLKNVAKGAALTAITAGDNPFATQYEGLRAGGLAVEKARLTVSRSLVATLWAMWRKGVEYHPRQEGDPLPWPTSPPRRRRAA

SEQ ID NO: 386498 - protein, 425 aa, unidentified
MSSEIEIAAFIGLDWADQQHVIRLRAAGSAAVEAQCLDQKPESLRAWIAQLRHRFAGRPVAIALEQSRGSLLYALMSVDFLRLYPINPQNLAKFRKAFYSSGAKDDPQDAQLLLEMLEKHRDRLRVWIPDDADTRCLRLLAENRRKLVNRRTAFTNQLTSLLKESFPQSLEWAGPLDSVRACDFLQHWPSLEALQKTSTSRLRKFYQKHTRVDDPTVQQRLDQIRQAQPLVTDPAVLAAAELMIPALVRQLRCLIESIQQLDQQLKQRFQQHADYILFHSFPGAGPALGPRLLSAFGSDRNRFESATEVQNFSGIAPVTERSGKSCRVHWRLACSKFLRQSFHEFAAQSILFSPWARAFYDQLRARGSSHHAAVRALAYKWIRILFRCWKNHQPYDESLYLASLKRRGSPLSLILPSQSKEVACA

SEQ ID NO: 386499 - protein, 403 aa, unidentified
MINVGIDWAEAHHDVCIEDAEGRVLAKGRVPEGVEGVEKIHEMLSAHAADPSEIAVGIELDRGLLVAALVAGGYEVHAVNPLAVSRYRDRLAPAGAKSDPGDARVLAEVMRTDRHLHREVAGDSETAEAIKVLARAHQSLIWTRQRMGNQLRSVLREFYPGALRTFPELTTADAIAVLRIAHTPPAGRALTKAKVKKALAAGGRKLRLDARADEIVEGLRAPQLGAPALVEEAFGHQVASLVAVLQTLKTQIEELRAELAASFEGHPDAEIITSLPGLSSVLGARVLAEFGDDRTRYADARARRSYAGTAPITRASGTRKVVLARVARNKRLADACYRWAFSSLQASPGARGFYDRHRASGKTHHQALRALGDRWVGILHGCLIHRELYREDAGWGSQPKPAA

SEQ ID NO: 386500 - protein, 345 aa, unidentified
MTQYKRIAIDTSKSVFTIHCIDAQDWPVLRTNLRRGQLLPFFRKLAATEIAIESCSGSHHWARELTALGHTPRLVPPQYVKPYVKRGKNDRNDAEAICEAAGRPGMHFVPVKSRTQQAQGMVLKVRDTLISQRTVLGNTIRGHAAEFGIVAGKGISTIAPLLSAIEQEATVPPEAKEMFVLLGQQIEEIGGRIKEIDAKLNAAHKASEVSTRLATIPGVGRVIALTLATEIDPSAFESGRHLAAWVGLTPKEHSTGGKQRMGKISRAGNERLRALFVSGATSIINAAMKPGSRQMTEWLRALLLRKPRKLAAVALANKNARTAWAMMTSGETYRRPSAAAGAVAA

SEQ ID NO: 386501 - protein, 373 aa, unidentified
MNACLTPKSTVVGVDVHKYSHTAVAMDCFGQEKARLDFSNERLNDYVLWLRELGDKEDIIVALEDVNGYGFHIVERLSKEKISMRYVPAILTERERKKSIHREKSDYEDAKRVGKVILTKFDETLPAKESIADDQERELSANLDLLTAERRILVQEKTILKNQLHAMLHQIYGDHYGEGFPKVFHKKAIKSFRQKLTKTKFDNPIRVALAGSSIRRFDRLALVEKQLKEIDGSINNIGQKSEAVLALSDNIHGCGIITAASIIAEVTTISRFCDKSRFARYSGIAPIDKSSGRHQRLYTSPFGNRKMNRALHTIALCQIACKGDDRGKIYFKKKLSEGKTKLWALRCLKRQISNRVFQALKEQKRRERTIQNG

SEQ ID NO: 386502 - protein, 450 aa, unidentified
MSTLNSAEEQKPAYAAHIGLDWADQKHFWTMLTADGKRTRGELKHTPEAIEVWAVELARTFGGRPVALALEQARGALVAVLSKYAHVHLFPLHPTKLAYYRMSVCPSGAKGDPSDADLILDYLVKHPERLRCLEPDTVETRSLQFLVEERRKLVNQHTCQLQILLHWLKQIFPQMLVWFDNMSTPLVGDLLIRWPELPKLQKASAKTLRKFFDQHNCRSEERIQQRLEEIGQAVPATTDAALLRTGNLCIQLSVQLLAGLRAGIAEFDKQIEAIYQTHPDRFITASLPGAGPALEPRLLAALGTNRERFESASNMACCFGIAPVTESSGKSRWVHWRWACSKFVRQTLHEWANCSIRTCGWAREHYDKQRLKGKGHHASVRSVAFKWIRILFRCWRDRVPYSEQRYLEALRTHGAAPSAPAAIVDEPTPLLSGTQWESCGDFAKLAKVSS

SEQ ID NO: 386503 - protein, 321 aa, unidentified
MAKHTTICAGIDTGKRKLDVAIDGSSKQLQVENTAEGHEALLTWLRQHRVKRIGIEASGGYEQPVVAELRRKGFVVVVFQPAQVRAYAKFHLQRAKNDKIDAAIIAACTAAVRKIHAAPDPRLLPFAEQLTMIDQIGEDIARLKNRIESCRNETINKLWQEDIARLEQRERAALKALVAAIRKHPDLAKRLALISSVDGIGLPTAVAILVRLPEISQITREQAVALAGLAPYDDDSGNRSGVRHIEGGRKRLRRALYTASLAASFRWNPQLIQLYQRLTAAGKEHKPALVACARKMLIFANTVVARGTPWCGEPPGSLPAS

SEQ ID NO: 386504 - protein, 359 aa, unidentified
MRTSGKNIFEGQLTIGLDLGDRSSAYCVLNAAGEIVLEHKLATTPEAMKQVFGSLPRCRIAMETGTHSPWDSRLLMALGHEVIVGHAQKVRLITKSRRKDDRLDARTLARLARIDPELLSPVKHRSAQAQLHLTEIRARAALVSTRTALVNAARGLVKSYGERLRKCHTQQVGREMTRELSMGLREALKPLLQEVESLNERIKEYDRRIEKMAKEMYPETALLKQVKGVGDLIATAYVLTIEDPHRFRKSRDAGCFLGLQPGRRNSGESEPQMRISKEGDEYLRTLLVQGAHYILGPFGEDSDLRRWGQKLSARGGKNAKKRAVVAVARKLAVLLHRLWVSGEVYEPLRNSQKPMSTAA

SEQ ID NO: 386505 - protein, 387 aa, unidentified
MTKNKGRVIGLDVHPDSFAGAVVEGSDPANARVVSTSTRVELKQLEQWTLRYTRREDTLVLEASGNAFAVAARLQGIGREVQILDSHRAGKVGKVYCANDRVDAVKIARIYLSALSPIVWQPDQKTLERREVFSAYQAVVKESTRAKQQLRAMLNEHCVRLEKGFRLCHPNAIRRLLALREWTPARRMLLQQLHGSLVAARARRTLLRRHMAQEIVAEEALLRLTRLCGINLITLYGVVAAVGDVRRFTHSKKLVAYLGLNPTVSQSGNFQGSGALKRHGKGALRALLIQSGKKLLEVNNPLQKWGLAVAARRGRNKAAVAVARKLCVAIWHVMMGHVIGILERLDTLATKLSKFATEIGPAALTAFGYNNKADFVERKLYVLRSYP

SEQ ID NO: 386506 - protein, 335 aa, unidentified
MTEITTVGLDLAKRVVSLCGEDASGRAVVQRTLRREAVLAWFVQRPPCLVGMEACSSAHWFARELAALGHKVRIIAPEFVRPFRLSGKNDTNDAAAIWAAVRQPQLRFVTVKSAEQQARLVVHRLRQGWQAERTAGLNRLRGLLAEFGRVYANSAAAVLAGARSALRHGVARQLEHLRGLDQCIDECDREIAQDAAADPRARRAARLSGVGVLTASAVAATVIDPQQFRCARQFAAWIGLTPRQYSTGGKPRLGHITRRGDTYLRGLLVQGARSALQAALRVSPTRRTRLAAWIVATYERIGYHKTLVAIANKHARLLWVLLMRDEPLRAHAAMN

SEQ ID NO: 386507 - protein, 327 aa, unidentified
MWNYVGIDVSKNKLDIAWLRDPEKVKIKTKAVPNNREGFTQLVHWLSEQISAELSSIHVVLEATAVYHESVAYALVDAGVAVSIVNPGRVHDFARSLGSQHKTDKKDSVLLARFGALTRPDLWEPERPEIRELKALLSRLSMLEKDLYREQSRQEQANISAASVVVVASIEGMIAQLQREIERVKQQIDRHIDDHPDLRKDRELLLSIPAVGEVLSRNLLALLHSRDFKNAGQVSAFIGLVPKIRQSGQWQGQSRLSKSGNGQIRAKMYLAAVVATRHNPDIRAQYERLLKAGKRKMQAIGAAMRKLVQICYGVLKHQSKYQPQAVF

SEQ ID NO: 386508 - protein, 407 aa, unidentified
MIFAGVDWAEAHHDVLVVDAEGRRLGGGRLPEGVEGIARFHELAARHADDPGQVVIGVETDRGLFVAALVAAGYQVFAVNPMSTSRYRDRHSVSGAKSDPGDAKVLADMVRTDRHNHRPVAADSDLAGAVKILARAHQSMIWSRRRQANMLRSALREFYPAALAAFEDLTSGDAVEVLRAAPAPALGAALSRPKIAAALRRGGRQRRVDARAGQIQAALRAPQLAPAPVIAAAMGATVSASVAVIAEMTAQITALERQLTADFEAHPDAEVVRSLPGLGTVLGARVLGEFGDAPDRFATAKCRKNYAGTSPITRASGTRRAVLARHVRNQRLADAIYLWAFSALSVSPGARAFYDHRRAAGDTHHAALRALGNRLVGILHGCLAHHTPYSETTAWAHRANTTLTQAA

SEQ ID NO: 386509 - protein, 458 aa, unidentified
MPKKSSKKAKSQRSRERALLDKVHLNAAGIDIGADAHWVAVPEDRDQRPVRSFGVFTSDLIALCGWLKECQIQTVAMESTGVYWIPLFQLLEREGFEVHLVNARHAKNVPGRKSDVKDCQWLQQLHTFGMLRGSFRPQAQMCVVRSYLRLRDTLSKDCNSLVQRMQKALTEMNLQIHRVISDITGLTGMNILRAIVAGERDCVKLAQLKHPQIRSSAQQIAKALEGDYCPEHLFALQTALELYDSYQLKIMQCDKHTEEALAAFEAKVQVAAPDLSRLRSAQKRLEALRRHHLEQVAGVDLTKLPGLDVLAVERILSEVGLDMSRWPSEKHFCAWLNVAPNNRISGGKILSTQPRKNANRAAAALRLAAQSAMQSKTALGAFIRRIKLRLGAPTAINAGAHKLARLLYRMLKFGKAYVETGQESYERLFKERTIRNLQRKARELGFHLTPAIPSVVVS

SEQ ID NO: 386510 - protein, 347 aa, unidentified
MRFYTKQHQAYCGIDLHARSMYVCILDQAGEIVLHQNMKANPEAFLRAITPYRADIVVAVECIFTWYWLADLCAREGIAFVLGHALYMKAIHGGKAKNDKIDAHKIAVLLRGGMLPQAYVYPAEMRATRDLLRRRMYLTRKRAELLGHVQNTNSQYNLPEIGKKLAYKANRTGVAERFPDPAVQKSLEVDLALIDYYDQLLSDLELHIVNAAKQHDAQTVYLLQTVPGIGKILSLVLLYEIHTIERFPSVQDFVSYCRLVKCAKESAGKRYGTAGTKIGNAYLKWAFSEAAILFLRDNPAGQRYLARLEKKHGKGKALTILAHKLARAVYYMLKRGVVFKLDTFLHS

SEQ ID NO: 386511 - protein, 296 aa, unidentified
MEKYEDVVGIDVSKLTIDAHLYKRGLHRLFSNTYKGYVALVKWTEQHLKEVGYFFCFEDTGHYSTNLAVFMSENAIDYIEENPLAIKRSSGIVRGKTDRLDAAMIARYAWIHKEELKLSSPKETYLQELGRLLAFREQLVRDRTGKTSTLKEAQNLLNSPSTDLCCKTIEKTIHYLTKQIHTIEQRMIALVKEHKTSQRNYDLLNSMKGVGLILSCQLIYHTDNFKRFESWRQFSSYCGVAPFGYQSGTSIKRRNRVHHIGDRMQKSVIVYHPRRIKVNHPCRVKVSHLRRRKVNH

SEQ ID NO: 386512 - protein, 337 aa, unidentified
MYYTGIDLHKFTSYLTTVDSSGAIVKQENLKNAAHNFVQYFHSIPGEHQATVESTMTWYWLNDLLTSLNIPLVLAHAKYVKAIAYAKVKTDKVDSHTLAQLLRMNYIPVAHKISNENRLLRDALRARLKIVQRHTSVTNSMGLLLAKYNFNSPTQLTGIPKFQYEQLSEVESLLSEQILDLEKQLYPYLIPNDDIQRLLWIPGIGKMNAFTILLEVDDINRFPDLKNFFSYSRLTPSARNSAGKSKQHSSKDGNKYLKMAFSDAAIHAVQYYPVIRKYHNLLLRKKNKQISKTIIAKEIAEIVFYVLKNKSDFNNTFKGHQLEEKSLQWPRVVSPCA

SEQ ID NO: 386513 - protein, 365 aa, unidentified
MPSVSRLAVTHLGLDVHKDTISVAILAPDRDGPDVDRIPHDEASVRRLVGRFPEPRLLRACYEAGPTGFELARLLATMHVRCEVIAPSLIPKAPGDKVKTDRRDCRRLARLHRAGELVAIRIPTVQEEAVRDLCRARADLVEDRTRARHRLSKFLLRHGRPWRGGNAWTLTHERWLLAQRFDQPALAATCAHYRAVLEVRDAQLEAIEADLAVWYDAPPFADAVHRLSAYRGVTRLGALTLASEVGDWRRFPRAAAFTGFCGLVPSEYSSGTSTRRGHITKCGNAHLRAQLVESAWAYQHRPAVGLELRERHKGLDPAVLARAWAAQLRLCGRFRRLAARKDSKNVVVTAIARELAGFVWAEMTA

SEQ ID NO: 386514 - protein, 344 aa, unidentified
MGEVSTIGLDIAKSVFQVHGVDVAGEVVICKRVSRSKMLEFFADLAPCMVGIEACPSAHHWGRELQALGHIVKLMPPSYVKAYLKRSKNDANDAAAICEALTRPSMRFVPIKTKEQQTALMLHRTRQLLVRQRTMLSNALRGHLAELGVVSAKGRNGTGELLRIIADGADNRLPQAVRGILDVLARQYGAIGAEILSIDKSIMALHRSCEASRRLAEIPGIGPIVATALVAEIGDWKTFSSGRSLAAWIGLVPKQHTTGGKDRLDSITKQGNRYLRWLLVVGAMAVIRYAKKHGAKNRPWLARLIERRPTKVAAVALANKIARMAWAIMVRGERYKEPKLLLAA

SEQ ID NO: 386515 - protein, 347 aa, unidentified
MDYYAGIDVSLETSSVCVVDASGKIMREAKVLSEPENLIGWFRELGLTLTRIGLEAGPLSQWLFAALKKEGLAVELLETRHVRDAFKAMPVKSDRNDARGIAQLMRLGWFRPVHCKSMPAQEVRALLTARKLVQSKLFDIEMSLRGILRGFGLKIGRTTPNGFGPRVEELVAGHPTLDIIGKALLAAHQVLLRELNGFEKRVRQQARQDKRVRLIMTAPGVGPIVGLTFVAAIDDPARFKSSKQVGPHFGLTPKKYQSGETDYNGRISKIGDASVRTALYEAANVILTRPLKGATSLKSWAMKLAKRAGMSKAKVALARKLGIILHRMWVDGKQFADRAGSPKPVAA

SEQ ID NO: 386516 - protein, 364 aa, unidentified
MNKCHSNTELSSHEGTRCHFNGGTGAIKLGIDVHQDFYVVVMQEGGGNPKPPQRFQKAASLHWAAKLKSRGGEVYAVYEACGFGFTLQRNLSALSIHCHVVCPQKLDEHNKRVKTDGLDAKALCLKLDRFVQGNRDALARVRVPTEKEEQLRALHRQREQLVKVRKQLEAQGRSLLVNHGFEPVKSWWKLRTFAALDVPQWMRELLQNSQPILLALQQKIGALTIQLQSAAAPNQPRGLGLMTSVIIDREIGDWRRFSNRRQIASYTGLCPGEYSSGNTRLQSCVTKHGNPRLRAALLELAWPLVRFQPNYKPIVKWRATLAKGALATGAARKKAIVAVARQLAVDLWRIKTGRLRSEELGLIN

SEQ ID NO: 386517 - protein, 396 aa, unidentified
MDRAWAGVDIGKQHHHAVVVDDQGTRVLSRRVANDQVALVELIGRVTALAGAVTWAVDLHSSEAALLVALLLAHDQTVVYVPGVMVNRAASAYRGAGKTDAKDAYVIAEQARMRRDLQVLRADDELIVELRLLVARRQDLRADRTRAVNRLHDRLVAVCPALERVLDLGNRGALVLLTGFQTPAALRAQGVAGLEAWLGSHKVRGAGKLAAAAVDAANAQTIRLPGEQVAACLIADLAEGVLALDEQIKQVDELIEGRFHRHPAAEVILSLPGMGVLLGAEFLAVTAGNMAAFGTPDRLASLAGVAPVPRDSGRVVGNLHRPQRYHRGLQRVFYTSALISIRCCPESRAFYDRKRAEGKRHTQAVLALARRRVNVLWALLRDQRCYQQTPPEPKAA

SEQ ID NO: 386518 - protein, 348 aa, unidentified
MSQVTTIGLDIAKSIFQVHGVDAAGRSVLRQKLSRSRVLEFFAKLPRCLVGIEACASSHYWARELMALGHEVKLMPAQYVKPYVKRGKNDVADAEAICEAVTRPTMRFVAVKTPEQQSIMMLHRVRLILMRQRTQLSNALRSHLAEFGIVSPIGREGLDRLLTIVADTDDGRVPAEARASLEMLAVQLEGVKAQILANDRRIIASARATEVGRRLLEVPGIGPVLASAFVASVADPAIFKSGRDLAAWIGLVPRQNSSGGKERLGRITKAGNRYLRQMLMVGAIAVIRYAQRNSARRPWLAQLMGRRPTKVAAIALANKTARTVWALMSSGERYRDPQAIPAAVSATL

SEQ ID NO: 386519 - protein, 390 aa, unidentified
MQALCPRPDEHIAVRTDLNAIFVSLELSRSTWIITSLAPCGGEKMSKHSVPSGDVAALLARLSQLQEKARARTGRIFPIIVIQEAGLDGFWIHRVLQQEGIESHVVDPASIATSRRCRRAKTDRIDGEALVRALLAYKRGEPRVCAMVKAPAPHEEDRRRTSREREVLTAERVQHVNRIKGLLFAQGIGDYEPLHRNRWERLEELITGDGRPLPECLKAQISRELDRLELLIEQIKAVEAERDAVLAQAQASPGVPAPAAQLLTLKGIGPEAAATLWTEGLFRTFNNRKQVAAYAGLAPTPWQSGSVHRDQGVSKAGNPRLRTIMIQIAWLWLRHQPQSALALWYRARIKRTGGRLGKTMIIALARKLLVALWKYATAGVLIEGAVLKPA

SEQ ID NO: 386520 - protein, 416 aa, unidentified
MTAHRIAGIDVHKKMLAVVVLDAAEEGEGTLQRRKFLTTAEDLDALAAWLRSLQVQEVVMESTAQYWKPVWRALEPQCQLELAQAQSNRGPRGRKNDFADAERLVRRYLAEELILSFVPPPEQRLWRALSRTKQTLTRDRTRLQNRVEGLLEEMGIKLSSRVSDLLGVSARRMLTAVAEGETDPGKLAAMAEPELRATSEQLCDALRAVPTLHSSYRRLLQQYLERIQMQERQIAELDRELGTALKLHEDAVVRLADVPGLGADSAQQIIAEVGPQAAVFPTQADLCSWVGTCPGQEVSAEESHSDHSPKGNRPMRRILNQAANAAIKAKGTVFEAHYRRIRGRDPKKHNVAVWAVANRLCRLVWKILHCGITYEERGCRPNRKAVRQRAARLLRQLRALGYNVQVSQPQRCTPSS

SEQ ID NO: 386521 - protein, 339 aa, unidentified
MEHVAIDLGARKSQICVRSADGQILEERRWPTKDLDTYLAARPTSRVIVETCAEAFCVADAARKLGHETRVVPATLVKTLGVGARRLKTDLRDARALSEVSSRIDLPSVHIPRTESRDRKTMCGMREALIGARTKIINTVRGWLRSRGRRIERGGKASLRKRVEAAWEGQLPSYVDRQLKLIEVLNTQIAEADAEVKSWATTDETCTRLMTVPGVGPLTALRFVAALDDVTRFESAHQVESYLGLVPGESSSSERQQRLSITKAGPRALRWVLVQAAWALHLRCRRPEAIPLQLWAHRIEQRRGRRTAIIALARKLAGILFALWRDGSVYEGSRGAKMI

SEQ ID NO: 386522 - protein, 412 aa, unidentified
MEVLFACCCGIDVHAKMLVACLIQAGKKETRTFSTMTGDLLRLLDWLTQAGCTHVAIESTGVYWRPVFNILEGALDVILTNARDAKGYKARKTDVIDAEWLADLLRHGLLKPSFIPPLPIRELRELTRYRESLVREQTALANRIQKLIESANIKLGQVASDALGVSGKRMLRALAAGETDAEKMSHLAQTSLKRKQPQLQQALEGRVTPAQRWVLGQLLDQYDQIDAALTRVEARITQEVESSPDPFVPEAVQLLDTIPGVGETVAQIIVAEIGADMNRFPTANHLASWAGMCPGNNESAGKRKSGKTSKGSRYLRAALVQAAWAASHQKGTYLAAQYKRFVKRMGKKKALVAVGHSILVMVYHVLQNRTSYQELGGDYFDRRNVDTQRKRLIRQLEGLGVKVTVEEIKEAA

SEQ ID NO: 386523 - protein, 355 aa, unidentified
MNQEKYIGMDVHQATISVAVMDAAGKLIMECLLETKAATIVEFIQGLHGTLSLTFEEGTAAAWLHDLLKPHVSRLVVCDPRKAALLKEGNNSDRIDARKLAEMLRTNQLHSVYHGEHGMRTLKELGRSYLTVTQDVTRVMNRIKALYRSWAIPCSGTTVYASRHRAEWLAQLVEPGVRVRAEHLYQQLDSLQPLRMEARRELLGESHKHPAVKLLRQIPSIGPIRAALLVALLQTPHRFRTKRQLWAYSGFAVETHDSGEYRYVRGKPQRNRERITVRGLNDNYNKDLKNLFKGAAISASTSPGPLHDFYVALVAKGMRPTMARLTVARKIAAVSLTIWKKGVSFDPKRLQQQAV

SEQ ID NO: 386524 - protein, 324 aa, unidentified
MIDGVLGIDVSKNTLDASMSSCNKVRARSFANSPDGWRHLLDWLITQRVRRVHACLESTGRYSLGIAGALNEAGHVVSIVNPAQIRDFARTKLGRNKTDGVDASHIREYCELFKPKPWAPPSAAHRRLGELQTIRAGIIAGLTEWKNRKNSGMIDAVAQSLADVTISHFTSQLGAVDKAITQTIDNDPVLRRKRDLLLSISGVGETLAAVVLAELPGPDVLRSGPEVVAYAGLNPRQHQSGTSIDRVTRISKIGNAVLRAALYMPAMSAMRYNPAIVALVARLKSQGRLKPKQIVVAAMRKLLVLCFGVLKTGKPFDPAIAMGC

SEQ ID NO: 386525 - protein, 326 aa, unidentified
MREHYIGVDLHKAFFQVCVVAASGERLWEQRFPRSEEGMAAFVTRCPGAAALAVEASTPTWHFADAVADHVEELRIVDAVKTRLKAGYAAKTDRLDARRLADALRRDSVVGIYYPPPAIRDLRELCRGRHTLVHLRTCLVQRLRALLLRHGIVEARRLVQRDDGLTALALPPQAAAVVARLRRVLTGVRAEIAAVDHEVHAVAATDPIAHRLQQIPGVGPVLALLIRAEVGEMHRFPTPGHLASYAGLVPRVDASAGRYRSGPITRRGSPWLRWALVEAALHGPRRRDATGRWGRRLAVRKGALKARVAMARQLCHEIMTVWRAEA

SEQ ID NO: 386526 - protein, 479 aa, unidentified
MRRQKNRKPKQAATTQSMPELQPDAAGVDIHPQSVYVGVPQNRASVTVRCFGTFTPDLIELADWLAECKIRTVAMESTGVYWIPLFELLEERGFEVLLVNAHHVKHVPGRKSDVVDSQWLQFLHAVGLLRGSYRPPKEICAFRAIIRQRAMLLRCAASHVQHMQKSLSQMNLHLHHVVTDITGVTGLAIIKAILAGQHDPAALCKLRDRRIKATEAEVKKAMSGNYMPEHLFTLGQAFVTYCHYQTLITECETEIERRLRGLAPMLPSQSEPTDTQPTDTQSADTKPVDTQSADSKRKRRHRQDSNVNFNLTSEYERVFGIDLTRIPGINVGTVEVVLGEAGPTIPQVFRSSAAFASWGQACPQTNKSGGKDLPVKSKKGKPRLYTALRMAAVSLFRSQTSLGARFRRMVARLGTPKALAAMAHLYFRIIYHLLKTGQQYDESVYAELEKAYEDRRIKNLHKTAKQLGFRLTPLEEPAT

SEQ ID NO: 386527 - protein, 343 aa, unidentified
MEKITIIGIDLAKRFFQLHGATADGQPMLRKKVSRSQLLSFLARQSRAVVAMEACATAHYWGRAIVELGHEVRLIPPIYVKPFVRRQKNDATDAEAIVEAASRPTMRFVAVKTEDQQARAMIFRTRDLLVRQRTQLINALRGHLAEHGIVAAQGIAQVSRLVAALNEAVDATLPALVRELGQQYLEHIDRLSTEITGLEQRLRRLSKDDETAVRLQTVPGIGPITAAAIEAFAPPMTTFRRGRDFAAWLGLVPRQHSSGGKQRLGRTSKMGQRDIRRLLIIGAMGVIRWTIRTGPAEGSWLARMLARKPRLVVAIALANKMARSVWAMLSRGEDYRGSAMVAA

SEQ ID NO: 386528 - protein, 357 aa, unidentified
MDHIAIDLGGRESQICVRRSDGEITEELRYATRNLPAWLKRRAKGRVILETSAEAFGVADAAVAAGHEVRIVPGHLVRTLGVGARGIKTDKRDARALSEVSCRIDLPSVHLPTHLSRRYKALCGARDTLVETRTKCINGVHSWLRTQLTNVRSGQSKRFPDRVRSKLLNEESGMPSFVDGQLTVVDEMSKQIAIYDQEIEHAAKNDEICRRLMTVPGVGPITSLRFRAALDDIARFEGAHAVGAYLGLTPGEDSSSERKRRTKITKAGPSRVRRVLVQASWTLIRTRPNDPIVQWATAVAHRRGHRVAVVALARKLAGVLYAIWRDGSSYDPAHGQVPHAGEEVKDELASLVGSAAP

SEQ ID NO: 386529 - protein, 367 aa, unidentified
MTNTIVHYEGAASPEVAVNKVKLSRSIIKIGLDVHTRLYVAVAQYDHLLPKPARRLAPSQFVPWVEQLLRAGHTVHVVYEACGFGFGLYRELKALGAHCYVIAPRKLDEQCTRVKTDPRDATTLCQRLSRYLDGNTRELAVIRVPTEAEEQARHVSRQREQLVHLRQKLEAQGRSLLVNHSLPAPAHWWKKQTWARLSKLLPSWICIRLEVHRPALLTLQQQIDALTAELEAAAPADVPAGLGKLSTVVMTREICSWERFRNRRAISSYTGLCPGERTSGSKRIPGSVTKHGNPRLRAALVECAWRMVRFQPNYPPVKKRLAILAKGARATGGQRKKAIVAVARHLAVDLWRLHTGRCTAAQLGLTN

SEQ ID NO: 386530 - protein, 427 aa, unidentified
MNYTQNEKIMSITEKTLVVGVDIAKTPHYARAFDYRGIELAKVFKFENTREGLESFKEWIDSLAKENGKSSSIVGMEPTAHYWFNLGYFLKDEEVRLVLVNPFHVKRSKELDDNSPTKNDRKDPKTIAKLVIDGRYFVPYIPEGIYSDLRIAMDIRDSINKSLVRIKNRVIRWLDKYFPEFFDVFGDWEGKAALITLREFPIPEKIITAGIDKIVATWRKGVQRAVGAKRAAKLVEAAKGSIGIKEGLRMAQKELRAIMQQYDLYMEQLSEVEADMEELALQVPGVNEMLTIKGVGITTAAGFIAEVGDISRFSHPNQIQKLAGLNLVESSSGKHKGQTTISKRGRSRLRSILFKVIMPLVAKNDEFKALHKHYTTRRENPLKKKQSLILLCCKLIRIFYALINKRVAYSPEKLIKNISYLQLQDAA

SEQ ID NO: 386531 - protein, 278 aa, unidentified
MQITVLGIDLGKNSCSVVGLDEAGRVVLRRRMRRDGVVRFVERLSPCTVAMEACCGAHHLGRELAGFGHAVRLMSPEYVRPYVKAQKNDDRDAEAIAEAATRPTMRFVEIKSEEQLDLQTLHRSRSRLVSERTALINQLRAILLERGIVVAQGRRKLEQRLAEMLADGEVLTISARMRILIEDMRAQWRELDRRIAVFDDEFARHARENAAARRLASIPGIGVMNATALVAAIGNAETFARGRDLAAWLGLVPRQVTTGGSLACSGSASEGIPISERY

SEQ ID NO: 386532 - protein, 354 aa, unidentified
MIIIGADYHPGFQQIALVDTDTGEFEERRLEHREEAEKFYRDLATRLLCVRVGMEASGQARWFERLLGELQFELWIGDAAEIRTKRVRKQKTDRQDAQLILRWMLEDRFPRIWVPNWENRDLRQLLWHRHRMVQARTRIMNQLQAVALNEGLRCKKRLWREAGREQLKSFPLAPWADRRRRDLLELLDRLTPTIEELTQAIEQEVEKCPEAQRLQTHPGVGALTALAFVLIIGRADRFQCGKQIASYLGLVPWEESSGQRRRLGHITKQGNSLLRFLLVEAAQVTVRSDPEWRSKYFHLAMRRGRKIAKVAMARRLAVRMYWMWRKGWDYEQMRKFSSHAGQPGNRAGVPLNTE

SEQ ID NO: 386533 - protein, 355 aa, unidentified
MKQQTKSSNITVGLDLGDRRHRFCALDERGEVVEQDSICNDRVSLKKLAGRYHGALGVMEAGAHSPWISRFLEALGWRVVVSNPRKVRAIYQHERKSDQRDALMLARIGRMDLALLYPVRHGTAEGQQDLLRIKLRDSLVRARVAVINSVRFTLKSLGYTVRNSSSARFHKVVMEEVPESVREMITPSVQALAELTARIKMLELEINTLAQMKYPQSAQLQQIPGVGPITALYFVLKIEDPNRFAHVRDVGAYAGLCPRRDQSGESDPQLRISKRGDAYLRRLLVSAAHYILGPFGPQSALRAYGLMLAADGTARAKKRATVAVARKLAVLLLSLWKSPRGPTIWNDCAASHGSD

SEQ ID NO: 386534 - protein, 383 aa, unidentified
MLGADPFNHEFKPADYEIFAGLDVDKQSMTVTFAKPEGMLRSMRMPSQPEPLLGYVRRHLPGKRIAFVYEAGPTGFHLHDGLVAAGYPCLVVAPSMVPTAPGQRVKTNRLDSQKLATSLRGGQLRSIHVPSPTYRSLRHLVRLRDTFVRQIAATKCRIKALLLLENLAFPHPSGLWSLSVLQQLSVLPCAPAIRFKLDRLLESLAFAQDQMLRTTREIHRFCLQDPELNRCLGYLTSIPGIGVITGTHLLARIGDWRYLRNVRQLAGFLGVVASERSTGDSIRRGGITHVGDSRLRGKLVQAAWAAIRQDAELREFYQRIYQRNPRDHAAGKAVVAVVRKLTTRIYAVLKEQRPYRIHRRLTREEIRPRERLDWPQNSESASL

SEQ ID NO: 386535 - protein, 316 aa, unidentified
MIEALAKRSAGLDVHKKIVVGTVLIENAHGQIEKQTREFGTFRKELNTLAEWLSESEVEIAVMESTGIYWKSVYEALERKEVKAYVVNARHVKNVPGRKTDVQDSEWLAELARCGLLRASFVPPRDLRELRLLTRYRGKLVGTLSAEKNRLHKILDGCGIRLGNVVSDIDGVSAREMIDALIEGNKEPYDIVLLARGRLNKKIPELIEALDGELSDRHRFLLKQIHSHIRWLEDRVREINRQVVAAMKPYKEEWHLLQTIPGIDELCAAMLLAEIGPDMSCFGSKDHLSSWAGMCPGNNESAGKKKVVKSGRGIST

SEQ ID NO: 386536 - protein, 369 aa, unidentified
MRDRITYVGLDVHKDGIVVAIAEGGRRGEVREYGRIANTPAALQRLARKLGQEGVELRFCYEAGPCGYGIQRQLSALGHECTVVAPSLIPKRAGDRVKTDRRDAASLAKLHRAGELTAVWVPDPGHEAMRDLVRTRLDAVRALRRARQQLSGFLLRQGCHYGRPAWTKLHRRWLAGLKFEQAVHHIVLEDYIAAVEAAEARRDRLTAQIEAMLPDWTLAPVVAALQTMRGMALVNAATLIAELGDLSRFGNPRQLMAYLGLVPSEHSSGASIKRGGLTKAGNSAARRLLIEAAWTYRFPARVSRELRLRQEEQPRVIREIAWKAQLRLCARYRKLACSGKPPNVVTAAIARELAGFIWAIARRVPPAAG

SEQ ID NO: 386537 - protein, 351 aa, unidentified
MNIKHYIGFDVHKKSISYCVKTADGQIVEEGKLRATHQVLREWAQKRTEPWHGAMEATLFSGWIYDALKPFAAELQMGNPSMMKAIGAAKKKSDQLDARKIADLVRCNLLPVCYVASAEMRDLRRLLRYRNLVVGQAVQMKNRMSGMLMEVGAEYSKQRLHGKQYFSELLDQLEEVPASVKDLLRLSRSALDVFETTQRKLLDRLQKEPLLVKRVKLLRSIAGVGEVTALTWALEVCDPRRFPSIGDAVSYCGLCSALVSSADKAKRGPISKQRNAHLQTVLIEASKLAPRWNKQLAEVYDRELKRGDRNQATLAVARKLVAYLLAVDKSGKRFEVRTLPPAAPEEVAKVA

SEQ ID NO: 386538 - protein, 346 aa, unidentified
MMHVGLDLSRRRLEVQLVNEQGEPVERLAAVPTVDGLRDLAARVARHQESVRAVIESMTGARFIHDQLELLGWDVAIADAVKAKGLAPLTCKTDRIDAWVLAQLSRLNLVPEIWLPDPAIRADRERARWRLHLVRHRTALKNRIHQTLISFGHACPVSDLFGARGRELLRGLALPEPWQGAVIASLQLIDHLDRQIDACEAELHSLGEEQPYVSLLRTVPGIGWVLAYTIAGEIGDISRFASPAKLVSYTGLCPSVRQSGDRDYRGPLTKQGPKYLRWALIEAAQHAAMTSRYRERYQTIKRRLGRQRGTNVATVAVARELAKAIWYMLIRNQPFAPRGANVSVAA

SEQ ID NO: 386539 - protein, 355 aa, unidentified
MNSSKYIAMDVHKDSISIAVRNATGKIVMESLIETKASMILQFIDGLRGDLHVTFEEGTSAAWLYDLLKPHVTRVVVCDPRKNKSMREGNQSDKIDARRLAELLRLNHLTPVYHGEHGLRTLKELVRTYLTVTKDLARVMTRLKAIYRSWAIPCSGKQVYARCHRAEWLGKITEPGVRRRAEFYYLQLDALRVLRQDARRDLLAESKKHKAWKRLCEIPAIGPIRAAVLLGILQTPHRFRNKRTLWNYGGLAIEMHSSADYRSVDGELQRSRKNVLVRGLNRNCNHDLKNLFKGAAAVASSKPGPFEEFYAALVAKGMKPEMARLTLARKIATIVLIVWKKGVCFDAQYLKPQTA

SEQ ID NO: 386540 - protein, 366 aa, unidentified
MKKNITLVENTNEVFKSQQLTIGVDLGDRTSHYCVLDEAGNVILEHSVATTPKGIQQVFSKISRSRIALETGTHSPWLSRLLMQLGHEVIVAHARNVQLITESTRKDDRLDARTLARLARIDPQLLGPVRHRSAKAQIHLTEIRARATLVSARTALVNAARGLTKSFGERLAKCGTEQMNREIAKGLSPELRDVLEPLLKEIESLKERIAEYDRRIEQIAQEVYPEVTLLKQVKGVGTLIGLTYILTLDDPHRFRRSRDAGCFLGLRPGRRNSGRSEPQMHISKEGDAYLRTLMVQGAHYILGPFGPDSDLRRWGLKLAERGGKNAKKRAVIAVARKLAVLLHKLWVSGEVYEPLRNNHEVVSAVA

SEQ ID NO: 386541 - protein, 410 aa, unidentified
MGYETLIRRAHVMTRKNTLKSLPTDTDFRVVGLDLAKSDVSVAAIPVDDNTPSLVDRMTYADLLDWAGKISPTLFAMEPCNGYSLLCLQLENLGHEIKVISGWTVSMWINTHLSGQKTDLNDAIALARLAVSDAELTPIRHKSITEIRIQTVQAVRQQLMSQRSKSIVSFKALAQQWGIPCAAGHRNLKKLRESIEAKVDLITRPVANAMLFLLDAVKSLDRQIGQLNQTLQELVMSDERGRLLQSVLGVGTQISARVITVVGNIERFNSPRSLVAYVGVAPRNFITGHKNLTKKKHGNCPDLSHKGQGKISRRGDKLLRSLFIQGAACLYMQFCKDQLPECQLKRWILKQLASQKPYGKLIVSLAAKLIRIVWAVLTYGEKFNIQKAGMTRSMWSEMALETPLNKEVPA

SEQ ID NO: 386542 - protein, 353 aa, unidentified
MRTYYVGMDVHQASIVIAVLNGAGKVKMESIIETGAETVRGFLKQLRGKVYVTFEEGTQATWLYDVVRPLVSEVVVCDPRQNKLLESGNKSDRVDARKLAELLRNGSLRAVYHGNQGVRTLKELVRNYDCLVGDTTRVMLRLKALFRGRAIACAGHDVYRSERRAQWLAKLSEPGVKQRASCLYEQFTALQRLRQEAKRVMLKEARRHPAYQLLLSIPLLGPISVAQLIAVVGTPFRFRSKRQFWAYVGLAVVTRTSAEYVLVNGLVRRSSRPVATRGLNRNHNHLLKKVFKNAASSACVSGPFKPGYDARVAQGMDASLARLTIARQLAAITLVIWKRGEQFAPERLKQQVA

SEQ ID NO: 386543 - protein, 324 aa, unidentified
MTPAPYTLGIDIAKASYQVSLKRPDGKRRNKSVRNTVAGHTALVEWLTRQATAPVHACLESTGTYGEAVATALVDAGHRVSLVNPAAVKAFAQSQLRRTKTDGVDAEVLADFCAAMAPPLWAPWPVEVRTLQGLVRRREAVQDMLTQERNRQQAGALSAPVAASLARVVEALEAELADLDQQIRDHLDQHPTLRAQRELLCTIPGIGVATAARLLAECRAITAFDSARAYAAFAGLVPRESQSGQTRGRARLSKLGSARLRYALYFPALAAARVPGPVHAFAARLRAAGKAKMVVVAAVMRKLLHIAYGVLKHQRPFDPQALGA

SEQ ID NO: 386544 - protein, 313 aa, unidentified
MKKTICGVDVSKAKLDVCIEPGHRFASFDNDAAGIAELAKFCRGNAAELVVMEASGGYERRAFVELWGHGISCALTNPRSVRRYAEAMGVLEKTDRIDASVIARFADAKNLAPTPLPSQAQQRLKALVARLRQVTGDLIVQKQRRSSMIDNAEMQASIDEIIALLKRQSRSLEGEIASMIDDDPLWAKLAGTWREMKGVAGRTVARLHAELPEIGTLSNKAIAKLAGLAPIADDSGKRKGKRSTRGGREGVRTILFLVAAGVARHDENLRNFRDRLVKAGKEKMVIRIALARKLLVVLNAKAREARAEYALAT

SEQ ID NO: 386545 - protein, 391 aa, unidentified
MSMYFVGIDISKYKHDCCILSAANQQVAAKFVILNNKEGFNELQAALQSLSNPEDIRIGFEATSHYALNLKLFLEKAHHSFMEVNPILISKHKMSTTLRRTKTDTVDCESIARWLMTVEYKPHQKGFYHAYSLKSLTRLRDRLVRQRSFYLVKITNVLDHTFPEFKPFFKDHFSKTSIYLLENYGSAEKMARMNSASYGKLRSLSHGKFTPQHFLALKSLASNTVGVGNDIFDAELKCLLTLHKSIAEQISMLESQITGLIMEIRPRCMTIPGIGPISAAAIYAEYGDVSNFSSPAQMLAYAGIEPGVSESGTESHGGRMVKRGSSHLRYVLLNCVLPLIRYDMTFATYYQKKRSEGKSHRVAMSHVAKKLIRVIYALERQNTDFNVQALR

SEQ ID NO: 386546 - protein, 346 aa, unidentified
MSYYVGLDVSVKSVTICVVDSNGAITSRGEVSSDPDQIAAFVLKHAPDAARVVHESGILSIWLTRELEKRGLPIICIDARLAHKALSGRINKSDRGDAEGLAHLARTGWFNQVHVRSEASERIRVLIGTRERLIKMRKDLEGHVRGVLKVFGVCMSGVHRANMRQGFRDQLVKAGTVDPAIGVMVDMFGPIHLALCSAADAMDAELRAIARGSNLAVRLMTVPGVGPIVALAFISTLDDAGRFKKSKDVGAFLGLTPRRYQSGEMDWSGRISKCGDRDLRRLLYSAATTLITQVKKPSPLLTWATRLNERKGFKKAAVAAARKIAVVMHAIWRNETVFDPNMEGVA

SEQ ID NO: 386547 - protein, 421 aa, unidentified
MEVLFPRCAGIDVHKRTVVACRIVLTDDGEWLRETRTYATTTDDLLRLSDWLGAGGCTHVGLESTGEYWKPVFNLLEGSCEVWLLNAQHIQAVPGRKTDVRDAEWIAELLRHGLVRPSFIPPRHQRDLRELTRHRTTFVRERATLANRVQKVLEGTNLKLSAVVTNVLGASGRAILAALLAGEEDVTVLADLAKGKLRKKRDELERALRGRLQPHHRFLLTELLAQIDGLDATIARFDAEIARLCAVDEEEEVVTLLDTIPGIGRAMAELLVAEVGVDMGRFPTPAHLAAWAGVAPGNNESGGRQRAGKTRKGNAWLKTALVQAAHGAARAQGTALAARYRRIAARRGAKRAIMAVAHRLLIIAYHVIAHREPYRELGADYLDRQQPAALADRLLRRLRRLGVEVQVLASTSADDTPIVAT

SEQ ID NO: 386548 - protein, 343 aa, unidentified
MQTIKTIGLDIAKSVFQVHGVDAAGAVVIRRQLKRRSVLAFFQKLPPCLVGIEACASSHHWSRELQALGHTVRLMPPAYVKPYVKRQKNDMADAEAICEAVTRTNMRFVPTKTPEQQSCLMLHRTRHLFIRQQTAVINSIRAHLAEFGIVAPVGRKGVTELLHIVADPSDKRVSKVARACLAALGTQLLSLKQQIVEFDRMIMAWHRSNQASKRLHYIPGVGPMLATALVASVADPRNFRSGRNFSAWIGLVPKQHSSGGKDRLGSISKQGDRYLRSLFVAGALAVIRYAKIHGTGHRPWLTALLSRRPTKVAAIALANKIARMAWAMMAKGERYKNPVALAR

SEQ ID NO: 386549 - protein, 409 aa, unidentified
MEVLYSHCAGLDVHKETVVACVRHMEGHVRTTVKTFSSTTRGLLDLSAWLSEEGVTHVAMEATGVYWKPVWHLLSDGEFHLLLANAAHVKNVPGRKTDVNDATWLADLMAHGLIRASFVPDEGTEQMRNLLRTRKQFVRERASQVQRLQKTLEDANIKLESVISDGVGVSGRRMIEALIDGQSEPQPLAALADGRIRARGAQLEAAVRGRVTAHHRFLLKLHLDHLDAVDAAIARMDKEVDGHIEPFRTAVERLSSIPGVSSLSAEVIVSEVGLDRSRFPTVGHFISWAGLCPKNDQSAGKRRSTRMRKGAPWLKTVLIQCAWAATRVKGSYLQAQYLRLRSRRGAKKAAGAVAASILTAAYHMLRDGTWYQELGASHFDRRSTTQQISRLVKRLHHLGYDVHIAPLAA

SEQ ID NO: 386550 - protein, 306 aa, unidentified
MQEIGFTQVVSVGCGIDVHQNLIVASIRKSSSEVETREFEAYTSSLTSLREWCKSEGVTHVAMESTGVYWKPVFNVLEEDFAVILVNARHVKNVPGHKTDKKDSRWLSKLLLSGLLKGSFIPPRDIRELRDLVGYRKKVVGQIASEKNRVLKILEDANIKLSSVLSNVDGVVGTKIITAIINGESSVEVLASHYHGKQKVSREEFRKALEGRITAHHRLMLRIHKDSISDKESQLKRLDEAIDKATEDYRVEIELLQSIPGVGKDSAIGIISEVGTDMSRFPDETHLSSWSGMSPGNSETGGKKKA

SEQ ID NO: 386551 - protein, 374 aa, unidentified
MDESSKPTIYVGLDVHKESIAVAYAPEERGAEVVSLGAIGTRQCDIDKLVRKLQAKGATLVFVYEAGPCGYWLYRYLTGKGLACHVVAPSLIPRKPGDRVKTDRRDAVALARLMRSGDLSAIYVPRVEDEALRDVSRGREDAMQDLKRSKRRLKSFLLRQDIRYEGRANWNAAHLRWLAEVVCPTAAQQIVFQEYVRAVSEEQERGERLERELREAVKGWRLYPVVEALQALRGVELTGAVILMAELGDITRFDSPRQLMSYLGLTPSEYSSGARRRQGGITKAGNSHARRALVEGAWAYRYPAKVSRHLQLRLEKVPTEIQAISWKAQVRLCKRYRQLSARGKHVNQVVVAIAREMAAFAWAIARLVPLAAAQ

SEQ ID NO: 386552 - protein, 378 aa, unidentified
MKRILKIGMDVHTTNYTLCAMEPIIGEDDRVFATIKVTPDYKNILLFIENLKTKLGLNDEYDIQCGYEAGCLGYSLYKQLTAAGVKCVILAPTTMLTPKGVRIKTDMRDAYMIAQCLSYGGYHAVYIPTEDDDSVKEYLRMRNDHKLALKKIKQQINAFCIRHGFCYDGTKWTQAHLKWLKKLEITNQLYRETLDEYMASYEEQEAKIERYDKRIEEIAEQTRYHDKVKKLECFLGIKTHTALSLIVETGDFERFAKGNQYASYLGLAPGENSSSDSIHRLGITKAGNSHLRQLLIEASGGICKGAVGHKSKDLRARQNGNTAEVIAYADKANTRLRSRYYKFIRHGKKRNVAVAAIARELACFVWGMMTDNIEMKAV

SEQ ID NO: 386553 - protein, 357 aa, unidentified
MAMLPEIVDGVIGSDTHRDTNHVEIAYPSGAVIATCSLSNDSAGHAAALAWVFEHAPGPRLVMSIEGTRSYGAGLARAAAAAGIPVIEAERPTRKARRGRGKSDPMDAHLAVLYALQLDAEKLPTPRADGDREALRILLCAREELTTTSTGQINRLKALLRDGDDADRRAARGKLTNITLAGLARRRLPREASRERAVRHAEIRRLAVAVREAGRVLKTNRAELAAIVNDVVPGLTDRRGIGPVTGAQAIVSFSHAGRCRNDAAFATLAGTSPIEASSGQTTRHRLNRGGDRALNKAIHVIANTRIRSDPATQAYVARRTAEGKSSREIRRCIKRYIARQLFRSLTAAMAPNLAASV

SEQ ID NO: 386554 - protein, 326 aa, unidentified
MQYILGIDVSKDKLDLVLITEPGKFHKVISNNSEGYKALDKWLVSRHVEQVHACLEATGQYGEEVAEHLYKQGHAVSVVNPARIKHYGESKLHRNKTDKADADLIAEFCLKEKPTLWQPLSPEIKHLRALVRRLEDLKTNCQQEKNRLSSGEKDEWVVKDLSTHVAYLETCIAATEKEIQNFIKQTPNLKKQQELLNSIPGIADKTSARLLAEIGDISTFENASQLAAYAGLNPKGFSSGSSVHKKTRISKQGRKELRSCLYMPAVVATNYNPVVRSLKVRLHDRRLANKAIIVAAMRKLLHIVYGVLKTQMPFDAEYHKQFNFSA

SEQ ID NO: 386555 - protein, 349 aa, unidentified
MIIVGMDVHVRNSFLQVVDEEGRVLRRGRCANRLSDLAEFLEPFGTEPMRVSLESTTNSRAVHRMLMEHARESGTPVTAQVLDARKLRIIAESVTKCDRLDAAVLAELTRSDFKLPVCYLPDDEEFALREHLRARHDLVVLRTRVKNRIHSVFHRRGILTPARMSLFSGTGRKWLDETVLDEAGQSIISHYLEIVDRLEATIDASTRQLRELARRPRWSKSAALLQTMPGIGPITALTILAELGDRHRFRSRAAVANYVGLVPILRSSNDKSSTGHITKRGSKHLRAVLVEAAWMAVGRVPAYSAMFERVARRRGRRIAIVAVARRMLEDAWTMLKRDEAFRFSQSVAG

SEQ ID NO: 386556 - protein, 359 aa, unidentified
MDVRDSAKPHVVGGVDTHKDLHVAAVVDERDRVLGSQSFATTRQGYRQMLAWMQSFGEVQRIGIECTGSYGAGLLRFVQTVGIEVLEVTTPDQHDRRRRGKNDDLDAQNAAHAAFTGQRTVTPRSRDGMVESLRVLSACRKTAVAARRVALQLIQNTIVCAPDGLRDVLRSMTRMQLIRTLAAWRPDLTAYRDVEAAYRITFKSLARRYLELHDEIADLDIMIGAIVDELAPDLVARNSIGHVGAAQLLLAAGDNPDRLRSEASFAALCGTSPVPASSGKTIRHRLNRGGDRHANSALHIIAIGRLRTDPKTKTYVAKRVAEGHSKLEAIRALKRYIAREVFTLIMRRHKTINQTQIAA

SEQ ID NO: 386557 - protein, 339 aa, unidentified
MRHIGVDLHTNSFTACYLQEGKPEHIQTFRLKDLDNFTKDLQETDEVAIEATGNSCFFYDAVSPYVKCIVIIAPGQFEVVRRSVNKTDKHDARAIAFFLSKDMLPEARCKNKQCQQLASLLQTRDQLVKSRVSLINKVHGLFNYHGIKIKKEVLTTKVGFERATQKHNWDPLEKVEIEVISYHLEAIRESLKKLEKEIIAFAKQLPGFSNLISIKGIGPISAAVFIVTIGDINDFRRPEKLTAYFGVVPRVSQSNQQCTIGRITKRGSKIARTSLVQCTWIAVRYSPYLKSFYEHIKKKRGSAKAITATARKFLITIFYTLKNNWVFKDFTKFEISIGQ

SEQ ID NO: 386558 - protein, 411 aa, unidentified
MEVVYECCGGLDVHAKTVVACLIKQGRKQLRTFATMTDELLQLADWLASEGCTHVAIESTGVYWKPVFNILEGVVQVILVNARHIKAVPGRKTDVRDCEWLADLLRHGLLKASFIPPLEIRELRELTRYRQTLVTEHTAVANRLQKLLESANIKLGQVASDVLGLSGRLMLRAIADGEQDAEKLAELAQGKLKSKKGELRRALAGRLTQAQRWVLAEFLTRLDETEAALSRVEARIGEEVKTCPDPFVKEAVALLDSMPGVGERVAQTIIAEIGVDMDRFPSAKHLASWAGMCPGNNESAGKRRSGQTTKGSKYLRTALVEAAWAATRAKGTYLQAQYQRLVKRMPKKKALVAVGHTMLVIGYHLLSRRVAYADLGSDYVDRQHIERQRRRLVERLAALGVKVTIEEAAAA

SEQ ID NO: 386559 - protein, 352 aa, unidentified
MESITVGVDLAKQVFALCEVENDGRVRMRRELKRDGFHAWLAAQPAGTVVAMEACSSAHYWGRACERHGLVPRLMAAQFVKPFRKNARVKNDRQDAEAIATAARQGNMRFVTVKSEAQQVRLCWHRVREGYKKDALALRNRLRGLLAEFGVVPAPSVTALKRALADIGSQPLPASLLRLIRLQQEHLAAIEAGMAECDAQIEAQAKADERCARLLELTGIGPVTADAVVASVGNAAEFKNGRQFAAWMGLTPTQFGSGGKVSLGHISCRGDRYLRTLLIQGARSSVQRAKVTPQEKATPEQLWIVQLASRMPYGKVLVAIANKHARQVWAMLARGEAYDPEAWLKHPMVQRA

SEQ ID NO: 386560 - protein, 340 aa, unidentified
MEYFAGLDVSLRSCAVFIVDSKGAVLFERELPCEVNDIAACFAGFRHPIERVGFEAGAMSQHLFFGLEAEGADVVCMEARQVNAALSAMRNKIDKNDARGIAQVLRTGGFSPVHMKSKEAYGQRSLLSTRKALLNKTIDLANEVRELLKIFGIRLPKCVKHGSFNGIVRLIIEMDDVLAHALVPLLDARLVVYQHFLELDRRVKRAASNDEVCMRMMTVPGVGPTAALMFKAAVDDPTRFKRSRTVGAHFGLAPRRYQSGEHDNPGRISKAGDRDARATLYAAANALLMRTMNGSQIKSWGMRLLVTTRFRPPCSPGRQLAANSRAVTRRAGSFCDRGCG

SEQ ID NO: 386561 - protein, 374 aa, unidentified
MSDHSEAYVAFDSSKLRHAVAIADCGRAGEVRFLGEIENSAAATAKLVRKLAGKYGQLTFCYEAGPTGYGLYRQIKRLGHECLVVAPSLIPKKAGNRVKTNRRDALHLVKLLRAGELTAVWVPDERHEAMRDLTRARGAAVEDLRRKRQHVSAFLLRHELRYAGKQSWSKAYMNWLASLKLAHVEQRIAFEEMLLAVRQAAERIVRLEDAIRAAVADWSLAEVVTALMAMRGMDLVAATAFLAEIGDLSRFATPRELMAYLGLVPSEDSTGDTIQRGPITKAGNRRARRILVECAWSYQHPPRVGKDKQAKVAAAPRAVREIAWKAQGRLCGRYRALTRRGKLKTVAVTAVARELAGFIWAINREVTPGRAEVS

SEQ ID NO: 386562 - protein, 319 aa, unidentified
MSTTSSSNQVFVGIDVSKLRLDVCRLPGGDSAEFANDGSGIKSLLEWSAHAPPTLVVLEATGGFERLVVAQLAAAALPVVVVNPRQVRQFAGALGRLAKTDKIDAQVLARFAQDVRPTVRPLPDDKERELAELIARRRQLVELRSAELNRLKQTGSLKVRRNIEHTLKFLDKQLQAFDDELDRQLRQSPVWREKDELLQSLPGVGPTTSRTLLAELPQLGQCSRREIASLAGVAPLNRDSGRFRGQRTIWGGKATVRSALYMATLTAVKYYAPLKAVYDRLRNNGKKAKVALVACMRKLLIILNTILKTKTPCRITQPA

SEQ ID NO: 386563 - protein, 347 aa, unidentified
MESIGIDVHKVHSQVCILTEDGAVLERGICTAVDRFEKLLGGRPKARILIEASTESEWVARFLESLGHEVIVADPNFAAMYATRSRRVKTDRRDARTLAEACRLGAYRSAHRLSEAQRHVRAELIVRESLVRTRTRYISVIRTLVRRDGLRVRNGSSETFVDRLGEIDLPEVLRTEIAPLIALMTPLREQIQTCDARVEERAKEDEVVRRLCTAPGVGPVTAATFVATLDTAERFERAHQVEAYLGLVPREMSSGEKQHKGRITKAGNSRARSLLIESAWCILRWKKPETEELRTWAERIARRRGKSKAAVALARRLAGILYAMWRDGTEYTAQRAAVQTEESLVTT

SEQ ID NO: 386564 - protein, 351 aa, unidentified
MWIIGCDYHPSMQEVALVDTETGEYDERQLNHSDGEAEKFYRNLKQRGVNVRVGMEATGHARWFERLMAELGFELWTGDPAVIKAARVRKQKTDREDARLLLKLMSENRFPRIWVPNPENRDLRQLLWHRHRLVQMRTRVMNQLQAIAMGEGVRLRKSLWSRSGRAKLESLQLAPWAAKRRKDLLELLDHLTPKIGELNVAFQQEAWNRPEVRHLMTHPGVGPVTGLAFVLIIGTPERFGCGKQIGSYLGLIPCENSSGGRQRLGHISKQGSSLLRFLLVEAAQQAVRFDADWKRRYLHLAMRREKRIAKVAMARRLGVSLYWMWRTGWNGKQALEFGSHAGQLVRSHGLT

SEQ ID NO: 386565 - protein, 372 aa, unidentified
MASIIYVGMDVHTTNFTFCCYTADSDRGFAVAQTEPDYRQVIKYMERVQKQRGEECKFVCGYEAGCLGYSLYHQLTRCGVDCVILAPSTMHQEKGKRMKTDRRDAENIARCLAFSLYSPVYVPTTEDDAVKEYIRMRDDIKADLKRVKQQIIAFTTRHGFAFDGKSYWTQKHLKWLETLVFEHPLYKETLQEYLILYYMLDEKVAVYDTRIEEMSHLEHYEENVQKLCCFRGVAAHIALSLLVEVGDFQRFRSAKHFAAYLGLVPGEHSSSDKQIRTSITKAGNTHLRRLLVEAAQSYNRGAIGKKSAALKARQGGNPAEVIAYADKANERMQRKYYRIAFKSRHNIAKTAIARELACFVWGMMTGNISNAA

SEQ ID NO: 386566 - protein, 353 aa, unidentified
MVSLTETAHRLTLTGPFPFFKGAIMADAKLIGIDLGKYSFFVHAQDARGQQLWRRKFTRHQLIMMLAQHPPCTVAMEACAGAHWLARKLQSFGHQPRLITPQFVKPFVKGNKTDFGDAQAICETASRPSMRFVAIKTPEQQTLLALHRVREALVSERTATSNQIHAFLLEFGISLPTGARAIARLPALLDEPAHELPPRLIATLLRLHRRYGQLGNEIAEIETDLKAQLAEDEAAQRLLTIPGIGPITASSLIAVIGDAHAFRHARDFAASLGLVPRQHSTGGRATLLGISKRGNAQLRSLLVQGARAVMRYIERRHDALGTWVQSLLRRRHSNVVACALARGGEYRAQPSPA

SEQ ID NO: 386567 - protein, 347 aa, unidentified
MVTFGCDSHKRTHTLVVVDQNGCQLGERRVVATASGHLEALDWARQWSERQWALENCRHLSRMLECQLLSAGEVVVQVSPKLMGSVRRSGRELGKSDPIDALAVARAALREPHLPVAQLEGREREVKLLVDHREDLVGERTRIQNRLLWHLHELEPGYQVVASGLLRSVVLAEVSRRLERHTGVVAEIACELVVRLAELTQSVKRLQQRLESLTRELAPSLLTLPGCAALSAAKLLAETADVSRFRSSAAFAMHNGTAPIPVWSGNHNRHRLNRGGNRQLNVALHRIAITQIRLGGPASAYVARRLTMGNTKTEAIRALRRQISDEVYRRLRQDQLKRSTAQVAVAA

SEQ ID NO: 386568 - protein, 353 aa, unidentified
MEQFIGCDAHKKFSLFIAMNQEGQYGKPMRIAHDRERMREFLEALPAGSRIALETSGSYYWLVDEMQRAGHQVQLAHALTAKRRMEGRHKTDERDARGLAMLLRNGTLPRVWIPPSELRDQREMLRWRMSLVEARSRIKNRIHGALLRYNIQAKAADLYGVAGREELKDRLSELPEWTRQSVNEQLETVDHLERQIEDCEKQLEALLEANAERDLLKTMPGVGPILSAVIALEIGDIGRFASAQNLASYAGLVPAARESAGKKRKGKCPADCNTYLKWAFIEAGNVVSLHHHQWPDRHVAQLYERVKQSSGMHGKATVAVARHLAEASYWMLTKQEIYREPNLHRQALSSTHG

SEQ ID NO: 386569 - protein, 347 aa, unidentified
MKKIAYLAMDLHAKNCTLGKMDADGSFKGNIEFSTSEKNIIMALKSVKVKEKYLAIEQGPLTYWAAQIAVPYVNQVIACDPRKNALIYKSAYKKDKVDTHKLCRLLRFGELKQVYQPENDDRAIFKAAALHYLDLRQQLIRFKQKIKAMYRHWGIIQVFTEAVYSKSGRDQYLDKVNHPPIRDQLLRLYHLMDQTETMRKAASKTMKRLGRNYAEIQQFMKIPGIADIHAHIFDAFIQTPHRFAKKSRLWKYCRLSITERSSDGKPLGFQRIDSSGIGELKALSYRAVIAAMKSDNEVKHFYLQSLQRTHCRKHARLNTQRKILAVMYNIWKKEVAYRPELFTESAI

SEQ ID NO: 386570 - protein, 458 aa, unidentified
MYRELQPFRETLSQELKASLFPVVAGMDPDKLLGTYLDRLTMYTGVDVADQTFTVLAMDASREILGSLEGCANHPDGFQHFVAWARDLRDRHNLRIIAIAGETTGIYYWALWDFLGEQPDIARVLYNPRTTKHMGEVLSKKVRNELVDALLLAEQLRLGSTPEVLLLEDADLLTARYYSRAARDLAQQINRKKNQLRALLRAYCPPLCQVFPRGNLHHPAVYALLQENLFPDEFAQSGAEALATTLTTHCRTAFGLTEAQHLVEASCQSLTRPIGRDAIRHLVHSHIEDISTFQQRKAFFLKTGYALIKNRQQTKLLRTVKGAGVSNTLALVSEIGDVHRFSSGEYLSSFLGLTTSKHISGATLFRSKRITKQGSPNGRYAAVNVAQHLSCRVPRYQAMYQRIKGRKPPRKGHFIALVAIARDFVANVLYDMWRHERPFFLEVSDYRDYRRKTQRTDH

SEQ ID NO: 386571 - protein, 299 aa, unidentified
MTCYVGVDLHRRRSVIVVLDSDGTELWTKRIDNDPLTLGLEIEDAGPAPEVVLEATWGWYWAADLIAQAGGSVHLAYPLGIKGFENRRVKNDRIDARLLADLLRMGRLPESWIAPEGIGHQRELVRYRRKLSQLRAGLKAQVHAELGKEGLRPPITYLWGPGGSVWLDETDMADAYETRVRSLRRLIKIYDTEITKLDTRIADVFEGYEGYETIQQLNGVGPVLAAIFTAELGDVTRFGSAKQVTSWAGLTPRTSGVGHHGASGVDHQTRIRIGPVGGYRSHIEEPWRRPHQNPLPEGF

SEQ ID NO: 386572 - protein, 444 aa, unidentified
MARKSKKQPLRVIHPHSAGIDIGSREHWVAVDPDSCEDSVRPFSAFSDDLYAMADWLESLGIEVVAMEATGVYWIPLYEVLDARGFQVNLVNSRATRQVSGRKSDVLDCQWIWQLMTYGLLSGAFRPADDICSLRSVVRQRATKVRDQSRSTLHMQKALTQMNVQLDNVISDLTGKTGLAILREIVAGERDPKKLATLRDRRLRATEETVARSLHGNWRSEHLLALTQALAHYDFLATQIADCDEAISKALTRLPSLTEKKSEPVKKLRSPHRTAAQQAELHQALYKILGVDLTTVPTLAIETVLVLAGEIGPDLSRFPSTGHFVSWLGLAPPTNISGGKTLSGRKSKVINRAGQALRQCAANARRSNTFIGASHRARLARMDTVKAVKATAHQLARLIYAMLTKGQAYVEKGMEAFEARSKERQVRAVLRKATRLGLLVTPQL

SEQ ID NO: 386573 - protein, 403 aa, unidentified
MITLNSAILGIDHSKKRATWALHQSGKCVHKSECTSPAELSEQLEQQGYSPEDMIIVSEATGVYHEAYADYFRKAGAQCFVLNPLEAKHLLQKSQPLRKRKTDSIDAEGLARICEFSGGTELLVKRKWTSRPLDRAAKRILAVRENLVEKMADLKRNFRSTLESVFPEIDDEFKQSFPARICNLLRNHPTPEQVKSMEMEDLKKIVGKKKAAKVHQWASETKVCPVLSKAIGPSLGILLKAIEDLQTHIQELEIKAAAIIRESGQLGSLETLNAIEGVGKVLAMKLLAYLPQDWYQWEGSNRKLSGKLLAYSGLDPIVAESGDYKGKRKISKRGSSALRHTLYQAAYSQTQHHEGSKERYQKAKKRKKSHKVSIIDQVRYLLREIVRLLRPMLSNMNSIQQAA

SEQ ID NO: 386574 - protein, 449 aa, unidentified
MGSNYAGVDWASEKHDLLVADETGEAVLAATYAHDERGLIALCNALVRLKVQLVAIERPDGVLIERLLDAGLRVMAIHPNQVAAARPRFRTSGGKSDRFDAFVLCELARTDSHRFRVLVPDGDQTKALRALTRAREDLVATRVALANQLRTELERYWPGAAAIFKDIDSPISLAFIKRYPSPKDARGLGAQRLGWFLARHAYSGGKQPEQLIGKLRSAPDGRAGDQETEARRAVVLTLVAAIDPLVAKISELTSEIGHCLRAHPDGHIFLSLFKGKSVVTAAELLAEIGDCRDRYPTADALAADAGMSPVAIESGKRKVAAFRFGCDKRLRDAFGVLADTTRRWHPWAGDHYARAIQRGHDHPRAIRTLGRAWCRVIWRCWQDHAAYDPAKHRGLQQHVLVTIPGSSGPRPDLAATQRMAGAAVTEPAARRAEREALDGKPTSANSPGG

SEQ ID NO: 386575 - protein, 343 aa, unidentified
MQIRSVGIDLGKTTFHLVALGDNGKVLLKKKFTQRQLITFTANLQTTLIGLEACAGAHFLGRALREQGHDVELIPAQFVRPFVKSNKNDFLDAEAIAEAVDRQNMRFVPIKTDDQLDLQTLHRVRDRLITRRTSVINQLRAFLLERGLVFAKSPAKLRERMPEILENAEEDLTPRMRNLLALLWNEWKDLEQQVVDLNHEVELIASSDAACLRLRQIPGIGPLVATAIVASIGNGAAFHKGREFAAWMGLVPKQYSTGGKAKLSGISKRGNRYLRKILIHGARAMVLRCKRERIPMGAWMTALETRAPRNVLIVAAANKLARIAWAVLSSGQDYRAVQQPVAA

SEQ ID NO: 386576 - protein, 410 aa, unidentified
MEVQHPRCCGLDVHKATVVACVRLVIDGKTVKEIRTFATTTASLIALSEWLTETKCTRVAMEATGVYWKPVWHILSDQDFDLVLANAAHIKNVPGRKSDVKDADWISDLLAHGLIRPSFVPDGPTQEMRTLLRTRKQLVREKTSHILRIQKTLEDANIKLDSVITDVMGLSGRKMIEALIAGQKDPAKLARLADHRVKASQESLREALRGRVTKSHRFLLRLHLGQVDAIDAAIAEIDREVEAGIAPFRTAVEQVSAVPGIKSLAAQTILSEIGIDMSRFPSSAHLISWACICPRSDESAGKRRSTRIRKGSPWLKSTLVQCAWAATRTKGSYLQAQFYRIRARRGPKKAILAVAASILTAIYHMLKDGTLYQDLGPNHLNARNKERQKNRLIKRLADLGYVVELVPQAS

SEQ ID NO: 386577 - protein, 320 aa, unidentified
MSGFIGIDVAQGDFVVAREGIAGSRSYPNTDRGCRDLVKDLSADAADLKLIVVESTGGYERRLVAALGAAGLPVVVVNPRHVRDFARSKGQLAKTDQIDAHVLSDFAASIKPDIRPLPSEEQQDLRELLTRHEQLVQMLVAEKSRLLQAEGQSRHVLRKKIKNHIKFLEREITMNDSDLDDTLKNSEVWREKDDLLQSVPGVGKGTSRTLLGFVPELGTVSAQEIAKLVGVAPFNHDSGKFRGSRHIGGGRGRARTMLYMATLSASRRNPVVRGWYERLLAAGKPKKVALVACMRKLLVVLNQMLKTKTRWQAHLTPTTA

SEQ ID NO: 386578 - protein, 343 aa, unidentified
MKLIRVGVDLAKNVFQVHGVDRSEKAVWRRKLTRENWLKVLRQSVEPGCEIGMEACGGAHHWARRLQELGFKVRLVAPQFVKPYVKSNKNDANDAEAICEAMGRPHMRFVSVKTVEQQDIQAVHRIRAELIKQRTAKANQIRGLVAEYGLVAPKELGHLRRALPCWLEDAENGLSGRFRRLLHGLWGDLQTLDERLSELDREITMIARSDPVAKRLQQLRGVGPIVATALVAAVGNGQQFARGRQMSAALGLTPKQQSSGGKERLLGISKRGDVYLRALLIHGARAVIQNAKDKDDRLSQWVGRLAARSHPNVAAVALANKTARMAWAMLRNGTDYRPGMVSS

SEQ ID NO: 386579 - protein, 319 aa, unidentified
MLIGIDVAKAELVVAARPSGDRWSVTNDERGIKTLVDRLTRETPALIVLEATGGYEMLCVAALAAAALPVVVVNPRQVRDFAKATGQLAKTDRIDAALLALFAERVHPAVRPIADADAQELDALLARRRQLLDMLQAERNRLGQVFGRGKPLVKKSLKQHIAFLERELRMADTDLGAMVRASPAWRERDDLLQSVPGVGRVLSLTLLAELPELGRLSRREIAKLVGVAPFSRDSGTQRGRRFVQGGRAAVRAVLYMGALVATRRNAVIRAFYARLLAAGKPKKLALVACMRKLLTILNTITRTRQRWSGHHVDAAHIPA

SEQ ID NO: 386580 - protein, 359 aa, unidentified
MPSIAEQARAVTAGVDTHAEVHVAAVVDQVGHVLGSEAFAVSEVGYRAALTWMCSHGQLEAVGVEGTGSYGAGLARYLRSQGVAVVEVIRPNRQARRRRGKSDSADAVAAALAALSGQACGDPKAHDGAVESIRALRVARRGAVKAATQAANQLRDLIVTAPESLRTKLISLSTGARVALAVRFRAGDLADPIGATKQAMASLARRYQRLQAEIADLDLALKALVARTAPACLMARQGVGLHVAATLLTTLGDNPTRLRSEASFAALCGVSPVDASSGKQRRHRLNRGGDRQANSALWRIVFVRMSHDPRTKAYVAKRTAEGRTTKEIMRALKRYVAREVYKTLIRPAQSTDLTGTVAA

SEQ ID NO: 386581 - protein, 343 aa, unidentified
MEQISTIGIDIAKTVFQVHGIDETGEVVVRRQLRRRQVLSFFAKLPACLVGMEACATSHHWARELAKLGHEVRLMPPRYVKPYVKRNKNDAADAEAICEAVRRPTMRFVPIKTPEQQSALMVHRTRHLFVRQRTTLINAIRAHLAEFGIVAGVGRNGVETLLELIIKGEDERLPSAARECLMALAAQLELVKRQIMEADRRVREWHRSNKTSKRLEAIPGVGPLVATALVASVPDPHVFRSGRDLSAWIGLVPKQNSTGGKHRLGSISKAGNRYLRQLLVVGALSVIRRAKQLGYTRHPWLVRLMARRSTKVAAIALANKIARIAWAMMARNESYRTPLPQSA

SEQ ID NO: 386582 - protein, 497 aa, unidentified
MKTNPKSRATSIYRNQSVSLRAIFDEAKSLRHILCVALDFAKAKHVAMICDGKGDVLKAAFPVHNSTEGVAFLCEQIEASARRRKIPKKHIFIGGEDEASYVENFTTALCDRGYLVVRVNAREAKENRENTLASTDNLDLIGIAKTMLSRRARVARDPLESEPAIYRELRGLCRSRRKLIRDETAASNRIHAQVDRLFPGFLDSSKSGLTAFGPASLHLMSERFSAPEIARRSPASLTKTLRSQHVHYPEETATKLITLARSALSPDPARIGAQQRSLSTSVELYRCLENAALDLKVEAAGLLASTPYVFLTSLPGIGFVLAAGVAGELGDPGKLSSLGGMCAYSGIVPATYQSGGPDSPARTGSTSGRCNHILKDWVVQSSQKLRQYGPPEWKERFVRWEAGDQHALFAGARRYLRVLRTLVRQQIPYETPDARLRNATREQRAASAEATWDVLLKKWRTIPGWQELAFSEGKPLEFWRELSNSVHGTNLTLPKER

SEQ ID NO: 386583 - protein, 387 aa, unidentified
MTGQTAPTNPTAAFDHDSTLVVALELSGKSWEVGAIVPGVARRPRRQLTPRDMPGLLKQLERWKAEALRAGRTVQRTVLCYEAGRDGFWIARYLLAHGIEVQIMHPASIPVERRGRRVKTDRIDLDMLLRTLLAWLRGEPRVCSMVRIPSEAEEDMRRPERERERLVSERIALENRIENLLCLHGITGFKPRLKKAAARLDELRSYTGEPLPPNKLDELKRMMVRHGVLSEQLKEIEAAREQAVTAAEPDHAAQQIQMLALLYGLGLGTATVLTREVFCRTFRDRKAIASFVGLTGTPFNSGGSEREQGISKNGNPRVRRLLMQLAWRWLRFQPDSALSCWFVERTAGSKGRIRKIMAVALARKLLVALWRYVETGEVPAGARLANA

SEQ ID NO: 386584 - protein, 320 aa, unidentified
MNSNQSEIQSAVGGDVSKDTVTLFDSNTGKTSTVENTATALKAALKPYAGCVDILAVCEATGGYEDTLLFVLERLAIPAHRADAARVKAFIRSCGTRAKTDPIDARHLAEYGLSHGRSLPRWQAPEPDDARMKLLVMRRADLVSMRTQEENRRQAPRNRSIAREIADHVTELTRRIEALDKEIDNLSQQNKRLRDRQAILRSVPGIGKVTAPVLLALLPELGFISRKQVASLAGCAPHPRDSGTHKGRRFATGGRRQLRPLLFTAAMAASHSKSELAASYRRLLDAGKSKMTALGAIMRRIVVIANARLKEYEDAHARLT

SEQ ID NO: 386585 - protein, 355 aa, unidentified
MPSVADLVDAVVGVDTHRDTHDAEIALPTGAPIATITISNDSSGFAELLAWIAEHAPGPRLVMSIEGTRSFGAGLARAVAAAGLTVIECDQPQRKQRRGRGKSDPIDAHLAVLTALALDVARLPSPRADGDREALRILLGARHDLTTTQTAQTNRLRALLLTGDDRDRDAARGSLTDTTLATLARRRIPADVSREQAVRQGEIRRLALALRASRAQLKDNRHQLQAIVDGLAPGLTGRHGIGPVSAAQVIVSFSHPGRCRSDAAFAALAGASPLEASSGRTVRHRLNRGGDRALNHALHTIAMTRMRTCERTRAYVARRTAEGLSSREIRRCLKRYIARELYRTLNATMPTPEAA

SEQ ID NO: 386586 - protein, 360 aa, unidentified
MKKRLTKKASWFKENNFTAEDEIYVGVDVHKRNYHVAIWHNGRIGCAYSMTSDNNKLLRDIQQVRSSLKNIVYEAGPTGYGLVRLLRSANLPAEVVAVSKTPRMTDTSAKTDRLDCQQLAEYAAKGLLTFVAIPTEQQEADRQVVRLRDQLTSKRRRIMQQIKSFLLQHSISWPGGNWSKILIERLRQLDISSELRFTLAQYLDEYEFFCGKIAETETKLRQIFSRKRHSAAIEIFKSHPGVGNIVAWAYRAEMFNITRFSEPKQISKYTGLCPRVSQSGKTCHQGPITKTGRRQLRAMLVQAAWAWYRRDPRARQIYNRLLHNTGNGKKAIVGLAKRIAIHLWRMLCDGCLYDANVVKV

SEQ ID NO: 386587 - protein, 337 aa, unidentified
MIIIGCDFHPSFQQIAMLDTETGAIEDHKLVHASGEAERFYRGLASAALVGIEAVGNDQWFVQLLQKRGHEVWVGDAAQIRASYVRKQKTDRRDAKHILQLLLEGRFPRIWVPSAEMRDHRQLLVHRHKLVQIRTRVKNELQHLMLNQGMQKQQKLWSAEGRAALASLPLEPWADRRRHDLLNLLSMLDEQLQQLNDAVIQVARQYPQVDLLMSQPGVDAVTALAFVLTIGDVRRFPRGKQVASYLGLIPREYSSGGKQRMGGISKQGNRLLRFLLVEAANIAVRFDPVFRKEYLHRCHQKHFTVAKAAAARKLAIRMYWMLRTQTPYPDVLSSRAA

SEQ ID NO: 386588 - protein, 334 aa, unidentified
MENIALIGIDLGKNSFHIHCQDRRGKAVYRKKFTRPKLIEFLATCPATTIAMEACGGFLFFAPQLEEVGDSPKLISPQIFRPFVKNNKNEFVDAEAICEAASRPSMRFVQPRTESQQAMRALHRVRESLVQDKVKTTNQMHAFLLEFGISVPRGAAVISRLSTILEDNSLPLYLSQLLLKLQQHYHYLVEQIKDLESQLKRKLDEDEVGQRLLSIPCVGTLTASTISTEIGDGKQYASSRDFAAATGLVPRQYSTGGRTTLLGISKRGNKKIRTLLVQCARVFIQKLEHQSGKLADWVRDLLCRKSNFVVTCALANKLARIAWALTARQQTYVA

SEQ ID NO: 386589 - protein, 405 aa, unidentified
MGIYVGIDWAEAHHDICVLDEAGMVLAKRRIAEGLEGVGQLHALLADHAQEPDQVVVGIETDRGLLVGALLAAGYQVYAINPLAASRYRERHVTSGAKSDPGDAKVLADLVRTDRHNHRPVAGDSELAASLQVLARAHQNLIWSRQRLVNQLRNNLREYYPAALAAFGTELAHPVALGVLDLAPTPARGRTLSRAKLAAILRRAGRERGVEEKAGTIQAQLRAPQLAAPALVGEAYGKSVASTVRILRGMNAELASLESELAPSFEKHPDAEIYRSLPGLGIVLGARVLSEFGDDRTRFAHPKARKNYAGSSPITRTSGKSRVVLARMARNRRLADACHQWAFCALTGSAGARGYYHALRQRGKTHHQALRALANRLVGILHGCLDHHQTYREDIAWPGPLTVAA

SEQ ID NO: 386590 - protein, 309 aa, unidentified
MEHFAGIDVAKDRLDVHLRPSGETFAVARDGEGLAQLVDRLQTLAPQLVVMEATGGYETIVASAGVAARLPMAVVNPRQIRDFARATGKLAKTDRIDAAAIAHFAEAVRPPARPIADAEARALGELVTRRRQVIEMMVAERNRRRRVTQSRVLRAIDRHLELLQTELSELEQDIDGAIRKSPAWQANADLLASVPGVGKATLRTLIAELPELGRLDRRKIAALVGVAPINRDSGTMRGRRTIAGGRPAVRTALFMAALVASRANPIIAPYYVKLRAAGKTGKQALTACMRKLIVILNAILRDRKPWQPA

SEQ ID NO: 386591 - protein, 486 aa, unidentified
MHPQMTNIQASAQDAFEHIFASAGALVFVNEYSGSAAPPAPYNAFAEHKLACPLAQRYHTLGRSHMQPEAPEAFAAFVGLDWADAKHDVCLQAAGSAQREHRSLDHTPEAIDAWVCSLQKRCEGQPIAIGLELNKGPIVFALRTYHFLVLFPVNPLTLARYREAFTPSRAKDDPTDAALQLALLRTHRDKLPPLTPQSPTLRALAQLVEHRRRVVGDTVRITHRLTSTLKNYFPQALQWFQDKDPIIFCDVLSRWPTLKAAQLARRSPLETFFREHHVRSADVIAHRINSIKAAIPLTTDESIITPNVLLVQALVSQLRATLQAIQDFDTAIAQHAQRPPDFPLFQTLPGAGPVFAPRLLVAFGEQRERSASAAELQPCAGIAPVTERSGKKCWVHWRFQCPTFLRHTCVEWAAESIRHSFWARVYSQQQRDAGKAHQAAVRALAFTWIRLLFRCWQDRTPYDESVYLNALNRRGSSLIHNLVKES

SEQ ID NO: 386592 - protein, 343 aa, unidentified
MTVIIGVDPHKATHTAVAICRDERELASITVRATKNQATKLVSWAEPLGPRTWAIESAGGLGYLLAQQLVEAGEDVVDVPATLASRIRVLATRRSNKNDPNDALSVAIAALRAPALRSVKPADHSEVLRLLAKRNKDLGSLRTKVVCRLHALLADLTPGGISKEMNASDAVRLLDRFDPATPVEQTRYELALELLEDVRRLDAQLKESHRRITIAVKASGTSLTDLYGIGPIIASEMVGYAGDVRRFAGRDAFAAYNGTAPIELSSGGRVVHRVSRRGNRQLNHAIHMAAICQIRQTGSDGRAYFERKVAEGKTKKEAIRSLKRHVSNAVYRQLLIDAERSKK

SEQ ID NO: 386593 - protein, 365 aa, unidentified
MTKVRTWAGLDVHAASTVACVVDAPSGELRVQRLSGRTTDLTAFCAQLPAPARVAYEAGPTGFGLARSLTAAGIGCIVAAPGKIERPAQDRVKTDRRDAERLVRLLMIGGLHPVRVPSDEEEALRDLVRAREDLRGDLMRARHRLSKLLLRHDVRYEDTASAWTAAHRNWLSRVELGERAAQTTLLDYLGAIDALVLRRDALERTIGELVPGSPWAEQVARLRCLRGIDTLSAVGLCAEIGDFARFEHPSQLMSYLGLVPSEHSTGQARRQGAITKTGSRHARRLLIEAAWHYRRAPRNGTTLQRRQEGQTATAVAISWKAQQRLHQLWRRLDSERGKRKTIVAVAVARHLAGFCWAITTTDPDA

SEQ ID NO: 386594 - protein, 481 aa, unidentified
MAKREQSTFERLKGKDLNRKERRELQRRLFSDDPGLEILHPDAAGIDIGNESHFVSVPPGLDPEPVREFGSWTADLERMAEWLKSCGVKTVAMQSTGVYWIAAYDVLEKHGLEVFLVNARDTRNLPGRKTDVQESQWLRKLHTYGLLRNSFRPPEEIRAVRTTWRVRDRLVQDASRHVQHMQKALTTMNVQLANVVSDITGLTGQAIIRTILQGERDIYVLADLRDARVKASREEIARSLEGNWREDVLFELKQAVDAYDFVQKQMGECDKQLEKYMAALPSRNLPGADAEDTGDGGKNKQKSKKPKGNAPKFDLKAELNRVNGVDLTTIDGIDVMTAETILSEIGTDMSRFKTEGHFVSWAGLTPSQDVSGGKVIRQRSRRVNNRVGNALRLAARSLFRSESYLGAKFRKLRARRGAPKAIKGMARYMGCLIYRILTHGQAWVDRGTKHFEEKNRQREIADLQRKATALGLHLLPVTANA

SEQ ID NO: 386595 - protein, 344 aa, unidentified
MEVSHYVGLDVSQETTSVCVVDQAGRIVWRGQCGSDPDVITACIKRFAPFAVRVGLETGLLSNWLTRSLRQRGVPVVCLDARHAKAALKMQINKTDANDAHGLAQVFRTGWFREVAVKSMDAQTLRMLLVTRAQLVSQRQALANTIRGLIKSFGLVVQKGAGSPFATRVRAVIGDNAALSAIAEPMLAVWQVLREQIEVLDKQLLQRAQADVAARRLMSIPAVGVIVALAYVAVIDTPERFRHSSSVGAYLGLTPRRYQSGDVDRAGHISKCGDGLLRSYLYESANAILTRKVADSSLRCWGKALAARIGMRRAKIAVARKLAVVMHRIWQDGREFDRRLAMPG

SEQ ID NO: 386596 - protein, 339 aa, unidentified
MKFAGCDLHKQTITICVVDQSRRVLERRTVRCGEERTILAFFERLGDFEAVVEATASYEWFVRLIEPVAHRVLLAHPKKLRVIAESTRKSDRLDAQILAEFLALDMIPTSYRATPRQHEHRRLVRQRGGVQRRLTSVKNRLRRILCDYNADRPSLFTVEGLAYLAQVPLSGADRFAVDQMVEELHFGRRQLLAVNARLKEFAEAAPLCEQEARTLLRTIPGVGFVTTEVVLAELADIDRFGSQKRVVAYAGLSPGQRESAGKSRELHLEKNGSTLLRSTLVEAAWRLVQHSLRWRRIYERLKLRVRAKKAIVAVARRLLCLMTAILKTGQPYSLSQQPT

SEQ ID NO: 386597 - protein, 339 aa, unidentified
MAIVGGLDVHRRQITFDWLDSESGEVRRGRIPGDRLGFRAWLDQLEQRPADFAVEGCTGWRFVVEELERAGMGAHLAEPADTQALRGPKRHAKTDGIDARHLRDLLRAGTLPESWIPPTHIQEMRARVRLYKELIELRTAWVQRIHAVRYHQGLPTLSPSAAPGRRRYLDGEEALSPAGRDWVAAALRLLDHVDGELAQLRALFTRFARQQPGCRALSEEYGVGPVTAVAIWAEIGDCRRFSSSREAVRYSGLDITVYSSDAKRARGHLSRQGSPVLRWALFEAAQCGARPSSPDHAYHAAVKERAGSKQAALSVARKLARRAHHRLRSLGDQAMVPVG

SEQ ID NO: 386598 - protein, 426 aa, unidentified
MNTDMPQSAAPLPPAAWIGWDWADKHHDLFLESADGRTEEIRLPNEPAKLHAWLQTLGARFGQRQIAVCWEATRSAMLPILLEYPFLKLYQVNPKALARFREAVRPSGSKNDQLDCKLACQFVKSHAHLLHALVIEDGPTLQLEQLVRYRRDLVNQRSALANQLTSQLKFYYPLAWELLVHDTTSELAADFVLKFPTLEALQAARLDRVRKFFLDNKCKATEGLEARLQSIAPALPVSPQTHWNQPASFMACALARQIKDLCASIDELEERIRIAAEQHPNYALAKSLPGAGPALEPRLMAALGTHPEACASAADRAVRSGVAPVRRQSGNTSVVARRWAKPEFIHQTWIEYAKCSVNHCHWARGFVEAKTKEGKSYFTAIRALAYKWIRIVHACWEKGTVYEEAKYLQALKAHHSPFLPATSDQA

SEQ ID NO: 386599 - protein, 352 aa, unidentified
MPKRTRIVIGGVDTHGRTHHAAVIDQQGRLLGDREFPADRGGYQQLLGWLGRHGQLEAVGVEGSGSYGAGLTRLLLDRGVKVVEVDRPDRRTRRQRGKSDPIDAEAAARAVLAGVATAPAKRRDGIVEAIRALRAARSGAIKARTAAINQLKGLLVTAPASVREGLDALPRAALVAACARLRPDEATLDDPVQGVKAALRAVACRIHQLDEELSLADQRLATLVRRAAPRLLKLHAIGVDHAGQLLTTAGQRPERLRGEAAFAHLCGVAPIPASSGATHRHRLHRGGDRDANRALHLAVVVRMRWCPRTRGYAERRTTEGLSKPEILRCVKRYLAREVYHALVADFEALHAT

SEQ ID NO: 386600 - protein, 346 aa, unidentified
MMVIGCDYHPSWQQICWLDTETGEIEEKKLDHASGEAERFYRELSTPALIGMESTGNCQWFVEMATTAGHEVWIGDAAKIRASEVRQQKHDRRDAALILKLLVEGRFPRIWTPSGQEKDLRQLLIHRYKLVRIRVQVKNELQHLAMNQGVTKKHKLWSKAGEKVLRELPLKPWAGRRREDLYKVREMLNAQLDRLDQAVVEAAEKNEKARLLMTQPGVGPITSMAFVLTMGDVNRFQRGKQVASYLGLIPREYSSGGKQRLGSISKQGNRFMRMLLVEAAQSAVRCDPQMRSEYLHRCHKKAKGVAKVAAARKLAIRLYWMLRTNTKYPEVVRAESSSRVPVVSAS

SEQ ID NO: 386601 - protein, 360 aa, unidentified
MEVQNRATLLRGSVTVKITTMGIDLAKAVFQVHGVDGRGKVLVRKQLKRKDVVGFFANLEPCLIGMEACGSAHHWGRTLSGLGHTVRLMAPQFVKPYVKTNKNDRNDAEAICEAVGRPNMRFVSIKSVEMQAVLALHRARQGFVKGRTAQANQIRGLLGEFGIVIAKGIGHIGERLPAILEDGENALPGMMRQLLARLGENLKELDQQVGELERQITLWHRDNEQSRKLEAIAGIGPITATAFVATVGDVKSFKNARQVPAWLGMVPRHEGTGGKATLGCISKRGDVYLRTMLIHGARTVVAQLERKRDATDEWLRKLVARRNKNIAAVALAAKNARIAWAVLAHERSYQHNYVANRAGA

SEQ ID NO: 386602 - protein, 318 aa, unidentified
MEATVVVGIDVSKDRLDVAIYPSDEPGFAVARDAAGLDALAARLKLLGPAAVAVEATGGFESVVVASLAAAGLPMLVVNPAQIRAFANALGKRAKTDPIDAMVIARFVAATRPEPRPLPDEATQHLADLVARRRQIIAMMVAERQRQKRLLAPRLQHSITRLLEALQKELSEVDREIDTEVRHSDIWREKEKLLASVPGVGPVIARTLLAEMPELGRLDRREIAALAGLAPWTRQSGQWRGKSFIGGGRASVRAVLFMGAITAARHNATLKAFHQRLIDAGKPKLVALVAVARKLLTILNAIIRSGKAWKSEVQAASI

SEQ ID NO: 386603 - protein, 407 aa, unidentified
MNQLLVGIDVSKNTNAIYIMKPDGSKHSSFSVGNNLVGAKTLTDRVVKALDDLGMQGVKLGMEATSIYGDNLARYLRVNDALCRYDRKVMILNPKQVKKTKDTFNDLPKNDPTDAFVVAEVLRNGRIGHEIPSDDRFTALQVLTRGRYHTVLALVREKQNFMNHLFLKFSGLTQEKVFSNAFGATSLAIVEEFATADEIIDMSLDELAAFISKKGKNHFENPEEVAKAIQAAVRGSYRLPKTVADSVNRLLAISISTMRALERSIKAFDEEIERQISAIPNTLISVPGVGPVYSAGIIAETGDVTRFGSHPSLAKYAGLTWTQHQSGDFEADDTKIIRSGNRYLKYYLCEAANKLRCYDADYRQFYAKKYHEVRKHQHRRALVLTARKFVRLVFRLLKDGTLYRPPG

SEQ ID NO: 386604 - protein, 353 aa, unidentified
MKRYYVGMDVHRASIVIVVLNGAGKVVMQSVIETGAARVRGFLKQLRGRVYVTFEEGTQANWLHEVVRPMVTEVVVCDPRHNKLLQSGNKNDRVDAQKLAELLRNGALKAVYHGDHGVRALKELVRSYDCLVSDTTRVMNRLKAIYRGRAIGCAGHDIYRQDRREPWLEKLTERGAKQRASFLYQQLAALRPLRHEAKRMMVKEARRQPAYPWLMSVPQFGAVSVAQLLAIVSTPHRFRSKRQFWTYIGLAVVTRTTADHEVVNGVLRRSKRPVSTRGLNRNHNHLLKRVFKNAANGACHGGPFKAAYELRVKQGMVPSLARLTVARQLAAITLAVWKHGEQFNPERMKQQAA

SEQ ID NO: 386605 - protein, 345 aa, unidentified
MKKVVAGMDLHSNNVVIGVMDMDGKRLASRKVSCELKEVVKFLAPFKSRLEKVAVESTYNWYWLVDGLQAQQYPVVLANPAGMEQYRGIKHADDTNDAFFVAELLRLDILPTGHIYDAELRPVRDLLRRRMMLVHQRTALMLSFKSLYTRTTGQEMRLGELKDLEIKEAQKLYVHPANQLIAGMQVKHIEQLTESIEKIEKVVMACARALPPYSKVATLPGVGIILGMTLTMEVGDIKRFASAGDFASYCRTVAAQRTSNSKRKGENNSKCGNKYLAWAFVEAANFARRFDPACRKWYDRKAARTSNLIATKALACKLAKAAWHLMSGGTEYDSKRMFGQPAKIK

SEQ ID NO: 386606 - protein, 342 aa, unidentified
MKDTMIGVDLAKNVFQLHGASMTGEVKFRKKLTRPQFMAFMADHPAAVVVLEACGSASYWARELSKAGHEVKLIAPQYVKPFVKRQKNDAADAEAIVVAAQRPEMRFVPPKTEEQQARAVLFRARERLVHQRTELSNALRAALYEYGHAVPQGSVHLKRIVEIIEAETCDLPDLAREEARDLLEQIAEKTVRIEAKTRKIAAQAALTPTARRLQTMPGVGPMTALAVEAYAPAMATFKCGRDFAAWLGLVPRQMSSGGKERLGRISKAGQSDIRRLLIIGAMSRLNWMGARSIREGSWLDRLRARKPKMLVAVALANKMARMIWAMLTKQEDYKDPVPAGAT

SEQ ID NO: 386607 - protein, 375 aa, unidentified
MKEKVRFLGLDVHAETIAVAVAEPDGEVRSLGTIANREESIRKLIKKLGAPEHLRACYEAGPTGYVLYWQLTQLGVECAVVAPTLVPIKAGDRVKTDRRDALKLARSHRSNDLTAVWVPDPDSEALRDLVRTREAAKQDQLRARHRLSKFLLRMGRRPAVGVKAWTEPYMAWVRQVRFERPTQQATLQDYLHEVDHMAARVKRLEQAITEVVKLASPQVQEVVKGLQTLRGIAEISAVTIVAELGNIARFDTPRQLMGYSGAVPSEDSSGKRKRQGSITKTGNAHLRRIVVEAAWSYRHRAAIGPRLRKRQEGVSEPIKEIAWKAQVRLSKRYARLAAAGKNQRKIVTAVGRELLGFIWAIGVKAERSVPQQIAA

SEQ ID NO: 386608 - protein, 337 aa, unidentified
MKYCGIDLHSNNSVVLVSDEEDRIVLQKRLPNDLGQIQAALEPHREEVAGVVVESTYNWYWLVDGLMDAGYRVHLAHPSAIKKYEGLKYSGDFADAGYLAQLLRLGLLAEGYIYPREERAARDLARKRMQLVRYRTAQILAIENILARQTGARMSGEVVKRLTAKQVEGLGFTPDVALAVEANRAVSQTLGQQIEALEKRLKKRVRLRGEFKLLNTAPGIGETLATTIMLEMGTPARFAKVGNFSSYCRCVDSLRESNDKKKGEGNAKNGNKYLAWAFVEAANFARRYCPQAKSFYERKKRKTNRVLATKALAHKLARACYHMLREQKPFDVSRCFG

SEQ ID NO: 386609 - protein, 346 aa, unidentified
MAMTIAVLGVDLGKNACSLVGVDSSGTVVLRRRVKRETLIGLAAKLPPCVVAMEACCGAHHVGRVFAAHGHEIRLMSPEYVRPYVKAQKNDDRDAEAIAEAATRPTMRFVELKSQDQLDMQTLHRARDRLVGERTALINQTRAILLERGIVVAKGKRKLEEALAALIDERGGAGLSPRVVALIADARAQWAELNRRIAAFDAEFVGWSKENEAARRLTTIPGFGAMTASALIAAVGQAESFGRARDLSAWLGLVPRQFTTGGKPKLLGISKRGNKYLRKLLIHGARAAMPYVAERDTPLGRWAKALLARAHPNVAIVAFANKLARIAWAVLRRGEAFAAGRLLAAA

SEQ ID NO: 386610 - protein, 273 aa, unidentified
MSNYVGLDVSLKEVSICVMDGDGCVLASGSTPTDPSAIMAFIDKHTPQVVRIVHESGQLSTWLTRELLARGAPVICIDARMAHKALSARLNKSDRVDAEGLAHLARTGWYRAVHIKDESSDQLRILIGARERLLRIRKDIEGHIRGILKTYGIRLAPVMAARQRANFRKQLRIVAKDHPALELIAASFIVAHEAACKECAVIEKELVRRARGNELATRLMTVPGVGPIVALSFIATVDDASRLAKSTQVGAYLGLTPRRYQSGEVDYSCHFSP

SEQ ID NO: 386611 - protein, 343 aa, unidentified
MEVAIGIDTHKGSLAAASVDALGRVLDVREFTNDPTGHRSLVRWVKEQTQPRRIGIEGSLNYGASAARTLLASGEDVREVSPLLTHVERRRRSKGKSDPVDAVAIARVVTADETLPSARRAALLADLKLLVDYRDQLVRARTQVANRVHADLVIIRPGYEQVVPNLRARRHVIKARALISRDRSVQGELVRRRLGEILRLETEIAQSDRDIAAKLRETDTTLTQIPGVGPFIAAKILGEVGEISRIRSKASFASLSGTAPLVASSGQTHRHRLNRRGNRQLNWALHYIALVQSRTTPEAKAYLARQREAGKSHKEAMRCLKRHLSNVVYRHLLLDARRLEQAA

SEQ ID NO: 386612 - protein, 327 aa, unidentified
MKTISVGIDIAKLTFVAAVKMNASYHTKELPNNKEGFAELFDWLKQYSADNYNVCMEATGIYGNALATFSYNCGHTVYVENPAKIKHFISSQLTRNKTDMIDAKMIAHYGDLFKLKPWKPTAEKIQKLQALTNRLDVLVKLKTQEKCRLESAHEIAKDSILSLLEHLDNEIKSLKKQIKQYIDNDDKLKAKAELLRTIPALGAITIPKIIAFLGQVEDFKKPKQMAAFVGLNPQHAQSGTSLNKSSLCKTGKSELRKAFYMPALTAIKHNPILKEFYNKLLARGKPKKLAICAVMRKLVHIIHGVLNNNQPFNPEYKITFINKKNIN

SEQ ID NO: 386613 - protein, 335 aa, unidentified
MAKNLIQVHGVDERGKTVLKKQLKRDQVVAFFANMPACLVGMEACGSAHHWARKLQSLGHEVRLMAPQFVKPYVKTNKNDVADAEAICEAVARPNMRFVPIKTAEQQSVLSLHRARQAFVKARTAQGNQIRGLLNEYGIVIPQGIGHVTRRLAEIVEDGENELPGRFRRLLQRLADNLKEMDRQVGELEREIKTWHRESEASRKLEKIPGIGALTASALTASIGDASCFTSGRQMAAWLGLVPRQRSTGGKATLLGISKRGDTYLRMLLIHGARAVIRVCERKPDPDRWLKGLMGRRNKNVAAVALANKNARIAWALLRYDKEYASDYAPAFAAE

SEQ ID NO: 386614 - protein, 324 aa, unidentified
MVTPALGIDVSKDRLDVEIAACGKPRSKCFANSPDGWRQLMAWLNEQKIKRVHACMEATGRYSLGIALALWEAGHIVSIVNPAQIRDFARTKLGRNKTDALDAGHIREYAEIFKPQPWTPPSPAMRRLGELQAIRAGIVSSLTEWKNRCGSGLADDTALALVKATITHFAAQLAEVDKAIAGTIDHDRDLSAKRDLLLSISGVGEVLAGLVLSELPGTDILQSSAQAVAYVGLNPRSHRSGSSIDRPTRISKIGNATLRNALYMPAPSAMQHNPVVAALAKRLKAQGRLKGKQIAVAAMRKLLVLCFGVLKSGKLFDPALAMPN

SEQ ID NO: 386615 - protein, 410 aa, unidentified
MERVIERCCGLDVHKKTVVACVRVPGRTGAREQQVRTFGTTTAELLALRDWLGGYGVTHVAMESTGVYWKPIFYVLEDAFTCVLANAAQIALVPGRKTDVKDCAWIAQLLEHGLVRGSFVPPVPIRELRDLTRYRAALIGEHTRETNRLQKVLEDAGIKLASVASDVLGVSGRAMLDALTQGTRDPDVLADLARGALRRKLPALRQALAGRFRPHHAFLVSQVLAHLDYLDEVIETLSTHLDEVMAPFAAEVSRLDTIPGVNKRTAEVLIAEIGVDMGVFPTAGHLARWAGLCPGNNESAGKHRSGKTRKGNRWLRGALIQAALAGGTRSTKGAFAARYRRVMRHRGHKKAVVAVAHAMLVAAYYLLERNTTYQEPGADYYERRHAERVRHRAVQLLERQGYRVILEPAA

SEQ ID NO: 386616 - protein, 308 aa, unidentified
MKIHPGFVGIDISQRYLDVFDGGVGAARRLDNLPEAIDLLIAGWNGDVFVLFEATGHYDKVLRRALSAAGIAFARVNPARARDFARAAGFLAKTDALDAQMLAAMAQCLRPDADGAINPVRERLALLHKRRDQLVACRKQERTRLAGTGADLADSIATHIAWLDDAVRDMDRQIDALIAEQEGLQNARRLMRSVPGIGPVNATTLLALMPELGFRSPKAIAALAGLAPLNTDSGQSRGARQIHGGRRRVREALYMAAVAVTRTRSRFARVYRAMREAGKPAKLALIAVARKLLVTLNAVIRDQQPFHP

SEQ ID NO: 386617 - protein, 319 aa, unidentified
MTPTPVFVGLDVAKATLDVALRPSGEQWQVPNDEAGVAVLVDRLRPLGPALVVCEATGGFERAAIAMLAAAGLPVVVANPRQIRDFARATGQLAKTDQIDAAILALFAERVRPAPRALPTDAAQLLDALLTRRRQLLEMLVAEKNRLGFAPRPLHKGIQQHIRWLERQLDDVTKDLADQIERSPVWRAKDDLLQSVPGVGAIVSAVLLAELPELGTLSHKQIATLAGVAPLARDSGTLRGKRMVWGGRAGVRTALYLAALCGRRWNPQLRRFYERLLAAGKPKKVALIACARKLLTILNAMLRDTTPWKAPELAVQHSC

SEQ ID NO: 386618 - protein, 385 aa, unidentified
MTCDTAPLISSPVQPQETTICVALELSRSTWLVGINLPGSEKISKHTVAGGDGAALLALLAKIKDKAEHQLGRALRLVVIQEAGRDGFWIHRLLEAAGIQSQVVDPASIAVSRRHRRAKTDALDLDLLMRTLLAWLRGERRVCAMVRAPSVEAEDARRGSRERERLVKERTQHVNRIKALLATQGVIDFQPTRHDARERLEQVKTGDGRALPARLKAELLREFDRLDRVARQLVDIERERDAALQASTGASEKASLLVRLKGIGPQGATVLLHEAFHRPFSNRRESAAYAGLVPSPWQSGGTDHEQGISKSGNARLRGTMTELAWLWLRHQPGSALSVWFHEHVGKAKGRRRRLAIVALARKLLVALWRSVEHGVVPEGADVKAA

SEQ ID NO: 386619 - protein, 358 aa, unidentified
MKAIKQTIGVDVAQDELVCSFGLLFEDLSWQIKARKTFGNHPSGFKACLKWAESMRDSGSEVLFVMEATGVYHEKFAHWLVDQGQKLSIVLPNKISNYMRTLAIKTVTDSTCADAITQFGLERKLDLWAPPKPIFRTLRQLTRERDQIVAERVTVDNQIHAEKTEAFPNENSLKRLNERRKLLCKQEQEIKNEIHHLVKSDQELDQDVKRITSIPGVGELTAVIVLAETNGFELVRNKRQLSSYAGLDVREKQSGTSVKGKPRISKKGNRSLRKAMHLPALAAIRHCDIYKGTFARLVGRHGIKMKAAVAVQRKLLELIYILFKNKTTFDPAYEEKREDGKNHASLHSLADADLSNEI

SEQ ID NO: 386620 - protein, 394 aa, unidentified
MKLIGIDIGKNKHFFCVMDQQTGEIISQPVSFSNDKEGFDFLVQKIKSYPKDSILIGMEDTGHYHFALLKYLLDLQYTVALINPKTTDFNRKMQGGITKNDKLDTINICDVLDTPERKKQYRITKVNSFDLYEQKQLTRHHHNLKEEENVYKNRIQKCIDIVFPEFNKLFNSKYGIVYMNILKMFGSAENIANTDIRTIRKCFEIEGRGNRTSLTPERLKECARSSIGISSSAEVIQIKHLTAQIEPIEEQLTEIDKKIEEFSIQNNSPILSIPGISHFSGTSILAELGDISNYSKPSQIIKFAGVAPLHYESSQFNAQHTAIIKKGSKYLRKTLYQIILPVIKFNPVFNEYYQLKISQGKGHRCAQGHCVRKLLRIIYHLLKTNQQFDPQLLR

SEQ ID NO: 386621 - protein, 384 aa, unidentified
MQASNVSTPTGGHIGTIFLAIELSQRNWLVTMHSPARGKISRFKLGGGDYAGLLALIERMRAGAARVLGTEPGVVSCYEAGYDGFWLHRRLTAAGVTNLVFDPASIAVEQRARRAKTDRIDGELLLRTLLAHCRGEPRVVRVVRVPSVEQEDARRATRERDRLIKEQTAHTNRIKALLRLVGMGAGNPRRRDWIVWLEAQRDDEGKPVPPHMVAELKREHARLMLVREQLQEVERALPQASPAAAEMGRRSALLQRLKSLGPVFAPVLTNEVFYKDFRNRREVAAYCGLAPSPWQSGTTDREQGISKAGNPRARQKAIELAWLWVKHQPGSALTQWFRRRTADAGGRIKRIAIVAVARKLMVALWRYLTSGLVPDGAVFKAAAA

SEQ ID NO: 386622 - protein, 427 aa, unidentified
MKYTQNAKIFQVTERTLIVGVDIASETHYARAFDQRGIELGSLIRFSNDAEGFRKMNLWVEEIKTRCNKHKIMVGMEPTGHYWFNIAPYLKDHKMKIVLVNPFHVKRSKELDDNNPTKNDSKDPKTIAMLVKDGRYMEPYIPEGIYSELRTAMETRWQIVKQLNAIRNRVKRWISIYFPEFNRVFCNWEGKAALIALKEFPTPAKALDKGVDGIIARWKQDKLRAVGRKRATELINAAKVSVGVNRGLIAAENDLAILLEDHEMKMRQYDQTMVMVEQLATQIPGVQEMLKIKGIGLVTAAGFIAEVGDISRFEHPKQIQKLAGLSLKENSSGKHKGKTTISKRGRRRLRALLFQGIMPVVANNPEFRGLHNYYTTRSENPLKKKQSLILLSCKLIRVFFALLTKGTAYDPNKMLNDIRRPLLKEAA

SEQ ID NO: 386623 - protein, 348 aa, unidentified
MEHYVGLDVSLKLTSICIVDRTGKVEREGVVASDPEAIATFIKLHAPHVVRIGLETGATSTWLWTELNKMGLPVICIDARHAKAALKMQINKSDRNDAVGIARIMQCGWYKEVCVKDLDSHATKALLVSRALLVKIKRDIENQIRGLLKNLGLVIGRAKMNMFAVRAAQLAKDRSELLAAVDPLLKAREAVEQQILDLDRKVLRLARNNAQVRRFMTAPGIGPVTALCFLATIDDPARFKRSRSVGAYAGLTTRRYASGEIDWTGRISKCGDKMLRSYLYEAANVLLTRVAKWSALKAWGSSLRNEAGCAKPRWPSLASLPSFCTECGSKVPNSNGHQRRLPISLHKG

SEQ ID NO: 386624 - protein, 370 aa, unidentified
MGNRSMFVGLDVHKETIDVSIAEGDRGGEVRHYGVIASDLEPLNKVVHALRAPDRRLHFVYEAGPCGFGIYRHLTTHGEDCVVVSPSMIPKRSGDRVKTDRRDSQMLARLHRAGELHAIYVPNDADEAMRDLVRAREDAVVVGTQAKYRLKAFLLRQGRRYPGREGWTLPYRHWLTDLSFPTAPQHITLQEYRDTIDETERRIARVTEQLRHLAPTWRWAPVVAALQALRGVSFVTAVALVAELGDLTRFGQPRELMAYLGLVPSEYSSGPSVRRGGITKAGNPHVRRLLAEAAWAYQGIPRIGRQHAYRQEALPKVVCDIAWKAQLRLTARFRRLVARGKAKPKVATAIARELTGFIWAIAQEVSPASP

SEQ ID NO: 386625 - protein, 356 aa, unidentified
MQSETLPELIVMGIDVHLRQHVVCRKTDAATVQPAQRMKPEELVAWVVKQKSHAKRIACCYEAGPFGYTLQRQLAAQGITCHVVRPQDWDRHGERVKTDSRDARELAEALARYEAGNKHALAVVRVPEVEQEQRRLITRQREGFVREVRRLGAMGRSHGMSQGHEVSGHWWRKGAWSALSKRLPQHLKDLLEPLSQVLVKLEELIAQRAAQIEARAAAATARPKGLGALTERIIENEVLDWTRFNNRRQVSSYTGLCPSEHSSGGKRRQGSINKHGNPRLRHALVESVWRFIRLQPGWKRLLKVVERLKGSDGKRPANKKKIAVALARELAVDLWRLNTGRSSLEALGLIAAETAR

SEQ ID NO: 386626 - protein, 387 aa, unidentified
MIYVGIDIAKETHVAATVDSDGVIVIEPFSFSNNHEGFKLLKSKLDSLDKSNLLIGLESTAHYAENVIFFLHGCGYELAVINPVQTAAMRKTGIRKTKTDKVDSLLICKTLMVNSFRRYTENDIKTLKLKSLCRFRQNLKKSKARLKIQLTSYVDVIFPKLQYFFKSDLHIKSCYELLKVYSSPDDIAALHLTKLSNILTKASRGRFGKQDAESLKSLAKSSVGVKNTYISIQITQTIAQIELIESQLNELETVIETAMDELDSVIMTVPGIGKLNGAMILGEIGDIKRFSDSSKLLAYAGLDPVINQSGKFNAKRTRMSKRGSKILRYALINAAWNVSLNNDTFKRYYDSKVAQGNSHYSALGHTAHKLVRVIFKLLNDNITFALV

SEQ ID NO: 386627 - protein, 359 aa, unidentified
MESMEGSRSCVVGGVDTHKDLHVAAVVDEQDRVLGTRCFATTRQGYRQMLAWMRSFGNVQRIGIESTGSYGAGLLRFMQDAGIEVLEVTTPDKHDRRRRGKNDDLDAQNAAHAAFAGKRTVTPRRRDGMVESLRVLTVCRKTAVAARRVALQLIQTTIVSAPDALRDTLRNMTRMQLVRTLAAWRPDLTAYREMEAAYRISLKSLARRYLELHDEIADLDAMIGAIVDDLAPQLIARNSIGHTGAAQLLLTAGDNPERLRSEASFAALCGVSPVPASSGKTIRHRLNRGGDRAANSALHIIAIGRLRTDPATKGYVARRIAEGHSKLDALRALKRYIAREVFSIIMRRQREINQTRVAA

SEQ ID NO: 386628 - protein, 340 aa, unidentified
MFPFYLGIDLHLKRTYVVLMDVKGEVIDERRLPNAEMRGYLEEHIPQETYALLEATRNWPFMYDMLSDHVERVELAHPKEVKAIANAAVKTDRIDASVLAHLARLNYLPTAYAAPKEVRDLRLYTRHRSWLIGHRTQAKNRLQAVLASYNLASPVSDLFGVKGRVFLEEVMEELRSAAQRVIMDNLTLIDRLDQQIKELEQEIPLTKEQAHSIKLLMSMPGVGKVTALTILAEIGHISRFNSSKALCNWAGLTPRVRKSDAIVRHGKISKQGSAYLRSAMGQASIVASRFSPRWYRVYERLAKRCGKRGARVAVARRLLTVIYYMLKRDQPYQEDYHRGA

SEQ ID NO: 386629 - protein, 317 aa, unidentified
MNTGDRYVGIDVAQAHLDISVRPSGEVWQVSYDTPGVANLLVQLAELAPTLVVLEATGGLETFLVGELAGAQLPVVVVNPRQVRDFAKAVGKLAKTDALDAQVLAHFGEATKPDLRPLPDDSTRELQALLARRSQVVEMVTAEKNRCRTATQRLQPQIQEHIRYMEKQLKELEQGLSELLSSSPVWRTKEKLLGSVPGVGPVLTVTLLAGLPELGRLDHREIASLVGVAPFNRDSGTLRGKRTVWGGRSSVRATLYMATLAATRYNSVMRAFYQRLLEAGKPKKVALTACMRKLLTILNAMLKHNRSWNSKLDLEIS

SEQ ID NO: 386630 - protein, 325 aa, unidentified
MDLHKNYLQAAVMDDQGRLLSQERIPNKDEYIEEFTRKTLKDSHAEIVIESSSTWYHVYELLSKNQNCHVVLSNPVKTKAIASAKVKTDKVDALTLANLLRTGYIPESYIPPRHIMDLREMVRYRTSLVRMRVEAKNKIHAILLQNGTKINEKPFTIRFVEELRKLGDYRIDGYLSVISSLSRQIRSVSTTIKKEAREDESTRLLLTIPGIHYYSALLILSEIGDINRFPDSHHLCSYAGLTPSTHSSGGVTYHGSITRSGSRYLRWILTECAKAHIRSQRDSQLTRFYTEVARRRGGSKATVAAASKLLRIVYWVLKEKRPYHS

SEQ ID NO: 386631 - protein, 341 aa, unidentified
MKPAMSVLGIDIAKRVFHAVGMDERGKIVLRKRLSRHDLMPFMTKLPPVLVGMEACGGAPYWARRFREHGHDIKLLAPQFVKPFVKSNKNDMRDAEAIAEAVTRPTMRFVPIKEIDQQDIQALHRVRERLISERTALINEVHGLMHEYGIVLPKGVAKFRQAVVEKLERDKDKLTALGQELFWKLLQEFVDLEQRIASYQEKLEGLATMHPECQRLMTIPGIGAITATALVAAVGDVGVFKNGRQFAAWLGLVPKQHSTGGQTRLLGISKRGDSYVRKLLIHGARATLRWVKRKTDDRSQWIQGLLARRGWNRTAVAVANKNARIVWALLRRGGVYGTNAS

SEQ ID NO: 386632 - protein, 338 aa, unidentified
MSAIKVIGIDLGKSTFHLVGHDYSGREQYRHKLSRSKLLQFISVHEPTLIAMEACCGAHWLARKCQEYGHQVKLIPPQYVKPYVKSHKNDFIDADAIAEAATRPRMRFVSPKTEQAQLGVVIRRIRTGYIRERTATMNRIGSILTEFGFSFPRGHANMKRLFQWLADTGQPVPSLLVFELRDQLSHYNDLNDKIKEQDKKLETLNRDNELFTILQTVPGIGPMTASCCLSSVSDPKDFSNGCNFAAWLGLVPFQYSTGGKPIMLGISKRGNKELRELFIHAARAVLWRDETAQRYFGSWLTDLKLRKPFNVALVALANKLARIAWSVMATKKPFEIRV

SEQ ID NO: 386633 - protein, 345 aa, unidentified
MTIVEEKPAITGGAGTHSEIHVAAALDPLGGLLGTGEFPATAAGYASLLGWLGKFGDVALVGVEGTGSYGAGLPRYFAKHGVRVVEVDRADRQDRHRNGKSDPLDAVSAARAAMSGRASGAPKGRDGAVEAVRTLMVAKRSARHERTQAVNQARALILTGPDELRDRFAGKRAAALAEAVAALRPRPGDAAGYSLRTALRELGRRVEFLDAQTGRLDDLIIPLVTARVPGLLRLYGVGPDTAALLLIAAGDHPERLRSEAAWAHVCAAAPVPASSGKTRRHRLNRGGNREANHALWRIVITRMSAHPGTWRSVQVTANCSLDFRSWRWPRECSTGAGLYRRGTAG

SEQ ID NO: 386634 - protein, 435 aa, unidentified
MSSKAYRATRVNEVNWEQIARGKEGLGVTAGVDVGKFDLWVVCRWADGRFERPWRVKNPWEIPTLVGVLKQVKADRKLVVALEPSGTYGEALRQALGDNGIEVQRVGTKASHDYAEVFDGVPSQHDGKDAAVIAELAAMGKAKPWAYQAADSWEEELAYWVEEMVAQRQMLTPWQGRLEGLLARHWPEASQVLKLSSGTLLRILKRYGTPQALAEDPDAATQLARWGRSLLSAAKIEELLTGARSSVGVRPGPWQQRQIQEYAERALAARQQANRAQRRLRQLAAGHPVLQAQGKVVGVPTACVLWVSTGDPRDFDSAGAYRKAMGLNLAERSSGTYQGRLRISKRGSARTRQWLYFAVLRLVQQCGVRPWYEAKKARHEGEARRALVAVMRKLAVALYHVGVRNQEFQPRRLFGRIGRRSARSARQSVSSKQRA

SEQ ID NO: 386635 - protein, 368 aa, unidentified
MKKANTAGSKRAPGPSLTIGLDLGDRSSRYCVLDQAGEIALEQEVETRREALQKRFGALAGSRIALEAGTHSGWVARLLEGLGHEVIVANPRHIPLLTMHSAKSDELDARTLARLARVDPQLLGPIQHRGESAQIQLLTVRSRAVLVEARTKLINAARGLTKALGYRLPAAKADAVTTGLLSGLPALIQKPLASLLEQAESLSEQIRKLDQQIEEIAATHYGQETTKLQQVKGVGPVIALTFVLTLERAERLSSSRAVGCYLGLRPKQRQSGQSNPQLRISKEGDHYLRSLLVQGAHCILGPHGEDCDLRRWGRRLCERGGKNARKRAVIAVARKLAVLLHRLWAGKEAYDPLYNAKRLQRATLGACA

SEQ ID NO: 386636 - protein, 345 aa, unidentified
MPIVGGLDIHRKQITFDYLDTETGQVQRGQISPADRLHLRAWLARFAGREDVAFAVEGCAGWRYVAEELAAAGIAAHLAEPADTAFARGRKRHAKTDRTDARHLRVLLAEGRLPECWIPPARILECRALLETYNDLRRERTAWAQRIHAVVFHQGAPALGEGALRTEKGVTALREVAAAHLSPAGQLQVATALEVIDALEARLHVVRHQLTDAARHLAGARALAARLYGVGPVTALAITCWLGGAGRFSSSRQAVRFAGLDITVSSSDRKGPPGKLSRQGPPVLRWAVYEAGKAHARTSAPDHRYYATVKDRKNSKRACLSEARKILRQAHHILAELGDDALAAA

SEQ ID NO: 386637 - protein, 354 aa, unidentified
MNKIKQLNFDGKVIYCGLDVHKTNWKINARMEGIEMAAFSQNPDPLLLKNYIDKNYPGAELKVVYEAGFCGFEIQRSLKSLGIECIVVNPADVPCSDKDRKRKDDKRDARKLSIELAKGNLKGIYIPDKQMQDARSLVRQRHRLVQDQTRCANRIKHLLLSNGITTGEKSERWSLRFIKKLQQLDCGSISLKSSLQFAIEQYLQTRRIVKEITLAIGDLSKQEPFKKVQAVLGSIDGIGLINGMVIQTEIGDIHRFKRLDSLCDYAGFVPDIYSTNDRMVIRGISKRGNEFLRETIIESSWVLIRKDPAMLMKYNEYRSRMSANKAIVRIAKHLLSRIRFLWKNEQTYVRGIIG

SEQ ID NO: 386638 - protein, 370 aa, unidentified
MDQNIKFFVGLDVHKDTISISVCEAGREASQFRGTIRHDVAALLKVLRKVGTPARQLVAYEAGPTGYGLHRRLIAEGFACQVVAPSLIPQRAGDRIKTDRRDSARLAELLRAGELKPIWVPDLEHEALRNLWRAREDALQMRMRARQHLKAFLLRQGRIYASKRSWSKTHERWLANQRFELATDQLAFTEYVLAVQASQAQLQRLDLALVQATERWRFAAVVSALRTLRGIDTVSAIGLVAEIGDIQRFAHPRHLMSYLGLVPSERSSGNSVRRGSITKTGNAHARRLLTEASWNYRYPARLSRVLQSRQEGQPESICRHAGKAQVRLCGRFAHLRRRGVHINKVCIATARELTGFIWAIARQASTTCAA

SEQ ID NO: 386639 - protein, 412 aa, unidentified
MEVLYPHCAGLDVHKDTVVACVRDMATGSVEREVRTFKTTTKDLLALSDWLAEHGCTHVAMEATGVYWKPVWHILSDGDFVLVLANAAHVKNVPGRKTDVNDATWLADLLAHGLIRGSFVPDEQTQEMRNLLRTRKQLVRECSRHIQRLQKTLEDANIKLDSVISDIMGLSGRAMIEALIAGESDPERLAQLAHRRIKAPPEALCEALRGRVTRHHRFLLRLHLKQIDAVNVAIDDIDQEVDAQIEPFRTAIQLLITIPGVSELSACVILAEIGHDMNRFPTAAHLISWAGLCPKNDESAGKRRSTRMRKGAPWLKTTLVQCARAAARKKASYFQAQYHRLRARRGDKKAIGAVAASILTTAYHMLKYGTLYEDLGPDYFDKRGKGKHVHRLINRLQNLGFAVQITPVEAAA

SEQ ID NO: 386640 - protein, 340 aa, unidentified
MSEITTIGLDLAKHVFQVHGIDAQGTTVVRKRLRRGQVLAFFSRIPRCVVGLEACATAHYWARELRALGHEVRLMPAQYVKAYIKRNKHDAADAEAICEAVGRPTMRFVPVKTAEQQATQLLHRGREQLVRQRTMLVNALRAHLAEFGLVAAQGLRNVGELIAIVRDDGDKRLPAVARQVLQVLAKQIEQIEAAIAALETQLLAWHKANAVSQRLARIPGIGPIIATAIATTVADPNVFRSGREFAAWLGLVPRQNSTGGKIRLGGITKRGNRYLRRLLINGASANLLRSRATKADPWVIGLRRRRPPLVVAVALANKTARIAWAVMLRQNEYQPRAVAA

SEQ ID NO: 386641 - protein, 391 aa, unidentified
MIYVGIDVAKDKHDYFITNSDGEVLFKSFTISNNREGFETLFQKVQSVSDDFAKVKVGLEATGHYSYNLLGFLLDKGLPTYVINPLHTNLYRKSLSLRKTKTDKVDAHTIASMIMSDVNLKSYSDTSYHNEELKSLTRYRFDKVKERAKLKSSVSRLVCILFPELEKLVPQLHMASVYALLSEFPSAHAVASIHITRLTHLLSESSHGRYGKDMAIIFREAARNSIGSNMPAKSLELKHTIKLIQELTSEIDEIEAEIKAIMDEINSQILSIPGISYNMGAMIVAEIGDFSRFDSADKILAYAGMSPSTYQSGQLDNCYSHMEKRGSRYLRYALYNATKYVCHWDNSFGAYLTKKRAEGKHYNVALSHATKKLVRTIYAMEKSGRVYLPTV

SEQ ID NO: 386642 - protein, 341 aa, unidentified
MQITTIGLDIAKNVFQVHGIDAAEKVVVRRQLRRGQVLKFFAGLPPCLIGMEACATAHYWARELTKLGHEVRLMPAKDVKAYVKRNKNDAADAEAICEAVRRPTMRFVGAKSAEQQGRLMQHRTRDLLMRQRTQVINALRAHLAELGIVAAQGREGLKQLLTIIADEKDARLPIDARGSLIVLAAQLQALQTMIGSVEKRLTMQHRANEASKRLESVPGIGTIGASAITATVTDPNAFRSGRDFAAWIGLVPRQDSTGGKQKLGPISKQGDRYLRRILVVGAHSVLRRARQNPEKYPWLTQLLARRPFKVVAIALANKMARVAWVLLARGGTYRVPALAAA

SEQ ID NO: 386643 - protein, 391 aa, unidentified
MVCVGIDVAKDKHDCCILDSEGTTLVDCFTIPNNMDGFKSLLQTIQDCSQKSDKIKVGLEATGHYSYNILGFLLDNDLPVYVMNPLHTNLYRKSLSLRKTKTDRVDAKTIATMLLSDVDLKSYTDTAYHNEELKSLTRYRFDKVQERAKLKQSVSRLVTILFPELEQLVSSIHGTSIYALLSEYPGAKQISEAHLTRLANILVKTSRGHYRKDKATHIRDAARISIGSVMPAKSLELKHAIKLIQELTSEINEIEDAIRKIMDELKPPILSIPGMGFHSAAMILAEVGDFSNFNSPDKVLAYAGCSPSTYQSGKLTNCYAHMEKRGSRYLRYALYTATKYVCYWNPVFTEYLTKKQAEGKHYNVALSHATKKLVRLIYALQKSGKAYLAVT

SEQ ID NO: 386644 - protein, 408 aa, unidentified
MGRATEIVAPSSSIRTDGGCPVLQVNDLSRSLAAFDPISTLVVVVEMSKMSWLVSGVVPGVERQPLKKLEPDATALLRLIERWRIEAVRAGQPIRRVALAYEAGRDGFWLARWLIARGIESHVIHSASVAVSRERKRAKTDRLDAVMLMRVFLGWLRGERGHCGMVAIPTMEEEDARRPSRERESLVNERSRIVNRMKSALARLGIRGFKPHLRRAPERLACLRTAEGTGLPANIIEELRRDMARLALVREQISSIEKTRAERLERAPDTGPHAMVRLLSKVIGIGIETADMLVREILSRKLRDRRAVARYAGLTGSPDESGLKSREKGLAKAGNARVRRGLIQLAWRFLMFQKDSALARWYRTRTEGPSGARKTTMIVALARKLLIALWRLVTTGEVPEGVELRPAA

SEQ ID NO: 386645 - protein, 406 aa, unidentified
MRVLYERCCGLDVHKQSITACALTPEGKEIRTFGTLTDDLEELVDWLKEKKVTHVAMESTGVYWKPVYNLLEAEPIEVLVVNAQHIKAVPGRKTDVKDAEWIADLLRHGLLKGSYIPHRAQRELRELVRYRRSLIEERARELNRIQKVLEGANIKLSSVVSDINGMSARLIIRALIEGKNDPAALAQLAKGRLKQKTEELRRALKGMIGPHQRMMLAEQWRHVEYLDEAIARLDREIEERTRPFHEALELIDTIPGVRRQSAEQIVAEIGTDMSRFPTAAHLASWAGMAPGNHESAGKRLSGRTRKGNKKLRSCLVECARAAARTKNTYLSAKYHRIAKRRGANRASVAVGRTILEMIYYILTRKEPYRELGADYWDRQREASIVRQTVKRLEGLGYEVKLEKTSA

SEQ ID NO: 386646 - protein, 391 aa, unidentified
MVCVGIDVAKDKHDCCILDSDGMVRADCFTIPNNMDGFKQLLQTIRNCTKKSDKIKVGLEATGHYSYNILGFLLDNDLAVYVMNPLHTNLYRKSLSLRKTKTDRVDARTIATMLLSDVDLKSYTDTAYHNEELKSLTRYRFDKVRERSKLKQSVSRLVTILFPELEKLVPSLHIASVYALLSEYPGAKQISEIHLTKLTNLLATASKGRYGKDKAIQIRDAARTSIGSVMPAKFLELKHTIKLIRELTSEIDEIEVSIQKIMDELNPPILSIPGVGIQSAAMILAEIGDFSNFESPDKILAYAGCSPSTYQSGKLTNCYAHMEKRGSRYLRYALYNATKYVCHWNPVFAEYLAKKRAEGKHYNVALSHATKKLVRLIYALQKSGKTYLTAA

SEQ ID NO: 386647 - protein, 414 aa, unidentified
MLKIVYRICCGMDVHKSFVVACIASTNENGVTTYKSKRFSTFTGDLRRCAAWLAENNCKDVCMESTGKYWIPIYNILEPTCNIVLAHPKYVKAIRGKKTDKRDAKWIADIFKHDLVAGSFIPPADIRQLRDLFRYRWKLTSFTTGEKNRAQNCLTVSNFKLDDVFSDVFGKAASAITAHILENPTEKITDVSGFRTKGMKATNEQVLAAVDGEMCEEQAEKLRIIRSHMDSLELCKLNLESLILATAEKYLPQLDLVMTVPGIQSFAAIGIISEIGVDMSVFPTSKHLCSWAGLTPQNNESAGKKKTTRISRAGAYIKPLLVQCALNAIRAKKFPEVRNRYLALKKRRGHKKAIIAIARMLLTAIYNMLKKNEPYNSELYRKSDRPPVHREVSVAEAIFILQRQGYLVAAPPTV

SEQ ID NO: 386648 - protein, 380 aa, unidentified
MRKNQKGSGFIPRNYDVFSGLDVDKESISATFSGHDGNMKAIRIPYDVRNLLNFVSNHYSGQKVAFAYEAGPTGFRLYDELTQYGYFCLVTAASNIPTAPGQRVKTNRLDSKKISENLRGGQLKGIHVPTQPYRHLRHLTQLRDTFVKEMKATKCRIKSLLLYEGIPFPEASPSSKWSSEVIDQLENIKCSEPVRFKLGRLLVSLKFFHSNIIETTRSIRAFCHTNDELKRNIEYLKSIPGIGWVTASQLLARIGDWRQLQRVDQLGSFLGLVPTENSTGDDVNRGSITRSGDNRLRNKLIQCAWVCIRKDPELLEFFYRIYKRHHDQYAARKAIVAVARKLTTRIFAVLSQQRNYEVRQTAKPVPLTRKKTILLQEETR

SEQ ID NO: 386649 - protein, 396 aa, unidentified
MTVPDRVVAGIDPHADTIHVAVITTTGKLVTDSEFPTTPDGYRRAVTFVTAAGDLERVGVEGAAGYGAGVSRALRTAGVEVVDVARPSRADRRRAGKSDQIDAYHAARSVLAGRLSPVKDPSIDGMRALHLARRSAVKARTATMNQIVSILVMAPDPVREKFRNLKGERLVTAVIRARNPLEPADHNTVTALKVLAERHRHLTGQIDQLITRIDPLVTAAHPALRAAYGVGPDTAAQLLITAGNNPDRLTSEASFAALCGVAPVPASSGKTSRHRLSRGGDRAANNALYRIALVRMSNHTPTKAYVARQTSRGRSKLEIIRMLKRAIAREIYRLLTQPVTVPDYSDLRPARQAKNITLTAAANQFGLWPTTISRLERGQQRDDTLAQHYRDWLLTA

SEQ ID NO: 386650 - protein, 381 aa, unidentified
MTTAVAHKTNVHTTEATLFVAFELSEKTWKLGFTMGHGQKPRERNVTARHQERVLDEISLAKHRLGLPETAPVVSCYEAGREGFWLHRFLLAHGITNHVVDSSAIEVSRRQRRAKSDGLDVRKLLSMLIRYEQGEHQVWQVVKVPSVEAEDQRHLHRDLETLKRERASTTTRIQGLLSSQGIQVSTLAKLPEQLDTLRLWDGTPIPPGLRRRVLRVYAHHTFLNEQIAAIEAERRAQLQTSREASIDHIRQLMMLKGIGINGSWLLVMEFFGWRAFKNRREVGGLAGLTPTPYQSGESAREQGITKSGNPHVRWMITELAWSWVRFQPESALSVWFRERFGDGGKRLRRIGIVAVSRKLLIALWRFLETGVLPEGAVLKEG

SEQ ID NO: 386651 - protein, 359 aa, unidentified
MSKYITIGMDLGNKKHTVCALGQDGKVLWRRDVENSPEALTPFFKENAGATVAMETGLCCRWISALAKSCGCDVLVGNARKLAAIWKSKQKNDEKDALLIAELARTSTLLFHPVELRDDERHEMVQIIELRAVAVSQRTQTVNSVRGLCKAHGVFIKKCDASCFHKVAGEAIPAGMAWKFKPMLRHLKEIVTTVKRYDAMLEKYARAHFKEEVDLLQTIPSVGLVTSCAFVAHISNPRRFGSARDAGAYFGLTPGQDQSGDRDAPKRITKTGSTLMRHLLVTAANYILRESSPDTALKRHGERICARGGKVARRKAKTAVARKLAVTMLAMLKSGKPYDDGLAAKRGATEAPAVAELVA

SEQ ID NO: 386652 - protein, 402 aa, unidentified
MNAVGIDVSKGKSMVAIMRPFGEIVSAPFEIKHTASDINSLVELINSVEGESRIVMEHTGRYYEVLAHQFSEANLFVSAINPKLIKDFDNDSLRKVKSDKADAVKIARYALDKWQNLKQYSVMDELRNQLKTMNRQFSFYMKHKTAMKNNLIGILDQTYPGVNTYFDSPARSDGSQKWVDFASTYWHVDCVRKMSLNAFIDHYQNWCKRKKYNFSQSKAEEIYGKAKELVPVLPKDNITKLIIKQAVNQLNIASATVESLRTLMNETASQLPEYPVVMAMKGVGTSLGPQLMAEIGDVSRFTHKGAITAFAGVDPGVNESGSYEQKNVPTSKRGSSNLRKTLFQVMDALIKTHPQDDPVYQFIDKKRAQGKPYYVYMTAGANKFLRIYYGRVKEYLSSLPES

SEQ ID NO: 386653 - protein, 310 aa, unidentified
MSKCVGVDVAKSHLDWVLGVEGNASRVPNTPAGVRRLVARLAKASVDRIVVESTGGYERALTEALSAAGLPIVLVNPWRVRRFGEGLGVLAKTDPLDARVLALFGERARPPRRPLPGPRQREMADLVRRRRQLIAMIVAEKSRLDTASSVIRRDIQSLVQILERRVSKLDDRIDRAIAEDPGPAETWRRVQTAPSVGPGVARALVIDLPELGALGRREITSLVGLAPFAKDSGKKSGYRRIRAGRAAPRTALYLAAMNGARFNPVLKAMYERMIAAGKPPKVALIALARKLLTILNAMVRDRTDWQQAKT

SEQ ID NO: 386654 - protein, 350 aa, unidentified
MLYTGVDHHRSFSYLTTMNEKGEIIAQKKLPSNGEIIDFLKSFGESMEIAIEATPSWYWLYDHLEDAGFEVKLSHPLKTKAIAYAKVETDKVDSATLAHLLRSNLLPLSYVPEKSVRSNRELLRYRASLVTLQTRVKNKIHNILAKNNISQEYSDLFGKEGMTFLHSLALPENYKIALEGYTTVLDAVRQEIRVASQKVRQLAVQDHDALLLMSIPGMGYYSALLTASEVGDVRRFPSAKQLCAYAGLVPSTHASGNTCFHGHITKQGSRWLRWILIEAAIHAVKRPGVLRRFYFKVESKKGGQIAKVATARKLLEWIYHILKDGRSYQEMERIADLLGRGEPGNHSGSA

SEQ ID NO: 386655 - protein, 398 aa, unidentified
MKTCGLDVHKDSIFCAVYDGKEYSEVKEYDTTTPKIRQMGEYLRESGVEKVAMESTSTYWVPVWDILLEMGFELMLVNPFLIKQMPGRKSDVKDAQWIACLLYKGMLRGSMIPCAEIQQLRIYSRKYTKLQEQKTCSLQKMDRLMVMCGIRIGSCMSSLATKSVMNIVKALIKGEKRPEELCKLVYGNTANKQSGRLQEALTGNLKEHHRQQLEWEKQEYDLYEKQTEQCLKQMQRICEEHYREEIKLVKSIPGVSDISAMVIIAETGGDMSVFENSGKITGWAGLRPRNDESAGKYKSTAITKGNRYLRSGLVQVSWAASRIKEGWFREKFNRLVIRKSRKKALIAIARKILTVIWNVLYYKTPYNPQLVHIYDPVKVEAKMNYHQREMERMQKMLK

SEQ ID NO: 386656 - protein, 355 aa, unidentified
MLLGRDSQSHPRRCFMKLYTGIDLHSSSSFVGIVDETGKRAYKKKVPNDSGVILDTLAPFKNDIVGIVVESTYNWYWLVDLLMAEGYALHLANPTAIQKYSGLKYSDDQHDAFWLAEMLRLGILPEGYIYPKEDRPIRDLLRKRSHLVKLRTSLVVSLQNIINRNNGFKLQGNKIKTLTIDHAAPLLEANEDLALAGKVSKDSIDFLTRQIRAIEANVEGKVELREPYARLLTIFGVGKILGLTIMLETGPIGRFDKVGNYVSYCRKVSSKWISNDKGKGKGNKKNGNKYLAWAFSEAAELARRFHPEARAYYTRKMKKTNFMIAHAALAHKLARAAYYVMRDQISFMPEKLFAS

SEQ ID NO: 386657 - protein, 433 aa, unidentified
MRIIGLDIHRAFAEAVAWEDGRLRRLGRVDMRRDLLAAFAAKLSPNDVGVIEATGNATSATAVVAPHVKKLGIGNPKQVRIIAYAKIKTTIEADVLAQLYASGFLPEVWIADEPTQALRRQVTRRNQIVRQRSRLKTVIQSILHSHLIPSCPHADLCGAKGRTWLIEQVVPQDERLAIDRHLREFDRLGEDLQVIERDLARSALEDEGVKRLMTIPGVDITVALAMKAAIGDVSRFDDPQKLMTYLGLNPSVRQSGQVRPTMGGSPSRAVVMRAACSSRRPGRPLVLPDRCEPSPCGVRARRGQHVAAVATARKLSVVIWHLLMKGESFAWARPSLHAKKLARCGTQGREQGCARPKGSGARLQHKEPPGRRAPLGGAGRGRLCTPRRRLEPTRSEEGRHGCRKRGATIEAARQGSHLGPCSSPRGRPCATGE

SEQ ID NO: 386658 - protein, 337 aa, unidentified
MTLYCGIDLHSNNSVVAVLDEQDRTVYEKRLPNDLDTITEVLCIYQSELAACVVESTYNWYWLVDGLMTAEFPVRLAHTSALPEYSGLKYSNDYSDARHLAHLLRLGLLPTGYIYPKEERGLRDLLRRRLLLVRQRSLHHVSLQSLIARHSGQRLNTLQIKQLTKGQLADYLQGHALLGGEITHQARCWLEAAVKKIERELQRHIKSREDYQLLQSMPGVGSVLGTTIALETGTIERFASPGNYASYARCVKSEKTSNNKYKGQGNKKNGNKYLAWAFMEAAHYGAIWDPRIKRFYQRKKAKAHILVAKKAVANKMARACYHMLKRGEEFDVTRAFS

SEQ ID NO: 386659 - protein, 342 aa, unidentified
MYYIGLDVHKKTISFCVKDASGQVHREGVVRATRNELDCWVRTLPQPRIMAMEATIFTGWIYDHLLPHADQVKVAHPLMLRAIAAAKKKNDRIDAGKIADCLRCDFLPECHMASTEIRDRRRSLRYRHLLVRQMVQMKNRISGLLMETGVSHNKQRLHKVGYFRELISKNEEVPESIRPLLRLSRETIDRCRKTEYALVSSLERDPLLAERIQRLRTVPGVGPITALTWALEIGDVSRFRSIKQAISYCGLCGEEKSSADKVLRTPLSKQRNKHIQHVLVEAAKLAPRQNHELALIHEKEKQKGNGNRATLAVARKMVAYLLAVDRRKRDFVPAEGRSTAAA

SEQ ID NO: 386660 - protein, 319 aa, unidentified
MHCIGVDVSKQELVTFDGSKERIFPNTRGLAEFDRFLARSKDALVVFEPTSTYSRRLEALCRTHRISCCQLNPRVVPHLRLVGKGRSKTDSTDAELLYRYGIERGHSEAAPLENDALAESIQARLACYRVAQKARIAYHNVLEALSQDPAASQDLLRDLGTEIAELKRKEKQQLDAAQQLVEGDEEASQRLSVLLSIPGVGPITALTLLALFRKYPDANRSQIVALAGFDPIRIQSGTSVHGKSRISKRGNREVRKRLFEATLSAARYNPSIQSIYRRLKEAGKPEKVARIAAARKLLLIAHAIYKNGVLFRDPTEKEG

SEQ ID NO: 386661 - protein, 312 aa, unidentified
MDHLFVGLDVAKAQLDVHVRPTGETFTIPHDETGLTALLDRLRTLAPTLITLEATGGYEATVAAILASAGLPVAVVNPRQIRDFARATGLLAKTDTLDARVIAHFAEAVRPAVRLLPTEQAQRLGELVARRRQLVEMLGAEVNRRRLTRDRGLQRRIDTHIAWLERALRDLETDLHDTIRSSPAWRETENLLTSVPGVGPITALTLIAELPELGRLDRRRIAALVGLAPFNRDSGTLRGRRMIRGGRGSVRRVLYMATLTAIRHNPRIRTFYQRLRTTGHPGKVAVIAIAAMRKLLTMLNAMLRDHRPWLPA

SEQ ID NO: 386662 - protein, 343 aa, unidentified
MAKTPIAVLGIDLGKNSCSLAGLDAAGAVIMRRRMTREGTIKFVATLPACVVAMEACCGAHFLGRTFACQGHTVRLMSPEYVAPYVKAQKTDNRDAEAIAEAATRPTMRLVTLKSEAQLDLQVLHRARERLVAGRTRLTNQLRAMLLERGVILPKRRAPLIKRLDELMAGELPISQRARQLLLDLRDEWMDQDRRIKAYDDELMGLTREDGAARRLATIPGIGVINATALLAAVGDASAFAKGRDLAAWLGLTPRQHSTGGKTKLLGISKRGNKYLRTQLIHGARAAMAHFANKATPVGTWVRQLLTRAHPNVVVVALAAKLARIAWAVLRHGSNYDHRAATV

SEQ ID NO: 386663 - protein, 431 aa, unidentified
MLKINPLSTLYVGIDVSSKSNYVCALDFYKNKYINSSFANNQPGAEELALKILECLKEHPDITTIVAALESTSVYSIHIANYLSSCEELMRFKPYVFVLNPKCTANYKKSYIGLGKSDPIDAFVIADYARAGNIESEPWRGSPFLALKRLTRHRLHLVECMTREKTYLVSNLYLKFSELQMLEGDDQPFCDIYGATSSSVLMEYFSPEEILDSSEEDLIAFLAKKSRNRIKDISKTADLLKKAARDSYRLDKALYEPLNVSIASSFNCIETFKREIKVIDNAIEKEIKGLNPNAFIILQSIDGIGPVFAGGIIAEIGDITAFHSSDALAKYAGLTWKSNQSGAFDGEDTPMIKAGNRYLRYYLGEAANSMRKHNVEYGTYYRKKYNEVPKHQHKRALALTSRKFVRLVYGLLARNQLYSGVSLDTSIKDSN

SEQ ID NO: 386664 - protein, 371 aa, unidentified
MNNVTGIRKYVGLDVHKATVSIAVADAQAGEVRDVSTVANDLHAIRTVLRKLGGPGALRVVYEAGPTGYGLYRWLVAEGYAAQVIAPSLIPRKAGDRVKTDRRDARLLARLARAGELTPIQIPDVADEAVRDLSRAREDLVEARTSARQRLQALLLRHGMVFSGKTRWTKAHDRWLSTLAFASPAQQTAFTEYWEAVKRADAAIERLTQALRDAVQAWQWQAVVTALMAMRGFDLVAAVTVVAELGDVRRFTHPRELMAYLGLVPSEHSSGATRRKGGITKTGNGHVRRIMIEASWCYRFPARIGKGLNERQQGQADAICDLSWKAQHRLCRRFSALRARGLHQNQVCVAVARELAGFIWAMARIAQPAAT

SEQ ID NO: 386665 - protein, 411 aa, unidentified
MEVIHARCAGLDISKKDAKVCVRVAGAGRRKTVETVTTWGSMTSQILALRDHLIAERITCAVMEATSDYWKPFYYLLEDAGFDVLLVNARHVKNLPGRKTDVADATWLAQLGAHGLVRASFVPPEPIRHLRDLTRARTAITRERSREVQRLEKLLEDAGIKLSAVASDILGVSGRAMLESLIGGNRDPAALADLAKRRLRSKIPALTEALTGRFTEHHAFLARVHLDLVDQHTAAINHITTRIEATIKPFHWFRDLICTIPGISILTADVIIAETGADMTRFPTAAHLASWAGTTPGHNESAGKVKSSQTRPGNPYLQGALGAAAMSCAQNPGTYLGARYRRIASRRGPQKANVAIQHSMLIAIWHMGTNGCIYDDPGADYFNRLHPERAKKRAISQLEAMGYNVTLTHAS

SEQ ID NO: 386666 - protein, 391 aa, unidentified
MRIVGFDVSRSVAEIAYLEDGTLHAGGRTGLRRDELERFAEKLRATDHVVLEATGNTAAIVNVIRRHVARVAIANPLQVRLIAEARVKTDKIDAAVLAQLYASGFLPEVWMPDERTLALRRQISRRSQLVRQRTRLKNEIHAVLAAHLIERCPATDLFGKKGRAWLGVQPLPLDERLGVEQRLRELDRLGEDLREVEQELAQATIDDARLRVMLTITGVNITVAIGLLSAIGDIERFPNPEKLVSYFGLNPSVYQSGPTPARHGHITKRGRSYARAILVEAAWGATQAPGPLRAFFLRVRDRRGQQFAVVATARKLAVIGWYVLTRGEPFAWDRPALTAHKLRALELQAGMPAQHGSHKGSAAAYSLKSVRQQERVVAEQSERAYQRLFNR

SEQ ID NO: 386667 - protein, 409 aa, unidentified
MMNAVGIDVSKGKSTVTIRQPGDIVVLPPCNIQHTQSEITELINFIKELDGETKVCMEHTGRYYEPMASWLSKAGIFVSAVNPMLIKNYGDESLRAPKTDKADSGKIARYALDRWNKLPQYGYMDEMRNQLKTMNRQFTFYTEQRTAMSNNLIALLDATFPGANTFFDSTKNYRDGHQKWVDFVYTYWHVDCVRRKSRKAFTEHYQKWCKHKDYLFSPKKANEIYDKASDLIAVFPKDENTKMIIREAVNTLNNISATVENLRFEMNSLASQMPEYPIVMAMNGVGASLGPQLIAEIGDVTRFTKRGALTAFAGVDPGKNESGKYSQKSVPVSKKGSPHLRRTLFLIMDNLLLRSPADDPVYAFMANKRSQGKPYFVYTTAGANKFLRIYYGRVNEYLSKLEEQRQKES

SEQ ID NO: 386668 - protein, 408 aa, unidentified
MERIVQRAAGLDVHKDVIAAEVHLPGGVVDQGTFATTTPGLLVLRDWLTGHGVTRVGMESTGVYWKAPYYMLEDAMQVWLLNARHMRNIPGRKTDAADASWICQLIEFGLVRPSFVPPAPIRELRNLTRYRKAQIEERTREAQRLDKILQDAGVKLSSVASDILGKSGRAMLAALVAGTTDTGVLADLAIGRLRVKIPALREALTSRFSGHHAVLVSSVLAKLDFLDELITSLTVEIEQVICPFSHQVDLVDTIPGIDQRTAQGLLAEIGVDMTVFGTAARLASWAGVCPGNHESAGKSRSGKTRNGPKWLGIYLHNAAMAAIRAKNTYLAAQYARLRPRLGHSKALVAVEHSILVAIFYMLERDQPYHDLGVDYFIRREDPQRRARKLIRQLEAIGYTVHAEPPAAA

SEQ ID NO: 386669 - protein, 289 aa, unidentified
MKITRVGVDLAKKVFQVHGVDVAGRQVWKRQLKRCSWLSVLTEAVEPGCEIGMEACGGAHHWARELKSRGFEVKLISPQFVKPYLKSLKNDVNDAEAICEAMTRHHMRFVAVKTVEQQDVQAMHRVREGLMNYRKAKANQIRGLVAEYGLVAPRQMGPLRKAIPCWFEDAENGLRSAFRILLHGLWEDLQSVDLRLKVLDKEIFALSETHADAKRLKQLRGIGPLTATAMVAQFGDGRHFKRGRQASASVGITPQTYRHRGQELSIRHHQEGESLLTQHPDPWRQISGE

SEQ ID NO: 386670 - protein, 354 aa, unidentified
MSNDRFAAFDVHAATTTYVVLDDKGKLVMQGVVETKGDVLLSVVRGISGRVSLTFEEGTHAAWLYELLGPHVAKLLVCNPRKNRRCQENKNDRVDAIQLAKWLRSGDLSPVYHRDHGIRALKELVRGYEHAVDDSTRSKNRLKAIYRSRGLLTPGRKVYRPEERDDWLSKVDSVGLRTRAEWLHEQVESLDGLVKVAGAAVECEARRHGGCRLLRSVPGIGWIRAATIVAHVMHPGRFRTKRQFWSYCGFAVVTYSSDDWEIVESRLVRKSRPSTTRGLNKKYNRHLKGVFKGAARTSCSARGVFRPHFDHLVASGMRESMARLTVARKIAATSLVIWKKGEKFDVGKAVINTA

SEQ ID NO: 386671 - protein, 411 aa, unidentified
MNAVGIDVSKGRSTVAILRPMGEVVQTPIDVMHNAVSLERLAYQILTLGEDTRVVMEATGRYHEPIARELHAHGIFVSVINPIAIHGYCTSGTVRKVKNDQKAALKIARFALDRWTELREYTPMDALRQQLKIFSRQYNLYMKSCVALQSNLISLTDKVFPGVNELFKSPQRADGHEKWVDFVTTFWHCECISTVSENAFTERYQKWCRRMRYNFSLTKAADIYTESLGHIVTLPKNNNTKLLIQTAAKELTAMNELIAVVRGEMTRLARELPEYETVRAMYGVGDTTAAQLIAEIGDIRNFPRRSSLVGFAGVDPAINDSGKSVGNSMAATKRGSPHLRKTLFQIMTIYLRLAPQDEPVYQFLDKKRSEGKPYYVYMTAGANKFLRIYYARVKECMANLDASAEDSETAE

SEQ ID NO: 386672 - protein, 442 aa, unidentified
MAKSEVSQQAQEPEFAAFVGIDWADQKHAWCLQAVGSTQRESGELEHKVETVEAWVTQLCQRFGGDRPIAVALEQTKGALLYMLAKYECLHLFPVPSTMAASMRKALYPSGAKDDPTDSDLLLDLLLLHRDKLHRLTPDTEATRRVQNLVEERRKLVDEKTAQLNRLTSNLKIYFPQMLEWFEALDTELVCDLLEHWPTLEELQKVSSEDLRRFFHQHHCRNRELMERRLQGIGQARPAIQDRPVIEAKRVVVRVTVQLIRSLRAGIAELDGKIAEATATHPDFFLFASLPGAGEVMAPRLLAAFGSQRDRYSSADEMQIYSGIAPVLERSGKTKWVHFRRACPKFLRQSFHEWAGHSMVKSAWAQAYYRQRRKQGQGHHAAVRALAFKWIRILFRCWKDRVAYDEKKYLAALAKRGSPLRELLVASAVRPCEIPSEIVVNP

SEQ ID NO: 386673 - protein, 387 aa, unidentified
MTARTVSNPPATSHDEAVRCLFAIELSKDSWIVAYSTPLSDKISRYTLKPCDWMGLLELIERVRSRVVHELQRPVEVISCYEAGYDGFWLHRLLQAHGVHSHVIDPASLQVNRRARRAKTDRIDAEQLLRSLMAYLRGEPKVWSVVRVPSVAEEDARRLHRERDRLITERVSHVNRIKGLCAIHGIYDYNPLRSDRLQQLDHLRTVQGQPLPQALKAELWRELLRLELLLKMIAGVEKERDAIVTDNGSAHHNASKIKELCRLRAIGPEFASVLVGEVFYRSFNNRRQVGSYIGMPPSPFSSGNTVREQGISKAGNPKARKTMIELAWLWLRYQPDSALSIWFCQRVGTTKGRIRRIMIVAMARKLAVALWRYLETGMIPQGAVLKG

SEQ ID NO: 386674 - protein, 412 aa, unidentified
MQVVYERCAGLDVHKRTVVLCDITSDAQSQRCKERRTFSTMTPDLLRMRDWLKELGISHVAMESTGSFWKPIFNILEGHLEVLVVNAQHLKAVPGRKTDLKDAEWIADLLQHGLLRPSFVPPVAQLEVRELTRYRISLVEERSRTINRLQKTLEDTNIKLASVASDVMGKSARDMLTALLAGEVDPSILAELARGRMRSKRDLLSQALQGQLKPHHRFLLSEQLADIDALDEAIERMSTQIAERLRPYEQQIQRLMTIPGIKRRLAEVILAEIGPDMSRFPSARHLASWAGMCPGNHESAGKRFSGKTRKGSPWLRSALVEAAHAAIHAKDSCLSAQYQRLAVRRGGKKATIAVGHTLLVIIYHLLSQDKDYEELGGHYFDDWDRQAVQKRLVRRLEKLGYEVKLEPVSPTA

SEQ ID NO: 386675 - protein, 407 aa, unidentified
MAGLDVDRDNVVACVRRLGPRGGVLFEKDRFTTTTAGLRELEAWLADRRVELVAMEATGVYWKPVLYALESRFAVWLCNARNVRRVPGRKTDLSDAEWLADVAAHGMIRPSFVPPPPIRELRELTRYRRTQIDARAAEIQRLEKVLQDAGIKLTSVASRVLTQSGRAMIEALIAGEHDGTRLAELAKGKLRPKIPALTEALTGHFGSHHAVACRRILGHLDFLNESVAALTEQVDARTAAFAPLYALLLPLPGLERLTIDVIIAETGADMSRFPTAGDLASWVGLCPGSHESAGKHRRVGTSNGNPWLRRALIESARAAARTKGSYFGAQYRQIARRRGPNKAAVAVAHSLIELVWHLLSTGELFKDLGDDYYTRRQDPQRRARRLVAQLEELGFKVTLEAAAALPA

SEQ ID NO: 386676 - protein, 466 aa, unidentified
MARSKPKASRPAPPAPALPPQLAAANLHAAGIDVGAEAHFVAVPPSDDPQPVRGFGAFTADLEAIAAWLVACAITTVALESTGVYWIPLFELLEARGFEVLLVDPQQVQKIKGRPKSDVHDCQWIQRLHTFGLLASAFRPADQVCVLRSYLRQRAMLLTYAAHHIQHMQKALTQMNIKLQHVVSDITGVTGLAIIRAILVGERDPAKLAQLRDYRCKHDEATIARALQGTWRDEHVFALAQAVALYDVYHQKITECDRHIEAYLQTFADRREGQPLPPAPRPRKRGRNQPGFAVREPLHRITGVDLTQIEGLDETTSLVILSEIGLDMHRWPTVKHFTSWLGLCPHHRVSGGKVLSRRTKPCANRAATALRLAAACLHHSQSALGAFFRRMKARLGAPKAITATAHKLARLVYSMLKHGMAYVRQGMDEYEQQYRDRTVKNLTRRAKTLGYTLVQTPEGTLKGALV

SEQ ID NO: 386677 - protein, 355 aa, unidentified
MKNTAIQYVGIDVHQATLVIDVREASGTKVMQSTVPTQRKAIEQVLRGLTGRIWVAFEEGTQAQWLNEVVSPLAERVVVCNVRDSRQGENKSDKIDAADLSEKLRLNALKPVFHNTADVATLKELVRIYESLVSDGTRSKLRLKAIFRGRAINTPGEAVYDAKTAGELLKQIKDKGRAFRANTLIEQIALLEELRERAYEAMVHEAKRHRAYKTLIKLPFFGPVRTAQLIAIVVTPFRFRTKRQFWTISGLSVVTRGSADQKFVEGRLVRSKRRPMTRGLNRNHNRTLKNVFASAAHDASCRSGPLKDFYEAMLVRGIAPQMATLTLARKIAAYTLRLWKKGETFDPAKLTISTS

SEQ ID NO: 386678 - protein, 344 aa, unidentified
MNITRVGVDIAKSVFHVHAVDRHGSLVWQAKLKRDQWLVVLTDRLTPGAEIGMEACASAHHWARELQKRGFPVKLIAAQFVKPYVKSNKNDLVDAEAICEAMSRPGMRFVSVKSVAQQDIQAAHRIREELVGQRTAKSNQIRGLVGEYGLVAPVGIRQLRRALPQWLEDAENGLTNDFRALLADLADDLRHLDDRIANLDERIEASVKKDPVARRLLELRGVGPLTASALAGALGDGKSFSKGRDFAASLGLTPRQHSTGGKDRLLGISKRGDSYLRKLLVHGARAVIRYAKDRDDGLSQWLKALSARKHANTVAVALANKTARVAWAVVHNDTPYDPALVSGY

SEQ ID NO: 386679 - protein, 347 aa, unidentified
MKIIGCDFHPSYQQIAMLDTETGELLEFRLEHEKGEARRFYERLQGPVRVGMEAVGNSQWFEQMLAALGHELWIGDAGEIRRLEVRRQKTDRRDAQHILDLLLDGRFPRLWVPSAEIRDVRQLLRHRQKLVEWRTQVKNQLQHLALNQGVQRKRKLWSKEGRAVLEQLPLQGWTARRRAELLGMLDRLEEQIKELDTAVRAEAERRPEVRLLMTHPGVGPVVGLAYALTIGPPGRFSRGKKVASYLGLIPRENSSGGRQRLGAISKQGNTMMRTLLVEAAQNAARFDEQLRRDHRRLAARKHKALAKVMVARKLAVRLYWMLREQRPYVPPSVARRQGGPSHSVVEG

SEQ ID NO: 386680 - protein, 392 aa, unidentified
MYIVGIDIGKNHHEASIVSPEGKQIGPSLRFATTHKGADSLMSFIFINIGNSPCVFGMEATGHYWYPIYSFLKAKGYTIYVINPIQSDSLRKMYIRQTKNDSIDSFLIAEVIRFGQFGTTSMADENILAMRQLCRYRDSVISSRTEIKLRIGTIMEQIFPEYEKQFSSLWVSTSMGILEKYLTPENIENAPIDELFEIIKDKSHNRLTRAKAISIKEAAADTFGIKIAQDAFSFQLKQLIDRMNFLDKQIEALDIEIMKYYEQFDCYLHTIPGIGIIGAATILAEIGDISRFKNSSALVAFAGIDPTVRQSGEFNSTHNHMSKRGSPYLRHAIFLAATTCSFHNSPLNAYYKKKRDQGKHHLTATGAVARKLTTIIYAVLRDSKPYEPKKFC

SEQ ID NO: 386681 - protein, 345 aa, unidentified
MEPMYYIGLDVHKRKISYCVKDSSGQVCAEGSLPATRFDLDRWMKTLPQPWSAAMEATMFTGWIYDHLKPHAASLKVAHPLMLRAIAAAKRKNDRIDANKICDCLRCDFLPECYMAPTAIRERRRTLRYRNLLVRQMVQMKIKISSLLMEAGVSYNKQRLHRAGYFRELLATNPDIDEGLRSLLRQCRETVVRLSKTESALIRSLEDDRLLAERVERLMSIPAIGPITALTWALEVGEVQRFSSIKKAISYCGLCGAEKSSGNTVQRTPLSKQRNKHLQTTLIEAAKMAPRYSPTLALLYDREKQRGNANRATLAVARKLVAYLMSVDRGRCHFLVLDQETSTAA

SEQ ID NO: 386682 - protein, 312 aa, unidentified
MAPTIFVGIDVSKDTLDIAVRPSALRWQLANDDAGIRDLVSRLAELSATLVVLEATGGYEHPAAAALAGASAGVVIANPRQIRDFARATGQLAKTDAIDAGILALFAERVRPEPRALPDEARQMLEALVTRRRQVTEMLVAEKNRLGHARRPVRRGITAHIRWLERQLSDVDRDLDEAIRQSPLWRSQDDLLQSVPGGGPITSRTLLAQLPELGLLDRKEIAALVGVAPLARDSGTLRGRRTIWGGRATVRAVLYMATVAAARCNPLIRIFYQRLRAAGKPAKVALIACMRKLLTILNAMARTHTPWRPAHA

SEQ ID NO: 386683 - protein, 354 aa, unidentified
MLIIGCDYHPGFQQIAYVDTETGELQERRLVHRQEAEEFYRALKQRQIAVRVGMEASGQARWFERLLAELQFELWIGDAAKIRTKRVRKQKTDRQDAQLLLGLMLENRFPRIWVASWENRDLRQLLWHRHRMVQMRTRLMNQLQALALNEGIRRKKGLWREAGRKQLESVALAPWASQRRHDLLELLDRLSPRIAELSERVEQEAGKCPAAQRLMTHPGVGPLTALAFVLILGQAERFRCGNQVASYLGLVPEEDSSGEHRRLGHISKQGNSLLRFLLVEAAQVTVRSDLEWRRKYFHLALRRGRKIAKVAMARRLAVRMYWMWRKEWDHEQWRKFGPHAGQPGTGVGVKSNTE

SEQ ID NO: 386684 - protein, 371 aa, unidentified
MSRSIIYLGLDVHKESVTIAVLPIEAPAPTRVDRLPNDLSKLRRYLQRLAEPGELRACYEASGAGYVVQRALTAWGVHCEVIAPSLIPKRPGVQRKHDKYDAAQLARLYRAGELTVVRIPSEAEERVRDVVRCRETFQRELMKSRHYVLKFLARRGVVYRDGKAWSQAHLEWLRRLGTPTGPLAPEDRLVLGEYVALLEYKLHRRAALDREIEALALTPALATAVGWLQCFRGIRFHTAMVLATEIIDWGRFAGPRELMAYLGLVPRERSTGERERKGALTKAGNAHCRHVLVQAAWSYRFRPKLAAALKARQRGQPAAVIAQAWKAQHRLHQRYSHLAYRKRPQIAVVAVARELVGFLWAVMRRLEPAAA

SEQ ID NO: 386685 - protein, 323 aa, unidentified
MGVDVSKNTLDVCCAEIKEHIQIKNGSEGFLQFKKWCKHFDIKLQRSFLVMEYTGGYEYKLIQFCEANNILYTRIPGLAIKNSLGIARGKNDKVDAARIAQYGEEKHKLLNADKPLNVAIVKLKELLNFRKRMVRENAGYKSSIKERRHMYGDNKKDIIVKMLEQKQKENVKKIASVELALLKILTADEKMRTNYTLLTSIKGIGKINALMTIAYTENFVSFTNPRSYAVYVGVIPFDHSSGTSIRGRKRVSHIANKELKQELNQAARSAMEWDKEMKLYGQNKMKTKCYKVVLNNIKFKLILRMFAVVKKGEMYVDKYQNAA

SEQ ID NO: 386686 - protein, 429 aa, unidentified
MCYRIAGIDVHKKILAVAVSDVEVEGEYQFERRMFGSSPDQLRSLAAWLLEQAVEEVVMESTAQYWKPVWEALERYWKPLRQKREGASRRSGTLHLAQAQSNRGRRGRKRDFPDAERLVKRLVARELTLSFVPDADQRLWRTVTRRKYQLRRDHVRLQNQVESLLEEAHIKLSSFVSDLLGASARRMLKALAEGETNPAALAALADRKLRATPEQLCDALGACTDLKPVYRRLLHMALEQLQFLEKQIDQLDQELASLLHPHQDAVQRLAEVPGLGVDSAQQIIAEVGPTAATFPSEKCLSSWVGACPGDDESAGVNYSHRSPKGNRHMRRVLNQTANAAARTKGSIFDIVYRRSVPRLGHNQAIGAIAHRQCRLIWLILHHGVHYEERGPAVTKQSKQKRTARMIRQLRSLGYRIEAPNPQPSQAQAQ

SEQ ID NO: 386687 - protein, 354 aa, unidentified
MSQTPSTAIAVIGIDIGKNSFHVVGHDTRGTIVLRQKWSRGQVEARLANMPPCLIGMEACVGAHHLSRKLASLGHDARLMPAKYVRPYSKGQKNDFNDAETIAEAVQRPTMKFVATKTVEQLDLQALHRVRERLVSQRTGIINQIRAFMLERGIAVRQGIGFLRTELPTILATRTDALSPRMLRVIEELTGDWRQLDQRIDSLSGEIEALARQDQACSRLMTVPGIGPIISSAMVAAIGTGDVFSKGRDFGAWLGLVPKQISTGDRTILGKISRRGNRYLRVLFVQAAWVVLVRIKNWERYGLRSWIEAAKKRLHHNVLAIALANKLARIAWAVLAKGRAFELTRTNDAGVRPA

SEQ ID NO: 386688 - protein, 310 aa, unidentified
MDCYIGIDVSKATLDIAVLPDGESWTVTNDDPGLAALAPRLVALTPVVIVLEATGGFEMLAALTLAKAGLPVAVVNPRQVRDFAKALGRLAKTDALDAGILADFAQRVRPEPRPLPDEAAQLLESLLTRRRQIVDMLTAEKNRLGFARGPVKRDISQHIRWLAKRLTDVDGDLQDAVTASPLYQAKADLLRSVPGVGQVTTLTLLATLPELGHLSRHQIAALVGVAPMNRDSGTMRGKRMVWGGRAPVRAVLYMATLVGIKHNPVLRTFYERLRAAGKPFKVAATACMRKLLTILNAMLHQNRRWDPQHA

SEQ ID NO: 386689 - protein, 354 aa, unidentified
MTMMLIGVDPHKSTSTATAVEPDSNREVASIRIDATLREYRRLLTWAGRWPERRWAIENAEGLGRHLASWLLARGERVVDVPTTATARVRQLSRGGGRKNDRIDAAAAACVAALQGDARPLEAEGTTDAMALLDERRANLSQARVRVVNQLHALFRALLAGGAPTGLSAAEAGALLRTVRPVGEVERVRKQLAGDLVAEIRSLDARLKRNAEAMAELVKASGSSLTQTVGIGDITAARLIGRTGRPSRFPTAAAYATYSGVAPLEVASADKTRHRLSRSGDRQLNSAFHTIAVTQIRTTGSPGNIYYQTKIAEGKTPREARRCLKRRLADHVWRTMIADEKRQRAKASESVDAA

SEQ ID NO: 386690 - protein, 337 aa, unidentified
MGEVSTVGLDIAKSIFQAHGADGAGGIVFRKKLGRGRLLAFFASLPPCLVAMEACAGAHHWGRELAKLGHTVRLIPPAYVKPFVKRQKNDEADAEAICEAAQRPTMRFVPVKSQDQQASGVVFRARDLLVGQRTQITNAIRGHLAEYGYVAPKGVCYVERLVDQIDSLPDVAQPALRGLVRALRALDEQVAELDREIALRAKEDETARRLITIPGIGPVTATALVALAPDPQAFRCGRDFSAWLGLTPLQKSSGGKQKLGQITKMGERTLRRLLVIGASAVIKQAAMRGAPAGSWLAQMLARKPRMLVAVALANKTARIVWALLAKGGIYRAPVLAA

SEQ ID NO: 386691 - protein, 328 aa, unidentified
MTNAREPMSRPLQFVGVDMAQQVFEWAMHGVPGTHTAPNDEAGFETLLEALQNLRVGLIVMEATGGLERKLAGFLLRHSLPVAVVNPRAAREFARSMGHLAKTDAIDALALAHLAQTLAAKADQSGVAFRPPTAEVEQLQLLMTRRAQLMSMRTAEKNRLVSAGRVLHKSITIVIKTLDKEIARLERDIDAHLERHFKEQARRFQDVKGLGPMTCAVMLAFMPELGTVKSARAAKLAGLAPLNRDSGKERGKRHIWGGRSAVRSALYMATLSAVRFNPVIKTFHDRLIAAGKPKKVVLTACSHKMLRILNAMARTGQPWDESLHATTP

SEQ ID NO: 386692 - protein, 360 aa, unidentified
MIYVGLDVHKAFSSMEALNPATGEVQEFKRVATNQEALGEALAQVAGPKTVVLEAGRNSLYLAAMLDPLADEVWVVDPAELRKLQKGTAHTDPHDAAGLAFWAAKGVLRPLWRPDAETMNLRELTRGKTALTGIATQLRNKVRSLLARHGCECPYSDLLGVKAQQWLAQVKDRIPGYAAQVLEALERLLPAAQAEVDQLEPPLRQEARRHPGARRLQTIPGIGPFLGLALAAEIGDIHRFASPTKLRGYSGLTAKVDQSSRRLSYGPLTKRGNRHLRYAAVLAAQRMAQMKSADARFKRAYLMVAFKHGRNPAKVDCARRILDLAHHLLTHEEDYRAPRSIGAAVAPAKGRRRVRQAATA

SEQ ID NO: 386693 - protein, 313 aa, unidentified
MAQIVATVGIDVCKDRLDVAVHPSDEQFSVTNDQAGWRELVRRLRPLQARAIGLEASGGYERGPINALLTAELPVHLVNPWKLRRFAQAAGVLAKNDRLDAKLIARFVASMPSREVHRDRAIDHLAELVQGRRQLLDAGQQITCQLEHVRDRTLRRQMTRRIRQIEHDVDQLDQLIVRAIEGSPILSARRDLLCSMPGVGPVLAATLLALLPELGSLSNRSIAALVGVVPYDFDSGRMKGLRCIFGGRAAVRRVLFMAAQVAARFNPTLKAFKQRLIAAGKKPKVAIVAVMRKLIVTLNAMTRHNLPWQTAAA

SEQ ID NO: 386694 - protein, 425 aa, unidentified
MKNNFLSTLFVGIDVSSKTNVLCALDFQGNKLLNLKALNNQPGAESILESILDCLNSYSLKFVVIALESTSFYSTHIANFLSSNETLLAYSPMIYCLNPKTIANYRKSFIDMDKTDPLDAYIIADFARCGRITSQPWRGAQFLALQRLTRHRLHLVVSASREKAYMVSNIYLKFSQLAVAKDEDKPFSNTYGATSEAVLTEFLSLDDIAYSSLEDLVEFIKSKGKNRFSDPVETAKLLQKAARDSYRLDKILYEPLNVSIASSFNVINALDTEIKTIDKAIEKTIKGINTTEYQSLTSIPGIGPVLASGILAEIGSIVSFDSNDALAKYAGLTWRVNQSGNFTSDETNMTKTGNKYLRYYLIEAANSVKNNVHEFNEFYHKKFGEVTSHQHKRALALTSRKLVRLIFGLLTKNQIYSTNKVGETQ

SEQ ID NO: 386695 - protein, 360 aa, unidentified
MILSDRVVIGMDPHKRSATIEVMAGDETVLGTGRFDTDRAGFAAMVVYAKQWPNRVWAIEGCEGIGRHIASRLLADGEEIVDVSPKLSARARVFVTGQGRKTDATDAHSVAVVATRMSGLRPVVNDEQLAVLRLLVDRRRSLGDDHTRMVCQLHQLLLELIPGGAKKSLSAAQAKALLATVRPRDAVGKARRRVAAELIADLERVYQRSKQADKELKELVAATGTTLMDLHGIGPSGAARLLVEVGDITRFPNRAHFASWNGTAPIDASSGDQVRHRLSRAGNRQINRVLHIMATVQLRNATLGRAYFDRRKAAGKTPMEAMRSLKRRLSDVVYRQMINDAAAATATGPGGHRDTSTSPA

SEQ ID NO: 386696 - protein, 358 aa, unidentified
MKQYVGLDVSQKETSVCVVDEVGQILFEGKAKSAPGAPAALLRKRAPQAERIGFETGAMASWLWHELRRVDLLVVCIDARHAHAALSVRMNKSDQNDARGLAELVRVGWYREVKVKSEESQKIRAILVARSRLVSMRRDIENQVRSLIKEYGLLFPRAIGQQFRNLVSELLGDNHPLLSVISPLLLIHEHICQQQNKFDDEVRQLAKADETTRRLMTVPGVGVVTALTFRHTIDDPLSALTVGAYLGLTPRRNQSGETDINGKISRWGDRLLRTYLFEAATVLLYRTKKWSSLKAWGMKLAKRIGMRKAKVAVARKIAVILHCIMAHPSTGGSRSQSDICSQVPGPVCRTGDVPLGRC

SEQ ID NO: 386697 - protein, 414 aa, unidentified
MGLKIVYPVCCGIDVHKTFVVACIASTNKGVTTYKRHRFSTYTKGLKELSQWLCENNCKDVCMESTGKYWIPVFNVLEDSCNITLAHPKYVKAIRGKKTDKKDAKWIADLFKHDLVAGSFMPPLAIRQLRDLMRYRFKLTNFTSSEKNRFQNSLTVSNIQLGNTVSDTFGKSSMNIIEKLLEDPTDTDFDIEPLIHGSMKDKIPELELAIDGVISPEQAGKIAVIKQHYDDLQARKADLEQLILSLAEPYTEEINLILTVPPFKNIFSAIAVVSEIGVNMDVFPTAKHLCSWAGLTPTNNESADKKKSVRVSRAGVYIKPLLVQCATAVVKSDKHPEVRNRYLRLKKRRGHKRAIIAIARMLLTAIYHILKKKESYNPDLYQKADVLPVNREITIEQAISLAKSQGFRIMETVT

SEQ ID NO: 386698 - protein, 312 aa, unidentified
MERIFVGIDIAKDQVDVHVHPTDERFQLSRDDAGLAGLVARLQPLGPRLVVLEATGGYEIPVAAVLASAGVPVAVVNPRQIHDYARATGQLAKTDALDARLMALFAEAVQPEVRPLPTPEAQALGDLVTRRRQLVDMLGAERNRHHQARDLRLQRRIATHIRWLTKALAEIEADLATRIRSSPIWRERDNLLHSVPGVGDITAYTLIADLPELGHLDRRKIAALVGVAPFNRESGHWRGRRMIAGGRPAVRSVLYMATLTAVRFNPAIAHFYQRLTAAGRPKKVALTAAMRKLLTILNAMLRDQRPWQPQSA

SEQ ID NO: 386699 - protein, 319 aa, unidentified
METKIYVGIDVSKDTLDVAVHGDKQHWSFPNNEAGINKIVAKLKGLNPELVVLEATGGFEFSLAAELVAAKIPTAVVNPRQIRDFAKSVGMLAKTDILDARIIARFAATVQPTPHQIPDIEAQELGAITARRRQIVNMITAEKNRLSTAVKTVKPRIRAHINWLEKELDEINKNMKQKVKDSPAWQAKDDLLQSVPGVGPNLSTTILAELPELGTLNRKQIAALVGVAPLNRDSGTLRGKRTVWGGRAAVRTAFYMATLVATRYNPLIRCFYERLRAAGKPKKVALTACMRKLLTILNAMLKYNTRWDYPVVHILSTYH

SEQ ID NO: 386700 - protein, 372 aa, unidentified
MQQNIRVFVGLDTSKMKISVALAEDGRQGEVRFLGDINNTPDAVKRLVIKLTGKYQKLLFCYEAGPTGYGLHRQITTLGHDCSVIAPSLIPKRPGEHVKTNRRDALTLARLHRAGELTAIWVPDSGHEAIRDLVRAREAGMEDLREKRQHLQSFLLRHGRIYPGLRSWTLVHARWLSNLTFEHPAQYLVLREYRQAIEDAEGRLERLTQQVTDVVSTWSMASVVEAYQAMRGVAFLTAVTFVAEIGDVRRFETPRQLMAYLGLVPSERSTGEQVRRGGITKAGNPRARRVLIEGAWTYRYPARLSRPLQVRQESLPKIVRAIAWKAQVRLCARYRRLMAAGKRQTLITTAIAREMAAFLWAIGHEVQPRSAA

SEQ ID NO: 386701 - protein, 339 aa, unidentified
MNRQYVGIDLHRRSSTIYRMSEDGEVLGCVRIPSQPFELAQAMEEAGEAPEVVLESTYGWYWAADLLKELGANVHLAHALGNNWGNRRVKNDERDAKDLAAMLRLGRLAEAWIAPPETRELRELVRYRFSLVAHRTSAKAQIHGVMAKNGILPVVGEMWGPSGSAQLDSLDLPAAYNLRMESLRGLLEIYDREIAMLDGHIHRELKDDVGYRALLKLPGVGKVIAAIFVAEIGDITRFDNPKKLCSWAGITPKHRESDAIVHRGSITKQGSPLVRWAAIEAVGNYRAKGNEKLRADYLRIAERRGRYKARVAVARKLLTLVYYGLRDGKVRCLEAPEAA

SEQ ID NO: 386702 - protein, 347 aa, unidentified
MTLYIGVDFHPHQQTVSYCNNEEGEVHQTSLVNNVEQVRRFYRQLPKAVVGIEASCTAAWFEQLLADLGHELKVGNPTAIRARARSRHKSDKRDADLILDLLVKDEFPELWRRPLPSQSVLEQLRFRHHLVKHRTQICNRLQALAHAAGLPKKGIQTKRARVALMAANFTETQSFERDQMFELLDDLTERIKQVEKWLEEKAAGDEKVKLLLTHKGVGLLSALAVVHTLGDINRFPSSKEAVAYTGLDPLEQSSAGKVRFGSISKAGSSVLRHLLGQAMHVASRYDGELKAFYQRLANRRSKSIAKVAATRKLLIRLFIMLRDGIDYNEFKRRGSAVGMPAQSHGLQ

SEQ ID NO: 386703 - protein, 428 aa, unidentified
MNAEDTIRRKQFCQIKDEISGSDDYLVVGIDVAKDKHHAFMGSATGKSFVRKLVFENNLEGFGKLLERSEAVKTQNALSKVVFGMEPTANYHKPLGAHLLGCGCHVVLVTGKAVKYNRELLDGRWDKNDDKDAANVADLVSRGRCLYYDYPSSSINELRQSLSLRRRLKKEEHSVRMRIRNNLLALYFPELDRFYSACESETLAIVRWCLDPGRIAGMDFESFFLMVTRSRRGIAQKRRLQKIHQLAVESVGCAMGPAAEFEAVLLVDKLKAVRGQLKQVADQMQDICLQFADYSYLLTIPGFGPYVAARVLASLANPWRFDSSNQVIKMAGYDLGANRSGRSSDQAVPVISKRGNAELRYALYQAAHVASTRNRDFIGYFTRMLRGRQRERGIKTKMKVKLAAKMLKIAWTLMKKHEAFDPDHLIVA

SEQ ID NO: 386704 - protein, 422 aa, unidentified
MNSEPEKVDYAAWIGIDWGSEKHAVCVRAADSSRLEHCTLEQKPDTLHAWFMSLLGRFGGRKVAVAIEQSKGAVINFLLGVDFVHIFRVHPKSLKNYRQALFPSGAKDDPTDAELILQFARLHQDKIHPWVPDDVDSRLLLRLVEGRRKIVNKRVSLTNQLTQLLKEYFPQALDWAGDLDRVMACDFLSKWPTLPKLQRSKPDVVCQFYRDHGCRSGQRIDSRREEIRSACPLTTDQAVVESSVLMLKALVPQLRALIEAVARFDARIEEVYGQQPDSEIFSSFPGTGPALGPRLQVALGADRDRFHDSAEVAEYSGIAPVTECSGKTTWVHRRLACSNFVKQSFHEFAGQSIVQCAWARAFYDSKKARGLGHHAAVRALAYKWIRIIFRCWKDHVRYDEQKYMESLKRKQPAWLVFLAAAA

SEQ ID NO: 386705 - protein, 367 aa, unidentified
MKKVSTAAAEQISKFSQQKLTIGLDLGDRSSWYCVLDETGELRWEGKVSTTAKALREVFSALPTSRIALETGMHSPWVSRLLSELGHEVIVAHASKVRLIGESRRKDDRLDARTLARLARIDPQLLCPVKHRSAKAQADLTVIRGRAGLVRARTALVNTARGLAKSYGERLRGCNVRNMNPEKAEELSPELQAALQPLLAGIESLSDRIREYNERIEALAQQSYPQVALLKQVKGVGTLIALTFLLTLEDAHRFHKSRDVGCYLGLQPGRRNSGQSEPQMRISKQGDPYLRTLLVQGAQHILGPFGADCDLRRWGLKLAECGGRNGKKRAIIATARKLAVLLHRLWVSGEVYEPLRNSDCMTMATVA

SEQ ID NO: 386706 - protein, 364 aa, unidentified
MTTSAAAVIGGVDTHKHTHYAAAIDGHGRLLGHQEFPANDRGYAALLGWLRGHGTVQTIGVESTGSFGATLTRSLSKAGVPVVEVNRPNRSARRIDGKSDRLDAEQIARSVLGNTATATPKTKNGVVEVIRTLRVTRASAVKSRTQAFNTLFGVMISAPSPLRDELVVLSKQTLVNRCLHLRPETEDLLELTNDPDRLLLAGVKTALRDLARRWKTLNAEIKALNRQIEALVTLAAPDLLDLHGVGAELAGQFLMTAGDNAERIRNEAAFAKLCGVAPQPASSGRTTGRHRLSRSGDRAANSALYIVTIVRMRHHPATRAYVERRTAEGLSKREIIRCLKRYIAREIYSALPRQPHIQPRPNTA

SEQ ID NO: 386707 - protein, 344 aa, unidentified
MYYIGLDVHKKTISYAIKLADGAVHREGVVNATRTSLDDWIARLPQPWTAAMEATLFTGWIYDYLLPHAASVKVAHPLMLRAIAASKKKNDRVDAGKIADLLRANLLPECYLAPTALRERRRTLRYRNLLVRQSVQMKNRMAGLLMETGVAYNKRKLHQKRYFAELVRESAELPPALKPLLKIGRETVERAATTEKALLRALQQDPSLEARIERLTSIPGIGPVTALSWALEIGEVSRFPSLKHAVSYCGLCSGENSSAGVQKRSPISKQRNKHLQTVLIEAAKLAPRWNHDLALLHDKELARGNRNRATLAVARKLVAYLLAVDRREKPFQKGGKNQAPEIAA

SEQ ID NO: 386708 - protein, 326 aa, unidentified
MATIGIDVSKKKLDLCWLRDAQAGKVKTRVFPNAHDHYPALLAWLLKQTNEEAGDLQVYLEATGIYHEPLAYWLHQAGVTVYVLNPARVRYYARSLGDQGKSDKKDSKRIAYFAQANPELTPWQPEPEEVRTLKQLAKRLETVQKDIQREQNRLEKAQFNRDTQAEHSITHVLALLRREAKRLVKEVDDHIDRHDGLKRDRRLLESIPGIGEVLSVHLLVTLRSRRFKSGRQVAAFMGLVPVEWTSGSSVRHAPRLSKNGDPALRQKLYMGAVVAMRHNPSIRRQYQRLCAAGKRKMSALGAAMRKLVHIAYGVLAHQKEYEPQPT

SEQ ID NO: 386709 - protein, 317 aa, unidentified
MTQKHTPLAPADHHLVAIDIAKDTLQIHSPQLGDLSVGNDNAGLRQLLKHLQSLENPFVVCEATGGYERLLLNELHHRGVAVAVINPSRLRAFALSEGIKAKTDPIDARMILRFAQEKRLTPTPPPDPGTRELAALLDRRSHLTEQQAREKNRLQNSSKLIAASIKRMLRCIEKELASIDAQIEKLITADPGLSTKAKTLQSVKGVGKVTTWTILAYLSEMPHLSRNKLVALAGVAPYNRDSGKTSAKRSIFAGRGKVRKCLYMAAQTAAMHNPVIKPYVQGLIARGKPYKCAIVAAMRKLLIHLQSLLKIQQKALA

SEQ ID NO: 386710 - protein, 425 aa, unidentified
MTRPQLTPPAGVLVAIDVAKARNEVLIEVPGSGRRRRLSVLNTRAEHDRLITLLTDLGQPVTYGFEATGNYHRPIAWRLLQAGFAVRLISSVGLARTREALHNGWDKNDPKDAQVMLHMIRIGASQVYHDPLAAGINDVQELFKTHDAVSRAKTEVLHRILTHYLPLYFPEVDRFRHNSRSDWFFAFLDHFPTPASITALSKEAFIAAAWDVVGRKVAKAQLLGDIYETARSSIGLPVPLDAPAVSMFRLVIGEVRGLIRQRDAVEAAADTLLSASADYKLLRRIPGIGPINALTILAEAGDLRRFSHHRQFLKFCGLDLATQQSGTFRGQTKLSKYGNARLRRTLWLAGQVAIRQRENGFRDKFERYIARDRHDADLRRKALTAITAKMARVVHAVIKTGADYRPFVEGPVPGGRTPLSRAVRA

SEQ ID NO: 386711 - protein, 400 aa, unidentified
MISPQLQVAVDVGCRRHRVAVGDAAGELLEEFDVEHSVVGLADFFARIERLRVKFGWPVAVAMEGYNGWARPLDRQVLLRGWRLYNVNNLKLARYKEIFPAPSKSDAIDTRRMLELFRLRGQLRVARNVLQEVAAVPVENDKLKRLTRRRRQLVGEKGRVLNRLQADLQAVCPGLLAITGEADNLWFLSLLASREDLRKIAGLRKSTLLSLEGVGRKYASVIQAWQKRAVFSPEAEWVGPMIVIDAQRVLELKGQIQALDQAIAALVGRSEIARRLDTIPGFGNTCSGELAGEIGTLERFAGEASLAVYLGMATLDNRSGDAEGSKPPRQVNTRAKAAMMVAVARHVEQVPISRVFYEKKRAQGKTHNQAVRALGRHMVRVIWSMLKHGRDYQLRPAADA

SEQ ID NO: 386712 - protein, 345 aa, unidentified
MGPMYYIGLDVHKRTISYCVKDISGKIHAAGSISATRLDLDRWLRSLPQPWTAAMEATLFTGWIYDYLKPHAAALKVAHPRMLRAIAAAKKKNDRIDASKICDCLRCDFLPECYMASTEIGERRRTLRYRNLLVRQMVQTKNKIAVLLMEAGVTYNKQKLHRAGYFRELLASNPHIDEGLSSLLRSCRETVVRLQRTESALVRSLERDFLLMDRVERLTTIPAVGPITALTWALEIGDVTRLSSIKKAISYCGLCGEEKSTGDTTPRTPLSKQRNRHLQTTLIEAAKMAPRISPDLAMLYDREKQKGNSNRATLAVARKLVAYLVAVDRRQENFLVVRNEDRTAA

SEQ ID NO: 386713 - protein, 470 aa, unidentified
MSTMMTLGIDVAVRAKHRATLADDRGEYVWSGHGFLTAPEELERLWARVPEDAEVTVVLEPTRNAWVPLVAWLRARGAQVVLVPPEQSKDLRRYYSKHAKNDKLDSRILARLPLLHPEGLRALDDLGPADALKRAVRRHATLIERRTASYHRLDCLVELLGPAWSQVLGTSDYSNTALVVLERYADPEKLRRLGRARLARLLSKHSRGQWREDKAELLLGAAEQTLTLWEAGGLDFTELAADIASEVATIRALNEQLTLVDERIERLYEQVDPAGIFRSGPAMATTSAAGILGRLGDPNRFANLGAVRAYTGLVPGVDESGQAGHHTGPTKAGDAGLRHQLYLAAERARLVDPTLAAKYYRLVVEDGRHHVSAVCHIAPILITRLAACWRNGERYIVRDIDGRPITEAEGREICAEHYRVPDEVRRRRRRTTTTQRQKGRTGRRDEESTKAAPAVDPSRSDPTHTNDIAA

SEQ ID NO: 386714 - protein, 346 aa, unidentified
MKIIGCDFHPSWQQVAIFDSSTGEILEHKLVNGNGEAERFYGSLPRPSLVGLESCGNSEWFVELVQRLGHQVWIGDAAEIRASYVRKQKTDQRDAAHILKLLMESRFPRLWMPSREQRDLRQLLIHRHKLVEIRSRVKNGLQHLAMNRGMQKKSRLWSAAGQKAFGELPLEGWAACRRQDLLALLAKLDGQIGGLDGAVLKAAEEDERVRLLMTQPGVGPITALAFVLTIGDVARFPRGKQVASYLGLIPREHSSGGRQRLGSISKQGNRFARMLLVEAAQTAVRLDEGFRKQYQHRCHHKPKGVAKGAAARRLAVRLYWMLRTKTGYPGIVRIESSSRVPLDGAS

SEQ ID NO: 386715 - protein, 400 aa, unidentified
MHLTANISIPQKNFIAIDLHSDNAVICVRRNALNKAGELVGKNIWCGRVSIRDGLDNFIKVPVPHCQDFDHVAVVESTYNWYCLADAFEERGWLLRVADPSTVSQANLKSSDERTDAQYLAERLRVGSLKHYLPLNYSSRALRDLCRYRMATVQDCASLKINLINLYRNQLSKNVRVADLLERCQPHMQPNYRFNSDILEEFKDPNIRLRVAFEISRIAMLEEMIEECNAEIQKQCKDQELVKLCQTIPGCGLVLSAVICTEIGTMQRFKSASDFVSYCRLCSTSKLSNGKSKGLGNAKNGNAYLSWAFTEVAQYASRNPVIREILQRLLRKYGGLRVKAIRTLAAKIARVTFYVLKNKQPFNAAKCFGMELTKSIVKKLPHKPLREDAAVVLPTVAGQA

SEQ ID NO: 386716 - protein, 489 aa, unidentified
MKLGAARDQSRSAWRLVVIEVVADSATFSYRLDRNKLRQTRSREGRYLLRTNLVEDDPNKLWSHYLLLVAVEEAFKNLKRCYGASGERNGIIVAATKPTGCPMPQPNDLSKSLAALDENSTLIAVIEMSQSSWLVAGIIPGVERHPAKKLNPDEGGVLRLLHRWRGEAEKAGRNISWTAVAYEAGRDGFWLARLLRAHGVEAYVIHPNSIAVSREHRRAKTDRLDTALLKRAFLGWLRGEREHCSMAAIPSLEEEDAKRPSRERENLVGERTRIGNRVKSTLARLGIRGFKPSLCTAAYRLERLRTPEGEPVPAHTLAGLRREMARLQLLAEQIREIETARLERLERQPNRGAHPMIRMLAQVRGLGIETADMLAHEAFSRSLRDRRAVARYGGLTGAPDESGARRREKGLAKAGNARVRRGMIQLAWRFLMFQKDSALAQWYRTRTADARGATRKALIIALARKLLVALWRLVTTGEVPHGVVLRPAS

SEQ ID NO: 386717 - protein, 409 aa, unidentified
MKMAGIDVHKKVLMVVVVDTSALQEKPARRRFVTLPSELQRFRIWLQEQGVEEAVMESTAQYWRSVWLELEPHMHLHLAQAFSNRAPRGRKHDFKDAERLVRRLIADELILSFVPNGEQRIWRSLTRMKVQLTRDRVRLQNQMECLLEEMRIKLSIVVSNLLGASSLRILHALAQGETDPKKLAELGDERLHCTEEQLVDALTGRVQPMHRGMLALQLQRLQLIDQQMAQLNHLIAQAMKSHQDAVIRLAEVPGLGVDSAQQIMAEVGAQASTFSSAAELAAWVGTCPGKEESAEQNQSSRSAKGNKYLRRVLNQAAHAAVAKKGCHFQVVFRRLMPRLGYKSAIWAVANRLCRVVWKILHEGVRFIEQGREVGPREKKQRAQLLARALRKLGYEVTITPINQLAPKPA

SEQ ID NO: 386718 - protein, 339 aa, unidentified
MEKIVKKNVGIDVSKDTFWATITIKTHDQEFRHLKSKEFPNKIAGFASLESWIQEVVAESTELHFTMEATGVYYENLANYLYLKDYFVHVVLPNKAKKYAESLDGKSKTDKLDSKSLGQLGVERKLKRWNAPTPLYKDLRDLTRERGQLIKIRTKFKNNLHALNHAYKSNENRVTRIGLMIEALDGQVKEIERELNNLLKETPFLKEKVSNITSISGVAQLTALTVIAETNGFALVENTKQLCSYAGLDVRIRESGKWKGQSKISKQGNSYLRAAMYFPALTAINNNEHFKNQKDRIVKGSRKNGVGITAVSRKLLILIYTLWKNDCKYDKDFGRKNVA

SEQ ID NO: 386719 - protein, 368 aa, unidentified
MKTVRFVGLDVHKESIIVAVAEGDRSEPQVVAELPNDTLRLLKELRKLSRGGAELRCCYEAGPTGFGVHRALREAGIECVVIAPSLIPKQAGARVKTDRRDAVKLARFHRSGDLTEIHVPDAATEAMRDLERAREDAKNAERVARHHLSKFLLRQGLRYSKSGAWGTLHMAWIRAQQFDHEAHNRVLVDYIHAVEQATDRVARLDKDIAELVESWSLKPLVDALQGLRGIRLLSAVVIVAELGPMDRFAKPSKLMAYLGLVPSEHSSGESKHRGGITRTGNKHVRRILVEAAWCYRFRPAISDRLRAHNRHISPSVIAVAWKAQHRLHDRYRRLLARGKNKQQLITAVARELSAFIWDIARQPQLLAA

SEQ ID NO: 386720 - protein, 459 aa, unidentified
MTRKRKLELDIVNEDAAGIDVGSRSHFVAVGQSLEDVKEFGVYAEDLVALCHWLHSFGIRTVAMESTGDYWQNLYVELIKHDFEVVLCNGKFTKHSKGKKTDVKDCRWIQKLHTLGLLTSSFLPDETTEVLRTYCRQRGNWISLAASASKKMQKYLKFLNFRLDVVVKDVCGLTGLKIIEDIFNGNLDPQSLAEHRHFNCRKPKEEIAKALHGNNRKDYLFGLQQEYESYSFFQTKIKACDKEIEKLIKEHIMKNPEKSKLISNDKPYKRINKNAPEIRNFNQVAFQYFGGVDLMAIEGVSHATVMSIMSEIGIEGFKKFKCSKEFCSWLRLAPNNKISGGKVLSNRIPKGSNRLKIALRHSANAIGNLKDTHMSDFFNRISYRKGRQAAVSATARKLASIIWTMITKKVPYSPPKEYMFLDQKRKLNLLKKIKKNIAKFIIKPDEIGFGNSLTLSAEF

SEQ ID NO: 386721 - protein, 344 aa, unidentified
MSQVTTIGLDIAKNVFHAHGADERGAMVFSRKLTRHKLLDFFADQPACVVALEACGGAHHWARELLAMGHDVRLIPPAYVKPFVKRNKNDAIDAEAICEAAQRPGMRFVAVKSEDQQAAGLVFRTRDLVVRQRTQLINAIRGHLAEYGWVAPRGTAHMSMLAELLEDEEMISTLPEAARPMFKLMVGLLAELDKQIAVLDREIARRAKEDEAARRLMTIPGIGPIAATAIIALAPPIETFRKSRDFAAWLGLAPRQHSTGGKQRLGSISKMGERTIRRLLIIGGSSMVRQACRFGAPAGSWLERMLARKPRMLVSVALANKMARMVWALLTKKEDYRAPAVVAA

SEQ ID NO: 386722 - protein, 344 aa, unidentified
MHIASVGIDLGKTTFHLVALGEHNKVLVRKKFSRPQLLVYTANLPASLIGLEACAGAHFMGAALRAQGHQVQLIPAQFVKPYRKSNKNDFIDAEAIAEAVTKQNMRFVQIKTQEQLDWQAMHRVRDRLMQRRTALINEIRGFLLERGLTFAARPIYLRKNLPTVIEDAEQNLSPRLRWLLDRLWQEWKQTEIDIKVITDEIERISNDDARCRRLRQIPGFGPLVSTATVAAIGNGAAFRRGRDFAAWVGVVPRQYSTGGKQKLFGISKRGNIYLRRMLIHGARAVLLRVKYDTGGFGQWVHRLAQRAPRNKVVVAIANKLARMAWAVLSSGQEYRHQPLQLAAA

SEQ ID NO: 386723 - protein, 361 aa, unidentified
MCQSRCLASKKEEPIVQNDTLVAVDIAKEVFEVGVSDWPGRVARRRRLARYEFLEFFAQLPQATVVMEACGSAHYWARKIEELGHVVVLLPPQYVRPYVVRNKTDRTDVDGLLEAFRNEQIRPVPIKTVTQQVIGTLHRLRSGWLADRTRAINSLRGLLRELGFFIPEGRRHVLPDAWEIIHDPTRGLPEALKPSLSSLCQEIVSLSTRIEEIEAQLEALAKQIPAVARLRTVPGIGLLSATALYAFVGDVSRFPSGRHMASFIGLTPREYSSGLRRRLGRISKRGDVYLRMLLIHGARSVLWHAKRMKNRDRLRAWALRLERKLGHNKAAVALANKLARITWAVWKNDRNFEHVPELQAA

SEQ ID NO: 386724 - protein, 393 aa, unidentified
MVNGAVRREVQTFKTTTKALLALSEWLAGEGCTHLAMEATGVYWRPVWHILSDGDFALVLANAAHVKGVPGRKTDVGDAAWLADLLAHGLIRGSFVPDEQTQEMRNLLRTRKQLVRERSSHIQRLQKTLEDANLKLDSVISDVMGLSGRAMIEALIAGESNPDRLAELAHRRIKAPPEELREALHGRVSKHHRFLLRLHLQQIDAIDGAIAEIDREVDSNVEPFRTPIQLLTIISGISELSARTILAEIGRDMRRFPSAGHLISWAGLCPKNDESAGKRRSTRMRKGAPWLKTTLVQCAWAAARKKSSYLQAQFHRLRARRGAKKAIGALAASILTAIYHMLSDGTLYHDLGPDHFDRTAKASQTKRLVARLQNLGYAVQITPWQPDPAAVSC

SEQ ID NO: 386725 - protein, 343 aa, unidentified
MYYIGLDVHKKTISYCVKDAAGCVHQEGKIGSTRRELDAWVRTLPQPRMIAMEATIFTGWIYDHLLPHAEAVKVAHPLMLRAIAAAKRKNDRIDAAKIADCLRCDFLPECHMASTAIRNRRRILRYRHLVLRQAVQMKNRVSGLLMETGVSYDKLRLHRMGYFADLMSSSEEISDSIRPLLKLCREHIDRSARLDTALLRSLERDPLLADRLQRLRTVPGVGPITALTWALEVGDTSRFRSIKQAISYCGLCSAEKSSADKVMRTPISKQRNKHIQQVLVEAARLAPRYSDELALLYERERQRGNSNRATLAVARKMVAHMLAVERRNTDFVPAGEFKRTAAA

SEQ ID NO: 386726 - protein, 318 aa, unidentified
MLNESFVGIDVSKDWLDVGWEPAQQTERLAHDEVAMVGLCERLVQERPCLIVLEATGGLETHLASALAAAGLPVAVVNPRQVRDYARACGRLAKTDRIDALVLAAFARAIRPQVRAPKDDETLELGALLARRRQLIDMRVQEKLRLERASPVQRDSIKEHIVWLTERIARLDTDLTHRLRSSSLWRDKEDLLKAIPGVGTITRVTLIALLPELGKLNRREIAALVGLAPFNRDSGQHRGERVIWGGRAQVRRVLYMASVAAIRSNPVIRAFYQRLRAQGKPGKVALVACMRKLLTIMNAMLKHNTPWNPNALDLEHSC

SEQ ID NO: 386727 - protein, 387 aa, unidentified
MQKPHDNSKVCRAAFVQDSTLVVVIEMALTSWLVAGMIPGVDREPLKKIAPDPEELLQLLYRWRDEAIKAGKEITRIAVAYETGRDSFWLARWLRARGIDAHVIHATSVAISREHRRAKTDRIDTAMLRRGFLGWLRGEPGHCSLAIVPTVAEEDAKRPHRERESLVQERTGTVNRMKSILIQFGVRNFNPVLRKASERLDAVRPPEGIPLPPNAAAALRRHMERLRVIKEQIKAIERTRLQRLQRDPADKMNAMVFLLVRIIGLGVETAEQLVHEILFRDLRDRKAVARYAGLTGSPDESGSKRREKGLSRSGNGRVRTILIQLSWRLLKLQPGSELVLWFQKRTADAKGSRKPMIVAFARKLIIALWRYVNTGLLPEGFELKPAA

SEQ ID NO: 386728 - protein, 315 aa, unidentified
MMLAHEIVFVGIDVGKQDCFAAVHGQKGSRPFANSPEGHLALSAWLAGLGGEVRVGLEATGGYEAAVWEHLTAAGFAVRQLVPSRVRAFAQSAGCLAKTDRLDAGLIAACLAARPEARRALPPENTRKLNALQVKRRQLIDQRKVLVCQHQQHRDEDIRTLDEELLDIISRQIKHLDKAIAAFLQADNELAGKARLLRSIPGLGPVAAATLLAAMPELGSLSSRAAGCLAGLAPIAHESGQYKGKRFIRGGRIEVRNVLYMAAFAAVRSNPALKAFADRLKAQNKPHKQIQTAIARKLIVLANTVIKRQSEWIPA

SEQ ID NO: 386729 - protein, 370 aa, unidentified
MSVRRILAKTIDTDLEYEAIGIDLAKNCVSAALLTTDGEVVCIDRLDYSELEKSAQALSSTTFAMEPCTEMNYLVQKLEAWGHRCLVIGGKNVQNYVENHFSGQKTDLNDAQALAFLAQDKQLRTIKAKDIEQQKYASLTTLREQYIKQYRQTIVSLKGICQAWGLNISKGISGKARLKDLIENHAAFPEELKESLVDMVTHAQTAQKALNKITKTLEVLAKNDKVCQLIQTIPGLGTICSCRLRATIGDIKRFKNPKDFPAYYGLVPRSIATGHNEKKGRITHRGDKTMRSLMVQGAGSVVNMATKGKLKSKQLTKWILKKQKEKMPWGKLVCAVAAKLLRIVRAILISSKPYNPKIAGVAKCSLSKGS

SEQ ID NO: 386730 - protein, 385 aa, unidentified
MSQLNDLSRSLTSLEQDNAIIAVIEMSQSSWLVAGIVPGIERHPLKKLEPNEAELLRLLMRWRAEATKMGCTITRIAVAYEAGRDGFWLARWLRAHDIETYVIHPTSVAVSREHRRAKTDRLDTGLLKRVFIGWLRGEPDHCHMVKIPTLAEEDAKRPNREREGLVRERTRIVNRMKSCLARFGVRSFKPTLRKAPERLATLVTPEGVPLPANTLLELRRDMARLRFIMDQIKEVEEARGQRLGQAPQEKSHAMVRLLARVIGVGIETADMLVHEILSRSLRDRRAVARYAGLTGAPDESGSRRQEKGLAKAGNARVRRGMIQLAWRFLLFQKDSALAQWYRTRTESAGKKRKTMIVALARKLLIALWRLVTIGEVPAGVVLRAA

SEQ ID NO: 386731 - protein, 331 aa, unidentified
MSEVVVGLDVHLKCTQVTIMKNDVKGEIVKREKVRPSKAELRRSLEAVPEGTRVALESEGFCWPWVDFLEQLGYVPLLANPVKVKQRAEDIKNDKVDSKLLAELTRMNWLPTCYVPPAELRWLRSLLRHRAFRTKFSTAMKNRTRSEFWKRDIQLDVNLGTLKGRKATLGLGVFEISQNMELLDLIDSQSKEVEKLLWKKYGRVRPVELLMTIPGIGFLSALTLYAEVCDIKRFPNPEKLAHYAGLVPRVRQSGEHAHMGKESKGDKWLKWILVEAAWSHVRFCPEGHLANVFRDACKRKGDSRKAIKVVARKLVNVVWAVLTYEREFMVK

SEQ ID NO: 386732 - protein, 402 aa, unidentified
MVFVGIDWADREHEVCILDQEGTELARFRVPHNRQGFKDLKQRVLRHAGTPEEAPCFLETSQGLLVHFLLENGFPVYPLNPKVVDSRRKPSGAKSDAIDARLVADIGRSDFRRLRRLVPDSEHMRELKILCRDQDALLEQTTRLRNQLTATLKEYYPVALELFSDPTLPVALAFLQAYPTLEAARRASLSKLVAFLKAQRHPQAEAAARRIYGLVHAPQLEASPGVTRAKSRYVLALISQLEPLLEAIRQYDEEITRLFESHPDSVIFASLPGAGTRLAPRLLAGWGEDRGRYENAAAMQALAGTSPVLHQSGKYRFARCRRACVKFLRRALHLFAYQSVRLVSWARAYYARKRAAGKTHHEALRALANIWVRIIFAMWLKRETYNEAVFLAAKARHASVNP

SEQ ID NO: 386733 - protein, 387 aa, unidentified
MFYCGIDVAKHKHAVSLMNDQGQKLKAVFTITNTRPGFDQLLAELQALQSSVTVGLEATGHYWLALYDELTRTGYPVIVLNPLQVAAYRKSGIRKIKSDTTDAVWIADYIRIANLPAAKQDLPVILQLRELSRFRFRLTEQVGDIKRKLLTILDRVFPEYEHLFTNVFLKASRTILKEAVSAQEFADFDLQELSALLAQASRGRFGQDKAETIQQQARQSVGVAFLTNAVHLEMYCLLAQLDLLDDQRSQVDEMIADLMLQVPQYITSIPGIGPLTGAAILAEIGDIQRFETVDKLVAYAGIDATVYQTGQFEASEAHMSKRGSPYLRHALWLAATAAILHDPTLQQYYQKKRNEGKHHGTALGAVCHKLLARIFVVLKEQRAYVIR

SEQ ID NO: 386734 - protein, 402 aa, unidentified
MNAVGIDVSKGKSMVAIMRSFGEIVSAPFEIKHTASDIHSLVELINSVEGESRIVMEHTGRYYEVLAHQLSKANLFVSAINPKLIKDFDNDSLRKVKSDKADAIKIARYALDKWQNLKQYSVMDELRNQLKTMNRQFGFYMKHKTAMKNNLIGILDQTYPGVNTYFDSPARSDGSQKWIDFASTYWHVDCVRKMSLNAFISHYQSWCKRKKYNFSQSKAEEIYGKAKELVPVLPKDGITKLIIKQAVDQLNSASTTIESLRTLMNETASQLPEYPVVMAMKGVGTSLGPQLMAEIGDVSRFTHKGAITAFAGVDPGVNESGSYEQKSVPTSKRGSSDLRKTLFQVMDVLIKTHPQDDPVYQFIDKKRAQGKPYYVYMTAGANKFLRIYYGRVKKYLSSLPES

SEQ ID NO: 386735 - protein, 416 aa, unidentified
MTKTLYVGIDVASRSNTAQWMDPTGQALGKPWTFPNTLPGAQALETRVAEGLRQGAYEQVKIGLEATAFYDWHLADALAASALLRPWHPEVYRLNALRVSRFRKAAEEPDKTDRVDAAVIADFLRVGRNLPAPHVSGDPYLPLKRLTRYRFHLVGTLVRETSHFLTHLFLQCSGLAQANPLGRPLGATGCALIEAFPSVEALATLPVEELVAFLVKQGKNRFPDPAGMAQRVQQAARESYRLRPELARSEPFILANLLRTIRALKASLKEINKAIADELAAFPNTLTTLPGVGPVLAAGIIAEIGDIRRFASDDQLAKLAGLVWKRHQSGTFEAQDRRMITSANKYLRYYLVEAANALRMHDASYRAFYKAKFQEVPKHQHQRALMLTARKLVRLVYALLTRGQIYRPAAVQPAGR

SEQ ID NO: 386736 - protein, 314 aa, unidentified
MKAYVGVDISKGTLDVQMGEVFFQVINQEQGWREFIKALKKFISAGNDLGAVVCEASGGYEKEWVMRLQKAGYPVHVAHANKVRAFARCKGYLAKTDKIDAKLIQTYAATMQVEADEPILSAEQIQLGDWLKRREQLGKDRQREINHLEHCTDALIKRSLKAHIHWLDKAIANIEQAIEQYKGTPDMRSTHALLTSVPGVGDLTAWHLIAFLPELGRSNHKSLAALVGVAPFNHDSGKHKGKRFIQGGRALARRTLYMSALACTRWNPDLKAFYQRLRAAGKPAKVALIAVLRKLISMLNSILQRQSPWMENLT

SEQ ID NO: 386737 - protein, 374 aa, unidentified
MADYSEVFVGLDTSKLRNAVAIAEGGRSGEVRYLGEIENTEAATSKLVKKLAAQHRRLTFCYEAGPTGYGLYRLIKALGHECMVVAPSLIPKRPGDRVKTNRRDAVNLAKLLRAGELTAVWVPDARHEAMRDLVRAREAAVDDLKSKRQQVLSLLLRLGRHYLGKRTWTRAHITWLVSQKLAHREQRIAFEEMLLAVRQAEERVIRLEQAIVAAVPDWSLSKVVTALMALRGLDLVSAAIFLAEIGDLSRFASPRELMAYLGLVPGEQSTGETVWRGGITKAGNHRARRILVECSWSYRHPPRVGKKKLAKVEAAPRAVQEIAWKAQARLTARYRALARRGKRPTLVVTAIARELSGFIWAVNRAVGAPATPAV

SEQ ID NO: 386738 - protein, 416 aa, unidentified
MNAVGIDVSSRKSTVAVLRPLGEVVCLPFDVTHDIAGLASLAEKLKAIDGETRVVMEHTGRYYEAVAKALHEAGFFVCAVNPLLIKEYGANSLRRVKTDKADAIKIARYALDNWADLRDFTPMDAIRYDLKTLNRQFQLASKQRTASANNLIALLEQSFPGIRKCFDSPVRSDGTQKWVDFAHSFWHVDCVRKQPFPAFCERYRKWCKRHAYLFKQSNAEEVYALAKRAVVLTPKSKVVKVLVQEAANQLSSISRSVEVYRAEMDRLAAMLPEYPVVMAMYGVGKSYGPQLMAEIGDVRRFERKQALVAFAGIDPMPNQSGDKNVRSNKSSKRGSPYLRKTLFNVIRTYLQCAPQDEPVFQFLNRKRAEGKPFYVYMLAAANKFLRRYYAKLRDYFASLDTLQPVAPIPTILKAAL

SEQ ID NO: 386739 - protein, 443 aa, unidentified
MNKNDSAHLRGERGQAFANLVRGIPPEQILCVSLDISKYFHVVMIHNGLGEIVIPTFEIDIYQSGFDQLCQMIDAAQEHTKARLVLVGMEPTSHYFENLARHLLARSQPVKLINSFSVKQNREQQLMRREKTDQIDVAAIGDLLRRGEGTPYKPPTSIYLQLQQIDRVRLGKLKIANMLKNQILGHLDRIFPGLVLVSQTAQERYTPLFNVDFWQCQTLQALIRIFPNPYQLVAMSPDQLIQAFHAQKHRMGPAMAAKIIAEAHKTLLPDLELAAIRCELLQHDLALLEAVQAHITSLEQRLTNLVAQTPYQVWTKLKGISAVQTASLAAAIGDPANYTEAAQVFRRSGLVSGRNDSGNHQRKGRGNPILKTGDVYLRHSLMNAVATLILHQPVLYRYYKQLSFTKPSGVARVATARKTIGILWAAQRDQSSKTLINCKGAAM

SEQ ID NO: 386740 - protein, 342 aa, unidentified
MEKVTIIGLDLAKNIFQAHGMRRDGSVAFRKKISRAKLLCFFASVPKCVVAMEACASAHHWGRQIGALGHEVRLIAPIYVKPFVKRNKNDAADAEAIAEAASRPTMRFVAIKSIEKQAAGMAFKTRDLLVRQRTQTINAIRGHMAEYGVIAPNGPVHIKRLVEALQDPDSGLPESIHGVCELLLRHIALLSEKIGLLEREIRERTRRDELANRLMEIPGVGAICAVAMEALAPPPESFSKGRDFAAWLGLTPRQNSSGGKTRLGGTSKMGQRDLRRLLVCGAMTVVRWAARKGAPQGSWLEQMMKRKPRLVVAVALANRTARIAWALMMTGESYRASKAICE

SEQ ID NO: 386741 - protein, 462 aa, unidentified
MVAPRSGSLRESLTGCSARRGRKAWRGRGTAEDRSPRGGSGSELGGESARADYANGWRRSGSSRRQPLALASSGLTLKTSCGEQWSSTITCRAELLKRARPLENNVRYLGLDVHGKATVYCLLDAEGNAVERGSAPTTVLDLSELVRRLSQHGELMAGQEVGTMCHFVHDIFTALGVRILSFNAQHLRVIASSRKKTDKRDAFWIAKCLQTGMMPHPVHIPTANVRKLRSLLAQRNALATERKRWLLRARSYLRGVGVLVPKGVRKIARMLEDAIGRPDGLDDFVVNALELCARQERQLASELARIDDALQREAEQVDEIRRLKTIPAVGDRVAIAIYAAIGDIRRFRSARLLSSYAGLVPSVHQSGETLRYGGITKAGSPSLRSVLVQAGHVLLFRCRAPDTLPLKQLAARVHTARARRKIAVVAAARHILRIAFYVLRDGTSYDPTRIRSASVKEAAVAA

SEQ ID NO: 386742 - protein, 351 aa, unidentified
MKKNIFTQIGIGIDISKADFRACIMGNDGKKTFKVIASRKFANTTKGFSDFCHWVNKHLNKYEVEEVEYIMEATGVYHENLAWELYENQLKVIIVLPNQAKAFLKSEGIKSKTDKIDAQGLAKMVLVKKLRYWQPISPVLKALRNLTRYYEITQKELTQNYNRLHALEHSHKPDKFILKQLKQHLKFLEKQKENIYQQILETTQKDETLHKKMKHLTTIYGIGILTVAVVVAETNGFELFNNQKQLMSYSGYDIVEHQSGKYNGQTRISKKGNTHIRRALFFPALQTVKEENIFQELYVRVFDRTKKKMKAYTAVQRKLLVIMYTLWKKEVDFDHAYKKQNFVEEQDALLH

SEQ ID NO: 386743 - protein, 314 aa, unidentified
MEQQTEEAFFGIDVSKTALDLAQWGQKTVTRFENNATGIAALVERLLTATAITAIVVEASGGFEQTMVTELAAASLPIVVVNPTRIRNFARAKGQLAKTDEIDARLIAAFAEAIRPEVRPLGTEEQQLIKALVTRRRQLIDMQTAEKNRCATTNPELLPRLQKHLDWLETELAEIEDDLNNWIDQNAQWREKRISLESVPGVGPVTSFTLLAELPELGTLSRQKIAALVGLAPFNRDSGRFRGHRHIFGGRSDVRSILYMAALSGIRYNPILKAFYDRLIAKGKLPKVALTACMRKLLTILNAIIRDEATWQIA

SEQ ID NO: 386744 - protein, 342 aa, unidentified
MSYLGIDLHTNSFTVCRRTKQGKNSIRTFRISRIADFRKTLRKRDLLAVEATGNTAWFVSQVRDRVKKVTVVDPYQFEVIRRSVKKTDKNDSKTLALYLSKDMLPEARMKTKENAQLHSLATTRDKLVKQRTALINKVHNVLNSYGIKFKKESLGSEKGLKSIWAYDWDVIVKIELEVLVEQIRSLNKSIKTLDKEMTDHGQNLKGHNSLTSIKGIAGRSATVLLSVIGDVNDFADENKLSAYFGIVPRVSDSNETVRHGRITKHGSKLGRTTLVQCTLVAKRYNPYLRRYYDRIKSHRGSGKAIIATSRKFLGIIYNTLKNDWVFEDFPNFVLASSCVKKQ

SEQ ID NO: 386745 - protein, 415 aa, unidentified
MFFIGIDIAKVFSVCSVINDKEEMIIKPFPFNSSVGGFKKLINNIESLNCDTKDIIIGMEATGLLFENLYRYLIDLNYNVILLNPYQTSQYRNMVTMKYVKNDNIDSLIISLLIKSGRYSKGYVNEEQLQSLKVLFRHKENIKDNLKSLKRETSSLLAVVFPELDKVIKDPYNVSGLILLDKYPTAKHFEHVTVKIILKLFRKTKGNNFNEAKAELLLSYANDTIYSGVAKDARAFFIRSNITLIRALQEQIKALEDEMLKIFDKPLNREDVITKEDEDYISSVLDNLRTIPGVSDKTLLAVLAECGNLDRFKDAKSLIGYLGLYPTQEQSGNTLKYGHLAKRGAKYAKKALYLASVAAVRHNSELKQIFVNQVASGRAKKEALIIVARKLAYIIWAIYNHNQPYDPARVFVAHP

SEQ ID NO: 386746 - protein, 437 aa, unidentified
MRVLYEHVAGIGVHKDMIKVAIRSPGEKPWTRKTEILEFRTFYGVLQEMARLLRRRGVTHVVMEASGVYTDPVYYALCEQDFAGVAVVNPAHARALRGHKTDAADCRRLAELFECGLLRGSYIPPAELREVRDLTRYRMKTVQARTSEIQRLGKALESAGIKLGSVASDITGKSATAMIDSLIDGERRGAVLADLAIGRMRTAGKLADLSMALTGRFTEHHALLCRLHRDRIAGLDAAVADLDDQIAGRAGRWQRELDLLKTVPGFGDVVAQTWLAEIGPAPHRHFASHEKLASWVTLCPGNNISARKRKHGRTGDAGTYIKPMLIQAAWNAIRPKGRLQARYSRLVRRFGGEKNPGAKKKAITAIAHTLLKIASQVLKSEVPYQDLGADFYTRRESPDQQRAYLERRLRKLYPGCAITITISPPEAVLTSTVSNAP

SEQ ID NO: 386747 - protein, 413 aa, unidentified
MDVLHTSCAGLDVHKKTVVATVIVSQERGKPLKATQTFGTMTGDQLALSDWLMSYGITHAAMESTGEYWKPIYTILEDNFEVWLVNPQHIKTVPGRKTDVKDSEWIAELLRYGLIRASFVPPKGQRELRELTRMRSTFVKERATLVNRLHKVLESANIKLASVAADVNGVSGKAILQAMIAGGSTPEEMAELAQGRLRKKRELLSRSLQGYVKPHHRFVLSELLLQIDGLDETIARFDEEIREYCRPFEEAVELLDTIPGVARRTAQVIVSEIGVNMSRFPTADHLASWAGVAPGNNESAGKRLSGKTTKGNQALVSALTQAAHAASRVKNTYLNAQFHRLAGRRGKKKAIIAVAHSILIIAYHMIKNNEPYRDLGSDFFDKRNVQATTRRMVRRLEQLGYKVNLEILTPIAA

SEQ ID NO: 386748 - protein, 346 aa, unidentified
MEYIALDVHKHYTWARVENDKGDKLYECKLAHSRGTIENFTKKWNPGSPVAVETVGNWYWVVDEIEAGRGLPQLVNARLAKLMIGSVNKSDKLDAKGMNRLQRAGTLPVVWIPPANVRDARELPRTRMVLSDQRTQLKNRIHATLGKYGFKVEGVSDAFGKQGRKILDGLLAKLPVHTAQALGLMLDELDHVGVNLKRIEDQMRQAFAPCSETTLLRSLPGVGEMLAVVIFTEIGTIERFGRAEQLASYAGLVPRENSSGGKIRYGRVRKDVNLYLKWAYVEAANSAVLNRERCEYRHVSRLYDGIKARRGHGKAIVAVARHLAEASFWMLKKGKSYREPMSSTQG

SEQ ID NO: 386749 - protein, 407 aa, unidentified
MSQKESNPDRFVGLDVHKHYLIAAAVGADRNEVMSPSRVPLTRLDSWVRRTLTPQDAVVLEMTTNAFQLYDDLSPYVHSVTVVHPPHVALITRAQVKTDKIAARTLAKLHAVGLLPSIWIPSLEVRDHRALVAQRTKMVRLSTQAKNRLHAVLHRHHLLPPAGKLFEPDMHVWWLELEISALEQARVRCDLDTLIFAQGQMAHLEEAMAALAAQDERVVLLLQLPGVGLITALTLLAAIGDMSRFPTAKHLVGYSGLGASVHDSGLTRRTGRITKAGRRDIRAAMVEAAHTAVRTHPHWQAELDRLEPRLGKNKAIVAIARKLLVAVWHILTKDSPDRFADPERVARKLLKHAYCLGRAHRPQGQTAPQYVRQQLDRLGLGAELTAVSLSKTRRIALPPSQLGAEGH

SEQ ID NO: 386750 - protein, 404 aa, unidentified
MNNVAGIDVSKGKSMVSVLRPFGEVVAKPFSVGHTGSELKELADYLKSLDGETRVVMEHTGRYYEPVARFLYEEGIFVSAVNPKLIKDYGNNTLRKVKTDKADARKIARYGLDNWVELRQHTPMDTIRMQLKTLNRQQGLYSKTKTMMKNNLIALLDQTYPGINALFDSPVREDGSQKWVDFATAFWHVDCVRSMSLAAFTERYRKWCKRYGYNFSQSRTVEIHTQAQELIAMLPKDALTKTMIRQAIDALNAVSASLERLKAEMRTLAAQLPEYPIVMAMRGVGDSLGPQLMAEIGDVTRFTHRNAITAFAGVDPGADQSGTHEAKSTRASKSGPPELRKALFLVMDCLLKTMPQDDPVYRFMDKKRAEGKPYLVYMTAGANKFLRIYYGRVKEYLASLENAD

SEQ ID NO: 386751 - protein, 455 aa, unidentified
MTGEKSPGADALSMVNPGAAAIDIGSTMHMAAINPQADDNPVRAFGTFTGELHEMARWFKASGVTSVAMESTGVYWIPTYEVLEEHGFHVILVNARYAKNVPGRKTDVSDAAWLQRLHSYGLLRGSFRPEAGVATMRSYLRQRERLIEYAASHIQHMQKALMEMNVQLHHVVSDITGVTGMRIIRAIVAGERTPFTLAGMRDVRCHASVETICAALSGNWRDEHIFALCQSLALYDFYQTKILECDRKLEVALKALEIDKGHDIRGLPKVRTKRRQVNAPDFEVRSALYRVLGVDLTQIHGIGPSLALKLVGECGTDLAAWPSSKHFTSWLCLAPGNKISGGKLLSSKTRRSSSRAAALLRLAATTIGRSDTALGAFYRRLSARAGKAKAVTATARKIAVLFYNSLRYGMVYHDPGATQYEERYRNRVIGNLQRRAKAFGLSLQELPPEPEVAVS

SEQ ID NO: 386752 - protein, 367 aa, unidentified
MKKISTRAAAQSRDISQQKLTVGLDLGDRWSWYCVLDEAGKIRLEQRVSTSPKAMGEVFGGMPRSRIALEIGTHSPWISRLLRELGHEVIVANARKVRLIAESRKKDDRLDAQTLARLARIDPELLYPVKHRSLQAQADLTVIRARAGLVRARTALVNTVRGLAKSYGERLRGCNVRNMNPEKAEGLSPELQRALEPLLAAIESLSERIVEYNERIESLAQQSYPQVALLKQIKGVGTLIGLTFLLTLEDPHRFRKSRDVGCYLGLQPGRRNSGQSEPQMHISKEGDPYLRTLLVQGAQHILGPFGPDCDLRRWGLKLAERGGRNSKKRAIVATARKLAVLLHHLWVSGEVYEPLHNSGPTTVAAAA

SEQ ID NO: 386753 - protein, 338 aa, unidentified
MNITRIGIDLAKHVFQLHGVDRTGKVLVRKQLRRAQMLVYFSKLPPCLIGMEACGSGHYWARELGKLGHDVRMMAPQFVKPYVKSGKNDANDAEAICEAVSRPSMRFVSVKTVEQQVMQAEHRIRARLIRSRTALSNEIRGLLAELGIIIPTSMGKLRRAVPEILEDGENGLPGSFRHLLAQLGEELRTIDDNIVVYDARIAQAAREDQRIKRLLDVEGIGPVVASALVSAVGDARQFGKGRDMAAWLGLTPRQHSSGGKNRLGKISKRGDTYVRTLLIHGARAALNAAENKEDGRSRWVMGLVTRRNKNIATVALANKNARIAWSILSRGESYRVAA

SEQ ID NO: 386754 - protein, 399 aa, unidentified
MTPDDIDVWVGLDVGKSAHHAHALDHDGNTLYDKPLKQDEKAIRTMLGKLSKHGRVLLVVDQPNTIGSLPLTVARNMGIAVAYLPGTAMRRTAQLLPGDAKTDRRDAHVIAWAALKLPETLRDAGPDDETLAALKLLAGHDEDLAHESTRHVNRLRSLLLQTHPAFERALKGERITRDATLALLERYGGPMGVKRAGIEDVKDWAKSNGLRAGCIIDDMFKAIGEQTVTVPGTLMAETIIPSIAHDIKTIRDRRREVGRQVEKLLEDHPLLTVLTSMPGIGVRTASNILLGIGGDIANFKSSAHLAAYAGISPVTGQSGTSIKGERPSRRGNKRLKNALWQTAFVASTKHPPSVAYYKRKREQGKHHNAAIICLARRRCDVIYSMLKNGVLYQEPALVA

SEQ ID NO: 386755 - protein, 462 aa, unidentified
MKLYLGGDVSKGYADWVILSEKKQTVLENFQLDDTYAGHCKLYSMLEAYVEKHPGSEIYAAVESTGGYENNWLNTLKSYQKVFNLKVARINPAGVTFNRKAGMKRNVTDAISALSIAEFMIDHPENITYDQDDKWKSLCRHWNFVEMQKQQRVQTINQLETILYSANPTLMRFKKDNLPNWLLELIIQCPTAETLAKARPEKLAKIPYLSLARAKTLVAEAKQSIASAKDKNAEILVSQIARQIKSFDLNIKSQMQLIERDLTCPEIEILKTFKGIDTISAIGLLLEIETIERFPTVKGFSCYFGLHPKFKQSGDKVIGVRMSKQGSKNMRKILFNIAKGAITYNPLIMAVYEKKLSHGMKKMAAIGVCMHKILRIIYGMLKHKQEYNPLIDKLNCEKSKDKQQEKQQQENANIEKSRRYQEFDVKAPISRKQTKKRRKHDLSQCEITSQSTGSTCSSETKL

SEQ ID NO: 386756 - protein, 363 aa, unidentified
MTVYCGVDFHTRQQLIKWCDTTDGEIKEERLFHDSLDDVRKFYSRFTGEVLVGIEACGYSEWFERLLHDLGHEVWVGDATKIRRRARSRQKTDRRDAELLIDLLLKDEFPRINRLSFESLEVLRRLRYRHRLVQMRTRMRNSLQAIALGSGIVLKSKLRTKRGREKLNDLPLSPVLSEQRSGWLEMIEEVERRVAQVERELEKAAIGDEHVSRLRTHPGIGLLTGLALVHTLCPINRFANSRKVTAYVGLEPREHSSGERKRMGRISKAGSRVLRFLLVEAGIKATREDADLKKLYCRVMHRREQARAKVAVTRHVLVHAFIMLRDEIDYKEFKVRGAEMRSDARTVHRPNVPDHLIERPASA

SEQ ID NO: 386757 - protein, 346 aa, unidentified
MKITTIGIDLAKEVFQIHGVDEHGKAVLRKQLKRHELTKFFANSAPTLIGMEACGSAHHWARKLTGFGHSVKLMAPQFVKPYVKTNKNDVADAEAICEAVGRPNMRYVTVKNVEQQAILSVHRARQGFVKARTAQGNQIRGLLSEFGIVIPQGIQSIIKRIPEILEDGDSGLPGTMRRLIARLTDNLKEMDRHVAELEAQIMLWHKQSEASRKLAEIPGLGPITASAIVSTVGDAKEFRNGRQLAAWLGLVPKQNSSGGKQMLLGISKRGDSYLRTLLIHGARAVIQYAEKNKPAESWLRKLMARRNKNVAAVALANKNARIIWALLAKDSMFRPDYASTALAVSA

SEQ ID NO: 386758 - protein, 400 aa, unidentified
MNPVVGLDVAKGESQVQAFLDQSKPYGKSFSMKHIKEELDHFLEFLKEIEEVTGQMPMVILESTGHYHSPVIQYLEEQGIPYILLNPIISYQAKKSSLRKVKTDAIDAYQLCVLYYKEDLEPHKIRGIQLLDLRNLSRQQEIVTNMYVEAKLQFHTILDQVFPEYRKVFGDLYSRVSLLILKEYPTSEAVLTAGESKLAESVIEFCPSRSGQWAWEKAKKIMDSASRNPFQINVYQSHVINLRMYIELLFHYQGHLSELEDRIVALANELEEYKIIQSIPGIGEKIAATIISEIGEIDRFNHPKKLVAFAGVDPSVHSSGKFTATINRITKRGSSRLRHSLYLAVLCGIRSSRNKKLKAFFDKKKSEGKPAKVAIVACMNKLLHWVYALLKRKEAFLDLS

SEQ ID NO: 386759 - protein, 320 aa, unidentified
MSQNTSAIMNDKQTAVYAGLDIAKVSLQLHLQGKSYDLPNTIDGHAQLIKRLAAIPGVHVVCEATGGYERAVVGSLHAAILPVSVLNPARVRQFARASGELAKTDPIDAAMLTAFGQAFAPTPTPPRSATELKLTALVTRRMQLLELRVAEAQRADTCIDLALRKLFTLWLAQMEKQIAKVEALIEALLQEQAPLANQVQRLDNIMGVGRLTAVMVLATMPELGTLNRRQAAALAGLCPYNRDSGQWAGKRCISGGRAEVRRALYMAALSASRTNHLLKPFYNRLVAAGKPAKVALTAVMRKLIVLMNHLLKNPNFSLAH

SEQ ID NO: 386760 - protein, 429 aa, unidentified
MKKSFRSRPVLAKGRAVVGIDVGKRKHAATALTPQGEVIARLASFPNTRQGVDQLEREVLRKAGGPCKVLVGMEATGHYWMCLYHELSRRGYACVVVNPLQTNARSSAHIRKTRTDKIDSLTIARLILSGEARATRVPDPKTTELRLLVRHHRRLIHAAGDMERYAHTLVDRVFPEYADVFCKVFLSSSQKLIREIGLAPRKLVQRADEVRELLRRASRGRITPQTIDQLLEAAKESIGTRQAEDLAESQLRSIFDYLETLREQITHIEKQLDERAEQLDSPLFSLGLTGPLVAAIHAETDPIGDFTRPEQYVAYTGLDPSLHDSGDTIQWRGRISKRGSPLLRHALYLAAFVVYRRHDYFRRIYRKHRSRGKKHRNALVIVARRLARVIWRLLTDGRPFTARPPKSACPIAKPRKSAKSTRKALYARA

SEQ ID NO: 386761 - protein, 317 aa, unidentified
MSNPESFVGIDVAKGWLDVAWLTGETLRIDHAEKAIAVLVERLRSQPPALVVMEATGGLETGVASALAAAGLAVAVVNPRQVRDYAKACGRLAKTDRIDALILAAFAAAIRPQVRELPDEHTRALGDLLARRRQLVEMRVQENLRLQRASNVQRASLREHIVWLDERIGRLDIDLTHALRSSPAWRDKDDLLKPIPGVGSLTRATMLALLPQLGTLSRRQIAALVGVAPFNRDSGQHQGGRVIWGGRAQVRRTLYMAAVAAMRCNPVIRSFYQHLRSQGKPAKVALTACMRKLLVTMNAMLKHHSAWSNRLDTQHSC

SEQ ID NO: 386762 - protein, 315 aa, unidentified
MEPKVAVAGIDVSKENLDLFVIPLGVSQRFVNDESGCNQLVKVLAELAPSRVIFESTGGLEMLAAGIASAASLPVVIVNPRQIRDFAKACGLLAKTDKLDAKVIALFGQKIEPDIRPLKDEPAQELSALISRRRQLVEMLTAEKNRLSAAPKSVRDGIIRHIEWLEEQIRSYDDDISRFIQSSPMWKAKGEILTSVKGIGPVTAATLLAALPELGSVTRQQISALVGLCPYNRDSGRVKGKRSIWGGRAAVRCVLYMAALAAVRFNPTIKVFYDRLRNAGKVHKVAITATMRKLLVILNAMLRDNQPWSDSHAFA

SEQ ID NO: 386763 - protein, 394 aa, unidentified
MTAAHRQSTPPACVLYVAFELGWENWKLAFATAAADNPRLRTVRDRDLTALRREIAQAKAKFHLPADAPVVCCYEAGRDGHWLHRYLTAEGFRCHEVDSSSIEVNRKQRRAKTDALDAAKLVSMLIRFENGEKRVWRTVRVPSEADEARRHLHRELEDWLDQRRQHNNRIKGLLAGQGLEATVDKTFPQQLDALRCWNGQPVSEELRARLVRQFEGWQFADRQVKDLENQRARSIRTGTDSCLDTVRQLLRLKGIGAASAWLFVMEVFAWRDITNRRQMGSIAGLTPTPYTSSTTSREQGISKAGNRRLRAMAVEIAWMWVLHQPQSELTKWFLRRFGTGSRLRKIGIVAVARKLLVALWRYLKEGTVPPGAVLVDWKAKMNSHRKPVAPAAAA

SEQ ID NO: 386764 - protein, 436 aa, unidentified
MRGCRCSMIMGFTKPIEHFNLQRKKVIFMNPLYVGIDVSSKSNVVYLMLPNGDKHSNFSVANSHEGSTQLVKRILSALTSHSLDTVLIGLEATSVYGDNLVYFLREDATLAPFNRKIHVLNPKQVKKFHDAYNDLPKNDYVDSFVIADCLRFGRINKEVYMGDYRYKALQNLTRARFFAVQNLVKEKQRFMNVLFKKYSTMTQEKVFSDTFSPTALAVYDEFESAEALANMDLHELTDFIIEKGKNRFPDPDAVAKAIQKAARNSYRLPKTVNDSVNQVLSISITSMKALESQIKEFDKAIKAQMELLPNVLISIPGIGPVYSAGIMAEIGDINRFNSQAALAKYAGLAWKQHQSGDFESEVTRLIPSGNRFLKYYLCEAAFSLVRCDKEYSDFYHLKYKEVNRCQHKRALALTARKFVRLVFRLLKDNRLYCPAK

SEQ ID NO: 386765 - protein, 478 aa, unidentified
MKADRRWHTRKEKKEWARRLQSNDPGLDVIHPQAAGIDVGNASHYVAVRPDRDEEPVRQFECFTADLHRLADWLKSCGVRTVAMQSTGVYRIPLYDILEKRGFEVYLVNARHTKNLPGRKSDVQECQWLLKLHTYGLLNNSFQPASQLRVLRTYWRQRAEHVQAAASCIQRMQKALTQMNVQLANVISDLGGLTGQLIVRAIVRGERDPQKLAALRDRRIQASPEEVAKSLEGNWRPELLFLVKQEVDTYDTYQKRIAECDEQLQQQLASLASVAPGVATPPVTQLQGDEQPKKSKAKRRKLAKNAPQFNLQQELQRVAGVDLTRIDSIDVMVAQTILAEVGLDMGRWETEGNFVSWLGLCPDNRITGNKVVGRGTRHVVNRAATSLRMAANALLRSQTYLGAQYRRLRTKLGAPKAITAMAHRIARLVYRMLKYGQRYVDKGAEYYEQRFRNQQLQFLRKKAAQLGFQLTEHEARTA

SEQ ID NO: 386766 - protein, 664 aa, unidentified
MSRSCQNRRRAAARTATNQDAGGAVHAAAMPTEGPVPSTTDPKTSRSRAAPGDTPAATPVAIGVGIDTSRYGHHAIFLDADLQPAAPELKFVESAQGYQQLQSRLAALRHKHGPVHFHFRLDVAGSYADNLLAFLHGLPEPRTISCGDPQRNKNYRAAIFGHKKSDATEANATARYALTEKPKPMPVVAPAVQQLCQIASRLESQARHCTRVVNQLHNLLGRTFPELALLVKDLSAGWVLTLLDRYPTAAKLAAARSSSLEKIPYLPHEHIASLLEQARTSIASLTGPVTEELVRELVGQLQDAHVRHQALEKLLVSAYRQLPEPNHLDSIIGFGEVTAAILTAKMVTTGRFVEPAKLTGYFGIYPVEASSGIDRDGQSRLPLRMVMSRRGNDLVRRYLWMAALSAAQHNPAVRPLYQRVRAKHPDQPGIAIGHAMRKLLHLALAVWQTGKPFDPEHYPWDQAAHLPGSQQPATAEPVAPSPTHEHTGPHAQAAGHKNPVTTPVRSVVTAACVPTSVTEAASAGNDSTRSVASEHPEATACDMPMSQDAQAEATALAWIDFAHLKTQLPLQRVLEHLNLLTDLRGRSRQRKGPCPVHAASGKSRTFSVNLDKNLFQCFDPHCGSKGDVIDLWAALHKLSLRDAAADLIQTFNLEPASRTEKRHG

SEQ ID NO: 386767 - protein, 391 aa, unidentified
MIYVGIDVAKDKHDCFITNSDGEVLFKPFTITNNLDGFNELYQKIESVTEDATKVKVGLEATGHYSYNLLGYLIDKGLAAYVINPLHTNLYRKSLSLRQTKTDKVDARTIASMLMSDVNLKSYSDISYHNEELKSLTRYRFDKVKERAKLKTSVSRLVCILFPELEKLVPTLHITSVYALLSEFPGAKHIATAHLTRLTNLLSEASKGRYGKDTAITFRDAARASIGSNMPAKSLELKHTIKLIQELDSEIDEIEKEIKIIMDEINSPILSIPGINYRMGAMIIAEIGDFNRFDSPDKILAYAGFSPSTYQSGQLDGAYAHMEKRGSRYLRYALYNATKYVCHWDPTFAAYLAKKRAEGKHYNVAISHAVKKLVRVIYHLEKTKQQYIKAA

SEQ ID NO: 386768 - protein, 340 aa, unidentified
MDATTYGLDVAKRVFQMYWVEVETGEIVNRRFGRDELIRFLAQRPPGRIALEACGSAHWWARKIKALGHEAVLLHAKFIRPFVQTNKTDAADARSTWTAVQQPGMRTVAAKTEDQQAMLSLHRMRALLVKFRTMQVNQLRGLLYEFGVTFRAGRAAGLAEIQARTAELEGALPGTMMCCLQDQLRRIDELQRDIDLLEKRIGVWQKQDAACHAITAVPGIGRLTATALVATMGDAKSFRSGREFAAFLGLVPRQSGTGGKVRLGPMSKRGDPYLRTLLIHGARSVMYNAKVPTPWQTDIQARRPSNVAAVALASKIARTAWAILARGQEYQRNYVSVRPA

SEQ ID NO: 386769 - protein, 426 aa, unidentified
MERETGRVVADVTIEAGEDGHRRLLDVARRKAAERAWAIEDCRNVTGALERFLLRAGERVIRVHPKLMAGERKVARQPGKSDVIDATAVARAAIREDDLPVAYLAGPEREIAWLVDHRAQLVAERTRVACRLRWVLHDLDPGLQPPKRGLNDAAALERLDRQLAGLDPIAQVRIGRRLVERLGQLNLQISGLARELAPLVRRRHALLLAVPGCGVITAARLIAEIANVGRFRSDAKLASYAGVAPIPASSGLQQRHRLNRAGNRQLNAALHAIALTQARIHAPARDYLARRRSDGKTPKEGLRALKRHLARHIYRLFTTIPQPRRAAAAVRRHRAVGTLLDIGADSESALPAAGAQRLGSRWSPSASSRPDRPATTSTRPSRTRARPPRSRRALRTTTSEGARPPAVGSAGVPPRSHSTGSWPATS

SEQ ID NO: 386770 - protein, 341 aa, unidentified
MQTTTIGLDIAKNVFQVHGIDAAEKVVVRKQLRRGQVMKFFASLQPCLVGMEACATAHYWARELTKLGHEVRLMPARDVKAYVKRNKNDAADAEAICEAVRRPTMRFVRAKSAEQQGALMQHRTRDVLIRQRTQVINALRAHLAELGIVAAQGHEGLKQLLKIIADEKDARLPIDARASLIVLAAQIQALHTMIGSIERRLLLQHRANEASQRLESVPGIGTIGASAIAATVTDPNAFRSGRDFAAWIGLVPRQDSTGGKQKLGPISKQGDRYLRHILVVGAHSVLRLARQNPEKYPWLTQLLARRPFKVVAIALANKMARVAWALLARGGTYRVPALAAA

SEQ ID NO: 386771 - protein, 351 aa, unidentified
MEYIAFDSHKRYTLASVEKPSGGQSCELRLAHQPGSIRQFLSRWTPGSPVAVETIGNWYWIVDEIEQAGMVPRLVHARKAKLMMAMVNKTDKLDARGLNRLQRCGTLPTVWIPSRELRDQRELPRTRMVFSRTRTRLKNRIHATLAKYGLSIPQVADLFGKKGRELLPQVLAQLPPHTLFSTEQLLAQLDTVEQQIQQFERRIKEVFAPSVELARVMSLPAVGFILGTVILLEVGKVDRFPSAAHLASYAGTTPRVHASGGKMHYGQLRPDVNRYLKWAFLEAANVICLNHRHLPQRHVHRLYQRVASRKGYQKAIGAVARHLAEATYWVLKKEEAYREPQASKKVSSTKG

SEQ ID NO: 386772 - protein, 353 aa, unidentified
MSQQNARVAVVGIDIGKNSFHIVGQDGRGEIVLRQKWSRSQVEARFANMSPCLIGMEACVGAHHLSRRLRALGHDARLMPAKYVRPYSKGQKNDFRDAEAIAEAVQRPTMKFVATKTADQLDLQALHRVRERLVSQRTGIINQIRAFLLERSIAVRQGIRFLRAELPRILAMPPDVLSPRMVRIIEDLACDWRRLDERVEGLSNEIETIARQDAGCERLMSVPGIGPIISSAMVAAIGAGDVFTKGRDFAAWLGLVPKQISTGDRTILGKVSRRGNRYLRVLFVQAAWVVLIKPKIWERHGLKPWLEAARKRLHHNVLAIALANKLARIAWSVLARGRAFEVRKINQAAPQPT

SEQ ID NO: 386773 - protein, 321 aa, unidentified
MNKYKEIYGIDISKDVFDVYGSQSGHNQFKNDAKGFVSFMKYLPKDVLVVMEATGYYHYRLAQFLYKSGVSVSVVNPLSVKRFIQMKLAKVKTDKSDAKAISEYGSMNDVPLYTALTDVQSECLQLFRLLDSYIKHRTATKNKLKGEEVLGIPSKFVYRSLNRNLKHLNKEVLTLESRLLELVKQDQQHQLTLLKSIPGMGVKTALFLIVVTDGFKKFETASQLCSYVGITPTIRESGSSVRGRSRISKVGNKKLRNLLFLCAFSACKYNKACKAIYERIVNKGKSKKLALIAVANKLLKQAFAIAKSGIPYDENYVSKLT

SEQ ID NO: 386774 - protein, 328 aa, unidentified
MLDVGVDLHKRFSQVGLLDEYGEIQQRRVEHVGKEMEDFLRQLQPGSRIAVEATRSWWWFVDLAEGLGHQVVMSHPKATKAIAHARLKNDKVDAAMLACLLRANLLPTVWIPPAPLRHAKELLRHRFLLMRFRTALRNQIGALLSKRNLQPPTRSTFTRAGRTYLEGLTLKPEAMHIRENGLSLLHQLDRMIGQLDRDLEQQMKKNPLAIRLMTAPGVGAQTAFAFITFVGEIERFRSAKHLASYFGLAPRVRSSGIEAAGQAARQPGPLREYYRRMVYRKGKSKARVALAHKLIGVLFHLWKEELTYHEFLCLGAAKRVSPATSVVN

SEQ ID NO: 386775 - protein, 350 aa, unidentified
MRRPKEKLIAGIDLHSNNLVIGVINQDGKRITHRKLDCKLAEVEEFLRPLKPQLQSMAVESTFNWYWLVDGLQAAGYPIDLANPARIEQYSGIKHADDKHDAFHLAELQRLKILPKGHIYDAQLRPVRDLLRRRVMLVQHRTALMLSFKSLYNRTTGEQMDLARLKGMSPQEGPKLYQHPANQLIAQIQLEQIEALDENTRRLEKAVLSCAREIPLYQKLLTLPGVGRILGMTITLEVGDIRRFKTDGNFASYCRAVDSRRLSNGKQKGQNNQKCGNKYLSWAFVEAANFAKRSDENCRRWYDRKKAKTSTVLATKALACKLAKAAWHIMAKQTNYDATRMFPELATRKK

SEQ ID NO: 386776 - protein, 369 aa, unidentified
MNQNILFIGMDVHKDSIEIAIADGASLEVRRYGKIGGTRDAVRKTLRKLVSLGKPLHFCYEAGPCGYELHRYIVSEGHTCWVVAPSLIPKKAGDKVKTDKRDAMQLARLFRAGELTPVYVPDREDEAIRDLSRAREDAMLVQKAARQRLKSFLLRHDIRYQGKTAWNESHLRWLADEVSCPSPAQQIVFQEYVNAVTEADHRLQRLNEQIEVFARQWRLYPVVEALMSMRGVKITVAVTVVSELGDLSRFENPKQLMSFLGLTPSEYSSGLRQSRGRITKTGNGHVRRILIEAAWCYRFPAKVSREMQKRQETLPLSIRDIAWRAQLRLTQRYRYMQQKGKLHNVTVVALARELVGFMWAIAKEVNYPR

SEQ ID NO: 386777 - protein, 465 aa, unidentified
MNVVLGVDLACRAAHQASLARADGTFLWSGRKFFTTPADLEALWVRIDLQPGQVLTVVMEPTRNAWAPVASWFRRRGARIVMVPTTQSADLRAYYSKHTKNDQLDSKLLARLPLLHPEGLREQTGDGPADPLRRAVKVRSTMVKRRTAVFSRLDAHLELLGPAWYDALGSRYGKAALAVLARYADPNALLRLGSARLTRFLIRYSRGAWREEHAGRLLAAARQSLELWGADGIDFAELAADIAVEAEQAQVITEQIEDLDERIASLYELADPKGIISSAPGVGPVIAAVIAGRIGDPHRFSSLAAIRAYSGLVPKVTQSGLSSSQHGLTKAGDVLLREAVFAAADGARKTDPRLAAKYVRLMATDRHHDSALCHIATALLTRIATCWRNGTPYVITDVDGTPITAEEGRRIVQDHHQVDPKMRNPAAQRRVSQRRKGRADRERKESQSAPASRPAANTLKPTTAA

SEQ ID NO: 386778 - protein, 354 aa, unidentified
MSNNAQTTQAVIVIGGIDAHADTHHVVALDTTGKILGDHPFPASSRGYRDALDWLAKFGLIDKIGVESTGSYAAGITRFLLESGVDVVEVNQPHPHLRARRGKDDSIDAEAAARKALSGQATAIPKVTTGVVESFRVLRLARESAVRSRTRTIVQLRSLLVTAPARLREQLTERSAAVLVARCAGLRPDLDRLDDPLQATKRALRAMARRIQMLDEEINETDASLKQLVERTAPTLTSKLAIGPGHAAQLLITAGQNIERLHSEAAFARLCGVAPIPVSSGKTHRMRLHRGGDRQANAALHMIAVCRMRYHQPTIDYVKRRLSEGLSKKDVLRCLKRFIAREVYHDLKTDLGLT

SEQ ID NO: 386779 - protein, 398 aa, unidentified
MIGVDPHKGSHTAVAIDGSERQLARLRVRASTAQAGKLVEWAAAWPDRTWAVEGAGGLGHLLARQLVAAGERVLDIQPKLGSKVRLLSSGPANKNDPSDALSVAVAGLRSPRRREVRADGPATALKLWAKRHRDLARLRNQAACRLHSLLASLVPGGIADEITPAQASRLLAGIEPSGPAAQARHQLAAEHVADLRHLDAQLRQTRARLAGAVKACGTSLTEISGVGPVIAALVIGDAEDINRFATRDAFAACDGTAPIEVSSGNRVTRRLSLRGNRRLNHAIHMVAVTQIRHRHSDGRACYDKKIAEGKTPKEALRCLKRRISNAIYARLRADARNAASASAAAAGPGGQPGNDSASSAASSHPARQLFGPATPEPEPQPTTPASHLPQQKKPRTRS

SEQ ID NO: 386780 - protein, 337 aa, unidentified
MKKNNSNSQTNSDRAGKPGKARGPVQRDAKEVMAELVARLSQKLEPRSAAARAGEGRQQDLPGPNRDRLTVGVDLGDKWSNFCIVGLDGEKLTEGELRTTQEDFAEFFKLMAAARVVMEVGTHSAWARDVVAGCGHEVLVANPRQMEGPKRRKRKNDRIDAHKLARIGRMDPQSLFPVEHRSVKVRQDLVAVRARDALVAARTQLINTTRGLVKSMGGRLPKCSSPSFPHKVEESLPAEVREVLLPLVRLVETLSDGIAAYDEKMEKLGSEKYPQTKLLRQVKGVGPITALAYILTLENPERFAQSRDVGPYLGLVPKQEDSVGTASRSCESPRWET

SEQ ID NO: 386781 - protein, 371 aa, unidentified
MSNEENTIYVGMDVHKAAINVAVAVRGKREFEAEWQLANEPRAVKQMMRKLARMTRGTVKAAYEAGPCGYTLQRQMREQGVDCVVVAPSLIPVKPGERVKTDRRDARKLAMMLQAGLLTEVHPPTAEDEAVRDLTRAREDTKQDQMRARHRLAKLLLRYGYIFNECKNWTKKHREWLRQVRFEDKILQRVFEGYLLVVEQVEERLKSVNGQLEEVAQSARYREQVGWLRCLRGVDTVTAMTVLAELHDFRRFTSPRELMSFLGLTPSEHTSSSHVRRGSITKAGNSHVRRLLVEAAWNYRHRPSVSIYMKRRRKGQPAKVLAIADRAQERLYRRYYKLSEGYRKPHNVVAVAVARELVGFIWAVLQHREAA

SEQ ID NO: 386782 - protein, 369 aa, unidentified
MQESTMFIGLDVHKESIDVALAPSGLGEVRSYGRIAGDLEAVDRTIGRLGISRARLNIVYEAGPCGYALYRHLKKKGIRCSVVAPSMIPKRSGDRIKTDRRDAVNLARLHRAGELTTVFVPGPEDEAVRDLSRSREDSVLASKRARQQLGALLLRQNIRYTGSKAWTQAHQRWLGRVAMPMPVQQIVFQEYVHAVDEAHQRIERITEQLRQSVQSWRMAPVVQAFQALRGVSLVAAASILAELGDLTRFDDPRCLMAFVGLVPSQYSSGPRQRLGAITKTGNSHARRMLVEAAWAYRFPARVSRGLRDRQENLDQNVCEIAWKAQVRLCGKYRRLAAKGKIKQVITTAIARELLGFMWAIAKEVKPLAA

SEQ ID NO: 386783 - protein, 340 aa, unidentified
MNATTYGLDVAKQIFQMYWVDAQTGEIANRRFRRDELIAFLAQRPAGRVALEACGSAHWWARKIKALGHEVVLLHAKFIRPFVQTNKTDAADARAIWTAVQQPGMRTVAAKTEDQQAMLGLHRMRSLLIKFRTMQVNQLRGLLFEFGVSFRTGRVAGLNEIRARMEELEDALPGVMISSLQDQLRRIDGIEQDIDQLEKQINGWYKQEAACQAIAEVPGIGKLTATALIATIGDAKTFKSGREFASFLGLVPRQSGTGGKIWLGTISKRGDPYMRTLLIHGARSVMCHTKVPTAWQKGIQERRAPNVVAVALANKMARTAWAILAHSTAYEKHHVSVRPA

SEQ ID NO: 386784 - protein, 354 aa, unidentified
MDHFAGLDVSVKETSVCIVDDTGRIVREAKVASEPEALLQVLTTPAYHFKRIGLEAGPLSQWLFSALAGAGLPVICVETRHMRAVLQARINKTDRNDARGIAQMMRARLYRPVHVKTLRSQKLRMLLTHRKLLQSQAIAIENDLRATLRNFGLKVGMVGTVKFEARIKELVENLPDLAVLVEPLLIVRRVLRKQIGILHRRLLTIVRDDDVCRRLMTVPGVGPVVALTYRVTVDVPARFRNSKAVGAVFGLTPSKYQSGESSRTGGISRCGDEMMRVMLYEAAQSMLVRSTKWSWLKAWAMKIARRRGMKKAIVALARRLAVIMHRIWVDGTEFRWTREVVAALEPWGIKCDRR

SEQ ID NO: 386785 - protein, 343 aa, unidentified
MQIRTIGVDLAKNVFQVHGVDSAGKVVITRQLRRKQVIEFFSKIPPCLVGMEACGTAHHWAREVSKLGHTVRLMPPSYVKGYVKRSKNDAADAAAICEAVTRPSMRFVAVKSTDQQASLMLHRTRDLLIRQRTQLINALRAHLAEFGLVAETGREGVAQLAALITDESDREALPFAMKQALQAIVDQLAALELQVGTLDRAIHAHHRANDISSRLETVPGIGVIGATAIASTVTDPSNFKSGRDFAAWIGLVPRQHSTGGKERLGGISKQGDRYLRRLLVVGATAVVRHARQHPQKHPWVMRLLAKKPAKLVAVAVANKMARIAWAIMAKGGYYRAPELAAAA

SEQ ID NO: 386786 - protein, 352 aa, unidentified
MKHFIGCDVHTRNQVVAWIEEETGEIKKRRLEHEGAEVKEFYAQFPRGTVVGIEATFPAHWFERLMGELGHELWVGDAARIRASEVRLQKTDARDAEHMLDLLRTDRFPRIWVPSLEERDLRQLLVHRMKQVRARTQVKNQLHALAISQGVCRKSKLWSAKGRKELESLALLPWAARRRKELLETLDRLDEQVRELDRAVEEAGRERQEVALLRTHPGVGMVVGLAFALTVGPVERFSNSRKLVSYWGLNPRENSSGGRQRLGSISKQGNPMMRWLLVEAAQTAARLDPQLGRIYQRLKKKKTSGVAKVAVARRLAVRLFWMLRTRNNYAQLVQMSGSPSSAVVPPTAESKV

SEQ ID NO: 386787 - protein, 345 aa, unidentified
MKIVGCDLHTRYQQIAMLEEETGELVERRLEHESGEARAFYAALSAPVRVGIEATGHTRWFERMLGELGHELWIGDAAQIRASMVRKQKTDARDAAHLLDLLLSDRFPRIWRPTLEERDLRQLVWHRQKLVWMRNAVGNQLHALAMGEGVCRKKKLFTKKGRVELESLKLGPWASHRRQELLKMLDALDPSLQQLDRAVQQQAEQNAEAVRLMTHPGVGPVTSLAFVLTIGPVGRFERSKQVVSYLGLNPREHSSGGRQRLGAISKQGNPMMRSLLVEAGHTAARLDAELRQDYQRLKLRRGSGVAKVAMARKLAVRMYWMLRNQASYAQLVRMQGSPWATLVKE

SEQ ID NO: 386788 - protein, 385 aa, unidentified
MSKPYDLSKPLVALDHDSTLVCVIEMSGSSWLVAATVPGVSRRPLQKLPVDPARLLAQVERWRQEAARAGRTITRTVVAYESGRDGFWLARLLHKHGIEVYVIHASSVAVSREQRRAKTDRLDTEMLMRALLGWLRSEPGHCRMVAIPTVAQEDARRPGREREGLVAERTRLTNTIKAELALWGIQGFKPGLKKAAEHLEALRTVEGEPLPPNTLARLHRLLKRRTLISDQIKAIELAAAQAIERDPTGPNALVLLLAQIKGIGLETAQMLVHEVLSRTLRDRRAVARYAGLTGTPDESGSKRREKGIGKAGNPRVRCGLIQLAWRFLMFQPDAALVRWYRERTAGGKGAIKKTMIVALARKLLIALWSYATAGVMPEGVVLKAV

SEQ ID NO: 386789 - protein, 433 aa, unidentified
MNSTCPFDQAIGLDRSDRKADLYLVHTASGQTERQTIGTSPEALHDWLLRLRQKHPEARVAICLEQPAASLILFLEAYLWITLYAINPITLQKFREAFVTSRAKDDGKDAQYLAELLHTHHGKLRPWQPDDAQTRRLQQLVSHRRAVVDERTGLSNRLKALLKQYFPQALDLCGEDLWRPLATAFLLKWPTLQSLQKAKPQAVNSFYYLHGSRSQKLITERLDQIAKAVVLTDEAAVLESHTLRVQLICRQLQLLQKSIAEFDEKIAAAFKAHEDHDLFASLPGAGPVLAPRLLASMGSERERYPHARNLQRFSGIAPITKQSGASRYIHRRYRCPVFCKQTFHEYAKESILFSRWAAAFYLQQRQKGCGHHTAVRALAYKWQRIIWKCWSTRTPYKEETYEAALKNNGSPLVALFDHIEIGKSPMKNPAKKS

SEQ ID NO: 386790 - protein, 460 aa, unidentified
MRKRSQSLENLAVIHPNAAGLDIGAREIWACVPPGRDPESVKRFSTFTPDLQVLVDWVVACGADTVAMESTGVYWIPVFEMLEARGLKVYLVNAWHLKHVPGRKSDYLDCQWIQKLHSLGLLNGSFRPDGEMVALRGYLRHRAQLLEHRAPHVLHMQKALHQMNLQLHHVLSDVTGVTGLAILRALVAGERDPVKLAQWRNPGCKSSEDTIAKALTGDWKAEQLFVLKQSLEVYDFYTRQVAECDAEIERQSAAMKPRWEGVKELPDVPPLKPGSKSKNQPKLNVRAAIIRLTGVDLVAVEGISASLAQTILSEIGTDMSKWLNDKHFGSWLGLAPHNDISGGKVLRSRTLKTDNRAGQAFRQAAASVTRSNSAFGAFYRRKRAQLGPMQALVATAHKIARTVYYMLKNRVQYVDIGAEAYEQKQREREIIYLKKKAAKLGFDLSPHNPAKAVAQAVVMV

SEQ ID NO: 386791 - protein, 317 aa, unidentified
MQTFLNIGVDVAKDAVVVACAAQSFPVHSVANQRVPLLTWLKSLPAGSRIGLESTGCYHELLADLAYAQGYTVFLLNPLDTRHYAKAMGNRAKTDRVDAELIARLIAQEHARLRSYTPPTASQRKLDRLIRRRARIVRIKSSLKLTMLNLGGFAAELKAVLLKLDALIASIDAAMSAIAATSPQHVEAQQQLQTIVGIGPVAGMALTNTLERVPFRCADAFVAFIGYDPRANDSGHKTGRRRLSKRGPGELRRLLFNAAMSAAKTKVWKPIYEHYRSQGWSTTAALVIIARKIARTAWSIHHYHSTFNPERITKCLT

SEQ ID NO: 386792 - protein, 434 aa, unidentified
MSSLEKIIKNCAGIDIGSEKVFVSIEGEDVRSFRTFTRTYKELGFYMREHGITHVAMEATGIYWITLYDILEAMGFDVCLVNPADSKNLPGRKTDVQDCQWIQQLFSYGLLRKSFVPEDIVRKLRVYTRMREDKLQMASSHILHMQKALVQMNIRLPEVLSQTHGASGMAMIEAILEGERDAQVLLSYCTTDLRKRKAADILLALEGNYKEEYIFELQQAYDGYLFYLNQVQLCDKETEKILIEFKKKANNDYKDDNRVKPIRHNKPDIKNLHDLLMGIHGANPTVLPGLTDYSLMRLTAELGNNIEQWPNVKAFVSWLGLAPGKNQSGKMNKRSKKKAMTRSGQIFKQAAQSLLVSKQPGLGAFARKLKARRGAAIAIKATARKLAELYYKTFSNGMQYVEKGVEIYLQKQKEQQIKFLTKKAIELNMQLIDI

SEQ ID NO: 386793 - protein, 334 aa, unidentified
MSIMSMHLQGGVAKDAARPNAGIDVSKEHLDVCCGHDKRRVSNDVRGWDELAAMLRAAGVDLVVVEATGGYERGLVCALQGAELCVARVNPRQARDFAKSMGVLAKTDAVDARTLRDFADVLARHAQRQRYITPMLEQARRDLSELMTRRRQLVDMRVAEHNRLEHAGARAARSIHSVLKLLDKQIVALDRQIDDHMDRHFKSQRALLDSVKGVGPVTVLTLTAALPELGRLGRRQIAKLVGLAPLADDSGRRQGKRRTWGGRSNVRAVLYMAAIVAMRHNPVIREFYERLLRAGKPKKVAIVACMRKLLTILNAMLRDQSMWNAAHHLSSPSA

SEQ ID NO: 386794 - protein, 448 aa, unidentified
MSKAKRKEAEVKRISQLPVLNSLVAGIDVSDTEMMVAFPINPEQLAVRSFECYTRDLHAIAKCLKEYGITSVAMESTGVYWVSLFLLLQEEGFEVCLVNGKHVKNVTGRKDDQSDAEWIQKLHSCGLLQASFQPDNLTRTLRELVRHRKNLVRTAATYLNRMQKALELMNIKLHTLISDIDGKTGTLIIEAILAGERDPEILADLRDSRIKASREDIIKSLEGYWTTEQLFVLRQCYETYRFHNQKITECDQQIEQQLIVQMASRHDGVVPPIAKVNRKRSRKRPLPFDLTSDLKEILGVNVTEVCGISEVSALSIYAEVGQDMSKWKTARHFTSWLGLTPNTKISGGKVISSRIRKKKHHAGQAFRVAAQSLDHTKGPLGDHYRRIKARAGAPKAVVALARKLAIIYYQMVRNQEAFNPQALLDYQKIYKYKKINQLKQRIAKLEAA

SEQ ID NO: 386795 - protein, 450 aa, unidentified
MPQRYYLSLDIGYKEHVAVVIDLQTFVRGDDRWKRARCLHFPSTRVGLKKFQKYVDRFCPDPAAFLGLCEPTGGFYGATVLQYLLDGGYQMLLVENATTRHMREKIFPNLPKTDEMDARVMARIGYLHEAVGEEFTLRPLELPDPDDADLMALCRDSWKLSTLITRARNQFTQLIAVTFPELKTFFTSSVSTVVPVSLITAYPTPALLAEAPAEEVHQVLWEARDYQHARRVDGLQALARNSSGLLPDPGRVWRLNWLTCFLLTNFHHQAALDKRIKELLEQREDYELIVHVPYSGPATLGVILAVTGDVGRFSNYRQYVAYTGYFAGLEKSQTIDRTRMSKRGNRDLKRALFQIAAPLVWFDQGDNPYKALYERKMAEGRAWYEAMPFVCAALARHIYHCLKFKDPYDVERAFRGSSPIPASEQALVDLRADLDERFEVMDVHLCQIEG

SEQ ID NO: 386796 - protein, 343 aa, unidentified
MQTITTIGLDIAKSVFQVHGVDAEGNVILRRQLKRRYVLAFFQKLPPCLVGIEACASSHHWSSELQALGHTVRLMPPAYVKPYVKRHKNDATDAEAICEAATRPNMRFVATKTPEQQSCLTLHRTRHLFIRQQTSVINAIRAHLAEFGIVAPVGRNGVEQLLGIVAEASDKRLPEVARACVTALGAQLRTLKAQILQFDRMIMAWHRSSEASRRLDDIPGVGPVLATALVASVADPKVFRSGRDFSAWIGLVPKQNSSGGKDRLGSISKRGDRYLRSLFTTGALAVIRYAKIHGTKHRPWLTALLARRPTKVAAIALANKIARMAWAIMAKGERYKEPAALAA

SEQ ID NO: 386797 - protein, 341 aa, unidentified
MGQASTIGLDIAKWVFQAHGADATGRVVFRKRLVRAKVLEFFAGQPPCLVALEACGGAHYWARELGKLGHTVRLIPPAYVKPFVKRQKNDVADAEAICEAAQRPGMRFVPVKDEAQQANTVVFRARDLLVRQRTQCINALRGHLAEYGHVVPQGPAHVDSLVALVEDPKSSVPESARGILQVLIRMLNALEEQLKELDGEIARRAKADPVARRLMTIPGIGPIAATAITALVPAPEGFRAGRDFAAWLGLTPLQRSTGGKHKLGAISKMGERTIRRLLILGASAVVRWASRRGAAAGSWLARMLARKPRMLVTTALANKMARIAWALLVKGGTYRAPAVAA

SEQ ID NO: 386798 - protein, 343 aa, unidentified
MNATTYAVDTAKNVMQLHWVDLQTGEIKRRKLSRAKFLEFFAQRQPARVVMEACGGAHHWGRALSALGWQAELLPAGQVRAFVRSNKDDAADARAIWLAAQHGDMRRVPIKSVEQQAVLSLHRLRAHWISVRTASINALRGLLYEFGVVLPKGKGAGLKALAERRAELQAQLPATMMRLLDLQLHALDDVHGSVMALDAEIAEVARANAAVQRLDRIAGVGVLGATALAASLGDGHGWKSGRVFAASLGLAPCHSGTGGKVRIGGASKRGDSYLRYLLINGARSIVQLAHPPQWVAELLERRPFNVVVVALAHKMARQAWALVAHEREFDPKWVSVAPIRQPA

SEQ ID NO: 386799 - protein, 345 aa, unidentified
MKKIFIGIDFSKEKFDATVIKAEGVEERAERKHNVFENKTTGYGHLIKWIDEAVGNLDVSLWLFCGENTGGYSNGLCNYLYVHGYDMWLENALCIKRSTAIQRTKSDRADSAIIAEYAMRNYDQMRLYKPLGKNLERLREVFLYRHNLVKLKTSMTVRRNEKKITQAKSDMSRFISMSSKHLITEFNKKIKECDQRIKEIISEDEELQRNFEIITSIPGVGTQNAVCLMVYTDNFVRFEYNSRKIACYYGVAPFARQSGTSVNTPPRVSPFANKLIKALLSQAALASIRFCPQMATYFHRLLEAGKKKQVAANNVKNKLLHIITAMVKKQEKYNPNYEYYKAKAA

SEQ ID NO: 386800 - protein, 354 aa, unidentified
MSQHHDVTAGIDIGDRYSHLCLLDTESGEVIEEGRIPTNTKAFERRFSDAEPMRIAIETGTHSPWISRMLEECGHEILVANARKVRLIYGEGHKNDKIDAEKLARLARVDPKLLAPVKHRGEISQAHLALIRSREALVGARTKLVNHVRGAVKSFGARLPKCTAESFHNRVAEHLPQELVPALGPILKIIASLTERIRDYDRKLEGVAEEIYPETKLLRQVHGVGVLTALTFVLTLEDPSRFAKSREVGAYLGLVPASDQSGGSNPEKHISKHGNKLMRKLLVGSAHYILGPFGEDSDLRRHGEKIAGRGGKNAKKRAVVAVARKLSVLLHRLWVTAEVYDPLYNASRPRGQAA

SEQ ID NO: 386801 - protein, 446 aa, unidentified
MSFMVRYVGLDVHKRVVEVCILDASGKVLHRERFELNRDTLLDFAKTKLTPQDHVALEATTNCWVVARLLRPFVAEVVVSNPLVTKAIAEAKVKTDKVDALVLAQLLRCDFLPRVWQPDEATSLLRELTSRRTALVQDRTAVRNRIHSLLAVRLIVVPVDALFGSTGRAWLAALDGRQLDSQGRLLLDADLRQHDALEREIDFLEDELARRGYTDARVKLLMTLPGVNVTVAQTLLAALGDVSRFRDGDHAASYLGLVPRTRQSADRSYHGPITKAGNSHGRWCMIQAAHCVTRHPSPLGYFFNKLAKRKNYNVAVVATARRLVVIAWNMLTHNEPYRYAVPRSTETKLSALRVRATGNKRKTGPAAGVKNVAKVPGGGRTVKSLPRVCREEGLPEPPPLRPGERRMVAENGLDEFVAGLATDQVIPRRKTKRKATPTGDAPAPTS

SEQ ID NO: 386802 - protein, 331 aa, unidentified
MEILDVVGIDVSKLTIDAVIHKSKSYRKLENSNKEFGVLCKWALSMSKVGKDKLLFVFEHTGLYSHQLATYMASNKFNFIMVPGLEIKRSLGIARGKDDKIDAAKIARYAYRLRDEIELTVLPTQQIQDLKNLLTLRDRMVKQRAGYTTTLKEMKRVLKAKNNVILFSSQSKIISNLNKQITAIEKEIDRIIRGNDKLKLQFNLLISIKGIGPQTALYMIVLTHGFTKFKNSRSFASYCGVAPFPNSSGTSIRGKTKVNSLANKKMKSLLDLAAKSAIQYNQEMKVYYTKRIEEGKSKMCAINIIRNKLLSRMFAVINRGTPYVNTMNYAS

SEQ ID NO: 386803 - protein, 482 aa, unidentified
MKKRSIYGPQSQELRRIYEEAGSGKKVLVGAIDYAKRDHVAMLCNGHGDILRKPFPVKNTPAGVEFLVEQVMGTCRYHKIDPKHVFFGGEDCGSYAENFIACLRQKGWVVAGVNAQDAKRQRQNLQASTDRLDLLGIARMLINRRGNCSPCQAGAYRNLRTLLRHRRKLVSLATAERSRIHGLVDRLFPGYLDEKNSGLTPFHPPSLKLMEDRFSARQIVRRKRATLSGLLSRAGAQQPEQAAAQVQTYAATVLDAAAEYVPTWQLSLTQHVTLYRCLQDSIAALEREMAVWLAQTQGAFLMTVKGIGMVLAAGVAAEIGDPFTQMPLNNLVSYAGIIPRVTQTGGPDAEAYIGSVAQRCNRILKDYVVQSASHIGLHGVADLMADHKRRDAAGQHADYGIARRYIRIGMHLMRHDTVYLPPALRTSRTPAEKRAEYYQVFWPFLLEKWKKYDAHTVAFAPDNPLGQWRAMVQELYRIDLKM

SEQ ID NO: 386804 - protein, 343 aa, unidentified
MRQDTARDVFVGIDYHQDNVQVCVLDPSGGVLLNRSLPNRRDVIESAVGVLGRPRRAALEACGGAASLAQELVDVSGWSVDLAHPGYVARMKRSPDKTDFGDARLLADLTRVGYLPKVWLAPPYIRELRRLVRYRQQQADVRRNVKLRIGALLREHRLRPGGPIRPWTKAWLWWLTTEVRASLPEGSAWILDRHLAQLAWITAEIEVARDRLRAFTENDATVKRLLLEPGIGEVTAWVLRSEIGRFDRFASSKSVSHFCGLSPRNASSGQRQADAGLVKAGSNLLRATVMEAAHRLCRREQRWSELKQRLVAAGKSGSLATAAVGNRWMRGLWHRMMERTEAS

SEQ ID NO: 386805 - protein, 407 aa, unidentified
MGITCGIDWSESHHDVALIDEHGTVVARTRIDTGATGFHILLALIAEHGGSVDDTPIALETDKNLLVVALAKAGFTVYPINPRAVARYRERYGQAGGKSDPGDAAVLAHILRTDRHLHRPLPAVSEEGRAVKALARQHQEAIWALHQTVSRLRSVLLEFYPQALQAFPNLKHKAALTVLADAPTPAAGQRLTRGRVVALLRRSGRGNHPALVEQILTDLHTPALGQPPRVEEAYGHTVRGLVAIVIAMGQAVDDLETELTREFDQHPQAAILRSVPGLGPVLAARVLGEIGDDPARFDNPQGLRAYAGTAPVTIASGRLRYVKARKVRNKRFGDACHWWAYTMLTKSAGARAHYDRRRAAGDHHNAALRNLANKLLGRLWWCLVNNQPWDEHGAWPDHGHTENPTAA

SEQ ID NO: 386806 - protein, 347 aa, unidentified
MSVFIGVDVSLATSTICILGEGGKIIKETKIDSEPAAFVVFMQDQPYEITGIGMEAGPLSQWLHKALTDAGFTVVLMETHRVKKALSAMPIKTDKRDAEGIAHLLQLGWYSAVHCKSVTAQETRALLTGRNALQRAIIAMELSVRGILRNFGLKMGKISKRRYEERVRELIDGNDMLKQMALPLLKARAELRKQLAVFEQQVCSMARKDPVCRKLMTMPGVGPVVALTYKAAVDDPTRFRRSKDIGPWVGLTPSREESGERSVIGAISKTGDVGLRSALYQAAHIMLTRGGENWLKTWAQQLAEKCGNRRKAKVALARRIGVVLHRMWMDDTDFRSVREEALALRAA

SEQ ID NO: 386807 - protein, 360 aa, unidentified
MAKARSLVGLDVHATKIVAAVLDAETGQLQCFTLGGEPDRAAAFCEQLPGPVRVAYEAGPTGYGLARELGKRGLGCVVAAPSKIPRGSGDRVKTDRRDAEHLVRLLLAGKLHAVRVPGREEEALRDLVRARESVRMDLMRARHRLSKLLLRHGHRFDDGNAWTDRHRRWLAGIDLEWPAAQTTLLDCRGQVDTLVIRRDQLEREIVTLLPSSPWTVQAGRLRCLRGIDTLTAVGLCAEIGDFERFAKPQQLMSYIGVVPSENTTGQQRRLGSITKTGSAHARRLLTEAAWHYRPRPNLGKTLTDRQHGQPAAAVAIAWKAQLRLHRTWTRLEARNKRRTLIAVAAARELAGFCWAITQIE

SEQ ID NO: 386808 - protein, 400 aa, unidentified
MSGSRKPFQGFVGIDVSKDKFDACGIREDGAKLFQFSAPMDRNGFEKLKSHLSSIPIDSVLIGMESTASYHVNLFSYLVSEGYAAVVLNPLLISNYVKMQLRKTKTDKKDAWVIAQFLIANRDSLIRRATSPLISDLRELARQRESLVDQMTSLKNDIKRILNITFPELEHMAGIFTKSVLKLLQRYPSAYALQEVEPDQLTRMLIEDSYGRKRGAFAEALLKAARSSIGTPSPMKDVILKQKVSLHFYLEEALQEITEMLLQTSRGMMGDDMDILNSIKGIGEKSAASFLIEMGGDIQQFDDPNKIIAMAGIDPAVRQSGKHEGSSRITKRGNRHLRRIIWLMTTQVIHFCDVFRVYYQKRRKDGLPYKKAVLATSHKLIRVIYAMLTQRTFFCQAANS

SEQ ID NO: 386809 - protein, 385 aa, unidentified
MEISPRSAASAAEQPATIYLALELSRASWVVAVHSPLADKISLHRLAGGDSSGLLALIARLRARLERALGRPVAVVSCYEAGYDGFWLHRLLEAHGVRNHVLDPASLQVNRRARRAKTDRIDAASLLRALIAHLRGEPRVVSVVRVPSVAEEDARRLHRERHRLVAERVQHVNRIKGLCATQGVYDFPPLRRDRWQRLAGLHTGDGRMLPPRLAAELGRELKRLELVLEMIAALETDRDAVLEASAPEHPHAPRIRALARLKGIGAEFATVLVGEVFHRAFANRRQVASYVGLAPSPFRSGGLAREQGISKAGNPKARTTMVELAWMWLRHQPESALSRWFRQRVGVAKGRLRRIAAAALARKLLVALWRYLETGLVPDGAVLKG

SEQ ID NO: 386810 - protein, 391 aa, unidentified
MGCALGCAEPHAERPRATRCKDRGGEAITSFVGLDVHHDSIAVGSAPEGREEPRFLGTVVPQWAALSKTLSRLGPPKALKIVYEAGPCGYTLARQLRAHGYACEVIAPAKIARAPGDRIKTDRRDALLLARAARAGELVSVTIPDERDEALRDLSRSREDAVRARLKARQQLKALLLRHGHRYSGKSSWTQAHERYLAQVSFSQPAQDIAFAEYRSAVRDAHERVERLTDSLRSQLEAWRMRPVVEALMSLRGIELIAAMTLVAEIGDYTRFARPRELMGFLGLIPSEHTSGTHRRQGRITKTGNSHARRVLVEAAWNYRFPARISPALEARQQGQPKVVREIAWRAQLRLAQRYRKLAARQLPFNKICIAIARELSGFVWDIACQVKPST

SEQ ID NO: 386811 - protein, 302 aa, unidentified
MSCFAGLDVSLRETSVCIIDNDGKVIRESKVETASEALQSALSEHAKELGRIGVEASSIGIWMQRELQAMGLPIVVVETRHMRNALSAMRNKTDRNDARGIAQMVRLGWFRPVHVKSLENQKLRTLLANRKLLKRKLIDLENHIRGAIRTYGLQVGHVSRKTFDARVRELLGCADAVFEVMISTMLAVRQTVLEGYQKLHGVLLKAVMRDPVCRRFMAVPGVGPVTAMAFKVAIDDPHRFARSRTVGAHFGLTPRRHQSGTSIDFAGHISKQGDFDVRESLCEAAASLLLRVKRWSALKAWA

SEQ ID NO: 386812 - protein, 438 aa, unidentified
MILIREVADAPDIMGISKPAGLKSHHRGGENMNPLFVGIDVSSKNNVTYLMKPDGSKYSSFSVQNNLGGAKLMSEKIVSALEAMQLSDVVIGLEATSIYGDGLVCALREDGRLGQYQRKIHVLNPKQVKKFKDSYPDLPKNDWVDAFVIADHLRFGRIGKEVYMDDYRYKSLQTLARARFDVVQNLTREKQHFANYLFLKCSGMAQDKDIANSSATTIALMERFETVDELAYADLDELTRFIDETGRNFADPAAKAKAIQAAARNSYRLPVTVNSSVNQAMAVSIATMRALEKQIKVLDKAIEQQFQIIPNTLTSIPGIGKVYSAGIIAEIGDVHRFNSQASVAKYAGLVWTQHQSGDFEAQHTKLIKSGNRYLRYYLLEAANSVRRCDSEFRRYYDLKFKEVNQFQHKRALALTARKLVRLVYRLLMDNRLYIPPES

SEQ ID NO: 386813 - protein, 339 aa, unidentified
MENFVGVDLHKKVSQLATLREPKPASQVRFPNHTVTVEKVLKKLPQGSKIALEATGSWWWFVDLAQRTGHEVVMSHPKQTKAIASARLKSDKVDALMLAKLLKADLLPTVWIPPAAQRYVRELLTHRARLVRQRTSVINELHALYAKRNIDPGMIFHRVRPPAFRAEDLSGYGPRIVEEDVALLGFLNRQVQGLDKELKAIAEKDPESKRLMTIPGVGPVNAVAGSCWIGTIERFSNSKKLSSYFGLAPRVRQSGERERHGHITKEGNRMVRSLLIQAALWHIRRGPMSSRRHYLGVCKRRGKPIARVAAANKLLGIIFQMMKEKIDYEEFLRRGGNAQ

SEQ ID NO: 386814 - protein, 392 aa, unidentified
MYIIGIDIGKNHHEASIVYPEGKQIGHSLRFATTHKGADSLMSFIFNNIGNSSCIFGMEATGHYWYPIYSFLKARGYTIYVINPIQSDSLRKMYIRQTKNDSIDSFLIAEVIRFGQFTTTSMADESILAMRQLCRYRDSVISSRTEIKLRISTIMEQIFPEYEKQFSSLWLSTSMGILEKYLTPENIENAPIDELFEIIKDKSHNKLTMKKAISIREAASDTFGIKIAQDAFSFQLKQLIDRMNFLDKQIEALDCQILEYYEKFDCYLHTIPGIGMIAAATILAEIGDINRFKSSSALVAFAGIDPTVRQSGEFSSTHNHMSKRGSPYLRHAIFLAATTCSFHNSPLNAYYKKKREQGKHHLTATGAVARKLTTIIYAVFRDGKPYEPKKFC

SEQ ID NO: 386815 - protein, 357 aa, unidentified
MKIVGCDLHARQQTIAMVDTETGEFTEKTLSHEGDAVRAFYAALEGPVVVGIEATGSMQWFLELLEELGIQCRVGHPAEIRAKETRKQKHDRRDARLIWELLIEDRFPEIWMPSSKERDLRTLLRDRHQWVKMRARLQHTLQAIALNHALRQGHALWSAAGQRALEALPLPPYTRQRRDELLALYAQLQKRIQELDKEVEAQARQRPQARRLLTHPGVGPVTALATDVFLGDPSRFASGNQVASYIGMIPCEHTSGKRQRLGKMSKQGNALLRYLWTEAAMSTVRKDPELQRFYRRKLIPKGMGKARIATARKLGIRLWIMMRDQIDYEEFCRRGKLRQTGEAHAGMPDFNSGPAQQ

SEQ ID NO: 386816 - protein, 359 aa, unidentified
MLNDSTTFLGLDLGDKHSHLTMLDQHGDLIEETRLPTSEASFRRKFSDLPSARIAMEVGTHSRWASHLLKELGHEVLVANARKLRAIYDNPRKTDHADAETLARLVRMDPKLLSPIHHRSPQAQADLAVLRSRDALVRSRTLLINHVRGSVKSSGARLPSCSTDSFSKKVLASIPESLLPAVLPILDTIGSLTQQIRSCDRQIETLCESQYPDTHSLRQVPGVGALTALAFVLTLEDPSRFAQSREVGPAIGLVPRRDQSGDRDPQLPITKTGNAFLRRLLVGSAHYILGPFGPDSDLRRWGLQLAERGGKNAKKRAVVAVARKLAVLLHRLWKTGEIYEPLYSSAPRINQTEVISTVA

SEQ ID NO: 386817 - protein, 400 aa, unidentified
MIDTSDIGAFLGLDVGKGEHHATALTPAGKKAFDKRLPNSEPKLREVFAKLIAKHGTVLVVVDQPASIGALPLAVARDAGCKVAYLPGLTMRRIADLYPGEAKTDARDAFIIADAARAMPHTLRTVELTDETVAELEMIVGFDDDLAGEVTRIANRLRGLLTQIHPHLERVAGPRIQHPAVLTLLERFGSPAQIRKAGRRRLVTLIRPKAPRMAERLVDEIFTALDEQTVVVPGTDAAALIVPSLATSLQAVLDQRKILAVRIEELLANHPLSKVLTSMPGIGVRTGARILIDVGDGSSFPSAAHLASYAGLAPATRSSGSSIRGEQPSRRGNKQLKRAFFLSAFAALADPASRTYYDKKIKQGKHHTQAILCLARRRADVLFAMLRDGTFYDPQPTPAG

SEQ ID NO: 386818 - protein, 320 aa, unidentified
MIMSVGIDISKDWLDVGCYPAEPGGPGARRFANDDAGHAALIAWLAGLDGPDDAPAPVFFEATGAYHRALARALEGAAWPFRKVNPRQARSFARSLGPARAKTDRIDAVMLARMGHVLGLPPDEPQGEKQGDLSALVAARQALVKDRNAVLARRATTGHALVLSQLDRRKAMIEADIAEIDAALAALVRSDEDLRTREAILVSIPGLAAISATTILAEMPELGTIGNRQAAALAGVAPITRSSGQWRGRGFIGGGRAALRRALYMPALVAARFNPDLRATYRRLVAAGKPKKLALVAVMRKLIVLANVLLRDGRKWAPHA

SEQ ID NO: 386819 - protein, 356 aa, unidentified
MLKFCVGVDVSSKDFYACLSVIDFLQKVTVKSSSKFANNLSGFNSLDVWLNKHHKHKEIPLVVVMEATGVYYEKLALFLHLKGYQVSVVLPNKAKKYLQATGLKSKNDTIDAQGLSRMGAEQSLDVWQPKDEYFYQLRSLTRQHQSLQELKTNVGNQLHADEHGMYQNQEVISQLKLLIKTLEGQIEEMEKAIAAHLNKDAEVSKLVDGITLIKGVGALTVAIILAETNGFALFKNIPQLISFAGYDVVENQSGNHVGKTRISKQGNGHIRRCLHLPALSVVRCQQSPFIHLFNRTLERHGIKMKSYVAVQKKLLVLIYVMWKKKEAYQPTRNPDHSGEQEQLSSSLLSFEDAGLI

SEQ ID NO: 386820 - protein, 415 aa, unidentified
MEKQKNKVCGADIHKKFLVATIFSRDGTKSSGRFGMTLDEILKFKEWVIENNCEQVAVESTGVYWVPIHTVLEDKIEVIVANAYKIKHTPGRKTDMRDSEWLAELCLNGMIEPSRIFPKEDRELRTLTRARENLVNNSTQMKNRVHQALESSCIKISSVLTDIFGKSGRHIIDSLLEGKSIDEILMGIKSKSVKKKEQELREAVKNSLDPTQILLIRNCLELMEEIQKRINGLDTEIITRIERMKDDVKIAMSIPGIAFTSASAILAEIGEYRDFAKGEKLAAWCGLTPKVSQSADMLVTGSITKQGSKHVRRMLVQVAHAISRTKNSVLKRFFLKIKAKKGAKKAAVALARKVLCILHHLLINREMYEENGNTKSKPVKFDWTSSPIKMTVQDMINVLANAGYIIKKKDVRGCI

SEQ ID NO: 386821 - protein, 400 aa, unidentified
MASMTSPIPTTQAVRMLFGGIDTHKNIHVAALLDSDGGLVGSASFPTTVAGYRQLLGWMRSFGTVARVGVEGTGSYGAGICRQLTSVGVEVVEVNRPDRSQRRRRGKSDVLDAAAAAEAARTGNRISIPKSRDGQVEALRMLRLTRASAVQGRTKAFQQLDQLIVTGPEQLRDQLRDLPKMGLIRCCAAWRSNSHNVADPMVAARIGLKKLARRYLALDEEITDLDKLLAPLVAELAPQLVAVRGAGTETAGQILVTIGGNPDRVHSEAAFAMLCGVAPLPASSGKTQRYRLNRGGDRQANRALHVIAITRKRCEPRTQAYLNKKIAEGHSDREAIRSLKRLIVREVYYLLRPNLTAAPVPPSRPASRRAGAVKVEPPTRGTTLTAPSTGTPSKMEESAP

SEQ ID NO: 386822 - protein, 349 aa, unidentified
MTLFVGLDVSVRETAVCIVDDAGKVVREQKVPTEPDDIVSLLASIGEDYGRVGIEAGPLSQWLVNGLTAAGLPVVCVETRHMMALLKAQQINKSDRNDARGIAQMMRVGLFKPVHVKTQMAQEQRMLLTSRKLLQRKLLDVESDLRGTLRNFGLKVGVVSVGKFEARIRELVASYPRLALVVEPILAVRRVMRQQFVVLHKMLLDTVRHDPVCRRLMTAPGVGVVVALTYRATVDQPQRFIHSRAVGAHVGLTPRRHQSGEIDYDGGVSKSGDTMLRTMLYEAAQSLLTQSGKWSWLKAWGMRVAQRRGMQRAIVAVARRLAVVLHRMWVDGTEFRWSNSTTAVPSQAA

SEQ ID NO: 386823 - protein, 358 aa, unidentified
MSKHSENQQVKVMGIDLAKRQFHVHGVDVGGRKVLSKKFSRQKLKEYLVTLLPCTVAMEACAGAHYWGRLLRSYGHDVRLIAPQFVKPFVKSNKNDAADAEAICEAAQRPTMRFVAVKEVEQQDIQSIHRMRSLAVERRTAQINQIRGLVLEYGIEIPTGRFNLLKRLPEILEDAENGLTEFFRKELFGLYEELRHLDARIEHYDEKLKQIAQADERLQRLQTIPGIGPVIATALLAAIGDIQAFKNGRELAAWLGLVPRQHSTGGKATLLGISKRGDVYLRQLIIHGARAVLRWAERKTDRTSRWAAVLTVRRHKNIAIVAMANKMVRVAFALLKKGENYRVQPLVAHNTPLGPIEA

SEQ ID NO: 386824 - protein, 410 aa, unidentified
MLELFVGDDWAEEHHDVELMDPAGRRLARARLPEGVAGMARLHAMIAAQLGEGVEDAVVKVGIETDRGPWAQALVAAGYEVFAVNPLQAARYRERHSVSGAKSDKADAHTLADMVRTDSHQLRPVAADSPRAEAIKVVARAHKTLIWERTRHTQRLRHALREYFPAALEAFEDLAASDTLELLSKAPDPGAAARLSISQISAALRRARRRKIEEKAAVIQSALRAEHLRQPEVVVAAYAAAVQSTVAVLRVMVEQVKTLQGQVESHFGRHPAAEIILSQPGLGSILGARVLGEFGDADDRYVSAKSRKNYAGTSPITRASGKKKLVMARFVHNDRLIDALDAQAFAALSASPGARAYYDRIRVRGVGHRAALRQLANRLVGILHGCLKTGTVYDEATAWPADATASPAAA

SEQ ID NO: 386825 - protein, 482 aa, unidentified
MKKHNIYQNQSQELLSLFEQAANNAKVMCVPIDYAKKDHVVMFCNGYGDILRKPFSVKNSPQGVAYLTDQVTRSCRQRGISENHVFFGGEQVGSFADNFVSTLRSQGWLVAGVNAHDAKTQRENLQASTDRLDLMGIAKSLLNRRANCAPAQSGIYLDMRTLVRHRRKLVEITTEVKNRIHAVVDRLFPGFLNESKSGITPFSKSSLWLMQERFSAPQIRRRKRSSLIEALRQRGTKKPEDTADRLQQYASQVLNPPQNHVHMLQLSLAQHVKHFCCLQEGIGQLETEIALSLAQTQGAFLTSVRGIGIVLAAGVSAEIGNPFEQKPINNLVSYSGIIPRVKQTGGPQGKTKTGKVARRCNRILKDYVVRSASHLGLYGPADLKSDYQRRQATEQHADFGMGRRYLRMAMCLMRTSHIYLPSQLRKADSSMQDRADYYVMSWPLLRDKWQKSGALQTAFNAEQPLGQWRKIVQQFYGIKLTL

SEQ ID NO: 386826 - protein, 409 aa, unidentified
MELLHRRCVGLDVHQKSVVACVRIAEEGGRVVEEVRTFETTTTGLLALSSWLEESECSHVAMEATGVYWKPVWHILEPTFELVLANAAHIKNVPGRKTDVKDAQWIADLLAHGLIRGSFVPPTPIQDLRSLMRTRKQLVREAARNTQRIQKTLEDANIKLTSVISNILGKSGRAILDALVAGTTDPEALARLATGRLKASHEQLVEALRGAVREHHRFLIKLHLDQVDGLNHAVRELEARVGEELEPFRRSVDLLVTIPGVSDTAARTIVAELGPDMSRFPTAGHLVSWAGMCPRSDESAGKRRSSRIRHGAPWLKTTLVQCAWAAIRTKDSYLRAQFHRIKARSGAMKAIIAVAASMLTAVFHMLRSDSAYKELTASHFDRRDSTKQIRRLVKRLEQLGIKVELAPAA

SEQ ID NO: 386827 - protein, 377 aa, unidentified
MKNVRFVGLDVHAESIAVAVAEADGEVRSLGVIPNRAEVIGRLIRKLGKPEQLRVCYEAGPTGYVLYWQLSELGVKCEVVAPTLVPVKAGDRVKTDRRDAQKLARSYRAGDLTAVWVPDAAHEALRDLVRARLAAKRDQLRARHRLSKFLLRHGRRAPEGVNPWTDKHLLWIRRQVHFEHLAQQITLEDYLHEVDHAAERVARLERSIDAAIQQLPVKMLAVVQALQSLRGIAQLSAVSIMAELGELSRFEHPRQLMGYSGAVSCEHSSGERIRRGAISKAGNAHLRRIAIEAAWAYRHRPALGKTLAARQRHSSAAVTALAWKAQQRLHQRYTHLHSRGKNRQQTITAVGRELLGFIWAIGVHVEREHSAPLPQAA

SEQ ID NO: 386828 - protein, 392 aa, unidentified
MLFVGIDIAKRNHEASVVSQDGSIVRKAIRFANSQAGYNKLMDMVRSLNEPVVFGMEATGHYWLTLYTHLRSDGFTVHVINPIQSDALRGMYIRKTKTDSVDSIIIAEVIRFGRYCKTSVEPGDLQAMRELCRQRFYIIDMASDLKRKVIALLDQVFPEYEKLFSDIFGASSMEILSQYTTPEEMLSVSSQQLAELLEKASRGRLGAAKAEEIQEAAKNSFGIVMASSSFSLIIRQYIEQIRSLEASVDVFDAEIAHLLSGFDTQLTTITGIGPTLAAVILSEIGGDIKRFSSPAKLAAYAGIDPTVKQSGDFSATRMKMSKRGSPYLRRAIWLASTVAAFKDPAIHALYERKRAEGKDHMTVIGHVCRKMVSIIFAVLRDNTPYVPAVISD

SEQ ID NO: 386829 - protein, 343 aa, unidentified
MHVNTIGVDLAKNVFQVHGVDSAGKVVITRQLRRKQVLDFFSKLPGCLVGMEACGTGHHWAREIAKLGHTVRLMPPSYVKGYVKRSKNDAADAAAICEAVTRPSMRFVPIKSTDQQALLMLHRTRDLLIRQRTQLINALRAHLAEFGLVAETGREGLAQLGAIITDESNREALPSAMKQALQAIVDQLAALELQVGALDRAIHAHHRANDMSCRLETVPGIGVIGATAIASTVTDPSGFKSGRDFAAWIGLVPRQHSTGGKERLGGISKQGDRYLRRLLVIGATSVVRNARLHPQTYPWIMRLLAKKPAKLVAVAVANKMARIAWAIMAKGGSYRAPELAAAT

SEQ ID NO: 386830 - protein, 355 aa, unidentified
MNDTKYIGLDVHQATISVAVLDSAGKLVMEAVLETKAETILQFIHGLRGSLHVTLEEGTCAAWLHDVLKPHVARVLVCDPRKNALIKAGNKSDRIDARKLADLLYLDKLHPVFHGETGNRALKELARSYLALTRDTTRVMNRLKALYRSWAIPCAGQRVYAPRYRSEWLAKITEAGVHRRAEIYYQQFDALRSLREQVRRDLLAEGRKHKAMKLLRQIPSIGPIRAALLIALMQTPHRFRTKRQLWAYCGLALKTSTSGEYRIVEGRLKRSKKFLAIRGLNANHNHDMKNIFKGAATRAAAVPGPFQEFHAALVARGMKPTMARLTLARKIAAITLIVWKKGVDFDAEHLKQQAA

SEQ ID NO: 386831 - protein, 418 aa, unidentified
MSRTLAKKLAKIEPGTLYVGVDLALDRNVAVVLDEGAKQLARFTFPHSRDGYDYFYRRLEAVRARQQAPAVLVGMEPTNYFWKLLAADLEVHGSEYRLVNPYTVKKNREGEQLDRSKDDQRDAFTIGDLLRTGKFTETRLLHGRYAELRQYVTLYERLRRDIRRQKTLIRNTAGQLFPELSSVCKDFTGDTALAMLRRHAAAVSTQTLPQEVFIAGVRADFQGKRLQVTKLRRAHALAAISVGLKDGTQALQLALRLHIKALATLEGQVEQVHAALRDTFLALPEAPYLLSMHGLGLISAAIILAEIGDPSHYSRGCQLVKLAGTQPVANTSGRKTRSRTPMSHKGRPRLRTVLFFAVMRLVQVDDAFARQYQQLQTREKNPLVKMQALGVLMNKLLRILWALMRDRTFYDPNFQATA

SEQ ID NO: 386832 - protein, 318 aa, unidentified
MNTKINQSINVGVDTGKTQLDIHIRPLDLFFSVENNDKGIKKALKTIKSHSPERIVIEATGRLEMPFVLACAEAQLPIVRANPVHIKRFAGAIGRRAKNDRLDAELIAHYGEAIKPALTVIKPKNIRLMSDLVIRRNQLLSMQTMEKNRIQILPASLHPTIKLMLTTIKNQITKLEEKLVKLIEDSPEYQAKNTILQSVPGIGNIAAASIISNVPELGYITNKQAASLIGVAPITRESGRYKGKRVIQGGRAQVRTVLYMTMMSAMQCNPIFKATYARLLAAGKPKKVAIIACVRKMVVTLNSMLRDGVMWDENTAKN

SEQ ID NO: 386833 - protein, 350 aa, unidentified
MVNAQRTPSSNRVTRTVANVMNVNQQGREAVAAPRANGGIDVSKDWLDVAWADRTERFANDAVGMESITALLRQQDIDLIVLEATGGYEKAAAAALQAAGLAVAVVNPRQARDFAKAMGVLAKTDKVDAQVLRSFADVLARHEKRSQFLHEVPDEKRAELAALVTRRRQLVEMRAMEVQRMAMTRAKRARKSLNNVILFLDQQLAEIDRDLDQFTKDHFQDLRKLLSSAKGIGPVATTTILAALPEIGQLNRRAIGALVGVVPLARDSGKHRGKRSCWGGRSQVRHVLYMATVTAITHNPVIRGFHQRLIAKGKPPKVALIACLRKLLTILNAMVRDGTAWNAALHVKTS

SEQ ID NO: 386834 - protein, 347 aa, unidentified
MKILALDLGKYKTVSCDYERESGKHRFRGSFTTPAALQQLVKEVKPDRVVLEVCNIAGWVCDLLREMGVEVQVANTSDDAWRWRKVKKKNDRCDALKAAQLSAVNQLREVHIPTIEVRQWRALIAFRQQLVKRRGKVKNHIRDLLVTEGQLLPRGAKCWTQLGVARLEAMARPLAGVSLNELWRGQLHIELQQLREVQEEIAIAEEKLDAIAAADPRIALLRTIPGVGPRLSEAIVALLDRPERFRKASEVSAYIGMVPKQFDSGESERHGRITRHGSRLVRSLLVEVAWAGLRYNPWVRQTYQRISGGKKSRKKIAIVAVGRRLLVRCWAMLRDGTSWRMPVARAA

SEQ ID NO: 386835 - protein, 344 aa, unidentified
MEQVYYAGLDIHKKIIAFCIKQADGTIVAEGKIDASRKALQQWAESTPGPWIGAMEATIFTGWVYDFLKPYARQLQVGNPLMMKAITAAKKKNDKLDARTIADLVRCNLLPCCYMASEEMRDLRRVLRYRSLLVRQAVRMKNRMATLLMETGQEYNKKKLHGAKYFRGLLEKLSDVPESFKEILQMSRGALELFESCQKRLLKGLVNNEGLRERIQRLMSIQGVGEVTALSWALEIGDVQRFSSIRKASSYCGLCSSQVESGGKITRMPLSKQRNKHLQCVLIEAAKLAPGHNPELLQVYNQERQRGNNHKQATITVARKLVAFLLAVDKSGKAFVKKAEQQAA

SEQ ID NO: 386836 - protein, 353 aa, unidentified
MERYIGLDVHAQSCSLGVRGSTGKRLGLQVVETNGAALKQAIRGIPGNKHLCLEEGTQSAWLYELLEPEVDEIVVIVPEKRAGPKDDAHDAWKLAEDLRVGAIKRRVYKRVGPYSELRAAVRSYMQLRSDVQRAKCRLKAIYLSRGLHMQGRRVYQEKNATWDRQLPPAQRSSVEILRLEVGALMDLWTQAEERLLRASKEHPIVQTLATAPAIGPIRAAQIVALVLAPHRFRTKRQFWAYCGLAIVMRSSADWVKDRHGQWVRAQTSNTRGLNRNRQPLLKEVFKSAAHQVATQMTKHPLHHAYMRLIDGGMKPELAQLTLARRLAAAVLAMWKHEEVYDPEKHRTHTTAQA

SEQ ID NO: 386837 - protein, 405 aa, unidentified
MDIQPIFRCAVGIDIHLALICVCIIIAEPGVEPVVYRREFGGFQRDRRAMADWIASFKPDIVVMESTGIYWKSPYAALEKVGIHAQVVNARQVKKVPGRKTDTSDAEWLAMLARAGLLRGSFIPPERLHTLRQVSRHHQKITAMRAMEKNRLVKVLSDAGIRITAVVSDPHGAAATAIIDCLLEGGTPEQALTLAGRLQAPREELLAALQGELSADHRFVANTIRHHLRTLDSQLADLERYLVEALQPHEAALQLLMTMPGIDRLAAAKLLVEIGVDMAAFGNAGRLCKWAGVCPGNDASAGQRRRGDTAPGNRYVRALLCQIAWAAVRTTSQFKSRFQNLVSRRGTKRAIVAIGHKVLKTVFVLLSRQVPYHDSTVDYEALAVKRNAPRWIKQLRKFGYLPKMA

SEQ ID NO: 386838 - protein, 333 aa, unidentified
MKKKWFIGIDVSKKTLDVVIYDSSKKHADSEVYKQVSNNKQGYSDLLSWFKGKEIACRSVVIGMEHTGAYCFDLRLFLESRGIDYCAFNPLHLKRSLGLVRGKNDKVDAERIAYFTYLYRDELTYSKLSGSVILQLHELSAERKRYVTQQAGYKALLTDNKGRARTSTQQRARQMVDTLGKEIDTVEKEMSALIEKDPSMAKNYRLLTSIKGIGNVNAISTLIHTNNFEAFETARQYACYLGIAPFDHTSGTSVKGATRVSRLGNRQLKADLSQAANSAIVWDKELKEYYERKTKEGKAFGVVLNAVKFKLVCRMFAVVKRGTPFVELNTYKS

SEQ ID NO: 386839 - protein, 339 aa, unidentified
MKYTPVGVDIAKHLIQVHFINEHTGEVVDKQLRSRDFLTFFSNREPCLIGMEACGGSQHWARELTKLGHKVRLLQARFVKAFVMGNKNDVMDARAIWMAVQQPGKEIAVKTEEQQSVLILHRTRRQLVKFRTAQINSPHGTLLEFGESIHKGRAAMEQEFPEALERMKERLPPYLITVLEDQYNRLSELDSLIDDIEKQLTSVARQNETCKRLLDIPGIGPLIATAAVATMGEASAFKSGREFAAYVGLVPKQTGSGGKIRLLGISKRGDTYLRTLFIHGARAAALLTREPGPWITELKKRRPASVAIVAMANKLARTVWAIAAYGRKYDKNHVSIRPY

SEQ ID NO: 386840 - protein, 371 aa, unidentified
MKFVREWTLRADGIKVPKVEGVQTSQATGGSDMNRIVVGVDIAKRVFQLHWVEPQTGEIVALQLKREGFLEHFANRSNCLIGMEACGGSQHWARSLQKLGHEVKLLSGRMVKPFVGGNKNDAADARAIWTAMQQPGIKAVAVKSEEQQAVLALHRMREQLVKFRTAQINGLRGLLTEYGEVMPQGRAGIKRDIPGALGRLADRLPAMVIETLREQYARLGELDAQISQIERRLRQWQSEDSATQRIAAIPGVGLLSATAAVATMGDAKAFKSGREFAAWLGLVPRQTGTGGRVRLLGISKRGDKYLRTLLIHGARAVLTHSKSPPEWLTELVKRRPKNVAVVAMANKMARTIWALTAHESAYQSGYVCRPA

SEQ ID NO: 386841 - protein, 413 aa, unidentified
MADETIYWFAGVDWGSAKHQVCLLDGAGKVVGEREFAHGGAGLTALCEWVVSMAGDPGTVAVAIEVPHGPVVDALLDRGFAVYAINPKQLDRLRDRISVAGAKDDRRDARVAAAGLRTDRPLFRRVLAGDPSVVELREWSRLAEELQQERVRLGHRVRQQLWRYYPQLLALSDDVTAEWVLALWTLAPTPAQAARLREATLARLLRQHRIRKLDAPAVRGILRQPAITVAPGVTEAAVLHLRSLVARLRLANQEFHQAARKLEALCTALSQTQPGAQDSGPRDAAILSSLPGVGPVTLAALLTEAAGPISRRDYTALRTLSGVAPVTKRSGKSCIVIMRYAAQLRLRNAVFHWARVAVLNDPKCRSRYAALRARGHSYGRALRSVADRLLGIACVLLQRQVLFNPNHGAPTQP

SEQ ID NO: 386842 - protein, 421 aa, unidentified
MEEITEEAAELVARVAALDIGKAELVACVRVPHEARPGRRRQEVRTFATTTRSLLELRDWLICQGVSLCVMEATSTYWKPPFYLLEDAVGCWVVNARDVKNVPGRPKTDRLDAVWLCKLAERGMLRPSFIPPPWQRELRDLCRYRRTLIQERTREKQRAEKLLEDTQIKLSSVISDIFGKSGRDMLEALIAGQRDPHVLAELARGSMRGKKSVLREALTGHFRDHHGYLLRMMCDRVDALTVQVEALTGRIDEAIAPFASQVAQLDEIPGVGVTGAQELIAEIGVDMARFPTAGHLVSWAKYAPRARQSAGKNKPGTTGKGNPWLASTLGEAGIGAARTKTFLGSRYHRLARRRGKRRALVAAGNSILVIAWHLLSDPQAHFTDLGPEWHDRLAPLRRKRQLIAELERLSGKKVLLQEAAA

SEQ ID NO: 386843 - protein, 320 aa, unidentified
MNADNKTVYVGVDVAKATLQVHLCGAQIELGNTPAGHTQLRQKLQSIAEAHVVCEATGGYEQALVQSLNKVQIPVSVMNPAQVRASAQAKGQRAKNDPIDARTLTDYGQRYRPAPTPPVSETQCQLVALTRWLKQLIQARSAAKVQTEHHTDPFVLKQHQALSEHYDSQIETTEFQIKKLMEQDPVLKQRVECLDAIEGVGLRTAVLVLTHMPELGQLNRQQVAALAGLAPWTRDSGTLKGKRCIGGGRAEVRVALYMSSLSVARFNPVLRQFYARLVGKGKPKKVALTAVMRKLLIYMNHELKSLTIQPVCQKEQKKRA

SEQ ID NO: 386844 - protein, 399 aa, unidentified
MLQTLPMLDPLAAFVDVGSEHMHVSVGGNRPEVFGTVTSQLHALRDWLLAQGVRSIAMEATGVYWLPLYGVLESAGLEVRMVNGRQTRNLPGRKTDMADSQWGATLHMHGLLHAGFVPPADIRRLQDYLRLRADHVAAAATCVQLMQKAFERMNIKLHDVISSLAGVSGLAVARAIVAGERSPEALVALCDVQIRRKKEQAVIEALRGTWADEHIFALAQALQSWDHYQKLIADCDERIATVLPPHDDTQPPLPRSTRRTSVNAPDIARLREILAQMCGGRDLTKLPALSSYGVLQLIGEVGTDLSAWPTEKHFTAWAGLAPGNHDSGKRRKGVRRGRNRTGRLFCMMAQSLVRSRDIALGGFYRRLAARRGGLVATKALARKLAAWFWRASSPPGSGA

SEQ ID NO: 386845 - protein, 312 aa, unidentified
MALYTNFIGLDIGKFNFVVAIKGNKKTEEYENNNLGITLFLKKYDSILPSSLCVLETTGGYETRLLLTLCDKNYSVHRADTRKVKNFIRSLGNEAKTDALDAKALASYGHERSNRLDRFIPSSKKALELYELQQRRKDLKQMLVAEKNRLQAPKIDLVKSSCSKMINIIAEQAEAIDKEINRIMQEDEGLKTKKEVLKTIKGVGDVVANELLILMPELGKMNRRQAASLAGLAPRSKDSGTSKGYRRTCNGRSGIKPVLFLAAMAARNSNSEFKAFYLRLIEKGKKKMVALIALARKIIVIANARLKPLTTV

SEQ ID NO: 386846 - protein, 341 aa, unidentified
MKIRSIGIDLGKTTFHLVALGERGKIVIKKKLSRKQLLTFTANLEPSLIGLEACSGSHFLARALSHQGHDARLIPAQFVKPFVKSNKNDYLDAEAIAEAVERENMRFVPIKTDDQLDLQALHRVRERLVSRRTAVINQVRAFLLERGITFRKGPASLRRLMPEILEDGEAQLSPRMRSLLATLWREWKHLEEQVELLSTEISSICDSDPSCQRLRQIPGVGPLVATAVVAAVGNGAAFRKGREFAAWLGLIPKQYSTGGRTKLLGISKRGNPYLRKMFIHGARAAVLRVKREGSLLGAWMNGLEARAPRNVLIVAMANKLARITWAVLSSGEPYRAVTVAA

SEQ ID NO: 386847 - protein, 358 aa, unidentified
MTTMTDPTRIVTGGVDTHEQTHHAAVLDEVGQQLGDHEFPATLKGYRELLAWLGSFGRLERVGVEGTASYGAGLCRYLRAAGVRVVEVNRPDRSARRLQGKSDPLDAYSAARAALSGSAAAWPKTQDGPVEAIRALRVARGGAIKARTQAINQLKSLLITAPAELREELRGLSVARLIATCARMRPSPDPADPEQAIKTGLRRLARRHQFLSQEINDADTELRTLVAVAAPRMIKLHGVGTEVAAQLLTTAGDKPDRLRSEAAFAHLCGVAPIPASSGRTQRHRLNRSDDRAANSALYIVVISRLRYDKRTQTYADRRTAEGRSKPEIIRCLKRYVAREIYQALRPISSQADPVGMAS

SEQ ID NO: 386848 - protein, 379 aa, unidentified
MYRILKIGMDVHTTNYTLCAMEDKFGEDGQIIAQVTVAPDHKLILNFIRRIKEKMDPQGKDEIDVECGYEAGCLGYSLYHLLTACKVKCKILAPTTMLAEKGPRIKTDKRDAKLIADCLANGGYHAVHIPTKEDNAIKEYIRMRDDHLLMLKQTKQRMNALCIRHGYIYEGTKWTVPHMKWLQQLQLDPIVREGMDEYITTYGELMAKIERYDRRIQELANQAEYRERVKKLECFLGIRTHTALSLIVETGDFSRFRKGNVYAAYLGLAPGEHSSAESGGHLGITKAGNTHLRKLLIEASGGICKGNIGYKSKDLKARQAGNPADVIAYADKANTRLRSKYYRLTRHGKKRNVAIAAIARELACFVWGMMTDNIHGNAA

SEQ ID NO: 386849 - protein, 346 aa, unidentified
MKAVCQIGLDIAKLYFQVHGIDKRGKEVFNRKLRRAEVLPFFANLPPCLVGLEACGGAHYWVREIAGLDAGHTVRLISPRHVKPFIVNNKTDAADARAICEVVGRPSTRFVTVKTVEQQDMTAWHRIRERKVRERTALVNQIRALLGEQGIVIPQGITHVRKSLPEIIEDLENTLSMSARDYLSELYSELVEYDEAIAKCESRIVAFAKADESCRRIQKIPGVGPLTATAIVAHVGQAKHFKNGRAFAACLGLTPREHSSGGKQKLLGITKRGNTYIRRLLIQGARIVLRYGLLRPEEESTPRLRWLRALCGRRGRHIAAVALANKTARVIWALLSSGEAYQPTTA

SEQ ID NO: 386850 - protein, 422 aa, unidentified
MGRLKIVYPICCGMDVHRDFVVACIANTNAQGVTSYATKRFSTFSGGLRDLRDWLAENNCKDVCMESTGKYWFPVHNILESTCNIVISHPKFVKAIKGKKTDKKDALWIADLFKHDLVRGSFIPPEDIRQLRDLCRYWCKLTSYTTGEKNRAQNCLTVSNFKLDSVFSNVFGKSASAIVSHMLEQPGKTFDVTPFVDGRCKTPIDVIQEAVEGCFSPQQTEKLKIIRNHIDFLVKLKLDLESEILGVAEKYLNQVELIMTVPGVSDPMTAIRIIAEIGADMTQFESAKHICSWAGLTPQNNESAGKKKTTRIGKAGQHIKPLLIQCAMAASNPRSAKNPEILSKYQQLKKRRGSKKAGVAIARRLLTAIYHILLKDEAYAPYILPAKETIPENRVLTTHQALALLRSKGFVISESVALSDSA

SEQ ID NO: 386851 - protein, 333 aa, unidentified
MKLTTVGVDIAKSVMQLYYIDAETGGIVNKPVKRVAFLEHFANRSPCLIGMKACGGSQHWARKLTALGHQVKLMPGKFVKAFVMGNKNDAADARAMWMAVQQPGKSVAVKTETQQAVLGLHRMREQLVKFRTMQTNSLRGLLTEYGEVLGKGRTALDKAIPGVLERQVDRLPTILINTPREQWNGPVELDKQIAQIERRLQTWMKEDKACKTIAAIPGVGLLTATAAVATMGAAKTFRSGREFAAWIGLVPAQTGSGGKVQLLGISRRGYTYLRTLLIHGARSVLFHPKEPSLFDKCVRNVHVRQCALRPAISLFQNRRRRTSEGTGTGKYTR

SEQ ID NO: 386852 - protein, 433 aa, unidentified
MTRYVGIDLHKHLIVGHVLDAAGTKVDTFRYESVDAATLEHIGRKRLRPEDEVVLEATTNCWAVVRALEPFVARAAVSNPMATKAIAKAKVKTDKVDAAVLAHLLRLGYLPEVWQPDLATRGLREWTIRRSRIVGQRTTAINRLRSTLAQRLLHCPYDMSSPVARDWIAGQTVDEDTRWLLESDLRLMDSVQAELDAMDQLLAQRGYVDPRVKLLMTLPGISQHSAQSLLAAIGDITRFRDADSLASYLGLVPSTRQSANHCYHGPITKQGRSHTRWMLIQAAQSVRLHPGPLGHFFRRLKRRKPYNVAVVAVAHKLVLLAWHVLTKQEPYRYALPQATENKLRRLRIQATGLKRPTGSAPGTKKSPAKLPGGSQRIKPLAEVYANEQVPAARPAPAGELRRLDELELTDFADSLQHEHIVPRRRRNSAASSG

SEQ ID NO: 386853 - protein, 405 aa, unidentified
MELVIALDISMGKSYKVIYDGQTCISEGEFLHNKFGFQALLDEIGNLSEEPILVFESTGIYSKPVETFCQKNQLHYSLLNPLEAKKQLEQGTLRSWKTDKHDAHKLAQVHQQNCRVEKIQQPEIYSRLRDLSRFYQEIEEEKKRMRMYLHNALQLSFPELEHFFSSKMTPYSLTLMDLFPHPDFVLEKSQTKIKNLLKKSTTKRISENRAKQKASQIIEYAKESYPAISSASIQTSKVQYYAKQLLRLLEEKEHVSNQLINEAKKLPEFEVLISLPGVGDISAGLFIGEFGDLSRFSNHKKVNAFVGIDIRRYQSGKYAGQDHINKRGNPKGRKILYLIVRNMIRQQKAGSNHIVDYYYKLKKQPISKKDKVATVACMNKLLKCIYSMVRNNTKYDYSHAVSMDQ

SEQ ID NO: 386854 - protein, 334 aa, unidentified
MEKITTVGIDLAKNVFSLHGVGSSGAVVLRKTVRRDQLLQTVAGLSPCLIGMEACSGAHEWGRRFQGLGHTVRLMAPKFVAPYRKSGKNDGNDAEAVCEAVARPNMRFVPVKSAEQQALLALHRVRQGFVVERTALINRLRGLMSEFGIILPLRSVTVRRQAAAAAEALPELTRRLIGDLLEQLRSLDERIGGYDREIEALARLSEPARRLMKVRGIGATTALAIVATVGNAREFKNGRQFAAWIGLVPAQYSTGGKPRLGHISKRGDAYLRNLLVQGARSVLQSASAHQDRMSRWILALLPRRGYYRTLVAIANKNARIAWALLAKNETLRPA

SEQ ID NO: 386855 - protein, 324 aa, unidentified
MGEVSTVGIDLAKSVFQVHGSDPSGAVIFRKKLRRDQVLSFFSTLPRCVVAMEACASAHYWAREIAAVGHDTRLIPPAYVKPFVKRQKNDMADAEAICEAAQRPTMRFVQGKSAEAQASGVIFRTRDLLVRQRTQLINALRGHLTEFGYIVRQGVGHVGKLVELVADPASDIPPVARPVLTVITQSLQALQSQIALLDREIARRAKTDPVAKRLMTIPGVGPVIATALVALAPAASTFRRGRDFAAWLGLVPRQHSSGGKERPGRTTKMDERSLRRLLIIGASSVTKVAARDPDKAGAWLAGMLARKPGMLITVALANKMARTV

SEQ ID NO: 386856 - protein, 400 aa, unidentified
MNTEYDVWLGLDVGKTSHYGCGLDPAGERVFDHELPQDEAALRNVITALQHDFGRVLVIVDQPNTIGALPVAVARECGADIAYLPGLAMRKAADLYPGHAKTDARDAFIIADTARTMPHTLRCVDRESDVLANLKVLAGTDEDLAHDITRAINRLRSLLLQIHPALERVFKGTVLTRTIVLDLLIRYRGPAGLRAAGKSGVKRWAKNHTRKDPSVLIDAIFDALSEQTVTVPGSEASESVVPRHAARIKALKAERAEIEAEAAELADSLPLLQVLTSMPGVGVKTASQILLAAGDFSAFKTAGHLAAYAGIAPVTRRSGTSIRGEFQSRAGHKRLKNALFHSAWVASCHDPLSKAYYDRKRAEGKRHNAAVMCLARRRLNVMFAMVKAGAFYEAKTPAAA

SEQ ID NO: 386857 - protein, 369 aa, unidentified
MKKHKHYVGLDVHKDTIVVAIAEAGRGGEVRSYGTIPNTLYAFERLIAKIGGEAVELHVAYEAGPTGFVLYRWMKKHGVDCIVVAPSRIPQSAGPRQKTDHRDAVQLARLHRAGELTAIHVPDETDEAIRDLTRARLDAVADRTRARNRLKGFLLRHGYRYPGTANWSEAHMRYLRGMELPSPIHKSVLEEYLLTIDQAVERVDRLEDLIEVKAAQWRFYPAVQALMCLRGFKLTAATVLVAELGDVKRFAHPRQLMGFLGLVPKENSTGQARRLGSITKTGNTQARWILIEAAHHAFHPPNVSAPLALRQSGQPEPYKALSWKAQSRLHKRGWHLLKRGLMKQKVVTALARELAGFVWALLSQVPSPV

SEQ ID NO: 386858 - protein, 404 aa, unidentified
MTEGAIRYFGLDIHKEYFVAVAVNRDLEVVFGPQRVSNYQLEDWAGRVLAPQDAIALEMTTNTYLFFDTLQPHVQSITVVHPPNVPEVTNARVKTDKKAAETLAQLLAAGILKGKGVWIPPYEVRNLRTLIAQRGKLVRLSTMAKNRLHALEHRNHLVLPENPFSPEQRAWWENLSLSSTEKLLVCSDLDTLEFARKQVERVEECLQQKSAKDERIPLLIQLPGVAMLSAMTILAAVGDITRFPTAKKLVGYAGLGTRVHDSGKTHSSGRITKAGRKDLRCAMVNAANHAVQDHPHWKAEYQRRELHLGRSKTIVAIARKLLVAVWHVLNKQVADRFADPQNVAHSFLNHAYRVRIKNLPKRQSALAFTREQLDRLGIGRDLGEISYGTRHFKLPPSKLLIDKE

SEQ ID NO: 386859 - protein, 476 aa, unidentified
MAVPNEDSKKPAKSKKPTNPNRARERSLAVPVPASAAPLTVVNPDAAGIDVHSDMHMVCVPADRDANPVRQFGAYTADLHEIVTWLHKCGVKTVALESTGVYWIPLFELLESEGFEVNLAEPGQLSRCGARPKTDVLDAQWIQRLHSYGLLRGSFRPPESVLALRAYFRQRQMLVRYAASHVQHMQKALEQMNVKLPEVVTDITGLTGMSIIRAILDGERDPVKLAKLRDARCHHSEEQIALALQGTWRPEHLFELRQAYELYQFHHRQISQCDQQLETELGRFPNRAGEKTRTVKPRGRGRKSNDVRFEAKGPLFQALGVDLTMIEGIDVGTVLAIAAEIGPDVSRFPSEKHFASWLRLSPPQNQSNKTNKRRDHRKSTSRVTIALRLAARSVGKTKTPLGMFYRRIRSRIGGLGAVKATAHKLACLVYRMLKYGQEYVTQSMEEYKAKMETSVLNALKRKAAAMGYQLNPLPAK

SEQ ID NO: 386860 - protein, 387 aa, unidentified
MSPPNDLSRSLVPFGQESTLVAVIELSQASWLIAGVVPGVERQPLKKMAPDEAALLRLLHRWRDEAIQNGRRITRIAVALEAGRDGFWLARWLAEHGIEAHVIHSGSVAVSREHRRAKTDRLDTIMLIRVFLGWLRGERGHCAMVAVPSLEEEDAKRPGRERENLVGERTRIINRLKAALTRLGIRGFNPKLRKAPQRLESLRTPEGFPIPPNTLDEMRRNLARLTILREHIKAIEQARLERLQQAPQTGPNAMVQMLASILGMGIETADMLVQEVLSRNLRDRRAVGRFVGLTGAPDESGAKRREKGLAKAGNARVRRGMIQLAWRFLKFQKDSELAKWFQSRTEGPGGARKTKMIVALARKLIIALWRMVNTGEVPHGVVLRQPA

SEQ ID NO: 386861 - protein, 358 aa, unidentified
MLYTGIDLHKQLIVMCTVNDNGEIIARSKIKTEPDAVITYFRQWSEPHRAAVECTSNWYWLSDLLISLGVDIVLAHAKYLKAIAYAKVKTDAVDAHTLAQLLRMGFVPEAHQLPSEYRGLRDLLRQRMVMEHQRTNLMVRMRSMLAKFNIIKLPCVASQPRFADFLANCAIPEDYRLTLLLYHQQCLQVAQHKKQLEHYFKGELRPTPTLQLLVSIPGIGDITGAIIAMETGPISRFANDKHYASYCRLAPGARDSGGKHKHRSGSKDGNQYLKYAFTEAALKAMRFYPQIKEFAQRLEQRSNPSIARTVIAKELSRITFYVLSRKEEFKTFKGIEIHKTRDWPRTCKPVRITGVHSL

SEQ ID NO: 386862 - protein, 345 aa, unidentified
MTSIDYIGFDIHKKTVSYCAKAQDGMILDEGTIPAWREALLKWAKTRPRPWVGAMEATLFTGWVYDLLKPSAQALKVAHPAMLKAITASKKKNDKVDARKIADLLRCNLLPECYMAPCAIRDLRRMLRYRNLVVRQATRMKNRIAGLLMETGTPYNKERLHGKTYFSELLGNLQDVPPSVVDLLKMSRGQLDFFASIQRRLVKGLREHPNLRERVMRLQSIPGVGEILALSWALEVGEVNRFPSMGQAASYCGLTSAQRNSAGKEQRGPISKQRNQHLQTMLIEAAKLAPRRNSQLAVVHERELQRGNRNRATLAVARKLVAYLMAVDKSGKPFQMRSRDAEAAA

SEQ ID NO: 386863 - protein, 401 aa, unidentified
MSKFNPEQHRIETASALEVIRNAESVEIHAAYVGLDVHKDTIAVAVAEPGRGEPIYRGEIANKPKTVEKLLAKLSETYEGGLLLFCYEAGPCGYVLYRQILACGHDCQVVAPSKIPKAPGERIKTDRRDALKLARLLRGGDLTAVWVPDQEQERMRDLSRARDDMKAQERKARQQLNAFLLRHGHHWPRGKTRWTPAHENWLAGLKMEHPWQQVVLQEYIDAERAAGERVAQLTDHLMRALPEWSLAPVVDSLIALRGVDKLAAIILLAELGDITRFESPKQLMAFLGLVPSEHSSGPRRRQGAITLTGNGHARRMLVESAWSYRFPARQTKHLKGKARNASQEAKKIAWKAQTRLCGRYRTLTRAGKNTKLVCVAIARELAGFIWDIVRHEMPRLAPQEG

SEQ ID NO: 386864 - protein, 319 aa, unidentified
MQNLKYNITKVWVGVDVAKDYLDIYINPTEKSMHISNTTDGLRGLVKKLSNLNVGQIVLESSGGYEQQAKIIFQKAGHAVWIVDPKRIKSFRESKGIKAKTDKIDAKMIALFASQEAPSYEQSHLSDDEVRIAALTKRRCAIISMIINEKKRLQQEHDIDCQRSTKRIIRNLEKEVTSIDEKREALVKKNVVIQKKADIMQTMVGVGQTTAYSLLSLTPELGKIGNKQISSLIGVAPNTKQSGKYINHATVGGGRSMARRALYMAALTASRSNPSLRNFYNKLRAKGKSPKKALVAVMRKMIVTLNAMLRKEETWVNYA

SEQ ID NO: 386865 - protein, 420 aa, unidentified
MAKTVEIVYPICCGMDVHKSFIVACIAVTDEHSHTQHHVRRFSTFTGDLRRLAQWLASFNCRDVCMESAGKYWIPVFNILEQTCNVCLTHPKYVKAIKGKKTDKKDAKWIAELFKCDLVRSSFIPPPDIRQLRDLCRYYVKLTNFVSSEKNRAQNCMTMCNFKLDDVFSDVFGKSATSVLDALLVHGNGNFPLDGLIDRRCKATPDEVRAALDGELNPMQAEKLTLIRKHISSVNDLQTALESLIHSLAAKFQPQIDLLMTVPGISSRFTAIRILAEIGADMSVFETAKHLTSWAGLTPQNQESAGKKKTTRIGRAGAYLKPLLVQIALACSKSNKHPELKNKYLALKKRRGGKKAVIAIARKLLTAIWHMLSKNEVYNAELYQKADRPPVERLLTTDQAIAMLRNQGYLIVDADTGEVA

SEQ ID NO: 386866 - protein, 356 aa, unidentified
MSVYLGVDFHARTQTVCWCDTADGLIHQRTLDHEHDDVRGFYTQFAVPAVVGLEATGYARWFHRLLEALGHRLLVGDAYVIRKCALRRQKNDRRDAELLLDLLLHGDFPAVHIPPIASQAVLRLLRYRQRLVEIQTKLRNGIQALALNHQLRLGPKLWSKQGQQQLLAIELDDTDVMQRENSLELLVQIRTRIRTLEKELTSRADQDARVRLLRTHPGVGLLTSLAVVHTLEPVTRFDRARRIAAYCGLDPRETSSGETVRMGHISKQGNRLLRHLLVEAAHRAVHSKADADLRNFYFRLMERKKNAAVAITAVARKLVLRLYRMLREDIDYTEFRRRGREARRARKTPSPAAGGC

SEQ ID NO: 386867 - protein, 338 aa, unidentified
MEHIVGIDLHSNNGYYAIVEQNGKRVFGKRLPNEMSMVLSSLEPFKKTTASIVVESTYNWYWLVDGLMENGYKVKLGNPAGFGRYSGLKHEDDKTDAFFLTEMERLNILPQGYIYPKEERPVRDMLRRRMLIVQHKTSHILSFQSLMTRQTGSKISSGAIRKLHESDVKNLLDEEYLILTGQTNIAIIRFLKEKIRHLEKTVLKRAELRPEFEKLMTVPGIGIILALTIMMETGDVGRFADNGKYASYCRLVKSKRISNGKTKGRGNSKNGNKYLCWAYVEAANFSRRFCPEAKKFYQRKLAKTNQAVATKALACKIAKACFFIMRDQVGFDVKKIFG

SEQ ID NO: 386868 - protein, 366 aa, unidentified
MQKLSTRRVMGNKILKGHQLTIGIDLGDRWSFYCVLNELGEVLQEEKLPTTPDAMKRTFEKLPASRIVLETGTHSPWISRLLAELGHEVMVAHAQKVQLITKSSRKDDRHDARTLARLARIDPQLLGPVRHRSAQAQIHLTVIRARAELVSARTASINAARGLAKSYGERLPKRGSEQVGRELATALSTALREVLEPLLREVESLNERIREYDQRLEQIAKEVYPEVALLKQVKGVGTQIALTYLLTIEDPHRFAKSRDVGCFLGLRPGRRNSGQSEPQKKISKEGDRYLRTMLVQGAHYILGPFGEDSDLRRWGLKLAERGGKNAKKRAVVAVARKLAVLLHRLWVGGEVYEPLRNTHRAMSAAA

SEQ ID NO: 386869 - protein, 320 aa, unidentified
MGTEKVYVGIDVSKETLDMAVHDSDQRWRFANSDEGITETLSCLEELCPTLVVLEATGGFQDPLAAALAVASVPMVVVNPRQVRDFARATGRLAKTDAIDARVLAHFAAAVHPPSRLLPDTQGQELKAILTRRRQLIEMLTAERNRLHSAHSRFVKAHIQSHISWLEEEMAHIDHDLGHSIRQSPIWREKDDLLKSVPGVGPVLSTTLLADLPELGLLNRRQIAALVGVAPFNRDSGHFRGQRTIWGGRAVVRSALYMATLVATRYNPIIRDFYRHLLSAGKPKKLALTACMRKLLTILNAMLKHKTPWQYPITEMLKTS

SEQ ID NO: 386870 - protein, 481 aa, unidentified
MSKRRPSTFERLNRRERRQWERRLYSPNPGLVIVNPNAAGIDVGNESHFVAVPPDRDENPVREFGSWTESLHRTCEWLLGCGIDTVVMQATGVYWMALYDLLESRGLRVVLCNAQHTKNLPGRKSDVQECQWLMKLHTYGLLPNSFRRPEAMRGIRTVWGLRGRHVEEACKAVQHMQKALTKMNLQLANVISDISGVTGLAIIKAILQGERDIYALADLRDRRVQASREEVARSLEGTWRDDLLFELQQGLDAYEFAQQQMQRCDVQLQKYMEQLPSRPALEPKPAEAPADGKSTSRRRRKDPPAPRGNAPAWDVTSELKRVTGVDLTRIDGIKAMTAFTIVAELGTDLSAFPDEDHFSSWLGLTPNKRVTGGKVVGHDKRNVRNRVAAALRMAASTLKESKSWLGAFYRHKCRALPAHASANKATAHYLAKLVYRMMTKGEDWVDRGAEQFQRRRDDLDLEALSKRAKAKGYALTPMAQA

SEQ ID NO: 386871 - protein, 374 aa, unidentified
MSILFCGMDVHKDTVVVAVLPEAAAEPTKVVRLMNDDRKLKRFFQRLTNDGQIHACYEASGSGYVLQRRMSGWGYACEVVAPSLTPQRPGQRRKHDKRDASQLAHLYRAGELVTIRVPDEADERVRDLVRCRQTLQREILKSRQYLGWFLTRRGLVYRQGTPWRTRKHERWLRALLDDGTLEGEDAEVFNTYLALLNFKIQQRDELDRRIEEIALLPHYAAAVSRLRCFRGIDTLTAMVLATEIGDFRRFERPSQLAAYLGLVPSEHSSGSRERKGPITKGGNSFCRHVLVQTAWHCRYRPHVSKVLRARQQGQPADVIAHAWKAQLRLYRLYHRLAYKKPHQVAIVAMARELVGFIWAVMRHLDVPATDQQAA

SEQ ID NO: 386872 - protein, 345 aa, unidentified
MPIVGGLDIHRKQITFDYLDTATGEVRRGQIAPADRAHLRAWLARFAGRDDVAFALEGCTGWRYVAEELAAAGVTAHVAEPADTAFARGRKRHAKTDKTDSRHLRVLLEQGRLPECWIPPAQILECRALLEAYHDLRREHTAWIERIHAVFFHQGAPRLGEGALRTEHGLAALGQAAAIHLSPAGQLQVATALDMLAAIEARMDTLRQQLLHAARHLAGARALQARLYGVGPLAGLAMTCWLGGAGRFSSSRKAVRFAGLDVTVYSSDGKRSPGHLSRQGPEILRWVAYEAGKTHGRASAPGHDYYAAVKDRTDGKIAALSQARKLIRQACHILAELGDDALTAV

SEQ ID NO: 386873 - protein, 385 aa, unidentified
MKKNNIPEQSPSKRANKMSRKVNRTGQKSRRQTGPVTIGLDLGDKSSRYCVLNEEGEVVLERSVGSTKKAITQVFGAIPRCRIAMEVGTHSPWVSRLLERLGHEVIVANARQVKLISHSSRKNDRLDAQMLARLARVDPQLLRPIRHRSEQAQGHLMVIRVRAALVDARTGLVNASRGLAKSMGERLPKCDTDQMGEERLATLPQGLRETLKPLLKEVESLTEKIKECDVKIEQIARTKYPETSLLRQVSGVGTLIALTFVLTVEDKKRFAKSREVGCFVGLRPSQSDSGESKPQLPITKEGDQYLRKMLVQGAHCILSKRGPDTDLKRWGVALSDRGGKNAKKRAIVAVARKLGILLHRLWVTGEVYEPLRNSQAAAKQKKTAA

SEQ ID NO: 386874 - protein, 401 aa, unidentified
MNAVGIDVSKGKSMVCVMRSFGEVVLEPFEVLHTAQNLNDLAGKLKALDGETRVVLEATGNYHKPVAFVLHNAGLFVSVVNPVLIHDYDNNSLRRVKTDRKDSVKIANYTLDKWTRLRQYLPEDDTRLALKNCYRQYQQAVAIRTMLKNNLISSLDLTFPDANKLFSSPAKNNGCEKWVDFIGDFWHSECVSSLSPDAFSKKYLKWCQKHGYNFTRSKSDEIFACAVNAASLPKSPTSKLLIQQQVAQLKAVSQSVAAFQQEMLRLSQQLPEFDTVMEMYGVGPSLGPQLMAEIGDVRRFSSKKSLIAFAGIEPQPNDSGKVVGNDKGISKVGSAVLRRTLFLIMTVILQTQPQDEPVFQFMNKKRSEGKPYKVYMMASANKFLRIYYARVKSVMDSECSQ

SEQ ID NO: 386875 - protein, 468 aa, unidentified
MALTLGIDVACRAAHQATLAVDGKTVWRGRKFWTRPADLERLWADLDLDDPGELTVVVEPTRNAWIVVAEWFRRRGAVVVMVPTTQSSDLRKYYSKHTKNDRIDSELLARLPLLHPEGLRPYSGQGPADPLRRLTKQRSTMIKRRTAVYARLDALTELLGPAWYEAFNGRYGIAALEFLTRYADPHAVLRLGQARLARFLIARSRGAWREDRAAALIVAAKETLALWTLADGSDGMDFAELAADIAHEAEQALFLTGQIKDIDERIANLYADADPDGIVASVPGVGPAIGAVIAGRIGDPHRFTSLAAIRAYSGLVPKVSQSGVSKVESNITKAGDPLLREMLFAAADQARKVDPQIAAKYQRLMAGDRHHNSAICHLATTYLTRIATCMRNNEPYVLRDVDGTEITEAEGREIVKERYAIDQKKRVAAAGRRMHQRRKQAAGQESQKSQSAPTSQPADTTITTAGAA

SEQ ID NO: 386876 - protein, 341 aa, unidentified
MWIIGVDYHPSMQQIAWVDTETGECGERRLAHCAEAEQFYRELKQKGVSVRVGMEATGHSRWFERLLAELNFELWVGDPAQIRAKQVRKQKNDRRDAAHILKLMLEDNFPHVWVPTAENRDLRQLVWHRHRLVGMRTRVMNQLQAIAMNEGVRRKRGLWSQQGRAQLESLSLPPWSSRRRQELLELLDQFDPSIDQLSEAIEQEAERWPEGQRLMTHPGVGPITALAYVLVLGSPDRFRCGKQVGSYLGLIPCEDSSAERWRMGHISKQGNALLRYLLGQAAQSVARCDELWRHQYAHLALRRNRAIAKVAMARKLAVRLFWMWRRGWDYQQLKKFGSHVG

SEQ ID NO: 386877 - protein, 330 aa, unidentified
MKLPQIIGADLSKKTIDFVVHSSQQHLKTTNDPGGYREFIKWMKNQKINCSTVMIVMEHVGLYSHQFEQFLLHKGLTFTKVSGLAIKLSMGLIRGKSDKIDAMRIARYGHEKSQELVVIQPGNETLNRLKMLHSLRERLVKNRAALMTAVKEYQEACNLKNSDIIIASQLHLIKTFTTQIAKVDDSMAELITTQQALKTNFDLLQSIKGVGPVLALATIIKTRNFSCFSNARKFACLCGTAPFEKTSGTSIRGRTRVSHFADKRMKTLLDLAAKSAIQYDKELKEYYEKRTQNGKSKMSTINVVRNKILGRMFAVIKRQTPFVDNYLQAA

SEQ ID NO: 386878 - protein, 383 aa, unidentified
MDQKQGTLSRDKSAPGPVLYVAFELANSTWKLACSDGNKLRHVTVTAGDLAQVRGAITGAKRHFDLGDEVHTVSCYEAGRDGFWLHRYLHSCGIDNVVVDSASLEVNRRLRRTKTDRIDAGKLLSMLVRYHGGEQHLWRVVRVPSREDEDARHLHRDLETLKRERTRYRNRIHGILIQQGLRIKNPSTKKFVQALELMRTWDGRELPPEMKVRLVRVHERLRLVEEQISCLVKEKTLRLKAETARMAQVAQLMRLPGIGPVSSWTFVMEFFGWRRFRNRREVAALAGLTPTPYDSGKRLREQGISKAGNRRVRTLAIEIAWAWLRFQPRSKLSRWFLERFAGGGSRMRRIGIVALARRLLIDLWRFLEYGVVPEGAQVRPLAI

SEQ ID NO: 386879 - protein, 446 aa, unidentified
MHTQLPASYRCLTRYDLQPVSAKPKTTMKNENYRAFVALDWGDKAHAFARQVSGADGIEQGSIEATPEALHAWLEQLGKTYDGQPVALAVEAGRNSLLQALLEYAWLTVYPVHPATSARFRTAFTPSGAKDDGPDAVVILTLLRMHRAQLTPLVLDTPATRELAALVAARRGAVDQRTGTANQLGSALKGCFPQALTLAGDDLTKPMALAFLRRFPELSAVKKVRPATLAAFYRQQNARSEERIAERLALAAKARALIEDRAVIAPALLSVAMLVDLLEVHARHIALLAARIAKVFAAHPRAELFAALPGAGPALAPRLLVAFGDLPERYPTAASLQKYAGVAPVLEKSGQKSWTHWRWAAPTFLRQSFVEWAGQTVGLCDWAHAYYHQQRRAGKAHHAILRALAFKWIRILWRCWHDNNPYDEQLYLASLRRHGSSLVSSLLKTG

SEQ ID NO: 386880 - protein, 322 aa, unidentified
MNKYKETYGVDISKDVFDVHGSNKGHGQYKNDGSGFKRFLKELPNDSLVVMEATGYYHYRLAQFLYKNKVTVSVVNPLSIKRFIQMKLAKVKTDKSDAKAICEYALVNEVSLYNALTDTQSECLQLFRLLDTYLKQRTATKNKIHGEAVLGIPSKFVYRSLIRNKKQLDKEVEAIESKILSLVRQEQQGQLTLLTSIPGIGQKTALFLIVVTDGFSKFETAAQLCSYVGITPTIRESGSSVRGRARISKVGNRKLRNLLFLCAFNACKHNKACKSLYERIVNKGKSKKLALIAVANKLLKQSFAVAKSGRPYDETYVSILPR

SEQ ID NO: 386881 - protein, 362 aa, unidentified
MAKVRSWVGLDVHARSVLAVMIDGESGELRSRRLSGVTSEVVEFCCSLPGPTRAAYEAGPTGYGLARALDAAGVGCVVAAPGKIERPAADKVKTDQRDAERVLRLLMIDGLHPVRVPSSEEEALRDVVRAREAVRGDLMRARQRLSKLLLRHDVRYEDTASAWTIRHRSWLTSIDLEQRGAQATLLEYLGAIDAIVIRRDALEQTIAELIPGSPWEQTVARLRCLRGIDTLSAVGLCAEVGEFERFAKAGQLMSYLGLTPSEDTSGEKRRQGAITKTGSRHARRLLVEGAWHYRRAPAKGQTLTRRQAGQPAHILEISWQAQRRLHKVWQRLDTQRGKRRTIVAVAVARELAGFCWALANAA

SEQ ID NO: 386882 - protein, 351 aa, unidentified
MEVVHAHCAGLDVHKDTVVACVRHMTDGKITTTVRTFNTATAELLALSDWLSAEVVTHIAMEATGVYWKPVWNILSDGEFELVLGNAAHIKNVPGRKTDVKDAAWLADLMAHGLVSSSFVPDQTTQEMRDLLRTRKQLVRERTSHTQRIQKTLECANIKLDSVISNVVGVSGRRMLEALIAGQTEPKQLAAMAHGRLQATPAELEAALRGRVTAHHRFMLRLHLDQVDSFDEAIARIDKQVSDNDQHFRAAVELLKSVPGIGSLAAEVIVSEIGIEMDRFATAGNLVSWAGLCPKNDESAGKRKSNRLKAGAPWLKTTLVQCAWGASRSKGTYLHAQYLRIRARRGNKKAI

SEQ ID NO: 386883 - protein, 351 aa, unidentified
MSRQPTSSAIATIGIDIGKNTFHLVGLDQRGAIVLRLKTSREQLVRRLANLPRCLIGMEACSGAHHIGRQLAALSHEVRLVPAQYVKPFLKGHKNDYRDAEAIAEAVQRPTMNFVTIKTPEQMDLLALHRVRSRLVSLRTGVINQIRGFLIERGITVRQGPAPLRKALSDIVSSNSSALSPRMVWLIGNLTEDWRRLDERIAIVSAEIEALVEEDQHCQRLMTVPGIGPIISSAVVAAIGDGAGFKQGRDFGAWLGLVPRQESTGDRTILGKISKRGNKYLRTLFVQAAHVILARRPSAAMQSLWPWIAQASKRLHRNMLAIALANKLARIAWAVLARGHEYQPRIMPRAA

SEQ ID NO: 386884 - protein, 313 aa, unidentified
MTQIALHVGIDVAKDRLDIAILETGELFTLDNDEAGHAALIERLSGSAIDTIGLEASGGYERAVLKALWRAGLPVRRINPHRLRQFARAAGINAKNDRIDARLIARFLATLPVHPTDLDPRLELVTELVTARRQLHAELGRVNNQLEHVRDTALQRLAKRRATRLHADILLLDKRIAQAIAGDRSLAHRDRLLRSTPSVGPVLSATLIALLPELGRLSNRQIAALVGLAPYDHDSGKLKGKRSIWGGRESVRNVLYMAALSAGVHNPVFATFRRRLRENGKLAKVAIVAVMRKLITTLNAMVRDNKPWSPASI

SEQ ID NO: 386885 - protein, 343 aa, unidentified
MEHYVGLDVSLKQTAICIVDKTGAIKREAMVRSDPEAIAEYINTNASNVIRIGFESGATSTWLWTELNRMRLPVICIDARHAKAALKMQINKNDRNDAAGIARIMQTGWYRQVRIKDLDSHAIKALLVSRALLVKIKRDLENQIRGLLKNLGLVIGRAKMNTFVTRTKELIEDKSSLIAVIGPLLKARECIAQQIADLDRKVMRLARNDAQVRRFMTTPGIGPITALCYLATIDDPTRFNKSRNVGAYLGLTTRRFASGEIDRTGRISKCGDTLLRSYLYEAANVLLTRVAKWSALKAWGMRIAKRSGLRKAKVAVARKLAVILHRMWIDGTEFKWTLKEVAV

SEQ ID NO: 386886 - protein, 353 aa, unidentified
MTIVADRCTHVMGVDTHAKTHTFALVEAATGAVTATATFPVTPAGLDRALAWAGRRAPGYVAAVEGTASYGATLTTRLQAAGTVVFEARPPKRAARAGRGKSDQIDAVAAARSVLGEPVERLAQPRSGELRQALQLLLTARRLLDRQRVQDRNALNALVRGVELGHDARRALSDAQVAAIAAWRTRRDDSVAHAIARAEATRLARQVRALQGQLRENYEQLERVVTLMAPELMRELGLGPVTAAACIAAYSHHGRVRTEAAYASLAGVAPIPASSGNTQRHRLNRHGDRRLNSALDTIARVRLSHDPAARDFRDRHLAAGKTKTEVRRLLKRYIARSTYRKLQTMLQTPEVPH

SEQ ID NO: 386887 - protein, 355 aa, unidentified
MNAIKYIGMDVHLATISIAVLDGQGKLIMEVTIATQAGALLDFIRGLSGTLHVTFEEGTSAHWLYTLLEPQVAQVLVCDPRQNPRRLGEKKSDRLDARKLADLLRLGSLKPVYHGNALGPTLKELARSYRALVSDTARVMNRLKALYRARGIRCAGTRVYSPRFRDQWLEQLREPGARGRAERLYKQLDLLLPLRQEARAAMVAESRKHPAHKILCSIPALGPVRVALLLALLQTPYRFRGKRQLWTYAGLALVTRTSADYQMMNGQVTRSRKPALVLGLNANHNHTLKGLFKDAVASALAHPGPFKDFYTTRVAQGMKPELARLTLARKIAAITLTLWKKGECFNAEQVEAQAA

SEQ ID NO: 386888 - protein, 454 aa, unidentified
MAKRREKRESRAVVLEPDAAGVDIGAEEIYVAVPPDRDEESVRMFSTFTCDLHALADWLVQCRIRTVAMESTGVYWIPLFQILEARGLEVYLVNARYLKGVPGRKSDVSDFQWIQYLHSVGLLRASFRPSMDICAVRSLWRHRGSLLQMASEHILHMQKSLSQMNLQIHHVPSDITGASGQAILDAILAGERDPVQLAQLCNCRVKSQREKVAKALEGDYRPEHVFTLKQSLDGFRYYQKLIAELDREIQRLMQTLPSAVETGQEIPRRTKHSAFQRQGNDPGFDLRGQLYRIAGVDLTDIPGVSAVTAQVILTEVGPDLRRFRNASAFASWLGLCPENRVSGGKVLSCKTRKVKSRAALALRLGANSLCRAKGYFGEFFRRMRSKLGTAQAITATAHKIARVRNHVLLTKEPYAETVFHQSEEHARRRAEMKLRKHAALLGFQVIPLSATSAT

SEQ ID NO: 386889 - protein, 409 aa, unidentified
MAQIERVVHPRWTRFNGLPHGEVVLSIVDYMTMSAPTTRVDLVDVKPNQGSGRKEPNMLIIGCDYHPSMQQIALVDTETGERGERRLMHREGEAERFYRELKQRRVEVRVGMEATGYARWFERLLAELSFELWIGDPARIRARRVRKQKTDRQDAQLLLRLLLEEDGFPRIWVPSPENRDLRQLLWHRHRLVQMRTRIMNQLQAVAMNEGLRRKRALWSEAGRKQLESFLLAPWATRRRKDLLELMDRLNPTIRELTGAVEKEAENKPEVQLLMSHPGVGPLTGLAFVLIIGTPQRFHCGKQMGSYLGLIPCEDSSADRQRLGHISKQGSSLLRFLLVEAAQVAARVDAEWRRRFLHLAMRRGRKIAKVAMARRVAVGLYWMWRKEWDYQQVVKFGSHVGQLELRHGVQ

SEQ ID NO: 386890 - protein, 364 aa, unidentified
MNTQTTATPKLFIGMDIHKKSWSLHFRTDLFDHRGFSMSPNPEQLYDHVQKTFPGHEVSLAYEAGCCGFSVARYFLNLGWQLKVVNAADVPIANKQLYQKTDKVDCRNLCKQLQDDRLRGIHIPTENQEQLRSLLRHRNNIVKQLRKEKQLIKSMLLYVGISLPQQYDNPNWSKDFLQWIRDIKWTYPTGAFSIQSKLRILEILNQEYLQTGNELRAYCRLHHKKDYYLLKSIPGIGGYLAAALLAEVGDIRRFNSEKEFSSYIGMVPGLRNSGETEKYMGVTPRCNALLRSYLIEAAWVAIRRDPEMQAYYRTHIGKNIKCIIVKVAHKMVKRILSVIKNEKPYVINYQLNKNNIHTKTIILS

SEQ ID NO: 386891 - protein, 392 aa, unidentified
MTTGPRPFAPRPTTAVAKQGPSRSRVASPEQPTELPKEPRRAGIPILAERSHSQDRDARMTDSASSSIFVGIDVAKDKFDLARSDSPQILTVANNPDGIRQIVDSLRLTKPEGKASAAEGKASAPAIIVVEATGGLERPVLNALLDADLPVALVNPGQVRHFAKGLGILAKTDAIDARVLVEYARLASPRLAEKRTKNQTELNALVTCRRQLTRTRAEQTNRRGSTSSRAAIKAIDAVLKTVNKQIEDLDKQIRKLIESDDDMDSIDKLLRTVPGVGAVLSSTLLAELNELGRTDRRQISSLVGVAPFNRDSGQSRGKRSIRGGRTDVRSVLYMVTVTALRCNPVIMAFADRLKKNGKFSKVVITACMRKLLGFLNAMIRDRLSWNQLKVAQ

SEQ ID NO: 386892 - protein, 339 aa, unidentified
MIPFYLGIDLHLKRSYMVLMNAKGEVVDKGRIANQEITQYLQEKVPQETYAVLEATRNWPFLYDLLNEHVQQVDLVHAKGVKAIASAAVKTDQIDASTLAHLARMNYIPKAYAATKEMRDLRQLLRHREWMVSQRSKAKNRIHAVLAAYNLISPVTDLFGVAGRAYLREVMDRDLRPSARQVIEDHLAMIDHLTERIHALEKSISLNEKQNHIVNLLKSMPGVGRLIALILLAEIGDISRFHSPKALCSWAGLTPKVHSSDAVVQHGHITKEGSRYLRSAMVQAATTACRVSPKWYRVHEHMALRCGRRAARVAVARRLLTVIYYMWKRDQPYRENYGQ

SEQ ID NO: 386893 - protein, 410 aa, unidentified
MEVIYSHCAALDVHKNSVIANVITPEYRETCTFGTMTKDLLELKQWLLDVKVTHVAMESAGVYWKPIYNILEDSFTLILANARYIKAVPGRKTDVKDAEWINDLARHGLLRGSYVPDRTHRELREVTRYRRILIRERGRVICRIQKILEGANIKLSSVASDIIGVSGRMILQAMINGIEDPKELAAMAKGKLRKKTQSLEDALQGLMGTHQRRLIESELDHVDFLDQKIAKLDEDIAERMRPYDAIIERIDTIHGIGRRGAEEILAEIGPDVVSHFPDAHHLASWAKICPGNNQSAGKRKSGRTGHGNPWLHAVLVEIAWAAIRVKGGYYSSMYHRLAGRRGKKRAIVAVAHSILVTIYSMLKNNTVYHDLGECFHDLLNPEQVLRRAVKRIERLGYRVTVETALAPALT

SEQ ID NO: 386894 - protein, 343 aa, unidentified
MTEVITIGVDLAKNVFQVHGVDAEGGVVFRRQLRRGQMLPFFKKQPPCLVGMEACATSHHWGREIEALGHQVRLMPPRYVKPYVKRNKNDMADAEAICEAVTRPTMRFVEIKTPEQQSVLMLHRTRHLFVRQRTTLINALRAHLAELGIVAGVGRNGLERLLKVIEDGDDDRVPSAARDCLLALRDQLEMVKHQILDADRRILAWHSSSEISRRLDDIPGVGPLIATALVASVPDPHAFKSGRDLAAWIGLVPRQNSTGGKERLGHISKAGNRYLRMLLVIGALSVIRRAKQVGYTRRPWLTKILERRSTKVAAIALANKNARTAWAMMAHGTFYQEPESQAV

SEQ ID NO: 386895 - protein, 322 aa, unidentified
MATLSFGGIDVAKDRLDVMVLPEQHRLSVSNNPAGWAELIEQLRGFSIAAIGLEASGGYERGVVRVLLAAGLSVRQINPFRVRQFANASGVLAKNDRVDARMVASFVANIPTREVERPAPVLERLAEILRARRQLSNEKVSAENASKLLEDAMLQRLSRRRIARLAADIDTLDGHLVKIVGIVTVLAHRYRLLTSMPGVGPVLACTLIAQLPELGQLSRKQIAALVGVAPYDFDSGKLKGRRCIWGGRSPVRHVLYMAALSASNWNPVLKAFHRRLTADGKLPKVVIVAVMRKMITMLNAMVRDNVVWAARVGERHTVPIAR

SEQ ID NO: 386896 - protein, 413 aa, unidentified
MSFTPSTTPARVCAGLDWASVDHAVCILDSSGQILERFFVVHDAAGLKTLVRRLLNAGVDEVGIERGDGPVVDALLQAGLTVLVIAPGQVKNLRSRYGSAGNKDDRFDAYVLADVVRTDRARLRPLVRDSAATTAMRTTVRARRDLIQHRVAAANQLRAHLQLVFPGAASLFAAIDTAITLSFLERFTTQTDADWLSVKRLGSWLRSVSYSGGTHPEVLHARLLAAPRGTTCTDAEVHATTTLAYVALLRVLNTQIALFEDNLTAQLAIHPDTHIYASLPRVKTLRIARLLGEIGDARGKFPTADSLAALAGVAPSTRQSGKVKAVTFRWGCNKQLRDALCDFAGDSRHDNAWAADLYDRAIARGHDHPHAVRILGRAWAGVIWRCWHDNLSYDPSQHRALQNVLAQTNAEAA

SEQ ID NO: 386897 - protein, 323 aa, unidentified
MKNFVGIDISKETFDIYFEQEGKGCHVKLQQTEEDYKVLLHLIGKDAICIMEATGNYHLKSAHYLHQAGIKVIAENPLKIKRFSQMSLQRTKTDKADAKLIYEYGRIILSSNKLHFWRPDKTEIGHLKQYDTVRHQLIKQRTALSNSEEALNALTHLNDEVTQVLSDMVTAVDKAIKQLDKGMLKLVKEHHSETFDLVTSVPGIGPKTATMMICLTDGFNKFSHDQVKQFISYIGMSPRTFESGTSVKGRAHISKVGNSRMRSMLYMCSWTAKRKNQQCITLYEHLSGKGKPEKVIKVAIAHKLIRQVFGVIKSGEPFSKEYA

SEQ ID NO: 386898 - protein, 350 aa, unidentified
MATISKDIIANIGIDLGKNTFHICAMNDKGTIVMRERLTRAALPKRLANMPPCLIGMEACAGAHHIGRQLVTLGHDVRLMPAKYVKPFLKGHKNDYRDAEAIAEAVQRPTMRFVHFKSDEQLDLQALHRVRSRLVGQRTAVINQIRAFLLEHGVAVRQGPGALRQALPSILARRTDVLSPRITHLIEDLTDDWRRFDQRIADVTREVEELAKQDEHCKGLMGVPGVGPITASAMVAAIGDGAAFSKGRDFAAWLGLVPKQISTGDRTILGGISRRGNRYLRTLFIQGARSVLQRSDGWEKKSFGRWLVAASKRLHKNVLAVALANKLARIAWTVLYHARGYDSAFAPKAA

SEQ ID NO: 386899 - protein, 370 aa, unidentified
MWRWLHELIGIQLGEDAQDAEVLVGIETDRGPWVAALVAAGYVVFPVNPLQASRYRERRGVSGAKSDGADAHMLADMVRTDWHQLRPAAGDSAEAGAIKALARMHKTLIWDRTRQLQRLRHQLREYFPGALEAFDDLAAPDALELLAKAPDPARAARLTRAQVSAALKRARRRNIADKTVAIISALRSAQLGQPPAVTSAYAATVRSLIAVITALEEQVTVLQVQVEAHFGQHPDAEIYLSQPGLGSLLGARVLAEFGDDPHRYASSKARKNYAGTSPITRASGKKKTVMARYIRNDRLIDALMAQAFTALNVSPGARAFYDQQRAGGAGHNDALRRLANRLVGILHGCLKTQTLYNEATAWSHRRKLAA

SEQ ID NO: 386900 - protein, 354 aa, unidentified
MKTITFSNSHFFIGIDTHLKNWRVTIRNSGLELKTFSMNPSVDELYRYLIKHYPDGIFFIVYEAGFCGFWPQRRFSELGISCIVVNPADVPSSNKEKVVKSDPVDSRKLARELENGSLKAIYVPDLYAEQLRSLMRLRFRLVQNQTRIKNRIKMLLYNYGIVIPKEHLSNSRWSGYFIHWLNSVKLSSSAGQFTLDNLLLQFHETREHLKEVLRQLRLEAKSDNIAPIINSLISVPGIAFITAMSLYTEIVDINRFSRFEHLCSFVGLVPSIYSSGETEYSRGISFRHNKFLRPILVEAAWTAVKKDPALTLRFNELIKQMPKQKAIIRIAKKLLRRIRHVWINQDSYVEALVA

SEQ ID NO: 386901 - protein, 367 aa, unidentified
MGKSSKLFVGMDVHKESIDLAVAEEHGEVRHQGAIGGDMSALGRAVRKLESLGKTLVFVYEAGPCGFVIYRFLRTRAHQCWVVAPSLTPRQGSDCVKTDRRDSLKLARLARAGELSPIYVPDAADEAMRDLVRIREDAVIMQRQARQRLAALLLRNDIRYAGKSAWTKAHRRWIASLKLPHAAQQVAFEEYVQAVQEATARVERLEQAIIAERAHWRWLPLAHALEAFRGIQTIHATRIVAELGDLRRFSHPRSLMGYLGLVPSESSSGPRRRQGAITKAGNSSARRAFIEAAWAYQHNARVSWVIARRQTELPQPVIDLAWKAQLRLCARYRRLCARGLNRNKIVVAIARELAGFVWVAGQNIKPV

SEQ ID NO: 386902 - protein, 339 aa, unidentified
MLYVGIDVAKNKHDVTALNVRGKTVLKPLTFSNNKAGFELLDLSLRQLNQDCLIALENTGHYAFNLLNFLHEQGYKVYTYTPLLIKEFAKSLSLRKTKTDKKDAHGIALKLLSDPNREQFQHDNRQVELKILARHIHRLKKKQSDWKVQYTRCLDIIFPELDKIVEKHSEYTYQLLTCYPNPQKRLEAGFDKLIEIKRLTASKIQDILSVAPRSIGTTSPAREFEIIKHYKRLIDKAETCVNDLMAEFNSVITTVTGIGNRLEAVILAEIRNIHAFDNPAQLQAFAGLDSSIYQSGQIDLAGRMIKRGSPHLRWALIQAAKACPRFSPAFKAYLKTKLE

SEQ ID NO: 386903 - protein, 419 aa, unidentified
MQSFRIVVGVDWADEKHAVFLLDQENGNREACEVQQTPEAITDWVASLRRRFSNCQIAVCLEQTRGALIYALMKFEFLTLVPINPRQLARFREAISASEAKDDPDDAELLAELFAKHGERLRAWKPDTEETRLLTLLSEDRRHLVDERTALTNRLKTHLKQYFPQVLELCASLHSQLACALLERWSSLSELQAATDEEIHQLFHDCRCYSQKQRERRLRIIREGIPLTTDRAIVKSRQLLVRAIVLQIKDLNDSLQQYDSQIQSVFHAHSDYDIFHSFPGAGAAMGPRLLCAFGTDRERFCSAMDVQSLSGIAPVTRKSGKSKVVRRRWACNKFLRQTFHEYAAHSIKYSSWARAYYVMMKERTGGHNAALRALAFKWIRILYRCWKDHKLYDESQYLDCLRRRNSPILKHLVANVPED

SEQ ID NO: 386904 - protein, 372 aa, unidentified
MTSEHVAFIGLDTSKLKISVAVADGERNGEVRFLGDISSEPASVSAMVKKLAKRGAKLHFCYEAGPTGYGLYRQIVELGHECSVVAPSLVPKRAGDRVKTNRRDAISLARLHRAGELTSVWVPDEAHEAVRDLVRARDAAFEAQKQARQQLHSFLLRHGRYYTGRKAWTRAHGRWLASQAFEHPAHQILLVEYCQAVDEAGVRLDRLGKLIGETSASWSMAPVVAAYQAMRGVAFMTAVTLVVEIGDIRRFDSPRQLMAYLGVVPSESSTGERVRRGGITKAGNARARRALIEGAWTYRYPARISSTISARLLGLPKSVCAIAWKGQIRLCTRYRQLINVGKAKTVAVTAIAREMAAFIWAIGQEVAPLGKP

SEQ ID NO: 386905 - protein, 342 aa, unidentified
MKFYCGIDLSARDCHVCVIDEQLKIMVQQKLRNDLTKVCQLLAPYKANLKIVIESTFNWYWLVDGLQAEGFDVVLAHTLGLYLITGAKVKTDRRDAYSLAKLLLVGAVPAAYIYPVETRPVRDLLRRRMHLVQVRAGKYGSLRRLLLRQGILSSKQQEIKTATEAELEQWFEHPLVRLHASQELRRIELYSEQIAELEKSILALAKTAPSYELLQKLPGVGQTIALTILYEVGELTRFANVKVFSSYCRVVPGIAQSGNVSGRGRASKQGNHYLKAAFSQAAVHAVRCYPKVRRYYERQLQRHRGRGRQMICYNIIAHKLAQAAFHVLKEQTEYREELLFGR

SEQ ID NO: 386906 - protein, 332 aa, unidentified
MMSTQNYAGIDIAKRHFVIGIHGKDKTKTETNNPKGFTHTIDYLHKHNVGLVVMESTGGLEIPLAKTLHRAGFQVVIANPRCTKNYANGFSLAKTDHLDAKMLADYAQALEIKGLVANMLYIPPSEAEEKLEALVKRRSQLVDIRAAEKNRLEQIHESQQQSVKDLIAHLDKLIAELDKDIDSNADAFGGKGQVLTAIKGIGSTTSATLLSMLPELGTVPHKRIAMLAGVVPPPNQSGDTDKKTGCIGGRMAVRNMLYMAALTASRFEPKIKAFYERLRAKGKPFKVAINACMHKLLRILNARMRDYLASLQTKSERQSEQQSEQQPAPQCA

SEQ ID NO: 386907 - protein, 391 aa, unidentified
MIYVGIDVAKDKHDCFITNSDGEVLFKAFTITNNLDGFNDLYQKIETVMKDITKVKVGLEATGHYSYNLLGYLIDKSLPTYVINPLHTNLYRKSLSLRQTKTDKVDARTIASMLMSDVNLKSYSDTSYHNEELKSLTRYRFDKVKERAKLKSSVSRLVCILFPELEKLVPTLHMASVYALLSEFPSAHAVASVHLTSLTNLLSESSKNRYGKDTAVRFREAARNSIGSNIPAKSLELKHTIKLIQELTSEIDEIETEIKSIMDTIHSPILTIPGISYRMGAMILAEIGDFSRFDSPDKILAYAGMSPSTYQSGQLDNCYSHMEKRGSRYLRYALYNATKYVCHWDKSFGTYLAKKRAEGKHYNVALSHATKKLVRTIYAMEKSGQAYNKAS

SEQ ID NO: 386908 - protein, 331 aa, unidentified
MLKVDSCGIDVGSLEYVVTLRRSGQRGLMRKSFPNTERGRLWLCRYLSRPGHLVRVCLESTGVYGLDLAVELDSCPGVEVMVANPRAVRRFAQALMKRNKSDQVDGDVLEQFAVRMPFVGWTRPSAAALELRGISRRIKALVHASTGEKNRLHAALASKTTPAVVRRDIEQTIARYQQSVTRLTREGLKLIAREPQLEDRFKLLLTAKGIGKTSAIRILGELAVLSEDLDGRQWVAHAGLDPRHETSGTSVEKKPRISKAGNKYLRSALYMPALVARHHDPHLRAFADHLQAAGKKPLQVIVAVMRKLLVGLYGMLKNYQPYDGRKLFALP

SEQ ID NO: 386909 - protein, 339 aa, unidentified
MKTYAGIDLHSSNNFTAVIDEHDQRLYRKRLPNRLDAIVSALEPFKDTLEGTVVESTYNWYWLVDGLQEHGYKLHLANPSAIKQYEGLKHTDDQWDSFWLAHMLRLHILPEGYIYPKEERPVRDLLRRRLLFVKHRTAHILSLQSMITRNLGSQMSCRAIKRLEQADAEILFNHPHLVLTATNNIAVIRFLKKRVKLIEKEIKSHITLREEFSYLLTIPGIGDILALTIMLEVGDIGRFPKVGDYSSYCRCVKAERLSNGKKKDENNRRNGNRYLSWAYVEAANFAKRFSPHAQTFYQRKMAKTNGIVAIKALSNKLARASYYIMRDKVAYDVDKLFRK

SEQ ID NO: 386910 - protein, 445 aa, unidentified
MPVIHPNAAGIDIGSQFHVVAVPPDRIAKSVRTFKSFTGELHAMAKWLKKCRVDTIAMESTSVYWIPAFEILESYGFEVFLVNAREAKTVPGRKTDINDAQWLQKLHQFGLLRASFQPSKEVAELRAYVRQREKLLEYRAAHIQHLQKSMMQMNIQLHHVVTDVTGKTGIDIIRAIVRGEHNPDELVKLRDAHCKNSVEVMKEALTGSYKSEHLFSLTQALELIDIYTEKIEACDQVIESALKRLQQEDDSTPPALPKPRSKSASKNTPGFDVRQALFSFTGMDLTQIHGIGSAVALKLVAECGTDMTKWPTSKHFTSWLCLSPCNKISGGKILSSRTRRSSSKVAMILRLAAVVVGKTDTALGATYRRLSARIGKAKAVTAIARKLATLFYNALRYGMDYVDQGANYYEEQYRKKVVSNLKRRAESLGFTLLENTQTLSAAGVS

SEQ ID NO: 386911 - protein, 348 aa, unidentified
MKNKSFVGIDISKNVIDVSIFREDTNIKMFPHEVFNNTRKGFGDMCSWLKKSRVVLSQALFGMEFTGCYSLDLEKFLTSKNYSFCMLSTRIVKHHPMGTIDKRDKNDSAKIADFLYRYDGTECAKPYKLPSKAMQQLKQLVNERKFLVEQRTNFMNRMQMFETKEDSAMYESYIKKLNHDIEKIDQEECELMSKEEDVFDTFQNLLTIPGIGLVNATNIIAITRNFTAFDTARQYARYVGVAPCSHTSGTSVKWRARPSAHCNGQVKADLSMAALRAVEYDVEMQMFYNRKLGGRKDSDTKRKALNAVKFKLIRRMFAIGKQKRKWEVLNTSDDRKNLHIEKSKASEL

SEQ ID NO: 386912 - protein, 341 aa, unidentified
MKNKSFIGIDISKNVIDASIFCEGTPIKDFPHDVFNNSRKGFGEMCTWLKKNHVVLSNCLFGMEFTGSYSMELEKFLNAKKYQFCMLSTHVVKHYPMGPKDKNDKIDSAKIADFLYRYNDTECVKPYKMPDKTMQRLKTLMNERKFLVEQRTCFMNRRQLCTTKEDTQLYDGYIKKLSRDIENIELEEQKLLATDDSLLATYKNLLTIPGIGFVNAINAIVITRNFTAFETARQYASYVGVAPHFRTSGTSVKWRPRPSARCDGQAKADLSMAATVVVQYDAELQSFYNRKLGGKQDSDTKRKALNAVKFKLVLRMFAIGKQNRKWEPLDSKSSNEKLAIS

SEQ ID NO: 386913 - protein, 438 aa, unidentified
MSNKVFFNLDDLFISVGIDIGADFSWMSIALPNQQFVGKPYKILHNSIDSLTTAVSKIKEAEELYSLESHIFLESTGIYHYPLFCYLRDKGFNCSVINPIITKNSTNINIRKVHNDRFDSKKAALVGLKPDLKVSLMPSDLALNCRNLCREYYDLMDNRSAYVNKLQGELRMVFPQYLDIFSKVTINTSLTLLETYTSPSAFLKADKQEIIDIIKSTARFGLTYAQNKYNAIIQAATDANQFGYIIDSNIKRIRLCISFIRKYDEEINNILESLHELVDANEDADFVKQIHLIETFKGAGFLSAVSIMGEIGDFSAFSKPKQLFAYFGLDPAVKQSGKFEGTKVQMSKRGSAIARRVIHTLTLQSISISRNGEAKNPVLREYYLKKCDSKPKLVAMGAVSHKVCNMIFAILRDNKPFKIIAPQEHIKQNKAAKCDTAA

SEQ ID NO: 386914 - protein, 313 aa, unidentified
MSEEKIFIGIDVSKDKLDVGVRPEGELMTFANTEDGIFLMTDFIKFKKPELIVLEATGGLEMASLRSLVSAKLPAVCVNPRQVRDFAKAMGILAKTDKIDAHVIARFADSVRPEIRPLKTEETEMLDALNTRRCQLVGMLTAEKNRLAIAPKWTKNDIQSSIKGLEKQLAKINRDLENLIRKSPHWQKMDKILQSVPGVGPIMSMTILADLPEIGTLNRRQIASLVGVAPMNRDSGKYKGKRTIWGGRARIRSVLYMCVISGIRHNPRIKGFYKRLRNAGKKNKVAITACMRKLMIMLNTMIKNGTCWNASGC

SEQ ID NO: 386915 - protein, 394 aa, unidentified
MSEHVVIAIDPHKASWTAAAVNSSLQPVATIRVPVTRAGYRSLRKFAAPWPAATWAIEGASGLGAPLNRWLAADQLVAVDVPAKLATRVRMLSTGHGRKSDNADATSVGIAALTAVDLRAAAVDEAITVLRALVEHRDDIVKTRTQTVNRLHVLLARLLPGGAPRDLDADKAAQLLRPIRPREIGQRTLRQLAVELVAEIRHLDRRIGAANTKIAEAVQASGSTLTDLRGIGTLTAGKILARVGSVHRFRSAGAFASYNGTSPIEASSGDVVRHRLSRAGDRQLNCCLHIMAITQIRLNGPGRTYYQRKRANGKSHKEALRCLKRRLSDIVYRQLLKDAGGQQTDPRSSPMDLGGQQGATTTSSAAGTTPTPTLRTSHFPGPPTPTLQPLTLST

SEQ ID NO: 386916 - protein, 331 aa, unidentified
MKFRAFIGIDVSKSTIDVYLRNAGKHMVFANDLEGFEAMVEWLMDILGQLTHDEMLLGLEHTGLYSELLIGFLNGQNFPFTVLPGLELKKSLGIRRGKSDKVDSKDIAEYIYEKRERVKLFEMPSKNLESIKKLASYRERLVKERTACTTRLKEYQNVHEREDFEIYVNSHTRVINCLDEEIKKIQAEIERLIRDDLELSRQYRLIQSIKGVGPQTAAIMIVLTRGFTSFENWRKFASYAGIAPFPNQSGTYTGKTKTSKLANKRIKSLLSMCAGVAIQYNPEIKRYYERRIEEGKNKMSTMNIIRNKLVSRIFAVIERGSPYVDTMKYAA

SEQ ID NO: 386917 - protein, 406 aa, unidentified
MDVVYTHVCGLDVHKKNVVACVITPETKEIRTFSTMTDDLILLVDWIKSKGCTHVAMESTASFWKPIYNLLELEEIQTLVVNAKHMKNVPGRKTDVKDAEWIAGLLRHGLLQGSFIPNRDQRELRELIRYRRSLIDERAREVNRVQKVLEGANIKLSSVASDVLGKSGRAMIEAMINGEENPELLSELAQRRLKNKKADLQRALKGLMGNHQKLMLAAQLRHIDFLDEEIGRLDEEIKRRMLPFEEDLELLDTIPGVARRTAETIAAEIGTNMDQFPSAAHLCSWAGLCPGQNESAGKRKSGKTRKGNKKLRSALVEAARAAGRTKNTYLSSQYHRIAARRGANRAAVAVAHSILMIAYYILKRRQPYIELGPTYYEERKRDTIIRQSIKKLESLGLKVTVESVAS

SEQ ID NO: 386918 - protein, 366 aa, unidentified
MHDSATNTVSVALDVHAASVRLAAVRADELLDEHTLPYDHAAVAGVIGRWPGARVCYEAGPTGYGLYRYLTARGIACEVVAPGLVPQRPGERVKTDSRDARKLARLYAGGLLEPISVPSPELEAARDLVRAREDARLDRMRDRHRLSKFLLRNDRRLPFKSWGAGRRKWLGEQAFEQPARQQTFDSYLLALDLVDRRAEALEREIAEIAETGPWAELVGRLRCLRGIDTLTALGIVAEIGDFSRFRIAEELMSFVGLVPSERSSGEKRRQGSITKAGNAHLRRLLVEAAWHARLRPKVSYELARRQAGQDPAVLERAWRCQQRLFKRWRRMAARGKPNQKIVVACARELTGFVWAIATDQPLREAA

SEQ ID NO: 386919 - protein, 379 aa, unidentified
MTAIDAHTGEVTISKPVGQDESEIRSALEPYAGTDAIAVVDQPGDLSSLLFAVAREMGLDVGFITPKAMARGIDLYGGEAKTDRRDSFVIADLALRIPSLVHGVSARRGDAEELAALMSYDRELTDDARRAAARIHGLLLATCPALNGVFAGQRVKRRLPLALLARYGGANGLASAGRGRVRRWVGAQRGFGHRGLLFVEEVFSAIASQSVEIVSSAFYDELIKIEAASLRSALDARERVGRRVDELLASMPDARVLLSMPGLGRVTAATFIAEVGDISRFSSAAKLAAYAGLAPRVRQSGRSLNSVTKPRAGNKRLKRAWVLSAARSIDFCEESRAYYDRKRAEGRCHYSAVIALARRRINVAYAMLRDGQRFESRLG

SEQ ID NO: 386920 - protein, 323 aa, unidentified
MVAVAEGGRRGEVREYRRIANTPTAVARLARQLSRDGVRLRFCYEAGPCGYGIQRQLSGLGYECVVVAPSLIPKRAGDRVKTDRRDAASLARLNRAGELTAVWVPDAGHEAMRDLVRARLAAVQALCRARQQLAGFRLRQGRHYGRPAWTKLHRRWLAGLKFEQPVPHIVLEDYIAAVEAAEVRRDRLTAQIETMLGDLSRFANPRQLMAYLGLVPSEHSSGTSIKTRRSHQGRQRHRPSTADRGGLVLPDSRPASAVSCCSARRRSRGRSVRPPGRRSCGSARGTASSPAPASPANVVTAAIARELAGFLWAVARQVTIPAG

SEQ ID NO: 386921 - protein, 312 aa, unidentified
MTPIEHYVGIDVSKARLDVHVRPEGESFAQTNDEAGIAALCTRLTQAQGPCLAVLEATGALQERAAAALCAAGIFVVVVNPRQVRDFARATGRLAKTDRLDAAAIAAFAEAVRPEPRPLPDDERKALIDRVTRRRQLVEMRAGEKIRRSQITPGLRPSLEAHIAFLDKEIAALDDEIGTSLRQSPAWRSEDDLLASVPGVGPVFRAALIAKLPELGQLTRRQIAALVGVAPISRDSGQMRGRRTIAGGRAELRTLLYMAALAAIRCNPALKAFNARLRAAGKAPKLAITACMRKLLTIINAIVRSNSPWRAA

SEQ ID NO: 386922 - protein, 347 aa, unidentified
MAKGSQTEGQLFAGIDVSARELSVGVRCGVQDGIAVTTFTNNAAGHKVLLSHLLRGNARARVCLEASGNYSLDLALTLQAHPQVEISVVNPRRARRFAESLGERSKTDPVDARVLCEYAMRMRWVPWVPPSLAALRLRGITRAIQHLVAMQTQEKNRQHSLLASRALPALVVREQEQHLRYLQLRIKHLRRAALRLIARHAELNRRFHLMLTTPGFGEISTLQILGELAVLPDTLDARQWVAFSGLDPGQFTSGTSVEKKPRISRGGSRHLRRALYMPALVAIRHEPFVRGFYQRLLRRGKAPLQAVVAVMRKLLHAFFAMFRFDQPYDGSKLCPAEFARDTVAVCA

SEQ ID NO: 386923 - protein, 344 aa, unidentified
MTVFCGIDWAERHHDVAVVDDTGTLLAKARISDDAAGYSKLLDLLAEHGDSPENPIPVAIETSRGLLVAVLRTGDRKVFAINPLAASRYRDRHGVSRKKSDPGDALVLANILRTDMHAHRPLPADSELAQAITVLARAQQDAVWSRQQIANQVRSLLREYYPAALHAFQDKEGGLTRADARTVLTLAPTPAKAAKLTLAQLRAALKRSGRTRAFDTETARLREIFRSEYARHRPAVEDAFGQQLLALLKQLDAACQAADDLTTAAEAAFKEHADSDILLSFPGLGPLLGARLLAEIGDDRTRFADARALKSYAGSAPITRASGKKHFVGRRFVKNNRLMHAGFL

SEQ ID NO: 386924 - protein, 406 aa, unidentified
MEEKRKRYIGLDVHKHYLVALGVDAELNVVQPMRRVEFSYLESWMKKNLTKEDEVVLEMTTNTWQLYDELIQYAGTVMVVHPPHVGLITRSQVMTDKIAAAHLARLLAKGLLVGIWVPPQEVRELRGLVAQRQKMTRLATQAKNRLHAVIQRHHLKPPAGNPFGKTNNGWWQALALGKLEKMNMQSDLETLQFAEQQEARAEKEMTLIAAEDEKIGRLLQISGFGVITAVTVSAAIGDIGRFIEPKKLVGYAGLGARVHNSGMTTRTGKITKAGRRDLRVALVEAAHVAANNHPHWKAELARLQPRLGYNKAIVAIARKLLITVWYVLQGKADKHAESKAVAQKMLKFAYAVGKANRAGKTAAQFTRERLDGLKMGESLTSIPWGAKNPIPLPPSTLKGRSDVPNS

SEQ ID NO: 386925 - protein, 410 aa, unidentified
MEPILKSCAGMDVHEKKVDVCIAHGPFDKPPKFEIRTFSTMTSDLEEITTWLKKYEVTTIGMESTGIYWKPIFNVMEGEFEIVLANAQRLKAIPRKKTDIIDCKRIANLLRYGLVPNSFIPPKEIRELRDLNRTRRKLVGMMTSEKNRLVKVLESANIKLSSVVTKIYGVSSLAMIRSLLEKDKLSREEISLMAKGKLKKKVDLLEKALNGKITDHHRFLLGVHLENIDHLAKQIKRMDEEIERKMVPFQKESKMIQTIPGISDVNASAILAEIGVNMSQFPDEAHLSSWAGVCPGNNESAGKKKSGKTQKGNSFLKGALTESAWAASKTKGSSYSAIYHNIVRRRGKKRALVALAHRMLIDIYYVLRTGEPYQEIGAKAVYERTSKRREQSMIRSLERAGYSVAKAATA

SEQ ID NO: 386926 - protein, 336 aa, unidentified
MRELLFVYIGVDVSKETLCVDAGDAFRGVVPNTPDGIRKMLAVVKRKLGRGRASHVCLEAAGPYGEALLAVCRGGGFPCSVLNPAKVRHYAKAMSESAKTDPIDARVIREFAEAKHPAADRVPGSAETLLRQLMTAREALTKSAVQLEGVLDSMTCASARKAVTQAVGCIKRKIRALEDGMATALKADRRLEGLAAELAGIDGVGALSAAKIVALVPEPGSLGRRDAASIAGLAPFRRDSGKFSGKAFISGGRASVRRALYMPALVAVKHNPTLKAFCQRLVGQGKPFKVAITAVMRKLFIHMDGVAHKWLAAHGGTGEGNAPQPFPLLPSFPRTP

SEQ ID NO: 386927 - protein, 424 aa, unidentified
MKPKPDVEFAAFAGIDWADAKHDICLQTAGNEEREWAVVPHRPAAIDAWASTLRQRFQGRPVAVCLELAKGPLVYALQKHDFLVLFPVHPATLAKYREAFTPSHAKADPTDAELALELLLRYRAKLKPLTPQSGPMRMLLRLVEQRRRLVGDQNRISSRLADALKQYFPDVLSWFPEKDTLLFCDFLTRWPTLKQLQRARRATLLSFFHEHHVRSQSRIDERLLAIKSAIPLTDDLAVIRPNQLLVLTLVEQLRVTLRAIESFDAEIATVSQTLPDYDLFRALPGAGATLAPRLLVAFGEQRERYQSAAEIQRYAGIAPVTESSGKKCWVHWRLQCPTFLRQTFVEWAGATIPRSFWAAAYYRQQRDKGCSHQAAVRALAFKWIRILYRCWKTRTPYDESTYLNALKRRGSPLLNSIAATAKNT

SEQ ID NO: 386928 - protein, 336 aa, unidentified
MIHIGVDLHRTFCYVTALDANGKVLHQGRINNEREAIQRYLSGWPEAPRVVFEACSFWPAFAESAEGRVAELYMVHPQRVKAIASAKLKNDRVDSLTLAHLLRADLLPQAWLADRETRQRRTRTRTRIELGRMRTRLKNRIHSLLHQQGLRCPHSDAFGKKGRQWLAQAALGNAERESVERYLRLLDSCEEQVRESQHTLLQASGSDDRVRWLSSIPGIGEYGANIILAEIGDITRFDRKALFSFAGLVPRVRESADKSWHGPITRAGSSRLRWIMVEAAVAAVRTSPGARAFFERLCRRKPRHVARVALARKLLGAVYALLRDGVCFNEQVFATM

SEQ ID NO: 386929 - protein, 307 aa, unidentified
MQAVTTIGLDIAKSVFQVHGVDAEGKVLIRRKLKRRYVLAFFQKLPPCLVGIEACATSHHWSRELKALGHTVRLMPPAYVKPYVKRQKNDAADAEAICEAVTRANMRFVETKTPEQQSCLMLHRTRHLFIRQQTSVINAIRAHMAEFGIVAPVGRQGVEALLEVAADGGDNRVPEVARSCLAALGAQLRALKSQILEFDRRITAWHRSNETSRRLDAIPGVGPALATALVASVADPKAFRSGRNFSAWIGLVPKQHSSGGKDRLGSISKQGAAQPVHCRSPRRDPLCQDPRHKASTLAYSLAGAASD

SEQ ID NO: 386930 - protein, 326 aa, unidentified
MSKKTVDISVLEGKEKLFYLRISNDEKGFKALKKELQKHGILAKKSLLCLENTGFYGYSFSCWAVENAYPVWIENAIAIKRSLGLVRGKNDQVDSYRIALYAARFEDQCKLWQPPRKAVQRLQQLIATRTRLIGSRNRLKTPLKELSFAFSKNQNKEVETCCKAAIKGLEKSIDKVEKTIDQLIKSDTQLSHMKKIITSVDGIGLQIATALIVATNEFKELKSQRKMACYAGIAPFEHTSGTSIKGRTSVSHLANKSLKTLLHMGALSAIKNSEEIGAYYRRKVEEGKPKMVVINAVRNKLVLRMWACIREDRMYEKTYTKNLAES

SEQ ID NO: 386931 - protein, 456 aa, unidentified
MSRKRRSSRKTGTPVLHSLNPNAAGVDIGATEIYIAVPADRDPQPIRHFSTFTEDLHAAADWLKSCNIETVAMESTGVYWIPFFQILEARGFQVFLVNAHHVKNVPGRKSDVSDCQWLQYLHSVGLLRGSFRPEQEVCTVRSILRHRDGLVQMASSHVQHLQKALDQMNLQLHHVISDITGMTGLAIIEAILAGERNPQTLAKLRDRRIKATESTIAKSLVGDYRREHLFTLSQSLAAYRHYQELIGACDKEIEQYLETFESKADPPEDPKWKSQDGQKTRGGRPAFDLQSHLYRIFGVDLTEIPGVHTLTTQTLLGEIGPDLSRFANAAAFTSWLGLCPDNRISGGKILSVKTRKVKNRAATALRMAAQSLYRSQSYLGHYFRRMRAKLGAPKAITAAAHKLARVIYHMLTTRQPYDETICGQNELQNRQRLEARLRKQARDLGLEIVAARTGAV

SEQ ID NO: 386932 - protein, 437 aa, unidentified
MRILYRRCAGLDVHKASVVACVLMVQEESRVAEQVRRFGTMTEDLRELAAWLNSQQVERVAMESTGVYWKPVWNILEAAGLDLLLANAQQVKALPGRKTDQKDSQWLADLLMHGLLRNSFVPSRVIRDLRDLTRSRARLAQWHGTLANRVQKVLEDANIKLASVASDVLGASGRLMLQAIIGGNTDSHELADLSKGRLREKIPELRKALEGQVTGHHRLLLQRYWEQFLFLERQLVKTDAEIARRMKYTPEELAQVKASLPAGAPLPPCPRQVALDYWMELPGVSVVSGSSIVAEIGVDMVPYSSAAHLASWAALCPGHDESAGKRRSGRTRKGNKWLRRTMSEAAWAASHTKNTYFAAQFRRIAARRGKKRANIAVAHSLLVTGYTMQTGHCHYQEVGASFFDSLNRDKVKRSAVKKLQALGYEVTLKANAEPSVA

SEQ ID NO: 386933 - protein, 366 aa, unidentified
MKRLMAGMDLHGNNVMIGIVDADGTRLRHRRLACDLEEVIAFLNPYKPFLDRVAVESTFNWYWLVDGLKAAGFPVVLANPAKIDQYEGIKHADDKNDAYFLAELLRLGILPTGYIYDPESRPVRDLFRRRMGLMRLRTTLLLSSKSLHHRTTGHSLAVGQLKALSPADLAAFYSHPANRLTAEIQKELIEALNQCIRRIEKMVASEALKKPYYKRLQTLPGIGVILGLVISMEVGEIERFAEPGRFASYCRTVDSNRVSNGKKKGSNNEKCGNKYLAWAFVEAAHAARRYDAHCRRWFDRKSAKKGTTIATKALACKLAKAAWHVMAEAVDYDPAKMFPELAAGRIEQISGRQTSASKGVGPEPED

SEQ ID NO: 386934 - protein, 375 aa, unidentified
MKKVRFLGLDVHAETIAVSVAEIDGEVRSLGIIANRQESIRKLIKKLGPAEQLQACYEAGPTGYVLYWQLTALGVKCDVVAPSLVPVKAGDRVKTDRRDASKLARSYRAGDLTPVWVPDEEHEALRDLVRAREAAKQDQLRARHRLSKFLLRHGRRAPSGVKVWTQKHLDWIKEQVHFKQPAQEYTLLDYWHEVEHVTAHIRRLEQAIEEAVKLAPARMQEVIQALQALRGIAQISAVTIVAELGEISRFERPRQLMGYSGAVSSEHSSGKRIIRGQITKTGNAHLRRIVIEAAWSYRHRPSHGWALRKRQKDLSEEVKEIALKAQHRLHQRYRKLLAAGKDKQKVVTAIGRELLGFIWAIGIQVERNNQQSRVA

SEQ ID NO: 386935 - protein, 355 aa, unidentified
MDDYAIGCDAHKYYSVFAVLDKEGTLKTHKRIDHEPGAIQGFLEQYPSGTRVALESVGNWYWIADEIEASGCIPLLTHPAKAKVMMGNVNKTDKLDAKGLATLLRLKSLPYVWLPPGKTRDGRELPRTRMALTKIRTALKNRMHATLAKYNQKLEGASDIFIPKWREELYSTVNQLPPETRKCMHSELELLDHLSSQIDFLETRIRDLVEESEQIQLLKTLPGIGNILGIVIRQEIGTIDRFPNAEQFASYCGVVPTVKASGGKSYYGRLRKQSNQYLKWAFVEAANVVGLRHTSPQWHDRHVVQLYCRIRQRKGHRIAIGAVARHLAEAAYWVLKRNQPYREPAISRQVTLQSG

SEQ ID NO: 386936 - protein, 334 aa, unidentified
MRQVSQVGVDVDSEKLVCMMQRVGQRMPLTTFANTAAGHKKFIRWATKRARPARVCLEATGIYSLQFALALHDAKNVEVMVVNPRAIKDFARACMQRAKTDAVDAGGILEYLERMPFTAWQPPAPEILQLQAINRRIVQLQTELTREKNRGHASEFAGASGDAVANDIEINIRHLERRIERMHDSGLQLVHGVPALATKLAHLVSAKGIGEASAMRLLAEVLVLPVDLAAPQWVAHAGLDPRPYESGTSIHRPRRITKVGNRHLRAALYMPALVAIQHEPNVKAFYNKLVAAGKKPMQAVVAVMRKLLHAIWGMLKHDQDFDGNKFFRLAEKTA

SEQ ID NO: 386937 - protein, 402 aa, unidentified
MNAVGIDVSKGKSMVAIMRPFGEIVSTPFEIKHTSSDINSLVKLIKSIEGESRIVMEHTGRYYEVLAHQLSEANLFVSAINPKLIKDFDNDSLRKVKTDKADSVKIARYALDKWQNLKQYSVMDELRNQLKTMNRQFGFYMKHKTAMKNNLIGILDQTYPDVNTYFDSPARSDGSQKWVDFASTYWHVDCVRKMSINAFIDHYENWCKRKKYNFSKSKAEEIYGKAKELVPVLPKDDITKLIIKQAVDQLNSASITVESLRTLMNETASKLPEYPVVMAMKGVGTSLGPQLMAEIGDVSRFTHKGAITAFAGVDPGVNESGSYEQKSVPTSKRGSSDLRKTLFQVMDVLIKTHPQDDPVYQFLDKKRAQKKPYYVYMTAGANKFLRIYYGRVKEYLASLPES

SEQ ID NO: 386938 - protein, 468 aa, unidentified
MNNSIAPPNKHYRRRKGPQLPEGLSLINRKAAGIDIGSQRHYVCAADGDGIMQVANFGCFTDDLRTLTQWLQARDVQTVVMESTGSYWIPVYRFLEEAGLEVLLVDTRHVKYVPGRKTDVLDCQWLQKLHAFGLLSSAFVPDGEIIALRQLWRWRKTLVEACSEQIQHMQRALTEMNLHLQVVLSDITGVTGMAIMRAIVAGERDPVALAQLKHPLVKSPQEEIAKALDGHYRAEQLFILKQALETYDYFHAQITACDAQIEQEMESFERKADPDAFVSTKKHKKNPKKPRKNEPHFDMARELYAILGVNLASIDGIDAMTAFTIVSEIGTDIHRFPSVKCFTSWLGLCPNNEITGGHVRRCRTKKTRNRVAQALRIAAQSLWKSETYLGAYYRRMNARFGPKKATTATAHKLARLVYHLLKHGQAYVDKGQQYEEEQHQIRKLRHAKKLAAELGLALLDQDTGELVA

SEQ ID NO: 386939 - protein, 411 aa, unidentified
MSLDDAQFYVGIDWAMSEHAVCVLDRTGRKIATFTIAHTTAGFANLATRLGKLADTGHIPVAIERPDGRLVDALLQAGHPVVPVKPNAIKTWRESEVLSGAKSDPGDAHVIADYLRVRAHRLRPATPFSGHTKALRAVVRTRGDLVQARVAATNQLAALLDSHWPGAKTIFADISSAIALAFLTKYPTALSAKSLTEKRLAAFCAKQGYSGKRPAAVLLARLRSAPAGSTDPVLSQGVADAVMAQVGVLTALNTAIKTLDRSIAEKMEVHPDGGVFRSFPRAGTVNAAQILTEWGDARDAYTGPDAVAALAGVTPVTKASGRQRGVSFRWACNKRLRLAITTFAANSRFASPWAAGIYDRARASGKDHPHATRILARAWVRVMWRCWQDGTVYDPTLHGGARPSPEQQVAA

SEQ ID NO: 386940 - protein, 337 aa, unidentified
MSTIHILGIDLGKHCFHAVGNNHTGKDVIRRKFSRSQLLRFLSVLEPTIIAFEACGGAHWLARKCEAYGHRVRLIPPQYVKPYVKGNKNDFIDAAAIAEAASRPSMRFVSAKSEEAQVIAAIHRVRDGYIKERTACMSRIGAILLEFGLSFPKGHAKMKALFQWLAEQDIKLPPSLVAELLSIHEHYKYLNEQVSTQDRKLKAITENNENAELLKSIPGIGDLTATLCVANISSPSNFGGGREMAAWLGLVPRQYSTGGKSKLLGMSKRGNKHLRTLFIHGARSVLSRIETTGKVFGDWLVNLRATKPFNVVVVALANKLARIAWAVLYHRQAFKAV

SEQ ID NO: 386941 - protein, 319 aa, unidentified
MKTSNSKHWVGIDVAKDSLEVYVDSSRRLTFDNTYDGIAQLLKELGSLDGVHAIFEATGGYEAALSEALTRSKIEFTRINPRLARDFAKALNRLAKTDRIDAELLAEFGACLKPAPTILPDEASRLLHDLVTRRRQLVDMRSMEQVRLQQTRATRLIKSIERTIQFLTKQIQSLDDDIDASCKALPEFKAQDDALRTLKGVGPVTRSTLFALVPELGRLTGKKMASLIGVAPFNDDSGKGERRRHIRGGRADVRQVLYMAAMSARLHDPTIRAFYDRLLVAGKNHQVAIVACMRKLIVILNARVRDALAAVPQLSTAEA

SEQ ID NO: 386942 - protein, 378 aa, unidentified
MQPTQRVDRIATLEASLEVAARSWKLALMDGRRLRPAVLDVKASDLWCRLQELLARLQEFKRKWGLAASCRVTLIYEAGQDGFWIARALQANGIQVLVVDAASIPVPRQARRAKTDRLDALKLLDVLRAWLRGERCGVRMVHVPSEQAEALRQMPRERGLLQKEVQQHRDRCRKLLRLCGCVQEIDASFAERLTAGQVRCADGRPLPEQLWERLLRECERLELAHRQLAGLERTLLEQLPPNVQRCIATLARLKGIGWVGAMRLVLELFWRDFSNRRQVAACVGMVPQPYDSGESHVDQGISKQGNRRVRALLIEMGWMWLKYQPGSALAQWFARRTAGAAKRGKRIAIVAVARRLAIDVWRCLRDGVIPAGAELKNA

SEQ ID NO: 386943 - protein, 397 aa, unidentified
MYIVGIDIAKRKHEAAVIDGEGAVIIKPFSFTNNCSGYNRLLAMLTKAKLPLDEVSFAMEATGHYWLALFTRLQKEGFRVQVINPVQTNSIRSFYIRQAKTDPRDALLIAEVIRFGHFSESTLHPENIYELRELCRGRHAIVSMQADVKRKVVALLDQVFPEYETAFTNLFGNTSMAILQTCPTPKELSEMPLEELCHLIEVSSHKRFRMAKARELQELARNSFGFAMAGDVFSTMIRLYAKHLDFLKQQVREMDCKIAEIMETLDTPITTITGIGPTLGAYILSEIGDINRFSSAAKLAAYAGIDPTMRQSGEYNGVRNRMSKRGSPYLRHAIWLATSSAVLHDPALKLYFQKKRDEGKPYMASVGHACRKMVSIIYAVMRDNKAYTPCIPSEISA

SEQ ID NO: 386944 - protein, 344 aa, unidentified
MLHAGLDLSRKRIDVCLIDSEGEVVGEFAVPADADGIRGLVRRVGPVRVRAVIESMSGARFVHDSLEQLGWEVLIADARRSGLAPLACKTDRIDARVLAVLSFRDLIPAIWLPDRRVRAEREQARFRTQLVRLKQRIHSVLINWGKPCPVTDLFGVEGRRLLDELEVPEPWRGSIDASLLLIDDLDAQIAKISAELKLSGVEYRYLPLLMTAPGIGWVLGHTIGAEIGEIERFASPKKLVGYTGLCPRVYQSGEKDRRGALTKAGLKYLRWAMLEATMHACRHPVYRDRYQATKKRLGRQRGAKVAQVDCARRLTEAIWHMLTLRQPFAPHTPAAGGAAFRLAA

SEQ ID NO: 386945 - protein, 324 aa, unidentified
MDMAWLGIDIAKRKYEVALLRPDGKWRSKSIANTPAGHGELLAWLRRQHEGPVHACLEATGTYGAAVAESLHDAGHRVSVINPAAIEAFGRSRLSRTKTDPTDARLIAQFCRTQEPPPWAPLPREVRELQALVRRLDALEGMRQQERNRLAADTGSAAVCASIQHLIDTLDEEMTALKGQIVDHFDAHPTLRQQRDLLTSIPGIGAATAAILIAEFGPMARFAHARQCAAFVGVVPRERRSGTSLRGEPVLSKLGSAAVRKALYYPALTALRCNPIVTALRDRLRLRGKHPMAIVGAAMRKLVHLAYGVLKTAQPFDPNFLQTT

SEQ ID NO: 386946 - protein, 452 aa, unidentified
MPRRGNQQVGLPIVHDRAAGIDIGSRFHVVAVAQDLCDEPVQTFQAFTGDLERMANWLITIGIKTVAMESTGVYWVPVYEVLESRGVDVIVANAREVRSVPGRKSDISDAQWLQRLHACGLLRASFRPGRDIAALRAYLRLRERHLDYAAAHIQHMQKALTFMNLQLHHVVSDVTGTTALNIIRAIVAGERDPATLAKMRDVRCKASAETIRAALRGNYQPEHVFALTQALQLYDFYQTRVAACDIEIERSLNALNQGKAKPEVALPKARHQNRHSNAVNFDVRAALFQLIGSDLTQIHGIGPYLALRLIAECGTDLSRWHSAKHFTSWLTLSPGSKISGGKVLSAHTRKTANRVTAHLRLAAVTVGRTNTALGAFYRRLAARIGKAKAVTATARKIAVLFYNALRYGMAYADPGADHYERRYRERVIKSLHRRAAEFGYELHPTAAAAGVS

SEQ ID NO: 386947 - protein, 325 aa, unidentified
MTKVEKVAGIDISKHFLDVCVITQESERERRFTNDLQGFKELYAWIGEDMHCVMEVTGPYYLRVASYLHLNGLRVSVVNPLVIKRFCQMRLIRAKTDKADAKMIALYGLSETLVQWSVPEQCIITLQQLDSIGEQLSKQYTALHNQLEAFTQSGAMEKHVKQFLLKAIRDTGKQQAVIQTHIDDLVATHYSDMMKNLTSIPGLGKKTATMLIVLTGGFKKFSSAKQLSAYVGLAPRIFQSGTSVKGRSRICKMGMSRVRALLYLCAWSAKRCNKACKELYERLVANGKAKRAALIAVANKLLKQAFAIANSNQAYSINYSKNICL

SEQ ID NO: 386948 - protein, 282 aa, unidentified
MTIVMGLDQHRAQVTAEWLDTCTGELSRSRVAPADRAGVRRFLEGFRGQELEVALEATTGWRFMVEELRAVGAIVHLAEPAETAALRGNKKRAKNDRADARHHRELLMAGRLPESWIPPDHLLDLRARVRLRHALSEQRGEWQQRIQSVLYHHGCPPRGDLINTTGLAWLAGQALAAGAREQVTIALNVIDGLDAQLGPLDKSLRAYARRQPGCKALIAAYYGIGPLVAVTILAELGDCRRFSSSRLAVRYAGMETVASNCTSCSGDFGLRDVTGVRDPLAA

SEQ ID NO: 386949 - protein, 343 aa, unidentified
MDHFAGLDVSVKETSICIVDQTGRIVGEVKVASEPEALLQVLMNPAYHFKRIGLEAGPLSQWLFSALGEAGLPVICVETRHMQAVLKAQINKTDRNDARGVAQMMRVGLYRPVHVKTLRSQKLRMLLTHRKLLQSKAIAIDNDLRGTLRNFGLKVGMVGKVKFEARIKELVENFPDLAVLVEPLLVVRRVLREQLGILHRRLLAIVRDDDVCRRLMTTPGVGPVVALTYRATVDVPARFRNSKAVGAVFGLTPSKYQSGEINRTGAISRCGDEMMRMMLYEAAQSMLVHSARWSWLKAWAMKIARHRGMKKAIVALARRLAVIMHRIWVDGTEFRWTKEVAAA

SEQ ID NO: 386950 - protein, 346 aa, unidentified
MHDTLVGVDLAKAVFQLAVSRRPGRFDSHPRLTREQVLPFFAQLPAAVVIMEACGTCHFWARKLQQMGHVVILLPPHQVRPFVRRNKTDRADAKALVEAYRNGEIRPVPVKTPEQQVLTSLHRLREGWMAQRTARLNALRGLLREQGVFIRVGSAEVVPAVWSLIEDADSELAAPLRALFAEACEEIRQIERRLTLVERELAALARQIPAVERLMQIPGIGLIIATALVGFVGDLRRFPSGRHLASYLGLTPREYSSGLRQRLGRISKRGDAYLRMLLIHGARAVLSRARSIDRPDRLRSWALALEKRAHHNKATVALANKIARIAWAVSVKQTDYRSVPAGPKAA

SEQ ID NO: 386951 - protein, 438 aa, unidentified
MTDSMIRYVGLDVHKRVVEACIVDQAGKVVHRERFALNRSTLETFATEILRPTDHVALEATTNCWAVSDALRPHVARVLVSNPMATKAIAQAKVKTDKVDANVLAQLLRCDFLPEVWQPDEATRRLRELTGRRSALVGQRTMMRNRIHSVLAMRLIVTPARLFNAAGLSWLAELELDDQARLLVDSDLRQLQFLQQEIDALDDELARRGQASAEVKLLMTLPGADVATAEALLAAWGDVKRFPDGDHAASYLGLVPSTKQSANQCYHGPITKRGNSHARWMLIEAAQHLDTHPGPLGHFFRRLAKKKNRNVAVVAAARKLAAIGWQMLVTGAPYRYAVPRSTETKLSRLRVRATGRRRKSGPCKGSKRIAKLPGGSRTIKALAEVCRAEGLPQPKGLSPGERRTVDEADCAAFVAAIAAAQVVPRRAGRKVKEAATHG

SEQ ID NO: 386952 - protein, 364 aa, unidentified
MTETTASAVPLPTAPVTLTLTTGLDLGDRTTHFCTLDEQRQVVGRGKFKTTREALAREFGGIAPRRIVIEAGSQSLWISHLLRELGHEVMVVDPRRVQKLVAGNRKTDRRDAESLARLAVGVPELLGTAHHRTLEAQADLSMLRSRDILVRMRTKLVCHVRGILKSFGFKLPACSASYFHRRAADLIPVNLQPALKPVLEALGDLDRRIDELDASLQEVAAVRRPEVKVLRQVSGVGPVVAMAYALTVGDPRRFRRSRDVGAWVGLTPDKRASGDKDPQMSIHRRGDAYLRRLLVVASHYILGPFGKDSDLRRYGLRLCERGGGNGKKRAVVAVARKLAVLLHRLWVSGVPYEPLRNSTKQAVA

SEQ ID NO: 386953 - protein, 354 aa, unidentified
MQLQTIGIDLGKTLFHLVGLNQRGEVVVRKKFSRRQLLHFTANLQVELIGMEACGGSHFLGRALREQGHEVRLMPAQYVKPYVKTNKSDYIDAEAIAEAVERPKMRFVPIKSDDQLDLQSLHRVRERWVMRRTAVINQIRGLLLERGITLRQGRRHVDEALPGILEDASAKLSGAVRSLLAQLKLELDHLQMRIDEADALIQKIAGENEACRRLVVIPGIGPVTATAIVAAIGNGAAFKKGRGFSAWLGIVPGEYTTGGKQKLLGISKRGNSYLRRLLVQGARAVLQQRAKQSSGLSAWLAQLTTRVHSNVAAVALANKLARMAWAVLAKNEPYRPPMLAADGDNVTGLQMTPG

SEQ ID NO: 386954 - protein, 485 aa, unidentified
MILFRRFPRSDRLGRSRITELKLDKDMAKKSSNKAKSQRSRERALLQKVHLNAAGIDIGADAHWVAVPEDRDANPVRSFGVFTRDLILLCEWLKRCQVETIVMESTGVYWIPLYQMLERKGFEVRLVNAHHVKNVPGRKTDVKDCQWLQQLHTFGMLGGSFRPQAQMCVVRSYLRLRDTLSKDCNSLVQRMQKALTEMNVQLHRVISDITGVTGMSILRAIIAGERDCLKLAQLRHPQIKSSALDIAKALEGDYCQEHLFALQTALELYDSYLLKIMACDRHVQKALSTFEAKTSAPAPELNGMRSAEKRQEALRRHHLEQMTGADLTKLPGLDLLAVERILSEIGLDMSRWPSEKHFCAWLNVAPNHRISGGQILSSKPRKNANRAAAALRLAAQSAMQSKSAIGAFIRRIKSRLGAPTAINAGAHKLARLVYRMLKFGKAYVETGQEAYEKFFKERTLRNLQRKAHQLGFQVTPITTPTVPVS

SEQ ID NO: 386955 - protein, 376 aa, unidentified
MEHNSEAFIGIDTSKLKNAIAIAESGRDGEVRYLGEIETTDAATRKLVKKLAAKYRKVTFCYEAGPTGYGLYRLITSLGHECSVVAPSLVPKKPGDHVKTNRRDAVGLAKNLRAGELTAVWVPDTRHEAMRDLSRAREAAVDDLKSKRQQISSLLLRLGLHYPGKKTWGKSHRRWLASLKLDQREQRIVIEELFGAERQAQERVDRLASAIIDAVPEWSLAKIVTALMAVRGIDLVAAVTIMAELGDLSRFASPRELMAFLGLVPSESSTGDSVKRGGITKAGNRRARRILVESAWSYRYPPRISRDKLAKVAAAPEPVRAIAWKAQTRLSSRFRALIKRGKRPTIVATAIARELCGFIWAIQRAVTAPAGRQLVS

SEQ ID NO: 386956 - protein, 348 aa, unidentified
MDKITVVGLDLAKQIIQVHGVDVAGRVVLRKAVRRERLLALLAQFPCCVVGMEACSGAHHWARELSRLGHAPRIMAAEFVRPFRKSVAAKNDANDAEAICTAVVQPNMRFVSIKSVEQQALLSLHRVRQGLSEERTATINRLRGVLAEFGLVLPQSVAVVQRALPALLADDGRLPPLVRRSLQALLEHLRDLDSRIAGFDRDIAQHARSSASAQRLGALSGVGPLTASAVVATVGNAHDYRNGRQFAAWLGLVPRQYSSGGKCKLGRITRRGDAYLRALLVQGARSTLQAALRRAPARHDRLSAWIVQLARRIGYHKTLVAIANKHARIIWALLAREQTLDLARASTP

SEQ ID NO: 386957 - protein, 376 aa, unidentified
MKQFNDIYVGLDVHKASIAVAIVRGARSAPQYFGEIPNTPEAIKKLIHKLSPEGEVMNLCYEAGPCGYELYHQLSNMGHHCAVVAPSLIPQKSGVRIKTDRRDALNLAKLHADNSLTPVWVPDKEQEGMRDLSRAREDFKQIETKARQRLAAFLLRNGKVYAGKSKWTQAYWRWLETVTFETPMQTIVMQEYVEAVRQAQRRVLSMEGQIRVAARGWSLEPVLKSLMALRGISMTSAVTILAELGDLSRFDNPKQLMAYLGLVPSEHSSGARQRRGGLTKTGNGHVRRVLVESAWNYRFAARKTRDIQKRAEQTSEAVQAIAWEGQKRLCARYQRLLGAGKIKQQVTAAVARELCGFIWAIACEASGKAHASRATS

SEQ ID NO: 386958 - protein, 385 aa, unidentified
MTATTRPFDPIALDDTLCLALELGEGRWKLGFARGFGGKILRRQVLARDGKGLLAAIAWAQERLALPGSTRVVSLYEAGRDGFWLHRFLVAHGIENLVIDSSSLEVNRRRRRAKTDRLDLEGLLDLLQRHLAGSAKKVFSVVRVPTVEEEDRRHLHRELVSAKRDRTRITNRMKGLLANQGLTLDLKKNVPVQLAALRQWDGAALPSGLQARLAREWERVCFFDALIDRLESERRELVRTSSDPVMKQVQKMNLLRGIGMNSAWLYGMEFFGWRRFRNGKEVGGLAGLAPTPFQSGESDREQGVSKSGNRYVRAMAIEIAWGWLRFQPQSALTKWYERRFGHGSKRLRKIGIVALARKLLVALWRYLETGLVPEGALLKADARIR

SEQ ID NO: 386959 - protein, 370 aa, unidentified
MQTIHRSRTLFVGVDVHKDTHTAVGLSPFGEKVFEMTIGNEAEDFISLIEKTKVEAEKSGLVPSFGLEDVHSWGERLSSFLVEEGLPVRAVAPILVDHRRSKTTHPEKNDSLDASGVAEVMIQRIDSLPLYKLTDEAQKAKQIRELSLEREWLVKERARLKNQLHILLHRIHNTCYRTKFKDPFSKKALRYWMRSVPKNTDVILEQRMKRAVRRILDLREEIQEIEEELTALMKDNGQTLSTASGCGVVIAAEIIGEIGDINRFHSPGALAKYAGCAPREHSSGKTIRWRKTRSGNRRLNRAFHRMALSQISRSGNDAARAYFKKKVSEGKTKAQALVCLRRQLVNVGTVAEWQNRRFCHAEIRVILDKK

SEQ ID NO: 386960 - protein, 342 aa, unidentified
MEHYAGIDVSLECSSVCVVDVSGKIVREAKVASEPEVLIAWFRSSGFELERIGLEAGPLSQWLFAAMRQAGLAVELLETRHVRKAFEAMPVKSDRNDARGIAQLMRLGWFRPVHCKSISAQETRSLLTARKLVQSKLGDVENSLRGILRGFGLKVGKTTDGKFAARIEELVAGHSHLQEITRALLAVRAVLRKEFAAFEKQVRKMARSDVRTRLLMSTPAVGPIVALTYASAIDDPARFKSSKQAGAHFGLTPKKYQSGETDYTGRISKIGDASVRTVLFESAHVMLTKPLKGCTQLKSWAMRIAKRAGMSKAKVALARRLAVILHRMLADGTTFNAAAAAA

SEQ ID NO: 386961 - protein, 411 aa, unidentified
MELVHPRCAGLDVAKDEVVACVRTPDGRGGRAQQVRTFPTFTSGLEALAGWLAAEGVTRVVMEATGQYWKPVWYVLEEAGFELLLVNARHVKILPGRKTDVCDAAWLAELLEHGLLRGSFVPPAPIRELRDLTRYRKRLIQAHASEGQRVQKTLEDAGIKLDSVAADVLGVSGRAMLTALINGERDPGVLAELAKGRLRAKLPQLRQALRGRFGAHHALLIRLALAHLEQLEGSIATLDTHIDRVLAPFAQARDRLDTITGVGKRAAECIIAEIGVDMAVFPTAGHLASWAGRCPGNNRTGGKRRSGKPTKGNRWLGEVLIECAWAAARSRDTYLSAQYWRLARRIGKKKAAVAVGHSILVIAWHLLTDNCDYQDLGGDYFVRRDTDRQRQRAVAQLQALGYRVVLEPVTV

SEQ ID NO: 386962 - protein, 346 aa, unidentified
MEHYVGLDVSLKLTAICIVDRTGKIEREGVVASDPETIAAFVKSHAPHVARVGLETGATSTWLWTELNKMGLPVICIDARHAKAALKLQINKSDRNDAVGIARIMQCGWYKEVRVKDLDSHAIKALLVSRALLVKIKRDLENQIRGLLKNLGLVIGQAKMNVFSVRAAELAEARPELAAAVEPLLKAREAVGRQIADLDRKVMRLARNDAQVRRFMTAPGVGPITALCFLATIDDPTRFKRSRSVGAYVGLTTRRYASGEIDWTGRISKCGDKMLRSYLYEAANVLLTRVAKWSALKAWGIRLAKRSGLRKAKVAVARKLAVILHRMWIEGTEFSWSSKEAANQPV

SEQ ID NO: 386963 - protein, 314 aa, unidentified
MTSNAEFIGVDVSKATLDVASWRSNEYRRFQNDPTGIQELIDWLKILQPELIVLEATGGLELPFVAELAYEKMPVAVVNPRRIREFARSIGQLAKTDKLDAKVIAHFGAATHPEARKLPTNDEEKLTALITRRRQIIEMLTAEKNRLHSARFSMKERIELHLSWLESELRDLDNEITKFIHQSPIWKEKDKLLRSVPGVGPVTSATILAMLPELGTLNRKKIAALVGVAPVNKDSGRRQKKRRVYGGRANVRSVLYMAALSASKHNPRIKMFYDHLIRMGKEKKVALTACMRKLLVILNAIIRVNQNYTLTPNF

SEQ ID NO: 386964 - protein, 423 aa, unidentified
MGRSIGLDVHRDFCQVAIADGGRARSAGRIATTPEQLQLFAQSLAPDDRVVMEATGNALAIARILQPHVGEVVLAHAKQVRAISHARVKTDKIDAQVLADLLAADLIPNVWIGDDRTRMLRRLVSRRRGLVKRRTQVKNEISAVMHRNLKGRNPASDPFSKKGRAWIAAQQLPVDEQLTVDAGLRQLDFLDQELGQIDAIIAQQVLGDEDVRRLMTIPGIDVVTAATLVAVIGDVHRFPTSRHLVGYLGLHATIRQSGNGPARHGRVSKEGSAAARHVLVEAAWSTAKSPGPLRAFAQRTATRRGRHVATVAVARKLAVLAWQLLTRGEDYAFARPSLVRRKLRALERAAGAPRAKPGPKPDPVWNTTNEAAERRVAEQAEAAYRRFVADWQTSGPKVGAGATPERASQRPSKGKAARQATSS

SEQ ID NO: 386965 - protein, 402 aa, unidentified
MNCVGIDVSKGKSMIAVMRPFGEVVISPFEVLHTDSELSKLAGLLKSLDGETRVVIESTGNYHAPVAWLLHDAGLYVSVVNAMLVHDYGNNSLRRAKTDKKDAVKLANYGLDHWLILPRYVPEEDTRLMLKTCYRQYQQYSKVQTMLKNNLISLLDTAFPDANRLFTSPPRADGSEKWVDFVAAFWHCECVCGLSEKAFTAKYQKWCKKHGYNFSKGKALDIYASSCGHFGVMPKTDTAKLLVEQAVSQLRATSAALAALKQEMQSLAASLPEYPVVMEMFGVGPTLGPQLMAEIGDVRRFHSKKALVAFAGIDAPPYQSGQMDVRSRSISKRGSASLRRTLFLVMGVILQHAPMNEPVYQFMNKKRSEGKPYRVYMIASANKFLRIYYASVKAYLDSLEHD

SEQ ID NO: 386966 - protein, 339 aa, unidentified
MDITTLGIDLAKNVFQLHGVDENGAVALRKRLSRNKLLAFVANLPGCVIGLEACGGAHYWAREISKLGHEVRLMSPQYVKPYVKTNKNDYNDAEGICEAVARPNMHFVAVKNTEQQDLQAMHRVREGLMKDRTALVNQTRGLLAEYGIVVAQGVHKLRGELPLILEDAQNQLSARGRELFAELYERLVGLDARIGEADARLQRVFEDNELCRRLAQVEGVGVLTATALVAAVGDAKLFKNGRQMAAWLGLVPRQHSSGENKERLLGISKRGDRYLRMLLVHGARSVVYRADNKEDARSRWVSQVKARRGVNRACVALANKNARILWALMAHEEGYRQVA

SEQ ID NO: 386967 - protein, 309 aa, unidentified
MDKVYVGIDISKDSLDVAVHTCDKQWQFPNDHAGIHRLCEMLVRLKPALVVFEATGGYEMPLYFGLDEANLPATPVNARQIRDFARSTGKLAKTDSLDARVIAHFGYAIQPIPHPIPQTQGLKKIQARRIQLLEMITAETNRLQGAQGVLKERIEAHITWLKEELTNIDCELRDMIEKDPVWREKDKLLRSTPGVGPTVSATLIAQLPELGTLNRRQIAALVGVAPLNRDSGILHGRRTVWGGRAQVRAVLYMAALVATRFNPVIRSFYQRLCSAGKRKIVALTACMRKLLTILNAMLKHLVPWSYATC

SEQ ID NO: 386968 - protein, 408 aa, unidentified
MKRYYLGVDWADEFHQVWVSDPEGKKIAEMKVVQSTAGLGELGRWLHERKAEEIELWAAIEKPHGRIVDFLLDHGAVVYPVNPKALDRARDRFRMSGSKSDLFDAYVLAEFVRTDHVHLRALEPNSEPAQELKMLTRDHDRQMRQKTRLLHQIEITLKEYYPRPLEVFSDLETHIARDFLKEYPTPQALSKLNRRRWNHFARRDHHLSEARCDELWEKIDKPQLTSPPYVIRAKAKLLLALVVQLEALLPAVESYSEEIKRFFDSMPAAELVKSLPGGKSGTTIPKLWAELGDAKNRWQSFRHLQAEGGGVPVTKSSGKSHVVHFRFACNKYLRHAIYWVSFNSLNRCEWANKYYRDQRAKGHSHPRALRALGAKWLKIIFVMWRDHKPYDENYHLANMARQRMRQAT

SEQ ID NO: 386969 - protein, 309 aa, unidentified
MTIHPCYIGCDIAKAHLDLFDETSGQSLRIANTSEAITEWLSSLDDPAGCFIAFEATGSYGQLLRQTLEQAGLRFTCINPGRARDFARATGRLAKTDAIDARMLAAMARSLALTPDAVSDPARSALAQLHKRRDQLVAMRAAEHVRYSEGLDPGGGLMRHLAWLDAEIAMFDRLITEALRANEALARAQAILRSAPGVGPVTATTLIALMPELGHCSSKAIAALAGLAPFNNDSGRHRGKRSIRGGRQRVRRALYMAALAAMRTSPRFKAFYDAILERSAAAKVALIAVARKLLTILNAMLKTNTAFQP

SEQ ID NO: 386970 - protein, 409 aa, unidentified
MRVIGLDIHRAFAEAVAWDEGKLKRLGRVDMRRHLLEAFAKKLAKEDVVVVEATGNASSLATLIAPHVKKVVIANPKQVRIIAHAKIKTDTIDAKVLAQLYASGFLPEVWIPNEPTQALRRQVTRRNQIVRQRSRLKNIIQSILHSHLIPSCPHADLCGASGRAWLFHQILPEDERLAVERHLREFDRLGEDLKVIERDLARSALGDEGVKRLMTIPGVDMVVGLAIVAAIGDAGRFEQSQKLVSYLGLNPSVRQSGPGPAYHGRITKQGRGHARGMLVEAAWAAARAPGPLRAFFLRVRARRGQHVAAVATARKLAVVIWHLLRKGESYAWARPALHARKLRDLELKAGYKAERGQRGAAHAYNIKSHRDEERRWVEQAETAYARFVAGWNPRGPKRARTGAANEGRQ

SEQ ID NO: 386971 - protein, 382 aa, unidentified
MTETTRSMECSAAAVTLFVAFELGSTKWVMAMTTPTTSQRPRLRQIAAGDLAALQRELLTAKARFGLGLEAPVQSCYEAGRDGFWLHRWLSAQGIRNVVVDSSSIEVNRRARQAKTDRLDAVRLLDLLRRWARGEARVWSVVHVPSPEAEAARQLTREITTVRVDRMAVRNRIGGLLATQGIRCDLTRQFLERLPQLQTGDGHPLAAAWQDRLAREWTHLQAIERRLATLRTMRQEAIAAGADRVARVAQQLCQLRGVAETSAAFYSAELFGTRTFANGRQLGALTGLVPVPYRSDQRVHDQGISKAGRGELRRVSIQLAWGWLRWQPDSALAAWFRHRFGSAGGRSRRIGIVAVARKLVIALWRFVEHGVVPEGAQLKPTL

SEQ ID NO: 386972 - protein, 408 aa, unidentified
MEIFCGIDWAERHHDVAVVDQTGRLLGRRRISDDLAGFSDLTALLVEHAGEQGEQVTGVPVAIETDRGLLVAALRAVGHPVYAINPKAVDRYRDRHAVSGAKSDPADALVLAHLLRTDRHAHRPLPADTEQAQVVRVLARAHQDAIWARRQDANRLRSLLREFFPAALTAFPDLTTRTALTVLAAAPTPAAAAALTRANLTGLLHAAGRGTRPADAARLADIFAAADQLRQSTEVETAMGAAARAIVRTLAAANQSVHELELALADHFEQHPDAEILDSLPGLGLVLGARVLGEYGDDPTRWPDAASRRNYAGTAPITRASGRSRIVLARHIRNKRLADACYLWAFTALTKSPGARAYYDTRRAAGDTHNAALRRLASKLLGQLHHCLTHRQPYDEHHAWPPATPAAA

SEQ ID NO: 386973 - protein, 353 aa, unidentified
MTVYCGVDFHARQQTISCCDTVTGEVQRVELDHQRDDVRAFYAQFTGEVIVGLEASGYSGWFEEMLEELGHTIWMGNPAEIRRKAPRRQKNDQRDADLMLDLMLKGDFPRVHRQRAASRAVMRQLRYRHKLVKLRTIAKNSLYAIGINAGLPLKGKLLTTRGETQLRGASLSPVLSSQRDEWLELVETLDQRVAAVETQLEQAAAGDSQVVRLRTHPGVGLLTALAVRHTLDPAGRFHTGRQVAAYVGLDPVEDSSGPVRRMGGVSKEGSRLLRFLLGQAGHSACRTDADLKRFYQRLVHRRNRPKAKAAVARKLLVRCFIMLRDQIDYAVFVQRGVAARSARKSHRPNVPDL

SEQ ID NO: 386974 - protein, 387 aa, unidentified
MYFVGIDISKFKHDCAIVDELGDVITPSWSFQNDREGFSLLKELLDALNGEKKIGLEATGHYGQNLKLFLENNDFSFMEFNPLLINRFVHSKSLRKTKTDSIDALMIAQYLMTVEYKPYPPSFYTLEKLKSLTRFRDSLIRQRSKQLVELTNILDKVFPEFKSFFKGRFSATALYILSHYASPEKISNMNSKSYEPLRRLSRGRFSMVDFVELKTLARNTVGSTCDYLLQEMEITIDIYNQLQSKVEEIELQIHNCVLGLTPPMLTIPGIGVASAAVILSEFGDLSKFNSPSKLLSFAGMEPGYFQSGTSESTGKMVKHGSSHLRYAMMNCAQTVINNEPTFAAYYAKKRAEGKEHRVALTHVAKKLLRVIYTLQTKELSYNPDLVR

SEQ ID NO: 386975 - protein, 361 aa, unidentified
MRYYTRNHPFYCGIDLHSRTMHVCILDHEGNAVVDQGIACNPKAFLKLIAPYRQGLVVGVESIFCWYWLADLCQEEKIAFVLGHAFYMKLIHGGKGKNDRIDAGKIARLLRCGSFPLAYAYPKGMRETRDLLRRRMYLVRHRSGLLTHIHIVHSQYNLPAPDKQLHWHSNQAGVAERFASASVRQNVSVDLRLINHLSQVIVELEEYLIRTARVEDRQTYERLQTIPGVGRVLALVLLYETHDWSRFSSVGQFLSYARLVRCLHESAGKTVASGNNKIGNPHLKWAFAEAACLMLSVSERARRWKQRYQQKRGAGKAMSVLAAKLGRAVYHMLRKQEAFAEERFWNSGRRAGNQPALAAKA

SEQ ID NO: 386976 - protein, 323 aa, unidentified
MIKKYFNIVIGADIAKKKFDVACLLEGKFKHKVFTNDAAGFASFVAWFLSLCGDTSPLICMEATGAYSLPLADYLVNHGFPVSLVNPAKIHAFAKSELSRAKTDKADAKLIARYALMTQQPLWIPPSPNIRELQALVRRVEHLLEMIQMEQNRLETADASTHLSITNVLNTLETELKSTRKAIKDHIDNNPDLKQRSDLLETIPGIGEACIAHLLLALSEHHGFTHAKQVVAFAGLAPVLRESGQWRGNTHISKTGDAALRKVLYMPALCAKRYNPVIQVFWNRLQANGKNGKAITCAAMRKLIHIAFGVIKSGKPFDPNYAI

SEQ ID NO: 386977 - protein, 420 aa, unidentified
MTSANIIPADAVLVAIDIAKVRNEVLIEDPSHKRRRRLPVLNTRAEHDRLIEILRTYGRPVVCGFEATGNYHRPIAWRLAEAGFEVRLVSSLALARTREALHNSWDKNDPKDAQVILHMLKIQATQRYHDPLRAGINDVQELSKTHEAIARAKTEIQHRILTHYLPLYFPEIDRFRGNSRSDWFFAFLDAFPTPASISALTKEEFVKAAWNVVGRKVSKTQILMDIHETARTSIGLPLPLDAPAIHMFRMVIAEARSLIRQRNEIEEQADELLRHSQDYQLLRQIPGIGPINALTIIAEAGDLRRFHHHRQFLKFCGLDLSTQQSGQYRGQTRLSKFGNARLRRTLWIAGQVAIRQRENGFRHKFERYIARDRDNPDLRRKAMTAITAKMARVVHAVVKSGSDYRPFVEGRVPGGRTSVS

SEQ ID NO: 386978 - protein, 447 aa, unidentified
MEVVNPQAAGIDVGSRSHWVAVGQSEQDVREFGVFNQDLYAMADWLHEKKVKTIAMESTGTYWQNLYAVLMSKGFDVILCNGKFTKNIKGKKTDVKDCQWIQKLHTLGLLTGSFLPDGKTEELRTYCRHRANLLHSAAGASKKMQKYLRLLNFRLDVVVRDICGLTGLLIIRAICEGETDPQKLASLRHGNCRKSKEEIALALQSNGRRDYLFALKQELDTYDHLQKKIEECDKEIEKMLDEIINSDDNKREHHIDTKPHKRINKNTPKDIDLNLKAYQMFEGTDLLAIEGISFSTVLSLMSEVGIEGIKKFKTAKHFASWLRLAPNNKVSGGKVLSSKVPKGSNRLKIALRNAANAIGNLKDSTPLRDFFHRISFRKGRVSAISATARKLAVIIWNIVVKGEPYVNPEGYLFLDQKRKLGLVKRIKKQIDKFRLTNEDLGLETAQI

SEQ ID NO: 386979 - protein, 316 aa, unidentified
MQTPLVFVGIDVSKARLDVGLRPSDERMSVPYDAHGITTLLAQLTQVQPTRIVMEATGGLERLLLRALVDAALPVIVVNPRQVRDFAKATGQLAKTDTLDAQVLARFAEVIQPALRVIPDAQTQELAALLARRRQVLAMQGAEQNRLDRAPDRVRKRIAAHLRWLRDELARLDEELDDLIQQSPVWRAREELLQSVPGIGPVMSRTVLAELPELGLLNRKQIAALVGVAPFNRDSGRLRGHRTIWGGRAPVRRALYMAALVATRWNPVIRLFYQRLRAAGKAPKVALVAAMRKLLTILNAMVHAGTPWQPVVAQDS

SEQ ID NO: 386980 - protein, 370 aa, unidentified
MDQDIKIFVGLDVHKDSISISACEAGREASQFRGVIRHDVPALLKVLRKLGSPATQLVGYEAGPTGYGLHRRLIQEGYGCQVVAPSLIPHRPGDRIKTDRRDSARLAELLRAGELKAIWVPDVEHEALRNLWRAREDAVQMRLKGRQQMKAFLLRHGRIYAGKTSWTKSHARWLADQAFEHAADQLAFSEYVLAIQGADQRLARLDQALVQTTRTWRFEPVVSALRTLRGIDTVSAIGLVAEIGDIQRFAHPRHLMSYLGLVPSERSSGATVRRGAITKTGNTHARRLLTEAAWNYRYPARLSNTLKARQEGQPEAVRRHAWKAQVRLCGRFAHLQRRGVHINKICIATARELTGFVWAIARTAAIQTSP

SEQ ID NO: 386981 - protein, 414 aa, unidentified
MAAETIAWFAGVDWGSERHQVCLVDAHGTVIGERDYPHSAVGLAELGEWILSISGTADAVAVAIEVPHGPVVDALLDRGFLVYAINPKQLDRLRDRFSVAGAKDDRRDAYASADGLRTDRHLFRRLQVADPRLVELRAWSRLAEELQEERVRLRNRVYQQLWRYYPQMLGLTDDLAATWFLELWERAPSPAKAAGLRKPAVERLLKQHRVRRVDADAVLRILRQPAIKVADGVVEAAAIHMGSLVARLRVANRELKHAERKLDELCGAIGEAGAAAADCVTQSDVVVLRSVPGIGKITLATLLAEASGPLSRRDYQALRTLSGVAPVTKRSGKSRVVTMRYAAHVRLRRAVYHWARVAAQHDHRSRTRYAALRRRGHSHGRAIRGVADRLLALACVLLQRQALFDPGLSQAAAP

SEQ ID NO: 386982 - protein, 346 aa, unidentified
MVIMGCDFHPVFQQVAVMGTETGEVTEHKSTHADGEAEQFYRRLLGPALIGVEAVGNSQWFLDLAKRLGHEIWVGDPAQIRASYPRKQKTDRRDAGHILKLLLGGRFPRVWVPGAALRDLRQLVLHRHRVVEMQTRVKTELQHLALNQGIQQKRKLWNKQGRSALVQIPLDTWANQRRADLLCLLDVLHDQILLLDRAVEDAANSHLPAHLLMTQPGVGPNTALAYALTIGDPKRFPRSKQVASYLGLVPRERSSGGKQRFDSISKQGNPLLRTLLVECATIAVRLDPSFRKEYLHRCDKKHSAVAKVAAARKLAARLYWMLRTETSYPQILHIEGSPPHSMVSAS

SEQ ID NO: 386983 - protein, 411 aa, unidentified
MNPVIGLDVSKGESQVQAFLDKGKPYSKSFKVSHTIEGLDLLVEFLEVVKRETGKRPPIVLEATGHYHSSVVQYLEDRGYLMIIINPLISYKAKSSSLRKVKTDAIDAYHLCELFYKEDLEPYKKRGVQLLNLRNLTRQHENITGVLIQTKLQFQAILDQVFPEYRGVFGDLYSVVSLLTLSEFPSSEDILEASEETIADKIAELCKSRSHRWAKEKATQLKAAANRNPFEKTVYQSHILSLGMYINIILQYKEHLSKLESEIDALAKGVEEYNIIKSIPGIGEKIAATIISEIGEIDRFTDPKKLVAFAGVDPSVFESGKFTATKNRITKRGSSRLRHALYMAVRCAIRDCRKKKTTDEIIPRNKRMREFYDKKRDEGKPFKVAVIACVNKLSHWIFALLKNKTTFQDIA

SEQ ID NO: 386984 - protein, 416 aa, unidentified
MSIETPLEIQVSLDIGSTHHAVAIGLSNGKIVEQFTVSHNGEGFKEFFNRIEVLEKKFKHPVVIAMEGYNGYARPLDSMILARNYRLFSINSLKLARFREIFAGPAKTDQLDARLGLQLLQAKEFKALEKGVIHEIGVVPEGNRILKRLTRWRKRFVREKTRGVAALHAELLAVCPGVLEMTTAIDNIWFLQFLRAREDITKLARVSKKSLLKIKGVGERTVEKIIEWQAKAHFSDEVAWVSELIVDEVNHILDLHNKIRKLDAKITAYSAKSEEAKLLQTIPGFGPTCSAEIAGEIGTMERFGKEASLALYIGMSALDNSSGKYRGGKQPKHVNTRAKAAMMIAVDRHRKFVGESQAYYEKKRLEGKKHNQAIRALGRHLTRIIYKMLKDKRAYQTISREVEPVIEPTEKLRIAA

SEQ ID NO: 386985 - protein, 374 aa, unidentified
MSKIARIGIDTSKGSFQLHGVNEKDEVVLRRTVRRRQFLEFMAKLEPTVIGLEACGASHHWARELARLGHRVMLIPPQAVKPYVSPGRKNDKNDAEAICEAMSRPRVRARLVPVKSVEQSASQMLMGVRDSLLKRRTQLCNTIRGHAAEFGLVAAKGLDKIEPLLVRIAGDDGLPALAREMFADLGQEHAELSKRIAQIDRKLAAFHRSNELSRRLMEIPIVGPVGAGLLITKIINPHGFRSGRLCAAWVGLTPKNHSTGGKQRLGGITRAGDESLRAVLVSGATAYIQQVRRGRIVPSPWLAALLERKPPKLAAVALANKTVRIAWKLMTSGERYDPTHRVDREGPGASLYGGLRAEPLAPSPTGGDSHAVAA

SEQ ID NO: 386986 - protein, 407 aa, unidentified
MDVVHPTCAGLDVHQQTVVACARAGSGKAVTYAVRTFGTTTQDLLALGDWLTTHGCTHVAMESTGVYWKPVWQVLDGHFELVLANAMHIRNIPGRKSDVNDATWIADLLAHGLIRSSFVPPAAVQELRDLTRTRKQLVREIAQHTLRIQKTLETANVKLTSVLADIMGVSGRAILAALVAGESQPERLAALASDKVKASRAELTAALHGRVTAHHRFMLKLHLRQIEALEAAVRDVEARLGEALAPFRAAVDHLITMPGVSETVARVIVAEIGFDMTRFPSAAHLVSWAGLCPRLHESAGKRLSNRTRSSNPWLKTTMVQAAWSAARKKDSYFRAQFLRIKSRRGPKKAVLAVAASMLTAAYHMLRDGADYRDLGADHFDRRDKAKLAKRLIARLHDLGLVVDVRAA

SEQ ID NO: 386987 - protein, 363 aa, unidentified
MKTINQQNNAQADGVPVVSKPYRCIKLGLDVHADSIRVVRMIDGATPQPAQKMTPDEFPKWAAKQLTLADRVCSCYEAGPLGYGLHRKLLALGIENIVIRPLVLDEYRVRVKTDKTDALALTKRLDTYVRGNRKAFAAIRVPSEQEEQDRTLSRQREQLVREARRLGAQGRSLMLFHGFHIHGVWWRVQWKTLKEKLPGWLVERLEVFRALLQVLDAQLRKLTQAVEAQAPAVRPRGLGALSFEVIRREIGDWRRFNNRKQVGSYTGLCAGVASSGGSRKTLSINKCGNPRLRSSLVTLAWRLVQYQPRCRLIQKWKRVLLKPQISSGARKKAIVAVARQLAVDLWRWQTGRIQAEQLGWRMN

SEQ ID NO: 386988 - protein, 347 aa, unidentified
MLHAGLDLSRKKVDVCLLSEAGEHLDQISTPPDGDALRTLARRIEETHREPVCAVIESMSGARFVHDTLEREGWEVEIADAQKVKGLAPLACKTDKIDSRVLAVLSHRDLVPAIWLPDPRVREERERARFRLHLVKHKSALKCRIHSTLINFGKPCPVTDLFGVEGRRLLERLRVPEPWRGNITASVALIDDLEGQIAEINTRLREGHADHPYIPLLLTAPGIGWVLAFTIAAEIGEIERFASPQKLTGYTGLCPRVNQSGDKDRRGPLTKHGPTYLRWALLEATMHALKHPAYSERYQRNKRRLGKQRGAKVAQIDIARRLAHAIWHMLSRQEKFAPRGAAFRLAA

SEQ ID NO: 386989 - protein, 339 aa, unidentified
MEILRQNVGIDISKDTFVATLTVLLQGQEIKHLKTKTFQNTPKEIKEFYQWVKKNKHGTCEINFTMEATGVYYENLAYYLFGKKETVHVLLPNKAKKFAESLNIKSKTDKIDSKILGQMGVERKLMRWEMSSKIYRKMRVLTRERKQLVKEITRVKNQLHAEGHTAEPLKSTMRRMRSLIKFLEKQKDKIEQELKKLVNTDEELAKKIDKITTVPGLRFITVAGIIAETQGFSNITSIKQLTSYAGYDVRIKQSGKWKGKPTISKIGNKHIRGALFLPALSIKTHTETYGRFYDRINEKKQNGLITGTAVQRKLLGLIYTLWKNDTIFIDNYQKQEVLD

SEQ ID NO: 386990 - protein, 419 aa, unidentified
MASNKAKKVKRINKKTMLTTIDIGKNIHYGYFRADDGHELKPFSFYNTQKSFHQFWHKICVFKQQHQLQEIVIGFESTGPYAEPLYHYLKQKPVTLVQINPMHSKRVKELAGNSPNKTDRKDPRVIADIISLGHALTLVVPEGAAAQLRRLTHGRERALKTRTAMLNQLQHLIFVIFPEFLSIMKNMSTKTAAYLLKHHPTPESIVELGVDDLTQVMKKVSRGKLGRQRAEKLYEAAKNSVGIFEGKQSIVLEIEHLNAMIENENCFIESLEKQMVCYLEQIAYSVSLLSIKGLGVVTVAGLIGEVGDFKKFDTHSEIMKLAGFDLFEVSSGQHQGQRHISKRGRALMRKLLFFAAINAVKTHGIMHARYHQMLDNGKPKIKALVAISRKLLRLIFALARDNTIYIENYDHKHKYKLAA

SEQ ID NO: 386991 - protein, 352 aa, unidentified
MTEVSTIGLDLAKNVFQAHGASAAGEVLFRRKLRRDQVLGFFAAQPPCLVAMEACPGAHYWGREIGKLGHTVRLIAPAYVKPFVKRQKNDAADAEAICEAAQRPTMRFVAVKSEAKQASAVIFRTRDILVGQRTQLINAIRGHLSEYGLIAPRGPFHVGRLIAHIEDPASSVPEAARSCLALLVEGVRHLQEQIGKLDAEISARAKADEMTQRLMTVPGIGPLIATAIEALAPPAETFRSGRDFAAWVGLTPVQRSTGGKERLGRTSRMGERTLRRLLIIAASAVIRWAKRKGVPKGSWLGRMLERKPPMLVIVALANKNARIAWALLTKGEKLPGSGRTCLSGTDLRPLAA

SEQ ID NO: 386992 - protein, 356 aa, unidentified
MISRLTVHVPKIIIGVDTHKEEHVAVVIDKLGARIGQLTLPTTKVGYVALECWARTLGEIEAFGVEGTGSYGAGLARFLKGQGHTVIEVNRPDRSTRHRLGKSDPTDAEMAARSVLAGVALDQPKSGVEEVEMIRMLKSTKNSAMKGRTQAINQMKALVVTSPVELREVLSGLTSSQLVVRCSGWRSGPLDTPTTAAKYALRSLARRYAQLADEIEKLNKELARLTVAFAPMLVDSFGIGPDTAADLLVTAGSNPERLKSEAAFAALCGVSPIPASSGKTNRYRLNRGGDRRANAALYRIVIIRLRYDIRSRTYLQRRTAEGKTKMEVIRCLKRYVAREVFGILHEIGMRHTFQNT

SEQ ID NO: 386993 - protein, 484 aa, unidentified
MERLCKGRRPGRAELNSLWKISMKPKRVESNKKASRRPTPNNWHKMNRKQRREMTRKIQSEDLSLEVVHPDAAGIDIGNESHYVAVPPTRDSQPVRRFGCTTSELKGMAVWLKQCAIRTIALQSTGVYWIAVYDILEEAGFEVYLVNARETKNLPGRKSDVQESQWLMKLHTYGLLRNSFRPSQEIRTMRTYWRQRNDLVRAAGRHIQRMQKALTQMNIQLANVLSDVSGMTGQAIVKAILAGERDPYELAALRNWRVKASEEEIARSLEGNWQEDLLFVLQQEQDGYEFCQKQMAECDQRLQQYLRKKKRGNAPQFDLRAELFRMTGTDLTQIDGIDVTTTMTILSEAGWDMSKWKTEHHFVSWLRLCPDNRISGDKIIGKGRLPTNNRVTNALRMAASTLRLSNTYLGAQFRRLRTKLGAPVAIKAMAAKLARLVYRMLRYGITFIDQGAEFYDAQHRKLQINYLKRKAANLGFQIIEAPAA

SEQ ID NO: 386994 - protein, 400 aa, unidentified
MDDIDTVGVFLGLDVGKTAHHGHGLTPADKRVFDKQLPNNEPKLRAVLDKLAAKFDTVLVIVDQPASIGALPLTVARAAGCKVAYLPGLSMRRIADLYPGEAKTDARDAAVIADAARTMPHTLRSLELTDEITAELTVLVGFDQDLAAEATRTSNRIRGLLTQFHPSLERVLGARLDHPAVTWLLERYGSPAALRKAGRRRLVEVIRPKAPRMAQRPIDEVFDALDEQTVVVPGTGTLDLVIPSLARSLAAAHEQRRALEAQIGQLLEAHPLSAVLTSIPGVAVRTAATFLVTVGDGTSFPTAAHLASYAGLAPTTKSSGTSIHGEHAPRGGNRQLKRAMFLSAFAALHDPASRTYYDRCRTRGKTHTQALLRLARQRINVLFAMLRDGTFYEPRTPRLT

SEQ ID NO: 386995 - protein, 433 aa, unidentified
MTDEPLYRDRVCGIDIGKAGMAATIRVPSDKNPARRASETREFATTRRGVLALADWLRCWQVPAVVMEATSEYWKAVFYRLEAEGFECVLADARQVKNLPGRPKRDPSDSRWLAACFERGAVRSCFVPDPEFRVIRLHTRYRRDLTNERTREKNRTEKLLESAAIKLSSVVTDLHGVTGRDIMEHLIAGERNPKVLAQLARARARRKITELEHALDGAEFFTARHAALLMTMLERIDRLTGDIARLSEVIEQLLTPYEEQLQQAESMPGWGRRSAEDAVAETGVDMSKFATGGHLSSWAGRTPLDSQSGKRTGRARHKKGNKYLAAVTGETAVAAGRTQTREGARYRKLARSRGKGKAQVAVGNTQLKVYHKLLSSPGMRYHDLGPDYYEQQAATRRKIAYHVRQIEDLGLDVTLTRPAPEPGPDEPASAPAA

SEQ ID NO: 386996 - protein, 417 aa, unidentified
MSEYAALVAVDWADQQHAVCLLDPSTGEREQSIVKHTPAALQEWALSLRQRFAGQPIAVCLEQSRGPLIYALLQYDFFVLYPINPATLAKYRQAFSTARGKDDPTDADYLLDLLEHHRNRLRPWHPDDEKTRTLRLLVEQRRRLTGDRTRVSNRLTALLKGYFPQVLDWFEDIRTQLVCDFLERWPQLSLLQQARPATIDKFLRSHHSTSKPTNLRRLTEIKTALPLTTDAAVMTSSVINVKALVAQMKTVIAAISEYDRHLEALCQTHDDYHLFAALPGAGPIHAARLTAALGSDRSRWQSADELVTFAGIAPIIERSGKQFRIRWRYFCPKFFRQTFHEFAAQSIQDSFWARAYYSMQRAKGKDHHAAVRALAFKWIRVIWKCWHTRTPYNEVIYLESLRKKGSSLLKFAVDYQQ

SEQ ID NO: 386997 - protein, 425 aa, unidentified
MKKVDYLSTLFVGIDIGARQNVVSAINFEQEFLIKMKPVPNSQSGADQLESMLVDILSNSTFKTVIIGLESTSFYGVHIANFLSASEKLMHYKPYVYCLNPKEVANYKDSFNSLDKNDSIDSFVIADFARVGRIHTQPWRGSQYLALQRLTRHRLHIVECLTREKTYMLSNVFLKFSEFALLQGEEHPFSDKYGATASSILTEFLSSEDIANASVEYLVDFVNRKSRKRISDPKMTAEVLQQAARNSYRLDKCLYEPLTTSIACSFNCIQAFEKELKAINKAIEKAVKGMNPVEYQILMSIPGFGPVYSSGILAELGSVHAFPKNDAIAKYAGIVWKENQSGGFKAENTPMNKAGNRYLRYYLIEAAGSVIRHIPEYQEFYQKKFAEVTTHQHRRALALTSRKLIRLIFGLLAKNQLYSSNRVDK

SEQ ID NO: 386998 - protein, 398 aa, unidentified
MTESSDYESVQIFISVDVGKDTHHAVAVNRSGNRLFDKALPNDEAKLRSLIYDLKQHGQILLVVDQPATIGALPVAVARSESILVGYLPGLAMRRIADLHDGEAKTDARDAAIIAEAARTLPHALRTLKLADEQIAELSMLCGFDDDLAAQTTQASNRIRGLLTQIHPALERVLGPRLDHPALLELLQRYPSPGKLASLGEKKLATQLCKLAPRLGKRLAADITQALTEQTVVVPGTNAAAVVLPRLTLQLITLRKQIDEVAQEVEQRGLAHPLYPVLTSMPGVGVRTAARLLTEVACRAFASAAHLAAYAGLAPVTRRSGSSIRGEHPSRRGNKTLKRALFLSAFAALRDPISRAYYTRKMSQGKRHNQALIDLARRRCDVLFAMMRDGTFYTPTAS

SEQ ID NO: 386999 - protein, 403 aa, unidentified
MNSVGIDISKGRSTVAVMRPFGEVVISPFEVRHTDSELSELARQLKSLNGETRVVMEATGNYHAPVAKLLHDAGLYVSVVNAKLVHVYGNNDLRRVKTDRKDAVKLANYGLDRWLTLPRYVPEEDTRLLLKNCYRQYRQYSKVQTVLKNNLISLLDTVFPNANRLFSSPIRGDGSEKWVDFVAEFWHCRCVSEKSQKAFTSKYQRWCRKHGYNFSEEKAHTIHAEASGYIGVMPKSETTKLLVEQAVAQLRATSAALTALKHEMLALAAQLPEYPVVMGMFGVGPTLGPQLIAEIGDVRRFYSKKALVAYAGLDAPPNDSGDVTGKHKSMSKIGASSLRRTLFLVMSVYLQNAPLDEPIFRFMDKKRAEGKPYRVYMMASANKFLRIYYATVKAYLESLEHTA

SEQ ID NO: 387000 - protein, 439 aa, unidentified
MRLAPSPGAHDSDGILRRRRRPRVDKREHEHRQRGSRSTPAERLRMRFVGIDVASERHVVAVVDESDRILLKATPFTEDAEGYAKLFGVLGAPTDALVAMEATGHYWKNLFAALVAAGFAVALLNPLRTRRFAGEDLQRTQTDAIDAVGIARFAAQKRPPASRLPDRATEELRELVRFRDRLRQDFGDRVRQLHRLVDLGFPEFTRHVRDLGSELATALLRAYPTAAGFQGAPVRRVAALRYDGRHKVGDELAAALIAAAAGSVGRHHGEVYRVQVRYTCEDLEVLRRRLRELERDIDRLLGQHEIGRLLTTIDGIGPQTAARLVATFGDFSSFPSARAVASYVGAVPALKQSGKRTFQRASLTPLGAARLRAKLWMPVLTAVRTNAWLRAYYERLIARGKLPKVALVAAMRKLLHAVYSVATHRRPFVANLVTAEARP

SEQ ID NO: 387001 - protein, 324 aa, unidentified
MNLPPLGLDIAKLKFNACLVGAGGKLRHKVFANNPQGFSQLSDWLKKQGVQQVHACMEATGTYGESLAAYLHQQSQLVSVVNPAAIKGYAQSHLSRTKTDRVDAALIAGFCGERRPPAWCPPAPEAQQLQALVRRLESLIEMRTAEENRLCSGITVEAVRESVEELIAHLSEQIKRTQALIRDHIESHPNLKRQRELLDSIPGIGETTAAALLAEVPDFSQYQSARQVAAFAGLVPRERQSGSSVRGRVRLSKIGNARLRKALYFPAVTALRCSPFFQAWADGLRQRGKSKMSIIGAAMRKLIHLAYGVLKTGKPFDPQWAKTA

SEQ ID NO: 387002 - protein, 341 aa, unidentified
MKNKSFIGIDISKNVIDASIFYEGTPIKDFPHAVFNNSRKGFGEMCTWLKKNHVVLSNCLFGMEFTGSYSMELEKFLNARKYQFCMLSTHVVKHYPMGPKDKSDKIDSAKIADFLYRYDGTECVKPYKMPDKTMQRLKALTKERKFLVEQRTCFMNRRQLCTTKEAAQLYDGYIKEFSRDIENIELEEQKLLATDDSLLATYKNLLTIPGIGFVNAMNVIVITRNFTAFETARQYASYVGVAPHSHTSGTSVRWRPRPSARCDGQAKADLSMAATVAVLYDAELQSFYNRKLGGKQDSDTKRKALNAVKFKLVLRMFAIGKQNRKWEPLDSKSSNEKLAIS

SEQ ID NO: 387003 - protein, 408 aa, unidentified
MEVLYPRCAGLDVHKDTAVAAVRCVSEPEHREVRTFPTTTSGLLELSEWLSSHGCTHVAMEATGVYWKPVWHILEGNFELVLANAQHIRNVPGRKTDVSDAAWIADLLAHGLVRSSFVPPAPVQELRDLTRTRKQLVREVAQHTLRIQKVMEDANLKLASVLSNILGGSGRAIINAMISGEEDPERLAELAQGKARKKQKALVEALRGRTTSHHRNLLKLHMQLIDALEAALGEVDAQVGKALAPIQDGAKLLKTMPGVSDIVANVIVAEIGVDMSRFPSAGHLVSWAGLCPRNDESAGKRRSTRVRKGAPWLKTTLVSAAWAAVRRKGTYLQAQFLRIKARRGAKKAIIAVAASMLGAAFYMLRDGTEYRDLGPDYFVRRDKSKTIGRLVKRLRDLGCQIELKTAAA

SEQ ID NO: 387004 - protein, 401 aa, unidentified
MNAVGIDVSKGKSRVCVMRPFGEVVLEPFEVLHTAQSLNDLAGKLKALDGETRVVMEATGNYHKPVAFVLHDAGLFVSVVNPVLIHDYDNNSLRRVKTDRKDAVKIANYTLDKWTRLRQYLPEDDTRLALKNCYRQYQQAVAVRTMLKNNLISSLDLTFPDANKLFSSPAKSNGCEKWVDFIGDFWHSECVSSLSSDAFAKKYLKWCQKHGYNFTRSKSDTIYACAVNAASLPKSPTSKLLIQQQVAQLKAVSQSVAAFQQEMLRLSQQLPEFDTVMEMYGVGPSLGPQLMAEIGDIRRFSSKKLLIAFAGIEPQPNDSGKIVGNDSGISKVGSAVLRRTLFLIMTVILKTQPQDEPVFQFMNKKRSEGKPYKVYMMASANKFLRIYYARVKAVMDSKHSK

SEQ ID NO: 387005 - protein, 360 aa, unidentified
MGSSVSWIYDVCPVEPEQSPGPVMSRARIYKEGNPTVQPNSNAKCWAGIDVSKDWVDVAVLVEEQKVEQIRCVRSLVELEQLAQKLLPYGPQGVVLEATGGLEGSVITALVAAGLKVMRMNPKRVRDFARAQGLLAKTDQLDAHILALFGARMQPPLRAWPEAERQQLGAWIARQQQLTLQRAAERTRLHQATEPQLRKSVERVIAFLGKELARLEKQMGKWMAQSEIWTEQESLLRTAPGVGPKTARLLLAQLPELGHINRREIASLVGLAPFACDSGHWRGKRRIHGGRGAVRAILYLASWSAVRPPGSLREFYRRLVAAGKPRQVALIAVARKLLLALNEMMRLNQPWRSPKESIPA

SEQ ID NO: 387006 - protein, 460 aa, unidentified
MSRNAQSSKPTQPKVDWKALEVVHPEAAGIDIGGSEHWVAISPDRDEQSVRCFGCFTADVEQMADWLASRGIRSVAMQSTGVYWIPVFEILQQRGMEVYLVNARHTKNLPGRKSDVAECQWLLKLHTFGLLNNSFQPSDEVRAVRTLWRHRGGMVAQASSAIQRMQKALVEMNIQLSTVLSDLSGVSGMAIVQAILDGKRDPRELAGLADPQVKASKAVIAKSLQGNWREELLFVLRQEVESYRAYQDRIAACDQKVQELLQRFSSKVDLQAQPIGPRPKGKRARGNAPKFDLRTELYRLTGVDWSQVDGVDVQVAQTVIAEVGIDLKEFPSEKHFANWLGLCPRNETSGGKVLNRRTPKVVNRAKVAFRQAASSLIKSQSYLGAQYRRLRTRLGAPKAITAMARKLACLFYRLLTKGQRYVDRGVEYYESKHREQQIRFVMKRAQQLGLQIIQPQGQNA

SEQ ID NO: 387007 - protein, 410 aa, unidentified
MLFIGDDWAEAQHDIEIEDEAGRLLVRKRLPEGLVGITLLHELIADHLDPSGEPEQVLVGIETERGPWVQALLAAGYQVYAINPMQVARYRGRHSTSGAKSDAADAHLLAEIVRLDRSHHRRIAGDSEIAEHVKVAARAHQTMIWSRVRQVNTLRSLLREYYPAALAAFGTDLASPDALAVLAAAPTPEQGRRLSQARIEALLRKAGRQRHIAATAAKIKAALGTPQLGARPGVVPAYAASASALVAVLSAMVTQTEVLAGQVEQGFGRHPDAEIYRSQPGLGVILGARVLAEFGDDPDRYADAKARKNYSGMSPITKASGTKRVVLARYARNRRLGDALFLQAYSALRASPGARAYYDRQRAGGASHYQALRTVANRLVGILHGCLSHHTLYEENQAWHTADDKLTVAA

SEQ ID NO: 387008 - protein, 367 aa, unidentified
MKKISTAGARQTKNFREQKLTIGLDLGDRSSWYCGLDEAGEVVLEQRLGTTPKAMKEVFGKMPRSRIALETGMHSPWASRVLSELGHEVIVAHARNVRLIGESRRKDDRFDARTLARLARIDPQLLAPVQHRSAQAQADLMVIRARAGLVRARTSLINTARGLAKSYGERLRGCNVRNMNPEKAEGLSPELQAALAPLLGAIESLSERIYEYNQQIEKIAKESYPQVARLKQVKGVGTLIALTYLLTLEDAQRFRQSRDAGCYVGLQPGRRNSGQSEPQLHISKEGDPYLRTLLVQGAHHILGPFGADSDLRRWGLKLAERGGKNGKKRAVIATARKLAVLLHRLWVSGETYEPLRNHHREVLPAAA

SEQ ID NO: 387009 - protein, 411 aa, unidentified
MSESEYQFFVGVDWGSETHVVCVLDPDRQLIAERSVPHTGRGLTALADELTALAPAEPGCIAVAIEVPRGAVVDTLFERGMHLFSLNPKQLDRFRDRHTVAGAKDDRRDAFVLADSLRTDRPAFRRVQPDHPRVVELRELSRVEDDLEQELRRLSNRLREQLHRFFPQALTLCPAADEPWFWALVERVPTPAHAQRLPVKTVAAVLKVYRIRRVTVENIREALQTPAVHVASGTVEAASAHIALLVPRLRLLQEQRTSVARRIEALLEELGQEAVPGEHRDVTILRSFPGVGRVVAATVLAEAAQPLAERDYQTLRAHGGIAPVTRKSGKKLSVSMRYGCNPRLRNAFYHWARTSVQNDPHCRDHYDRLRNQGHGHARALRGIADRSLGVLVAMLTSRTLYDPERRRQIAA

SEQ ID NO: 387010 - protein, 346 aa, unidentified
MLYAGLDLSRKRLDVHVLREDGTTALVTAVSPDKDALRSLARRVAVEGEPVRATIESMNGARFVHDSLEFAGWEVLIADAQRVRGLAPLAAKTDKIDARVLAELTRRALVPEIWLPTPEVRAERERARFRLHLVRHRTALKNRIHAILIAFGHPCPMTDLFGVAGHELIDRLQLPEPWQTNLVESLALVDDLTARVDALEVELKELGADHPSMRLLMTVPGVGWVLAYTIASEIGDVRRFAGPKKLAGYTGLCPLVRQSGGKDRRGPLAKNGPAYLRWALIEAATHAARDPRYRERYERTKQRLGRQRGAKVARVDLARQLAEAIWYVLTKNEPFHPAGPAMGLVA

SEQ ID NO: 387011 - protein, 347 aa, unidentified
MSISMIGLDTAKSVFQVHAVDKHGKAQMRRKVQRDELIPFFEKQETCTIVMEACGAAHHWARMLTALGHDVKLIAPEAVRPFVKKGKKNDAADAAAICEAASRPDIKFVPVKKLEQQGILALHSARSLLVKQQTMLANAMRGLATEFGLTVPKGISKLDELMALVDMDEAFPEKARQVFIGLLDQCRATAETIKAFEAEIVEHARHDETARRLATIPGVGPITASLIAATVVDISLFRTARHFAAWLGLVPRQYSTGGKTRLGRITKSGNREIRRLLVLGATSMTSRASQWNSAVGAWTRAIQERRPFRLVTVALANKMARIAWALMTRKEVYHAKGRGAATTGAAA

SEQ ID NO: 387012 - protein, 354 aa, unidentified
MIIIGVDFHPEFQQIALLNTTTGEVEEKRLAHPDEAEKYYRALASAGETVRIGMEASGHARWFERLVAELQFDLWIGDAAEIRAKRGRKQKTDRQDAQHILKLMLKDDFPKIWVPNWENRDLRQLLWHRHRMVQARTRVMNQLQAVALNEGLHCKKKLWRERGRQQLESFALAPWASRRRRDLLDLLDRLNPSIAELTQAIEREVENYPAAQRLRTHPGVGVLTSLAFVLILGDAERFRCGKQVASYLGLVPLEDSSGNRRRLGHITKQGSSIVRFLLVEAAQVTVRSLPEWRSKYFHLVLRRGRKIAKVAMARRLAVQLFWMMRKEWNYEQLKKFGSHAGQPGNRHGVQSNTE

SEQ ID NO: 387013 - protein, 385 aa, unidentified
MTKQLQYTTFMARNYDIFGGLDVDKKSMAVTFRDHGIMRKSLRLAYSASQLLNYTEKHFPGQRVAFVYEAGPTGFGLHDELTAASHACLVVSPSMVPTVQRKRVKTNRLDSLKLAEGLRGGQLRGIHVPAPGYRELRHLVQLRDTQVGQLRATKCRIKSLLLYEGIPFPAANGKWSAQALRELEALPCNATVRFKLDQLIDALQFHFLAAAKVQKQIRYFCQNEPELRQCISFLVSLPGVGTITATHALARLGDWRQIKDVRQIAGFLGLVSSEHSTGDKENRGEITRIGDSRLRNKLIQCAWTAIRKDPELRAFYRRIYERQPKKVAARKAIVAVARKLTTRMYAVLKEQRPFVIRPDSSIAPLTAEETGGPRERLDAAQNDQP

SEQ ID NO: 387014 - protein, 358 aa, unidentified
MRIIGCDLHARQQTLAMLDTTTGEIVNLTLTHEGNNVREFYCKLPRPVRVGIEASGSMQWFLNLMDELGIECQVGHPATVRVAEPRKQKHDRRDADLILKLMVENRFPSIWLPSKELLDLRALLLHRHQWVRMRTRVQNALQAIALANGLRRGPSLWNQAGQDQLASLPLAPHTAHRRSELQALYAKFAMEIEKLNQRVEKQAGERPTAVRLMTHPGVGPITALATDVFLGDATRFADGKALASYVGIIPREYSSGGRQRLGGLTKQGNPLLRFLWCEAAIHAVRKDPELKRFYCRKLFQKGLGKARVAAARKLGIRLWILLRDQIDYNEFCRRGQRRQKYGGACAGMPERVMAQNSR

SEQ ID NO: 387015 - protein, 339 aa, unidentified
MKLHCAIDLHGDNGYYGIMNEEGKRVYEKRLPNKLSVILEALEPFRDDLCDGIVVESTYNWYWLVDGLTANGYTARLANPAAIEQYDGLKNADDKTDAFFLAELSRLKILPEGYIYPKEERPVRDMLRRRLLLVRQRTAHILSFQNLIARERGEKISSNSIQKLHAEEVNQFFNDDRLVLMGRTNIDSIRFLTKQIREIESVVLKEVKLRPEYEKLLTVPGIGKILALTIMLETGDINRFKKVGNYSSYSRCVQSSRTSNNKKKGENNKKNGSRYLSWAYVEAANFIRRYCPEAKKWHQRKAARSKSVLATKALASKICKACYFIIKDQEDFDVKKIFG

SEQ ID NO: 387016 - protein, 429 aa, unidentified
MNSTQNKKIEQVKETTMIVGIDVGSEKHYFRAFNWRGIELTRKPVAFSNSMEGFNSFYNSVVELMQKNELKEALVGIEPTGHYWFDLGQFMGEKNIKFVMVNPHHVHKTKELDDNSPSKNDRKDPRVIAGLVRDGRYFYSYMPTGVYAELRNASNRRFVLVEEQTRAKNRLQKWVTVYFPEYKGIYTHIDAKGGLLVLKQAPTPEEIVRLGVEGIIKIWKDAKLRGNGHKKAMLILNAAMKSIGLKAGLTEARMEIQDLIEDYELQTKRLERVNDLIKELCQQIRYADKLLEIKGIGITTVAGFIAEVGDITRFDSTKELQKLAGLELVADSSGKHDGKTKISKRGRKRLRYLLFEAAISVVGKNEEFKEIHRYYTTREKNPLKKMQSLMAVACKLIRVFHVILTKGISYDASKMLKDIRRPGEQLKAA

SEQ ID NO: 387017 - protein, 322 aa, unidentified
MQTNVILGVDIAKKKFDVCLLIGSKERHKVFHNNQEGFAKLVAWCNRHGVDFFHLCLEATSCYSEDIVNFMYDLGHNVSLINPAQIKAFGKSELLRNKTDKSDAAKIARFCIANKPNLWKPTPPEVRRLRDLYRCLQALKDDKLQQMNRLENKNMDSRCKQAVLKVIATIETEISAIEEEINEHVNNYSHLKNMVENIKTIKGIGYLTAIAVIAEMPLVDNFDNARQFTAFAGLNPEHYQSGSSVNKKSRICKIGSERIRKALYMPAIVVKNYNSYFQKFCQRLKNKGKLPMVIVVALMRKLMHVFFGILKNNQPFDCNLVK

SEQ ID NO: 387018 - protein, 343 aa, unidentified
MWYVGLDVHLRSTAACILDENGKIVKRGQFAGHLGRVLAWLEGLPEPLAVCYEASCGYGHLHDQLRKVAPRVVVAHPGQLRLIFRSKRKNDRIDAMKLATLLFLDQVPEVYVPSVDVRSWRRLIEFRHRLVADRTRVKNRLRALLREYGLEGPRGGRLWTRKGRAWLAELTWPTSQAAVMRDVLVDDLERCQEKIGRVEQVLNRIAKASPGVALLRTIPGVGPRTAEAMVAYLDDPKRFRNSKRIGSYFGLVPCQDQSADRNRLGHITREGPATVRKLVTEASWRGVRQSPRIQKYFERIAGGDRDRKKIALIATAHYLLRVMFAMLRDGRPWSEDDLERGAA

SEQ ID NO: 387019 - protein, 350 aa, unidentified
MIIIGADFHPAYQEIASVNTDTGEYQEKRLAHPQEAEEFYRSLASVGQAVRVGMEVSGQGQWFERLLEGLRLELWRGDAEVIRAKRGRKQKTDREDARHILKLLLKDDFPRIWVPSWENRDLRQLLWHRHRMVQARTRVMNQLQAVALKEGLRCKKRLWRANGRQQLESLPLAPWASRRRSELLELLDRLNPTIAELSQAIEREAEKCPEAQRLMTHPGVGALTALAFVLIIGNAERFGCGKQVASYLGLVPLEKSSGSRRRLGHITKQGSSIVRFLLVEAAQVTVRSVPEWRSKYHHLLMRRGRKTAKVAMARKLAIRLYWMWRKGWDYEQWKKFGSYVGQPGNRDGVR

SEQ ID NO: 387020 - protein, 361 aa, unidentified
MRVRGNSERVLVSCAEGGHDTAHHQPGHDRPSGPWSFETERQPRSSRPHTAEPEQLRGPLSPYHARPGPEGRFSAPNDEAGCAQVLERLRAVPPTLVVLEATGGLEIPLTGVLAAAGVPVVVVNPRQVRDFAKATGRLAKTDTLDARTLAHFAQVMRPELRPLPDEQTQALAAILARRRQLVEMLTAEKNRLGSAPKPVRKSLRTHIAWLERELSHTDSNLAHAIRESPVWREKDALLRSTPGVGPVMTTTLLANLPELGTLTGKQIAALAGVAPLNRDSGTWRGKRTVWGGRAQIRATLYMAALVAARFNPVIRAFYQRLCATGKAKKVALTACMRKLLIILNAMLKHRTPWRTELVQCA

SEQ ID NO: 387021 - protein, 338 aa, unidentified
MKLYCGIDLHSTNNWLGIYDEEDRAVVSKRLPNDLGVVLETLEPYKAELAGIAVESTYNWYWLVDGLMEQGYRVLLTNPAGNEQYNGLKYTDDRHDSRWLARMMRLGIVATGYIYPKEERPIRDLLRKRMRLVQHRTAHIVSVLNTIARNTGSSLSWSKIEEMSDDQISKLLGDELIGMAPRASLAVIKSLDQEISKIEKTAKARAKLRSEYKLLKTVWGVGPILALTIMYETGEISRFSQVGGYCSYARCVGSVRISNGKKKGENNTKNGNRYLSWAYVEAANFASRFYPQAHRFIQRKRAKGNHTLAVKALGHKLARASYYVMRDQVEFDPGRLFR

SEQ ID NO: 387022 - protein, 355 aa, unidentified
MNSIKYVGLDVHRDTISVVVLNADGKLVMQSVLATHATAILDFLHGLRGTLHVTFEEGTHSAWLYDLLVRRVAHLVVCNPRKNALLKAGNKSDAIDARKLAELLRAGMLSPVYHGQNSTAAVKHLGRSYAALTEDTTRIMGRLKALYRGQAIACAGKKPYGARHREEWLAQLADSGLQRRARRLYQELDLLQQLRREARQDLILECRKHSETKLLRTVPWLGPIRVALLIGRVQTPHRFRTKRQFWTYCGLGLETRDSGEYRVVDGQIERKKKPVFIRGLNRNHNHDLKNLFKSAATTASGSDGPFRPFYENLLKKGMRAEMARLTLARKIAAITLHVWKKGEAFDAEYLKSQAA

SEQ ID NO: 387023 - protein, 333 aa, unidentified
MVEGTEGSHHKEGSTKMNHYSAVCAGIDTGKHKLDVAIDGSDERLQVDNSPEGGRLLLAWLQKRGVERVGIEASGGYEQAAVSTLRADGFVVVVFQPAQVRSYAGFVLQHAKNDKIDAALIARCTAAATDIREPPDARLAPLAQHLTMIEQLTEDVAQIKTRREASRDQRIHDFWTDEISRLKRLIKQELQLLVAAIRTHRDLSDRLDLIASVDGVGLRTAVAILVRMPEIGRVSREKAAAIAGLAPYDDDSGLRRGERHIKGGRQRLRKSLYAAALPAVFYWNPRLKAFYRRLIEGRKPHKLALIACARKLVIYANTVLARGTPWARQNAPA

SEQ ID NO: 387024 - protein, 336 aa, unidentified
MLYAGLDIHKNFSQAVVCRENGNVLKEGRVPTTKESISEFFSEFKEELKIAIEAGINSEYIFDFLEEQGHKVTLAHPLKTRMIAESRVKTDKIDANILAYLLRTNLLPTSYMPPKDIREIRQLVRQRIFLGRFSAKLKNRIHAELIRKGIRYERKGLIFTSDGKNWLHSLNIPFMESYLIMLGSIEDQIKKNNKKINQRGRKYEEVKLLTSIPGIGVYSALVIFSEIGNIERFNTEEKLFSYSGLIPSVNQSGNHRYYGRITKQGSKNLRWILTENVRVHLNWARANDVETKLLKYYLRLCKKGKPKNKAVIATARKLLQVIYWMLKNKTEYCVKG

SEQ ID NO: 387025 - protein, 404 aa, unidentified
MWYVGLDWADTHHDVEVLDEAGKRVGARRFAHSHKGLNELKQFVLSIAASPENLACIVETNHGLLITFLLEAGIPVYPVNPKTANQLRKAAGAKTDQIDAHLLAKIGRLDLAELRRLEPDSPTVQELKTLTRDQDALIQTQTRLVNQLTACLKEYYPAALHLKASVQQRSTLLFLQAYPTPQAAQAASVEAITATLRTGKHTKATRVAPKIFEELHRPHLVGNSAMIRAKSRLMLSLVKQLLVVIEEIASYDEAISTLFLTHPDHELWHALPRAGKRLAPRLLAEWGDDRTRYAGATSVQALAGTAPVPFQSGNYAKAHKRFACVKPLRNALHQFAWQSTLQEAWALAYYQRKRAEGKTHSMALRALANVWVRIIYRMWVNKTSYCTATFEAAKQAHAPRQRVA

SEQ ID NO: 387026 - protein, 386 aa, unidentified
MNAVGIDVSKGKSMVCVMRPFGEVVLEPFEVLHTAQSLNDLAGKLKALDGETRVVMEATGNYHKPVAFVLHDAGLFVSVVNPVLIHDYDNNSLRRVKTDRKDAVKIANYTLDKWTRLRQYLPEDDTRLALKNCYRQYQQAVAVRTMLKNNLISSLDLTFPDANKLFSSPAKSNGCEKWVDFIGDFWHSECVSSLSSDAFAKKYLKWCQKHGYNFTRSKSDTIYACAVNAASLPKSPTSKLLIQQQVAQLKAVSQSVAAFQQEMLRLSQQLPEFDTVMEMYGVGPSLGPQLMAEIGDIRRFSSKKLLIAFAGIEPQPNDSGKIVGNDSGISKVGSAVLRRTLFLIMTVILKTQPQDEPVFQFMNKKRSEGKPYKVSVSYTHLTLPTT

SEQ ID NO: 387027 - protein, 341 aa, unidentified
MERSVGVDLHKSCFTVCYLEQNGKHHLAEFKVKPKEIEAFKKTLSKKDKIAVESTGNTAYFVREIENRVKEVKIINPTQFKIISHSVKKTDEHDAVTIARYLSKDLIPEVRMRSREESQVASLINTRDKFVKLRTSLKNKIHNIMNENGLVSTAEMFSSEKGLNKVLALDLESAYVFELKIIVEQIRNLNKAVDEINKELTEMGKKVNGHKNLTSIKGIGDLSATILLNTIGNVKDFPDDKKLAAYFGIVPRVSVSNQTSHYGRITKMGNKIARTTLVQSTMVAIRHNHYLRNFYFKLKAKKGSGKAIIATARKLLTIIYRTLKYNWVFEDFSQFKLAVNH

SEQ ID NO: 387028 - protein, 530 aa, unidentified
MGREGRLTIGAYCPCRSLVSGVSAFATGDVLIRESGCDPDKELAAISHPCAHNLLSLFSVMPERENKIISHQAKKQSTKAKEFTVADLPRHLRHINVNAAGIDVGSDRHLVAVPEGRDVVSVREFKAFTADLHALADWLSQCGVTTVAMESTGVYWIPLYEILEQRGFEVYLVDARRVKNVSGRKSDVLDCQWTQELHTYGLLVQAFRPPEEVCVLRSYLRQKEMLVQAAAEHIQHMQKALQQMNLLLHNVVSDITGVTGMKILKAIIAGERNQQVLAALRDRHCQNSVETIAKSLVGNYREEHLFALRQALELYETYQVKIADCEAAIAAYLLRQDHRTDDQPPAPPKTIPARNRLRAGVDIRDQLYKMSGVDLFRVSGLAADTLLTLAGEVGFDMSPWQNVKNFTSWLALCPGTKQSGRRVLSRKTKPSANRAAQAFRMAAVTQARAKTALGAFYRRIRARSGGREAVTATAHKIARIYYSLLKHGSAYVEQGEAAYEQQFKERRLKALKKQAIALGYQLSPLAATSF

SEQ ID NO: 387029 - protein, 344 aa, unidentified
MNKITRIGLDIAKNVFVLHAVNEHGKTVKRQTLSRAKVLPFFASIEPCLIGIESCASSQYWARELTQQGHTVKLMNPKFIIPYRKSGKNDANDAEAICEAVGRPNMRFVAVKSVEQQAVCGLHRSRQHVTQARTALINHCRGLLAEFGVVLPQGAEKLRKDLPALIADDSSGIPPILYTLLQENLADLARMDQRIHAIDQQLKVWMSQHADAERLEQIKGVGVITATAFVAGVVDAHLFKNSRQFAAWLGLVPKQYSSGGKSRLGGITKQGDVYLRTLLVQGARGIVYQAGKREDRLSGWIKALVARAGVNKAVIAVAAKQARIIWAMLVNDAAFQPERIGVAA

SEQ ID NO: 387030 - protein, 375 aa, unidentified
MATIARLGIDTSKSLFQLHGVDEREEVVLRKQVRRGQFLGFVAKLAPTKIGVEACGASHYWARQLQALGHEVVLLPPQHVKPYVGRNKNDKIDAAAICEAMSRPRVRERFVAVKSAEQSAAQMLLGTRDGLLHRRTQLSNTIRGHAAEFGLVTPKGLAHIKPLLERIAADDTVPALAKELFAALGEEFAELAPRIARLDKKLKAFQRSDELCRRLVEVPAIGPVIASSMVVKIGNPAAFRSGRRCAAWLGLTPRDHSTAGKMRHGGITRAGDEGLRAALVSGATAYIQQVKRGRTRPSPWLAQLLKRKPEKLAAVALANKTARIAWKLMVSGERYDRARAEAREGLGATQHRGSTPSPSLQPHTAGQGASTMTAA

SEQ ID NO: 387031 - protein, 479 aa, unidentified
MRDGALEVETSLELFEADKLFDLERQGAEVSVRQSLRLVAPARESAFQKSEAFCAQPLNKESRMEPKLIVAGIDVHKKMLAVVVIDDDQPQQAREQRRFGTSRNELRNLETWLDSHGVSQVVMESTALYWRPVWLALEGKYVLHLAQAQSNAAPRGRKSDYADALRLARRFLAAELRLSFVPDAEQRTWRCLSRNKHQKRQRRIQIQNQIEALLEECQIKLSSVITDLLGATGYRILKALAKGETDPKKLVELAASNLKASKEQLAEAVGTPMGPRYRSILSLQLDELELLDKHIAELSRQLGEALQSQQAAVLRLCEIPGVREDAAWQMIAELGSAAAAFETAGQMASWIGVCPGREESAGKSTSNRSPKGNRSMRRVLNQIAWSAVRTKDSFFRELYHRLIPRLGIHKAIWAIAHRIAKVVWKVLHEQVRYIERGALALDPAAMKRRVNKLARQMRKLGYIVEVKPIAATTVEAQLS

SEQ ID NO: 387032 - protein, 353 aa, unidentified
MAQSTEGQEVILGVDTHLDAHVGVVIDGVGKVLGTLIAPAGLHGYRQLLQWSRSFGACTRAGVEGTGTYGAGLARVLRDAGIEVLEVNRADRSKRRLRGKSDPTDAENAARAVLSGEATAIPKLQSGVVEAMRAITVARRSAVKAKTQAINQLRALLVTAPDPVRSKLMKSKPEHCVRACIQMRALGTTPLLEALTRTLRILAKRWTVLAAELRELDAMLETLARRTAHRLLERFGVGPYTAATLMVVAGDNPERLRNDAALAALCGASPLPASSGKTQRHRLNRGGSREANNALWTIAMVRMRSDARTRAYVVRRTAEGLSSKEIQRCLKRYIVRELYPLILADLRDTLATS

SEQ ID NO: 387033 - protein, 391 aa, unidentified
MIFVGIDVAKDKHDCFILNSEGTVLADVFTIANNRIGFETLLSRIQSCSQGESKIKVGLEATGHYSYNLLGFLLDSGLATYVINPLHTNLYRKSLSLRRTKTDRIDARTIAMMLMSDVDLKSYSNTAYHNEELKSLTRYRFDKVKERAKLKSSVARLVNILFPELEKLVSSLHIAVVYALLSNYPGASYIANANTEELAETLCTASKGRYTKSKTAEIQVAAGVSIGSKMPAKSMELKHTIALIRELDKEISEVESAIDKITSQMDSPIFTIPGIGRHMGAMILAEVGDFSNFASADKLLAYAGLSPSTYQSGQLQNCYAHMEKRGSRYLRYALFNAAKYVCLWCPTFSAYLEKKRSEGKHYNVAISHAAKKLVRLIFAMQRSEKAFLADY

SEQ ID NO: 387034 - protein, 424 aa, unidentified
MELVYPICCGLDVHKKVIVATIVKTDKTGVSTYQRKSFTTINSDISKFHDWLIENQCLHVCMESTGKYWIPIFNYLEADIDVCLTHPKYVRAIKGKKTDKKDSKWIADLYRFDIVKNSFIPPKNIRELREISRYRYKLVCMKSSEKNRVQNCMTVSNIGVASVLSDPFGKTATEIISYLLANGPETFNEDACRKLIRKKAKAKSSDIIESIRGYKIEKDQALKLELARGHMEYLDEMIAKTETELYVRILPYLDIIGLISEMPGLTGLSATLILAEIGTDMKIFEDAKHFVSWTGLSPANNESAGKKKSVCISKAGQYLKPLIVQCALSATKSTKEPYFALKYRQLQKRRGHKKAIIAIARMMMVCIYYIVLDKKHFCPSDYEELNQQSSQPQKVVLNDETVFAYLKAQGYDPSLMLQNRNDNL

SEQ ID NO: 387035 - protein, 345 aa, unidentified
MSIVGGLDIHRRQLTFDYLDTVTGQVARGQVAPADRGHLRAWLARFTGRDDVAFAIEGCTGWRYVAAELAAAGAGVHLAEPADTALARGRKRHAKTDKTDSRHLRGLLAEDRLPECWIPPEQVLEARALLESCHDLRREHTAWLQRIHSVFFHHGAPAMGEGILSSTGGPAAARATAAAHLSPAGQQQVTIALAMMTCLEDQMHGLRHQLLDTARHLKGPRVLAAQIYGVGPLTALALTCWPGGAGRFSSARKAVRFAGLDITVSSSDRKGPPGRLSRQGPPVLRWALYEAGKARARASAPDHACYAQVKDRKTGKRAALSEARKIIRRACHILNDLGDDAFAAV

SEQ ID NO: 387036 - protein, 376 aa, unidentified
MKKSGVAFIGIDTAKLKNAVAVAEAGRDGEVRYLGGFENTPDAVAQLMRKLASRYERLHVCYEAGPTGYGLYRQIQALGHECIVVAPSLIPRRTGERVKTNRRDAQSLARLLRAGELTAVWVPDETHEAVRDLVRTRAMAVEDYRRKRQHVSAFLLRHGRRYDGKASWRGRHKRWLDGQTFAHPAQRLAYQEMLNAVQAAVERLDRLEAALIELVPDWTMAPVVAAFQAMRGVQFITAVTVVAEVGDLRRFEHPRQLMAFLGLVPSERSTGEIRRQGGITKTGNSRARKVIVEAAWTYRFSAGLGVDHQRRLQDLPASVRDIAWKAQTRLCARYRRMTAKGKRSTVVVVAIAREIAAFLWAIAQQVAPRPQPTVAA

SEQ ID NO: 387037 - protein, 343 aa, unidentified
MKLSRVGVDLAKNVYQLHGVDRRGKTILKRRLKRHHWFKVLLDKTEPGCVIGMEACAGAHHWGRELQSRGYTVRLIPPQFVKPYVKSNKSDAKDAEAICEAMSRPNMRFVTVKRVEQQDIQATHRIRAELMTQRTAKANQIRGLVAEYGLVAAKHLSSLRAAIPCWLEDAENGLTGDFRRLLHGVWEDLRLLDDRVGEMDKTIKQLADNNEDCVRLQQLRGVGPMIATAMIATVGDARQYHKSRQMAAAIGITPKQHSSGDKHRLLGISKRGDVYLRTLMIHGARAVVARAKHKDDRLSRWVTNIANKKHPNIAAVALANKTARMAWAMLRNETDYDPDYAIS

SEQ ID NO: 387038 - protein, 343 aa, unidentified
MEQYAGIDVSLESVSVCVVDGAGRIMREAKLACEPEALIAWFGKLEVGMARIGLEAGPLSQWLYARMQESGLSVELLETRHVRDAFKAMPVKTDRTDARGIAQLMRLGWFRSVHCKSLPAQELRAILTARKLVQTKRHDMEMSLRGILRGFGLKVGQTTPRSFEARVRELVDGHPTLIVVADAMLLARAVLMEQLGKLQKRLVSLARQDTRARLLMSTPGVGVLVALTYAAAIDDPARFRSSKAVGAHFGLTPRKYQSGETDVTGRISKIGDASVRTALYEAANVILTRPVKGSSLKSWAMRVAKRAGMRKAKVALARKLAVVLHRMLANGSAFVAGMAAARA

SEQ ID NO: 387039 - protein, 409 aa, unidentified
METMYHRCAGLDVHKKSVEVTVRILDNQGRLQTQTRHFGTYTRNLLEMADWLAEQGVTHVAMESTGVFWKPIYNILEGRFSVLLVNARHVKNVPGRKTDIKDCQWLAQLLQCGLLTGSFVPGRDLRQLRDLTRHRAQLVAEKNRVINRIHKVLEDANIKLGSVATDIVGVSGRAMICAIIQGENNPERLAGNARRRLKNKTEELKLALEGHVNDHHRFMLKLLWEQLLSVESLIQQLEDKIASQMGPFQQAVELIDEVPGIDRRVAHTIIAEMGIDMGQFPTDRHLASWAGMCPGNNESAGKRKSGKTTKGSRWLRQALVQAAWAASHVQDSYLAAQYSRVVKKRGKKRALVAVGHSILVIIYQMLKKKVPYQDLGSNYFDMRNHIHLTKYLVKRLEGLGHKVTLECAA

SEQ ID NO: 387040 - protein, 420 aa, unidentified
MSKRRYRCVEIKQVDWSAVAQRVDGGRVVVAIDVAKQDMVAALMKADATVLARLRWVHPQQTPALLEGLDRLARSASLEAVLEPSGTYGDALIGQLRRHAVAVYRIAPKRVHDAAELYDGVPSLHDAKAAEVIGRLHLDGISTVWVAARAERRELQARTTRLAVCKARYQAALNRLEAALSRHWPELLTVLELDTVTLSTLVSTYGDAAAVAADPGGARALMRRVGGDWLAEEKIAAVLADARASLGLPTVPGERDLLKWLAGDVETIRRERRAAERAIEQQVAQTATLAPLGAVVGRVSAAVLVAALGDPRDYPDSAGYLKALGLNLKERSSGTHRGQLKITKRGPGVARTYLYFAALRLIAREPVVGRWYRCRTDHPGAIKGKSIVALMRKLARALWHVARGDAFAVERRFNRAAPAA

SEQ ID NO: 387041 - protein, 373 aa, unidentified
MPFSQQTKGAGMEYYVGLDVSQRQTAVCVVDGQGKKIAEGKVLTLPGDIYGWLATKVLDLAAIVRVGLEAGAMSNWLYTELGKLGLPMICLEAYQAHQFLKSNRNKTDKNDARGLAQLVRMGGDFIRPVTVRAQTSREDRTLLTLRQNLVKQKINLENAITGSLKPFGLVVARGNLSARTFRLRVIEALVLAEERGINLRRGLEPSLDLYDSSCEQIAKLTKQIQATARNNPVCRRLMTAPGVGPIVALSFVTAVDVPERFSKSEDIGAYFGLTPRQFQSGETDLRGDISRLGNSMTRSHLVQAATVLLTSGNKWSTLRAWGRKIAKKRGFRKARIAVARKLAVVLHRMWINEQDFCWSNKQTEKELAGATPA

SEQ ID NO: 387042 - protein, 362 aa, unidentified
MNKHKYVAMDVDSANIVAGVFDSKGKCVMECCIKLNAEAVREFCQMLKGTVHVTFEEGTQAAWLYEVIKPLVTEVIVCNPRENKLMKAGNKSDKIDVAKLAKLLRLGELRPVYQGAADMQGLKELVHGYEALVQDSTRVKNRLKAIYRGRGVSSKGEAVYEQAEREQWLAKLKGCARQQRARRLYEQLDQLQRLRAAAEKEIGRAARRHAAYKWISSVPGFGPIRTAQILATVMTPHRFRGKRAFWPYCGLAVVTRSSSDYEWVAESSRRKRKVIQTLGLNQNHNRTMKAVFKAAALDALKRNRQFREYYQSLCAKGTRPEMAQLTVARKLAAIVLILWKKGERYNPEKLKQAAPGTGQAVQ

SEQ ID NO: 387043 - protein, 371 aa, unidentified
MNHITSIGLDVHARSITAVALDSITGEARSHKFGYSPAEVADWISQFESPKAVYESGVTGFHLVRALRGFGIDCVVGAVSKMTRSASDKRKKNDRNDAEFLARQLMAHNIVEVFVSDEETEAAQNLSRVLEDIRDDLTRAKHRLTHLLIKWGYVWSEYTPEGKRKKTWTRAHWEWIRKIELPESAAQESLDYYISEVHHIEAQKKAIEKGVVQYAQKPRWHERVESLRCMKGIKTMTAFALTVETGVFSRFNSARAFASWLGLVPSEHSSGEHISRGTITKAGNSHLRKLLVEASCHYTYATKERKRDLYDDSVPFVISNHAAAGVKRLVERRRHFMHDLKKRSVVPNVATARELACWYWALGCMSEGTLV

SEQ ID NO: 387044 - protein, 410 aa, unidentified
MEVLHRRCAGLDVHKKTVVACVRLAEENKVVTEVRTFATTTAGLLALSAWLSENGCTHVAMEATGVYWKPVWHVLSDGEFELVLANAAHVKNVPGRKTDVSDAAWLAELLAHGLIRGSFVPDGQTQELRTLLRTRKQLVREKTRHTQRIHKTLEDANIKLESELSDVLGKSGRAMLEAMVAGETDPVRLAALAHSGVKASQATLQEALRGRVTQHHRFLLRLHLGQVDAIDTAIATIDGEIEAHLAPFRIGVELVSTIPGVSGLSAEVIVSEIGLDMSRFPTDGHLLSWACLSPRNDESAGKRRSTRMRKGSPWLKTTLIQCAWAAKRKNGSYLQAQFLRLKSRRGPQKAICAVAASILTAAYHMLKDGTLYQDLGADHFKRRSKTTQTQRLVKRLQHLGYAVDIKPLAA

SEQ ID NO: 387045 - protein, 340 aa, unidentified
MFVNYKVMQNFYFIGIDVSKKKLDICVMSNSKVLKEEQVSNHPQAIATVIAGIKEELSMSNDCFIICAEHTGQYTYPLICACKSVGSKLWLENASQIKYCSGVTRGKNDKVDARRIAEYAMRFFDKAKPYQRPIEELMRLKQLEAERSLYLTDLAKYKAQLSDQEGFMEDKIFKRKAKRLKEMIKSLEKTLKEIAQEMADVIYSSEELSRQMRLLKSVEGVGPVVAMNMIIATEAFTRFDNPRQFNCYVGVAPFAYTSGSSQHSRNRVSQRAVKYIKCLLHMAAVAIAHKKTGDLKTYFERKVAEGKNKMTVLNAVRAKLVARMFAVIRNNRVYQPILSV

SEQ ID NO: 387046 - protein, 334 aa, unidentified
MENIALIGIDLGKNSFHIHCQDRRGKAVYRKKFTRPKLIEFLATCPATTIAMEACGGSHFMARKLEELGHSPKLISPQFVRPFVKSNKNDFVDAEAICEAASRPSMRFVQPRTESQQAMRALHRVRESLVQDKVKTTNQMHAFLLEFGISVPRGAAVISRLSTILEDNSLPLYLSQLLLKLQQHYHYLVEQIKDLESQLKRKLDEDEVGQRLLSIPCVGTLTASTISTEIGDGKQYASSRDFAAATGLVPRQYSTGGRTTLLGISKRGNKKIRTLLVQCARVFIQKLEHQSGKLADWVRDLLCRKSNFVVTCAMANKLARIAWALTARQQTYVA

SEQ ID NO: 387047 - protein, 405 aa, unidentified
MAIIGMDIHRSFAQAAFLQDGQVKREQRVDLVHDRLVRFGKSLAVEDEVVIEATGNSAAVERILRPFVKRVVVANPRMVRAIAYARVKTDKIDAVILARLHAGGFLPEVWVADDNTQRQRRQTVERMGVLEQVVRTKGRIHAILHANLIPKYSGHLFGKAGKKWLAGLPLPDEEKAIVGRLVDELERNSDQLAKLDMTIIGEALENPRVVRLMTIPGIGPVVASTVLASIGDISRFETPEKLSCYFGLTPKVRQSGDRPARHGRISKQGNTHARKMLVEAAWSAKTAPGPLRAFFQRVQRNRGAPAAAVATARKLAVMIWHVLTDGTEYAYARPAFTAMKLRKAALRAGAPREYGKAGPGRDYWIKEIREREADHVRRAEHAYERMVAAWKEKPPTAPAMTATPG

SEQ ID NO: 387048 - protein, 454 aa, unidentified
MSIHGTDPVAGLSPVRVQVGIDAAVVANHHVCVREILPDGQVRLSRFTTPPTLAGLDMLIGRLSAYPGVVAVAEPTSMTWLALSIAMRRSGGDLSLLGARHAARLRGAIIGKDKSDVIDADVLATAGEVFTLSPMRPLTPPQLALRRAVTRRGKLVVDGNRARRRLISLARWAFPDVWSAFAGSQPTAVAVLTRWPDLRALGSARRSTLTGVVAAHTRGVPDVPARVEAIRAAARAWTEFWQGHLDLDALAWEVAEHLHDMAEADQRIARATAQATHYWADLYGDDPLLLSVPGMGPMTAPAVRAFLGDGGAFTTAKAAASYVGMNPSTWSSGTVVQPSRAITKEGPAVLRLAFYQAAGGARKSDPQLAAFYRHLMVDRGHSHTKATVAVARKLIERTWTVLHRGQPYQLRDVDGTPLTRVRAKEIARTYAVPPEVRARARARSAATHRSKLTR

SEQ ID NO: 387049 - protein, 301 aa, unidentified
MAIIGEEGKRVFHRKVKNDPQLVVHILTPFKNDIEGIVVESTFNWYWMVDLLSDQGYEMHLANPSKIQQYSGLKHSDDKDDAFWLAEMLRLKILPEGYVYPKEQRPLRDLLRKRGHLVRLRTSLIVSLQNILARNIGDKMKTNDIKALKEDRVTPLLAGNDDISLAGRVSKEAIDSLTRQIKAIEVAVEKKMDLRKPYDLLLSMPGVGRVLALTIMMERGPIGRFTKVGNYVSYCRKVPAGRFSNEKKKGTGNRKNGNKYLSWAYAEASELARRLDAESRTYHDRKRRHTNAPIAHSTLAH

SEQ ID NO: 387050 - protein, 372 aa, unidentified
MNNITVYVGMDVHKESFTLAAYTIDEEKSSYIRRTPCDYKEVLKYLEFLRTVYGNDTNFICGYEAGCLGYTLYHQLTDHNVDCVILAPTTMLEQRSRKRIKTDKRDAELIGRCLAQHNYSPVHIPTDTDEQVKEFLRMRDDHKEALKKIKQQIQSFCLRHNYRYEGKSSWTSAHLNWLKTLKPEALYKEILDEYLLTYPTLTDKLERLDKRIAELASKDEYKDSVKKLRCFIGVQTHTALSVLVEVGDFKRFASAEKFSSYLGLVPGEDSSGDDKTRLGITKAGNRHVRILLTEASQCYSRGAVGYKSKALKARQAGNTPQVIAYADKANERLKRRFYKMVLGKSKKHNVAKTAIARELACFIWGIMTDNIA

SEQ ID NO: 387051 - protein, 340 aa, unidentified
MAEVTTVGLDLAKLVFQAHGADSGGQVVFRKTLRRARVLEFFGRLSPCIVAMEACAGAHHWGREIARLGHIVRLIPPAYVKPFVKRQKNDAADAEAICEAAQRPTMRFVAVKSAEAQASAAIFRTRDLLVRQRTQHINAIRGQLTEHGLVVGKGPAHLPKLLALLEASADLPETARAMIEVLVDMVSLLDERIARLDQEIRRRAREEDGPARLMTIPGIGPITATALAALAPPAETFRRGRDFAAWVGLTPLQRSTGGKQKLGSISRMGERTLRRLLIVGASAVVRQANRRDLPEGSWLARMLARKPRMLVIVALANKMARTAWALLARGDVYRAPTAAA

SEQ ID NO: 387052 - protein, 316 aa, unidentified
MSEMTVEQFVGIDIAKDTVDVCIGADAEVMHVAYDHQGVATICQRLKAVSPTLIVMEATGGLETRLASELAALGLSVAVINPRQARDFAKATGQLAKTDRVDAAVLANFARAIRPQARAMKDAGTRALDDLVSRRRQLIDMRVQETLRLGTAASKAMLKSLDTHIAWLDKRITDIDTDLTRCLRTSDVWRTKDDLLRGIPGVGAVTSLTMLAKCPELGQLNRREIAALTGVAPLAKDSGKHRGKRFVWGGRADVRAVLYMATVSAIRFNPRIKPFAERLKQAGKPAKVVIVACMRKLLTIMNSIVKNNMPWNPKNA

SEQ ID NO: 387053 - protein, 341 aa, unidentified
MERLYYIGLDIHKKTISYCVKQVDGKVVQAGKIAADRKTLFKWVKGLPGQWRGAMEATIFTGWVYDFLKPYAVELKVAHPEMLKAITAAKKKNDRADAEKIADLLRVNLLPECYMLSEELRELRRILRYRNMIVRTAVKMKNKMSGLLMEVGASYEKAKLHRRKYFSDLLERVEDVPDSVKNMLRLSRSSLEIFEAVQKKLIHTLRENHLIHERVQRLMSIKGVGEVMALTWVLETGDSSRFHNARHAISYCGLCSAQRESAGKEQRGPISKKRNKHLQTMLIEAAKLAPRWNPQLAALHEKELNRGNRNRATLAVARKLVEYMLAVERQQKDFVPSELAA

SEQ ID NO: 387054 - protein, 433 aa, unidentified
MPRVKRKVETCMGLGNLPDPNEKVGNAMYFAGVDIAKRRHELCVIDDSGDILLQLPVENTKRGFEKLLTAFRTKQLTNQNVRFCLEATGHYWIALYCQLKEHGFSVDVVNPIQSDALRNLYIRKTKTDQKDSFILADLLRLGRATSTQLASETVLKLQTLSRMRFEFVSQIGGLKNKVIGILDRIFPEYPGCFSDVFIKTSRELLKQYSSPEELAEVDLTELSDFLREHSRGRIGMDRAERIQNLARGTFGISIAIDAFTLELRLLLQQIEFIEEQIKEIEDAIDQVMEEMRPSDETPYRHVIETIPGIGPVLAAAIIGEVGDITRFKNAKALVAFAGIDATIRASGQFEGTRNRMSKRGSPVLRHSLWLAAVSARRFNPEFKEYYDTKRAQGKHPNVVTGAIARKLAHLIFALWTDNRPFDPNYKWTAGSTN

SEQ ID NO: 387055 - protein, 351 aa, unidentified
MIIIGVDYHPSFQQIAFVDQETGECGERQLNHSDGEAEKFYRELKQRGVSVRVGMEATGHSRWFERLLAELGFEVWIGDAAEIKTMRVRKQKTDREDARLMRKLLLENRFPRIWVPSPENRDLRQLLWHRHRLVQMRTRIMNQLQAVAMNEGYRWKKKLFSAPGRALLEKLSLAPWASRRRKELLELLDQLDPKIAELTAAVEQEAKKRPEVLLLMTHPGVGPITGLVYVLVIGTPERFPCGKQIGSYTGLIPCEDSSAGRQRLGHISKQGNTLLRFLLVEAAQAAARCNPDWRRKYLHLMMRREKRIAKVAMARRLGVRLYWMWRNHWQYSQLVEFGSNAGKLVTGHGVK

SEQ ID NO: 387056 - protein, 345 aa, unidentified
MQPMYYIGLDVHKQKISYCVKEGGGKVFAEGWIPATRFDLDRWRKTLPQPWSAALEATMFSGWIYDQLKPHAAELKVAHPLMLRAIAAAKKKNDRIDANKICDCLRCDFLPQSYMAPTAIRERRRTLRYRNLLVRQMVQMKIKISTLLMEAGVSYNKSKLHKAGYFRDLLATNPDINESLRSLLRQCRETVVRLSKMETALIHSLQQDPLLVERVERLMSIPGIGPITALTWALEIGEVQRFSSIKKAISYCGLCGDEQRSANSVQRTPISKQRNKHLQTTLIEAAKMAPRYSPTLAMLYEREEQKGNANRATLAVARKLVAYLMAVDRGKTHFLVIDQETRAAA

SEQ ID NO: 387057 - protein, 349 aa, unidentified
MALTIVKEARPVTGGVDTHAGTHVAAALDPVGGLLGVREFPATAAGYAGLLGWLGGFGTVCLVGIEGTGSYGAGLARHITAAGIRVVEVDRADRQDRRRQGKSDPLDAVSAARAAQSGRARGAPTGRDGAVEAIRTLMVARRSAAGERTRTNGQARALVLTGPDDLRTRFARHTPAALITGLASLRPRTGDVAGHATRIALRELGRRAQFLDGQLQRLDELIIPLVTARAPGLLALYGVGPHTAALLLITAGDHPGRLRSEAAWAHLCAAAPIPASSGKVTRHRLNPGGDRQANHALWRIVFTRLGSDPATRAYAERRTAEGKSKAEIIRCLKRYVAREVYPHLRPAGG

SEQ ID NO: 387058 - protein, 343 aa, unidentified
MDYFAGLDVSVKETSVCIVDDAGKIVREARVASEPEALLQVLTNTIYRFKRVRLEAGPLSQWLYSVLAEAGLPVICVETRHMRAVLKAQINKTDRNDARGMAQMMRAGLYRPVHVKTLRSQKLRVLLTHRKLLQSKAIAIENELRASLRNFGLKVGMIGTMKFEARIRELVERLPDLAVLVEPLLIVRRVVREQLGILHRRLLAIVRDDDVCRRLMTIPGVGPVVALTYRVTVDAPARFRKSKAVGAVFGLTPAKYQSGENDRTGAISRCGDEMMRIMLYEAAQSMLVRTAKWSWLKAWAMKIARHRGMKKAIVALARRLAVIMHRIWVDGTEFRWTRELPVA

SEQ ID NO: 387059 - protein, 317 aa, unidentified
MGEAKVDKYVGIDVSKNALDLMERPTGTRLQQSNDADGIAQLVKQLRRIRPKLVVCEATGGWERLLVGALATARLPIVVVNPRQVRDFAKATGRLAKTDRLDAEVIARFAEAVQPEPRALPTAAAQALGELVTRRQQLIDMRTAEGNRRRLAAGRLRQQLDEHLAWLDRQLEELDKELDDTLRNSPIWREQADVLRSAKGVGPILTATLLSALPELGHLNHKEIAALVGVAPFNRDSGMWRGKRQIWGGRAPVRAVLYMATLSAVRTNPIVRSFYQRLINAGKLHKVALVASMHKLLTILNAMARDGRRWQPAKITA

SEQ ID NO: 387060 - protein, 323 aa, unidentified
MSDPVILGIDIAKQKFDAALLMGGKLKHKSCKNSTEGFELLSQWLRKQRVDRLHACLEATGNYGDELAFYLHEAGHTVSIVNPARIKGFAQSELLRSKNDKMDAGLIARFCLAMHPEPWAPPAPEIRALQALVRRADALVTMRTQELNRLGTAPVTVEPSIREHIAYLDEQIEKIKQQIDGHIDDNPELKSKKDLLHSIPGIGPATIAAILSEISIFERFDQVRKVVAFIGLAPKEALSGSSIKGKPRLCKIGHARLRKALYMPALVSIRYNPMMIGFYKRLRSKGKNGKVIVCAVMRKLVHIIFGILKSGKPFDPHYKPHFA

SEQ ID NO: 387061 - protein, 424 aa, unidentified
MKVTYQTCCGVDVHTSFLVATIVKTTGGIEPSYQKKRFSTFNNSILEFKQWLLDNDCHDVCMESTGKYWVPVFNLLEDDINVVIANPKWVKAVKGNKDDTKDSKWIGDLFRLGLVKGSYIPCKKVRILREYTRYRYKLVSCRSSEKNRYQNALTVCNVALDSVVSDIFGKSSTSIIDYLLEQSGSSINHEEIASKLLRSLKSKEDAVIESVEGYQMTDAQKYRMRLVRAHMDYITAEINDVDKMIENMISSNTDFENAVQFLCTIPGVKRDSAITIISEIGTDMSQFSSSRRLCCWAGLTPGSNESAGKKKSVRITRAGVYLKPALVQCAHAAVKSDKSPYYKKKYESLVKRRGKKRAIIAIARMILTAIYQMLSTGEQWNPSDLYKIDMPVALVEKQKAKAIKQAKKLLQREGLLPPDEPLAS

SEQ ID NO: 387062 - protein, 349 aa, unidentified
MSPKLNAGIAVIGIDIGKNSFHVVGLDRCGAIVLRQKWSRGQVSTRLATMPPCLIGMEACVGAHHLSRKLTSLGHDARLMPAKYVRPYSRGQKNDFRDAEAIAEAVQRPTMKFVATKTAEQLDLQALHRVRERLVSQRTGIINQIRAFLLERGVAVRQGLRFLRAELPRILATPCEVLSPRMLRVIEDLAGDWRRLDQRIEGLSSEIEVLARRDAGCERLMSVPGIGPIISSAMVAAIGSGDAFTKGRDFAAWLGLVPKQISTGDRTILGKISKRGNRYLRVLFVQAAWVVLIKPKSWQRHGLKPWLEAAKKRLHHNVLAIALANKLARIAWSVLAHSRTFEASKIQAA

SEQ ID NO: 387063 - protein, 426 aa, unidentified
MRVLYDRVAAIDVHKDMVKVAIRVPGAKRGTRKTDVLEFRTFYGVLQAMARELRRRGVTHVVMEASGVYTDPVYYALRELDFTEVMVINPAHAKALKGHKTDAKDAIRLLDLYECGLLSGSYMPDADLREVRDLARYRMKTVQARTSEIQRLQKALETAGIKLGSVVSEITGGSATAMIEALISGERRGSVMADLAQSRLRTAGKMADLSMALTGRFTDHHALMCRLHRDRIKLFDDAVQDLDATIAPLVARYAREAELLKTLPGFGDVIVAGWLGAIGPAPHQHFATASRLASWATLCPGNYMSAKKSKGGRTGNGGAYIKPLLIQAAWAAVRVPGRLQARFRRLVRKFGGPRSKGAQKRAITAIAHTLLKIAYSVLKTGKPYADLGADFYTRRESPDARQDYLVRQLQKLNPGCVITITPAEAA

SEQ ID NO: 387064 - protein, 387 aa, unidentified
MPQPNDLSRSLVALDQDSTIIAVVELSQSSWLVAGVLPGIERQPQKKLEPSAERLLGLLHRWRDEAVRAGKKITRIALAFEAGRDGFWLARWLNARGVEAHVIHPSSVAVSREHRRAKTDRLDTEMLKRGFLGWLRGERGHCTMARVPTMAEEDAKRPNRERECLVGERTRIVNRIKATLARMGIRNFKPTLRKAAERLATVRTPEGMPLPPNTLAELQRDMARLGFVVSQIREIEQARQKRLEQETETGPHAMVRQVARVIGIGIETADMLVHEVLSRPMRDRKAVARYAGLTGSPDESGARRREQGLARAGNARVRRGMIQLAWRFLRFQNQSALAQWYRARTADSRLGMRKTMIVALARKLLIALWRFVTTGETLEGVILRPAG

SEQ ID NO: 387065 - protein, 342 aa, unidentified
MEHFAGLDVSVKETSVCIVDDTGRIVREVKVASEPDALLSVLTNPTYHFKRIGLEAGPLSQWLFSVLAEAGLPAICVETRHMQAVLKSQINKTDRNDARGIAQMMRAGLYRPVHVKTLRSQKLRMLLTHRKLLQSKAIAIENDLRATLRNFGLKVGIAGRVKFEARIKELVENLPDLVVLVEPLLIVRRVLREQIVILHRRLLAIVRDDDVCRRLMTVPGVGPVVSLTYRATVDVPARFRKSKAVGAVFGLTCSRYQSGEVDWSGRISRCGDEMMRTMLYEAAQSMMRSKKWSWLKAWAMQIARRRGMKKAIVALARRLAVIMHRIWVDGTDFRWTRETAAA

SEQ ID NO: 387066 - protein, 405 aa, unidentified
MGKVFVGHDWAEDHHDVFVEDDTGCRLAGGRLPEGVDGIARFHELVAGRVEDPADVVIATETDRGLFVNALVAAGYTVLAVNPMSTSRYRQRHSTSGAKSDPGDAKVLADLARTDAHNHRTVAGDSELGEAIKVLARAHQSMIWTRQRQTNQLRSTLREFYPAALEAFDELAGRDALAVLTIASTPTAGSHLSLSKIASALGRAGRQRRLAQRAAEIQTALRSEQLAAPALIAEAMGATVTALAAVIVELNTQIASLETRLADHFEQHPDAKIIRSLPGLAMTLGARVLGEFGDAPNRSVDAKSRKNYSGMSPITKASGKHHVVLARHARNKRLSDACYLWAFAALTASPGARAFYDQHRANGNTHNRALRALANRLVGILHGCLRHDALYDEHTAWAHRHQHAA

SEQ ID NO: 387067 - protein, 324 aa, unidentified
MQKDILYCSIDVSKERLDVDGAALALPEQLDNDQAAYRQLIKAAKKYPGVVHFVFEASGPYHLGLALALWEAKLPLSVLNPARVRYFAKAEGKAKTDPIDKQVIGAFARAFSPPPTPAPDPIRRELTELLQRREALVSSRVAEQNRLGQSRHRLIKAQIGRLISQLSAHIEQIDRQDKKLVSSCAELKGQVELMCQIKGVGQLTALSLLITLPELGTVSRNRISRLVGLAALNDDSGQQKKKRFIQGGRKAPRNALYMASLSASQHNEVLSDFYQRLLKAGKLKKVALTAVMRKLLICLNGLLRKYRQQHKANPEDFCTAKASQ

SEQ ID NO: 387068 - protein, 468 aa, unidentified
MKEAKANRRVPGRKKKGLCQQDRPLIEPNAAGVDVGAREMYVAISPDRDSEPVRVFLTFTADLEALVQWLLERGITTVAMESTGVYWIPLYQMLEDRGIRVCLVNARHMKNVPGRRTDWHECQWLQYLHATGLLRAAFRPEQDVCAVRTLLRHRNDLIKIAAQHVQHMQKALTQMNLQIHHIISDITGLTGLAIIDAILAGERDPGKLADLRHPSIHADEGTIRKSLQGDWREEHLFTLKQSRQMYTQYRSSIAACDEKIVELVGAFEPKVDIEVKPLPPHVGPSRKRRTKRTGDFRFDPRTEAYKLFGVDITRIPGLNELAIPIFSEVGRNLAARFPSADHFASWLGLCPDNDKSGGQVLWTGVRRVNNRTAQMFRIGASSLHHNRSHLGDFLRRMKAKLGPAAGITATAHKLAIIFYTVVTKQVEYDDSIWSARDAQRQKRFEQKLKRQARQLGYELVLVQAARVP

SEQ ID NO: 387069 - protein, 518 aa, unidentified
MIKRRLSTLERLKSGKLNRKQRKELMRRVFAGDPGLDVVHPNAGGIDVGNESHYAAVPPGRDAQPVQEFGCWTADLKRMAEWLIGCGVKTVVMQSTGVYWIAVYDVLRKSGLEVWLVNARDTRNLPGRKSDVQECQWLMKLHTYGLLRNSFRPPEEIRAVRTIWRLRDRHVKDASREIQHMQKALTTMNLQLANVFSDISGESGQAIIRAILKGERNPQKLAQLKDYRARASEEEIACSLEGNGQEDVIFELPQSVERYDFCQGQIRACDQQLSKYLAALPDRKIEPVGGTTEPGSKSAGGDGKEVPPKRRKGKRKQSRGNEPKFDLEVELTRICGVNLCTIDGVGVMTVPTWVSEIGTDMSPWPTEDHLVSWLKLTPNKPISGGKVIKKGRNPDNRTKNRVATVLRTAATSLDESQSYLGARYRQLRARLDPGKAAKAMAAQLARLIYRMLTRGARMGRSRSPGTREPSPRPRQAVLAAQGRSTRLPPGGGRLITRRTKHKAIAAAREQFLERRLLR

SEQ ID NO: 387070 - protein, 391 aa, unidentified
MDKVWVGIDAGKEFHWAHILDASGSKLLSRKVKNDEADISKLIDEALCLAEEVLWAVDQPGGGAALLLALLWERNQRVLYIPGLTVNRARHTYRGESKTDTRDAHVIADQARMRADLGELRAGEEEIAKLQLLLARRRDLVTDQSRTVTRIRETLLSLFPALERVLDLNSKGPLILLTHYQTPAKLRRAGHKRVAAYLRNRCVKGFNSVAHKALSAARSQRVSLPAEDVASRIVAELAGEILALKERIEGIDEELGQRFFARPEAPILTSLPGMGPLLGAEFLVAVGDLSAFESADRLAAYAGLVPAANDSGKRVGNHRRMRGGNKTLKRVFYQSAFSSLRGSPESRAFYDRKRAEGKRHTQALIALARRRVSVLWAMLRDGTKFETRFVT

SEQ ID NO: 387071 - protein, 403 aa, unidentified
MKSVGIDISKGRSTIAVMRPFGEVVISPFEVRHTGSELSKLAKQLKSLDGETRVVMEATGNYHASVAKLLHNAGLYVSVINAKLVHGYGNNELRRVKTDRKDAVKLANYGLDRWLTLPRYIPEEDTRLLLKNCYRQYRQYSKVQTVLKNNLISLLDTVFPNANRLFSSPIRGDGSEKWVDFVAEFWHCRCASEKSERAFTSKYLRWCRKHGYNFREAKAHTIYAEASGHIGVMPKSETTKLLVEQAVAQLRATSTALAALKQEMQSLASVLPEYPVVMDLFDVGPTLGPQLIAEIGDVRRFYSKKALVAYAGLDAPPNDSGDVTGRHKSMSKIGASSLRRTLFLVMSVYLQTAPLDEPVCQFMDRKRAEGKLYRVYMMASANKFLRIYYATVKAYLESLEHTA

SEQ ID NO: 387072 - protein, 428 aa, unidentified
MDEINRNRLEEFRQLRKEVRHSEEFLIVGIDIAKDRHYAFFGTATGKTLLRRIVFSNDHEGFRKLLDQAEALRAQQGLKKVVYGMEPTANYHKPLGEYLINLGRVVVLVSGVTVARNRESLDGRWDKHDGKDSANIADLISQGKCLYYEYPSAELRGLRGLLSLKRRLKKQEHGYKVRIRNQLIAQYFPEMDRDYERLGAEGLSILRWCLPASEIVQLDVEPFIERVTSRRIRMEKRRRLEEVWEKAAESIGCEGVPGVDHEAKVMVEGLKQIREMIKETEGKIRELCEQFPEYPYILTIPGFGPDVSAKVLGAIGDPDRFQNGKQVLKMGGLDLSADRSGKDSDRAIPEISKRGKADLRYGLYQAALVASLQNRHVMIYYTNKIRGREREKGIHVKMRVKLAAKLLVIAWTLMKKKEPFNPAYLNAE

SEQ ID NO: 387073 - protein, 408 aa, unidentified
MQVVHTRCAGLDVHKKSVYACVICRTGEGKNREVRSFGTMTADLLRLADWLREHQVSHVAMEATGVYWRPIWAVLQGHFELLLVNPHHIKVIPGRKTDTKDCEWIADLLQHGLVRSSFVPPTDIQDLRDLTRYRAELKQAQCTVANRIQKLLEQANIKLSSVASNALGVSGRRMIEAIIAGEDNPEHLAALAKKRLKEKIPELRSALQGYARDHHRFLLREFLDEWNALAARISRVEQEIDRRIAPYEHAVTLWQSIPGMDRVTACNLVAELGVNMAQFPSAQHLTAWAGLCPGNNESAGKRMSGTTRPGNKWLRRTLCQSAWAVTRKKDCYLSAQFRRLAARRGVKRAVMAVAHSMLIIAYTMLKTGNTYRDLGGNYLEQTNKEHLQNYFVKRLRRLGLNVTVAPAT

SEQ ID NO: 387074 - protein, 412 aa, unidentified
MGLFCGIDWATEHHDVAVIDDDGRVVARGRVSNDAAGFAALLTLLAEAGDSAAHPIPVGIETDRGLWVAALRETGRVIYPINPLAASRYRARHAVSGAKSDATDAVLLANIVRTDAAAHRPLPADTELAQAIRVLARAQQDAVWARQQIGNQIRDLLKDFYPAAIAAFAGLPEGGLARADARTILAAAPTPTQAATLTPARLRRLLTKAGRRRHLDRDIERLRAVFTDTYLHQPPAVENAMGIQLAALLRQLEAACTAADELAEAAIAHFEQHPDAKIITSFPGLGMLAGARVLAEIGDDRTRFAEARGLKAFAGSAPSPAPAARKPLSCTATSRTGDWPPSARSGHWDRCAPRRARVATTMPAAPPETGTTKPNGTCSTSFSANSTTACRPAGSTTNTWRFHLLSRSWLDS

SEQ ID NO: 387075 - protein, 415 aa, unidentified
MTKIIRIGMDTSKNVFVLHGVDAAEQAILRRKLRRKQVLEFFTRLEPTKVGLEACGAAHYWGRELRALGHEVVLLPPQYVKPYVKRNKNDAADAEAVCEAMSRPTMRFVPVKTAEQQAALMLAGARDGLIRRRTQLTNTIRGYAAEFGLTAAKGLNKIEPLLVRIADAALPPLAKELFATYAREYARLKGEIVKIEAKLMAWHKHNEPSRRLVKVPGVGPIGAALAVMKVPDPHAFRCGRDFSAWLGMTPKDHSTAGKTRLGVITRAGDEALRSVLVVGATAVIQKVKQGKGHPSPWLVELLRRKPPKLAAIALANKNARIIWKLMVSGERYNPARSVAARGEGVEVPSCASVTPCSPPSRTLRAAPGGGPRGPSLTVAARGVTGPRQVGTEKRPSGRTKKLTLKKPENVAPAAV

SEQ ID NO: 387076 - protein, 402 aa, unidentified
MNAVGIDVSKGKSMIAVMRPLGEVVLAPFEVSHTDSELRELAKTLKSLPGETRVVMEYTGYYHAPVALALCETGLYVSVVNPLLVHDYGNNTLRRTKTDKKDAMKLANYALDRWTQLPQYHPQEDTRLLLKTTYRQYQQTSKILTMQKNNLITLLDITFPEVNSLFSSKMRDDGSEKWVDFVGTFWHSQCVACRSEKVFQGQYKTWCKKHGYRFSEEKASAIYAAASTHICLLPQMDETKLLVEQAVAQIRASSKTLTALDQQMRNLAKSLPEYDVVMEMYGTGPHLGPQLMAEIGDVRRFHSKSALVAYAGVDAPPYQSGTIDIHSRSITKRGSPSLRRTLFLVMSILLQKAPPDQPVYQFLDKKRAQGKPYKVYMMAASNKFLRIYYAKVKAVLDTAEKQ

SEQ ID NO: 387077 - protein, 338 aa, unidentified
MKTTTFGVDLAKRVFQVHWVDMDTGEINRRQLKREQLVTFFAKQAPALIAMEACGSAHYWARRFASFGHQVRLIAPSFVRPFVKRNKTDVADAQAIWEAAQRPEMRFVAVKSEAQQAVLTLHRVRAQLLKMRRMQINQTHGLLYEFGAAVHRGSHSMNDAARMLGELADALPAMVIDTLREQLQRIEALTRDIRAIEHRLAAWLRQDEGATRLAAIPGVGLLTATAAIATIGEASTFRSGREFAAFLGLVPRQSGTGGRVKLLGISKRGDVYLRTLLIHGARAVLSHPKHLSDALQRLLARRPFNVVVVALANKTARTIWALLAHARTYQSGYVAHAA

SEQ ID NO: 387078 - protein, 469 aa, unidentified
MKRKSRRAKEQKVSPFSGDLELIEPDAAAVDVGSRSHWVAVNPQRDPNPVREFGTFTADLMSLVDWLAQCGAKSVVMEATGVYWVNLYELLERRGFKVYVVDAHTVRHLPGRSKSDVKDCQWLRRLHSYGLLQGSFRPPAQIRQLRNYHRSRSKLVDAAAQQQLRMQKALTLMNVHLHHVISDISGLTGLSIVRAIVGGERDPKQLAQLRDPRIRASKETIQKSLEGNWQEELLFDLKIALENYDHFQRQIAAYDEQIRQELKEVPSKVDLLQEPLPAARLRICRKRPGMSQQDQLDLREELYRISGVDLTRIDGISLQTAQKVFFEIGTDVNAWSDEKKFTSWLGLSPNHRISGGKVLKRSSRKVVNPLSVALRLAARSLLNSHSALGANFRRLIAKIGMPKAITAMARKLAVLIYRMLKYGTQYVDKGMQHSEAKYQATKVQYLRAQAAKLGMVLLPKQPAVAGALT

SEQ ID NO: 387079 - protein, 371 aa, unidentified
MNDYSVYVGLDVHKDTIAVATAAAGRSQPIYRSEIANTATAIKRLLHKHSPDGEVLGVCYEAGPCGYGLYRQITAMGHDCIVVAPGLIPRKATDRIKTDRRDALSLARLHRAGELTPVWVPDTEQEAMRDLTRAREDSKQIERVARQRLNAFLLRHGQIYPGKSRWTQAHFRWLERVTMATPTQQIVLQEYIDTVTEAQRRVASLAEHMRHALADWSLRPVVEALMALRGISLVGAMTLLAERGDITRFDSPTQLMAYLGLVPSEHSSGGTRHQGRITKTGNGHARRVLVESAWAYRYPARKTRVIQRRAERTAPEVQAIAWEAQKRLCARYRHLMEGGKNKCVTTTAVARELAGFLWAIAREVPVSPAQP

SEQ ID NO: 387080 - protein, 366 aa, unidentified
MLYLGIDQHARQITVSLRDEGGDVLQARQVSTQPDKINAFFQQLTRERLHDGESFVAVLEVCGFNDWLIRLLHEYHCHKVILIQPDQRKKCKTDRRDAAALSELLWVNRDRLLQDKPVRGLRQVDIACNTDQENRRLTTLRKEAGQARTRLVNKVRHLLRRHNLQWQMPTKRFPTKAGIAWLKQLALPEIDRLEMNHLLTDVEQVQQRVKELEQVIAQRCGVSAEAGLIASMPGVSYFTATSLACRVGRVGRFPRARSLANYWGLTPGCRNSGENTQRLGNITKAGSGMARWLLAQVTHKVLRKDARLREWFKRIKRRRGSTIARVAVMRKLATIIWHVLSKRKTYAECRALAEAGAGEREKQEGV

SEQ ID NO: 387081 - protein, 338 aa, unidentified
MKLYGGIDLHSNNSVVALLDEQDQVVYQKRLGNDAQGIIEALAPYQEAIEGLVVESTYNWYWLVDALMEAGYQVHLANTTAIKQYSGLKYSDDDSDARWLAKLLRLGLVAEGFIYPKEERAVRDLLRRRSRLVQQHTANLVAVQNLMARNRGRSLSANAVRRLTPQAVEQLLPDPNLALAVQSTLLAMRGQEAAIDLLERQACAQVQLRPAYRHLLTVSGIGKVLGLIILLETGPVGRFARVGNYGSYCRCVDSQRLSNGKRKGRGNTKNGNKYLAWAYIEAANFAVRFNPTIKRYYQRKRAKSNGIVAIKTVAHKLARACYYILRDGTDFEVTRAFT

SEQ ID NO: 387082 - protein, 412 aa, unidentified
MLHPKMRKLFIGVDIHKRTHVAVIINCFTEKLGELRFENNKKGFEKLIEFVKSHLKRGISPCFGLEDTSGNGRNFAIFLLNLGYTVKSVDASLTYTERRNQAIAHKTDGHDAFCVAKVLLNQLDTLPDASIHDDSWTLQLLVSRRNSIVKVRAASKNQVHSYISHHYPSYTRFFTVTYCKAGMEFFQNFPSPSKLRGITKEELAEFLSIHSSGFFGIEHAERILMLVAKDGDTSTEYQETRDFIVSHCIKEIKHCNEELEVIEAEIKKHMKQFPYRLETMPGINTITAAMLISEIGDIRRFSSADKMCRYSGISPVSCSSGDKDKNFRNKQGNRRLYEIFRDIASRNISRGRDKKSPINETFLEYFNKKISEGKTRRQALIAVMRQIAKVIYSMMIHQREYIKPTVSKIENA

SEQ ID NO: 387083 - protein, 341 aa, unidentified
MLYSGIDLHKRSLVIHTLDADGTTTREAQLKSDRGAVLAYFGTLSGPHRAVVECVQSWYWLRDLLGPTGVDLRLAHAKYVKAISYAKVKTDRVDARMLAQLLRTGLVPEAHMIGAEHRETRDLLRSRLQLVTRAVRCRHAVGSLLEKYNVPTPEELPELARMQAALQEEQRTLIRTHVRRVEAVLKTRLLPTPEVQRLVWIPGIGKLSAYALVLEIDTISRFPTVRHFHSYCRLVPGADNSAGKVRHKRSRDGNRYLKQVFHTAAIRAAQYHPEIRQEYRRLSRRKGKIVARALIAKELASIVYWVLRKQEAFNGKFRGHVLTAKPAVWPRLASPKSLTDA

SEQ ID NO: 387084 - protein, 457 aa, unidentified
MSQRKRDRKSRELPLVHPAAAAIDIGATMHVAAVGPDRDQEPVRTFRTFTDDLHRLADWFAECGVKTVVMESTGVYWIPVFEILEQRGFEVMVVNARDAKHVPGRKTDVSDAEWLQRLHEYGLLRPSFRPQAEIAGLRAYLRQRERLQDYAAGHIQHMQKALMQMNLQLHHVVSDITGVTGMAIVRAIVAGERDPTVLASHRDRRCHASVETVCQALIGNYREEHVFALTQALELYDVYQTKVMACDKQIEAILTRLRKAAPRPVHKLPPARRRGDQKNAPTFDARAALHAILGVDLTQINGLGPYLALKLVGECGTNLAAWPTAKHFTSWLGLAPHNKISGGKVLSSKTRRTDNRAASLLRLAAGTLGRTDTALGAFYRRLSARIGKAKAITATARKIATLFYNTLRHGMAYTDPGAGYYEDRYRERVLRNLRRRAKSLGFVLVEPDPHAAQVVVS

SEQ ID NO: 387085 - protein, 316 aa, unidentified
MLEQIEVYAGIDVSKEVLDVALVPGNKTWRFSYDEGGIEALVKLMEEMRPKAVVLEASGGIQRPLAAILFSAKLPVVQVNPRQIRDFAKATGKLAKTDKIDAQVIAFFGQLIKPQQRPLPDDQVRAIESLMARRRQIVGMLIAEKNRLHRADLVVQLRLRKHINWLEEELDSLDKELNQQIKSSPIWREQEDLLRSIPGIGPVFTLTVLSSLSEVGSLNRKQAASLVGVAPFNRDSGKLRGKRTIKGGRAAVRSALYMATLAAIRCNPAIRSFYQRLCALGKPKKLAIVACMRKLLTIVIAILRDHRPWQLNPVRP

SEQ ID NO: 387086 - protein, 376 aa, unidentified
MRRHGEAFVGIDTAKARNAVAVAEGGREGELRYLGESDNTPDAVAKLVRKLAERYETVQFCYEAGPTGYGLHRQILALGQNCIVVAPSLIPRRPGDRVKTNRRDAQTLARLLRADELTAVWVPDETHEAVRDLVRTRAMAIEDYRRKRQHVSSFLLRHGRSYEGTTTWKGRHLQWLDRQNFAHPAQRLAFQEMLNTVRSVAERIDRLDAALLEIVPAWTMAPVIAAFQAMRGVGLVTATTMVAEAGDIRRFEHPRQLMAFLGLVPSERSTGDTRKQGGITKTGNIRARKALIEAAWTYRHSAGIGEIHQARLAQLPEQIREIAWKAQARLCARYRRLTAKGKKPTVAITAIAREIAAFLWAIARHVEPSPAQPGRT

SEQ ID NO: 387087 - protein, 404 aa, unidentified
MQVLYQRCCGLDVHKKSVVACVITPEGREIRTFGTMTADLLQLADWLLERGVTVVAMESTGVYWKPPYNLLEGTGLELLVVNAAHIKAVPGRKTDVRDAEWIAQLLQHGLLKASFIPDRPQRELRELVRYRTQLTRERARAVQRIQKLLEGANIKLASVASDVLGVSGRAMLSALAAGEADPATLADMAKGRLRTKRTELEAALRGLMGEHQRLLLGSGLRHLDFLEEETRRLDGEVAGRMAPFAKELEALDGIPGCARRTAESFLAEVGADMSRFATHRHLASWARICPGTNESAGRRGSGATGPGNPWLRSTLVEMAHGTTRSRSYLGAQYHRLAARRGKKRAAIAVAHSILVIAYHVLRDGTPYHELGRNYFDERQREEVARRAVTRLERLGFKVTVEPAA

SEQ ID NO: 387088 - protein, 388 aa, unidentified
MKQRLDSHPVLITPDYNETLILAIELSNSKWVLAAQVPGLANVKNKRTIEPTVEALMAAIDGYRARAAKTGRKVQRIIATYEAGWSGFWLARWLMRQAIETHVIQPSSVPVDRRARRAKSDGIDAELLLRTLLAWLRAEPRVCSMVPIPDEADEDARRLVRERSELIKERIKLVNRIGAVLATLGVAEYDPLKRNRRRRLDELRTALGEPLPIHARAKIARMLDRLELLLEQIADLERQRDAVLGEERPDKAAEMIQQLASLRGIGVQSASVLVREGFVREFANGKALGSYAGLTATPYSSGGVEREQGIGKAGNARLRTMMVELAWIWQRYQPDSAQVRWFRDRISSTGRRVRKVMVVALARKLLIALWRFATQGVVPEGAVMKPAS

SEQ ID NO: 387089 - protein, 415 aa, unidentified
MNTTDYAALVALDWGDKTHAFALQIAGAEGIETGTIEATPEALLDWLDKLHERCHAKPVALAIEAGRNALLRVLAAHSWLTVYPVHSATSGRFRQAFTPSGAKDDIPDALVILKLLRQHRDELCALLLDSPELRELAALVADRRGAVDARTRLVNQLCGLLKHYYPQALTLAGEDLAAPLAIAFLRSFPELAAVQKAGANRLRAFYTKHNVRSQQRIDERLALLGRARALSVDQAVIAPSRLSLARLLDLLEVEARHIAAYDKHIATVFAAHPNAEVFAALPGAGPALAPRLLVAFGDVEARYPNAQSLQKYAGLAPVREKSQGRVWVHWRWTAPKFVRQSFVEWAGQTVPRCAWAHAFYQRQKAAGKGHHAILRALAFKWLRILWRCWKDNVPYDETRYQASLARRGSPLANAA

SEQ ID NO: 387090 - protein, 369 aa, unidentified
MKHSIIFVGLDVHKDSIDIALANEGRTGEIRFSGTIGGDLMSLDAAIKKFHRSGVELRFVYEAGPCGYEVYRHLTARGFHCDVIAPSMTPKRSGDRVKTDRRDAITLARLYRAGELTPVYVPREDDEAMRDLVRGREDAVNASRKARQRLSAFVLRHGLRYTGGSTWSAAHLRWFADIKMPHPAQQITLQEYINSVEESSERIVRLTEQIVKLIPTWRMAPVVAALQGLRGVAPVVAVTMVVEIGDMRRFDNPSQLMAYLGLVPSENSSGQTTKRGGITKTGNGHARRALIEAAQAYSHQARISRELRKRQEGLSRAIKEISWKAQVRLCGRFRKLQARGKNRNRTVTAIARELSGFMWAIAKEVPMSA

SEQ ID NO: 387091 - protein, 348 aa, unidentified
MRLYNQQHRFYAGVDLHARSLFTHVLDHAGRTVFEKDLLASPDTFLDAIKPFRTGLVVGCECMFAWYWLADLCEDHSIPFVLGHALYMKMIHGGKAKNDRIDAAKLANLLRGGLFPMAYVYPRAKRQTRDLLRRRSFFVRQRAQLIAHIQNTNSQFNLPPFAKKLTYAGNRTPEIAERFAHPSTQLSIAADLKMIDAFDEQIADLERYLIKNAKVDDPVTYQLLKTTPGIGPILGLILLYEIDAIGRFPEVGNFLSYSRLVRCQHESAGKVKGTGGKKIGNGHLKWAFSEAACLMIRSCLPIKSWVQRQEKKRGKRKALSLLEAKLGRAVYHLWRKQVPFDPKRFLNG

SEQ ID NO: 387092 - protein, 392 aa, unidentified
MTTIRTNDVTTPATRLHLAFELGWSEWKLAFTIGHGQAPRLRTIAARDLEALMRELAKAKERFHLPADAPVVSCYEAGRDGFWLHRYLSAKEINNIVVDSASIEVNRRQRRAKTDRLDAGKLVTMLLRYHAGETKVWSVVRVPTVVDEDHRQLHREMLELKAERTQHVNRLKGLLASHGIAAPAVNAKFLAALPTLRLWDGSALAEDSQRRLVREYERWQFVDRQIKDLDNDRCRRIRRDETPHVVKVRQLLQLAGVGLNGAWLLVFEVFGWRKIRNRKEVGALAGMTPTPSQSGAGFREQGISKAGNRRLRTMMVELAWCWLRYQPESELSQWYTRRFSLGGTRARKVGVVALARKLLVAFWRYLEQGEVPKGAKLVSWGPKAKKSSPVAA

SEQ ID NO: 387093 - protein, 301 aa, unidentified
MNSICLSTDQLTTALPVLGLDVAKKSVQAELRTNGKRVRFGFENNAKGFAQLARMLKEQGAPKVWAGLEATGPYSHALALWLHGQSHRVSLLNPRRVKQYARSAGNRNKTDLLDAAIIADFVCAHLPAAWQPPTLEVAQLQALVRRREELSLMLQAEKNRLEGVASHVRCSLERIIDTLSAEKTRLEKLITQQIRSHQQLSRDHQLLCTIKGIGSLTAAILLAEVARPGQVERARQAAAHAGLAPRREQSGTSVRRNRGLGKEGNRYLRKALYMPALVAIKYNAPLRHFASRLRTAGKPKK

SEQ ID NO: 387094 - protein, 394 aa, unidentified
MCQQYKTEASMIKHNILFIGLDTHKTFTEVAFIEDQRGAKSIHLGKILSNKAAFKKLARQLQSKYPDATLHFVYEAGPCGYWIYRLLTSLHHCCYVIAPSLIPKKPGERIKTDKRDALKLAKLLKSEGLTPIYVPEPEDEAVRDLSRSRETAMKDLKDAKYQLKALLLRNNINCKIKDNWSQQHLRWLAELVLPHPCQQIVLQEAVSTITERLKRLKRLDNELTHQVKNWRYYPVVKAVQALRGVRLLVATGVIAELGDLTRFDHPRKLMCYLGLVPSEHSSGGKRHLGAITKCGNSRARRLLVEGAHSYKHNANISKEMQLRQEGLSKEIIDMAWQAQLRLCRRYNRLMHKGKHRNVVVTAIAREMIAYIWAISREVVLPVIDVKLRLARMPA

SEQ ID NO: 387095 - protein, 347 aa, unidentified
MRFYSGRHRYYCGIDLHARTMYLCILEHESGKVLLHRNLRCDPQLFLSTIEPYREDLVVGVECIFCWYWLADLCNQQGIPFLLGHALYMKAIHGAKAKNDKIDAHKIAVLLRGGAFPLAYVYPRGMRATRDLLRRRLFFVRRRSELFTHIRNTFHQINLPPPTVPFHHPRNRLGLARAIPDPVVRATVEADLALATRLDEIIRTLELTIRQQVKIDDPKTFKLLQTIPGIGRILALTLLYELHDVGRFPRVQDFLSYARLVKSQAASAGKVTGTSGAKIGNAHLKWAYSEAAVLFLQKNPPGQRLLNRLRAKHGKGKALSILAARLGRASYYMLRRSTAFDMDRFMN

SEQ ID NO: 387096 - protein, 406 aa, unidentified
MRKDTKDCLIVAIDIGSASHSVYWCDFQGTEGKTQSFSNNREGFEKLCHIIETGKRKTGLTKVMVGYESTGPYWIPLVHFLHEKPFRLVQVNPSHTKKVKEIEDNSPLKSDKKDPRVIAMLMQLGYFLDVVIPRGDAANLRNLSHARERACGDRTVALNRLHDLVFCLFPEFPTIMKISSATGRYLLQHYPTPQSVLDLGEKPLTAIMQTVSRKQLGADRARKLLDAAAQTVGIHEGIPSLLGELNDLLQSVARKDTTIAALETQMAAYLKTIPDSRLLLSIKGVGIVTAAGILGEVVDFHAYPSQAAILKMAGLALYEVSSGKHIGSRHITRRGRSLLRKYLYCACIGMVKQNGIFFESYQRLLDRGKPRRKALVAMMRKLLRIMFSLVRNGVHYNHERVVPNAA

SEQ ID NO: 387097 - protein, 473 aa, unidentified
MINTEEQKDDMNAGPPQLSARLVRQQEREEVPVMAIVGGFDIHRRQVTFDYLDTVSGQVRRGRIDPACRETLRAWLVRFADRDDVTFAVEGCTGWRFVVEELQRAGITALLAEPAETAHQRGPKQRAKTDKADARHLRALAAEGRVPLSWIPPEQARELRVLLQLYRDLREEHTAWAQRIHATLFHQGAPGLAGRLADPQARAVLEHGQDIGLSPAGAQAVATALHRMDDLEAALRPVRAQIAAFARRQAGCKALTAELYGVGPLVAAIVWAFLGDTRRFSSSSQAVRHTGLDVTVYSSDDKRTPGHLSHQGPPILRWALFEAGHQGSRASSPDHLYYTDAAARIDANRAALSVARKLARRSHHILRRLGDQAYTPCQAGEADAGERGGPHATDAPWPFPQWPAPRSCPACRPRHRPGADSLERPARPHPQRDHPIDHHVAGTSQHGLAHRDKAGRPRHPHQPNPKPREEPMT

SEQ ID NO: 387098 - protein, 421 aa, unidentified
MQVIYERCAAVDVGKDVIAVAVRLPGDRPDGRATVKRTFKTFYGVLAEAARWLASLGVTHVAMEATGIYSMPVYHALIEHGGFAKVLVCNAGHVKNVPGRKTDFSDAEWLVHLLECGLLAGSFIPPAEVKAARDVLRYRTKVAQQRVSEIARLGNVLQDAGIKIDSVASSIATKSGRAMIEALIDGERRGPVLAELAKGRMRAKIPDLAMALEGRFGDHHALMCRLHLDHIDHLEAMLTRLDAQVEAMMTPFRAARDLLTTAPGIGLLSAAAVISEIGADVREYFPDDAHLASWTGLCPGNHESAGRRRSGKRRKGNQHLQSILVECAWAAVRHDGYLKSLYHRHVMKWGGYRSQLAKKKAIIVVAHALVVIIWHILATGTPYHELGADYFTRRLDPDRETRRLIARLEALGHTVTLQPAA

SEQ ID NO: 387099 - protein, 341 aa, unidentified
MDHYAGIDVSLEYSSVCVVDGSGKIVREAKVASEPEALIAWFASLGFGLERVGLEAGPLSQWLFAAIREAGLAVELLETRHVRKAFEAMPVKSDRNDARGIAQLMRLGWFRPVHCKSMGAQETRATLTARKLVQSKLRDVENSLRGILRGFGLKVGKTTELGFAGRIRELVAGHPHLETIADALLAVHVVLRNEFKAFEKRVRKMARSDTRTRLLMSTPAVGPIVSLTYASAIDDPGRFKSSKQVGAHFGLTPRKYQSGETDYTGRISKIGDSSVRTALYEAAHIMLTKPVKGCSALKSWAMRIARRAGMSKAKVALARKLAVIMHRMLVDGKPFKAVAAA

SEQ ID NO: 387100 - protein, 417 aa, unidentified
MKKDNKFGKKSELGTKPAKSGNTGQRETKEVLGELVGRLREKLNPKVASVSPAEEHRRGDLKPNLDRLTVGVDLGDQWSNYCILDLEGETLAEGKLRTTQQGFAELFQCLSSARVVIEVGTHSPWVEEVIGHCGHEVVVANPRLMEGSKRRKRKNDRIDANKLARLGRVDPQSLHPMEHRSREVRQDLVLLRARDALVAARTELINTTRGTVKSIGRRLPKCSSRSFASQAEKELPVEIREALLPLVQLADKLSDCIKEYDRRIEEMASEKYGHTKLLRQVRGVGPITSLAYVLTLENPERFTQSRDVGPYLGLVPKQEDSGESQPQLGISKAGDRMVRRLLVGSAQYILGPFGPDTDLRRYGLRLCERGGKNAKKRAAVAVARKLAVLLHRLWVTGEVYEPLRNSLSLPSVATTAA

SEQ ID NO: 387101 - protein, 419 aa, unidentified
MKRMIKRCAGLDVHQATVVACVLIHEGRKSPRSEVRSFGTMTHELQALRDWLAAERVTHVGMESTGVYWRPVYAVLEGHFELIVGNARHMRNVPGRKTDVKDAEWIAELVCCGLVRSSFVPSKPLRELRELLRYRRKLVEAQAAERNRLQKLLETANIKLGSVATDVFGVSGRAILRALRDDTASPEEMAELARGRLRSKRVELAHSLKGQVEDYHRFLLSMQLRRVEDTEQYIEQLDQRIAEKLEPYQSAMALLMQIPGVDWVVAAVLIAEIGTDMSVFISVYHLAAWSGLCPGSHESAGKRRNVSVRKGNMHLRTILVGAARAAARTKGSYLKDKFHRLKARRGTKRAEVAIAHKILVAAYHMLSRGVGYRELGEAYLDQIDQTRTAANLKRRLERLGYVVSIHPKEAAPNPVEAAA

SEQ ID NO: 387102 - protein, 289 aa, unidentified
MPIAGGLDIHREQLTFDYLDTATGEVKRGQVAPAGRAHLRAWLARFAGRGDVAFALEGCTGWRYVAEELAGAGVAAHVAEPADTAFARGRKRHAKTDQTDSRHLRQLLAEGRLAECWIPPSVILECRALLETYHDLRAEHTAWVQRIHAVFFRQGAPALGDGALRTDRDLQALRAAAAAHLSPAGQLQVDTALGMIAFLEGRLEVLRHQLLAAARSLTGARVLAARLYGVGPVTGLAMTCWLGGAGRFSSSRKAVRFAGLDITVWSSDRKGPARAAVPAGPAGAALGGV

SEQ ID NO: 387103 - protein, 395 aa, unidentified
MGQLKRAAKGRIHRKPAVAGDLVRPELSIIGVDLAKSVFQVPGVNHKGDVAIQKKLPRMDVLSWFAGQERCLVGMEACATSHYWARQIAELGHEVRLIHPSYVKPYVKRQKNDQVDAAAICEALSRPTIRFAWIKTRDQQAVQVMHRSRDLLMKQKIKLSNALRGHLAEFGYVFAQRECGLRAMSAALSQTGNEEIPVLAQRVLLALIKQLNSVSDAITTLDKELLAWHRSQADSQRLATIPGIGVLTATAIIGAIGDGRQFRSGRDFAAWVGLVPRQHSSGGKDRLGRISKRGNSYLRRLLVVGATMHLVGNRSKKAPGGAWFEDLRQRKPARLATVALANKLARIAWAVLTRGGTYRAEPVQATDKEPCREGEALTEGKIPERVPPAGRYRRL

SEQ ID NO: 387104 - protein, 427 aa, unidentified
MNYTQNQKISQITPSTLIIGIDIAKDKHVARAQDDRGLDFGKRMVFENRIYGFEALLKWVKQHQEQHKKSHVIFGVEPTGHYWLSLAYYLKARNYDFVLVNPMHVKKSKELDDNSPTKNDTKDAKVIAQLIKDGRYSVPNLLDGIYAELREGVKIRDQLTEQLMITEGRIQNVIQRYFPEFFDVFGNWDGKTALCTLKMFPFPSEITEMTPEQVLEKWKPYVQRGVGIKRATKLVETAKKSIGIKVGLSFAKREIAYLIEQFELFKTQLKELDSELETIVGSLPGAKQMMKIPGLGAVTVALFYAEVGDISKYSHPQQLVNLAGLSLREHSSGKYKGQTRITKRGRRRLRRALYLAIRPLVAHNLTFKALHHYYTTRPERPLKKQQSLIALCCKLLRVLFVIGQKQCEFDGSKLLRGIPQTEELQAA

SEQ ID NO: 387105 - protein, 372 aa, unidentified
MPDVSSNQPADVRLWVSLDVHKLSIVAATLPPTGGQPEVQRIETTRVAIRRFIERLGSPEGLAVCYEAGPGGFDLLRVLTELGVACDVIAPSLIPIRAGDRVKTDRRDAKKLVRLYRAGELVYVQPPTPETEGLRDLMRCRDDLRRARTAARHRVSKQLLRHGRIYRDGKSQWTKMHRGWVARQRLDDEFAQAALEQMLIHLDGLDRQLDALDRDLEQIARTGRWAETVQILTRFRGIATRTALGLISEIGDFHRFGHPRELCAWLGIVPTEYSSGDQRHRGHITKTGNHHARRLLIEAAWSYQHRPRRPDRGPEPDARAWQAQIRLHRRYRHLTTERGKRSTVATVAVARELAGFLWAAATNQPFALEAAA

SEQ ID NO: 387106 - protein, 415 aa, unidentified
MEIIYPRVAGIDVGKREIAVAVRTPGDVPGRRRQQIRKYKTYYLVLRGMVAWLVEQGVTHVTMEATGVYWKPVFHALCEAKQIEVLLVNARHVRNVPGRKTDVKDSEWLAQLLECGLLRGSFIPPKEIAAIRELTRYRKKLIEERTRELQRLSSVLEDGGIKIDSVASSITTLSARDMIEALIGGERDPRVLAELARGVMRNKIPDLTMACEGRFGDHHALLARMHTDQIDNLASMIQVLDDRIEEVVDPFAEQLRLLLSIPGIGERAAQVIISEIGVDMARFPTAAHLASWAGLCPGNNESAGKHKSGRTRKGNAEVRSILTECAWSAGRTGTYVGAQFRRMHRRFGKTGGGKAAIAVAHTLIVIIWHVLHDGAAYRDLGSDYFTRHDNPEARKRRLVHDLQSMGYQITITPAA

SEQ ID NO: 387107 - protein, 427 aa, unidentified
MAVVMIGIDPHKASHTAVAINAAEQSLGQLRVRASAVQAERLLGWAQAWPERAWAVEGAGGVGHLLAQQLLSAGERVLDVPPKLAARVRLLATGDINKNDPNDARSVAVAALRSPGVREARRDDHAAVLKLWSKRYQDLGRGRTQVACRLHQVLCELIPGGIPGEITAGQAERILASITPAGTVQAARRELAVELTEDLRGADARIRETRQKATMAVAAAGTSLTGLFGVGPVIAAAVIGDVRTVSRFPNRDHFAACNGTAPIEVSSGGRKVYPLSRRGNRRLNHSIHMAAVTQVRYRHSPGRAYYDKKLAEGKTGKAAPRCLKRQISDAIFACLQGGARRPAPAKSPGGQPGNHSASRAAGSHPGHRRFGQATPGPATHPTAPAAPAAFPAPLPPRANGRTGQGPGAARPRSGARRASSTRPPASR

SEQ ID NO: 387108 - protein, 429 aa, unidentified
MNYTQNEKILQVGEGNLIVGIDVGSKKHYARTFDCRGIECSKKAFVFTNDGEGFAGFLEWTSEMLEKSGKETVIPGMEPTGHYWFDLAKFLQDNGMRPVLVNPLHVKRSKELDDHLPSKNDRKDPKTIAKLVIEGRYTYPYMPEGVYADLRNASNMRFQVEAELTRNKNRIQKWFSVYFPEYNEVYGSFDAISSMMIIKQAALPCDIISLGAEKINQIWREAKLKAVGKKRAQTLVEAAQRSIGYTEGLGTARIEISMLLDDYEKLKVRLGLIMELIEKLVSKIPYAEKLMNIKGIGMKTVSGFIAEVGDISRFTNAKQLQKLAGQAIVENSSGKHKGKSRISKRGRKRLRYLLFEAALSLAATNPEFKELHRYYTSREQNPLKKIQSLMALSNKLIRVFYTILKNGADYDPEKLLNDIRRPEGMSKVA

SEQ ID NO: 387109 - protein, 352 aa, unidentified
MRWVGLDLHKRYITACAVDDAGQVVAEHRRLPADVVPLVAWLQALGDAVTVAMEATLYWAWLHDQLSAAGIAAVAAHPYQVKLIWQARCKTDPIDARKLADLLRTNLLPAIWVPDAAVRADRKLLRGRAYLVRLRTSLKNRIHGHLTAENWQTTVTDLYGRAGRAWLATVALSPMGRLQVDLLLELVDALDERIGRLDDRVKRLVKEDPVAQRLQTWPGIGTFGAALLLAEIGTIHRFHSSHELAAYAGLTPSTQSSGDKTRHGSVGRAGSPWLKWILIEIVQSLKLAPGPVGQQYQKLLRSKGKAKATVAAARKLCCYLYWCLKEDWSYEEWLRQHERLEVRPVHSLGSAA

SEQ ID NO: 387110 - protein, 318 aa, unidentified
MSVLGLDVAKESFHAALLQGDRIARKAFPNNARGYEQLDAWLRNRDVECVHACLEATGGWSEALALHLHTGGHTVSIVNPHRIRAFGQSEGLRAKTDAADAALIARYCAVHAPEPWTPARPEVRALQALSRRRGALIEMRTQETNRLSGPETNESVRSSVAAHVSYLDAQIAEIEREIDDTINKDPTLRNQRDLLETIPGIAHRTATSITAEMPNLAEFHSGKSVAAHAGLSPIIEQSGTSLARSRLSRTGNARLRHSLYFPAIVAMKFNPAIRAFAGRLRARQKRPMVVIAAAMRKLLVLAYGVVKSGRPFDPSLTS

SEQ ID NO: 387111 - protein, 447 aa, unidentified
MATKRARSQKNKKAVLNKINYNVAGIDLSSEDMFIAVIEKNVRQFSTFTKGLEDAAIYLKSEGIEKIVMEATGVYWIPVFEYFEKQGFDINLVNGAHAKNVPGRKTDVLDSEWLRELHTYGLLRASFIPDEKIRELRYYVRLRDDHISMGATHINIVQKNLDMMNIKLHKVIDSIMSVSGLLIVQAILDGERDPERLWALCEKLIDNKKKEDVILSLKGNYRSEYLFGIKQALEMWQHYQNLQKQCDAEIEKILHQMTFDKGNPQNMGTEKPIKKRNKPAIEDFHLLMTKLTLGKDTTAIAGINDYSALKIIAETGTNLDKFKNEKHFTSWLGLSPSAHQSNKKKRKKGRRHCNRAGMIFRQIAVNVGNGKHTALSSFYKRIRARAGKMIAIKATARKIAVYFYNLLTKGEQFVEEGIRRYEQRYAEQQEKYLQRKASEMGYMLIKA

SEQ ID NO: 387112 - protein, 401 aa, unidentified
MRFAGIDVGSERHMLAMVGEEGEVLCRSSPFGEDASGYARLFELLGPPEGCLLALEATGHYWRNLFVALLAKGYAVAVLNPLRTRRFAEEELQRTKTDAIDALGIARFAAQKRPSAAQLPDVATEELRELARLRARLQEDFASRLRQLHRAVDLGFPEFTRHVHTLESQLAAAILSRYPTAASFHGVSVKKLARIVYDGSHKIGEELARALIDEAANSVGSHHSEPYRLRIRYLCEDLDVLRRRLKDLARDIERKLDDHEVGKLLTTIDGVGPLTAACLIAELGDPARFRSAGAIASYVGVVPRLRQSGKKRFSGSPTIPFGNARLRKALWMVVLNAVRCNPWLRQYYERLRAAGKPGKVAVIAAMRKLLTAVWSVATHRKPFVPHLPRVPAPLGAVTNKA

SEQ ID NO: 387113 - protein, 407 aa, unidentified
MRLFVGDDWAQDHHDVELMDAAGQVLARRRLPEGVAGMARLHELIGQHLNADAEDAEVVIGIETDHGPWVAALVAAGYVVYAVNPLQASRYRERHGVSGAKSDRGDAHMLTDMVRTDSHQLRVVAGDSPDAGAVKVVARTHKTLIWERTRQVQRLRYQLREYFPAAVEAFADLDAPDALELLAKAPDPVRARRLTRAQVSAALKRARRRDIPAKATAILAALRSGQLGQPEAVTAAYAVTARSLIAVITVLNEQVKALESQVEADFGRHPDAEIYRSQPGLGSVLGARVLGEFGDDPRRYVSGKARKNYAATSPLTRASGKKKVVTARYIRNDRLTDALMAQAFTALSVSPGARALYDAERARGTEHNPALRKVANRLVGILHGCLKTRTLYDEATAWSHQEIKLAA

SEQ ID NO: 387114 - protein, 372 aa, unidentified
MHGLAHSTASTRILALDLGKLNSVLCVYDPATHDHHFVSAQTTPQTIHDLLVTHQTDDPSSTLLVIETCDVAGWVYDIAVALGMNVAVANPAHEAWRWTRVKRKTDKDDALKLAKLAVLGQLPTAHMPTPQQRQRRRLVHYRRVLVDRRTQIKNQVRSIYSQQGLSLPRRGKAWTKAGVAQMAEEAKPLGECESVDDLWRGRLHVELQLLESLNQQVTQVDEKLDALGSQDDRVQLLQSVPGVGPRLAETVVAHLDDPRRFKNARQVASYAGLVPKQFESGTIKRSCRITRRGPALLRSMLVEVAWMVYLRNVWAKQFVQRISRGVASRKNIAIVALARKLLVMLWAMLRDHKRWRDPSPARDASSAPLAMA

SEQ ID NO: 387115 - protein, 412 aa, unidentified
MDKPKVEYEQIVERGCGIDVHKETLTATIRGIGIKETSRVYNTFTSSLIELRDWLKSEGITHIAMESTGVYWKPLFNILEEDFSIILVNARHIKNVPGHKTDKQDSAWISKLLLSGLLKGSYIPPRNIRELRDLCRYKRKQISDISAEKNRLQKILEDANIKLSSVVSDVFGASGTRIIDAIIEGEQNIDELAELCHWRLTGKLDQIKESLNGKITEHHRFMMWTIKKKIEGLEKIIKEVDERIDRQIGEYTLEIELLQTIPGVSKEGAITIISEIGADMDVFPNEQHLASWAGMSPGNNESAGKKKSGRTTHGDKYLKVILVQCAWAASRTKNTYYRSKFESLVGRRGKKRALIAIGHKILCAAYFILKNKEPFLELGSEYLESRRKQTKVSKCLLELKDLGYEITIKKTA

SEQ ID NO: 387116 - protein, 370 aa, unidentified
MPKLKVRYVGLDVHKDSIVIAVAEWGRDSARDVGKFPSDWVSFEKQLKRLSNGFTLKLCYEAGPTGFELHRRLVEAGYDNQVVAPSLIPRKPGERIKTDRRDASKLARCLRAGDLTAVYVPDEDTEALRDLERARDAAKKAETASKHQLGKFLLRQGRRWDGRSNWTVKHYTWIRQLSFDHEAHRRVLRDYIKALEDATERVERLTRDIEELVATSTLAPLVTAFQSLRGIATISSVVIAAEIGDLRRFDSAGAFMSFVGLVPSESSSGKRTKRGSITKTGNRHVRRILVEAAWHYFKPIGMSRVLRARNALVSDEVRKIAWKAQKRLHRKFHHMVYEKNKLSQVAVVAVARELAGFLWAIAREDKLLAP

SEQ ID NO: 387117 - protein, 353 aa, unidentified
MKKMQEFIVRGKRIFVGLEDSKKTWRVCVRCERMVVHETGMPARYEVLRAYLLNQYPGCKISLIYEAGFQGVWLHDLLEADGIDCIVTPPNKVSCPKDDRVKTDKRDARLLAKNLEAGVYASCAVPDRERREDRQISRTLSQVQKDIVVEKNRIRRFLDYHGLNGGLPDKNWTDKDYLRLKEMEIPRSLKVSLDAYLHILETLFSTRDELKTELRALCKKERYKAGVTIKRTVPGIGWLTAIRLTLEWGDLRRFPTGKHMAAFTGLTSREYSTGETVRRGRITGQSSGYVRSWLIECAWRAIRKDPALLDKFMRVWRNSGSKKKAAVAVARILAVRIRAIEIAGHSYCFSVAE

SEQ ID NO: 387118 - protein, 405 aa, unidentified
MGKVFVGHDWAETHHDVYVVDADGNRLGGSRLPEGVEGVRRFHELVGAHCENPAEVVIATETDRGLFVGALVAAGYTVLAINPLSTSRYRDRHSTSGAKSDPGDAKVLADLARTDAHQHRAIAGDSELAEAIKVLARAHQSLIWTRRRQLNQLRSMLREFYPAALDAFEELGHRDALAVLALAPTPEQGRALSTTEIAAALRAGGRQRRVEERAAKIQAALRTEQLATLPMVSAAMGSTVTALVAVATELTGQMDRLEEELADRFEQHPDAKIIRSLPGLGMTLGARVLAEFGDDPNRYADTKSRKNYAGTSPITRASGKNHVVLARYARNQRLADACYPWAFAALNTSPGTRAFYDAHREAGDTHHQALRALGNRLVGILHGCLRHHTLYDEHTAWGHRTELAA

SEQ ID NO: 387119 - protein, 462 aa, unidentified
MTGKHEIEGSEGNRRQLQGLPVIRRNVAGIDLGSERHWVCAPTAEGSAREIASFGATTAELIRMAEWLKARQVESVALESTGVYWIAPHEVLEGQGLQVLLVDTRQLARVPGRDKKTDPTDCEWIQRLHSCGLLQGSFRPEEAVCMLRTLVRDKANLVAESGDWLRRMQKSLDQMNVRVHRAVSDIDGVTGMAILRAIVGGERDAQKLAKLRDQRCSKTEQEIAEQLRGHWREDHLFSLQQALKMYDAVQERIAAYEKEILQRLGEMERDEQRGQTAPPLPNANKAKAIKKRGQEPMRQALYRMSGVDATHIDAIGVETLEVVLSEYGPDLSRFPTEKQFVSHVTLAPHVPTSGGKPLRKRKRNSTSTRVAAALRMAALSLRHSQTALGAYYRKMAQRLGGDIAVFATARKLATLIYRLLRWGQPYVDEGAKAYEARYRQQRIGRLAATAKQLGYQLAPINA

SEQ ID NO: 387120 - protein, 487 aa, unidentified
MLAESHDEEQIIARVAALDIAKAELVCCVRVPSPAGGKRRLQEVATYSTMTQALTELANRLVEMRVQRVVMEATSSYWKPVFYLLEAHGLDPWLVNARDVKHLPGRPKTDVLDAVWLCKVAERQMLRPSFVPPWPIRRLRDLTRYRTDLVAARTAEKNRVEKLLEDACIKLSVVASDIFGVSGRAMLAALVAGERDPKVLAQLARARMRGKIDRLEQAFDGHFDDHHRFLLSRMLARIEGLDADIAAVDAQIDVQLAPFAEAAARLDEIPGIGPVAAAAIIAEIGVDMSRFPTAGHLCSWAKFAPGINSSAGKSKGSASSGHGNPYLARILGEAAVGTTKTNTFLAARYRRIARRRGAANPEQSSRSVAPSWSSSGTCCTTQTPDIGIWAPTTTPDTSIRLPRSAATFDNSKPSATRSPSLPPPNNVVRTEAKLTIIFGSVSGWMCTRFRWWRTPSMRRQARSPGHGCARITARSWVGCISCAPRCG

SEQ ID NO: 387121 - protein, 342 aa, unidentified
MFYAALDVSLRSVAICIIDQDGKVRLERSVSSDVPDLVRCLREFGEPIHQIGLEAGTLTQHLTYGLKEAGFDVVCMEARQVNAALSAMRNKTDKNDARGIAQLLRSGWYSRVHVKSVESHYIRALLTSRKVMQRKCIDLENEIRGLLKVFGVKLPMRLRGGAFDAAVRDTIESDPALSHALLPMLQARQMLLETFLELDRRVRRAAHQDSVTTRFMSVPGVGYVTALSFKAAVDDPTRFKSSRTVGAHFGLTPRRFQSGEKDNPGRISHAGDADVRATLYAAANAMLMRSIAWSSLKAWGVRLMKTKGRRRAIVAVARKIAVVLHRMWIDGTEFRFGSEASA

SEQ ID NO: 387122 - protein, 412 aa, unidentified
MDVLVERCAGLDVHRDSVMATVRVPGKRRRQREQHRRAFGTTIAQLQELGEWLEGFGVTLVGMEATGVYWLPVFDVLERRFECWLLNAQHLHNVPGRKTDTIDSAWICQLVEHGLVRPSFVPPPEIRRLRDLTRLRKAQINERARAIQRLEKVMQGVGIKLTSVASAAYSVSARAMLEALLAGTTDPNELAELARGSLRGKIPQLREALANRFELAHHGVLVSGLLAHIDALDQGIAALDARIVEATEPLAELVELVSTIPGVKQRNAQVLIAECGIDMSVFPTVHHFASWARICPGTNQSAGKHRSGKTLRGSRWLRQALTESARAAARTKGTYLASHYWQIRGRRGEPKAIGAIRHDILVAYYHIARDRVPFRELGADWLARRYSPEHRARRLVRQLEALGLKVTLEAAA

SEQ ID NO: 387123 - protein, 355 aa, unidentified
MTQPAYHSNNYETFIGLDVDKNSYSYTVHDQFQIKKSKKMPSNPEHLYNYIQKHYNTKKVICAYEAGPTGFSLHDYLSGKDITCLITSPASIPKAPNERVKTNRIDSVKLTEHLVSGKLRPIRVPEGPYRELRDLVKIRENYARDRKASKQRIKALLLYANLYPGLKDADSNWSSAYIEELRHLQCSFAQRQRLDMLLEDLDYARKKLLSIHRMIKSFCLEHDQINQYMSYLRSIPGIGFTVAFSILGKIGDPDQLQNPRELAAFIGLTPKEKSTGDTINRGSITQMGDKTLRFLLVEAAWIAIRKDTQLEQFYHRIKNKNHPRAASKIAITAVARKLTQIIYRVLKDKRNYIQY

SEQ ID NO: 387124 - protein, 521 aa, unidentified
MSRPRCKRSTKTRKTFLLQKPNGELTPRVRKVGPEHFGIVAIDCGKVRSRYLLADFYGRALLEPTPLPHTRGDFQAAIERIRQAMSQHDLRDVVVAIERTGEYHRPVQEAFRRAGFETRLVHPFTSKQYRQPADSGNKTDDTDLSAIFRATSQGYGLGDPIWPDDYLTLRLFRRHRADLVAKNSMLCCQIREVLHAAMPGYAECFGNLWDAPGALALARQTTSADSVRQAGLQGLQEMVAQNKIVCRRQTLHKLLAWSEQAPPGHHHSADLRRILHTLDDDRRAKTQQILELERTLAHFAVRTPYVLLLAIPGINIVTVADLAGELGPMPFYLNANAITGRAGLMPSRYQSAEVDHANGPLRRRGHRRLRAVLMKTADNLVTCNHYFHARAELWYRAGKDARWIRVKVAKIFSRLAFAMVAGRQLFPHPCCQPRHYILGKLLAFHAEHRSNPAETRQDLEAASEHLPAPARAQEARSLQEHLDGLAKRRRGPQALANIIPLVLARLGTMMVESSHNEGAGP

SEQ ID NO: 387125 - protein, 342 aa, unidentified
MDITTIGIDLAKNSFSIVGMNKHGKVLLRKTLSRKKLLPFIAQCPPCLIGMEACSGAHHWGREFSKLGHRIGIIAAKFVEPYRKGAKNDNNDAEAICEAVSRPNIWFVPIKTPDQQAVLCIHRVRQGLVRDRTSMMNQLRGLLSEFGIVMPKGRYSLQAAIAGILEDAENSLPMIARRVIDNLWQRIKQANEQIDGYNRELAQLVKESTVARQIMTIPGVGAQTASGVVASVADPRMFKNSRQFSAWLGLVPRQYTTGGKIKLGRITKRGDQYLRTCLVHGARAVVASLRDKQDRVSCWIRSLIARRGYLRAVVALAARNARLIWTLMMKQEDYRAMPVLEN

SEQ ID NO: 387126 - protein, 408 aa, unidentified
MINDAINTSRVIGFDAHPDSFTAAILSGPTPAAAVVEKMFNKVPMNRLLQWAKKNTLDSDVIVLEASGNSFHIARSLRSAGREAFVLESRHIGKLKEAHANNDKISAIRIGKAYLAGTTKIVWIPDETTQERRDTFHTYSKAVKRSTQVTNRIKSYLSDHGVRLKSKTHILNQKESIMQACQWSPRERLIIEGMLMDLQNAQSQRAHWNHFMAQEVLHDPLLLSLTRLTGVREIVAYSIGAIIGDINRFASPKKLVAYIGLNPAFDKSGEGEWNGGIKGHGRRDLRSHLIEAAQSILQSNHDLGRWGKKLMARKGSRNLAVAAVARKLAVAIWYLMKGLWSTVEEVEAGMKLKIGKMIGKMGKEGLSLIGKTRKEFKEEIEQNLKKGREYILDRARSSPLKSSLKEAS

SEQ ID NO: 387127 - protein, 352 aa, unidentified
MARDNFINKLDSTQPVFVGLDVHKTKWSVCIIHQDEVIESHTIPGDYKSLHSILKKYSSLNVLSVYEAGFLGFYLHRHLENDGVKNIVVSPNKIPSEVGNYVKTDKRDAKKLAFSLSKNLLTGIFIPSEELFDLRQILRTREKIVRSKRAIINRIKMLLHLHEVKISSAGLTKSTIKIIQKLNLPSNVLLSLNLYLEQFELLVSQANKLESRANKIAQESAYSNSYKILNTIPGVGTITASLLCFEIGDFSRFSSGKKLASYIGITPREFSSGEHVYKGRITGQGNSFLRSCLIEASWYLIGKDPAMKSFYNKIKSNSGSGKKAIVAVARKLINRIHSIVINNQCYTIGEIG

SEQ ID NO: 387128 - protein, 346 aa, unidentified
MCYSTTVGVDLAKNVIQVSVVSDRGKELLNRSLTRRKFAEFLCKQKPALVAFEACATAHYWARTAQRHGHTARIIPAKAVAPFRQGHKTDSNDALAVAEAARRPNIKEAPMKTLDQQGLQAIQRSRDLLVQESTALSNHLRGLLMEFGVVMPQGFAALQRILPEILEDGDNEVPDMYRPTVHRLYLRFLELRSDIQAMNVEIRELVKQHPGCSRLTALEGVGPISAVLLYASLGTGEAFSGSREFAAYLGLTPRQLSSGGKTNIVGLSKKIGNRQLRSVLIQGARAYVHKLKEPKTSKDRWLKDLIERAGHGKAAVALANKNVRTAWAMLTQGTEYQRQPQLKVAA

SEQ ID NO: 387129 - protein, 397 aa, unidentified
MYIVGIDIAKRKHEAAVIDGEGTVIIKPFSFTNNCSGYNRLLAMLTKAKLPLDEVSFAMEATGHYWLALFTRLQKEGFRVQVINPVQTNSIRSFYIRQAKTDPRDALLIAEVIRFGHFSESTLHPENIYELRELCRGRHAIVSMQADVKRKVVALLDQVFPEYETAFTNLFGDTSMAILQTCPTPKELSEMPLEELCHLIEVSSHKRFRMAKAQELQALARGSFGFAMAGDVFSTMIRLYAKHLDFLKQQVREMDRKIAEIMETLDTPITTITGIGPTLGAYILSEIGDISRFSSAAKLAAYAGIDPTMRQSGEYNGVRNRMSKRGSPYLRHAIWLAASSAVLHDPALKLYFQKIRDEGKPYMASVGPACRKMVSIIYAVMRDNKAYTPYIPNEISA

SEQ ID NO: 387130 - protein, 387 aa, unidentified
MVQVNDLSRSLAAFDPISTLVVVVEMSKASWLVSSVVPGVERQPLKKLEPDATAVLRLIERWRNEAVRVGRPISRIALAYEAGRDGFWLARWLIARGIEAHVIHSASVAVSRERKRAKTDRLDAAMLMRVFLGWLRGERGHCGMVAIPTMEEEDARRPNRERESLVNERSRIINRMKSALARLGIRGFKPHLRKAPERLAGLRTAEGTGLPANIIEEFRRDMARLALVREQISSIEKTRAERLERAPDTGPHAMVRLLARVIGIGIETADMLVREILSRKLRDRRALARYAGLTGSPDESGLKSREKGLAKAGNARVRRGLIQLAWRFLMFQKDSALARWYRTRTEGPSGARKTTMIVALARKLLIALWRLVTTGEVPDGVELRTAA

SEQ ID NO: 387131 - protein, 414 aa, unidentified
MELLHPRCAGIDISKRDAKVCVRIAGSGRRRAAETVTTWSSMTNQVLALRDHLTRERVTCVVLEATSDYWKPFYYLLEDASFEVMLVNPRHVKNLPGRKTDVSDAAWLAQLGAHGLVRASFVPPEPIRHLRDLTRTRSAITRERAREVQRLEKLLEDSGIKLSSVASEIMGVSGRAMLEALIDGQRDPAQLAELAKRRLRSKIPALTEALTGRFNAHHAFLARMHLDLIDKHTEAIEHLTTRIEVVIEPFRGFRDLICTIPGISTGVADVITAETGTDMSRFPTPGHLASWAGTCPGSNESAGRVKSTKTRPGNPYLKAALGTAALSASQSKGTYLAARYRRIASRRAPIKAVVAIEHTMLTTIWHMATTGALYDDPGGDFYTRRHPEKAKRRAIQQLRAMGYQVTLEPLQEPA

SEQ ID NO: 387132 - protein, 357 aa, unidentified
MRTREQAILSKEKIFVGLEDSKKTWQLCVRSGGVIVHEASMPAKFDVLRNYFNNRFPECEIRVIYEAGFSGFGLHDELEANGWECIVTPPHTVTEEKCQRKKNDRTDCRRLAKNLENGDYHSCFVPDKELREDRQISRTYEQVQTDIRKVCNRIRRALEFHGLDRALPPGSWNKAMYTRLKLHLKDLEISHSLRFSFDVMLNELEYLRQMRKELLQELRALAKSDRYKERVELLQSAPGIGMFTAIRLQLEWGDVSRFQRKEEFASFLGLVPSDYSSGEKERQGHITKQGNSSVRSWLVECSWMAIKHDPVLLDKYRRVLKNCGSKKKAIVAVARKLAIRLRRILLNGEPYVLGVVE

SEQ ID NO: 387133 - protein, 516 aa, unidentified
MATKCKSRKSGKSCKSRPAFLGKPQGVIQPRVQKVGPEHFGIVAVDCALARSKWMFCDFYGRVLLPPKNVEHTRSDLQLAIAEIDQASTQYDIRDRIVAVEMTGTYHLPVKRAFRQAGWDTRLVHPFSSHHYLLPANPDNKTDDNDLEAIFRAAVNGFGLVEPACDETYQTLKYLVRARRDLVEKRSRLHCQIREHLQRCLPGYGALFPDDELWTSPVALRIARRAASAEAIRQTGIPGLTRWLREDRCRFQSRTVERVVAWAGNAAPADPLAPMLTRLWQKLDDDRQTKTQQILEMEREIAGFLVHTPYLLLLSHPGINVVSAGELAGEMGPIEHDANAKAITGRAGLFPSRYQSDEVDRADGPLARFRNHLLRAVWLRVASNLVKCNAHYRGMAQLWKLREVDARDIRTRIANRATRPIFHMVSGRKLYEHPSRLDRGYVLDKLRQFHLDHQTPPQQILRDLQHAIKQLPPEAYPQEAEPLQQAYQKNRRSRRSGPVHIGEILLATLARLGVLE

SEQ ID NO: 387134 - protein, 599 aa, unidentified
MLHDQAAVAPPQTVHHPVRIGVGIDTSRYGHFAAFLREDHQPAAAELQFIESAEGYAQFQQRLEHIAQRHKTVSFAIRIDAAGQYADNLLHFLQRLATHPERHTCFLPNCTITISCGDPQRNKNYRAALYGSKKSDPIEAQAAARYALSERPASTTPLSMEMRTVRQVATRLQATVRQRTRLINQLHHLLVLAFPELALLVKDISLGWVLELVHRFPTAQLLAAASDKDLANIPYLPDKHIPKLLQHARSSVASLSGTTIEELVRDQVRQLRDASARQKRLENLMVQAYRRLPSPNHINTIPGIGDVTAAVLTAYILDIERFETPNKLVAYFGVLPIEASSGVDRDGQPRKSRRFVMSKRGNDLVRRYLWMAALSAVRFNPAVRALYCRVVARHPDHKAIAIGHAMRKLLHLVYALWKSDKPFNAKHYPWGGPAEEASAQPTASEKSSEQAEVGKEQTTGHKPTIEPARKVVTVACAATVASESPTDEKTFIDFAHVKRQLSLSRVLDHLGLSSRLRGSGPQRRCACPIHRADGRGRTFSVNLDENVFHCFDTKCGKEGDVIDLWSLLHQMNLRAAAEDLLQTFGLEPAPGSGTEKRHG

SEQ ID NO: 387135 - protein, 358 aa, unidentified
MAVNEGTRRIVGGVDTHKDLHVAAVVDEQDRVIETRSFATTRQGYRQMLAWMRAFGDLQRIGVESTGSYGAGLLRFMQQAGIAVLEVTTPDKQDRRRRGKNDDLDAQNAAHAAFAGQRTVTPRSRDGMIESLRVLMACRKTAVSARRVALQMIHNTIVCAPDGLRDQLRSLTRMQLVRTLASSRPDLTAYRDLESAYRIGLKSLARRYLELHDEIADLDAMIAAIVDELAPNLVACNSIGHIGAAQLLLTAGDNPERLRSEASFASLCGVSPVPASSGKTVRHRLNRGGDRAANSALHIIAIGRLRTDQRTKDYVARRIAEGHSKLDAIRALKRYLAREVFTLITRRRREINATRIAA

SEQ ID NO: 387136 - protein, 319 aa, unidentified
MTQPERFIGIDVSKATLDVAFGHDEQAPVESIPYTPDHVARLVARLQQLQPTLIVLEATGGWERPLVEALQQADLLVVRIQPQRVRALAKAEGLLAKTDRLDARLLARFGERIRPPAEAAADPQQQEMSDLLARRTQLLQMRTAERNRLGTAGPAVRKRIQEHLDWLDKALAEIEHDLEDRINSSNDLPRQQQLLQSVPGIGKITAQTLLIRLPELQSKDRKAIARFVGVAPLANQSGPKDKKRHIYGGRQDVRSVLYMATLSATRCNPVIRAFYQRLRQTGKPFKVALVAAMHKLLTILNAILRHNRPWDPTLHASKT

SEQ ID NO: 387137 - protein, 350 aa, unidentified
MEKVSVIGIDLAKNVFVLCAQTASGEIAWRKRLKRRAFKQFMAATAPRCLVAFEACGGAHYWGRFLTALGFEVKMMAPRAVKAYRQGPHKNDWRDAEAAAEAGSRHPVRAVRVKSEAAQAVQVLVRLRALQIRQLVQTGNHLRGILNEFGIVLPKGHKRLREAIARLRQEDPASAALPASVRRTADRLCLQLAEQARRVTEATSELEAAIKDEEDCRQLRTVPGIGPINAAALSVALEAPQAFPTARAFAASLRLVPRQHQSADKQIMLGIGPLSANETRRHLVLAGQSLITMVRRFKQPPADKFLLWVYRLDRRKHRNVAAVAVAAKLARIAWALMAKDQIYQPRLATA

SEQ ID NO: 387138 - protein, 343 aa, unidentified
MKLHVIGIDLGKTVFHLVGLDSTGRVVIRKRCSRTQVLAFTANLQVQLIGMEACSGAHFLGRALREQGHEVRLMPAQYVKPYVQTNKSDYLDAEAIAEAVQRPRMRFVPIKTEEQLDLQALHRVRERWVMRRTAVVNQIRSLLLERGLTLPKGRSHLDEQLPRILEDAKLNLSDSFRVLLGQLKLELEQLAARIEEMDRVIQKTAKENEDCQRLTEIPGVGPVTATALIAAVGNASAFGKGRKLSAWMGIVPGEYSTGGKQKLLGISKRGNKYLRRLFVQGARSVLQQRHKQAPGLSEWLAQLLARTHQNVVVVALANKLVRMAWAVLCKNERYRAPVSAITT

SEQ ID NO: 387139 - protein, 347 aa, unidentified
MKHYAGIDVSLNSSNVCVVDESGKVVREVKVPSEPVALIRCIKSLGVRVERIGLEAGPLSQWLYGALRESGLPVELLETRHVKAALSAMPVKTDRNDARGLAQLMRLGWFRPVHCKSMAAQEVRALLTARKLVQSKLYDIEMSLRGILRGFGLKVGPTTSRSFAARINHLTADHPSLEMVAEALLSTHAAALCAFKNLEKNVRQISRADARVRLLMSTPGVGPVVALTYVSAIDDPKRFTSSKPVGAHFGLTPKKYQSGETDINGRISKVGDSSVRAVLYEAAHIILTRPIHGGALKSWAMRLAKRAGMKKAKVALARKLAVVLHRMWVSASTFDFEKANSSTRAAA

SEQ ID NO: 387140 - protein, 418 aa, unidentified
MLFAGIDWSDQALDYHLRTADGRVLADGQVAVSPEGLAELFVSLETQAPPDQIGIAIETAQGAWMQSLLDRGYRIYPVNPKAVERFREAMSANGDKSDRIDRRVLAMFLAVFHERLRPLKPDDPEIVCLRIACQDRLRLVEERTAKLTELGAILKVHYPAFGPLFGDLSSRIALEFLQQFPTQKQMRKLTERRLRSWLRRHQYSCPQRIDRMLAVLNQPALPVADHLQTVKARLIQYLASSLIALKAEIAEREEQITREFEQLPEAGWIGSLPGAGPNLRPALLACLGRDRDRFAASSDAQAFMGTAPVTKASGRSRSVKFRRGCWKFARRTLQLFANMSRPRCGWAQAFYDKQRASGHTHHQALRGLAHKWLKILLAMQRNGTPYNEAVFLNSRRAYLLETPEIRTPAKAFFAAGLT

SEQ ID NO: 387141 - protein, 322 aa, unidentified
MGSVTTIGLDLAKNVFQVHGVDAEGVAVIRQRLTRGRMLKFFAKLPRCLVGIEACATSHYWARELVALGHDVKLMPAQYVKPYVKRGKNDAADAEAICEAVTRPTMRFVGIKSPEQQSAMMLHRVRLILNRQRTQLSNAMRAHLVEFGIAAPIGRNGIEQLLDVIADPADERVPADARFCLEMLAAQLRIVKEQILENDRRILASARETELGRRLMEIPGVGPLLASAIVATVPDPAIFRSGRNLAAWIGLVPRQNSSGGKDRLGGITKAGHQYLRQMLIVGAMAVVRYAERNGAKRPWLVQLLARRKTKVAAVALANKNAV

SEQ ID NO: 387142 - protein, 360 aa, unidentified
MVQRTSVGLDVHARSVVAAAIDGQSGEVQRRTMSPDHGELLAWVSSLPGGVKVVYEAGPTGFGLARFLLTAGVECVVVAPSKLQRPAGDRVKTDAKDALHLARLLHLGEVTAVTVPSVEQEAARDLVRAREDVRGDLMSARHRLSKLLLRQGIVYYDGKAWTGVHDRWLRQQHFEQAGLQIAYDSAYETMLMALARRDRLDAAITTMAADSPFTPVVHRLGCLRGVSTLTAFGLAVEIGDWQRLSGRSIGAYLGMVPTEHSSGQSRSQGGITKTGNGHARRLLIEAAWHHRPPYRAPGIDLRRRWQHAPAAAAARGHAGNRRLHGRWQNFIDRKKTPVIANAAIARELAGWCWSLAILDD

SEQ ID NO: 387143 - protein, 316 aa, unidentified
MNKKTQVEINVGIDTSQSQLDIYVRPTGDYFSVENTPEGAKKAASKIREYQPTRVLIEATGRLELNFVCAAHNAGLPVVVCNAGQVRQFARSTGRLAKTDKLDAQDIAHFGEALQPPLTLLKPEKLRQISDLITVRRQCLDLSTMQKNRLLRMPKSVQPPIQRILKTIQKEIERIDQKLDKLVDAIPQWREQRDLLMSAKGVGKVVAYTLMSELPELGKLNRKEIAALVGVAPMNRDSGSYRGKRRVTGGRSKVRTVLYMSMWSTIQYDPKIKATYERLLAAGKPKKVALVACMRKQLTILNTMMKNGTHWNEKLA

SEQ ID NO: 387144 - protein, 404 aa, unidentified
MKGPIVSIDVSKGKSDYQAFKNLNVKYTGSRSIKHTKEGFDEIVNLVREMEKKLETEVCVVYEATGVYHRVLKKVLEDNNIKQFIINPLLSAKTRKNDSLRCPKTDKLDPKSIAKTYYSHSLHNSHKQETIYHELRELSRYYEDILVHIRKDKVAFRAQLDIVFPGYDTLFDDLYGPVALAVIEKYPHPEMLQKKKINTVSKVIQSKTCHRQAVSDTMADKAIEYSKTIYSGCDKDDIEVLILQRFIKKLNEDMAEAERTIGEMIKLAQELPDFSIIKSIPGIGDNLAARIIAELGDMTRFKKKNELVAFAGLDPRISESGKNDGDHMHITKKGNKRLRCLLYLAVTCSIRLKRDDNSIKDFYIKKKQQSNPMCSKAAKTACASKLVRIIYSMCKTGELYQYNK

SEQ ID NO: 387145 - protein, 409 aa, unidentified
MISVGIDVSKGESTVCIMKPGGEVLKTPFKMLHSIEDIVHLSNLIKSYDEETRVVLEDTGHYHLPVVSLLVEKGIFVSTVNALRMKKYCSQDIRRAKTDRIDSIHIASYGLTYWNRLTPFLPPIDVYRELKLLARQYYQTVSILVKAKVNLSNLLDQVMPGIQSLMSDSTSNHKLTDFVDRYWHYGHILDMGEKRFTTDYCKWAKKKGYRVYERLAKEILAVAQNGIPVLPNSLSTKLVVQEAVRVIHQVELSRDTILAQMQELAKSLPEYSVVREMSCVGDVLAPRIIAEIGDVKRFHSKHSLIAYAGIDIPPYQSGSFTATERHITKRGNSYLRKTGYEIMQCLIQHKPVGDPVYDFIQKKRSEGKCGKEAMIAGLNKFLRIYYGRVTELYTNISDELVFCSRVDFT

SEQ ID NO: 387146 - protein, 340 aa, unidentified
MTPIRIGLDIAKNVFQVHGVDDKGTVVIRKRLRRPDMLRFFASLPSCLIGIEACSASHHWARELIRLGHEVRLMPARYVKPYVQRGKSDALDAEAICEAVGRPTMRFATIKTAEQQAVLTLHRARELLVKQQTMLANLIRGCLGEFGIVAPLGIRRVSELIAVINDDADTRILPEARIAMRAVAGQLCDLQTRIKQIEQAIRAWHRSNEASRRLATIPGVGSITASAIVATVANATEFKSARHFAAFLGLTPKQYSTGGRQRLGRISKQGDVYIRRLLILGGTSLVRYARGAGGSIWAKQLLARRPTRIVTVALANKAARIIWALLTRGEVYRAPQPQTA

SEQ ID NO: 387147 - protein, 393 aa, unidentified
MRFAGIDIASETHVAAVVDETGEVSVKATPFAEDAAGYAKLLGLLGRPGEVLVAMEATGHYWKNLFAALAAHGYAVALINPLRTHRFAAEDLERTKTDAIDALGIARFAAQKRPAATRLPDCATEELRELVRLRDRLVQDFGDRLRQLHRLVDLGFPEFTRYVKSLDSELASSILHDYPTAQAFRGVSAKRLAHLRYDGRHKVGPELAGELIEAAQRSVGSHHSEPYRIQVRYTCEDLDTLRRRLRGLDRDIDGKLAEHEVGSLLTSIDGIGSQTAARLIATLGNPADFRNAAALASYVGVIPGIKQSGKNKNIRAALTPIGNARLRAALWMPTLAAVRRNPWLRAHYEALRARGKLPKVALVACMHKLLIAVYAVARDRRPFISKPSSAAPT

SEQ ID NO: 387148 - protein, 356 aa, unidentified
MTISTKYIGLDVHKESISIAVRNSVGKVLMDCVIETKASTILQFIDGLRGDLHVTFEEGTSAAWLYDLLKPHVTKLVVCDPRKNKSMREGNQNDKIDARRLAELLRLNHLNPVYHGEHGLRTLKELVRSYLTVTKDLARVMTRVKAIYRSWAIPCSGKQVYARCHRAEWLGKITEPGVHRRAEFYYQQLDALRVLRQEARRDLLAESKKHKAWKRLCQIPAIGPIRAAVLLGILQTPHRFRTKRQLWNYGGLAIEMHSSADHRSVDGELQRSRKNVLVRGLNRNCNHDLKNLFKGAAAVASSKPGPFEKFYAALVAKGIRPEMARLTLARKIATIVLIVWKKGVSFDANHLKPQTV

SEQ ID NO: 387149 - protein, 412 aa, unidentified
MEVLYPRCAGLDVHKETVVACVRLAGGNEASHVVRTFATTTAGLIELGEWLEENGCTHVGMEATGVYWKPVWQVLADSGFELILANAAHVKNVPGRKTDVNDATWLSELLAHGLVRASFVPEPAIQDLRGLLRTRKQLVREKASHVQRVQKTLEEANIKIESALSDVMGRSGRAIIGALIDGETDPAKLAALVHWKVRASAETLREALRGRIKSHHRFLLRLHMQQIAALEAAIAEIDRELDAGLACFRDAVERLSTIPGISQLSAQVIVSEISTDMSRFATDAHLRSWAGLCPRNHESAGKRRSTRLRKGAPWLKAALVQCAWAATRSKGTYLHAQYVRLRARRGPKKAICAVAASILTAAYHMLKDGTFYSDLGSSYFDRRRPEMQARRLLKRLTELGFSVELQPLATAP

SEQ ID NO: 387150 - protein, 349 aa, unidentified
MKILALDLGKFNSVACLFDTETNQTEYETISTQVFAIEQLLQTMQPNKVVIETCTMSGWVYDLCQGHGFEVVVANPSSEAWQWRNVKRKTDKDDALKLAKLQALEQIVPVYMPAAEMRQYRRLVKYRKVLVGRVNQVKNSIRSLLDAQGKCLSSRAKAWTVAGMAVLEEYRKPLSECGMHELWRGELDIELTLLDNLWEQQDVLEKQLEAMAKQDERVQLLMTIPGVGRRTAEVIVTILDDPERFQNGRQVSAYAGLIPEQRQSGQTNRLGAITKRGSRLLRGALVEIAWMLLRFNPWALAVYNRIYGGVKPRKKTAIVAVARKLLVCCWAMLKHKQPWNPPEIQAAAG

SEQ ID NO: 387151 - protein, 349 aa, unidentified
MQMKSQIRSIGIDLGKTTFHLVALGTRSQIVVRKKFSRSQLLIYTANLPASSIGMEAGVGSHFLGRALREQGHEVRLIPAQFVRPFVKPNKNDYRDAEAIAEAVERENMRFVPIKTEDQLDLQALHRVRDRLVARRTSVINQIRAFLLERGISFRKGPASLRRQMPEILENADEKLSPGMRRLLDFLWQEWKGLQAQIETLNMELEQIASSDASCVRLQQIPGVGPLVSTAVVSAIGNGAAFKRGREFAAWLGLVPRQWSTGGKTKLLGISKRGNPYLRKMFIHGARAAVLRVKRESSTLGKWMSGLETRAARNVVIVATANKLARISWAVLASGNDYHPMHKAAVFSN

SEQ ID NO: 387152 - protein, 388 aa, unidentified
MEPTSIHPTAVRTDLGAIFVSLELSRSTWLVTSLSPGSGEKMSKHVVDGGNVAELLDRFEQLQQKARLRTGKSFPIVTIQEAGLDGFWIHRVLEANGVESYVVDAASIATSRRRRRPKTDKIDGEALTRTLLAFKRGEPRVCAMVRAPDPEDEDRRRICRERKVLIAERVRHVNRVKGLLFAQGISGYQPLRKDRRKRLEELQTGDGREIPRHLKAQVNRELDRLELLLEQIATVESERNSLLSTHEQPAVEAITPAAMLLSLKGVGAEFAAVLWTEALSRHFDNRRQIAAYAGLTPTPWMSGTIDHEQGVSKAGNPRLRTTMIQLSWLWLRNQPASALSRWFVDRVQSNGGRLKKAAIVALARKLLIALWKFVTAGVVIEGAVMKTA

SEQ ID NO: 387153 - protein, 393 aa, unidentified
MICVGIDVAKDKHDCVILNSEGKILAGVFTIPNNADGFDTLLQKIRSCTSSDDKIKVGLEATGHYSYNILGFLINQGLPTYVINPLHTNLYRKSMSLRKTKTDRVDAKTIATMLMSNVDLKSYTNTAYHNEELKSLTRYRFDKVRERAQLKQSVSRLVTILFPELEKLVPTLHMSSIYALLIEFPGAKQITEAHLTHLKSLLKDASKGRYGRDMATEIRDAAKHSIGSVMPAKSLELRHTIRLIRELDSEIEDIEAAIEAIMEELQSPITTIPGMGFRMGAMILAEIGDFARFDSPDKILAYAGMSPSTYQSGQLSLAGTYSHMEKRGSRYLRYALYNATKYVCHWDPGFAAYLAKKRAEGKHYNVALSHAAKKLVRLIYAMEKSRQPYKRAA

SEQ ID NO: 387154 - protein, 315 aa, unidentified
MADTIAQSVGVDISKDTLDVHLHPAGTARRFLNTRTGRSGLIAWLAKFTIVRIVFEPTGPYHHAFERHLAEAGLPLAKVNPRQARRFAEAIGRHAKTDRIDAAMLARLAALLEPPIRPAPSQTLDDMAELIVARRARVKDRVAALQRDSVHRSTLLKRQAVQRLAQIERQIAAIDTALRERLAGDLTLRARFDILASIPGIGETTALIMLVEMPELGTLDHRCAASLAGLAPIARDSGQHRGKRFIRGGRSHLRQALYMPALAAVRFNADLKAKYKALRHAGKPPKVALTAIMRKLIILANALMRDGRTWSLKPG

SEQ ID NO: 387155 - protein, 373 aa, unidentified
MPKYSTAFGMDVHLRSTTVCALDADTGEAVTRRFPGNPWGEIAGWMDGFPGPSLAAYESGYLGFAPQRELAGLGVECVVAAVSKIPRSAADSASKNDRNDAARMAKAILAHDISPVWVPSPEVEGIRDLAGAYDGATARLATAKQRLLAFLAKRGFVYGGTTPAGNPRKYWTYDFLRWLDKVRPEDDGGVRTLAALRNEVEAAAEARADLLSEYRAAVDASPIAAEAAALQSIKGCAFALAAAFSAEVGDFTRFRSGRQVTAYFGLAPSQRSSGDSVRLGGISGAGNALVRKLAVEGSWCYAAARHQPKLMPRDTGVPLEIRVHGRKGSERLLRRREEMLARGMPAAKANAATAAELVRWLWALGMMCREGAE

SEQ ID NO: 387156 - protein, 398 aa, unidentified
MGGEIMDNKLHLIVGIDIGKNFHQATVINDSGQILGGSVRFPNTTAGAELLMGKIASVNPKGLPLLFGLEATGHYWLPLYAYLTEKGYQIVVLNPYQSDAFRKVSMSSTKTDKEDALLIAELLRFGAFPQTKMADEDMIALRNLTRFRLSLNQQVTDSKRRILTILDKIFPEFESMFSDILGKTGRALLKRYPTPEEMEAVSLRKLTSLITKLSKGHFKEEKAQEVKMKAKTSFGITLALESLTMQLKILLETLEFTEKQLKVVDTEVENLLPATCVLLTLPGISKVLSAAIISEIGDIKRFKTSAQLVSFAGINPTVRQSGNFLGSRNHMSKKGSPYLRLALWQASITSSRFNPILKEYYQLKIKEGKSHMTVIGAVARRLTGIIFAMLRDQTAFTV

SEQ ID NO: 387157 - protein, 342 aa, unidentified
MDHFAGLDVSVKATSVCIVDDTGKVVREVKVASEPEALLAVLKNPAYHFKQIGLEAGPLSQWLYSALAEAELPVVCVETRHMQAVLKAQINKTDRNDARGMAQMMRVGLYRPVHVKTLRSQKLRMLLTHRQLLQSKAIAIENDLRGTLRNFGLKVGMVGKVKFEARIKELVENQPDLAELVEPLLIVRRALREQIVILHRRLLAIVRDDEVCRRLMTTPGVGPVVALTYRATVDVPARFRKSKAVGAVFGLTCSKYQSGEIDRSGRISRCGDEMMRVMLYEAAQSMLYSKKWSWLKAWAMQIARRRGMKKAIVALARRLAVIMHRIWVDGTEFRWTRGVATT

SEQ ID NO: 387158 - protein, 343 aa, unidentified
MNKIITIGLDLAKNVFQLHGVDASGAVVLRRQLRRSALEKFFAQLPSCTVGMEACGSAHHWARVIGSYGHQVRLMPPAYVKPYVKRNKNDGRDAEGICEAVSRPTMRFVPVKTVEQQATLAVHGVRAMLVRQRTMVANALRAALSELGIVAAQGREGLRELMARLEAPSEDIPEMMRCALLVLAGQWQTLDAEERVLEQQISKAARCDREARRLMEVPGVGPIIASTILAKVPDAKVFRSGRDFAAWIGLTGRDHGTGGKHRPGHISKQGDRVLRALLISGASAHLRQQKTRGITDPWLRELLARRPYKVAMVAFAAKTARILWAMLVKGEHYRDRASASAAA

SEQ ID NO: 387159 - protein, 405 aa, unidentified
MEILFERCCGLDVHKKSVTACAITPEGKEIRTFGTMTEEVFALVAWVKEKGCTHVAMESTGVYWKPIYNLLEIEDIEILVVNAQHIKMVPGRKTDVKDAEWIADLLRHGLLKGSYIPDRGQRELRELVRYRKSLINERTREVNRLQKVLEGCNIKLSSVASDITGVSAKAMLKAIIDDAADPVVIAKLAKGKMKNKQKELEKALAGLVGEHQKMILTTQLKHIEFIDEQITELDQEIKERMRPFEEELALLETIPGVGRKTAENIAAEIGIDMSRFPKDANLASWAGMSPGNNESAGKRKSGKTTKGNKSLRSTLVIAARAAAKSKDTYLYAQYRRIASRRGGNRAAVAVGHTILIIAYHILKNREPYKELGADYFDRRKKDMVVSNAIKRLKDLGYKVTVEAAA

SEQ ID NO: 387160 - protein, 420 aa, unidentified
MNHPKMQYTYVGIDSHKDSHCAVFIDCFFEKLGEISFDNRPSSFDSFLQQAQAYLMPGTSFMFGLEDCSSYGRGLMIFLKQSGHPVKHVNALLVAQERKSFQSTTQKDDSIDAECAARVLLSKFSSLPDASHDDKYWVLRSLVARRSLLVRHRAATKHYLHSLLTQQYPNYRSFFENIDCKTSLAFFERYPSPGTLQGVTIEELAAFLEVPSKRSVGMAKARQILNSLHDTGTGTTTHQATHQDVRDSVVRSAIRQVQFSIDEANTLEASIGAFLKEFDCTLTSMTGIDTVTAAQILSCIGDIKKFSTPAKLARYAGIAPVTYASGKKDLRFANQRGNRELNSIFFWLAVRVSSPAGSKHRIMNSFFHDYLNRKMSEGKTKRQAIKCVERRLVNIIWTMLTNNEEYVNPPSYELRGASDA

SEQ ID NO: 387161 - protein, 420 aa, unidentified
MTKAKDNTVLSVIHPICCGLDVHKEVVVATLLTSDVNGNERSKTRAFGTFTDDLETLRDWLLKHKCPVVAMESTGIYWRCIHNVLEGHVDVILVNARHIKNLPGRKTDIEDSKWLAGLLRHGLVRGSFIPPKEVRQWRELSRLRRKNRDTLSDYKRRVHKLFESANIKIGSVVSDLFGVTGRNLIAILMIEGKEITIDDIRECARGSLQKKDEELHRSIRGFFEEHHRFLLINLMRTITVLEDENEAIDFRMRELMYEHRELIDRMDEVPGINELSAQYILSELGTKLDEFPNASSLASWAGLCPGNNESAGKRYSGRSPVRKHHLKTIMIEVAWAAVKKKGTYYHDKYWRLRYRLGPKKAIIAIAHRIIKALYFIIKKGERYKELGDQYLLQKTKTNKLWRLKQEAKKLGFELVAIQEG

SEQ ID NO: 387162 - protein, 351 aa, unidentified
MTEYISFDSHKHYTLMERELIQTQVARQRRIEHAPGAIRSALAGCTAGTPVAVEATGNWYWIIAEIEQAGLRPLLVHPRKAKLMMGLINKTDKLDVHGLNRLQRNGTLPTVWIPPADLRDVRELTRTRLVITRQRTRLKNRLSATLAKHGRQLTGFSDPYSAKARRELTARLAQLPPHTRWVSELLLAQLEFVEQQITALEKRLGELVTVTSAMELLMSLPGIGVILAATIALEIGDIERFASAERLASYAGTTPRVHSSGDKTRYGPLRTDVSQYLKWAFVEAGNSVAVNHVRCPQRHVSQLYGRLKQRKNHYKAVGAVARHLAEAVWHVLARKETYRDPVLSQGRSNAA

SEQ ID NO: 387163 - protein, 376 aa, unidentified
MNKVRFVGLDVHADTIAVAVAEPDGEVRALGTIPNRPDSIRRLVKRLGPPDRLRMCYEAGPTGYVLYWQLTGLGVPCDVIAPTLVPTKAGDRVKTDRRDAMKLARSYRAGDLTPVWVPDATHEALRDLVRAREAAKKDQLRARHRLGKFLLRTGRRPPLTMKAWTQQHLRWVKTVQYDQAAQEATLQDYLQEIEHVADRIARLEQAIDEAVKSVPERMRAVIAALQALRGVAQVSAVTMVAELGELSRFASARQLMSYTGIVSSEDSSGTRTRRGAITKTGNAHLRRIVVEAAWAYRHRPGLGAAFHKRQATVSPEIKEIAWKAQHRLHTRYRWLMAKGKHKQQVVTAIGRELLGFIWAIAVKVEAQRSDGQATAA

SEQ ID NO: 387164 - protein, 429 aa, unidentified
MKKSFRSRPVLAKGRAVVGIDVGKRKHAATALTPQGEVIAQLTSFPNTRQGVDQLEKEILRKAGGPNKVLVGMEATGHYWMCLYHELTRRGYACVVVNPLQTNARSSARIRKTRTDKIDSDTVARLILSGEAKATRVPNPKTTELRLLVRHHRRLIHAAGDMERYAHTLVDRVFPEYADVFCKVFLSSSQKLIREIGLAPGKLVERADEVRELLRRAGRGRIAPETIDQLLEAAKQSIGTRQAEDLAESQLRSIFDYLETLRQQIADIEKQLDERVELLDSPLFSLGLNSPLVAAIHAETDPIGDFTRPEQYVAYAGLDPSLHDSGDTIQRRGKISKRGSPLLRHALYLAAFVVYRRHDYFRRIYHKHRNRGKTHRNALVIVARRLARVIWRLLTDGRPFTARPPKTACSSLKPRKSTTSTRKAVRARV

SEQ ID NO: 387165 - protein, 338 aa, unidentified
MKLYGAIDLHSNNNVTVVIDEQDQIVYQKRLPNELPMIVQQLSVYQSSLQGIVVESTYNWYWLVDGLMERGHKVHLANTAAIQQYEGLKYTDDNSDARWLAHILRLGVLPQGYIYPKEERAVRDLLRKRSQLVHHRTAHLLSIQNLVTRNTGSSISANRIKALDDPQVDELLPNEDLALAVKANLAVMCTADKQTQILERTVTERVKLRPQFSFLKTVPGIGQILALTIMLETGDIGRFPSVGNYASYCRCVGSQKISNGKRKGSGNTKNGNKYLAWAFIEAANFAVRYQPRIKSFYQKKKAKSHGVLAIKAVAHKLCRACYYIIKDRVAFDVTKAFA

SEQ ID NO: 387166 - protein, 373 aa, unidentified
MKYTTVYVGMDVHKESFTLACYTNEKEEAEYVQRTEAHYSKVISYLEAMRFHYGDDVTFICGYEAGCLGYTLYHQLTNHHVRCVIIAPTSMPVQQGKKKVKTDRRDARRIAKCLAHHEYSAVHIPTAKDEETKEYLRMRDDHKLALKKIKQQILSFCLRHGYSYTGGSQNWTKTHLKWLRELKPGGMYQEILEEYLLTYNNLVDKLERMDKRIEEMAAEEEYAEDVRKLSCFPGIKNQAALSLITETGDFKRFATAQQYASYLGLVPGENSSGEEEIKLGITKAGNRHLRMLLVEAAQHYGRGHIGHKSKELKKRQEGNVPEVIAYADKANERLHRRYYRLVLAKNKRSNVAKVAVARELACFIWGMMTGNVA

SEQ ID NO: 387167 - protein, 328 aa, unidentified
MKVMYERVAGIDVRKDMIKVAVRSPGDKPWARKTEILTFRTFYGVLRAMARELRRRGVTHVVMEASGVYTGPVCYALCEEDFTEVAVVNPAHARALKGHKTDARDRARLAELSGCGLLQGSYIPASGLKEMRDLSRYRIKTVQARTSEIQRLAKALESAGIKLGSVASEITGKGPVAMIEALISGERRGAVMADLARGRARTAGKLADLSMALEGRFTDHHALMCRLHLDRITALDAAVADLEARIAATAADWQREIGLLKTIPGSGDIVAWAWIAEIGPAPHQWFASHRKLASWVSLAPGSNVSAGKRKHARTGDAGCGVPKLDQST

SEQ ID NO: 387168 - protein, 353 aa, unidentified
MRKMQEYIAKGKQIFVGLEDSKKTWKLCIRSEGMVIHETSMPADYSNLGQYLRGRYPDCRIQVMYEAGFSGFWLHDCLTGDGIECIVTPAHTVTQEKSKKVKTDKIDARRLARNLENKDYTACYVPDKEQREDRQINRTLVQIQKDIVATKNRIRKFFDFHGLNKGFPAGSWSATVYNRLRDFQLSGPLKVSLDTYLHILEELQRAKKVLIKELRALCEKDRYAAAVRLKQSSPGIGWLTAIRLTLEWGTLSRFPSGKHFASFTGLTSREYSTGETVHKGRITGDGSVSVRGWLIQCAWRAIRYDPVLLDKYKRVCNNSGSKKKAIVAVARKMAVRLRAMEITNQPYCVGLIS

SEQ ID NO: 387169 - protein, 392 aa, unidentified
MFIVGIDIAKRFHEASVIAQDGSLVRKALRFANSQAGYNKLMNMVRGLNEPVVFGMEATGHYWLTLFTHLRNDGFTVHVINPIQSDALRGMYIRKTKNDAIDSMIIADVIRFGRYCETSVQPGDLQAMRELCRQRFYVIDMASDLKRKVLALLDQVFPEYEKLFSDTFGASSMELLSQYTTPEEMLSVSTEKLAELLETASRGRLGLAKAEEIQEAAKNSFGIVLASGSFALIIRQYIEQIRSLESSIAVFDTEIARLLAGFDTQLTTITGIGPTLAAVILSEIGGDIKRFSSPAKLAAYAGVDPTVKQSGDFTGTRMKMSKRGSPYLRRAIWLASTVAAFKDPAIHALYERKRSEGKDHMTVIGHVCRKMVSIIFAVLRDNTPYSPAGISD

SEQ ID NO: 387170 - protein, 379 aa, unidentified
MHAITLHLGLDVHKDSITIAIAQAGLKGEIRVFGTITHDLHALEKALTRIRKAHRGAPLEVAYEAGPCGFGIARRLQQLAVPCLVAAPSLIPKQPGAPFKTDQRDARSIARLLRAGELTGVYVPEPTDEAIRDLCRARTDAVDDLRRCRLRLKSFLLRHSYRYHGKANWSQPHMRYLRELVLPHPAMKAILEEYLQGIDAAHQRVQRLEASMLTLLETWRLKPAVHALMTFRGFQLVAAMITVSELGDIHRFAHPRQLMTYLGLVSVEHSSGPRQHLGAISRCGNGHARWLLVECAEHYLAPPKVSKELSRRQEGQPPEIRALSWKAQNRLHRRFTRLLARRLQRNKAKVAVARELCGFIWALLRTQDCYRQATGGAAS

SEQ ID NO: 387171 - protein, 355 aa, unidentified
MKNVTSRVRSLAIDLAKNVFQLHGTDAKGKIVMKSKINRASLLEFVANLEPCNIYLEACGTANYWGRKFKEHGHRVKLINPKYVKPYVKRNKNDANDAAGIAAAARDPDMRFCEVKSEAQQDMQSIHRIRSLLVQQRTALANQIRGLLAEYGFAIPQGIRHLSKELPKVLEQNPTNLGSLVFNCLLDLYEHFCALSKRVTYYDNKIKGLSKSNEACQRLETIPGIGPMTATILASTLGNGGGFKNGRHFAAFLGLTPKQHSSGGKERMLGISKGGDTYTRTLLIHGARNVLRWVDKKAGSRPNHINCWLKRLLERRGYNKTAVALANKTARIAWAIIKEGGSYNINYKPSFIKAA

SEQ ID NO: 387172 - protein, 343 aa, unidentified
MQSISTIGLDIAKSVFQVHGVDAAGQVVIRRQLKRRFVLSFFEKLPPCLVGIEACASSHYWSRELRALGHTVRLMPPAYVKPYVKRQKNDSTDAEAICEAVTRPNMRFVPIKTIEQQSCLMLHRVRHLFIRQQTAVINSIRAYLAEFGIVAPVGRRGVEQLLEVVADPAERRLPELARACLAALGSQLRALKAQILEFDRRIIAWHRSNATSKRLDAIPGVGPALATALVASVADAKAFRSGRDFSAWVGLVPKQNSSGGKDRLGSISKQGDRYLRSLFTAGALAVIRYAKIHGARHRPWLTALLARRPTKVAAIALANKLARMAWAMMARNERYREPAALTA

SEQ ID NO: 387173 - protein, 386 aa, unidentified
MQADANQTESSVAVRTDLAAIFVSLELSRSKWLITSLSPGAGEKMSKFVVPGGDVSALLERFEHLQRKASARSGRSFRIISIQEAGLDGFWIHRVLEDSGIESYVVDPASIAISRRRRRAKTDRIDGETLVRALLAHKRGEPRVCAMLHVPTPDEEDSRRLVRERKALINERIRHVNRIKGLLFSQGVSGYEPLNRDRRERLEALMTGEGRPLPKALKAQISRELARLELLIEQIGDVEEARDAVLAEAEHSTRGPALLLNLRGIGPEFAAVLWSEGLSRRFDNRRQVAAYAGLAPTPWQSGQISQDQGVSKSGNPRLRATLIQVAWLWVRHQPTSALAAWFKARVSQNGGHRKKSTIVALARKLLVALWKYVNAGVVIEGAVVRT

SEQ ID NO: 387174 - protein, 346 aa, unidentified
MGKSITDLSSVTRVGLDLAKHVFQVHGVDAAGDVVFNKAIKRDKLLAFFAALPQCLVGLEACGSAHHWTRELIKLGHDARMMPPAYVKAYVRRQKNDAADAAAICEAVSRPSMRFVAVRPVTNQAELMRHKAREMLVAQRTQVLNGLRGHLGEVGVIAAQGPRHARELAGLIEACDESIPLEVCAALAELVHQLHRLDETIDRLDKTIAKNAQANATSRRLMTIPGIGPITASAIVAAVPDVSGFSGPREFAAFLGLTPRQHSSGGKERLGRISKMGNRYLRKLLVVGAHAVLFHRKAHNDPLRMWAKKLIEKKPFKLVAVALANKLARVVFAILKAETSYRAVPA

SEQ ID NO: 387175 - protein, 363 aa, unidentified
MKYVGIDLHKKCMSVCVMDKERKVLHRQRLLCVEPERIAEYFRSLGEFCFAVEAMGSFEWLALLLEPLASSWVLVNPSKFRVIAESTQKTDRQDAQNLAEFLALGMLPRAYFPTERTREHRLLVRYRLRCRQKLSQIKVEIRQLASRYNADRQDLFEADQLAALQSLKQMRAADRFILKQQLVALHEAQKRTEAATKQLQKFAAQGSEAEQREREIVLSAPGVGEVVTEVVLAELSDVKRFASIKDATAYAGLVPAQRESAGKEKERGLTKKGSRILRWAMVEAAWQSIRSSARWRGVYEQLAKRRGSKKAIMAIARRLLGVLTSMLKAGTSYRWSLAELKEREERSQQRKLQRARKRQGSAA

SEQ ID NO: 387176 - protein, 462 aa, unidentified
MKGKRQARTRRSRRREQQILEKIHLNAAGIDIGGESHWVAVPGDRDEQPVREFKSFTHELVALANWLEACGIDTVAMESTGVYWIPLYEILEERGIEVLLVNARHVKGVPGRKTDILDCQWIQQLHTFGLLRGSFRPDAPITALRSLVRHRDQLVEAAASYVQRMQKAMVLMNLQLHNVISDVTGVTGIAILRDIVAGQTDPTVLARHRHPRCKASEEEIAASLTGHYRDEHLFVLRQAIELYDLYQEKILRCDEQIEARILALEATCESPDTLLPKAPRTRSRSANEPHFEIRSPLFALCGGVDLTELPGIGPYGALKLISEIGLDMSRWPTENHFASWLTVAPHNRITGGKLLSSRTQPSANRAAKILRMAAMSLGRSDHALGAFYRRMSARVEKAKAITATARKLAILVYRMLRDKMNYQEPSAANYDQQQRSRILRGLRRRAHSLGFEIVDTSTGLVM

SEQ ID NO: 387177 - protein, 403 aa, unidentified
MAEVFAGLDWASRLHAVCVIDEHGSVCRQWEVSHDADGLRELMRALRVLGVRRIAIERPSGLLVDALVDAGLEVVPIHPNAVKASRPRYRSHGGKSDASDAYLLADLLRTDGHRFKALAAQSDEIRALRALVRGRDDLVATRVQLANQLRALLESYWAGATEVFAEVDSPIALAFIQRYPTPDAASRLGPKRMAAFCAQHAYCGRRSAEELLQRLRQAPSITVGELEMDAKGELACCLARTLSKVVDQIRLLSSRIEHHIAASDDGRILMSFPRAGRICAAQILAELGSVRERFDSDEHLAAEAGVAPVTYASGKHKAVVFRWACNHRLRRALTTLADNSRHTSTWAAAIYAKARGRGCDHPHAIRILTRAWLRVIWRAWIDRKPYDPASHGGLQTMLKAVGG

SEQ ID NO: 387178 - protein, 371 aa, unidentified
MEAYYVGLDVHSRDSVFVIQDNAGAVRGRGTVPSTPAGLAQLCQEHQLPPGTTVGLETGTLAFYVARQLAALHLVPVVVDAHEVRRKASRPAQKSDRRDALELCDGVRRGYYQAVVHIPSPEISTLRTTLSRRRHFIRIQTAEVNAAKRLLRGAGWPGGTRMTLRSAKSWDRLLGGLSSEPDVQRCIRFHYAVWQQAGEQVRAVDHVLGEMARGVRDDVRRLETVPGVGPVVALTAIAAFGDVQRFASAKHAASYAGLVPSTYQSGTCDRHGHITKRGSAELRAMLCEAAHHARRPSHPLHPYFMKLCARRGYKMAIVAVAHRLCRILYALLRHGTEFQPGRLGVEEGPFTHTVTRQYRLTPKPAGRLSPA

SEQ ID NO: 387179 - protein, 367 aa, unidentified
MKKVSTAATKQSRNISQQRLTIGLDLGDRNSCYCVLDEAGRIQLEQRVRTTAKALQEVFGAMPRSRVALEIGTHSPWISRLLSKLGHEVIVANARKVRLIGENRKKDDRLDAQTLARLARIDPQLLCPVKHRSAQAQADLMMIRARASLVRVRTGLVNAARGLAKSYGERLLGGNVRNMNPEKAEGLSPELQRALEPLLSAIEEVSERICEYNDRIEALAQTSYPQVELLKQIKGVGTLIALTFLLTLEDPHRFRKSRDVGCYLGLQPGRRQSGKSDPQMHITKEGDPYLRTLLVQGAQHILGPFGIDCDLRRWGLKLAERGGRNGKKRAIVATARKLAVLLHHLWVSGEVYEPLHNSSPMTIATAA

SEQ ID NO: 387180 - protein, 369 aa, unidentified
MGDHITYVGLDVHKQGIVVAVAEDGLRGEVREYGRIANTPAALDRLARKLSREGVKLRFCYEAGPCGYGIQRHLSARGHECVVVAPSLIPKRAGDRVKTDRRDAASLARLHRAGELTAVWVPDAGHEAMRDLVRARLDAVHALRRARQQLSGFLLRQGCHYGRPAWTKLHRRWLAGLKFEHAVHHIVLEDYIAAVEAAQARRDRLTAQIEAMLADWTLAPVVAALQTMRGMALVNAATLIAELGDLSRFTNPRQLMAYLGLVPSEHSSGASVKRGGLTKAGNSAARRLLIEAAWCYRFPARVSRELLLRQEEQPKPIREIAWKAQLRLCARYRKLARTGKPANVVTAAIARELAGFIWAIARRVPPTAG

SEQ ID NO: 387181 - protein, 483 aa, unidentified
MMTVSNKSRESTSPTRRRSGSRKGRRGLCLEDRPVHNPNAAGIDVGAREIFVAVPAGRDEQPVRVFNTFTEDLEQMAKWLVGCGITTVAMESTGVYWIPLYEILERHHLELCLTDARHMKNVPGRRTDWHECQWIQYLHSVGLLRAAFRPPEQVCAVRTLMRHRGQLVEMASQHVQHMHKALTQMNLQIHHVLTDITGQTGLAIVDSILCGERDPDVLAGLRDPRVKASPDTVRKSLVGTWRMEHLFTLKQSRELYRAYQTEVAACDQQIEQLLGQFSPRVDPTERPLPPDRKKRQPRKRTRKGEPAKATPDLDLRTEAYKLFGVDVTQIPGIAVALALALFTELGRDLSKWPTSSEFASWLGLCTDNDKTGGRVVFRRARRGKHRAGQLFRLAAYSLHSASGPLGDYLRRMKTKLGPRAATTATAHKIAVIFYTIVRNQVEYDETIWAARDAARAQRLEAKLRRQAKGLGYQLIPIPEQPAA

SEQ ID NO: 387182 - protein, 341 aa, unidentified
MRYIGADLHKKSITFCVVETDGNQINVVKRQRIMCCEVERVETFLNSHTPYELTVEATIGYEWFASLAAESAQRVVLAHAGKLRIIAESTRKTDKIDAYVLAEFLARDMIPAAWRPTGRVRQHRALVRRRGKVQSRITSVKNTLRAILTRYNKDLTSLFSVAGREYANEVKSTLLGEDAWVLDDLFEELKEQTDRLKKVDGRLVEFAKSAPVKEREAREVLASMPGIGVVTVDTILAELGDWTRFRNADSVVSYAGLDPGVRESDGRRNDLKISKAGSPLLRWIMIQLAHRMKRTTARWGTIFEQISRRAGKKKATVAIARRLLLVIFAMLRDGRAYQMAA

SEQ ID NO: 387183 - protein, 405 aa, unidentified
MTVLVGVDWGDGSHAVCVINSGGEVLDRFAVNHDRQGLGDLVRRLRKRQGEIRIAIERPSGLLVDTLVDAGFTVVPIHPNVVKACRPRYRAVSAKSDPGDAYILADILRTDGHRLRSLEPQSDAIKALRGLVRGRDDLVATRVAMANQLTAVLQSFWPAAATLFNDLTCRIALAFIERYPSPEAAARLGPKRLAGFLARHPYYGHKKPQALLAHLHTAPPGCAGKAESKAKAELVCALARTLQTLVAQIATIGSRIEHMIAELPDGRIIMSFPRAGRICAAQILAELGDVRQRFQTEEQFAGEAGLAPVTYQSGKSRVVAWRWACNKRLRVAFTCFAGNSRRQSPWAADIYKRARARGCDHPHATRILARAWARVLWRAWTDRQLYDPTKHAGAVAFLSSPQPSG

SEQ ID NO: 387184 - protein, 369 aa, unidentified
MADYREAFVGIDVAKLRNAIAIAEAGREGEVRFFGEVDASDTSMRRVIQRIAAKFDRIHLCYEAGPTGYGLYRLIRSLGHECTVVAPSLIPRKPGDRVKTNRRDALSLARLLRAGELTAVWVPDEDHEAMRDLVRARAAAVETLRVHRQQVSAFMLKHGRAYPRTKNWTMRYRRWLQEQRFDYPAHQIALQEMVEAVRVSKERVERLDRVIEEFIPNWSLAPIVRALQTLRGVDLIVAVTFATEVGDVSRFESPRQLMGYLGLVPGERSTGETIRRGGITKAGNGRVRHMLVESAWTYRHPPRIGKAKLYRLEQAPPKVREIAWKAQARLTTRYRKLVARGKRTTVVCTAIARELVGFMWAVAREARST

SEQ ID NO: 387185 - protein, 348 aa, unidentified
MIIIGVDYHPSFQTIAFLVEETGEYGEQELNHSDGEAERFYREVKKRGDSVRVGMEATGHARWFEQLLAELGFELWIGDPAEIKTKRVRKQKTDREDARLMLKLLREDRFPKIWVPSPENRDLRQLLWHRHRLVQMRTRIMNQLQAVAMNEGYRWKKKLFSEKGGALLEKLSLAPWASRRRKELLELLDQLDPKIAELTAAVEQEAKKRPEVLLLRSHPGVGPITGLAYVLIIGTPDRFPCGKKVGSYTGLIPCEDSSARRQRLGHISKQGNTLLRFLLVEAAQAAARCNPDWRRYVHLMMRREKRIAKVAMARKLAVRLYWMWRNNWQYSQLVNSVRTRESSQPSMA

SEQ ID NO: 387186 - protein, 417 aa, unidentified
MEIIKNKVCGADIHKKFLVATILSRDGTQISERFGMMLDDILKFKEWVIANNCEQVAVESTGVYWVPIYTALEDKIEVIVANPYQIKHTPGRKTDKVDSEWIAELCLKGMIEPSRIFPKEDRELRTLTRARENLVNNCTQLKNRIHQTLEYSCIKISSVLSDIFGKSGRYLLDGLLEGKTIDEILIGTKSKTIRKKEQQLREAIKNSLDPAQILVIRYYLEQMEETRKKIDNLDTEIMSRIERMKEDVEIAMSIPGIAFTSASSILAEIGNYRDFANGNKLAAWCGLVPSIYESANKRITGSITKQGSKHVRRMLVQVAHAISRTKNSRLKSFFMRIKAKKGTKVAVVALARKVLCILHHLLVNREMYEESGNLKPKPLKFDRTSSPIQITEQDMIDALLKAGYIIKKMDKEVNTGS

SEQ ID NO: 387187 - protein, 412 aa, unidentified
MDTLYACCAGLDVHKATVVACVRTATAGGKVRREVRTFGTMTDDLLALADWLAGAGVTHAAMESTGVYWKPVFHLLEGRFEVLLVNAQHIKQVPGRKTDVRDCEWIAQLLQHGLLRASFVPPAPIRELRDLTRQRVQLVQERAAVANRIQKVLEDANVKLASVASDVLGESGRAMLRALIGGEADPERLADLARMRLREKIPELRRALRGRVTEHHRFLLRLHLDHLQYLEALIARVGERIETALAPFAAAAGRLATIPGVSERTAEVLVAEVGADMDQFPTSRHLASWAGMCPGNDESAGKRRSGRTTRGSRWLRTALVQAAWAASRSKGTYLSAQFKRVSARRGAKRAAIAVGHTLLVIAYHVLKRGSSYAELGADYLDRLETERLTKRLVRRLEQLGHKVTLEPAGAVA

SEQ ID NO: 387188 - protein, 419 aa, unidentified
MSFKILKNNCCGLDVHKTWIFACIGITDSRSRTEYKQARFSSFSKGLQELCDWLAKYNCTDVCMESTGKYWIPVFNILEKNNVWVTLSHPKYTKPQKGNKTDRKDARWICDLYMCGMVKPSFIPPADIRELRDLVRYRYKLTCMITGEKNRAQNCLTVSNLKLDEVFSDVFGKSSRSITEQILQHPGEIFDVTPFVDGRCKTPIEEIQAAVDGAVSTEQAVKLKQCLNHIDELEMHKAEIDREIFRLSDKYEEALILIRTVPGFDKNPMTAIQVLSEIGGDMSVFPTAKNLVSWAGCCPRNDQSNQKIKSTRISRAGSYFKPVLVQVANALIKSKKHPEFTTRYRRIKARRGHKKAIIAICRMLLTAIWHILTDLKPYTPEGFLESRPVNESKVLTTSQALNLLKQRGYIIKDDVVPVS

SEQ ID NO: 387189 - protein, 353 aa, unidentified
MKRTTKYVALDVHQATTVAAVREQSGRVIARSILPTEAGPLVEFFRGMRGSIHVAFEEGTQAQWLYDLLTPVVDRVIVCDRRGEHRGNKADQLDADKLSHRLLSGDLRAVYHGSSDRVNLQELTRTYMNLVEDSTRTMLRLKSLFRARAIRASGTRVYGTNERTSWLTRLPDRGARFRAETLYAELDVLRELRPKAKTLMVDEARRDPAWQVLQSIPFFGPVRVSLLLATMKTPWRFRTKRNLWAYAGLAVVTESSADHEFVAGRPVRRRRKPLTRGLNKNHNRVLKDVFKSTATASIGRPGPFQDLYQGMVARGMREDMARLTLARKFAALTLRLWKTGEPYDPTKLTVQAT

SEQ ID NO: 387190 - protein, 377 aa, unidentified
MTTTDAAAEARETVYVAIELSKKTWVLGIAHPDRDRPSIHRVSGGNIGELVSRLRVAARNNRRILVCYEAGYDGFWLARALAKMGIECRVLDPASIQVNRRARRVKTDRIDVLALLRALIATDRGERHVCAIVRVPSVEEEDARRSHRERQRLVRERTGHINRIKGLLFAQGIRDIKPKLRRTRIDFAALETAEGHPLPDRLRRELEREYARLSLIATQLREVEKERDTADAQDPVVEQKRQLLVALHGVGATSAAILAREVFARSFASRRQLGSYLGLTPSAYDSGSTTRCQGISKAGNSWARRILIEVAWLWQKYQPASPLSHWYIQRTAGQSSRIRRIMLIALARKLAISLWRYVETGLVPEGVAIAKAKLRPA

SEQ ID NO: 387191 - protein, 370 aa, unidentified
MLDTTTFVGLDVHARSIKAVSLDVMTGEVRAATFGYDAGAVAEWVRSVGPGARCVYESGVTGFDLQKRLSGLGVDCVVGAVSKMIKPSADRRRKNDRNDAEFLARMLSVGNVVEVWVPDDECEAARDLTRALEDARDDLSRSKQRLSKFLLRHGFVFDERTPTGRRKGNWTRAHWSWIESIGFAEGADEEVLAYYVDAVRRAAEEKARLEGLVEAEARKPRWRKRVDSLRCLKGVDTASAADLVFEAGEFSRFRNARSFAAWVGLTPSEHSSGESDRRGAITKAGNKHLRKTLVEAAWHYLTCSGRPKDLAKGQAPDPAARRHAAKGVRRLVERRGALLARGVHGNKANVATARELACWVWAVGLMAEEA

SEQ ID NO: 387192 - protein, 324 aa, unidentified
MKHYAGLDVSVEETSVCILDETGRICREVKVTSHPEDLLRILQDPIWHFERIGLEAGQLSQWLFDALADAGLPVVCIETRHAKAFLKAQVNKSDRNDARGIAQMMRVNLFRPVHVKTLTSQKRRVLLTARKLLQEKAIAIENDIRGLLLNFGLKVGVVGTAKFEERIHELIRDMPDLAEIVERLLDARRRLREHFAALHRKLLALARGDAVCRRLMTIPGVGPVVSLAFVATIDTPARFRKSKAVGPVLGLTPVRSQSGNTDRVGRISLCGDGMMRTLLFEAAQTMLRQTTRWSWLKAWAMRVAQRRGSRKAVVALARRLAVTC

SEQ ID NO: 387193 - protein, 366 aa, unidentified
MKKVSTAALKQSRNFSQPQLTIGLDLGDRSSCYCVLDETGRIVMEQKVATTPKALQAALGAMPRSRIARETGMHSPWVSRLLAELGHEGIVAHARNVRLIGESRKKDDRLDAQTLARLARIDPGLVSPVKHRSAQAQADLTVIRARAGLVRARTARVNTARGLAKSYGERLRGCNVRHRNPEKAEGLSPELRSALEPLLAGIESLSERIHECTERIENLAREKYPQAARLQQIKGVGTLIALTYMLTLQDPHRFRKSRDVGGYLGLQPGRRNSGQSEPQMHISKAGDPYLRTLLVQGAQHILGPFGVDCDLRRWGLKLAERGGKSGKKRAIIAVARKLAVLLHRLWVSGEAYEPLHNGRTPMPVAA

SEQ ID NO: 387194 - protein, 389 aa, unidentified
MLLDHPSDGLTAIRTHIAAIFVSLELSRSTWLVTSLSPGKGEKMSGHSVAAGNVAELVTLFADLRRKAETRTGQTFPIVTVQEAGLDGFWLHRVLQQQGVESHVVDPASIAVPRRRRRAKTDKIDGETLLRTLLAYKRGEPRVCAMVVAPSPEEEDRRRLCRERRTLIEERVRHGNRIKGLLFAQGISDYAPLRRDRRARLEALRTGDGRELPSHLKAQIGREFDRIELLLEQIKSVEAAQQALLAAARKPASEKAAPDPVTMLLALKGMGANFTTVLWSEAFYRSFSNRRQVAAYAGLAATPWQSGGIRHEQGVSKAGNPRLRTTMIQIAWLWIRHQPQSALTRWFKERSHQGRKRAIVALARKLLVALWKYVTQGVLIEGAVMKQAA

SEQ ID NO: 387195 - protein, 407 aa, unidentified
MKTLHRRCAGLDVHSDTVVACARLTARTKASHEARRFSTATHDLLELADWLAGQGVTHVAMEATGIYWKPIWHMLEGRFELVLANAAHIRNVPGRKSDVNDAVWISDLLAHGLIRASYVPPAPIQELRDLTRTRTQLTRELAQHVQRIQKTLEDANIKLVSEISDIVGMSGRRILKAMIAGETNAARLSNLGSARLKCSRSDLAAALDGRVTAHHRFLIDHHLGLIEELERRIAAFGARIEAVLAPFRDTVERLITIPGVGRGAAEVILAEIGPDMSPFPTAGHLLSWAGVVPRLDESAGKRRSTRVRHGAPWLKPVLVQCAWGAARAKRTYLQAQFFRLKARRGPKKAALAVAASILTAVYHMLKDGTFYQDLGADYLVKRDAAKIVAKLARRIKDLGFDVQYRAA

SEQ ID NO: 387196 - protein, 340 aa, unidentified
MNHYVGIDVSLEASSVCVVDVSGKIVCESKIATEPETLIAWLSRLQLELTRIGLEAGPLSQWLHAAMRQSGLAVELLETRHVRTALKTMPVKSDRNDARGIAQLMRLGWFRPVHCKSMAAQETRALLTARKLMQAKLHDIEMSLRGILRGFGLKVGPIAPARFEGRIRELVAGHPSLEAIAAGLLAARAALRREFDRFEKGVRAMARRDTRTRLLMSVPGVGAIVSLTFTSAIDDPTRFNSSKQVGAYFGLTPTKYQSGETDIDGRITKIGDAWVRAALYEAANIILTKPLKGCTALKSWAMKLARRSGMKKAKVALARKLAVIMHRMLVDGTSFRNAAA

SEQ ID NO: 387197 - protein, 391 aa, unidentified
MKKFNAQENQASALRSTALMDEAQRYGLYVGLDVHKETIAVAVALPGRGVPRYWGEIKHTPKSVSELVARLSEAHGGELMQWCYEAGPCGYGVYRQLLSLGQDCEVVAAPKSERIKTDRRDACKLARKLRAGELTRVWVPDEEQEAMRELSRCRLDFKTQERKARQQLNAFVLRHGHHWPRGKTRWTRAHLNWLESLTFAHAWQQVVLQEYLEAVRAATHRVDELTGELMGALTQWSLAPVVDSLCALRGVDKLVAITVLAELGDLTRFASPKQLMSYLGLVPSEHSTGTRRRQGAITCMGNAHARRMLVESAWSYRFPARQTMHLKRKAQHASHEAKAIAWQAQRRLCGRYRALLHAGKCTKVTCVAIARELVGFIWAVVCVEMPRLRHQ

SEQ ID NO: 387198 - protein, 309 aa, unidentified
MTANQKFSRFIGIDVSKAKLDIYDDATGEFLTVENTAKAIEKYVSALSPDPELLIVVDLTGGYEALCVNTFYNRGFTVHRAEGRRVKAFMRSYGEHAKTDRIDAYALALFGRKLHETLRMYTPLPLNLKPVTERISDLKTMLLQEKNRSTAPSLPPDMKKEIVRHIAYLEKEIERLYQKCLDIIKNDPPLAEAFNKIIAIKGIAEKSAVLLLTTLPELGCANRRQIAAIAGVAPYAKDSGTLSGYRRIRHGRTTAKSALFIVTLVAIRHNAQIKEFYERLLKKGKSKMTAIIACARKLLIIVNATLKTC

SEQ ID NO: 387199 - protein, 358 aa, unidentified
MRQQSNEISFKGQNIYVGIDVHLKSWSVTILSETSVLKKMSQGADPNALHRFLTSHYPEAEYYSVYEAGFCGFWIHDRLTELGIHNIVVNPADVPTMSSEKLRKTDAVDSRKLAVSLRAKQLKGIYTPDSEALEIRSLIRLKNSITKDMTRQKNRIKSQLRYLGIEIPTEYLEPHSNWSKRFLNWLKEVEMRTPSGRQTLDILIMQFEALRKQKAEMTRRLRALSHTERFDEMLRLLMTVPGIGQTTGLALMAEIVDITRFDNAEQLAAYVGMIPMCHSSGEHEGVGDITLRKHAILRSNVIEAAWVAIRKDEAMQLCYLNNCKRMVPSKAIVKVARKLVNRIYFVLKRHQPYVNAVA

SEQ ID NO: 387200 - protein, 403 aa, unidentified
MNSVGIDISKGRSTVAVMRPFGEVVISPFEVRHTDSELSELARQLKSLDGETRVVMEATGNYHTPVAKLLHDAGLYVSVVNAKLVHGYGNNDLRRVKTDKKDSVKLANYGLDRWLALTRYVPEEDTRLLLKHCYRQYRQYSKVQTVLKNNLISLLDTVFPNVNRLFSSPAREDGSEKWVDFVAEFWHCRCVSEKSEKAFANKYQRWCRKYGYNFNEAKAHTIHAEASGHIGVMPMSETTKLLVEQAVAQLRATSTALAALKHEMQALTSMLPEYPVVMDMFGVGPTLGPQLIAEIGDVRRFYSKKALVAYAGLDAPPNDSGDVTGRHKSMSKIGASSLRRTLFLVMSVYLQTAPLDEPVYQFMDRKRAEGKPYRVYMMASANKFLRIYYATVKAYLESLEHTA

SEQ ID NO: 387201 - protein, 354 aa, unidentified
MPQHSVTLGIDVGDRHSHLCLLDTETGEVIEESRIATTPQAFERRFVGVEPMRVALEAGTHSPWISRVLGGCGHEVLVANARKLGLIYAEGRKNDRLDAENLARLARLDARLLSPIEHRGEASQAHLAIVRSREALVGARTKLVNHVRGTVKSFGARLPKCSAEGFHRKVREHVPEALAVALDPVLETIASLTERIRGYDRRLEALSRELYPETALLRQVGGVGPITALTFVLVLEDAARFGRSRSVGAYLGLAPGQRQSGESDPQERISKRGDELLRKLLVQGAHYVLGPFAQDSDLRRHGLKIAERGGKNAKRRAAVAVARKLSVLLHRLWVTGEAYEPLYNARSTLGADPA

SEQ ID NO: 387202 - protein, 373 aa, unidentified
MKKVRFLGLDVHAETIAVAMAEPDGEVRSLGIIPNREESIRKLVKKLGPAEQLQACYEAGPTGYVLYWQLTALGVKCEVVAPTLVPVKAGDRVKTDRRDAMKLARSYRAGDLTAVWVPNQEHEALRDLVRAREAAKQDQLRARHRLSKFLLRHGRRAPAGIKVWTQKHEEWIKQQVHFEQPAQEYTLLDYLHEVEHMGDRIQRLEQAIAEAVKLAPRRMQEVIQSLQALRGIAQISAVTVVAELGEISRFEGARQLMGYSGAVSSEHTSGKRVQRGPITKTGNAHLRRIAIEAAWAYRHRPSIGPGLRKRQEGLSEEVKEIAWKAQHRLHKRYRSLSAAGKEKQKVITAVRRELLGFIWAIGVQAERNGKRVA

SEQ ID NO: 387203 - protein, 364 aa, unidentified
MTSAMIYTGIDYHKRYSVACTLDAQGQKLHEARIDGNAAAAFAAYFKKLGTDSEVVIEACWNWGVLYDLLEDTAGVAKVVLSHPAKNRIIADAQIKNDRIDAKALATLLRGDFVARVHVPSRDVRQRKNLVRQRLWLARVRTMIRNRIHCVIDRHPHLERPAVKDIFSHQGKAWMKRAPLPPADRTLLDDDLAVHALLQAQIDALEKTIAADNAANPLAVRLQTLPGVGKILAPVLALEIDQIDRFATADKLCAYAGLVPTTHASGGKIAHGRMLPFCNRWLKWAFIEAAWVAVGCSDYFGSFYRKQRLRGKGANAAVTIVARRMAIIAWTMLAHERDYTPQPSGAAPAPTPAQSLSPAALAKD

SEQ ID NO: 387204 - protein, 416 aa, unidentified
MENSFSYFAGIDWGAVKHRVCLMNHAGQILAERWIEHSGASLAELVAWLGQQTSDSPSSLAAAIEIPRGAIVETLLEHGFSVFSINPKQLDRFRDRYSPAGAKDDRRDAFVLADSLRTDMHCFRPVRLDDPALIRLRELSRLDDELAQEQNRAINRLREQFHRFFPQLLQLSQCADEPWLWALFELAPSPLRAARLTEAKIARLLQQHRIRRITAAEVRAVLKTKPLTLAPGAAEAAAEHALLLLPRLRLLHRQRTDLARRIGAQLEELATPAEGQEEHRDAAILLSLPGLGRKIAATMLSEAAQAIADRDYHALRCYSGTAPITHQSGKKKVVLMRRGVNERLRNALYHWARVSAVCDPASKKRYAALRACGHSHGRALRGMADRWLKVLTSMLTTRTLYDPQRRAAWCSGPSAP

SEQ ID NO: 387205 - protein, 344 aa, unidentified
MPIVGGLDIHRKQLTFDYLDTVTGEVRRGQIAPADREHLRAWLARFAGRDDVAFAVEGCTGWRYVAEELAAAGVAAHVGEPADTAAARGRKRRAKTDKTDCRHLRQLLAEGRLPKCWIPPSRILECRALLETYHDLRTEHTAWVQRIHAVFFHQGAPRLGEGFLRTEQGVAALRAASAAHLSPAGQFQVDTALEVITALEARLHMVRRQLRDAAANLAGARALAARLYGVGPVTALAMTSWLAGTDRFSSSRKAVRFTGLDITVYSSDGKRAPGRLSRQGPPALRWAVYEAGKAHARASAPDHGYYAAVRDRKNSKRAALSEARKIVRQACHILAELGHDALAA

SEQ ID NO: 387206 - protein, 400 aa, unidentified
MELSQYHTQKGDLMIYVGIDIAKLNHFASAISSDGEIMLQPFKFTNDYDGFHLLLHKLDSFDPDSLIIGLESTAHFGNNLFEFLVKHNYKVCVINPIQTSAMRKNNIRKTKTDKVDTYIIAKTLMMDPHRFFSQHDLSIMHLKELGRFRMKLIKKRTQGKIQLMSYVDQAFPELQYFFKSGIHQKSVYAVLKEAPTTKDIASMHLTHLSHLLEVSSHGHFKKDTATELRILAQKSVGCNDSSISTQITQTIELIELLDSQVHDVESEMELIVNSLASIIMTIPGIGFINGGMILGEIGDIMRFSSPSKVLAFAGLDPTVYQSGNFNASHTKMSKRGSCPLRYALINAAHNVVKNNKTFKDYYDQKISEGKSHYNALGHCAGKLVRIIYKMLTDNVSFNLD

SEQ ID NO: 387207 - protein, 346 aa, unidentified
MRAHVDAESNLDLAKYMFEVHGVDSEGNVVIRKTLRRGSVSTFFANLPPCLVGMEASNGAHYWARVLADFGHEVRLISPQFVAPYVKSNKNDRNDAEAICEAVGRPTMRFVPPKSPEQLAIQALHRIRQRLVRSRTRLVNQIRGILGEHGIVIARDIWKLRRALAEITGHETDDLNALVRVLIMEVQGELIELDRRIASCDRRIRELYRSSELCQRLGQIEGIGPVTATALVAAVGDRSCFKNGRQFAAWLGLVPKQRSSGGRNRLFGISKRGDRYLRTLMIHGARAVLGKAGGKQDPRSRWLGSLRQRRHPNVVAVALANKNARIAWAMLAGNVSYEPALSVQAA

SEQ ID NO: 387208 - protein, 326 aa, unidentified
MKKSYFVGADVSKEKINFCFLTSIESSKPKFVSLPNDTTTIKAYFQSFIKDNIFIVFEHTNNYHVPLQSALSDLQIKHSALNPAKISHFLKHLTFQKSDITDAYGLALYCRIFKADLNPSTYNHEYNLIKSYNSTILLLSKIQTQLKNFKKSQDFVTDTELSEIIHALTIQVKKTQEKIKLIAFEILKSFVPNCEQIIKSNKGFGIDLALNLFPQLHFNRAKSEKQFISFLGLSPRIYESGSSVHKSPRINKRGSSAIRRVLFLNAISCARFNDKFKQRYETLISKGKKKKVALVAVMCAIVRYLKSLFPLNESYINESLYHARAG

SEQ ID NO: 387209 - protein, 411 aa, unidentified
MTVFIGDDWAEDHHDVHLMDDDGKKLASRRLPEGLDGIRVFHELVADHIADPGDVVVGIETDRGLWVTALVAAGYQVYAINPLAASRYRDRHNVGGAKSDAGDAKMLADLVRTDRHNHRLIAGDTPEAEAIRVMARGHQNLIWTRNRQTNALRSALREYYPAALAVFADLADRDCLAVLAKAPTPAAGAGLTIGQIQAALRRGGRQRNIERRAGEIQTALRTAQLAAPAAVADAFAATTRAAVAIIAELNRQIVQLEATLTTSFEQHPDSDIYHSLPGFGVVLGARALGEFGDDPNRYANPKSRRNYAGTSPLTIASGKKKAVLARHVRNRRLYDALDQAAFCALTQSPGCRAFYGQHRAVGDLHHQALRALANRLVSILHGCLDHHSLYNEDTAWAHRRPASVNETQQAA

SEQ ID NO: 387210 - protein, 341 aa, unidentified
MEEVSIIGLDLAKNSFQLHGASADGAVVFRKKLSRSQLLKFLTAQPRCIVAMEACASAHHWGRAFGELGHDVRLIAPIYVKPFVKRQKNDAADAAAICEAAQRPTMRFVAVKSEDKQSSAMVFKARDLLVRQKTRTINALRGHLAEFGIVAPKGTAHLDRLISHVEAADTSLPKPVCAVSLMLIDLVRTLIGQIRVLDAEIRVRSRTDAVAKRLMTIPGVGPVIATALEALAPPAETFRRGRDFAAWMGLTPRQWSTGGKPRLGKISKMGQQDLRRLLIIGASAVVRWARKRGAPEGSWLQRMLLRKPTMLVVVALANKIARIAWALMAHGGIYRTPARVA

SEQ ID NO: 387211 - protein, 352 aa, unidentified
MRTSQKTHGMIATIGIDIGKNTFHLIGLDKRGAIILQQKVSRSQLERRLANVPHCLIGMEACSGAHHIGRQLIAVGHDVRLIPAQYVKPFLKGHKNDYRDAEAIAEAVQRPTMHFVTIKTPEQMDLLALHRVRSRFVSQRTGVINQIRGFLIERGITVRQGPMPLRKALPEILSADTGVLSPRMVGLIIDLVQEWRRLDERIAAVSAEIETLAEQDDGCERLMTVPGVGPIISSAVVAAIGNGTGFKQGRDFGAWLGLVPKQESTGDRTILGKISKRGNKYLRTLFVQAAHVILARRPSAAMRGLWPWIEQASKRLHRNMLAIALANKLARIAWAVLARGGTYQPRITAHAA

SEQ ID NO: 387212 - protein, 371 aa, unidentified
MEKSSTLYVGLDVHKDTIDIAVAAPGREGEVRHLGTVGGDLAAVDRALRKLIAAGHRLHVVYEAGPCGFVLYRHLSRQGIAVDIVSPSSIPKAPGERIKTDRRDALMLARLSRAGELTPIVVPDVGDEAVRDLLRARTDVVRAQRAARHQLKALLLRNDIRYAGKSAWTAAHQRWLASIKLAHPAQQITFQEYVQVVSEATERIGRFDRAIAETVSTWRWQPVVDALCALRGIALLAAATLVAEIGAIERFANPRQLMAYLGLIPSEHSSGQKRRQGAITKAGNAHARRMLIECAWLYRYPARVAPILQRRLDKVSAPVRAIAWAAQVRLCARFRKLAARKLPHNKIVVAIARELVGFIWAIARAQGPVPA

SEQ ID NO: 387213 - protein, 319 aa, unidentified
MAQNGLIVVGIDVAKDKIDACIRVLALRQPYPSSAQGHRRLVAWLRKHKVNKAVMEASGGYERDWAKVLRQAGIAVRIVDPKRVRSFARSAGRLAKNDAIDAEMIAWFAETFNEAPEQSYDAAHEEMLALVKARIALVELKTRLQSQNEHAAPGLVQKAHARILKDLAREIAGLEAAIAAKIKATPHLAERAEIIASVPGFAATSAANLVAGMPELGQVSNEVAAALLGAAPYDDDSGQRRGERHIKGGRRWIRTAIYMPCLGAVTQNNPALKAFYRRLIAKGKKPKVALIACMRKLIVICNTLIARRQKWDPSRYALS

SEQ ID NO: 387214 - protein, 412 aa, unidentified
MSTPSPPTRFVALDVHRKSLVVGAVDTGQQIVLTPRRFGFEAFSDWATTHLTLSDAVVLEATSNAWLFYEQLVPLVACVTVAHPLAVKLIAAARVKTDSRDTIKLARLLAANLVPAVWVPPVHVRELRALVSHRKRLVNQRTQVRNRLHAVLHRHNLMLPPGKPFAAHQQEWWLALDLSSSEKLRVQQDLSLVRSLEELVGAVEAELGRLSTCEPWVKLVPFLVQLPGLGVLSVMSLLAAIGDITRFPSAKKLVGYAGLGASVHDSGETHQGGHITKEGRRDLRGVMVEAAWVAVEHHPHWKAQFERLSRRIGKQKAIVAIARKLLVTVWHVLTEQQADSNAEAQAVARKLMNWIAHAGVTPGQHRDRLLLLYQHLDELGLSDELEEINYYGTTYRLSVRQKLLREVQKKSP

SEQ ID NO: 387215 - protein, 347 aa, unidentified
MRFYTKQHKHYCGIDLHTNKMYVCILNQDGEIVLHHNMRTEPGIFLRAIKPFREDLVVAAECMFAWYWLADLCEDKNIPFILGHALYMRAIHGGKSKNDKIDSHKIAALLRGGLIPMAYVYPRKMRATRDLMRRRNHLMRKRAELFAHIQNTASQYNLQEPLGRIAKPQHREGLVDRFELPSVQMSVAANLDMIETYDKVLAVLEQDIIENAKIHDPGSYALLKTIPGVGRIIALNLLYEIENIQRFPRVQDFVSYCRLVKCPKESNGKKYGTAGKKIGNAHLRWAFSEAAQLFLKGNEPARRYLQKISNKHGKGKALSILAHKLGRAVYFMLKNREGFNLNRFLTT

SEQ ID NO: 387216 - protein, 371 aa, unidentified
MKQQTKSSNITVGLDLGDRRHRFCALDERGEVVEEDSICNDRVSLRKLAGRYHGALGVMEAGAHSPWISRFLEALGWRVVVSNPRKVRAIYQHERKSDQRDALMLARIGRMDLALLYPVRHGTAEAQQDLLRIKLRDSLVRARVAVINSVRFTLKSLGYTVRNPSSERFHKVVMEEVPESVREMIMPSVQALAELTARIKMLELEINTLAQMKYPQSAQLQQIPGVGPITALYFVLKIEDPNRFAHVRDVGAYAGLCPRRDQSGESDPQLRISKRGDAYLRRLLVSAAHYILGPFGPQSALRAYGLMLAADGTARAKKRATVAVARKLAVLLLSLWKSQQPYQPFPGACLNGEQEDRRSGTIALHRMEATD

SEQ ID NO: 387217 - protein, 348 aa, unidentified
MDTIGVDLHKRETQLCIGHADGSITEQRIVTSRERFTAVLGTRSRARILVEASTESEWVACHLESLGHEVIVADPNYAPMYATRSRRVKTDRRDARTLMEACRAGTYRPAHRLSAARRHVRAQLAVRDAVVRTRTRYVAVAKALVRRDGLRVPSSAAERVGAHLAELAVSPALAAELAPLLTLLPPLNATIAAADQRLAELEHTDPTVALLMTAPGIGAVTASALVATIDDVQRFASAHQFEAYLGLVPGERSSGELRRIGPITKAGNRRARWLLVEAAWRILRSKDAAGAPLRGWARPIVARRGSRIAVVAVARRLAGILYAMWRDGAPYDAGKIRRPRSARQSPAA

SEQ ID NO: 387218 - protein, 345 aa, unidentified
MDQISRIGMDTSKHIFQLHGVNTAEEPVLRKKLRRKEMFAFLEKLAPTVIAIEACGASHHCARLLQSFGHSVKLIAPQLVKPYLKRGKNDAADAEALCEAMSRPTMRFVPVKTAEQQAALMLVGVRDRLIRNRTQLSNAIRGYAGEFGLTAAKGRAHLASLLARIQADESLPTLARELFAAQAEEYAQLQAQIDEVDARLMAWHRADECSRRLTKIPGVGPIGAVLLTMKTPEPELFRSGRQFAAWIGLTPKDHSTAGKVRLGGITRAGDQGLRSVLVVGATTVIQHAQRGGRPSPWLTELLKRKPPKLAAVALANKMARIAWKLMVTGENYAAKAASTALAGAA

SEQ ID NO: 387219 - protein, 452 aa, unidentified
MRKPKSTSAPSLTTLQPNAAGADIGAREIYVAVPPDRSPSPVRCFGTFTDQLRSLVEWLRECRITTVAMEATSVYWMPLAELLEEAKIEVCLVNPRHVKNVPGRKTDVQDCQWLQYLHTVGLLRAAFRTPLEVRPLRVLWRHRDALVRQSSWQVQHIHKALDQMNVQIHHVLADITGATGTAIVEAILAGRRDPAHLASLRDKRVKADEATLARALTGDYREEHLFCLRQASDSYKFVRQQIAAVETEVHRMQAALCPPERPPAAVPAETPKRRREGGKNLPAFPVADLLRRICGVDLGTIPGLSTATLQGLWAELGSSLAAFPTAKHFASWLSLCPNNKISGGKKLKVATRASANRVAGILRLAAQGVGHAHNELGDFHRRMRARLGGAAAITATAHKLARIFYACLRDKKAYEPSRHDLNTPLRRSKTLAKLRAKAQNLGFQLVELQTSN

SEQ ID NO: 387220 - protein, 371 aa, unidentified
MKQYSTFVGMDVHKNSIEIALADRGRNGEVRNYGKIDGTLDALDKVVRKLVSKGGPLHFVYEAGPCGYEIYRHLTAKGHDCAVVAPSRIPKKSGDRIKNDRRDACTLARLDRAGELTPVYVPLAEDEAIRDLTRAREDAKIDEKKSKQRLLSFLLRSGLRYTGKSTWSKAHMNWLADIKMAHPSQQIVLQEYIDTITECSLRVDRLTEQIRQLLPQWRMFPVVEALQALRGVSLIVAATTVAEVGDMTRFEKPTELMSYLGLVPSEHSTGEKTRRGSITKSGNGHVRRVLVEAAWAYRLPARVSRVLLTRQQDLPKKVCEISWKAQVRLCARYRKLWAKGKPKQVIVTAIARELCAFMWAIANETQVSSAK

SEQ ID NO: 387221 - protein, 352 aa, unidentified
MSKQVTTATPKLFIGMDIHKKSWRIHFTTDIVIGSGHTFPPKSDLVKNYVDRNYKEYEISIAYEVGCCGFKPAREFESYGWDTYVVNPADIPRPSKNKFMKTDKIDAKNIARQLRSGTLKKITIPPLERESLRSLTRQRTALVRDYRRIKTRIKSLLLYLQVEIPEGMDSPKWPIKFLEWLKELDLDYSNTNRTLRSMLSQYAFIDKELKYLSKEIRSYCKKHYKKDYMLLRSVPGIAGLTAGYILSEIGDIRRFKSFKKFASYVGFIPSMHQSGEGIYTGGSTPRANKHVRNILIEASWIAIRTDPVMQNYYRSHSGKNSKAVIFKVGRKLLSKIMAVIKTEREYSIGVLS

SEQ ID NO: 387222 - protein, 430 aa, unidentified
MTASARGTVQPEPEFVAFVGIDWADQKHVWCLQKANSTQREAGELQHRPEAVEAWVSELCQRFGHGPIAVAVEQVKGALVYMLRKYECLHLYPVPSTMSASMREALYPSGAKDDPRDAELLLELLVLHRDKLRRLTPDNEATRRVQNLVEERRKLVEEKTAQLNRLTGYLKVYFPQMLEWFAKLDSKLVCDFLERWPSLEELQKVPSAELKKFFRQRRGRHGELTEWRMQGICQATPAIRDRAVIEAKQMVVQVIAQLIRALLEGIATLDRKIAEAAGAHPDYFIFESLPGAGAALAPRLLAALGSQRDRYGSATEVQKYSGIAPVTERSGKKKWVHFRWACSKFLRQSFHEWAGHSIGQSVWARAYYQRQRERGKEHHAAVRALAFKWIRIVFRCWQDRVVYNETRYLTVLAKRGSNLTSALVDVAVSL

SEQ ID NO: 387223 - protein, 343 aa, unidentified
MKITRVGVDLAKNVFQVHGVNRAGSCVWKRQLKRLSWLQVLTEKLELGCEIGMEACGGAHHWARELEARGFKVKLISPQFVKPYLKSLKNDVNDAEAICEAMSRHHMRFVAIKTVEQQDIQALHRVREGLIQSRTAKGNQIRGLVVEYGLVAPKQMGPLRKAIPCWLEDAENGLQPAFRALLHGLWQDLQYVDERLKELDKEILLLSERHPDAKRLKQLRGIGPLTATAMVAQFGDGRHFRRGRQAAAAVGITPRHAGTGGKNWISGITKRGNPYLRSILIHGARSVVSKAKHKDDRLSRWVTELANRSHPNVAAVALANKTVRIAWAMLRNGADYDFEFTTA

SEQ ID NO: 387224 - protein, 328 aa, unidentified
MFLGIDIAKASMDCAILAGPGGKPLGRRSFPNSAEGVDRAVRWAARVSGAEVAETHVVVEATAAYHELAAHRLAAAGMRVSIVNPARVRSFARALGILGKTDRIDAQLLARYGQLVGPKLWSPPAKALLDLRSLIARLDDLEADSRREENRLEQARTRGCPELVQRSLLASITALEAQAGDLRRGIAAHVAADAALQADLERLMTIPAVGPKTATRMLLMLRSRSFDTARQAAAFLGLVPVERTSGTSVRGRPTLSRAGNPRLRAALCMAAVVGIRKNPDLRAQYGRLLARGKCKMAALGAAMRKLVHLCFGVLKSEGGYRPAAAIKA

SEQ ID NO: 387225 - protein, 400 aa, unidentified
MNEYDEIGVFLGLDVGKSHHHGHGLTPAGKKVFDKQLPNTEPKLRDVFEKLKTKFGAILVIVDQPASIGALPLTVARDTGCKVAYLPGLSMRRIADLYPGEAKTDARDAAVIADAARTMPHTLRSLELTDEITAELTVLVGFDQDLAAEATRTSNRIRGLLTQFHPSLERVLGPRLDHQAVTWLLERYGSPAALRKAGRRRLVEVTRPKAPRMAARLIDDVFDALDEQTVIVPGTGTLDIVIPSLARSLGAVHEQRRATEAQISALLEAHPLSKVLTSLPGVGVRTAATLLVTVGDGTGFPTAAHLASYAGLAPTTKSSGTSIHGEHAPRGGNRVLKRAMFLSAFAALHDPASRTYYDKCRARGKTHTQALLRLARQRINVLFAMLRDGTFYEPRTPRLA

SEQ ID NO: 387226 - protein, 365 aa, unidentified
MASMPNRVHASQRQPDGEVVLGVDTHRDTHVAAVVTPLGGVLATEAFPATSVGYRELLDWARSFGTLTRAGVEGTGSYGAALTRHLLARDVQVFDVNRPDRTAQRQQGKTDTVDAQAAARAVISGRATAQAKTGNGPVQIARMFKLAKDSAIKARTQAINQLKAVLVSADPALREQLTPLTNPALIRTCANLTSDPGYLGRDDVLDATVVTLQLLAERIQQLTAQIDELKRRLAGLVQSHAPQLLERVGVGPDSAITLLITAGDNPERLADEASFAALCGASPVERSSGKQQRRRLNRGGDRQANAALYRIVQSRLRWDPRTQDYLKRRTSEGKTRREVIRCLKRYVAREIFSLLPRAGLTPVLA

SEQ ID NO: 387227 - protein, 347 aa, unidentified
MSEYAGRQFVGIDLHRRRSVIVRTTDSGEVLETVRILNDADRLGSVLARAGEAPEVVLEATYGWYWAVDALRAGGANVHLAHPLGVKAFEYRRVKNDVRDATDLADLLRMGRLPEAWIAPPETRELRELVRHRAKLVGLRSHCKAEVHAVLAKCGVQVLMSDLFGIAGNDLLDRLRLPAPYAARVASLRRLIEDLDFEIDLFTHLVQGRLARDPGYVAVQQIPGIGPILAAVFVAEVGDVSRFGTAAQLACWAGLTPKHHESDTHVHRGRITKQGSRLVRWAAVESVQRLGPHSKVGALRDRVADRRGAHIGAVAAARRQVEYVFYALRDHHVRALHPSPHTPREAA

SEQ ID NO: 387228 - protein, 307 aa, unidentified
MNVCIGIDVSKHALEWSVGTEGRIQHTRNEPRPISQLVRRLAALDAERIVVESTGGYERKLVLKLAEAGLPVVVVNPRRVRRFGEGMGILAKTDAIDARLLALFGEKVEPPIRPILQGTERLLADLVARRRQLIAMVVAEKNRRDTATEPVRRTIDALLRTLDQHIRDLDRKIEKPLLEDSERAELSELLQTVPGVGPGVARTLLIDLPELGHLGRREIASLVGVAPFAKDSGTIRGSRRIRGGRAAVRTALYLAAMTASRFNPVLRDLYERLRQAGKPPKLAFVAVARKLLTILNAIAREKTAWQA

SEQ ID NO: 387229 - protein, 356 aa, unidentified
MSQTLKTSVAVIGVDIGKNSFHLVGQDRRGAIVLRQKWSRGQVEARLANLPPCLIGMEACVGAHHLSRKLQMLGHDARLMPAKYVRPYSKGQKNDFRDAEAIAEAVQRPTMKFVATKTADQLDLQALHRVRERVVGQRTSIINQIRAFLLERGIAVRQGLRFLRAELPGILATRNDVLSPRMLRIVEDLATDWRRLDERIEGLSGEIETLARQDKGCERLMTVPGIGPIISSAMVAAIGTGDAFSKGRDFGAWLGLVPKQISTGDRTILGSISRRGNRYLRSLFVQAAWVVLVKVGPKHWDRYGLKSWIEAARKRLHHNVLAIALANKLARIAWAVLNKGRAFECVRASEMTSRPA

SEQ ID NO: 387230 - protein, 392 aa, unidentified
MIYLGIDVSKDKHDCCILSQDRDLLTKPFSVPNSREGYEKLFSLVSSFENNPEKVKVGLEATGHYSFAILGYLLEKGFNCFVFNPLHTNLYRKALSLRKTKTDKVDSKTIANMLFSSVGLKPYSKALYHNEQLKSLSRYRFSKVRERAKLKQQLARLVNILFPELEKLVPTLHISSVYALLEQFPGASFVANAHLTKLTNLLTTASKGHYKKEKAIQIRVLAASSVGCFMPAKSLELKHTITLIRVLSNEIAEIESEIKKLMDESHSPITSIPGMSYRMAAMILSEIGDFSNFDSPDKILAFAGLSPSTYQSGKLDNAYSHMEKRGSRYLRYALYTATSYVCVWDKSFAVYLHKKISEGKHYYVAISHAIKKLVRLIYALQTSGQQYIPAVA

SEQ ID NO: 387231 - protein, 463 aa, unidentified
MEGKARRIRRTHKGPSLLERVNHNAAGIDCGSAEHYVAVPVDRDPEPVRHFKTFTADLHRLADWLVSCRIETVAMESTGVYWIPVYEILVARGIEVLLVNARHLKNTPGRKSDVTDCEWLRELHSVGLLRGSFRPDEEIVTLRSYLRHRDTLVQNAATAITRMQKALVQMNLQLHIVIRDIMGMTGLAIVRDIVNGQTDPGRLAKHRDAHCKASEADIAAALTGHYRAEHLFALKQNLEIFDAYQRQIEACDAQIEACLTELAEKMAPPSAPLPSRRSRRNRRSNEPRFEVRPMLHRLANTDLSELDGIGPYTALRLISEIGTDMSRWRTDRHFTSWLTLAPNNKISGGRLLSSRTQPSASRAAAILRMAAMSLARTQTALGAFYRRLAFRIGKAKAITATARKLAILVYHSLKGDFVYKDPGAAAYDARHRDSVIRRLRHRAAALGLSLVDGQTGEILDGVS

SEQ ID NO: 387232 - protein, 364 aa, unidentified
MIKLHYVGLDVHKETLEVIAFRENETNPCIEKRIPNRTKSIKKVFRNLLSEGSVIACYEAGCMGFTLQRLLEGMGVTTVVAAPGKLPRKSSERIKTDRRDARNLAIYLHNGDIEAIHIPTVDNEVVRDYLRAREDRRLDSVRMKQRLHKFLLRHGYVYESTRYWTGRHDKWLQAFEFVTPLMKATFDEYYYGIKGGKEKLRMMEKRIEEIAVSSPYVEGVKKLRCFKGVEYLTELSIICEVGDFKRFKSAEEFMSFLGLVPGEHSSGSKRRQGGITKSGNTHVRKLLVEASWHYRYKSSPSKRLTDRRYGQPAELIAYADRAMKRLQGKFFKLVVRGKTSQTAVVAVAREFSGFIWGMMVGQTA

SEQ ID NO: 387233 - protein, 318 aa, unidentified
MTIHTESQIEINVGVDVGKSKLDIVLHPLDLHFQIPNDETSIRKIVQVLKSQNVTRIVTEATGRYEHAFVFACDQANLPIVVVNPVSIRRYAQAIGVLAKTDKIDASVIARFAATIQPEIKPIPDKQSRLIKDLLVRRTQLLEMQTMEKNRLQSLPKALHRSIKTLLRSLETQIKTITKQIDEAVMQVKHWRTKTEILTSVPGVGKVLAYTLLSELPELGELNRKEIAALVGVAPMNRESGTWNGKRRIRGGRHRIRTVMFMAMLSSIQCNPVFKRFYEHLKAQGKLPKVAIIACMRKLIVVLNTMLKNEELWRHKTA

SEQ ID NO: 387234 - protein, 310 aa, unidentified
MDMKAVGIDVSKDRLDVHVWPDGIAFAVARDGKGLAELIERLLPLTPDLVVVEATGGFETVVAAALAGAGLPLVVANPAQIRHFAQAAGTRAKTDPIDAAMIARFGHDMKPDVRPLPDEATQLLADLVARRRQIIEMIVAERNRERRATVRRIKKSIARLVRALEKELAEIDAEIDAGVRGSPAWRDKEDLLAPVPGVGPVVARTLIAELPELGTLDKKKIASLAGLAPYTRQSGQWKGKSMIGGGRKAVRSALFLAALTACRHNATLKAFRQRLLAAGKPKMVAVIAVARKLLTILNAILRDQKPWQTA

SEQ ID NO: 387235 - protein, 313 aa, unidentified
MISSPDYVGVDVSKKYLDLAMAGHKVFRVANTSAGMSGLLPRLASLNRPHLVCEATGSYSRLLAREMAGQGIAVSQINPRRVRELARADGRLAKTDAIDAGVILRFAHLMAPEPDPQYDPNVVEMADLVRRRRQMVDMLAQEKQRREHPEALQVQASIDAHIGFLGQQIAEIDQAIARHIEADTTLSRRAELLTTIPGIGKTTAAVLIAEMPELGSIGNKQAAALAGVAPFNRDSGAMRGQAHIAGGRLSVRCALYMASLSAIRANPPIRDFYQRLRDQGKPGKLAIVAAMRKLITTANAVIANDAPWKGKSD

SEQ ID NO: 387236 - protein, 344 aa, unidentified
MSIAILGIDLGKNSCSVVGVDAAGAVVVRRTMRRQTLIDYVVKLPACVVAMEACCGAHHLGRRFAEQGHEIRLMSPEYVRPYIKAQKNDDRDAEGIAEAASRPTMRFVDLKSQEQLDIQTLHRVRSRLVAERTNLLNQMRAILLERGLIFPAGRLKFEHELDQMLSERNETLSPRMQDLIGGLRAEWKELDKKIGALNREFVQLARNDAAAHRLTLIPGIGVLNATALIAAVGDASSFAKARDLGSWLGLVPRQYSTGGKPRLLGISKRGNTYLRTLLIHGARAALPSLSKSDTPIGRWLTEMIERGVHRNAIAVALANKLARIAWAVLRKKTSFERGYLAAAA

SEQ ID NO: 387237 - protein, 409 aa, unidentified
MKLFVGLDVSSQDAKVCFLNGDGDRLQAFTITNDLPGAITLKEKILDTVSRSTCKTIKIGLESTSIYSYHPAMFLHNDKELRTYGSQVFMINPKPIANFKKSYSEMDKTDAIDAFIIADYVRFGRHTMSIVKEEQYIALQQLTRSRYQLVHALTKEKQHFLQHLSMKCSQFSQDVNSSVFGNAMMELFLEQFSLEDLIQMPLQELALFLQEKGRNRFGNPEEVAKSIQKAVKGSYRLSKVVEDSIDLLLSTSIRIMRTYQTQIKEIEKGIESLMSTLPQTLESIPGIGPVFAAGIVAEIGQIERFTDETKIAKYAGLFWKKYQSGRFTAENTSLSRAGNQYLRYYLVEAANSVRRNVPEYRDSYAKKAAEVPKHKHKRALVLTARKLVRLVDALLHNNQIYAFGRSADR

SEQ ID NO: 387238 - protein, 312 aa, unidentified
MNKICIGIDIAKNTIEISVRPSGEHWTATTEPNELLQTVDRLTALEPTIIVMEATGGYEIRVASLLSTAGLPVAVVNPRQVRDFARATGVLAKTDAIDARVLALFAEKMEPECRPVPSDDEQTLKELITRRRQLVDMRTAELNRRQQSISQQVYKSITTLIASIDHELDTIGREITTRIKANPGWRAKDKLLRSAPGIGDTTASLLIAALPELGSLNRRQIASLAGLAPMNRDSGTFRGRRMIIGGRAAIRAGLYMPMLSAIRCNPQIKSFYDRLIADGKLKQVAITACMRKMLTMLNAILRENQPWHPIPA

SEQ ID NO: 387239 - protein, 310 aa, unidentified
MLVPARQRREFLNTAVGHEGLMQWLSKSATAVQVCIEATGLYSLDLALALHRAEGIEVMVANPRAIADFAKALLQRSKTDQLDAEVMLEFARRMPFVAWQPPSSPQLELRALMRRITGLKLVSQQEKNRLHSVSQSAEITPLVRKDIQSHLVQLERHIEKLEHQAETIVQADRELARQFCHLVSVRGIARVSALHLLAELVVLAPDMTARQWVAHAGLDPRHHESGTSVHKPTRISRAGNRYLRSALFMPALVATQHDPNIRAFYQKLVDHGKTKMQAIVAVMRKLLHALHGMLRTDSDFVGEKFFVIPS

SEQ ID NO: 387240 - protein, 338 aa, unidentified
MAIVSVGIDLAKNVFAVHGVDDSGKAALVRPNVSRAKLLDLIASLPPCLIGMEACSGAHHWAREFAKFGHTVRLMAPKFVIPYRLSGKRGKNDAADAAAICEAVTRPNMRFVPVKSIDQQGQLLVHRARQGFVEQRTATLNRIRGLLSELGIVLPLKAAVVRREALACLEDLPGWANTVIGDLLSEVSRLDERIAQYDQHIRSMARQSAAAQRLMQLPGVGETTATALLSTIGNGRDFKCGRQLCAWLGLVPGQYSSGGKQRLGRVTKAGDPYLRSLLVLGARAVLAAAKNKSDAISRWATALAQRRGYWKAVVAIAAKNARMCWAVLARGEDFRLPA

SEQ ID NO: 387241 - protein, 417 aa, unidentified
MAMKIVRFNCCGMDVHKNLVVATIGITDRKTNITEYFQRSFSTLNSDLYRLKDWLKSHHCSDVCMESTGKYWIPIFNVLEDEINVHLTHPKYVKAIKGKKTDKKDSKWICDLFKHDLIKFSFIPPREIRELREIARYRYKLVCMRSSERNRYQNCMTVSNIGLASVISDPFGKTASNIMKEVMKANVIDDDKILKLVHRNCKNKDKILDSLHGYHIESDQRFKMEKSLDHMEYLDQLIDSCEVELIKRAYPLRRSFQHITQIKGISALSAILIISEIGIDMSQFESDKQLVSWAGLSPANNESAGKKKSVRISKAGQYLKPLLVQCALSAIKDKASYFGRKYSNIKKRRGHKKAIIAIARMMLVSIYHMILTGEEFQPTDHESLMSPKSNTDQSLTVEKALNFLKRSGIDISSILVN

SEQ ID NO: 387242 - protein, 345 aa, unidentified
MLHVGLDLSRHRLDVRVLEPEGATVAQLAVAPVGEDLRSLAARFAAEGPVRAVIESMNGARFVHDTLELAGWEVEIADAVKVKGLAPLACKTDKIDALVLAELSRRDLVPSIWLPSPEVRAERERARYRLHLVKHRSALKCRIHASLLAFGYPNRYSDLFGAGGREYLDQLVFPTPWRDNVHAAQLLIDDLTEQIRAIEAELSGIARTPPYVRLLVTAPGIGPVLGYSIASEIGDISRFDTPAKLVGYSGLCPKVYQSGQSERRGTLAKNGPRWLRWALMEAAVHAAGSPIYRDRYLRTRARLGRFRGPKIARVEVARRLTESTWHMLTKGEPFAPAGAASALAS

SEQ ID NO: 387243 - protein, 336 aa, unidentified
MTHYCGIDLHSNNHVVVVIDEEDKRVFDKRINNDLSLTLKALSPYQESLQGIAVESTFNWYWLVDGLQEHGYDLRLVNTAAVKQYDGLKFSGDHHEAFHLAHLMRLGILPTGYIYPKEQRAIRDLLRRRLALVRTASTQLISVQSQIWRSAGTRFSSAELRKPDFVPPHLDNYTLQAVHTGLVVYQTLQREIDALEISVHQAVKLTDAFKILQTVTGIGKILGLTIMLETGTIERFAGPGNFASYCRCVDSTRTSNGKKKGEGNAKAGNKYLSWAFSEAAHFAVRFEPLAQRFYERKKARTNGIIAIRAVARKLARATWMMLKHQVPYDAKRMFPG

SEQ ID NO: 387244 - protein, 386 aa, unidentified
MQKLNDLSRSLIALEPAGTLIAVIEMSLSSWLVAGIVPGVERQPLKKLAVDESALLKLLHRWREEAEKAGRRIERIVVAFEAGRDGFWLARWLKAHSIEAHVIHAASVAVSREHRRAKTDRLDTELLKRAFLGWLRGERDHCKVVAIPTLKEEDAKRPNRERESLVGEQSRIVNRMKAALIRLGIRGFNPKLKRAAGRLDSLRTPEGEPIPPNTLAELRRDMERRRLVSNQIRQIEEARLERFEQAPNDGPHAMVRLLARVVGVGIETADMLVHEVLSRNMRDRRAIARYAGLTGSPDESGRKRREKGLARSGNGRVRRGMVQLAWRFLIYQKESALAQWFRARTENALGARKPMIVALARKLLIALWRLVWQGVVPDGVVLRPAQ

SEQ ID NO: 387245 - protein, 432 aa, unidentified
MTTNRLQAGIDFSQKKADFCLLFPEGRPLEQHRSFDNSLPGYSLAKALMIDALETYQFDGLDVSGEATGFLWLPFFNQLAADPDLEAYDLNLFLLNPRWVKWFKKCFPQDDKTDQKDSFYIADRTRTRRPDATWSPQLDTLPLRFYTRLRFHLVQNLAREKCYFSAFLFLKASSYRRLKPFSDVFGVTSRRVLSEYATLDELAAIPVEVLAQTLHQMSGHHLPDPFDNARKLHRVAVESFPLPNVLVLPVHRILDLTLEHIRFLEGQIALVEDWISTEVQTQPTIMNLATIPGVGPVFSSGNGAEIGDTQRFLQAQKWDKKRKRYRPRNLRNAEDAVAKLAGLWWPRSDSGDFEAEDRRMAKTGNRYLRYYLIQAANLMRQHIPEYTEFYRRKYREASKHHHKRALVLTARKSVGLVVGLLHRNEAYRPREV

SEQ ID NO: 387246 - protein, 434 aa, unidentified
MNCNTNLEAITEKTLIIGIDVAKDRHLARFFDDRGAELCARMAFENSREGFCLLTGAIEALKGQHGKDNAIIGLEPTGVYGHTLIAYLQGKGLNVVYILGMQVKRAKELEDNSPSKNDHKDARVIASLVISGYYRRIRTFTDEIAELQEATRFAYQLTKKTTRVKCQIRDCMTEYFPEFTTAFATVFKHVGSYKNPGVSKTAMATLHMFPLPSQVDALTAEEIVSAWRASGVIKGIGMKKAQQLKRLAAGTIGIKASESVRLKIKGLLDEYDMLTAQEQEVWRRIEVLIGDNADFKAIMKIHNMTVKLAAYLLAEVGDFHDFSHPQQLVRLAGLNLKECSSGKNRGTSEITKRGRPLLRRTLYFIVLEQLKHAAPGWHQLHKYYTGRKERPLKKMQSVIALCCKFLRAVWGMLNNGTPYDPEMLLGGIRHPKAA

SEQ ID NO: 387247 - protein, 419 aa, unidentified
MSNRVAKHLASIQPGTLFAGVDLSLDDLVVVVLNATADRLDRFRSDNDAEGYADFRQRLQRSVEKHHAPGILIGMEPTNYYWKQVGYDLEQHQMPFRLVNALTVKRHREGDQLDRSKDDWRDAYTIADLLRQGKFTETRLPHGVYAELQTGYTAYQRLRRDRGRQATLLVNTVRQLFPEFEQVFKDVSGATAGAVIGAGLLPHVIGTHSEDLFLASVRSHFTGQRLCERQVRQLYALAKDSYGCREATMALRLMAQQQVGTIRLLDLQSQQLLAALLELFQTLPEAPYLLSIQGLTAPSALGVVAFTGDLTQYHCGGALIKLAGTQPTPNTSGRKTYSPTPFSHQGRSGLRTVVYFITLRLITQNDALAYHYQRLTTRTQHPLPKMQALGACMNKFLWYAWHVVKRREMYDSQRWRCLK

SEQ ID NO: 387248 - protein, 350 aa, unidentified
MNARTIAIDLAKNVFELAIADEAGKIVDRKRLSRSQLRRYFENYGAAHVVMEACGTAHYWGRWFSERGMQVSLLPPHYVRAYIRRNKTDRADATALLEASRANDIIPVCVKSVEQQALQGMHRVRSAWRGTLTARLNALRGLCREFGIIAPVGARRGLAELVQRVADESSGLPRIIRTVLQGVIEEVRAIQERLRQLELELAAIAEQSAVCQRLRKIPGIGLIGATAFAGSIGDIRSFRSPRRFAAWLGLTPREFSSGNIRRLGSISKRGDGYLRMLLVHGARAVLYSANAAQRAGRPLDALREWGLRVSSRSGHNKAAVAVANKLARIIWASWYRQRDFEFRPPSPATH

SEQ ID NO: 387249 - protein, 355 aa, unidentified
MPSKADTAVARTIGIDTGKNTLHVIGLDERGAIVLREKISRARIAARFVNLPPCLVGIEAGMASHYVARELVALGHEVKQVPPAYSKPFRHGHKNDFRDAHAVAEAVERPSTRCVPIKTDGQLDLQALHRVRSRLIGNRTAVINQIRGFLLEHGIPVRQGHHFLRKQLPLILATRTDVLSPRMIRIIGDLMADWKYLDERIERVTDEIEALAHADEGCQQLITVPGIGPIISSAMVAAIGNGAAFCKGRDFAAWLGLVPKQMSTGDRTILGRITKLGNRYLRMLFIQGARAVLLRPASWVKHSFGSWLTAATRRLHRNVLAVALANKLARIAWTVLAQGRRYEARVEPRVEPAAA

SEQ ID NO: 387250 - protein, 401 aa, unidentified
MVSDFRKGRYNLMKIYVGIDIAKLNHFAAAISSDGEIIIEPFKFSNDADGFQLLVSKLESFDKNSLIIGLESTAHYGDNLVRYLVTELYQVCVLNPIKTCQMRKNNVRKTKTDKVDTYVIAKTLMMQDNLRFVSFFDLDMMDLKALGRFRQKTIKQRTRLKIQLTTYVDQVFPEIQYFFKSGLHQHAVYALLKEAPSPKEIASMHMTHLANLLKVNSHGHFTKEQAKELRVLAQKSVGANDSAISIQITQTIQQIELLDSQLEKIEAEMTDIMKFNDSVIMTIPGIGYINGGMILGEIGDIHRFSNPNKLLAFAGLDPSVYQSGNFQAKTTRMSKRGSRVLRYALVNAAWNVVRNNATFKAYYDAKRAEGRSHYNALGHCSGKLVRVIWKMLTDNVEFNLK

SEQ ID NO: 387251 - protein, 336 aa, unidentified
MSKKVTFKQCLGIDVSMKKIDCCLSFYTEDLKIKVVATSSFENNSNGFIKLREWLNRKQDNGLALHVNMEATGTYHEEAAYFLAGVGYRLSVIQPTKGKQYAKSLDEKNKTDKIDAVMLARMGLERELMPWSRPNEQLRCLKRMSRERIGLIRDRNALTNQLHALNHSFDAFRDSVERLKDRIALATKQLGEIEAQMRVLAESDPELSRRTKHAITIPGVNFVTAITVIAETDGFANVGNRRQLVSYVGLDVVMKESGTLSWRPHISKRGNAYIRAGLYMAAVSSIIHNKTLKLYFNRLKDNGKPGKTGIVALERKLLILIYTLYKNEKDFIPDYQ

SEQ ID NO: 387252 - protein, 356 aa, unidentified
MFHVGMDYHKKYSIASAVDDQGGRVAECRFEGNTADGFRRFFENLGGPARVVIEACWNWGRLYDMIESIASVQEVVLAHPYKTRVIAEAQIKTDKIDARILAQLLRANLIPRAHIPDRQTRQKKDVLRQRLFWVKLRTRIRNRVHILLDRQKSLNRPQVSDIFGARGMAFLSEASLPEPDGTLLKQDLTVLKSLQEQIKQIEKQVVKENDGNEAVKLLLSVPGYGNILANVIAAEIDKIDRFRHSNKLCAYAGLVPTTYASGGKEYHGHLLPMCNKWLRWAFVEGAWVAVGCDPYFGALYKQQRDKGKNASQAIIVVARRMCQITWTILKEKRLYENRTYQTNSPGRSRYYLAVSN

SEQ ID NO: 387253 - protein, 353 aa, unidentified
MERYIGLDAHSQTCTLAVMGSSGKRLREQVLETNGKVLVDFVKTIAGTKHLCFEEGTHSEWLYELLKPHVDELVVVQPWRSGGQKNDSIDSWALADQLRKGGIENTVFKAPSAYTALRAAVRGHRAIVGDVVRAKNRLKAIYRSRGLQGMGKEVYDESQRAKWLRKLPAHRRKLAELLSSELDAILEARTTAEQWLMEEANRCPIVRLLATAPGIGTIRAAQIVAIVVSPERFRTRQQFWSYCGLGVVTRSSSDWVRDRRGEWSRRETAQTRGLNRNRNPVLKAIFKGAALVVVQSMPKHVLHQDYQRMISAGIKPTLARITVARKIAAAVLAMWKNKEEYDPAKSQSNTHAA

SEQ ID NO: 387254 - protein, 417 aa, unidentified
MRIVRPICCGADIHKDLIVATIATTNQDGITEYIQSSFSSQNFDLNRLKAWLKEHHCFEIAMESTGKYWIPVFNVLEDEIKVFVVHPKYTKAIKGKKTDKKDSKWIADLFKHDLLKFSFIPPKEIRELRELSRYRIKLIAMRSSERNRYQNSMTISNIGLASILSDPFGKSSRAVMKEVIRSSSVTEEKISKLLERNAKKKVKEVLQSLVGSHIESDQRLKMNIASQHMDQIDSHVRRLETEMAIRCIPYATLINLLLDIPGISYLSAMTIIAEIGTDMSVFETSKQLSCWAGLAPANNESANKKKSVRISKAGSYLKPLLVQCALAAINSKSNPYYRIKYNRIKKRRGHKKAIIAIARMILANIYHILSTGEVYSPCDMEQIINPKPVKKVMTIQNAIEFLQSQGFDTSKLISSSS

SEQ ID NO: 387255 - protein, 369 aa, unidentified
MARNGTLAKSQELQPSFHATTEQITIGIDLGDRFSHCCVLGPDGKILTEGRLRSTPETMARHFQHLPPARIAIEVGTHSRWVSQLLGQWGHEVIVANPRNLRMIADSIRKSDQVDARMLARLARVDPKLLSPIVHRKQGIYPDLIQLKARDLLVKNRTRLMNAVRGVLKSAGLRVPPSGTSCFPSKAATCIPDELKPSLTPLLETISHLNKQIYSLDKAIESTAQNRYPETNRLRQISGVGSITALQYVLTIGDPGRFAHSRDVPAYLGLTPRRHQSGSVEQQLRISKAGNKQLRSLLVQCAQYLLGRFGPDSDLKRWGTRMFERGGKNSKKRAIVAVARKLAVLLHRLWVTGDTYHPLYNASISSVTR

SEQ ID NO: 387256 - protein, 343 aa, unidentified
MEESRRLVIGVDTHKDAHSAALVDELGGLVAATDVSANRRGYVRLLEWARGQSSWRTWVVEGTGSYGAGLASFLAGCGELVYEGDRPQRRKHGASGKSDQADAIKVAREALAREHHALPRQRGSREAIRVLLSTREGAVSASRQALNQLYALVVTAPEPIHDRLIGLKAEQLVSACLHLRCSAGDVETSVTTKALRQVARRIRMLQAEAAEHAAQLEQLVAEAAPTLLAEPGVGTITAAQLLVSWSHAGRIRNEDAFAAIAGVAPIPASSGRLVRHRLNRQGDRHLNRALHVVAICRSSCHTPTKDYIARRTAEGKSTREIRRCLKRYLARRFFRLLQRLDNP

SEQ ID NO: 387257 - protein, 386 aa, unidentified
MSQTTHQPSGPFYIGIDFHKHYSVFCVIDDRNTILERGRIDHKIPIGFELLIKRYPGCRVVFETTMNWHWLYEILEAHMNHKDIVLANAYKMRIIAEAQVKTDKVDAYMLAKFLKAELISTVHIPSKSTRQRKEVLRQRCFFVRQRTMLRNRIQRLLSAQHNLQLPQCSDLFGKKGISALGKLELPDPAGLLLRQQLEMLENLKTRIAEDEAALKKMLEASPELEFVKSIPGMGPILAAVVVSEVDDISRFASAQRFCGYAGLCPTTYSSGGNTFNGRLMRACNKWLRWAFVEAAWVSVGCSPYFGDYYKRKRALGKKANTAIIATARLMARICWQLLTEKRAYASFPPAQKLQGRPEGKPQASSGWVKKMEDFAMPKETFPSRSE

SEQ ID NO: 387258 - protein, 382 aa, unidentified
MPAYADPTPTPISADTIFLAFELSGTSWLVALHAPDADKVERHRLPAGVAAEVLGLIARTKARVTRRLGTTPRVACCYEAGRDGFWLHRVLEAEGIASHVMDPSSLQVDRRARRAKTDRLDAQALLRALMAWSRGERQVCSMVRPPSPEHEDERRLSRERGTLLKERLRLSNRIKGLCAAQGIYHYEPLGADRRERLARLVTGDGRALPGRLAAEIGRQLDCLELVLRHLAEVEAVRDARAAQAREEGGSKLATLLRLKGIGPELATVLELEVFHRHFANRRDVAAYAGLAPSPYASGGTSREQGISKAGNRRARKALIELAWLWLRHQPESALARWYRDRVGTATGRVKRIAIVALARKLLVAIWRYVETGLVPAEATVRT

SEQ ID NO: 387259 - protein, 414 aa, unidentified
MLKIVYPICCGMDVHKSFVVDCIASTNEYGVTTYKSKRFSTFTGDLRRCAEWLSENNCKDVCMESTGKYWIPIYNILETTCNIVLAHPKYVKAIQGKKTDRRDAKWIADIFKHGLITGSFIPPADIRQLRDLVRYRWKLTNFTTGEKNRAQNCLTVSNIKLDDVFSDVFGKAASAITTKILENPMEKITDVSGFRTKGMKATDEEILAAVDGEMCEEQAEKLRIIRSHMAGLELCKANLESLILATSEKYLPQLNLVMTAPGIQSFAAIGIISEIGVDMSVFPTSKHLCSWAGLTPQNNESAGKKKTTRISRAGAYIKPLLVQCALCAIRAKQFPEVRSRYLALKKRRGHKKAIIAIARMLLTAIYNMLKKNEPYNPELYRKSDRPPAHREVSVDEAIFILQRQGYLVTAPPTV

SEQ ID NO: 387260 - protein, 418 aa, unidentified
MKEFNPERHRIETASALEVVTSAGHQEHHAAYVGLDVHKEAIAVAVAEPGRAEPVYRGEIANKPKSIEKLIGKLSAAYDGALLQFCYEAGPCGYVLYRQILACGHDCQVVAPSRIPRTPGERIKTDRRDALKLARLLRAGDLTAVWVPDRDQEMMRDLSRARDDMKGQERKARQQLNAFVLRHGHHWPRGKSRWTQAHYNWLESLRFEHPWQQVTLQEYIDAVKAASARVAQLSGHLMRALPEWSLAPVVDSLIALRGIDKLAATVLLAELGDISRFDSPRELMAFLGLVPSEHTSGPRRRQGGITLTGNGHARPCWSNRPGATGFRPAKPCTSSARRSMPRNWPRRLLGRPRYACAGAIARLPGRGRTPRWSAWRSPASWPASSGTSCASRWRARHRRRPEKAAHQFGRIAAIMIGQ

SEQ ID NO: 387261 - protein, 391 aa, unidentified
MPMYFVGIDISKYKHDCCIISAADQQIISKFTITNDKDGFEQLLTALNSLSNPEDIKIGFESTAHYALNLELFLENAHHSFMEVNPVLIKEYKKSTTLRRTKTDSVDCESIARWLITVEYKPHSKGFYHAYSLKSLTRLRDRLIRQRSFYLVKITNVLDHTFPEFKPFFNERLSKTALYLLENYGSAEKMARMNSASYDKLRCISRGKFSIQQFLRLKELAANTVGVNNSIFDLELNTLLTLYKSLSDEINTLETEIIKLIEEVHPHYMSIPGIGPISAAVIYAEYGDISNFSNPGQMLAFAGIEPGINDSGTESHGGRMVKHGSSQLRYILLNACLPLIRFDLTFATYYEKKRAEGKKHRVAITHVAKKLIRVIYALERQDVDFNAQKLR

SEQ ID NO: 387262 - protein, 352 aa, unidentified
MNYCGIDYHKKFSHVSVMDESGEKILERRIPNKRAAVEWLFSELSGDSVAVVEATRNWIRIHDLLEEFCEVKLAHPLKLKAIAWAKVKTDSIDSRTLADLLRADLIPEAHVPTPEVRELREVLRQRAFFVRLRTALKNRIHVLIDRHAEYDEMASSFSDLFGKTGLAWLGSLELVEGERRRLDEDLHLLELLNKLVKADDRWIEELSKQHPEIALLRTVPGFGPLIAALLWAEIDGIERFPHPKKLHAYAGLVPSTCQSSDRTRYGKLTKCGNKWIRWAAIEAVRGAINSDMELHELYLKHKQKSGGNRAKVVVARRLLAIAFRVLKEKRSFRARGVAPRSASANPAARACA

SEQ ID NO: 387263 - protein, 411 aa, unidentified
MDVIVERAAGLDVHQASIVACVLIGRPGQKPRKEIRDFGTMTADLEALRDWLRELGVTHVGMESTGVYWKPVHTILEGHFTLIVANAHHIKAVPGRKTDVKDAEWIADLVRHGLVRPSFVPPLEIRELRDLVRHRRTLAETLASERNRTLKLLETANIKLSSVATDVFGVSGTAMLRALAEGDMAPEAMAELAKGRLRTKLEPLVKALQGRVSEHHRFLLRLHLRRLDEIERDLAELETRIAERMRPYRRQVGLLKRIPGVDEIGAAEILAETGIDMTVFGNARRLAAWAGVCPGNHESAGRSRKTSTRKGNPHLKAALFRAATCAAKAKGTYYKEKYYRLKARLGAKRAAMAIAHKILLAVFHILAGDTEFRELGAAHLDQQHKHRVTKGLVRRLDALGYEVILRPKLAA

SEQ ID NO: 387264 - protein, 342 aa, unidentified
MKRKIYIGVDVSKNWLDLAYYDGVEIDWKSGHIRVDNNKSGYRRISLWMKKLQIAKESALFCMEYTGLYCYNFRVWLESEGIIYGMINPRKMHRFEPDLGEGEPALDRIKTDEMDSFRIAMYCEKHSRKIKSSPSKLPGSAFFNLKRLLAERRQYVKHSVLYKQQLHDISAYDTEESCKRKQAGLKSLSVLRRQTDIEMRKIIKSDEAIYKNYKLLCSVIGVGLVIAVETIVLTENFTAITNPRKYACYVGIAPGRKESGISIRGGNHVSKKGFKQAKANLSLVALQAIRHDSNIRSYWLRRKADGKHTGVVLNAIKFKMILRMFAVIKRQKPYVEMDAYMK

SEQ ID NO: 387265 - protein, 326 aa, unidentified
MTAPKLGIELSKKTLEVALIRDPEPMKANQRPFSNPPAGVQDLQNWLAKHGVNRVHAVLEAPGAEGDALAESLDAAGHQVSSGNPAHIKAFGHSELQRNQTDRADGGLSARLAWRHHPAPGTPPEPEHPELQSLVRPLDALIKPRTQVRTRLSEGRRTEAVGESWEKVLHSLKERIADVTMPINRHFEDPPGLQRQRELLDSIPGIGPETAARLRAELPQPGEFDAARAAAAHPGLTPKRHPSGTSIQAPTRMSKLGTPRIRDALDLPAMAALRSSREFKELAARLTERGKKKMQILAAAMHKLVRIAYGVVKNQRPYDPTYAAAV

SEQ ID NO: 387266 - protein, 355 aa, unidentified
MIIIGVDYHPEFQQIALLDQDTGEFQEKRLTHPEEAEQFYRALAAAGRKVRVGMEASGHARWFERLLEELQLELWIGDAAEIQSKRARKQKTDRQDAQHILKLMLKDDFRQIWRPSWENRDLRQLLWHRHRLVQARTRIMNQLQAVAINEGLRCKKRLWRAGGRQKLETFRLAPWASRRRQDLLELLDRLNPTIAELSQAIEQEAGKSPEARRLMTHPGVGALTALAFVLIIGDAERFECGKQVACYLGLVPLEKSSGNRRRLGHITKQGNSLLRFLLVEAAQVTVRSLPEWRSQYFRLVMRRGRKTAKVAMSRRLAIRLYWMWRQKLDYQQSKSSVRTQDSPDIAMVCSKTPSN

SEQ ID NO: 387267 - protein, 329 aa, unidentified
MTTNPPQIVFNHIVAFEVSKEKLVVHTLPDDEQWTIDNKPQAVRRLIKAEIKRNRKKQLGQMLVICEATGGYERHVLDGALEMGLSVHRAHGTRVRHFGHYRGLLAKTDPIDARLIAQYGLKTENIRLYSPPPPDTAALRALHARRTEIQQMLIAETSRLDHAQHKSVLKSLKAHIASLKAALAAIEADIAQLVEGSEMLRKKVALMQTVIGIGPISAMVVLAYLPDIGQLTKGQAARLAGLAPINNDSGKKRGARHVEAGRTAIRRALYMAASVAMRANPILKAFSDRLRSKGYPFKYVVTAVMRKLIVILNAVLRDGQSWKGAQMAA

SEQ ID NO: 387268 - protein, 344 aa, unidentified
MTHYVALDVSLRSVAICIIDGEGTIKRETSVVSDVEDIVHVLGRFDGEITSVGLEAGALTQHLTYGLQAAGYDVVCMESRQVHAALSAMRNKTDKNDARGIAQILRSGWYSRVHVKSLESHYVRALLSSRRAVLQKCVDLENEVRGLLKIFGFKLPPRVGHVQFDGVIRERIVQEAELQHALIPLLDARGALYTTYLELDRRVKRRALNDEICQRLMTVPGVGPITALTYKAAVDDPRRFKRSRTVAAHFGLTPRRFQSGEKDNLGHISKAGDAEVRSALYIAAHVLMTRSVGFSTLQAWGMRLMKTKGRRVAVIAVARKLAVILHRMWIDGEQFHWGTEGANT

SEQ ID NO: 387269 - protein, 339 aa, unidentified
MNILKQTVGIDVSFKSFDARFGTINTQQEINLSASRSFQNSHAGFKLFLRWLKKYILSDDIPLAFVMEATGVYYEQLAHFLFQQWYQVAVILPNKIGNYAKSLESKSKTDPLDAAVITRFGLERQFHLWTPPSETMKVLRDLYREYQSLKTNSMQIKNQLHALKSSFKPHRESFKRKTLHLKFLQRQIGHIQKELRALVKTEPDLAQRLKNIKTAKGLGDIAILTVLAETRCFELVTKLKQLASYAGFDFVFNDSGLNKGRTPISKKGNTFIRKVLFMPALSACRANPHLKQLYQRLVAKGKNKKLAIIAVARTLLLLIYTLWKSHSPYNPDFNSVQHV

SEQ ID NO: 387270 - protein, 323 aa, unidentified
MAKRTAICAGIDTGKRKLDVAIDGSSDELQIDNTVEGHKTLSDWLRQHRVKRIGIEASGGYEQAVVAELRRKRFVVVVLQPAQVRAYAKFHRQRAKNDKIDAALIASCTSAVRTIHAPPDPRLLPFAEHLTVIDQIGEDIARLKNRLESCRNLHFQQIWSEDVARLNKRERAELKALVAAIRRHRDLAERLDLIGSVDGIGPPTAVAILVRLPEIGKITREQAAALAGIAPYDDDSGEQVGVRHIDGGRQRLRRALYTAALPASFRWNKQLIDLYRRLIAAGKGHKRALIACARKLLIFANTVVARGTPWQQNQPQIGATPGG

SEQ ID NO: 387271 - protein, 350 aa, unidentified
MDIVGAFDLHRKQITFDYIEMDSGEVHRGRIQPADRENLRLWLERFTERFPAQHAAIAVEATTGWRFVVEELGRAGIEPHLAEPAETNSLRGRKKRAKTDRLDAGHLRDLLVIERLPESWIPPEHIQEIRTLMRMRHTMIEERSAHQQRIHAQLFHNGYPQQRNVLAADRRERLQKMELPRAARKVVDLSLAMIEHINEELEPIEAELRTYALSQAGCRALMEYYGIGELTSVAMLAELGDTRRFSSSKKAVRFAGLDVTVQSSDEKQAAGRLSRQGSPVLRWAAFEAAMVARRRGSPDHNYYVETKERIGTNRAALSIARKLIRRAHHTLRELGEEAMSEPAAVNNSSV

SEQ ID NO: 387272 - protein, 313 aa, unidentified
MSQNNTPILYVGLDVAKLTLELDVAGRIHSLANNPKGHAQLRKQLRAQPRAHVICEASGGYEQDIVQFLQASGLPVSLVEAARVRYFARAQGRRAKTDPIDATILSAYGSSFQPAATPAASAHQKRLADLSQRRQQLIQARNVERNHTEHYTDPLCVRQARLFLKTLDQQIAQCDETLAELVANDAELARKASRLQTIPGVGAVVATTVLAEMPELGLLNAQTVAALAGVAPYNRDSGGVKGVRYISGGRRTVRCALYMAALSAVRHDRILKDFYQRLRTAGKPAKLALTAVMRKLIILMNHLLKNPNFSLAT

SEQ ID NO: 387273 - protein, 343 aa, unidentified
MQTITTIGLDIAKSVFQVHGIDGSGQVVVRRQLKRRHVLAFFQKLPPCLVGIEACASSHYWSRELQALGHTVRLMPPAYVKPYVKRQKNDMADAEAICEAVTRANMRFVPTKTPEQQSCLMLHRTRHLFIRQQTAVINAIRAHLAEFGIVAPVGRKGVTELLHVVADPSDKRVPEVARACLAALGTQLLGLKEQIVEFDRMIMAWHRSNETSKRLHYIPGVGPMLATALVASVADPKTFRSGRNFSAWIGLVPKQHSSGGKDRLGSISKQGDRYLRSLFVAGALAVIRYAKIHGTKHRPWLTALLARRPTKVAAIALANKLARMAWAMMARGERYRNPVALAA

SEQ ID NO: 387274 - protein, 424 aa, unidentified
MNCTQNERINQVSEQTLVIGVDIASELNYARAFNWRGIEKGKVFKFFNNLEGFQAFNKWAHQVMSANKLTNIMVAAEPTGHYWFGLADYLKDEKLKLVLVNPFHVNRAKELDDNHPSKTDAKDPKTIAKLVIEGRYMEPYIPEGVYADLRIMYNCRQKVTKAMISLENQLKRWFRIYFPEYLSVFGNLSGQGSMAVLEKAVLPEDIISLGVDGINKLWRERKLRAVGMKRAESLYEAAVKSIGRREGNVGGRAEFRMLWEDYCHKMEQMEKLNIELESLLHKVPQAEEVLKMKGIGVVSVAGFFAEVGDLRRFESPKQIQKLAGLAIRENSSGKHKGQTTISKRGRARLRAVLFNAAIALVGRNGAFKSIHEYYIGRKANPLKKKQSIVAVSCKLIRIIYAICRHKEAYDEAKMLRDIRREQLA

SEQ ID NO: 387275 - protein, 305 aa, unidentified
MSEIKFTQVVGVGCGIDVHKDLIVATIQKGNEQIETKEFNAYTSSLKSLRDWCKEEGVTHIAMESTGVYWKPVFNVLEEDFHIILVNARHVKNVPGHKTDKKDSRWLSKLLLSGLLKGSFIPPCEIRELRDLVRYRKKLVAQIASEKSRIIKILEDANIKLSSVLSNVDGAVGTKILDSLIEGKTEVSYLMQFYHGKIKTSKEEFRLALEGKINSHHRFMLQLHKDSIADKERMIVRIDKEIEIATQAYQVEIALLQTIPGVARDSAISIISEIGVDMSIFPDENHLSSWAGMSPGNNETGGKKK

SEQ ID NO: 387276 - protein, 309 aa, unidentified
MLTAEADKCKTKVVVNTAAGVQALLAWCAKHGAQPAQLHAILEPTGLYHEQAATALPQVRVSLVNPAQARDFAKALALRSKNDALDSYVLARYGQTLSPALWHPAPLHARQLRALLTRREALSKDLLRELNRKEKSQFSPSAPLVDGSIDKAIAFLREQIKQIERAIDQHIDNHPDLKQDCELLNSIPAIGPQAGNAILAVMHNRHIDSAQSLAAYLGVVPVQRQSGSSLNSCAHLSKAGPSQVRATLYMAALVGTRHNPHIRALYQRLLKAGKSKKAALGAAMRKQVHLCFGVLKNRIPYQPNYAMNG

SEQ ID NO: 387277 - protein, 352 aa, unidentified
MEHFIGCDAHKKFSVFASINEKGEYGRTTQVRHDLEMFREFLKELPAGSKIALETSGCYYWMVDEMERAGHFPQLAHALTAKRRMEGRHKTNDRDAKGLAMLLRNGTLPVVWIPPAELRDQREMLRWRMYLSQMRTQIKNRIHGVLQRYNIDITVSDLFGDGGRVKLLARKGELPPHSRQSVLEQLQTIDSLETQIGECERILEEILYPSAERDLLDSLPCVGKILSAVLALEIGDVRRFPGPDRLVSYAGVVPTARESANWKRKDKCPRDCNVYLKWAYVEAANLISAHSKHWADRHVVQLFQRVKESTKMHGKAAMAVARHLAEASYWMLKKQEVYREPQTRQVLSSTHG

SEQ ID NO: 387278 - protein, 359 aa, unidentified
MKTRLSKKQMFFNKINLTKDDEIYIGLDVHKRTYNLAIWLNDAPAIDFVTPADNEKLLKLLYKIRIAIKRIVYEAGPTGYDLARSLQKASLPAWVIAPSKTPRQSARDSKTDRLDCKTLAKYAAKGLLRPIAIPTRQQEADRQLVRTREQLVSKQTRVKLQIKSFLLQHGINQPPSLKSWSVNAVRELKALKLSKQLRFCLDILLQQLQFFSEKLKEIADRLQETFIQERHANKVKVLLTHPGIGPVIARQFTAEIFKPNRFKHKTELAKYVGLSPIIIQSGQSLRDGPVTKTGRAELRSNLIEAAWIWIRKDANAYKSFLRILHNTGQKNKAITAMARRLAIHLWRMICENRPYIEGA

SEQ ID NO: 387279 - protein, 352 aa, unidentified
MIWVGLDLHKRYITACAMDEAGRVVGEQRRLPAEAEVLVAWLMELGGPVTVAMEATLYWAWLHDRLSEAGIAAVAAHPYQVKLIWQARCKTDPIDARKLADLARTNLLPAIWVATPAVRAQRTLLRGRVYLVRMRTGVKNRIHGLLTAENHRIEVSDLYGRAGRAWLHTVPLSPMARVQVDLLLDMVDVLDQRVVRLDKRVQRVVKDDPAAQLLQTWPGIGTFGAALLLAEIGTIQRFNSSHELAAYAGLIPSTQSTGGKTTHGGVGRAGSPWLKWILIEIVQSLKLAPGPIGHHYQKLLRAKGKAKATVAAARKLCCYLYWCLKEGWSYEQWLQQHESREVHPLQTLGSAA

SEQ ID NO: 387280 - protein, 370 aa, unidentified
MLSIGIDVSKGKSTVCGMKPGGEIVYTPFEVQHTREGMSELVSLLRSSGEEVRAVLKSTGSYHCPVVAALLENGIFVSVVNSLRMKRFCSQSIRKVKTDRIDAMQIALYGLAYWQELQPTKLPEDTYRELQLLARQYYQMTSILIKAKVDFNALCDQVLPGMQELMSDHAGRHKLSDFVLQYCHTTHILEMGETRFRKDYCKWAEKKGYRNCERMAVLIFATAQNGIPVLPNAPSTQIVITEAIRVLHTVEASRDAILTQMQALAKTLPEYSLVREMPCIGDTLAPRLIAEIGDVRRFHSKRALIAYAGIDAPPYQSGKFCANNRHISKRGNRYLRKTGYEVMQSYVMHKPANDPIFTFIEKKRGEGKEW

SEQ ID NO: 387281 - protein, 420 aa, unidentified
MPDDRCRLGSDDVVIGLDLASAEHQAVVLTAAGQRLTRFRIPHTRAGLEELLRRTTPAVLGRAGGARVFAFEATGHLWEAVAYVLRARGERYVVVNPLATFRVREARQLSREKTDLTDAEQIADLCRTGLVTQTQLETRPYLALRRAWGEYVRLREERARLKVLVAHQLYGCFPEFLRVWADLLQPGALAVLRTGLTPAAMAALSLTEFVAQVRAHGAGHRIWRFKLAQVHREAAQTIACPDGLDVLAREVQRAVARMDGLTAHMTAVVAEIDVLLAELAEVPYLRTIPGLGWASVAGLLAHIGAITKYHHGRQLIKLAGTNPSRRDSGQTVGRGQRMSHRGRAGLREVLYLATISCLQHNPRIRAHYDRLIQRADRPLPKMQALGACMNKLLLYAFAVMHRREAFQLDHDWQRTMSRVA

SEQ ID NO: 387282 - protein, 347 aa, unidentified
MKYYAGIDVSLNSSNVCVVDASGKIVREGKVASEPVTLITWLGSLGVNLERIGLEAGPLSQWLYGALREAGLAVELLETRHVKTALSTMPVKTDRNDARGIAQLMRLGWFRPVHCKSMAAQEVRALLTARKLVQSKLYDIEMSLRGILRGFGLKVGPTTSPSFAARINHLVDGQTSLEVVAAALLSLHAVALREFKSLEKSVRQISRADARVRLLMSTPGVGPLVALTYVAAIDDPARFTSSKSVGAHFGLTPKKYQSGETDVSGRISKMGDGSVRTALYEAAHVILTRPIKGGALKSWAMKLARRAGMMKAKVALARKLAVILHRMWVDAIKFDADKASGCVRVAA

SEQ ID NO: 387283 - protein, 341 aa, unidentified
MSSTSLLDSVKNFVGIDVSKDWIDCYLRPKQEAIHCGNNPDGFTELEQWLSAHGADMDTTIICMENTGIYGDKLLKHLTENGWICAVEKTTVLEKVTPDHHRKDDQFDAAGLAEYADRYLDKITITHPKSDDVERLRQLYSERNRLVIQKGAVQNKCSQLDHHTVTSERVAESLKQQLNFYQHQIDQIEQRMHELVRDHQGLHHYWQLLIEIPGIGKVTAWLWLVQFYGQPTLDCKKIASRFGFAPHSKRSGSSMHGKTRSSGHGAAQMRKCMSLAARAASTYYEKFRLYKQRKMDEGKIWPVVRNNLINKLIKIICAIWNSGQPYRSDHTSRYDRQKVVN

SEQ ID NO: 387284 - protein, 456 aa, unidentified
MAQHKRKKSPAEQQLPAQLHAVNLHAAGIDVGAEAHWVAVPVEADPQPVRAFPAHTASLHALAAWLTLCGITTVALESTGVYWIPLFELLETQGFEVILVDPGTMPKNGRPKTDVHDCQWLQRLHTLGLLSAAFRPDDPVVVLRSYLRLRLTLLADAARHIQHMQKALTQMNIKLQHVVSDITGVTGLRIIKAILNGERDPRRLATLRDQRCKEDETTIAQALHGTWREEHLFALHQAVAAYEFCHQQIQEGDAKIAAQLQTFEDRSKGESLPPKPRKRHRNRLSFETRPLLYRMTGVDLTKIEGLDETTALIVLGEIGLDMSRWPSEKQFTSWLGLCPRVRVSGGRVLSSRTRPTANRAAAALRLAAASLHHAKSALGAFFRRMKARLGTPKAITATAHKLARLIYAMLKHGTAYVAGSMAEYEQKYRQRVVHNLSRKARELGYELHPVLGGPPA

SEQ ID NO: 387285 - protein, 372 aa, unidentified
MSKIKNRPQVESASIQLVTPVGIDVSKDKLDVQLLHSSDKNAKHSYKQFSNAPSGFAKLVRWVEQLNSQLNRQTGLDRKPHYCMESTGSYSEALAQFLAEGEHLVSVVNPYLVKHYGECSNMLNKNDRADALVIAHYCRAEQPSLWYLSRPQVRALIKLVRRLQGLQQHLQQENNRLQEPGLIKPVVRSIQKSIRFLEKEIASVKAEIRRHIDSDDGPGGLKESMELLLSVPGIGETLATSILAELPDVSTFKSASSVGAYAGLSPKEHQSGTSVNKKTRISRKGNAHLRCALFMPALSAYRHNPLLAELYERLTKRGMPRKAAVCAVMRKLLMMAYGVLKNRQPFQLDWVKQQQDERRRKNTSNALCVSAG

SEQ ID NO: 387286 - protein, 340 aa, unidentified
MDQYAGIDVSLETSSVCVVDSAGKVSREAKVASEPEALIAWFRGLDAPVTRIGLEAGPLSQWLYAGLREAGFAVELLETRQVADAFRSMPVKTDRKDARGIAQLLRLGWFKPVHCKSLGAQEARALLTARRQVQTKRHDIEMSIRGILRGFGLKVGRTTPKTFEHRVRELVDGHPTLSTVVEALLRSRSALDMEFRKLDKAVSKAATADRTVRRLTSAPGVGALVALTYKTAVDDPARFASSRAVGAHFGLTPGKYQSGETDVTGRISKVGDHWVRVALYEAANVLLTRPVKGGALKRWGLAVAKRAGMRKAKVAVARKLAVILHRMMADETTFRFEAAA

SEQ ID NO: 387287 - protein, 321 aa, unidentified
MTQVSTAIAEAHREDGTISVALELSKARGLVGIALPRSSKISRYGVTGGDTAGLLKLLQAARAKAAQLGFAEARVVSCYEAGYDGFWLDRWLKQHGVDNRVLDPASIEVDRRARRAKTDRIDLDKLMRVQWALDRGEPRACSVVGVPSVAEEDAKRPHRERQFRVRERVRHVNRIKGLLSKEGVRGLDPGRPDFARRLSAATTPDGRALPPHLLAELRREHQSLRLAIAQIAELEAEERARIAAPKGDPNTAKIANLIGLRGIGLASAVPLVREAFYRAFDNRRQVGCYFGLTGTPYCSGATAREQGISKAGNPRARGIAI

SEQ ID NO: 387288 - protein, 334 aa, unidentified
MKKEKEMKESVGIDISKLTLDVFIYTKRLHKQFQNNKKGFESLKKWVKGETKSLEEVIWCFENTGWYGVLLGHFMHENKLHYCCINALEIKRSMGLQRGKTDKQDAEEIARFAWLRKEELDSSIPMPIKLIELQRLMSLREQLVKQSTALKNLSKGMMVTLEKKTGDTALSVIKQTLKHLEVQIRKVEKEMETLIKTDDQLCQNYKLSKTVKGVGTVLAIQMLLHTHNYTRFEKWREFSSYCGLVPFPYQSGTSIHRRPQIHSISDKKMKSLLSMSAISAIQADKELKSYYKKRVEEGKPKMVVLNIIRNKIVSRVFATVRRGTPFVELNKFAA

SEQ ID NO: 387289 - protein, 456 aa, unidentified
MSKRKEQKRKAINFDVLEQINLSAAGIDIGAEEIYVCVPAGRDEERLRVFPTFTADLHGLAKWLVACGVETVAMESTSIYWIPLYDILEGCGIEVCLVNARHLKNVAGRKTDVADSEWLYQLHTYGLLRASFQPPDDIRALRSLARHRDMLVSYRAAHIQHMQKALELMNVKLTYVLSDITGVTGMTIIRAILQGEHEPEVLAQYRDTKCKRSQEEIAKALTGNYRREHLFALQQAVELYDMYGQQIVALDAQLEAMYAQMQPPDEDISTTPPTPRRAKRRKNQANFDLATSLYQMAGVDLTRIDGIDALTAQSVLTEVGLDMSQWRTEKHFTSWLGLCPNNQITGGKVKRRRTNKTDNRAATALRLAAQSLARSQSALGAFYRRIKARHGAPKAIVATAHKLARLIYHLLKNRVDYVDPGADHYNEQQRERAIKRLQKQATRFGFRLESLATPLG

SEQ ID NO: 387290 - protein, 451 aa, unidentified
MLIQGSSDPPRLVRVGIDAAIVAQHEVCIRATDAQGRVRTDRFRVQPTLAGLRSLSNRLAEMPGVVAVAEPTSMTWLALSVALRDAGCDLSLLGARHAARLRGAISGKHKSDVIDADVLARAGEVFDLHPLRPVEPAQLALRRACVRRGGSVIDGNRHLRRLISLARWAFPDVWNGFRGSLPTAVAVLDRWPHLAQLAAARRSTLTAVVALHTRGVADVPDRVEAIRSAAAAWAAFWAGHLDLDALAFDVTEHLTDMADAKARTERATGQAQRYWRQLYGDDELLLSVPGMGPVTASVIRGFLADGTAFASGKAAASYVGLNPSTWSSGTVSQPSRAITKEGPAVLRLAFFQAANAARRQDPQLAGFYHQLMTEHGHCHTQACVAVARKLVERTWTVLSRGTPYQIRNLDGQPISRLEAKKMIKQVCTVPDQVRAKARAHSAATNRAKLTR

SEQ ID NO: 387291 - protein, 384 aa, unidentified
MKLDRTDAPTKAEYGTVYVAFELSKAKWKLGIVMPGSEKMSRFTIDGGDLASLEARLAVARAKAERSCEVVRIVSCYEAGFDGHWLHRWLLDHGVVNYEIDSASIEVSRRARRAKTDRIDLDKIMRAFLAHLRGEPRALSVVHVPSVEDEDCRRTTRERERLLDERTMHTNRIKGLLHGQGIRDAMPRKPDFIGWLAELRTGDGRPLPPRLKQEIEREHQRLCLVDQQLRDLEAVNVRELRAAAPGSNADKVVNLAWLKGIGVAGGQKLVNEVFYKKFDNRRQVGSYLGVVGTPYDSGKSRREQGISKAGNHRARTTAIELAWLWVQHQPDSELSRWFHARVGDAKGKIRKITIVALARKLMVALWRYLETGVVPTGAVLHRSI

SEQ ID NO: 387292 - protein, 387 aa, unidentified
MSEAFDPRKSATAFDQASTLVAVLELSGKSWRVGACVPGVSRRPSRHLEARDIGGLVKAIEQWKGEAGKAGHETRRVVVGYEAGVDGFWIARALREHGVEVYVIHPASLSVERRGRRAKTDRIDLDILLRALLGWLRGEPRHCTMAAIPSEAEEDLREPGRQREALTTARLKVENQMRSLLARFGIADFRPRLKKAAEHLERLLACDGRPLPRNARASLERMLAQHQLLSRQLKEIETARAQVVAIPNPDRIARMIQALAALVGVGVETATTLVHEVFSRRFRDRRALAAFVGMTGTPYDSGGSKREQGLSKNGNPRVRRILTQLMWRWLIFQPRSALAQWFLARTGGAKGRMKKIMAVALARKLLVALWRYVETGVIPEGARLATA

SEQ ID NO: 387293 - protein, 343 aa, unidentified
MQAITTIGLDIAKSVFQVHGVDADGQVMLRRQLKRRYVLAFFEKLAPCLVGIEACASSHHWARQLQALGHNVRLMPPAYVKPYVKRQKNDATDAEAICEAVSRASMRFVPAKTPEQQSGLMLHRTRHLLIRQQTSVINAIRAHCAEFGLVAPVGRRGVEELLNVIANAKDEQVPAIARACVTALGAQLHRIKQQILEFDRMITAWHRCCDTSRRLDEIPGVGPALATALVASVANPRAFRSGRHFSAWIGLVPKQNSSGGKPKLGSISKQGDRYLRGLFTAGALAVIRYAKIHGTRHRPWLTALLARRPTKVAAIALANKIARMAWAMMARGQHYREPIALAA

SEQ ID NO: 387294 - protein, 363 aa, unidentified
MKKLRLTAFAEQPSESPGPAAGTAVIIAIDLARTTWKYAVHWDDRVQCTPTTPGSLEHLQALVRRYHPAQPVSVVYEACGFGYEIAWWAQACGVPVLVVAPSQVERAPGARVKTDRLDARTLACKAAARQLKAIAVPTRAQHEQRQVLRTYGQAVRDRTRAQTRLRSLLQEHGRLGPPPSSGWAVYERWLDQQPLPAPVTLAVAELRALRTAAVASAVRLRHWLHTLAGREPYATVVAALTTQDGVGELTAMRLLLEVGDIGRFGSAESWTNFLGLTPSEYSTGDGPAHRGPIRKCGPAGVRAALVQCAWASLRRDAALRAVFERVSVRAGRKRAIIAVTRRLARRLRARWREVLPPPRAAAA

SEQ ID NO: 387295 - protein, 418 aa, unidentified
MTATVTTASTLLVAIDISKHRHEVLIGVPGKKRRRRMTILNKLADFQRLSATLASYDLPVRIGFEATGNYHRPLAHHLGRAGFDLKLVSSVGLARTREALHNSWDKNDPKDAQVILHMLEIGAVQFFHDPLVVGTADIQELSKTHEIVSRSKTELWHRILTHYLPLYFPEAERFHRSARTDWFLAFLAKYPSPHMISAMSRDAFIADAWDIVGRKVSKEQLLSDIYATAVGSVGLPVCPDSDAVRMFRLVLAEGRSLVRQRDEIEARAVELLSDLPDYQLLTTIPGIGPINAMTILAEAGDLRRFRHHRQFLKFCGMDLSTVQSGMFRGQSRISKYGNARLRRTLWMAGQTAVLKRTNSFRDKFERYISKDRHNAHLRRKAYTAIAAKMARTVHAVVNHGEPYRPFFEGVSPGGRTSL

SEQ ID NO: 387296 - protein, 344 aa, unidentified
MEHYVGLDVSLKETAVCVIDGEGNRVWQGKCASNPEDMETVIRQRAPLAVRIALETGPLCVWHWHALRAVDLPVVCIHARHAKAALMMQLNKTDPNDAFGLAQIVRCGWYREVEVKSIDSHRVRLLLSARSRFVEMRTTLYNQIRGLVKTFGIVLGPGKGGTFVREVEAKMPADPVIETVIGSLLSIWKTVTLQLQKLDREIGAIARKSTVHQNLMTVPGIGAITAAAYVATIDSPERFSRAKDVGAYLGLTPRRYQSGEVDRTGRISKCGDSMLRSLLFEAAHALLTRTRRKSALRNWGLALAKKTGPAKAKVAVARKLAVIMHRMWAEGTAFRTFDDVPVAA

SEQ ID NO: 387297 - protein, 316 aa, unidentified
MDHNNAVYGVDVSKAKLVIARYDVQTLAEVDNRPESIAAWLAGLPKGAVVAMEATGVYHRLLAHLAHAAGMRVYVLNPQTLKHYAQAIGRRGKTDNCDARMIARYAVHEQAKLRRWQPPARAADRLSQLLERRHTVVGVRQTLAQSLSGLPMIKAARQSLLASLERTVGRLDILIRHEMARLPGATALYERLKSIVGIGPVVAAQLVAVFSTLSFARAGAFIAYTGLDPRPNDSGIHRGRRSLSKHGPPLLRCQLYNAGMAAANSRVFKPVYKQLRERGLQTTEAIVILARKLARIAFALYKSGEVFDAQKHFKTA

SEQ ID NO: 387298 - protein, 428 aa, unidentified
MAPESVRARTWTFVAIDIAKEWNDVLMEYPDKTRQRWRMTNTQHHYRLLRDRLQALVVPPLIGFEATGNYHRPLAYFLGQAGFELRLISSLAMARTRDALYNSWDKNDPKDAQVLLHLLKSDVTQRYHDPLVHAVNDLQELAHAHCQVSLEKTRVQHSMLTHYLPLYFPEAERYYTQSRAQWFSRLLHRFPCPAAITRYSKDAFYQEAWSVVGRKVNKRSFLDDLYATAHESIGLPVAEDSEAMQVFRLTLQHHQELCAARAMLEQQADQKLTAHPDYQRLRTLPGVGPILALTILAEAGDLRRFPHHRQFLKFCGLDLSTQQSGQFRGQSRLSKHGNGRLRCALWMAAQGAIRMRENTFRQKYDRYMKGDPLNADRKRKAISAVAAKMARVAHGLMKTDTDYRPFFEAAVPSGALRSPLPSRHVVTS

SEQ ID NO: 387299 - protein, 471 aa, unidentified
MIKSVGIDLGGIGEHKVRCLDERAQMCDGFSFETTRAGLTKLEERVFSNGDNPVIIFEPTGLAWLLVAVYIKARHPDSRLVRVQAQKVVALRKYLHRSSKSDKIDSLTLAKMPFIDPEKLDEIYFPSGKIYAIQRLARQRRRLENEIAGRKKRIGSIVDGHFLGIRSTFSDPWSAHARAFLRSRLNPLAVVRSGEKALCAFLTKARRHCKIEASVESHGVYLACREVATLYKASSSVGTIDDDFFSALQDEISRELRLMEIEEAESAAIAKRLEKLYIELHPSDNLRTIPGVGDHTAPIFLATVGDPARFHSQSSFANYCGIVPGANQSSGSEAKGLRMTKAGPAIMRWALFQAGYIGRSHDPQLACVYYREMVHNGKNHMQAMGAVMSHMSARVLAVLREDKPYELRDKDGRLVSREEARKIILTRYQVPEEIRRERRRRKTPGSPRLQKKLREMLVPREHEAAVAPQSG

SEQ ID NO: 387300 - protein, 413 aa, unidentified
MEVLYRCCCGLEVHKKSITACVLWAEAKGRRKEKRTFGTFTQDLLRLLEWLKQCGVTHVAMESAGVYWKPVWNILEGQLDQVLLVNAQHIKAVPGRKTDQKDSEWIADLLQHGLLRGSFVPPRSTRELRDLTRYRVSLAEECNRISNRIQKVLEDANVKLASVATDALGASGGAMIEAMVAGEEDNEKLAEMSKGLLRNKRELLKQALEGRITEHHRFMLRQRLEDLRHAEGTMAKIEAEIDRRMGPFGEAVTRLKTIPGVERVTAWGLLAEIGFDLKQFPTSAHLASWAGLCPGNHESAGKRLSGKTRKRSHTLRRCLCQAAWAITRQKNHYLAAVYRRLAARRGGKRAVIAVAHALLVMAYHMLLRKLDYRELGPDYFDRLNQRHITNVLVRRLERLGHNVILQPAAGVFS

SEQ ID NO: 387301 - protein, 312 aa, unidentified
MSNYVTAIGLDVHARSISACAFDPMTGEVSRARFGYDPASVAEWALGFESPKAVYESGPTGFHLCRALRALGVDCAVGAVSKMHRPAADRGRKNDRRDAEWLARLLACRNVVEAWVPDERTEAARDLSRALEDARDDLQRARQRMSKFLLRHGLVFDETTPTGRRRSNWTEAYWRWARSIEFDEADDAAAYERYTDAVDRCGEAKRELERRVVEAASRPERAPTVDALCLVKGVDVATAFLLAAEAGDFSRFPSAPSFAAWCGLLMSIRLSPIPPTQSRRSRQRVPAVSADVRRRFRRPGPARGPSCDRTSR

SEQ ID NO: 387302 - protein, 346 aa, unidentified
MNQIIRIGMDTSKHIFQLHGVDAAEQAVLRKRLRRKEVLAFFAKLPPTVIGMEACGAAHYWGRELRKLGHEVKLMAPQHVKAYVKRNKNDGRDAEGLCEAMSRPTMQFVPVKTEEQQAALMLAGVRQQLIARRTQLSNAIRGYAAEFGVTAAKGLDKIEPLLARIAQDENVPALARELFAIEGREYAQVQAELKAIEAKLMAWHRANAASRRLAQIPGVGPIGATALVMKTPDPRAFPSGRHFAAWLGLTPKDHSTAGKTRLGKITRAGDEVLRSLLVAGATAVIQQVRRGRGRPSPWLVALLKRKPPKLAAVALANKIARIAWKLMTTGESYDGARMLGASALAA

SEQ ID NO: 387303 - protein, 386 aa, unidentified
MEHYVGLDVSLKQTAICIVDRTGKVQREGIVSSDPAAIAAFIKSYAPNVVRIGLETGPTATWLWTELRKQGLPVICIDARHAKAALKMQINKSDRNDAVGIACIMQCGWYREVRVKDLGSHATKALLVSRALLVKIKRDIENQIRGLLKNLGLVIGQAKMNVFAVRAAELADNRPSLIAAVEPLLKAREAVERQIADLDRNVLRLARNNEQVRRFMTAPGVGPITALCFLATIDDPTRFKRSRSVGAYAGLTTRRYASGEVDWTGRISKCGDKMLRSYLYEAANVLLTRVASGRRSKPGASGLRSEAGYAKPRLPSPESLPSSCTGCGSKVPNSSGHQRRLLVNLRSRTTEFPLTSGNQCPCRDAGVGAIAPGFAMLVKSKTRFTH

SEQ ID NO: 387304 - protein, 350 aa, unidentified
MIIIGADYHPGFQQIAYVDTETGELQERRLQHREEAEKFYRELAVQGMKIRVGMEACGHARWFERLLGELQFELWIGDAAEIRTRRVRKQKTDRQDAQLILRLMLKGDFPRIWVASWENRDLRQLLWHRHRMVQARTRIMNQLQAVALNEGLRSKKRLWREAGREQLAAIRLAPWASRRRRDLLELLDRLNPSIAELTEAVEQEAKKCPEAQRLMTHPGVGPLTALAFVLVIGTAERFRCGKQIASYLGLVPSEDSSGERRRLGHISKQGNSLLRFLLVEAAQVTVRSNPEWRRKFFHLAMRRGRKIAKVAMARRLAVGLYWMWRKEWNYEQLTKFGSHAGQPGNPHGVQ

SEQ ID NO: 387305 - protein, 368 aa, unidentified
MKKNISNKPRTGKGNRQEQEKEAFIFYIGIDLGDKHCEVCVMNPAGEVHQQFRLRMKGVDLQGYFLTIGRSRVAVEAGGQSQWVAELIQRCGHQVYVSNTRKVAYIYESDDKDDPGDAYKLAELVHFKPRLLHPIQHRSQALQADLSWIRAREALVESRTQLINTLRGISKAFGERLPKCSVESFTAKLAGEIPAAIRGAVAPLLETIDHLNEQIHYYDQMEEQIARERYPKYRLLEQVNGVGVHTALSYMLTIGDPERFQKSRMVGCFLGMRPRKQDSGESRPQLGITKAGDEYLRKTLVNCAHYILGPYGRDSDLRRYGLRICERGGKNAKKRAVIAVARKLSVLLHRLWVTGEAYEALRNGKKAA

SEQ ID NO: 387306 - protein, 317 aa, unidentified
MNTNQSAFHIGVDVGKHQLDFFCHETGDYFQVANSPDGIRKALKQLAPLSISRLVVEATGRHEQALVLAATRQQIPVVIAQPIAVRRFAGALGILAKTDKLDSRVIAQYAAMIAPPVRKLPDDKTRKLRDLGKRRQQVIGMLTMEKNRLQIMPAFLRADIRSSINALKRQLAKLDQQLLKLSEQVAAWRQRREIMESMPGVGVTVSTTLLSDLQELGTLNQKQIASLVGVAPMNRDSGRMRGKRRIRGGRAQVRTVLFMATLCAIQHNPVIKALYLRLLRNGKHKKVAIVACMRKMIVLLNAMVRDETYWIEMKNVA

SEQ ID NO: 387307 - protein, 370 aa, unidentified
MAKCSEVFVGIDTAKTRHAVAVAEAGRDGEVRYLGEIDSAPATVERMIKKLGSRYEKVHVCYEAGPTGYGLYRQVRALGHECTVVAPSLIPKKPGERVKTNRRDAVSLARLFRAGELTAVWVPDAVHEAVRDLVRARASAAADVRKKRQQLLSFLLRHGRVYSGGKHWTQAHARWLAKQAFEHPAQQIVFQDAIDAIEDCTGRLQRLGEQLQAIVPTWSMAPVVAAYQAMRGVSFEVAVTFVAEIGDVRRFDSPRQVMAFLGLVPAERSTGDNVRRAGLTLSGNQRARRALVEGAWTYRYPARVSARLQRRSEKLPKAIRDIAWKAQVRLCARFRRLAASGKKTPVIIAAIAREMAAFLWAIGQHVAPVS

SEQ ID NO: 387308 - protein, 344 aa, unidentified
MIIIGCDFHPSWQQIAWVDTETGETGEQKLVHADGEAERYYRQLSGPVRIGLESTGNCHWFVDMLTELGHEVWIGDAAKIRARQVRKQKTDRRDAAHILDLLMKNDFPRIWTPSREERDQRQLLIHRYKMVTLRVRVKNELQHLALNQGMQKGRSLWSKDGQKLLRELPLQHWAGERRANLLELLKTMDQKMVGLDLAVKKAAEENERARLLMTQPGVGPITSLAFVLTIGDATRFQRGKQIASYLGLIPREYSSAGKQRLGSITKQGNRFLRMLLVEAAQVAVRYDPKFRSEYLHRCHQKPKAVAKVAVARKLAIRLFWMLRTNKTYPEIVRIESSSRVPLGG

SEQ ID NO: 387309 - protein, 376 aa, unidentified
MEMHQVGIDVSKEKLNVALLLAPAFSKKKTKVVPNKPEGFESLIEWVQRQVKDQKPFRFIMEATGAYHKALALFLHDRGFQVCVVNPALIKHFGESMAARTKTDEKDCVIIAHYGAKMNPDPWTPPSPQYRALEQLLRRLDQLEKMIRQEKNRLEALGSGPADRDVFDSIEKMLSHFDKEYKELLKKIQDHVDRHPDLKEDLKLLTSIPGIGETTALRMTSVLEGGTRFASARQFAAYLGLTPRQNQSGIFQGKTSLSKMGPSALRKALYMPSIVACQRNPDVKALYERLLKAGKTKMSALGAAMRKMAHLAFGVVKHRQTYRAFFTSILEPEAGKEANPLAVGLLVHKPGKALSVKAELQRAEGQPLLKARPGYA

SEQ ID NO: 387310 - protein, 429 aa, unidentified
MSSNEKSNQNPPPAAQAVPAPEAWIGLDWGNKKHAFALQDRSGQSQRGFLEHSPENLHQWLRQIGQRYGGRPVALAIEASRGAVIHALLNYAWLTIYPVNPITSARYRVAFTPSGAKDDQPDADVLLELVRDHAAKLRPLEVQDPHTVKLTELVQVRRDIVDRRTQALNQTTSLLKTYYPQALELTGELNTGMALDFLSRWPDLISLKAAKPATIKRFYYQHNVRSTQRVQERLEFIQKAEALTTEACRVSVAVLQVRHLVDQLRAFGKHIALFDQEIHNAFREHPEAALYRDLPGAGPQLAPRLCAAFGTLRSTYPDPASLQKNAGVAPVRVKSGNQLWTHWRWQAPKFLRQTFVEWAGQTVVYCPWAAHYYERMKNKGKKHAAILRALAFKWIRILWKCWKDRKPYDEAAYLKQLSHRKSPNALPTT

SEQ ID NO: 387311 - protein, 343 aa, unidentified
MDTYIGLDVSLREISVCMDDEAGAIQLERTVAADPDAIAALVHAQASSVRRVGMESGPTAVWLWRELAQRGLPVICIDARHAKAALSMQINKSDRNDAAGIARIMQTGWYREVQVKSPHSHAIRGLLNSRSLLVKVQRDLENQVRGLLKSAGLIVGRAKDGVFSARTKQLLAAHIDLAAIALPLLEAREAIHQQLVHLERRVRQLAKEHRQTSAFMTVPGVGPMTALAFMATVDDPTRFRRARSVGAYVGLTPRRYASGEVDWTGRISKCGDTILRTYLFEAAGVLLTRVQKWCALKAWGLRLAKRSGMKKARTAVARKLAIILLRMWRDGTQFHWTAAPAGS

SEQ ID NO: 387312 - protein, 415 aa, unidentified
MIDLELQAERCAGIDIGKDEVVVRVHTPGPHGGRSRQTRTYATMTRDLLSLRDWLVEQGVTRVGMEATGVYWKPVFYLLEDAIAECWLLNPLHLKQRRRGRKTDVIDAGWICQMTEYGLVAPSFVPPSPIRRLRLLTRRRATLTSERSREKNRMAALLEDAGIKLGVVATDIFGVSGRHMIEAMIGGEGNPHVLADLALGVLVRKHPALIEALTGRFADHHALLAQQILDHVDYLDKAIGQLNDLIEVEIEPFRHQVDLLITLPGVGGHIAEVIIAETGGDMSVFPTAAHLASWAGVSPGLNSSAGKSKPTAAPQANKWLRGALGDAAFAASRTSTHLGTRFRRLSARRGRKRAVLAVSHSILTAAWHMITTDTPHHDLGPEHYTRHNDPTRRRRQLTTQLEQLGYTVTLTETAA

SEQ ID NO: 387313 - protein, 400 aa, unidentified
MLSIGIDVSKGKSTVCGMKPGGEIVYAPFEVQHTREGMSELVSLLRGSGEEVRVVLESTGSYHCPVVAALLENGIFVSVVNSLRMKRFCSQSIRRVKTDQIDAMQIALYGLAYWQELQPTKLPEDTYRELQLLARQYYQMTSLLIKAKVDFNAICDQVLPGMQELMSDHAGRHKLSDFVLRYHHTAHILKMGETRFRKDYCKWAEKKGYRNHERMAALIFATAQNGIPVLPNAPSTQIVITEAIRVLHTVEASRDAILTQMQALAKTLPEYSLVREMPCIGDTLAPRLIAEIGDVRRFHSKRALIAYAGIDAPPYQSGKFCANNRHISKRGNRYLRKTGYEVMQSYVMHKPANDPIFTFIEKKRGEGKCGKLAMVAGLNKFLRIYYGKVTELYRSLPAIE

SEQ ID NO: 387314 - protein, 414 aa, unidentified
MDVLHERCAGVDISKKDAKVCVRTPTAKRRGSFTTETTTWGSTTNAVLALRDHLLAAEVTLVVIEATSDYWKPFYYLLSEDLAVILVNARQVKNLPGRKTDVSDAAWLAQLGAHGLVRPSFVPDQPVRELRDLTRARTQLTRERGQIVQRLEKLLEDTGIKLAAVASDIMGVSGRAMLEALVSGEREPQTLAELAKRKLRNKIPELTEALTGRSRDHHAFLVRLHLDHYDQLTDAVGQLDARIEEAMAPFRGALDLLDTIPGINRAVAEVIIAETGGDMARFASARHLASWAGVCPGHHESAGRTKNTKVRPGNPYLKGALGLAAFGAVRTKDTYLQARYKRLTARRGPLRALVAVEHSIITAIWHMLTDHVTYRELGGAYFTQRDPERATRRAINALNQLGYTVTLNPLGTTA

SEQ ID NO: 387315 - protein, 372 aa, unidentified
MEERSKVFVGLDVHKDRISIGSAELGREAGRVVGGIAHDVPKLSKQLDKLGGPARVHVVYEAGPTGYGLQRALAAKGYECEVIAPSKMPRRPGDRIKTDRRDCVQLAECSRAGQLSAVWIPDPHDEAIRDLARAREDAIKTRQQQRQQLKAFLLRHDRRYSGKTAWSKTYYRWLGELNFAEVAAQTAFTEYWQAVQAGDERVQRLSQALRDAVVGWRFESVVAALQALRGIDVVNAVGLVAEIGDFSRFEHPRKLMAYLGLVPSEYSSGDKTVRGSITKTGNAHARRLLTQAAWNYRFKPRIGERAQQRQQKLDEAIRTLGWKAQLRLTRRFAALVGRGVQINKVCVAVARELTGFIWAVALRATPQPNART

SEQ ID NO: 387316 - protein, 343 aa, unidentified
MSIDTMIGVDLAKSVFQVHGASMNGEMRFQRKLSRQAFRTLMARHPAAAVVMEACGSAHYWARVLSGFGHEVRLIAPRYVRPFVKRQKNDAADAEAIVVAAQRPEMRFVEPKSEAQQSAAILYRSRQRLVRQRTETVNALRAALYEFGHVIPQGIQHVGRIHAILEAPNSDLPALMREECLAMLEQLAVLNGWIDTKTAKIKELAAATPVSKRLQTMPGIGPLVAMAVETFAPDMASFHNGRDFAAWLGLVPRQFSSGGKERLGRITKAGQADIRQMLIIGAMSRLNWMGRKSILESSWLARMMARKPRMLVAIALANKMARQIWAMLTKNEDYKNPMPVMAA

SEQ ID NO: 387317 - protein, 418 aa, unidentified
MPRFIGMDVHRDFAQIAIVEDGLVIDAGRVDCRPEALRAWADSLTRDDQIALEATGNSDAIATMLSEHAGRVVVSNPLKTRAIAEAKIKTDKVDARILAQLLAADFLPPVWLPDDRTAMLRRMTTARAHLVRQRTRIKNRVQAVLHRNLMPRPPVTDLFGKTGRAWLETLPLPEDERASVVSLLRQLDFLGVELAEADKAIAQQVLGDQAVRRLMTIPGVDVIVAVSIIAAVGDFSRFESPDKLVAYLGLHPKVRQSGNSPAIHSHITKTGRASTRGMLVEAAWIAAKAPGPLRAFYHRIKQRRGFQIAVVATARKMLVLAWHLVTKDEDYAFARPSLVAFKRRKLELTAGAPKAHARRGAGYDYNDKQLRKFERDLIEKSEHAYERLVAGWQPSRPAGADRIDFHPTPETEGAPTST

SEQ ID NO: 387318 - protein, 338 aa, unidentified
MNITRIGIDLAKHVFQLHGVESTGKVLVRKQLRRAQMLAYFSKLPPCLIGMEACGSAHYWARELSKLRHDVRIMAPQFVKPYVKSGKNDANDAEAICEAVSRPNMRFVPIKTVEQQVMQTEHRIRARLIRARTALSNEIRGLLAELGIIVPASMGKLRRAVPEILEDGDNGLPGNFRHLVARLGEELREVDDNIAVYDARMAQVAREDQRIKRLLDVEGIGPVVASALVSAVGDARQFSKGRDMAAWLGLTPRQHSSGGKNRLGKISKRGDTYVRTLLIHGARAALNAAKNKEDGRSRWVMGLVTRRNKNIATVALANKNARIAWSILSRGESYRVAA

SEQ ID NO: 387319 - protein, 346 aa, unidentified
MLHVGLDLSRKQVEGCLISDQGELTDRFTATPDREGLHGLASRVAVYGQPVRAVVESMNGARFVHDELIAHGWEVLVADAQKVKGLAPLACKTDKIDSRVLAELSFRDLVPAIWLPTMELRREREISRWRLHLVKHRSTLKNRVHSTLITFGHQRHMSDLFGVSGRRLLKELEIPEPWRSHADASLVLIDDLEARITAIAKELRRSGADHRYIPILMTAPGFGWITSFTVACEIADISRFPSPVKLTGYTGLCPRVKQSGQMDQRGPLSKHGPKYLRWGLMEAAIAASSHPLYRERYQRTKRRLGKQRGPKVAQIDLGRQLAEAIWYMLTRNQPFAPAGATFRLAA

SEQ ID NO: 387320 - protein, 355 aa, unidentified
MTGTKYIGMDVHKESISIAVRNDAGKLVMECVIETKANTVLQFIHGLRGDLHVTFEEGTWAAWLYDLLKPHVTEVLVCDPRKNALLKQGSKSDKIDARKLAELLRLKHLKPVYHGERGVRTLKELARSYLTITQDLTRVRNRLKALYRSWAIPCSGTQVYAPRHRSEWLGKITEAGVRRRAEHFYQQFDALRPLRQEVRRDLLTEGQKHKAWKLLRQIPGIGAIRATLLIALIQTPHRFRTKRQLWNYSGLGLETHDSAQYCVVEGQLQRSKKPLMLRGLNQNHNHDLKAIFKGAALEASSGAGPFHDFYEALLTKGRKPSMARLTLARKIAAIALTVWKKEVSFDAKHVKQQAA

SEQ ID NO: 387321 - protein, 317 aa, unidentified
MKKRPLCFVGIDVSKDQLDIACRPEDRRWHVANDSAGIADCLLQLRQLKPMLTVLEATGGWQGSLVAALAVAKLPFAVVNPRQVRDFAKATGQLAKTDALDAGIIARFAEAVRPTPRPLPDATMQHIDAVLQRRRQLLEMLVAERHRVALAHPAVRESLARHIDDLQRLIRETDEESATIIQASPAWREKDDLLQSAPGIGPVLSATLQAALPELGVLNQREIAKLVGVAPLNDDSGKRSGTRHIRGGRAEIRAVLYMATLTAARCNPVIKAFYQRLLARGKAHKVAITAAMRKFLIILNAMAKTRTPWNVSYQGCA

SEQ ID NO: 387322 - protein, 346 aa, unidentified
MVLIGSDFHPSWQQVSWLNRETGESGDVKLVHEPGAVEKFYRQFPAGSCVGMEATGNCQWFVELLASLGHELLVGDAAKIRASDARQQKHDKRDARLLVQLLAENRFPQIWVPSREQKDLRQLLIHRYKLVRIRAQVKNGLQHLAMNQGVLKKHKLWSKVGQRALCELPLASWASRRREDLLKMMSELDAKIDLLDQAVAEAAEKNENARLLMTQPGVGPITSLAFVLTMGDVSRFPRGKQVASYLGLIPREYSSGGHQRLGSISKQGNTFLRMLLVEAAQGAVRCDPEFRNEYLHRCHSKPKGVAKVAAARKLAIRLYWMLKSNTKYPEIVRVESSSRVPLVSAS

SEQ ID NO: 387323 - protein, 409 aa, unidentified
MRSFVGIDWSEKRHDVRVHNDKGACLARFQVPHSLQGFEKLEKRLKAVNPRAAACLVGIETQENLLVDFLCERGYPLYVVAPGTVNSNRGRHRASGAKDDDGDAYLLADILRTDRHRLVPWRADGALVRQMRLWLHGIDELTNSIVRANNRLRANLLRYYPQCLQAFENLQSHIALAFLQTYAAPTQLQALSYEDFWTFCRRQGYRHYRLLPEKYAHLQTPAPQVDPAIVTAHAAYSCAVAQQLQLLTQQKKKALQQVTSLFVQHEDAYIFDSLPGSGKLLAPKLLVMFGDHRDRYPQPTILQAIAGACPITRRSGKSQLVLFRRACNRRYRATAQQFAMSSLVKSPWAAGYFYRAKERGHSNSHALRALANRWLRIIWAIWQKREPYDESYHLQQLHHRRQPQPSTSA

SEQ ID NO: 387324 - protein, 338 aa, unidentified
MFIIGIDPHKGSHTAAVIDRDEQLVSEMSVQADRRQRDRLLRWAEPFEPRMWAVEGATGHGALFAQQLVASGETVFDVPAALSARARLLDAGHKDKTDAHDARSAAIVALRHRNLRTIVLEDHRQILRLLARRHHQLTAARTRAICRLHAVLCEMVEGGLSKNLSAKRASVEMRKLHPVDAIGIERKRIAVEFLDEVRRTDLALVELHGRINDAVNTSGTSVTQVFGVGSIVACYLIGYTGDVRRFATAGHYARYNATAPIEASSGPKVRHRLNPNGNRQLNHAIHIAALGQISHDSPGRVYYLAKQTEGKSRKEAMRCLKRRISDAVYRQLRADLTS

SEQ ID NO: 387325 - protein, 449 aa, unidentified
MVVPQEIEDEEYERVLERVAAVDVAKATGMVCTRVPHPARPGRRLTRVQVVDADTGSVMELADHLAAERIAKVTLESTSDYWRIWFYLLEAAGLDVQLVNSRDVSNVPGRPKSDKLDCVWQAKLTERGMLRPSFVPPAEIRRLRDYTRLRTDLTRERTRHWSRLEKLLEDALIKVTAVASKTGSKPVRDMVEALIAGERDPEVLAGLARGKMRARHDRLARALAGRFDDRHGELARVLLDQIDSLTAHIGKITGRAGELIAAMPGAWGVDAGGVTGPGAGLGAGAPVLPAVARLDEVTGIGAAAAQVIIAGVGLDMGVFPTPGHLVSWAKLSPRTIQSGAKNRPGRTGKGNPYLKGVLGEAAAAAGRTATFLGERYRRIARRRGKLRALVAVARSILVIVWHLLADPAARFRELGAGYHASRNDKNRKTRSHVRQLEALGYTVTLAQAS

SEQ ID NO: 387326 - protein, 401 aa, unidentified
MVSDFMKGRYNLMKIFVGIDIAKLNHFAAAISSDGEIILEPFKFTNDADGFQLLVSKLESFDKNSIIIGLESTAHYGDNLVRYLVAEFYQVCVLNPIKTCQMRKNNVRKTKTDKVDTFVIAKTLMMQDDLRFITFFDLDMMDLKALGRFRQKTIKQRTRLKIQLTTYVDQVFPEIQYFFKSGLHQNAVYALLKEAPSPKEIASMHMTHLANLLKVNSHGHFTKEQAKELRVLAQKSVGANDSAISIQITQTIQQIELLDSQLEKIEAEMTDIMKFNDSVIMTIPGIGYINGGMILGEIGDIHRFSNPNKLLAFAGLDPSVYQSGNFQAKTTRMSKRGSRVLRYALVNAAWNVVRNNATFKAYYDAKRAEGRSHYNALGHCAGKLVRVIWKMLTDEVEFNLE

SEQ ID NO: 387327 - protein, 410 aa, unidentified
MEVMFDRVAGLDVGKDSVTVCVRTPGPRGGRRSVTRTFKTMFGSLRVMRDWLVETGVTIAAMESTSTYWKPPFYCLEEVMEVWLLNAAHMKAVPGRKSDVRDAEWIAQLLEHGLLAPSFVPPPEIRRLRMLTRYRDQLMGDRVREIVRLELMLEDASIKLSSVVSSLKTVSARAMLTAMIDGESDPLRLADMAKGKLRRKIPDLAQALTGHFDANHARLARSMLRRLDLVEQALAELDAVIVDACRPWQRQIELLQTIPGVGPKVAQVIIAETGGDMSRFPTAAHLAAWAGLAPAMHESAGRQTPTGKRHGNKWLAAMLVEAAGSVGRMHGKNYLAAQHARLLKRRGMGRAQVAVAHSILIAAYWMLKRDEPYHDLGADWHRRRNDEAHTRRLVAQLEHLGHTVTLSPAA

SEQ ID NO: 387328 - protein, 346 aa, unidentified
MKILSLDLGNYKTVGCDYESETGGHQFMRSFTTPGALKKLVQAVKPDRVVIEVCSIAGWVCDLLRELGIEVQVANTSDDAWRWRKVKQKDDRRDALKAARLSAVNQLREVYIPQIEVRQWRALITYRQHLVRRRTKIKNHIRDLLLREGQILARGTKCWNQLGLAHLHSVARPLSEVSLAELWRGELQEELQQLREIQQRITVVEEKLNAIGAADARVQLLRTIPGVGPRLAEAIVALLDNPHRFRKASEVSGYIGMVPKRLDSGETERSGHITRQGSRLVRSLLVEVAWAGLRHNAWVRQTYQRLSGGKKARKKIAIVAVGRKLLVKCWAMLRDNCAWDWQPQMT

SEQ ID NO: 387329 - protein, 391 aa, unidentified
MIYVGIDVAKDKHDCFITNSDGEVLFKAFSIANNRNGFNDLYQKIETVMKDITKVKVGLEATGHYSYNLLGYLIDKGLPTYVINPLHTNLYRKSLSLRQTKTDKVDARTIASMLMSDVNLKSYSDTSYHNEELKSLTRYRFDKVKQRAKLKSSVSRLVCILFPELEKLVPTLHMASVYTMLSEFPDTKQVANAHLTRLTNLLSESSKGRYGKETAITFRNAARTSIGSNMPAKSLELKHTIKLIQELSSEIDEIENEIKLIMDEINSPILSIPGINYRMGSMIIAEIGDFNRFDSPDKILAYAGFSPSTYQSGQLDGAYSHMEKRGSRYLRYALYNAAKYVCNWDPTFAEYLAKKRAEGKHYNVAISHAVKKLVRVIYHLEKTNQQYIKAV

SEQ ID NO: 387330 - protein, 365 aa, unidentified
MIRNRTVVGLDVHARSVWACTVDDDSGEMKTLRVSSRTDEIVSWAKTLPGLVQVAYEAGPTGFGLARALIAAGMQCHVLAPSKMERPSAARVKTDKRDAEWIARLIRIGELPTVVIPSEGHEAARDLVRAREDVRGDLMRARHRLSKLLLRQGIVYEGSAWTGAHGKWLRTLTFERPGVRFAFDEGLDAVLTTSARRDRLDAQIALMAAEPAWAPIVGRLGCLRGVGVLTGFGLAVELGDWHRFTGKNIGAFVGLVPTENSSGDSRSQGSITKAGNGHARRLLVESSWHHRKPYRLSAEMIRRRDGQPPDVRARADQANRRLNQRWRTFDARQKRPTVAAVGVARELAGWCWSLAVMDGGKATAP

SEQ ID NO: 387331 - protein, 404 aa, unidentified
MWYTGIDWANAHHDALALDEQGRRVGSLRVDHTAKGLAALNAFLEQIIGSLPKEEMACIIETTHGLLIAYLLEQGWPVYPVNPRTVDRRRAASGAKTDPIDAYLLAKTGRADLADLHRLTPDSEKIAELKGLTRDQDALIQMQTRLVNQLTACLKAYYPVALELFGKLQQKCTLLFLQHYPTPQAAQAASVQQIQELLRSCRHPTARATAVAIVERVHQPALQAERVTIRTKSRLMLVLVSQLLPLIEQIAQYDKEIATLFLTHEDHELFESLPRAGQRLAPRLLAEIGDDRERYRDASSLQALGGTSPVLFQSGMYSKAHRRLGCIKPLRNVLQQFAWQTTQSEPWAMDYYQRKRSEGKSHTVAVRALANVWTRIIFAMWLHHSHYEAATFEHAQQHHARRAA

SEQ ID NO: 387332 - protein, 523 aa, unidentified
MATKTKSRGRRAGRFQSTAKPSGSFHPRVVAASPERFGIIAVDCAKARSKWMLADYYGRILVPPTEVEHTRQGFEEAVAHLKQAVETHGIRDIVAAVERTGVYHKPIQRALVAGGFETRIVHPLTTKQFRLPADPGNKTDDTDLLAIHRATANGFALREPQGDQTHGELQVLARCRRKLVRKNSTLRNQIHAELDDFLPGFSAAVGNIFDHEPALVVARHARSAQEIVALGIDGLAALLDAEQVGYHRPTLVKILAWARRSPQCGEFSRIHHQMFLLSDDERRSRLCTIARLERDMASRLARTPYVLLLSVPGINVVTAAELAGEMGPLANYLADGAITGRAGLFPSRYQSDKVDRCDGPLVGRGNRSLRYVLLLIADNLLLCNTYFHGLGESWRASGVHHRLQCVRVAKRFSRIAFRMVAGREAFRHPSCQDRHTILNKLISFHTAHETPMLDVLSDLRAAALEIPQREHAAEAVPLAAALAQASSRRRSGPCRLGELLPEVLATLGVTTVQSQSKGEPDLA

SEQ ID NO: 387333 - protein, 340 aa, unidentified
MTAHICGIDIGKTVFHLIGMSKEGHVVLKKRFTRKQLITHTVNMPACLIGMEACPGPHFLARVLKAQGHEIKLMPAEYVRPFVKSNKNDYVDAEAIAEAVQRPTMRFVPIKSEAQLDLQALHRVRDRWMGRRTAVINQIRGFLLEHGITVAVGPAHLKRRIPSILEDADNLLSLRMRTLLIELRDEWEKLEKQIEEVDREFAQAAKGEENCRRLLTIPGIGPLTATALTAAIGNGMAFHKSRDLAAWLGLVPRQHSTGGKSRLLGINKRGNPYLRRLFIHGGRAVVARVKRENHKFGSWIDHVEARSPRNVVVVAMANKLARIAWAVLSKGQVYCATACP

SEQ ID NO: 387334 - protein, 407 aa, unidentified
MQVYIGIDWSEEKHDIDFMNEAGADLACLCIEHKLEGFVQFDAARRKLGVAAQDCVVGLETAHSLFIDYLWSQDYQNLYVLPPNQVHSNQGRFRQSGAKDDRADARLIADVLRTDRGRLQRWCPDSLLTRQMRAQLSWVLQLNTQIIRLSNRLRAMLLRYYPAALEVFSSLTTQIAPEFVRAYPNPQAARALSYSEFQAFARQHRYPKPKQLPMRYAHLQDDYPETSPETVLIYQSQAVQLADLLLQTMRTRIQNMAQLQVWYRQHPKYAVFASLPGTGELIGPALLVKFGDDPQRFSHPSAVQALAGTSPITRRSGKQKTVRFRSACDKEWRYICQQWAMGLVNQVRSPIASAYYAKIRPHCHSNEHAYRCVANRWLAVAWKLWQTDQPYDETYHFQQRALRSKPH

SEQ ID NO: 387335 - protein, 481 aa, unidentified
MGWSDFFCEEEVREKRMRKAIGIDPDSKGYVCCLVEADGNRRSRKGYVTTVKDLESLLCWVKGEGEVIVAVEGSNGISRPVEQAFLKEQMVFYSLAPNDVSKFRKVVLGRNKNNEKDAETVARYALALQSQGKLEKFRRVWFPDDSLRLLTRGYERRSKELTAEINRMWKMLRYASPDLYLALSGTNPEVDITGKVLQQQGIVKLLEQKPNLYEWRNLSLDEFKNAMGGKTYRGREKLIAELQKLSASFRPTPPAVSLMIKNAAQTILQMRQHLNEIKKMIGELTRENRAVKVLEQIRGISVITSSTLMAEIIDIRRFANDDHLASYAGLGRSEYASGDRNRMIPNPQFNHRLKDGFITAAKNFVQNNPDSHLTGYFRNLVKKRKMKPNEAYKRVARALVRVIFRRLKSLVEDSSEEQKRSESDMASGLYVRSDQGHESNISLSAPTENDKAREGKIKSDKSNGKRKKMAAVKKCEKKHLT

SEQ ID NO: 387336 - protein, 349 aa, unidentified
MDRTTYGLDIAKNVMQLHWVEAETGEIGRKKLARAKLAAYFAQLQPVRIAMEACGSAHHWARVLGGLGHQVELLPAAQVRAFVRSHKDDAADARAIWVAAQQSDIRRVPQKSVEQQAVLALHRTRQHWVSVRTATVNSLRGLLYEFGVVLRGGRQAGLKALAEQRVAIDEQIPATMRTLVDGQLNTLEQIGQRIEQLEREIAALHKKLAGARELDRVPGIGVLGSTALAATLGDAKAWRSGREFSASLGLVPAHAGTGGKVRIGHLSKRGDPYLRTLLIHGARAVIEHAKDKPKWLEQLLARRPLNVAVVALANKMARTAWALIAHGRAYQRDWKSTRPGSGAAQAAAA

SEQ ID NO: 387337 - protein, 352 aa, unidentified
MQTQSNKLDFNGQNFYCGIDIHKKCWSVTIETDDITLKTFSQEADPEQFVKFLRRNYPGGNYIIGYESGYFGFNLQRYLSNQKIDCKVIHPADIPTTHKEKDQKRDPLDSRKIARALRTGEVDSIWVPPLYLEQDRQLLRVRRILTKDITRVKNRIKAILQIHGIKYPDTFERNGSHWSKRFIAWLESIKLDETTGTEALQVVVRYLNYLREEQLTVSRKIKSLAFTERYNAGYSELIKLPGIGMLIAMIILTEIGEISRFKSADNFRSFIGLIPRSHSSGDKDYQGRITNRSNTHLRALIIEATWSAIKKDPYYLNIYCNYKSRMKPNKALIRTARKLVNNIYYTLKRVNE

SEQ ID NO: 387338 - protein, 344 aa, unidentified
MPNHAATAVDIAKAVFEVAVSIQPGRVSERKTLSRPKFLVFFATRPATTIVMEACGSSHHWARQLQQLGHRVVLLPPSLVSPYVVRNKTNRTDAKGLLEAYRNEEIHPVPIKTLHQHTLTSLHRARSAWMQARTARINTVRGLLRELGVFLPAGAKKVVPLVHEYIGDAESDCPDALRPTLDTMCREIRDLEASIRDTEAQLERLAKDLPIVAQLLSIPGIGLLTATAVVAFVGDVRRFKDARRFASYLGLTPKEFSTGKKRRLGRISKQGNTYLRHLLIHGARSLLRAATTHKQHDRFRAWALAKVASRGPHKGATAVANKLARIVWAVWFRNDTYRSIPIAA

SEQ ID NO: 387339 - protein, 419 aa, unidentified
MSFKILKFNCCGLDVHKTWIYACIDITDSNNRTEYKQARFSSFTKGLNELCDWLAKYNCNDVCMESTGKYWIPVFNILEQHNLWVTLSHPKYTKPMKGNKTDRKDAKWICDLYMCGMVKPSFIPPADIRELRDLVRYRYKLTYMITGEKNRAQNCLTVSNLKLDDVFSDVFGKSSRSITEQILQHPGKTFDVTPFVDSRCKTPVEEIQAAVDGAISKEQVVKLRQCLDHIDELNRHISEVEQEILRLSDKYEAALNLIRTVPGFNKNPLTAVQVLSEIGGDMSVFPTAKHLVSWAGCCPHNDQSNQKIKSTRISRAGSYFKPVLVQVANALIKSKKHSEFTNRYKRIKARRGHKKAIIAIYRMILTAIWHILTDLKPYTPEVFLESRPVKKEKVLTVSQALNLLKQRGYLIKDELSANS

SEQ ID NO: 387340 - protein, 387 aa, unidentified
MPEDAPRPAQAAIRTDLGAIFVSLELSRRAWLVTSLSPGGGEKMSKHSVQAGDIAGLLRRFAQLKEKARARTGRDFPVITIQEAGLDGFWIHRVLQSEGIESHVVDAASILTSRRRRRAKTDKIDGETLVRTLLAYKRGEPRVCSMVKSPTPEEEDRRRICRERRVLVAERVQHTNRIKGLLFAQGAFDYEPLKRNRRAHLEDLKTGDGRPLPVNLKAQISRELDRLEVVLQQLQTVDAERDALLEPASEASPAPAAMLSQLKGIGPEFATILYTEGLFRGFDNRRQVAAYAGLAPTPWQSGSVDHEQGVSKAGNPRLRTTMIQLAWLWLRHQPDSALSRWFQDRVQRNGGRMRKTTIVALARKLLVALWKYATSGVVIEGAVLKAA

SEQ ID NO: 387341 - protein, 459 aa, unidentified
MDTRIIGIDLAVTAAHKAIVLDQTSNRFVSPVLTFHTDPAEMDRLLTTARMGASPDVQLVAVLEATAMSWFTVGVYLERQGVAVYRVNGQQVADLRKVYQRHAKSDRIDARVLARLYGTHPEQLHRVFLPTGPQMALQRACRELHRLTRLIAASKQRLLTTDQFAWLGLPDILPPYADVTRWLREQWYDPWRVYEAGETALANAWEAASPIQPADTAWIPALYERARQVMALYDDVHRPDYSLLQASVAREQARLKTVEEQAQVLRLKVVRPLYRQLHPTRHLETLRGVGQDSAAVYIAFIGDILRFPSLHDFRGWSGMIPFSRQSGEAQARGLHITQAGPDLIKATAFMDANVARLYDPQIAAIYYEQMVERGKHHLQAVCACATHLLDRIYVILKEDRPYELRDVDGQPVTRRQARTICMTRYHVPDEIRQRNNVRQRRARAEERTERRYQRRHKDE

SEQ ID NO: 387342 - protein, 420 aa, unidentified
MKVVYSTCCGVDVHKTFLVATIIKTTKGVQPSYQKKRFSTFNSDIRRFKQWLLDNSCFDVCMESTGKYWIPVFNLLEDQINVTIANPKWVKAVKGNKDDAKDSKWIGDLFRLGLVPGSFIPCKEIRILREYTRYRFKLTCCKRSEKNRFQNAFTVCNVALDAVVTDMFGKSASSITDYLITSDEFDPETCKSFLQKSLQKKADAVIESIEGYQMTSSQKERMLMVRSHLEFMQQSIDSLDSKLDELTAPYENAVSLLCTIPGVDRASAITIISEIGTDMTQFNSSKRLCCWAGLTPGNNESAGKKKSVRITRAGVYLKPALVQCAHAAVKSTATPYYKNKCERLAKRRGKKRAIIAIARMILTAVYHMLSTRETWNPCDLYKIDMPKEMQDKQKAKAVKQALKLLISQGVISPESAPTAV

SEQ ID NO: 387343 - protein, 358 aa, unidentified
MNKDSTLFVGLDLGDRWSHLTILDPEGEVVEESRVPTSGGAMQRKFSALAQARVAMEVGTHSRWVSQALRDLGHEVLVANARKLRVIFDNPRKGDRADAHTLARLARLDPKLLFPIEHRSPQAQADLDVLRSRDALVRARTLLINHVRGVVKSTGARVPAGSASSFPSKAAGSLPEALRPALSPILDTVRALNLEIRSYDRQIEDLCTSKYPECQRLRSIQGVGPITALAFVLTLENPRRFAKSREVGPALGLVPRRDQSGGQDPQLHITKTGNVFLRRLLVGCAQYILGPFGPDCDLRRWGLQLAGQGGKNAKKRAVVAVARKLAIVMHRLWKTGENYNPEHSSLEEASLIAIAQPA

SEQ ID NO: 387344 - protein, 310 aa, unidentified
MESITVGIDVSKDRLDVAVRPSGEAFAVERNAAGLEQLTIRLWELAPQVIALEATGGFETIAAAALAAARLPVVVVNPAQIRAFAKAIGQRAKTDPIDAAAIAHFAEATKPVPRPLPDDATRLLGDLVARRRQIIEMIGAERQREQRVTVPHLRQSITRLLKALEKELASLNTDIGDAVRGSPAWREKENLLVSVPGVGRVISSILIAELPELGQLGRREIAARAGLAPFTRQSGKWRGKSFIGGGRTAVRTALFMGAFVAKRHNPVLKAFFDRLVAAGKPKMVALIAVARKLLTILNAIIRDNRPWQIA

SEQ ID NO: 387345 - protein, 348 aa, unidentified
MLADQADHVIGVDTHRDTHTAAAVETQTGVVGESKTTSADSLGHKRMLAFAEEHAPGSRVWAIESTGSYGSGLTTYLLERGERVVEVDRPKRPARRSGAKSDHLDAIRAAKEALEREHPAQPRRRGEREAVRVLQRTREGAVRARSRAICHLKALVVTAPEGLRSQLRRLDDAALIPRCARLRTSPSQSTEHRMTVKALRATARRVLALEAEAADLESELELLVSRICPTVLAEPGVGVFSAAELVNAWSHAGRLRSEAAFAMLGGAAPIPASSGQTVRHRLNRGGDRQLNRALHTIVMSRLQHHPETQAYAARRAAEGRTPKEVKRCLKRFVARRMFRLLEAEVKMA

SEQ ID NO: 387346 - protein, 411 aa, unidentified
MIKENYVYVGIDLHKETHTAVMIDCYNQKLGEITFPNRPADFPKLVTKVKKCNTDGKEVVYGLENAYGYGRALAVWLIDKGYLVKDVNTAISHRQAKHRGAMYRKSDSDDAEAIALATLNMLDKLPDAYPNDAYWSLGQLVHRRDNIMKQRTRLVNQLHEQLCIAYPSYKQFFNDISRPTALYFWEHYPSRKYLKGKSVEDLRAELVPVSHNKCSTKTCEKILDAVASDKVKNNAYQDARDMVTLSIVSDLQHYDKQLAEVDKMLEQMYKMLGCTLTTIPGVNVITAVKILAEIGDIKRFSNANKLAQFAGIAPLHLSSSGKGKDLATKQGNRRLQATIYFLAIQMVQISSKGTPRNPVVRAYYEKRKAEGKTSQQALICISRRLISIIYGMLKSGTEYRMPVMENTGETV

SEQ ID NO: 387347 - protein, 342 aa, unidentified
MSEKRYIGVDLHRRVFTCCIRLESGRQFLSEWRLEQLSQFVKKLQATDEVAVEITGNTRLFYDAVAPHVARVVVVDANQFRVISQSVKKTDPNDARNLALYLAKGLLPEVRMKEKQQAQVASLTQTRDRLVKLRTALKNKVNNLLSARGMELEKEALSSEKGLTRVLNMEVEELTRFELQVIVEQIRSLNHSISELEKVIEQEGKKLKGHKNITSIKGIGSLGASILLSVIGDVRDFPKEGRLASYFGIVPRVHNSNETERSGHITKRGNKLGRTALVQCALIAKRYSPYLANYYERIRGRRGTGRAIIALARKLLGIIYHTLKNNWIFQDFPNFVLREATA

SEQ ID NO: 387348 - protein, 328 aa, unidentified
MDPTTTRTARLFAGVDVSKDRLDVCLRWNESERHEEEAFVVAYDHSGVDALVSRLLKERTVLVVLEATGGFERTVVGALAAAELPVVVVNPRQVRDFARAPGRLAKTDRIDASILARFAEVVRPAPKPLPDRELRALQGMVARRRQLLGMLAAENNRLSWATKPVAKRIKAHVRWLEKELSRTERDLEAAIESSPVLGENEALLRSVPGVGPVLARTLLAGVPELGTLTHKRLAALVGVAPLNRDSGTLRGHRSVWGGRADVRAALYMGALLVAARRNPVVREFYERLLAGGKPKKVALVACMRKLLSILNAILKYRTLWRSPHYLSP

SEQ ID NO: 387349 - protein, 421 aa, unidentified
MEQSQQPYWVGLDWSDAHHQVVIVDAQGTRTDGFRVKNTPEGYTELIARLRAMDGIGGVALETSRHVVVYALVEAGFTVYPVNPKLSAAWRNGWTVAGAKSDDRDAWVLAAGVCHHHTRLQPWVADDPSTAELKTRCETEMDLIAQRTAAVNQLQSLLKEYYMEALAWFVEWTSPAAWDFVAAFPTPQVLASAPAYKLQRFFTRRHMGLPAARQARIADRTRALNWPCPRDRAAALGVRAQYLVARLRLLETQVTQSGKHIAALFSTCPDAALFLSLPGVGPKLAPRLASAIGTDRERFRSAASLQQLSGVAPVTKQSGQHCLVHQRRACQKPFRNTMHQFAMCSLRRSVWARLFYRHLRAKRMSHARALRHLASKWMKIIYRTWQERTRYDELRYIDQLIRRGSPIADQLSLWKTRQENA

SEQ ID NO: 387350 - protein, 346 aa, unidentified
MKYYAGIDVSLESASVCIVDERGLIVREGKVASEPEALIGWLVKPGAKLELIGLEAGPLSQWLHGELSQAGLKVELLETRHVRAAFKAMSVKTDRKDARGIAQLMRLGWYRPVHCKSLPAQEMRALLVARKLLQKQLHAVEMSVRGILRNFGAKVGQTTARGFEGRVRTLVEGQPTLQAIADALLAGRTVLVRELAALEKRVRSAARHDDRVKLMMTAPGVGSIVGLNYVSAIDVPQRFRSSRSVGPHFGMTPTRYQSGETDISGRISKVGDGSVRSALYEAAHIILTKPVKNAGALKRWALAIAKRAGKKKAKVALARKLAVILHRMWMDGTPFDPTKAVGSATA

SEQ ID NO: 387351 - protein, 318 aa, unidentified
MSKRSTAYAGIDTGKDYLDAALHKRGDELRVKNTPEGHRALSAWLRKHRVKRAGIEASGGYEMDVVAHLRRDGFTVVVFQPAQVRHYAKFHLQLAKNDKIDARLIAACSAAREAEDIHDPPDERLAPLAAHLTWIDQIGEDVARHKTRLETCRDARGQAHGKQEIARYKKLQKAQTTLLEKEIRRHEDLARRLDLIESVNGIGMKTALLILVRIPEIGRLSREQVAALVGFAPYDDDSGSRHGERHISGGRKRVRAGLFAAALPASLRHNPLLKALYQRLRAAGKAHKVALVACARKLIIFVNTVVARGTPWQLQGAF

SEQ ID NO: 387352 - protein, 348 aa, unidentified
MYYAGIDYHKRYSVVSIQDAQGQIVQEERVDHQFPEVFQRLFRECPEPVSLVYESTINWGWLYEILEPVANVASITLANPYKVRLIAEAEIKTDKISARALATLLRLNVVPACHIPDQKTRQRKEVLRQRSYWVKLRTAVRCRVHKILGNQHDLSLPQVTDLFGRKGRAALDKALLPEPDATLLAQNLRVLDALDKEIGTDEQLIRQEGKADRAAQILASMPGLGLILANMIAAETDGIGRFGRSERYTGYSGLSPTVHSSGGKTHMGRMMQQCNRWLKWAFIEAAWIAVGCSPYFGGLYRYHRGRGKQANTAITIVARRMCHIAYQLLTEDRLYQERPFSPAALVKG

SEQ ID NO: 387353 - protein, 333 aa, unidentified
MKDLASYKNFIGCDVSKNTLDFAIHAKGTDYRQFIHVQVSNTKEGFAQFLKWLKTNKIRVKEAVVAMEHTGIYSEALSHWCDAKQLAFVLLHPLDVKNAYSRGRNKTDKVDSQFIADYTYTMREKLETSNVESPIINRLRQLYNERRLAVRTRTSYLNQIKTVTAPDAIRRMEKTITHLTNEIKLIEMELTKLIDEDKKIKNNFRLLLSIPGIGLINAVLTIISTGNFTRFQTSRQYAKFCCVSPLSRQSGTSVNGGEHVSCAGHSEIKGILTDAARSAIQHNWQLRAYYERKRAQGKSHGCVMNAVKFKLICRMFAVIGRQTEYADTEAFRS

SEQ ID NO: 387354 - protein, 347 aa, unidentified
MFPFYLGIDLHLKRTYLVLMDHEGEVIDKRRLKNTEIETYISRNVPKETYAVMEATRNWPFFYDLLAKHVDRVELAHAKGVRMIAAAAVKTDQIDASVLAHLARLNFLPIAYAAPKEIRDLRQHLRYREWLIDERRRAKNRIHAVLAGYNQASPVTDLFGRAGREWLKEVADKELRPTSRKVVLKTLTIIDQLDDQIKELAKDIPLPEDLKPKAEILMSMPGIGKLLSAVILAEIGDINRFNSPKALCNWAGLTPRVHKSDEVVRHGRISKQGSRYLRSAMVCAAMTTCRISPRWYGVYEHLARKIGRRAAKVAVGRRLLTVVYYMLKRNQPYEEDYEQRRAVEQGA

SEQ ID NO: 387355 - protein, 426 aa, unidentified
MAHYTHTHPRMKYTFCGIDSHAETHTAVFLDPFFELIGELTIPNIPSQFPQFLKDAEQFLIHGTTLCFGFEDHTRYGRGLVRFLLEGKHLVKCVSSNLVKSERDAQNVLKKTDSIDAECAARVLISRFDKLPLACINDDYWVLGNLVARRNMIVKTHTMMKNQLHSLLIDNYPSYKKFFCNIDGVAALAFYEHFSSSEKLAAVSADELHTFFHEHARGTLRPDKAKLILKLVSSDGARIIENQEIRDFNIQSIIRQMRFNQSELKRIDGQIKLFLKHFDHYPLTSMAGIDVATAAKIIVEVGNIDRFPTAATLASYAGISPVTHASGKGSVQFANKFGNRALKDELFHLAKRQIMPLGKTGLIINPHLYHYYQKKLKDGKTKRQALKALQRRLITILWKIMKYNRPYINPEPIKLKDLEEGATIHV

SEQ ID NO: 387356 - protein, 356 aa, unidentified
MEKLTTVGIDLAKDVIAVCVLDVRGAAIERRVFKREAFERWAEQLPASNVAMEACGSAHHWGRWFAARGHTTRLIAAEFVVPFRKGGKNDTADAEAVAIAARQPTMRFVPIKTVDQQAILAWHSVREGWKEERTALLNRMRGLLAEYGVVIARSADRFLAALPKLSEDNRLPDPVRALVLEAREQFAALHARLARCDAQIAAHARNSPAARRAGELLGVGPVTSSALAAMVPDAKVFRSGRQFGAWLGLTPRQHSSGGKTRLGRISLRGNVYLRTLLIQGARSTLQAAINTQPSRASRLQRWIIELYARKGYYKTLIAIANKHARILWAMLAKDERYDAAAWQRHPMHQPPLAGNA

SEQ ID NO: 387357 - protein, 264 aa, unidentified
MTSYVGVDVGKKTLHLYLPVVEQSFEFSNNQQGFHKLLKGINKYYKSLLDTIIVFEPTGGYERNLREFLKFNKVSFATVHPNKVRSYAKAKGWLAKTDYIDAKLLSDYATVFSLPIKQSYDSKTCENLHSLMQRREQLILLKNQETNRLETRFNQLITESINDHIAHLDKQLKQIQIAIEEVCKSDIEIQNKVSRLTSIPGVGITVATITICGAPELGNIEFKELTALIGLAPYAKESGNYKGRRSIFAGRGNLRKVLYVEVKI

SEQ ID NO: 387358 - protein, 343 aa, unidentified
MKVTTLGIDLAKSIFRIHGVDVRGAVVLRRQLTRKQVLPFLTRLEPCLVGMEACGSAHYWAHEIGKLGHTAKLMSPHFVTPYRKSQKNDGNDAEAICEAAGRPTMRFVPVKSGTQQDVQALHRIRFQLIKWRTALANEIRGLLSEYGIVVANGIAPLRRELPRILDDGENQLSGLAREMFGEMAERLKLLDQRIQQYDLKVERVFSHDERCQRLAKVEGVGPLGATALVAAVGNAHEFKNGRELSAWLGLVPRQHSSGGRNVLLGISKRGDRYLRTLLIHGARSAVRVVERRKDPCSVAISRLKARRGPNVAAVALANRNARVLWALLRRGEDYRPRATNAAR

SEQ ID NO: 387359 - protein, 421 aa, unidentified
MAGVVDIVYPICCGMDIHKNFLVACIAKTDERSNTTHQIKRFSTFSGELRRLAEWLAANNCKDVCMESSGKYWIPVFNALEKADINVCLTHPKYVKAIKGKKTDKKDAKWISELFKCDLVRSSFIPPPDIRQLRDLCRYYAKQTYMCSSEKNRAQNCLTVCNFKLDAVFSDVFGKSASRITEKLIEHGNADFDVAPLVDGRCKATIEEIKAALDGELTFAQTEKLKLIRQHMEQLNDLKSALENLIICLAEKYQPQITLLLTVPGISEPLTAIRILAEIGANMSVFETAKKLVSWAGLSPQNNESAGKKKTTRIARAGAYLKPLLVQCALAVSSSDKHPELKDKYQALKKRRGGKKATIAIARKLLTAIWHMLSKNESYNADLYRNADKPPVARVLTATQAVAFLRSKGFLIVDEETGEVA

SEQ ID NO: 387360 - protein, 420 aa, unidentified
MPATFSIPRTNDLERAMTAVMIGVDPHKGSHTAVVISPAEEPLGEIRVRASAAQAGKLAEWASAWPERTWAVEGAAGLGRLLARQLVAAGERVLDVQPKLASRVRLLQAGDTNKNDPNDALSVAIAALRSRTCREVAAEDHPAVLKVWSKRHRDLARLRNQVACRLHAVLCDLVPGGIAKEISAAQAARILGQATPSGAVEVARAELAAEFLEDMRRLDAQLRGTRKKLAAAVKVSGTTLTQVFGVGPVIAGTIIGDIADVSRFPGRDHFASYNGTAPVEVSSGNRKIHRLSLRGNRRINHAIHMAAITQLRHKHSEGRAYYEKKLAEGKTHKEALRSLKRKISDAIFARLQADARQAAAAAPKGPGGHPGNDSASSAAGSHPARQLFGQATPGPGTSLRPATPAGTPSKPVPRKTQATT

SEQ ID NO: 387361 - protein, 344 aa, unidentified
MPIVGGLDIHRKQITFDYLGTATGQVRRGQIAPADREHLAAWLADRFTGQDVHFAVEGCTGWRYVAEELAAAGITPHVAEPADTAALRGRKRHAKTDKTDSRHLRQLLADGRLPECWVPPSHVLECRALLETYHDLRAEHTAWTQRIHAALFHQGAPQLGGQRLRTGEGLAALQAIAAAQLSPAGQLQVAVALDKLAGLDRHLDVLRRRLLEAARQLAGARELQARLYGVGPVTALALVCWLGGAGRFSSARKAVRFAGLDITVYSSAGKRSPGHLSRQGPEVLRWCVYEAGKTHARGSAPDHGYYASVKDRIDGKRAALSEARKIIRQAVHILAELGDGALAA

SEQ ID NO: 387362 - protein, 344 aa, unidentified
MQIRSVGIDLGKTTFHLVALGTSGKVLVKKKFSQKQLLAFTANMQTSLIGLEACSGAHFLGRALRQQGHEVRLIAAQFVKPFVKSNKNDFVDAEAIAEAVERKNMRFVPIKTDDQLDLQAMHRIRDRLVSRRTAVINQIRAFLLERGMVFAQKPAKLKAAMADVLENAENALTPMMRNMIGILWDEWKTVEQQIDELTDRLEQIAASDAGCCRIRQIPGIGPIVATAIVAAIGNGSAFRKGRDFAAWLGLVPRQYSTGGKAKLLGISKRGNIYLRKVLIHGARAAAMRIKRDRFPIGAWMDALEARAPRNVLVVAMANKLARIAWAVLSTGEEYRPGAIAVIAT

SEQ ID NO: 387363 - protein, 324 aa, unidentified
MLPTLGIDISKDSFHVELSINHKLRHRRFANRKAGFVELGVWLAKYKATPVHACLEATGPYSEAVALYLHEQGHTVSIVNPAQIKAFGQSELLRNKDDRPDAGLIRRFCEKQQPAAWTPAPAHFRELQALTRHLENLLETRQQQLNRLETTTTKNVIKSLRKLVTHLDTEVQRIEQQIADHVDRHPDLKQQCQLLDSIPGIGKRTATRLLAEIENISQYKSARQVAAYAGLTPRNNRSGTMRGQTRLSKTGNARVRKALFMPAMVAKRHNPVVRSFCQRLARHGKNKMQLLGAAMRKLLHIAFGVLKSGKFFDPNHELLFNSGS

SEQ ID NO: 387364 - protein, 466 aa, unidentified
MKIYVLGWLGAIKLYPYHVPGSVFIVFMEPYRKELTMYNKNYISVGIDVGSAFSFMTIVAPDGSVIQKPFKITHNKPDSLEKAVSAIKKAEELHSLESRTFLESTGIYHFPLFCYLVDCGFHVSIINPIITHSANNTSIRKVKNDKVDSIGIAKLGLSGDIPVSQFPAKLVLEIRSLTRKYYDLTDERSAHINKLKGDLHTVFPQYLDTFCDVTGKTSTMILRQYGTPDKILRGHKKTMIEKISKASRKGLSKAAERYEKLCAAATAAKTFGCQIDSIYFNISLTLDLIEKLDSALDSILQRIHQLVTFNKSEKFIQQIKWLDTIKGVGFLTAVTIMCEIGDFSAFRNPKQLFAYFGLDPEVNQSGKFVGTEMHMTKRGSRIARRAVFAVALASIRTKRNGEGINPYLREYYEKKSGQKPKMVALGAVMHKVCNIIFAVLRDEKEFELRSPEEHCRQYQRPALQAA

SEQ ID NO: 387365 - protein, 402 aa, unidentified
MTATRPVTPAVFAGADTHADTIHVAAIDGYGRDLGDGEFPTTPAGYRDALAFLASFGSVQVFGIEGTSSYGAGLAVVARTAGIAVREVIRPEATVRRMQGKSDLIDAYQAARAAMTGRAKTAPKAEDVEGLRALLSTRRSAAKARTAAMNQIHAQLITAPVEIRERYRKLSDKRLIDALAACRPGSRGGVVATVLLGLKMLAQRHRFLGQQIELLDDQLRGLVAAINLNLISARGIGPVTAAQLLLTAGGNPERLASETSFAALCGTAPVPASSGKTTRYRLSRGGDRHANSALHTIATVRMASDPRTREFVATQRAKNRSNPEILRILKRAIAREVFKLLQNPNALTGIADLRRIRREKNLPIRVVVEQLGTTLNHVSRIERGVAFDREFTQRYRTWLQAA

SEQ ID NO: 387366 - protein, 339 aa, unidentified
MQVTTVGLDLAKNIFQVHGITDGDEVAFNRALRRAQVLPFFERLEPCLVGIEACGTSHHWARELINLGHTVKLIPPIYVKPYVKRGKSDAVDAEAICEAVTRPTMRFVEVKTPAQQAILALHRTRDLIVRQRTQTINMLRAQLAEFGIVFPQGVGHATQFAKRVLEGERPDLSEVACDVIAQLSEQLLFLHGKVAWYSLEMTRVAKREDRVALLQTIPGIGPITASAIVATVGTGRQFNNGREFAAWLGLTPLNRSTGGKERLGRISKMGDRYIRRLLVIGMMSRMRQIIQNPERYDPWFADILARKPGKVAAVAMANKTARMVWAVLTRNEPYKVRTI

SEQ ID NO: 387367 - protein, 351 aa, unidentified
MSHKTAATVVHTIGIDTGKNTLHLIGLDDQGAIVLREKIARGRIAARLANVPRCLIGIEAGMATHYVARELGALGHDVKQVPPAYSKPFRQGHKNDFRDAHAVAEAVQRPSTRCVPVKTDDQLDLQALHRVRSRLVGQRTAVINQIRGFLLEHGIAVRQGLRFLRQQLPDILAKRSDVLSPRMIRIMEDLSGDWRRLDERIEHITKEIEVLAGTDVNCGQLMTVPGIGPIVASATVAAIGNGAAFARGRDFAAWLGLVPKQMSTGDRTILGRITKRGNRYLRMLFVQGARAILLRPKSWVKHSFGPWLTTAARRLHRNILTIALANKLARIALSVLIQGRSYETRIVPAAA

SEQ ID NO: 387368 - protein, 406 aa, unidentified
MQEKRFAGVDWASEEHAVCVVDQDGRIVEGRRYRHDERGIGALCERLLDLGVELVAIERPDGLLIDRLLDAGPSVIAVHPNQVAAMRPRFSAAGGKSDNFDAFVLAELARTDSHRFRILVPDSDRTKALRAMTRAREDLVGTRVALANELRAQLECFWPGASKIFAELDSPIALAFLARYPSPADARGLGEQRLAGFLARHGYSGRRTPGELLSRLRGAAEGRAGELEGKARRQIVLALLAGLEPLVAQISDLTRQLRAALHDHPDGDTFRSLFIDPKSVVCAATLLAEIGDSRERYPTYRALAADGGQAPVAVESGKSKRARFRWACDHRLRDAIATMADASRHHNPWASDIYTRARARGATHQHAVRILGRAWCQVIWRLWHDHTTYDSAQHTARQRLSTAATT

SEQ ID NO: 387369 - protein, 421 aa, unidentified
MPNIEIGVDSMVKENFIYVGIDLHKETHTAVMIDCYNQKLGEITFPNRPAAFPKLVTKVKKCNTDGKEVVYGLENAYGYGRALAVWLIDKGYLVKDVNTAISHRQAKHRGAMYRKSDSDDAKAIALATLNMLDKLPDACPNDAYWSLGQLVHRRDNIMKQRTRLVNQLHEQLCIAYPSYKQFFNDISRPTALYFWEHYPSRKYLKGKSVEDLRAELVPVSHNKCSTKTCEKILDAVASDKVKNNAYQDARDMVTLSIVSDLQHYDSQLTEVDKMLEQMYKMLGCTLTTIPGVNVITAVKILAEIGDIKRFGNANKLAQFAGIAPLHLSSSGKGKDVATKQGNRRLQATIYFLAIQMVQVSSKGTPRNPVVRAYYEKRKAEGKTSQQALICISRRLISIIYGMLKNGTEYRMPEVENAGENM

SEQ ID NO: 387370 - protein, 353 aa, unidentified
MKKVLKQVAGIDVAQKELVVTFGILFEDFSIDLSAYKVFKNNDSGMKSLVEWVNKLRIPNTEVSFVMEATGVYHQKFAYYLEENACHVSIVLPNKISNYMRTLEVKTITDKSCSQALAQFGLERKLDAWKRPDEAYGQLQQLTRERDQIVLERSIIKNQLHAEKSQAVPHSKSLARMQQRIEFLNSQEKEIKNDIKTIVNHHPRIKQIIERVSTIPGVGNLTAVTVLAETNGFELIKNKSQLSSYAGLDVKEKQSGTSVKSNPRISKKGNKNIRKALHLPALAAVKWDDNFKNTYARLVSKHGIKMKALVAIQRKLLELIYILFKNETQYDKEYQTKNSVSTKLVQHATESSS

SEQ ID NO: 387371 - protein, 316 aa, unidentified
MDVASKTLEARVGQQGAAGSFANHPEGIAALGDFCRAHGADLVAMEATGGYEQQAFAQLSGQGLAVAIVNPRAVRQFAQSMGSLEKTDRIDAGIIAWYAEVKKSQPVCLAPENQQHLRALVTRLRQLTEMRAVQLNQQRLVTDRKVQASFKKLLTLLARQIGELEQGIAVLLERDPLWRELDQAFRTIKGVADRTVARLMAEMPEIGTLSNKTISKLAGVAPLANDSGKHQGKRAVRGGRAAVREILFIVASVVGRHEPDFIAFQQRLRAAGKPPKVVRIALAHKLLVRLNAKARQVRQAMASLEHRPAALEVESA

SEQ ID NO: 387372 - protein, 414 aa, unidentified
MSKTGKRMIVNSTAVIVGIDIGKYTHVAVALMPDGRFTRTLSLHNTREGYETLLERIRLWKDECGAGEVIIGMESTGHYWEVPARWLAGKELQVVLVNALHTKRAKEIEDNSPGKTDAKDSRIIAQLVRYGKYLNCVLPEGVMAELRELTRIRQHIVTELTQKRNYLRRLLDSVFPEIFTVFRKSWGKTFLHLARLYPLPEDLINAGLPAGAAKLKQSCRNLKIKKLERLHALAGSTVGVPVARGAYSSGIRNTAGRILTLQEEKTRVEKQMENLLAEVPESRFLLSLRGVGVVSAAIILGETGGLCRYTSSKEVIKLAGLNLFEISSGTHRGRVRISKRGRPLLRHILFILATVQAKKGMPLNGEYRALIERKMPPVKALIALSRKLVRLFFALTRDQRCYTETLSAVTTKAA

SEQ ID NO: 387373 - protein, 449 aa, unidentified
MKHKQVPTLVPEEIPDAEHELVIERVCAIDVAKAFGKVCVRTPRERRRVSKVWDVEATTGAVSELAAQLAELGIEKVTIESTSDYWRIWYYLLEAAGLDVQLVNARDVKNVPGRAKTDKLDAVWLAKLTEKGLLRPSFVPPAIIRQLRDYTRLRVDLTRERSRYWQRLEKLLEDALIKLSSVASTLDTLSARDMIEALIAGERDPRRLADLARARMKTKRPALIKALDGRFNDHHAELARMLLDQIDSLTAQINTLTARIGELLVAAGPSERDGGANLTGEPAPGSKLSTVERLTEIPGIGMTGAQIILAEIGLDMAQFPTAGHLVSWAKLCPRTVQSGPVTRGGKTGRGNPYLKGALGEAATAAAKTDTFLGERYRRIVKRRGKLKALVAVARSILVIIWQLLSDPTARFRDLGSNYHASRIKIERRMRNHIAQLAAMGYRVTLEPAA

SEQ ID NO: 387374 - protein, 368 aa, unidentified
MKEPITYVGIDAHARELHLAMLRWDTSEPSEWSSLNEPRAIERLRRRLEREAPGPIECCYEAGPTGYGLQRRLTAGRVQCRVIAPSLIPEKTGDRIKTDRRDARKLAQLLRADLLTTIQPPSEEAEAVRDVIRARDDARVDLMRSRHRLSKLLLRRGHLYPRTPWTGAYRTWLRRLEWPHAAEQHVVRDYQLAIDHLEARLAELDRVIADLARTPRYQAAVAALRCFRGIDTLIAMALLAELYDVRRFPHPRALMAFVGLVPSEHSTGERQQRGGLTRTGNTLVRRLLIQAAWQYHHHPRLGRALRQRREGQPASTLAIAIKAEQRLCHRYRRLCARQKPKPLVIAAVARELVGFIWATLQLPVTHHA

SEQ ID NO: 387375 - protein, 407 aa, unidentified
MDPMHHAPAFAGIDWGGHEHQLCVVDSAGHKELELRVTHDVTGLGELVRQLAKHGDRVPVAVERAEGLLVEHLQAHDYPVFPVSPRIAARARERYRVAPVKDDRFDAFVLADTLRHEHGHWRPLAVPSPLLAELRALTRDRDRLLETQQATEAQLRAILEAYHPAPARLFSSLDRQIALAFIADYPTPVVASRVRTTRMAGFLRRNGYTGRVPAQTLAERMRANLLSGSSGTVAGRAHSAKTFAHLLGAMNEALAEFDDAIASVVAEHPDAAIFASFPGVGPILTAVLLAEIGEDRRRYPTAQALLAESGLAPVTRSSGRSRSVRFRYAANRRLREAAMWWAFNSLKTSPWAAAAFRQARDERGQRYHRALRGLAARWMRVAWRCWQNNATYDPALHTGAAIAERSA

SEQ ID NO: 387376 - protein, 355 aa, unidentified
MKNKNLDFKGQEIYNGIDTHKNHWDVTIMLHGMQVAKISLDPKPIALAKYLRKNYPGGIYYSVYEAGFSGFWAHRELLELGIKNIIVNPADVPTKSKERRRKSDRIDSAKLARELSVGNLEGIYVPTVEEESFRNLVRLREQFKKDQTRQKNRIKSLLNFVGAKLPEDIDQKHWSKRYITALRQLPIEQPETKQTLNELLDSLENIRGQILRIVRQLRKNVNSKEDSKQIIELLLSVPGVGFITAITLYSEIIDMNRFKKLEELAAYVGLAPAVYSSGEKEKTLGLSKQRNKYLRNLIIEGTWTAIRKDPALQMAYGKLLNRMSSQKAIIRMSKKLLGRIRHVWSKKEKYVLSVV

SEQ ID NO: 387377 - protein, 465 aa, unidentified
MRTDKKLWRNRKARKELARRLQSENPGLEVIHPHAAGIDVGNSAHYVAVRPDRDAQPVRRFECFTADLHRLADWLETCGVKTVALQSTGVYWIPLYDILEERGFEVYLVNARHTKNLPGRKSDVQESQWLLKLHTYGLLNNSFQPPSKIRVLRTYWRQRAEHVSGAATCIQRMQKALTQMNVQLANVISDLSGVTGQLIVRAIIAGERNPRKLAELSHPRIQASRGVIAKSLEGNWRQELIFVLHQEIEMYDTYQRRIAECDQELQKHLTRFADTVPSPAKDEVPQKKKGKQNKNNPHFRLADELQRITGVDLTRIDGVNVMVAQTLVSEVGLDMTRWKTEAHFASWLGLCPDNRISGDKVLAPGTRHVVNRAATALRLGASTLLRSQTYLGAQYRRLRSKLGAPKAITAMAHRLARLVYRMLKYGQQYVDKGAEYYEQRNRQQQIEFLRKRAAQLGLQVTPVHA

SEQ ID NO: 387378 - protein, 461 aa, unidentified
MPDGGGEKSSTGRKKQIEGLPVVLRNVAGIDLGSERHWVCAPVAGGISREVADFGATTPELIRMTKWLQACGVESVAMESTGVYWIAPHEVLEAAGLDVLLVDTRQLARVPGRDKKTDPTDCEWIQRLHSCGLLRGSFRPREEVCMLRTLVRDKANLVAECGDWLRRMQKSLDQMNVRVHRAVSDIDGVTGMAILRAIAEGERDARKLAKLRDTRCHKSEEEIAEQLSGHWREDHLFSLRQALKMYDAIQQRLADYDREILQRLAAMQREELRQQPPPPVKNPQKAKNMKKRGEEPMREALFRMSGVDLTGIDAIGVETVQVVLSEYGPDLSRFPTEKQFASHVTLVPHKPMSGGKPVRKKRRNSASTRVAAALRMAAVTLRNSATALGAYYRKMARRLGGDVAVFATARKLATLIYRLLRWGQPYVDEGAEAFERRYQETRLKNLKAKVKELGYEMVASN

SEQ ID NO: 387379 - protein, 337 aa, unidentified
MKLYGGIDLHSNNSVIGLLDEEDQMIYHRRLRNDLPTILEVLEPHREKIQGLAVESTYNWYWLVDGLMEAGYRVHLVNTAAVKQYEGLKHGDDHTDSRWLAHLLRLGILPEGYIYPKEDRAVRDLLRKRGQLVQLRTTKILSIQTLITRNTGGRMNGNKIKKLLPAEVSELAPYEEVALAINSNLSVMQTLQEQIEILERAIQKKAKLRSEYAALKSIPGIGIILALTIMLETGPIQRFSKVGNYASYCRCVGSTRLSNGKQKGKGNAKNGNRYLSWAFVEAANFAVRYNDDIKAYYQRKQAKTNNVVAIKTVAHKLARACYFILRDQVEFDLQKAF

SEQ ID NO: 387380 - protein, 364 aa, unidentified
MPLYGGIDLHSNSNQSAVLGEDRKRIMKRKLANDPALILRFWEPYKADLAGIVVESTYNWYWLVDLLQENGYRVHLANPAAIQKYNGLKHTDDNHDAFWLAELLLLGILPEGYIYPKEVRAVRDLLRKRQQLRQLRTCLILSLQNIVTRNGGPKLSAQDLKTLKADRAQVYLQDFPELLLAGSANKACIDALTQQMARIEAVVETKLKLQEPYPQLLTLPGVGRILGSTILLETGPISRFSKVGCYASYCRKVNSRWTSNEKVKGHGNKKNGNKYLAWAFGEAAERARLFHRASREFYQRKLRQKKNAALAHGALAHKLARAAFYILRDKVAFQQEKMFGYPEVALGNVGRDGDPGVKLVKPED

SEQ ID NO: 387381 - protein, 370 aa, unidentified
MNNATTFVGLDVHARSIKACAFVPETGEVERKSLGYEPGELASWMKSLPQPAKCVYESGVTGFHLCRELRAMGVDCVIGAVSKMHRPAADRGRKTDRRDAHFLAVQLALGVVTEVHVPDPECEGARDLTRALADARDDAVRAKQRLSKFLLRHGRVYDERNAAGQRKNCWTRDFWAWVGRIDLGDPSAMATLDHYCECVHRADAEKAALEARVKSLAQAPRWKPACDALRCLKGVDAVTAASIACEADRFSRFERASGFAAWIGLVPSEHSSGESQCRGGITKAGNKHLRKLLVEAAWHYKSASRAPKGLAKGQSVPPDARRHANAGVRRLVDRRRAMDAAGKQSSVANVAVARELACWCWAVGRMTEGA

SEQ ID NO: 387382 - protein, 341 aa, unidentified
MKYIGLDAHSGSSFYVVKNRRGRIESQGSVATTEGALLQLIRSIRRPRKLIFEEGVVSHWLYLLLRNEVDDLIVCKPPERRGAKCDRVDATQLADDLRQERYVQVFHSDHGFMSLRDLVSAHVDVTQQLTRTKNRYRALYRQSAIATPDAQSFYADEALVEQLPEYKRMIALSLLRQMKVLIEEKNGFEDQFSGNVRANAVMRRLTTIPGIGATRANQLVAIIVTTERFADKYHLFSYAMLVKHEQTSNGRSYGSKRPLGQSLLKSVFFNAAVSALRSNNAFRRKYEIMSAMGIHPRAARQAVVRAIAATVFGVWKSGKKYNDDIREGLKKKTCQPAVQNL

SEQ ID NO: 387383 - protein, 405 aa, unidentified
MNAVGIDVSKGKSTVTIRKPGNVVLMAPRDIPHTQSAISALIEQIQSLEGDTKVCMEHTGRYYEPVATWLSDAGLFVSAVNPILPREYNDGTLRTPKTDKADSKRLAKFTLANWENLRQYSVMDKTRNQLKTMNRQFGFYMDQKTAMKNNLIALLDQSYPGANDFFTSPVRSDGSQKWVDFIYTYWHVDCVRSKTLKAFTEHYQNWCKRKGYNFSAEKARKIYAASLDLIAVFPKDETTKLLIHQSVSMLNAISRTVETLRIKMDELASTLPEYPIVMAMEGVGTTLGPQLIAEIGAVTRFTHRGALTAFAGVDPGKNESGQYVQKSVHTSKKGSPHLRKTLFLIMEGLIKRSPIDDPVYTFMDKKRSEGKPYLVYMTAGANKFLRIYYGRVKEYLASLEKSEES

SEQ ID NO: 387384 - protein, 355 aa, unidentified
MKYYTSTTEFNCGIDLHARQMYVCLMDRQGKKLVHTNVKDNDFAYFLKLIEPYKHSLTVCCECMFGWYWLADACQAAGLTFVLAHALYVRAIHGGKNKNDRIDSEKLTHLLRSNLIPPAYVYPAQQRPLRALLRQRIFYVWGRAQLLARIHCHQLAHNRIPAKQSRWTRDDWEERLLKAQIHPLRQLALQNDLAMIGHFDHQIFEVEKELYRQTKQVAAREYALLQTVPGIGENLGLTILYEIGDIERFPTVKDFLSYCRLVKGTVASAGKIKGLRGAKLGNPYLRWAFGEAAVIAKRDHFRIRPLAQRLEAQMQGNKFKANTVVAIKLARSVYFMLKNKTVFDPDRLVAALARD

SEQ ID NO: 387385 - protein, 314 aa, unidentified
MNTENQSEISIGVDVGKANLDIAIYPLERHFRIPNTVEAIQKILPLLKELQVKRIVLEATGRHEHPFVFACDQANLPVCVVDPVKVRRFAQALGIHAKTDKIDARLIARFAATMKPESKVIPDKQSRLIKDLLVRRSQLIEMRTMEKNRLQIMPKELHSSIKLMLKLLEKQLETLSEKIEQQVRQNQEWRMKTEILTSVPGVGKILAYTLLCELPELGNLNSREIAALVGLAPFNKESGRMKGKRSIRGGRPRIRTIMFMAMMSSVQCNPVFKQKYEHLKAAGKLPKVALIACMRKLIVILNTMIKNQQQWQLN

SEQ ID NO: 387386 - protein, 341 aa, unidentified
MNNNTTICIDLAKEVFQVAVFNQAGKARLNKEVTAKKMCLIIAQYPDAVIYMEACGSAHHWARRFTSSGHKVGLIPPHLAAKYRVGNKSDKNDVLSIYEASKNQQLHCVQIRTLEQQDIATLHKFREGYKKERNQIANRLRGFGREYGVNFALGINKLLKQVPMALEDAENEMTVVARRVIFRLLEQLRHVIMLMKEVTDEIEAIAKQIDACQRLVQLPGIAWLGASMIYAKFGSAEYFRRGRDASASIGLVPAHSGSGGKVTIGRITKRGDTYLRTLIINGARSLVIHIKEKTDGLSCWVRQLLSTKGFNKTIVAVANKLVRMATAMLKSGLEYRQPVAQ

SEQ ID NO: 387387 - protein, 316 aa, unidentified
MTDLACAAGIDVGRDHLDFSVAPQGHCWRVRNEPAGIATLVARLRRHGVIRVALEAIGPYAERLIQALAGAGIAVGAVDPRRIKAWRTAEGRLAKNDRLDAALIARFALLMPDIVRPVPDRESRALRALSTRRRQIVEMIAMEKTRLKQALDAEIAASHRSLIARLAEERQHIEAELEARLCAGEQAERFTLLQSAPGVGPAIAITLMADLPELDRLDRRALASLAGLAPQISQSGAGQPSAHIAGGRPCVRSALYLAALSAARLDHGYKAEYQAMRLAGKPAKVALVAIARKLLVALSSMARQNRPWQDKPPSKT

SEQ ID NO: 387388 - protein, 407 aa, unidentified
MLEVKVERCAGIDVGKKFIDLCVLIGPVNRKPAEEVRRFGTHVGDLEALRAWLKEKACTEVIMESTGSYWKPVFNILEGQFKVILANPEQVKALRGKKTDRKDCRWLAGLLRHGLVQPSFIPPRDIRELRDLTRRRRTLLQNGTQERNRIQKVLEDANVKIGNVLSDVFGMSGQAMLEALLENKLSPEQVADLARGSLRRKIPQIVEALEGHRMSEHHRLLIRQAFKHMQFIEEMIEELDKQIQEKLAPYQKQVELACTIPGIGSDAAASILAEIGMDMSDNGPFASCHHLASWAGVCPGNNSSAGKRKSGKIRKGNRWLKATMTQTAWAGAAKKNSAFQFRYQRLKARRGVKRATIAVAHAQLITLYWVLRNGAPYQQQRQDLERQQRESLIRHHLHRLAQLGHTS

SEQ ID NO: 387389 - protein, 438 aa, unidentified
MSNKVIFNLDELFISVGIDVGADFSWMSIALPNQQFVGKPYKILHNSIDSLATAVSKIKEAEESYSLESRIFLESTGIYHYPLFCYLRDKGFNCSVINPIITKNSTNINIRKVHNDRFDSKKAALVGLKPNLKVSLMPSDLALNCRNLSREYYDLMDNRSAYVNKLQGELRMAFPQYLGIFSKVTINTSLTLLETYTSPSAFLEADKQEIIDIIKSTARFGLTYAQNKYNAIIQAATDANQFGYIIDSNIKRIRLYISFIRKYDEAINSILESLHELVDANEDTDFVKQIHLIETFKGAGFLSAVSIMGEIGDFSAFSKPKQLFAYFGLDPAVKQSGKFEGTKVQMSKRGSAIARRVIHTLTLQSISISRNGEAKNPVLREYYIKKCDSKPKLVAMGAVSHKVCNMIFAILRDNKPFKIIAPHEHIKQYNAAKCDIAA

SEQ ID NO: 387390 - protein, 396 aa, unidentified
MRTMSERVVIGMDPHKRSATIEAMTADEVIQGGGRFATDRDGYRAMVKFARQWTDRVWAIEGCAGIGKHIAVRLLADGEQVLDVPPKLSARTRVFATGQGRKTDATDAHSVALVGTRMSGLRPVVNDEQLAILRILVDRRRSLGEDHTRMVSQLHQLLLELIPGGAKKDLSARQARALLAKVRPRDAAGKTRRRVAAELISDLERIYARKKAANKELTKLVAATGTSLLSLNGIGPSGAARLLVEVGDITRFPNKAHFASWNGTAPIDASSGDQVRHRLSRGGNRQINRVLHIMARVQIRNPSQGRDYYDRKKADGKAPMEAMRCVKRRLSDIVFQQMLNDAMQHSANTLGTGPGGHRGNDSDSSATGSHPHTGASDKSLPGPVRTQPKTPLPTAS

SEQ ID NO: 387391 - protein, 419 aa, unidentified
MQQLITTTSIYCGIDWADDHHDIAIVDDTGTVLASVRIDDTAGGLAILLELLATHGDDPAKPIPVAIETTRGLLVACLRGAGRPVYAINPMAVARYRERSSVAGRKSDALDARTLANILRTDAHEHRAMPEDSTLVQAIRVLARAQQDAVWDRVQLQNRLRSHLRQYFPAFLLAYEKMTGALSRPDAREILALAPTPARAATLTKVQLRAALRRAGRQRGIDPEVERIHTLFREHHMRHPEPVEKAMAHQCLALLRQLDAAALSCTELEQALVETFNEHPDSAIMTSFPGMAEISAARVLGEIGDDRSRFADARGLKAYAGSAPITRASGKSIFVQRRRVKNRRLADAGYNWTLASLRASPGARAHYDRRRQLGDRHSAAQRNLYNRFLGMLFHCLQTGTAFDETTAFKSPAQELELTT

SEQ ID NO: 387392 - protein, 332 aa, unidentified
MNKLFIGIDFSKKKVDVSVIEKENISSGVHREFSNDVAGHESLLAWLCDSYPQTGKDQMLFCGENTGLYSVCLSNTLAHEGYTLWLEHPYRIKHSSGMQRGKNDKLDSLLIAQYACRFEDMAKVYTPNTETIRALHSFFTFRDLLVKMKNEALVHAKELHSVLKGNHATDYIYQHSLTQVDNLNREIKDVEKEIMDLINSEEEIKNNYERITSIKGVAFVNALALIVYTENFTCFDDPRKLACYAGVVPFQRTSGSSVKSNAKTSGFANKKLNTLLTQAARTAAIHDPILREYYRRKREEGKHHNLVINNIRNKLIHRICALVRNQTFDQTA

SEQ ID NO: 387393 - protein, 379 aa, unidentified
MLPVSTLPESAVVSFASSAGVDLHKCTVSLDAVDPLGKSIARLTCSTKCVEKIDAFLAVLPRPSHLAVEAVGFVEWFIDRFRAGVDRIEIADATRLSDLRGKRRKTDRNDAHDIAVRLARGDCPLGFVAPEEVMQFRKLGRHWRCLSRSLSRAKHSMSSILLAANLKGPTLDGAGAQRWLLAHGHLLKDAQRDAFGDFVDLIELLERKRGVLKRKIIQANGSERFDGLITILRSVPGIDHIWACIIASEIGDFARFPNADALEFWAGMTPDNLTSAGRTTSGHITKAGNATLRWALCKAGVTLCRSDAKQEAIRQRLIAKIGKPRANVAMGRRLLRILYAMVRDGSLYQGQVKTGHEAKANIVRLKKIQRVKEGQMQTV

SEQ ID NO: 387394 - protein, 365 aa, unidentified
MKNYIFVGCDSHEKTLVNKIAHNDGPLESKKFGASRTGRQKLMEYLTERSRQAGGAQVVVVYEASGQGFILCDELTAAGFRCHVLAPTKIERSSKQKRNKNDDRDAARLLDVVRGHYLAGTHMPAVWIPDLQTRDDREPVRARQDLSEKQTRVKTQIQMLLKRHGMEKPEGVGTSWTKGYRHWVEAIGQNGPAMQSGLRQALTSLLRQLQFLEDEITRMDRALEELADTPRRKPIVEELLKENGVGVMTALKYVTDVGDFKRFRRGRQVGAFFGLAPSSHESGESQDRKGHITREGSPSARKILCQATWNRVQHDKGERDVYQRLVDRNPKKKKIAVVACMRRLAVRLWHIGLQAQLRMEATAQQ

SEQ ID NO: 387395 - protein, 366 aa, unidentified
MKKTSTVRVNGNMIFKGHKLTIGLDLGDRWSFYCVLDEAGEVLLEQKVPTTPEAMKQTFSRIPQSRIALETGTHSPWVSRLLTELGHEVIVAHAQKVPWITKSNRKDDRHDARTLARLARIDPELLGPVRHRSVQAQIHLTVIRARAELVSARTALVNAARGLVKSYGQRLPKCGTQQVSRELAAELSTELRDVLEPLLKEVESLNERIKEYDERMEKIAKQVYPEVSLLKQVKGVGTQIALTYVLTLEDPHRFPKSREVGCFLGLRPGRRNSGESEPEKRISKEGDRYLRTMMVQGAHYILGPFGQDSDLRRWGLKLAERGGKNAKKRAVVAVARKLAVLLHRLWVSGEVYEPLRNSHKAMRAVA

SEQ ID NO: 387396 - protein, 361 aa, unidentified
MIVIGADTHKVSHTVGAVDAATSRVLGDKTVAAKRRCFDDLLVWARGLGGERVWAIEDCRHVSGALERFLLVRGEHVVRVPPLLTADARRWARERGKSDLIDAVGVARAAIREGLDALPVAHLAGPELDVRLLVDHRERLVGQRTRLINDLRWNVHDLWPELQIPARALIGAGWQERLARRLAKAEQNTRVRIARDELRRVRELTRAIDALRLELAALIAQLAPQLLAEPGCGVLTAAKLIGEIAGITRFTTDAKLARLAGTAPIPASSGRSTRHRLDRGGNRQLNCALHRLAVNKGRYDPPTAAYLTRKQAEGKSRREALRCLKRHLARRVWQLLQPAPTQPHRTITIHCNTPTDRFSLT

SEQ ID NO: 387397 - protein, 346 aa, unidentified
MNATTYGMDIAKNVFQLHWIDPASGEIHRKKLTRVKVSEFFAQREPARVVIEACGGAHYWARTLSALGHQVELLPPHQVRAFVTGNKDGAADARGIWLAAQHADIHRVDIKSAQHQAQLATHRVRSHWVSIRTATINMVRGLLYEFGVVLPKGKNVALRWLAEQRSQVDALLPTSMQQLLDAQLQALREVDLHIVEADRQIAASIDPNATRLQRTPGIGPLGATALSATLGDGSSWHNGREFACCLGLTPRHTGTGGKVHMGGITKRGDAYLRTLLIHGARNLVRVPNPPDWIAKLLQRRPINVVVVAVAHQLARIAWALVAHGRSYNPQWKSTPPIARREVTMAD

SEQ ID NO: 387398 - protein, 350 aa, unidentified
MIIIGVDFHPEFQQIASVDTDTGEFQEKRLTHREEAEKFYRALAGAGQKVRVGMEASGHARWFERLLAELQFELWIGDAAEICTKRVRKQKTDRQDAQLILRLLLEDRFPKIWVPSCENRDLRHLLWHRHRMVQARTRIMNQLQAVALNEGLRCKKRLWRESGREQLESFRLAPWASRRRQDLLELLDRLNPMITELTQAIEQEVEKCPEAQRLRTHPGVGVLTALAFVLIIGRAERFQCGKQIASYLGLVPLEDSSGKRRRLGHITKQGSSMLRFLLVEAAQVTARSIPEWRSRYFHLMMRRGRKIAKVAMARRLAIRLYWMWRKGWNYEQVVRFGSHAGQLGTGDGVQ

SEQ ID NO: 387399 - protein, 353 aa, unidentified
MRTYYVGMDVHGASIVIVVLDGAGKIVMQTVIKTSAELVRGYLKQLRGKVYVTFEEGTQAHWLHDLIRPLVTEVVVCDPRHNKLMRSGNKSDRVDAQKLAELLRLGALKPVYHGDHGMQELKELVRSYDCLVSDSTRVMNRLKALYRGRALACPGHDIYRQDQKQQWLAKLREPGAKQRADLLYQQLAGLKPLRHEAKRLMVKEAKRQTAYGCLKSVPKLGAVSVAQLLAIVGTPHRFRSKHQFWTYVGLAVVTRSTADHEVVDGVLRRSKRPAATRGLNRNHNHVLKRVFKNAALSACHSGPFQAGYEARLQQGMATSLARLTIARQLAATTLAIWKRGEQFDAARRAKQVA

SEQ ID NO: 387400 - protein, 304 aa, unidentified
MNGIGIDVSKRQLDIGTTDGETLQVSNNRSGFSELDVWLKKRPTRQIVLEATGGYEQPVLDFLHKAGHPVVRANALRARKLAQGLGQTAKTDRLDAYALAQMAALVKLPPYQPLQPWQQKMREFVRARRQAMDALTIARQQQEMVLDRELRRLLQGNITRLQTLVERLGKQIVEQVGQQPQLKMLKSMKGVGPVLQAVLASYLPELGRITGKRIASLVGVAPMSHDSGTMRGKRSIHGGRAEIRQVLYMAAMSAMRHEPRLRDFYQSLRARGKEGKVAIVAVMRKMLVILNARVRDAESGLVPA

SEQ ID NO: 387401 - protein, 427 aa, unidentified
MVISWITHDVSFSTRLHSTNSSVEQSSVNYNDEGVTTMIYVGIDVAKDKHDCLISDSDDVILFEPFTISNNSFGFDELFSKLETCSESLSGIKVGLEATGHYSDNLLEFLISKGLNTIVINPLHTSLYRKSLSLRKTKTDTVDAHSIVTMLRTESLKPYSQTSYHVRELKSLTRYRFSLVKDCSRLKTSYARLCVILFPELEGLLPSLHMVSIYALLSELPSAKAIADCHLAHLISLLSKHSKGHYGKDKALEIRNAARNSIGTHSQVKSLELQQTIALIQMMEKQIIQVEAKINPIVDSLHSPIMTIPGISYRMAAIIIAETENLTNFDSAEQVLAFAGLEPSVYQSGQLTSTHAKMVKRGSKYLRYALFNATKYVCRWDEHFGQYLAKKRGEGKAYNVAVSHASKKLTRVIFHLVKTNQVFISRA

SEQ ID NO: 387402 - protein, 409 aa, unidentified
MGAFCGIDWAESHHDVAIIDADGKVLGRKRITDDAAGFTELLNLLADTGDSGEHPIPIAIETDRGLLVAALRATRRPIYAINPLSASRYRSRHQVSGSKSDAADAVLLANILRTDAAAHRRLPADSELAQAIRVLARAQQDALWARKQLGNQLRSLLKDYYPAALHAFADLAGGLARPDARTVLAAAPTPARAAKLTRAQLRRLLVKAGRQRNLDTEVERLRNVFRAEHPHQPSMVENAMGIQFAAILHMFEAACVAEHDLAEETKAHFDRHPDAKILTSFPGLGQLSGARVLSEIGDDRTRFTDARGPRAYAGSAPITRASGKKTLVLHRHIKNRRLAGVGPMWALASLRASPGARRHFDARRAVGDWNHQAQRHLFNKFLGQLHHCLRTGSLYDEHRAFPAPFAVAA

SEQ ID NO: 387403 - protein, 410 aa, unidentified
MELLYPHCAGLDLHKETVVACIRHMVNHTVTTLVKTFKTTTQELMALSDWLSEEGVTHIAMEATGVYWKPVWHILSDGNFSLVLANAAHVKNVPGRKTDVNDATWLADLMAHGLIRASFVPEEPTQQMRDLLRTRKQFVRERSSHTQRIQKTLEDANIKLDSVISNVAGVSGRRMIEALIASQTDPEALAALADGRIRATAAELEAALRGRVTAHHRFMLRLHLDHLDAVDAAIFRIDKEVEGNLEPFRVACEMLTTMPGVGALAAEVIVSEIGIDMSRFKTEGHLISWAGLCPRNDESAGKRRSNRMKKGAPWLKTTLIQCAWAATRVKGSYLQAQYLRIRARRGAKKAVGAVAASMLTAAYHMLKDGTLYQDLGTNHLDNREKGKQALRLVNRLQSLGFAVQITSMAA

SEQ ID NO: 387404 - protein, 376 aa, unidentified
MNEFNQVYVGLDVHKDTIAVAVARSGRGEPVYHGAIEHSPAAVAKLLKRLSPQGEVLHVCYEAGPCGYGLYRQLKALGHGCEVVAPSLIPRKAGERMKTDRRDALMLARLHRSGELTGVWVPDEEQESLRDLSRAREDMKSIELKARQRLGAFLLRHGKVYAGKSRWTQAHWRWLEGVKFNLPVQQLVLQEYIDTVKSSQRRVADLEGQMRGALDSWSLGEVAKALMALRGVSLITAVTTLAELGDITRFDSPRELMGYLGLVPSEHSSGNTRRQGGITRTGNGHVRRVLVEAAWNYRFTARKTACIERRAEQTSARVQAIAWEAQKRLCGRYRTLLQAGKEKKQVTTAVARELAGFIWAIACEALGKAHGSKALA

SEQ ID NO: 387405 - protein, 412 aa, unidentified
METLIRRCAGLDVHKASVVACVRAIDENGELLSFTQSFGTTTSDLLKLNDWLTSYEVKVVGMESTGVYWKPVYTLLETEFECWLLNAQHLRNVPGRKTDVADAAWIAQLVAHGLVHPSFIPPKEIRELRELTRYRKTVIQDRSREAQRLHKTLEGAGIKLSSVATDILGASGRAMLEGLIGGTHDPEILAELARGRLRKKLPALRKALAGWFSPTHRVLVSELLAHLEYLDESIERLSNDITALLAPFASAIDLLDTIPGVNRRSAEVLLAEVGPDMSRFPTSGNLASWAGLCPGNNESAGKRFSGKTRKGSKWLRTALVESAQAAARTKGTYLASQYARIKGRHGHNKAVVAVAHSILVIAYHILQRREPYNELGGDYFIERQNKDAYQRRLVKQLERMGYDVTLETKPAA

SEQ ID NO: 387406 - protein, 339 aa, unidentified
MQLYAGLDLHSRNTYIGIMDKEFKRVFNKRVANKLPLILATLKPFQNQLKGIVVESTFNWYWLIDGLMNAGYHCMHLANPAAMKQYEGIKHTDDQHDAFFLAQMLILGILPQGYIYPKEDRPVRDLARKRLFLVRHKTSHILSLQSLIARCSGQRVSANEIRKFTVEDLQRLLEQEYIVLSAQANLDTIVFLKQQIRQLEKAIQKKVKLSKSFQQLMTVPGIGLILAMTIMLEVGDIGRFPQVGNFASYSRCVSSQRLSDGKSKGHGNRKNGNRYLSWAFTEAAHLSRRYNERFRSYYNRKVAQANTSLATKALSNKLARICYYIMRDQVPFRENLLSQ

SEQ ID NO: 387407 - protein, 350 aa, unidentified
MAKVMVARNEGIVVGVDTHRDVHVAVALSGVGANLGTTSVPTKVAGSSELLRWAQALGPIVAFGIEGTGSYGAGLTRWLAAHGQTVLEVDRPDRRARARDGRSDPLDAEVAARAVLSGKATGVPKSGVGAVEMIRALRVARRSAMKARTQAANQLVALVLTAPPEVREVLRPLAVPRLVEVAGRFRPGPLVDPSAAVKTALRHLARRHAALSAEIAELDHDLGALVALAAPGLLAINGVGVEVAGALLVTVGDNPERLGSEASFARLCGAAPLPASSGLTTRHRLNRGGDRQANNALWRIAIARMRRDGRTQEYVVRRTQEGLSKREIIRCLKRYIAREVFTALKGVDGP

SEQ ID NO: 387408 - protein, 370 aa, unidentified
MEQYTEAFVGIDTAKNKHALAIADPGCDGEIRYLGEIDSAPAAVQRMIRKLAGHYEKLYFCYEAGPTGYGLYRQVRALGHDCIVVAPSLVAKRPGERIKTNRRDAVTLARLLRAGDLTPVWVPDAAHEGVRDLVRAGTAASEDLRRKRQQLLSFLLRHGRIYSGRKHWTKMHLHWLAQQKFDHPAQQIVFHDAVDAIEDAATRLRRLDQQVAEIVPSWSMAPVVEAYQAMRGVSFGVAVTFGAEIGDLRRFDNPRQLMAFLGLVPSERSTGERVWRAGLTLAGNKRARRVLVEGAWSYRYPARVSQTLQARLEGLPKTVRAIDWKAQLRLCARYRRLTAAGKKRPLVIAAIAREMAAYLWAIAQHVAPAA

SEQ ID NO: 387409 - protein, 391 aa, unidentified
MIFVGIDVAKDKHDCFILNSEGTVLADVFTIANNRIGFETLLSRIQSCSQGESKIKVGLEATGHYSYNLLGFLLDSGLTTYVINPLHTNLYRKSLSLRRTKTDRIDARTIVMMLMSDVDLKSYSNTAYHNEELKSLTRYRFDKVKERAKLKSSVARLVNILFPELEKLVSSLHIAVVYALLSNYPGASYIANANTEELAETLCTASKGRYTKSKTAEIQVAAGVSIGSKMPAKSMELKHTIALIRELDKEISEVESAIDKITSQMDSPIFTIPGIGRHMGAMILAEVGDFSNFASADKLLAYAGLSPSTYQSGQLQNCYAHMEKRGSRYLRYALFNAAKYVCLWCPTFSAYLEKKRSEGKHYNVAISHAAKKLVRLIFAMQRSGKAFLADY

SEQ ID NO: 387410 - protein, 455 aa, unidentified
MPKRTTGDRPELKQVNVGAAAIDIGSKMHMAAVDPTCADMPVRAFGTFTQDLHDLADWFKACGVTSVAMESTGVYWIPAYEILEQRGFEVILVNARYAKNVPGRKTDVSDAAWLRQLHSYGLLRGSFRPDAEIATLRAYLRQRERLVEYAAAHIQHMQKALMEMNLQLHHVVSDITGATGMRIIRAIVAGERNPDVLATYRDVRCHSSIETIRAALVGNDRDEHVFALTQSLELYDTYQAKMLDCDRKLESMITALTDKGAKTVGKLSRPRVKTKQVNTPSFDVRTALYGVLGVDLTEIHGLGPSLALKLIGECGTDLRAWPSAKHFTSWLCLAPGNKISGGKVLSSRTRRSSSRAAALLRLAATTIGRSGTALGAFYRRLSSRAGKAKAVTATARKIAVLFYNTLRHGMAYRDPGADHYEEQYRSRVLANLKRRAKSLGFVLQAVPCDAEVAVS

SEQ ID NO: 387411 - protein, 361 aa, unidentified
MKKSIPMMMRSVPAAHLSLGVDLGSEESVFCVLDCAGEVVLRGRFDMSPAELKLAVAGLEGSVVMLEACNQSSWVARVLRTMGHYVIVANPRKLKLISASHLKTDRLDAEILARLARLAQLDARLLQPVSIRTPETELLRSELRVREQLVATRGRFVSLARSIVKSQGIRLPTMSPSNFATRLAEMDLPAAVRLPLEPLLPLIAELTRSIAEMEARFRKVAAEYPATALLREIDGVGLLTSLAYVLCIEDPKRFARSREVGPYLGLVPIVRQSSKTERRGRITKMGDSGMRRLLVQAAHLLLMSKKDSALKAWALRIKERQGRKKAVVALARKLATVMHQLWVSGSHYERFPALSVKEAAA

SEQ ID NO: 387412 - protein, 345 aa, unidentified
MNITAVGIDLAKNVLQVHGVDARGKVVLRRQLRRDQVVLFFANLPPCLIGMEACASAHHWGRTLERFGHSVRLMAPQFVKPYVKTNKNDVADAEAICEAVSRPNMRFVPIKSVEQQAVLSLHRVRQGFVKARTAQANQIRGLLGEFGLVIPKGIWHIAPRVPALLEDASNELPLALRQLIDRLTCHLKELDHQVRELEREILAWHRSSDLSRKLEQIPGIGPLAATALVASIADARSFDNGRQVSAWLGLVPRQNSSGGKSTLLGISKRGDVYLRTLLIHGARSAILAARRRNDNKNGWLANLLNRRHPNIAAVALANKNVRTVWALLAHGRNFKPDYVPARAAT

SEQ ID NO: 387413 - protein, 604 aa, unidentified
MLPQHAPASPAPTSADLPPARIGVGIDTARYGHYAAFLRPDLQPAAAELLFAESGDGYHELRQRLELIAQRLGNAHFVIRLDAAGQYADNLLHFLHSLRTPDAPGADALRLAAFTISCGDPQRNKNYRAALFGAKKSDPVEARAAARYALSERPAHTPPMSTELRLLRQVAGRLQATVRQRTRAINQFHHLLALAFPELALLVKDVSIGWVLELVHRYPTATLLAAAAPADLAAIPYLPDRHIEPLLARARASVASTAGPTMEELLRDQVRQLRDVHARQKRLENTMIQAYRRLPAPNYSDTIPGIGAVTAAVLTAFILDIDRFETVNKLTAYFGVIPYEMSSGVDRDGQARGPRRYVMSKRGNDLVRRYLWMAALSAVRFNPAARALYARVVAKHPTRKAVAVGHVMRKLLHLVFALWKSGKPFDPNHYAWEPPAAAAASSDKALSPEAGSDDALSVNEQAAGHKPESKPAEQVVAAACVPTVAQSEIGAESLAIDFAHLKRQLPLARVLEHMGLSTRLARGDGPQRRCACPIHRGDGRGRTFSVNLDANVFHCFAKECGAKGDVIDLWSALHHLTLREAAIDLVQTFQLEPAPTRGTEKRNG

SEQ ID NO: 387414 - protein, 340 aa, unidentified
MTITTVGIDLAKNVFAVHCIDQNGKAVLVKPKVSRAALSELIAGLPPCVIGMEACSGAHYWARLFRQYGHDVRLMAPKFVSPYRMAGKTGKNDAADAIAICEAVQRPHMRFVPVKDESQQAMQCLHRTRQGFIQERTATYNRLRGLISEFGVIAPQSTDALRHVVSDQKETLPVQVRLCIDDLLTHVTNIEEKIAEYDRVLSRVAKTDHRSQQLMELKGIGPTTASALVASIGNAHDFKNGRQLAAWLGLTPSQYSSGGKSKLGRITKAGDAYLRTLLVQGARSVMVGAENRTDPFSRWVCSLIGRRGYWRAVVAIAAKNARLCWASLHYGDDFRLYSTT

SEQ ID NO: 387415 - protein, 419 aa, unidentified
MKSSKTKKIKLINKKTMLATIDIGKNVHYGYFRAPDGSELKPFTFYNYKKYFQRFWNKLCQFKRQHQLQDIVIGFESTGPYAEPLYHYLKKKPVKLVQINPMHSKRVKEMSGNSPNKTDRKDPRVIADIISLGHALTLVVPDGAAAQLRRLAHGRERALKARTVMLNQLQHLIFVIFPEFLSIMKNMSTKTAAYLLNHHPTPESIVELGVDDLTQVIKKVSRGKLARQRAEELFEAAKSSVGIGEGKDSIVLEIEHLNAMIDNENRFIQSLEKQMLCYLEQIAYSVSLLSIKGLGVVTVAGLIGEVGDFKKFDTHSEIMKLAGFDLFEVSSGQHQGQRHISKRGRALMRKLLFFAAINAVKTHGIMHARYHQMLDNGKPKIKALAAISRKLLRLIFALARDNTMYIENYDPTHKYKLAA

SEQ ID NO: 387416 - protein, 327 aa, unidentified
MEYLFVGMDVAKDTLDVVLRRAGQNSPAKTFANDDKGIAALLKWLTKDKHAPIWAFLEATGQYGDEVAERLHQAGCAVSVVNPQCTKSYARAGLVRNQTDKVDAGLLAEFCEKKEPRLWVPPSALHKALRALSRRLDDLEVMRQAERNRRHAAKHPHETLRQGLEEHLAFLAEQIESLKQEIQDLIDAHEELCQQRALLVSIPGIGALTAAKLLGENIQSFPTARTLVAYAGLNPMIRQSGSSLHAKPQLSKLGSRHLRMTMYMPALSARRTNPLVKDFCDRLQARGKAKKAVLGAAMRKLLCLAFGVLKSGVPFDPHFVEKVRMIT

SEQ ID NO: 387417 - protein, 366 aa, unidentified
MTRYVGLDAHSKRCVYVIQDEHGKVRGEGSVPTSMDGLLGLATRHELPTGTRVALESGTMAFFVARRLNRLGLDPIVVDAHEVRSKALRPNQKSDRRDALELCEGLRRDTYRSVVHVPPEPIERLRETLRRRRHFVRLKTMQVNAAKHLLRAAGLPAPGRTLGTLKAWERLLQVVVIDPTLLAFCQAHRAAWQCAHEQITTLEASLVEQEEPFRHNLDRMRAVPGVGRIVALTVQAVFSDVQRFPSAKHVASYAGLVPSSYDSGERVQHGRITRRGSSELRSMLCEAAHHARRPDHPLNPYFARWCARRGYKMAVVAVAHRLCRILYAMLRDGTEFDVNQLAIEQGHFEHTTVRRYRLKKGVARPV

SEQ ID NO: 387418 - protein, 413 aa, unidentified
MLKIVYPICCGIDVHKTFVIACIASTNGVGITNYLSKRFSTFTKGLNELSSWLIENSCKDVCMESTGKYFYPVYNILEKTCNKPIVAHPKYVKAIRGKKTDKRDARWIADLFKHDLVVNSFIPPQDIRQLRDLMRYRTKLTNFQSGEKNRFQNCLTVSNIQLASVVSDTFGKSSMRIIEKLLENPLDKNIDIASLIHKSMLAKIPDLELAVEGVITDEQAEKIKIIKQHYDSIELCKLNLESVILSLAEPYKKEIELILTAPSFKDVFTAIAIISEIGTDMSQFATAKNLCSWAGLAPTNNESAGKKKSVRISNGGKFLKPLLVQCANSVVISEKHPEIRNRFINLKKRRGHKKAVIAICRMLLTAVYHMLKKGEPYNSELYKKADILPLTREITVEQAIFIAQRQGYLILHN

SEQ ID NO: 387419 - protein, 422 aa, unidentified
MKKRRYHATSVNQVNWAQLAEQAGDQRVVFAVDAAKVTFVAVVMTPDKQVLKTIKWKHPEQTKSLLEGLFSQWDSATVQMAIEPTGTYGDALREAFERRGIEVYRVSPKAVRDSAELIDGVPSQHDAKAAYQIGWLHLNARSARWELRSEQRRLLGALLEELKVYQERRRSSLNRLEAQLARHWPELPTILGLGSVSLMTLLARFGSAAQVAAEPEEAEALLRRCARAALSQEKIAAVIDSARQSLGVPCIEAERRWVQGLAEDLLAQHRAVQRTEKAIAQQVEADPVATRLAEVVGKTTAAVLIECVGEPEAYPNAASYLKALGLNLKERSSGKHVGALKITKRGPGLGRFYLYFAVLRQIAQDSIMRAWHQAKTARDGGHKGKSIVALMRKLAKALWHVGRGERFDTRRLFDTAHLARAA

SEQ ID NO: 387420 - protein, 379 aa, unidentified
MLTLTISCFDVVDGARSRHRCAIGCFVGSESHEGAVQMQISTIGLDIAKNVFQVHGIDANETVVVRKRLRRSQVLAFFKALPPCLIGMEACATAHYWARELTKLGHRVRLMPAKDVKAYVKRNKNDAADAEAICEAVRRPTMRFVQVKSAEQQGQLMQHRTRDLLMRQRTQSINALRAHLAELGIVAAQGDKGVKELLSIVADEKDARLPIDARASVIVLAAQLQAVQTLIGSIEKRIKTQHRSNEASKRLETIPGIGVIGASAIAATVADPTVFRSGRNFAAWIGLVPRQDSTGGKQKLGPISKQGDRYLRRILVVGAHSVLRRAKQNPEKYLWLTQLLARRPFKVVAVALANKMARMAWALLAHGGTYRAPVLAAAA

SEQ ID NO: 387421 - protein, 359 aa, unidentified
MRKSISKFETVTTVGLDLAKNVMQVHAVDAAGNVVVNKPIRRGKLIAFFAALPKCLVGMEACSSAHHWGRQIAELGHDARLMPPAYVKAYVRRGKNDKVDAAACCEAVGRPSMRFVPLRSVENQAELMRHRAREMLSSQRVALLNALRGHLAEIGVIAPQGAQNAYYLKKLAETGHDENGEVLVPDGVRQSLAPLARQIDAIDAEIAAIDKILVKQAKSDPTARRLATIPGIGPVGATAFTATVLNVKAFANGREFSASLGLPPRQHSSGGKPRLGGISKMGDRYLRKLLVVGATAVLRHADGHNDALRGWAKDLLARKNGPYKKKIAAVALANKLARIVYAILSSGGTYDDRPVRARA

SEQ ID NO: 387422 - protein, 454 aa, unidentified
MARPVLAVGIDPAKRVHHAAAVLYPDRLILDTAFANDRDAIQDFDAKVAALAIQHEAELIYGIEDHRGYGRAVTQTLHQAGRQIRVVNPLWTHRQKDFYGQDKDDRIDARSVAAVVLRRADKLPDAGDVSALSAAIREAERTLEDLGRQRTRALNRLHRHLSDVYLASYETFFDRLKRPWVLRFFSRFPLPQDLHGQSTEDLARTLQELAGRHLGSARKSLGKRAHHILAATAALQTQPRDRSLALKAELIHQLCEEILANLERTRRLERLLHDQLLPATGQKLESVPGIGTLTAATILGEIGDVQRFPNRHAFAKYNGTAPASKSTGGRQRHTARRGCNHRLKRVLWLIALTAVRHDPLARAYYQHRAEGGLSKVDAIKRVARRMSDIVYAMLRTGAAYDRKRLEQAIANRQVAASKAGGTSSKDRQDGSAVGPALPAFDDASLPKSRHGTNR

SEQ ID NO: 387423 - protein, 383 aa, unidentified
MDIEDIEVFIGIDVGKAEHWATALNQEGRKVFDRALPNDEDRLRALYEKLASHGSLLVVVDQPATIGALAVAVAQDMGITVGYLPGLSMRRIADLTPGSAKTDAKDAAVIAGAARTMPHTLRAVSTSDEDAAALSMLTGFDLDLARQVNQTANRIRGLYTQIHPALEAVVGPWLEHDAVLEVIAAWPTPAELKRAGKARIDARLKKHGCRRHAAWAAQIVSALERQSVTVAGTDAAGMVLPHLARQLIALHAQRADIAAQVETLVQAHPLYQVLTSMPGIGVRTAAVFLAETLGKTFDTGAQLASYSGLAPVTRRSGSSIRGEHVSHGGNKRLKRAMFLSAFASLRSDPVSRAYYQRKRDQGKTPWARSSPPRPTTAYRPRTS

SEQ ID NO: 387424 - protein, 430 aa, unidentified
MKSNTQNAKIEAITEKTLVLGIDVGSETHYARAFDYRGIEYSKKPFKFSNTEAGFVTFKEWILDLKERHEKDKVIPGMEPTGHYWFNLGKFLQDNEMKPVLVNPHHVKKSKELDDNNPTKNDRKDPKVIAGLVREGRYMIPYLPDGVYADLRTASNIRFQLQAELTRIQNRISRWFNIYFPEYKTVYGKPDAKSGMLILKAAPLPEDILTLGIDGVNQIWRDAKLRAVGKARTKTLIEAAEHSVGSKEGAVSARMEIRMLLEDYESRNTRLQEVMVLIEKLVKGIPMAEKLLEIKGVGIRTVSGFLAEVGDISRFNNPKELQKLAGLALVENSSGKHKGETTISRRGRKRLRYLLFEVAMSLVAKNPEFRELHNYYTTRRRNPLKKMQSLMAIAAKLIRVFYAMLTKGADYDPKKMVSDIKRPAVYLQAA

SEQ ID NO: 387425 - protein, 407 aa, unidentified
MNENGKRYIGLDVHKHYLIALGVDANLEVVMPARRVELSHLENWMKKNLTRQDEVVLEMTTNTWQLYDELVEYAGSVMVVHPPHVALITRSQVMNDKIAASILARLLAKGLLVGIWVPPQEVRELRGLVAQRRKMTRLATQAKTRLHAVIQRHHLKPPAGNPFAKTNNGWWQALPLGKLEKMNLQSDLETLQFGEQQEARIQKEMTGIAAEDEEIGRLLHISGFGVITAVTVYAAIGDIGRFVEPKKLVGYAGLGARVHDSGMTTRTGKITKAGRRDLRVALVEAAHVVAHSHPHWKAELARLQPRLGYNKAIVAIARKLLVTVWHVLARKVADRFAEPKKVSQKMLRFAYAVGKENRAGKSAAQFARARLDILNLGEELTSIPWGAKKPIPLPPSKLKERSAVPNK

SEQ ID NO: 387426 - protein, 346 aa, unidentified
MLYAGLDLSRKRLDVHILDEDGRTVEVTAVSPDAAGLRRLAAHVLHFGHEVYGAIESMTGARFVHDTLERYGWDVAIADAAKVKGIAPLAAKTDRIDARVLAELARRELVPEIWLPDPTVRAERERARFRLHLVHHRTALKNRIHATLMTFGHPVPVADLFGAGGRELLARLALPEPWTGTLATSLRMVDELGAEIDACEADLRRLGADHPSIPLLLTVPGIGPILAYTIASEIGDIGRFSSPKKLTGYTGLCPLVRQSGNRDVRGPLAKNGPKYLRWALIEAATHAARDAHYRDRYERTKRRLGRQRGAKVARIDIARKLAEAIWHILTKNEPFAPAGPTMLLVA

SEQ ID NO: 387427 - protein, 410 aa, unidentified
MEVKYRRCCGLDVHKDTVVACARIVSDGEVVSEVRTFQTTTVSLIALSEWLAENGCTHVAMEATGVYWKPVWHILAGGDFQLVLANASHVKNVPGRKTDVNDATWLADLLAHGLIRASFVPDTQTQELRNLLRTRKQLVREKASHILRVQKTLEDANIKLDSVITDVMGMSGRAMIEALIGGESDPAKLARLANYRLKTSQEKLREALRGRVTNHHRFLLHLHLNQIDGLDASIAAIDQQVEAGIAPFRVAVELVTSVPGVGVLGAQVIVSEIGTDMSRFPSDGHLISWAGICPRNDESAGKRRSNRLRMGAPWLKTTLVQCAWAAVRKKDSYLQAQFHRIKSRRGPKKAIMAVAASILTAIYHMLKDGTLYQDLGANHFQSRSKGQQTKRLVKRLADLGYDVALTPVTN

SEQ ID NO: 387428 - protein, 341 aa, unidentified
MKNKSFIGIDISKNVIDASIFTEGASIKDFPHAVFNNSRKGFGEMVTWLKKNHVVLSNCLFGMEFTGSYSMELEKFLTARKYQFCMLSTHMVKHYPMGPKDKNDKIDSAKIADFLYRYNGTECVKPYKMPDKTMQRLKTLMNERKFLVEQRTCFMNRRQLCTTKEDTQLYDGYIKKLSRDIENIELEEQKLLATDESLLTTYRNLLTIPGIGSVNAINVIVITRNFTAFETARQYASYVGVAPHFRTSGTSVRWRPRPSARCDGQAKADLSMAALITVQYDAELQSFYNRKLGGKQDSDTKRKALNAVKFKLILRMFAIGKQNRKWETLDSMSNNEILAIS

SEQ ID NO: 387429 - protein, 443 aa, unidentified
MKRNRRRHLRGRRGQAFADLVRGVCPEQILCVSIDVSKDFHVVLLHNGLGEIVTPSFEIDIFHTGFDQFCQAVEAALADSAAQVVLVGMEPTGHYYENLARHIQGMGQKVTIVNSFSVKENRRQQMMAHEKDDEIDVAAIGDLLRRGEGSPFRPPTGIYLQLQQLDRARLGELKIQTIYKNRVIGHLDRIFPGLILTKAATKERYEPMFATDFWHCQTLQNLVRICPDPRELAVLSPAGLVALFHQNDCRMGPRTAARIITYAQKVLWPDPAVVTIRCQLLATDLQTLDQVSVRIAHYSQQLQQKLAQTPYQILTRVKGLSPIRAASLAAAAGDPTNYRFAGQLFRRSGLVSGRDDSGARQRQGKGKAITKTGDIYLRRALNDLLNGLILHQPILRAYYHRLKQTKPVGVARVATIRRTVGILWATLRDQRADSLLLRGDTMT

SEQ ID NO: 387430 - protein, 343 aa, unidentified
MKDTIYDHYIAIDWSIDNMAIARMTKKSNKITLIDVPSDVAESKVYIKRLKGSKILVVEETTTSQWLYTELSDFVDRMVICDPYRNKLLNDGPKNDKIDAAKLAHLLKAGLIKEVYHSKDKFLYLRRFVNGYENLIKSGVRLKNQRYSLLRACGKRGFERAGTKLDSKGDQYALDCMDRQLELYEKEKEGYEKEFDRLVKKYPEISHQKSLPGIGPIHAVKIVARIVTPYRFSDKGHYLSYIGLVKLEKMSGGRRYGRKNSRYCRQLKSIFKTSTWAAIGGNNPINDYYEYLIRVKGYPEHNARHKACRKLAILSLGVFKSGKKYQPYWRDHVKGTQEVKAGL

SEQ ID NO: 387431 - protein, 353 aa, unidentified
MEYIAFDAHKRYTWASVEREDGRRVQEERIPHERGRLRQFLARCEGGSPVAVETMGSWYWIVDEIEAAGCVPRLVHARKAKLMMGMINKTDKLDARGLNRLQRTGTLPTVWIPPGELRDQRDLPRTRMVLVRQRTQLKNRIHATLAKYALQCDEVSDLFGVRGVALLRQHLEALPPHTAFATGQLLEQVESLDRQVRAFEQRMRAVFEPTPAIELLRTLPGVGFILAVVIALEVGDVTRFPDAERLASYAGTTPRVRASGGKTRYGALRPDVNRYLKWAFVEAANVTNLHRGRYPGRHVSRLYERIARRKGHPKAIGAVARHLAEATYWILTKQEAYREPTRSAVSSMGGKRG

SEQ ID NO: 387432 - protein, 330 aa, unidentified
MKNVKDVIGIDISKNTIDATLYHSKEHAVFSNDEEGYRDLIEWSKCHLGTAHCFYCFENTGNYSLKLSVFLSSSSLVYVEESPMRIKRSTGLTREKSDKLDSYMIARFGWMYREELEPSNVKPKAFQEIGRLLALRDQLVRDRSGLKSTLKEQRHLLSSPSTDACCKILERSIKHIDKQVLSIEKHMKELLETDDRLQQNYRLLLSIKGVGLILSCQLLYHTSNFVKFDNWRSFSSYCGIAPFEYSSGSSIRRRKQSHYIGDRKMKTLLSMAAVSAIQSDQELKNYYQRKLEQGKHKMIALNNVRNKILARSFAVIKRGTPFVNIAAVNF

SEQ ID NO: 387433 - protein, 343 aa, unidentified
MQLTRVGVDLAKQVFQVHGVDRAGRPVWCKRLKRSRWIAELERAAEPGAEIGMEACGSAHHWARVLQGKGYRVKLIAPQFVKPYVKANKTDAKDAEAICEAMSRPSMRFVAVKSVEQQDLQAVHRVRSSLIRERTAKANQMRGLLYEYGLVAPREISSLRRAVPEWLEDAGNGLTPRFRALLAGLYGDLRLFDERVRELDREIAAIAREHEAVGRLEQLRGIGPLTASALYALVGDARQYRNGREMAVSLGLTPRQHSSGGKERLLGISKRGDKYVRTLLIHGARSALRAAPGKTDRLSRWVLALAERSHPNVAATALANKMARIAWAMLRHGTNYEPEHVAA

SEQ ID NO: 387434 - protein, 346 aa, unidentified
MIYIGMDISSKSFTVHAINERKEVVFKGEIEPTRTGLTEMVKRLKDQPKLIVFEAGNQLKWIALALKKMREVDVHVVHPNEIKWINQSSGKTDKIDARKLAYLARGDMLPRKVHIVDGKARDLRELISARDRLQGKRIALLNAIRGHLKQEGYKLPGKFFQNKKWRKELEKVRVGETLKLILKTYMSGIDSLKQSEEELTARILEVEGKDIELLESIPGIGGLSSRVLVSAIDDVSRFDDKKAIGKYGALTPRIYQSGDVTHLGRINRDGRHEVRRVLLQCAHTVTRMKTYAVKPLKLFYEKILKRRGKKIAVVALARKLLTIAYGVLKTGTAYNPEVLGGASPTS

SEQ ID NO: 387435 - protein, 406 aa, unidentified
MRIIGMDIHRVAAEAVALLEGHLTKLGRIPMTRDSLEAFARKELTHDDHVVVEATGNAAAVVEVLAPYVDRVVIANPKQVRLIAHAKIKTDAIDAAMLAKLYATGFLPEVWVPDQRTMALRRQVARRTQLVRQRVRLKNLIQSILHAHLIPPCPHLNLVRISGRRWIAAQMVPADERAAIERHLAQIDLIQGSLKEVEADIAREAMSDPIIRRLMTLPGVDMTVASGVAAAVGDIRRFADPTRLVSYLGLNPSVRQSGEGSACHGRITKQGRGQARGMLVEAAWAVARSPGPLRAFFQRVASRRGKHIAAVATARKLAMIIWHMLTKSTDYIWTRPALLARKFRSIELRAGLPTSHAKRGSAYDYNIPAKRAEERARVESAEKEYTRFTSRWRAKPRSRHSKASAT

SEQ ID NO: 387436 - protein, 334 aa, unidentified
MKNFYVGIDISKSKLDVAVYDAEKKKITNKFVIKNEADGIQSLFSTLKKEKINLEDCWFCFEHTGHYGFSLSYELEQICCVYSIVPALQIKLSLGMTRGKNDQVDAERIAMFAYTFRDKLQPSKMSSDCFQKIKQLLTYRNQMVRISTQLQNSLKSHQAVCQLTNFDYIVDEIKKQIIEVKVKIESIDELLMSEIKRDKSLENNFNLLKTIKGIGPIISIYLLVLTQNFESFTDARKFNCYAGIAPFEHSSGSSIRGKTKTSSLRNKTIKSLLFNGANAAALHDKEINNYYKRKKEEGKHHQSVMNAIACKLVYRAFSVIKRQSPYVTLYAQNF

SEQ ID NO: 387437 - protein, 462 aa, unidentified
MKHKAKSQAMHSGFAVVNPNAAAIDIGATMHVAAVGADRASDPVRSFGTFTADLHRLADWFAECGVKTVVMESTSVYWIPIFELLDERGFEVILVNARDAKHVPGRKTDVSDAQWLQRLHSYGLLRASFRPKGEIVELRAYLRQRERLLDTAASHIQHMQKAMTEMNLQLHHVVSDITGATGMRIIRAIIAGERDPAVLASMRDTRCHSSAEVIEKALTGHYRGEHLFVLEQALALYDVYQQKVAACDIRIESVLKELNSIRGRKEDARADGSGSPRRRSRQSNGPDFDVGKALHSLLGKDLTRIHGMGPYLALKLVSECGDDLSAWPSAKHFTSWLCLAPSNKISGGKVLSSRTRRSGSRAASLLRLAAVTIGRTDTALGAFYRRLSARAGKSKAVTATARKIATLFYNALRHGMDYIDPGASYYETRYRERVVKNLHRRAKAFGFILQAAEMPAAEQAVS

SEQ ID NO: 387438 - protein, 344 aa, unidentified
MKIKLLGIDLAKNVFQLCALNQANKVLFNRTIRRAQFRSTIAKLEPTTIAMEACSSAHYWGRTFADMGHQVMLVPAQHVTPFVRGGKSDARDALAICEAALRPGLHPVPIKSIEQQDIQLLHRLRQRQVQHSTALANQIRSLGREYGVIFPAGIKSLIKRLPEALEDGSNELSPVARYALADQHRCLLEVRTAMSTFLQQIEQLAAQHPAYVNLLSLPGIGPMIASAYIAAIGNGRQFKCGRQVSAWLGLVPRQYGTGGKIQLKGMSKNGDRYLRTLMIHGARSVITRGLKNRPDLAQWVQPIIDRQGFNKAVVALANKLSRISWVIVTTGEPFDMKQAFKPAT

SEQ ID NO: 387439 - protein, 457 aa, unidentified
MNANNARFQSASKIRISLLLIVLQCPMKGGDFMKNNFLSTLFVGIDVSSKTNVLCALDFQGNKLLNLKALNNQPGAESILESILDCLNSNSLKFVVIALESTSFYSTHIANFLSSNEVLLAYSPMVYCLNPKTIANYRKSFVDMDKTDPLDAYVIADFARCGRIKSQPWRGAQFLALQRLTRHRLHLVEAIAKEKTYMVSNVYLKFSQLAVLEKPDKPFSNTYGATSEAVLTEFLSLEDIAYSSIEDLVAFLKDKGKNRFSNPVGTAELLQKAARDSYRLDKVLYEPLNIAIASSFNVIKALQTEIKEIDKAIEKNIKGINTTEYQSLISIPGIGPVFASGILAEIGSITSFSSNDALAKYAGLTWRIKESGDYSADDTNMTKTGNKYLRYYLIEAANSVRNNIPEFNVYYRKKFNEVPKHQHKRALALTSRKLVRLIFGLLTKNQIYSSSKVGEVQ

SEQ ID NO: 387440 - protein, 350 aa, unidentified
MNSMHYVGLDIHKKSISSCVRQADGTIVQESTIAASHQALDRWMDQLPKPWVAGMEATMFTGWIYDHLNSRGAAAKVGHPAMMKAIAAGKKKNDHVDARKISNLLRCDYFPECHMAPREIRDRRRVLRYRNFLVRQAVRMKNKVSGLLMETGIPYNQQKVHLKKYFGELLKERRQEMPQSLPQLLQLSRSTIETISGMERQLLRVLERDQLLAARVERLATIPGVGRVVALTWALEMGDIQRFRSVKKAVSYCGLCGAEKSSGGKSERTPISKQRNKHLQSMLIEAAKLAPRWNAELALVYEREKQKGNCNQATLAVARKLVAYLMAVDRRERAFDPRVAEQSLNAKQSA

SEQ ID NO: 387441 - protein, 344 aa, unidentified
MGQYVGLDVSLKETKVHVLDEQGQRVWRGRCASTPEAIEAVIRKHAPQAVRIGLETGPLTTWLWQALTDVGLPMTCLDARKAKAALNMRTNKTDANDAEGLAHLVRSGWYCEVRVKGREAMLVRSLLDARTQLLGIVTELSNQIRGVMKTFGLIVPKGGGRIFEANVRRLLEGEAAVAGVIVPLLEAWRAVRERTAVLDRQLLAAARASATCRRLMTAPGIGAIVAAAFVAAVEKPENFRNSRAVGVWIGLTPRRYQSGEVDYDGHISRRGDARLRALLYEAAVSILTRVQSESTLRRWALALKTQVGFKRAAVALARKLAVILHAMWKTGTDFDPRAAVPAAA

SEQ ID NO: 387442 - protein, 349 aa, unidentified
MLADELDYVVGVDTHLEEHVLAVVAAATGAVLARQVLRANKRGYQAALRFAGEAAHGARAWAVEGTGSYGAGLARYLAGRGETVLESSRTPRTERRLRGKDDALDAARTARAALASEALALPRNGERREALRLLLVARRSAVGVRRETLGQLRGVIVTAPDRLREQLRVLPTGRLLERCSRLRRSSTAGADELATRLVLRSLARRIDAATAEAAELEREILAHVRALAPALLDEPGVGPIVAAQLLVAWSHRGRLRSEAAFARLAGVAPLPASSGQTVRHRLSRGGDRQLNRALHTVVLHRRQHDPATKDYIARRIAEGKSRRDATRLLKRYLARHLYRLLQNQEPLLA

SEQ ID NO: 387443 - protein, 418 aa, unidentified
MSRAISKRLACIEPGTLFVGVDLSLDDCVAVILDGRAQRLGRVRFPNDADGYHYFHRRLGMLQEREEAPAVLVGMEPTNYFWKLLASDLEQRQVPYRMVNPYTVKKHREGDQLSRSKNDYRDAFTIADLLRTGKFTETQLLHGDYAELRQYVVLRDRLQRDIRRQKSLIRNIAGQLFPELAHEFTDFSCLTALAMLRRHAVPSVIRNLSGQAFVTAVREDFTGQRLPVSKLRRAYALAERSVGVLHGTEALQDALCVHVDTLRLLQQQLEPVEEALLHVFFRLPPARYLLSVPDLGAITAAVILAQIGDPTRYSKANQLIKLGGTQPVANTSGRKTRSKTPMSKKGRPRLRTALFFATMRLVQHDDNFAQTYRHLLTRKENPLTKMQALGVLMNKLLRILWALMKHQTFYDPTYELIQ

SEQ ID NO: 387444 - protein, 362 aa, unidentified
MKNKSIVTHNAEIVIGADVHTKKHVVRVKIGDEYKKASNIAPNQESWKSVLRPYAQCNVTVVYESGPNGFNLHDMLLALAPMCNSLKVVMAPASQIPVAPGSKRVKTDRRDTKRIIMAWEMGAFTPVVVPEPEQREERALTRLWDQLKEKIRSVKNQIHGFLKNNGIEYPDKYAGAPWSGGWIATIKAATKATAKTRHLAFTLKIYLDELATHLKHEKELRKRIDELGKTGRCAPVAQRLKELTGIGMLSAVRIACEVADFAAFKNSDAFASYTGLVPGEHSSGDSIRHGHITKTGNRRLRPIFVECAWVWLRFDPQARRIFNRIAAGKKERACLAIVALARRLAVMAYHAVLHPADPQQAA

SEQ ID NO: 387445 - protein, 422 aa, unidentified
MLAESHDEEQIIARVAALDIGKAEVVCCVRLPAPTGGKRRLQEVTTHSTMTRSLTELANRLVELRVERVVMEATSSYWKPVFYLLEAHGLDPWLVNARDVKHLPGRPKTDVLDAVWLCKVAERQMLRASFVPPWPIRRLRDLTRYRTDLVSARTAEKNRVEKLLEDACIKLSVVASDIFGVSGRAMLAALVAGERDPKVLAQLARARMRGKMDRLEQAFDGHFADHHRFLLSRMLSRIEALDADIAAVDAQIEAQLAPFAEAAARLDEIPGIGPVAAAAIIAEIGVDMSRFPTAGHLCSWAKFAPGIHSSAGKIKGSASCGHGNPYLARVLGEAAVSTSKTNTFLAARYRRIARRRGQPRAVVAVGRSILVIIWHLLQDPDTRYQDLGSDHYSRHVDPSAKKRSHIRQLEALGYTVTLTPAA

SEQ ID NO: 387446 - protein, 331 aa, unidentified
MFPVGIDVSKKNLDLCMLYDGIKGRIKTRNIQNNRHSVENILRWLRLQHCGPEDVHVVMEATGVYHERLATELHDAGFRVSLANPHRSREFARGMGIMTKTDKVDAYMLACYAFLKKPHYWEPPAPEIRYLGALLRRRDVLLGDALREEKRLEKYLSTDTPADIISSCRRMAQLLREEVSNIERQIKAHIKASPALRRDYTLLTSIKSVGPQLGMHMLVVLRSHNFVSAEQAAAFLGVVPIEKRSGTSVRRRPRMSKIGPPQLRAKLYMSALCGKIYNKRMRNIYDEMCLRGKPKMVAIGALMRKLVHWCYGVLKTGTVFNDEGLKQVLST

SEQ ID NO: 387447 - protein, 394 aa, unidentified
MNFLKYGLGIDMAKEKFDACISIIDQLQHVMIRAQCSFSNNKKGFEAFCLWTTKNTRLAIPVVYLMEATGVYYEQLAWFLHDKNCSVSVIVPNKAKKYKEALGLKSKNDRIDAKGLAQMACEQNNTTWKPLSNNIYLLRLITRQIQSLSQQATVLKNQLHSLQYGMYRDKAIEKMYTKQLIVLEKNKGNLQLRVEQIIRNDEILKRKFENICKIKGLGLQSLAVIVAETNGFAAFENIAQLVSYAGYDVVENQSGKRSGKTKISKKGNSHIRRCLHFPAFNMITYEVAPFKNLYERVYEKSKIKMKAYTAVQKKLLEFIFVLWKKDEAFNPNYQDKSSGDVEPESSFTLVPKEPEISSKKNEETKSTSQKITPAITRVTQDKHPSKYRRMSSFT

SEQ ID NO: 387448 - protein, 338 aa, unidentified
MQTYAGIDLHSSNNFVGVINAKDKILYGKRHANRLDDVLKALDPFKDSLQGVVVESTFNWYWLVDGLQEHGYPVHLANPSAIQQYEGLKHTDDPWDSFWLAHMHRLGILPEGYIYPKEHRPVRDLVRRRLLFVRQRTAQILSLQSMISRNLGFKMSNNDIKKLKSEDIEQLFDCSNLVFMATSSWATIEFLKHIIIGIEKRVKSQVKLRKEFEMLRTIPGIGDILGLTIMLEVGDIGRFAKVGDYSSYCRCVESKRLSNGKKKGENNKKNGNKYLAWAYVEAAQFARRYCVKAQSFYQSKEAKTKPVVAIKALSNKLSKASYYIMRDQVAFDEDKLFS

SEQ ID NO: 387449 - protein, 355 aa, unidentified
MDSIKYIGLDVHQSTISVAVVNADGKLAMQSVIATQAATILDFLHGLRGTLHVTFEEGTHSTWLYDLLVRRVAKLLVCNPRKNALLKAGNKSDTIDARKLAELLRAGLLSPVYHGQNSTAAVKHLGRSYAALTEDTTRVMGRLKALYRGQAIACAGKKPYGARHREEWLAQLSESGLQRRARRLYQQLDLLQELRREARHDLILECRKHSETKLLRTVPWLGPIRAALLIGRVQTPHRFRSKRQFWAYCGLALETRSSADYQMVNGQLERRKKPVFIRGLNLNHNHDLKNLFKSAATAASGSNGPFRPFYENLLGKGMKPELARLTLARKIAAITLHVWKKGEPFDAEYLKPQAA

SEQ ID NO: 387450 - protein, 451 aa, unidentified
MARKGKARKTDGAVLPVMRPHAAGIDIGATEIFVAVPADRDAENVRSFPTFTQDLYALADWLKRCGIETVAMESTGVYWIPLFQILEDRGFEVCLVNARHVKNVPGRRTDVSDCQWLQFLHSVGLLRASYRPDQEVCAVRSLLRHRESLVQMGATHVNHMQKALDQMNLQLHHVISDITGLTGLAIMDAILGGERNPFTLAKLRHDRIKASEEVIAKSLVGDYRIEHLFTLRQSLIAYRSYQQLIDDCDREIRRSLDTFQPPRTPADSNHQPESKKRPASADAGLRTELKRVFGVDLTKIPGIRTGIAQMLFGEIGPDFTKFRSASAFASWMGLCPDNDISGGKVLWVGTRKVKCRAATALRMAAQSLHHSKSGLGDFYRRMRAKLGAPKAITAAAHKLARIIFHLVTTRQEFDDTRFAADQLHYLKRQENKLRAKAHALGFQLTPLENAG

SEQ ID NO: 387451 - protein, 430 aa, unidentified
MKSNTQNAKIEAITEKTLVLGIDVGSEMHYARAFDYRGIEYSKKPFKFSNTEAGFLTFKEWIRDIKERHEKDKVVPGMEPTGHYWFNLGKFLHDNEMKPVLVNPHHVKKSKELDDNNPTKNDRKDPKVIAGLVREGRYMIPYLPEGVYADLRTASNIRFQLQAELTRIQNKISRWFNIYFPEYKTVYGKPDAKSGILILKTAPLPEDILTLGIDGVNQIWRDAKLRAVGKARAKTLIEAAEHSVGSKEGAVSARMEIRMLLEDYESRNTRLQEVMILIEELVRKISMAEKLLEIKGVGIRTVSGFLAEVGDISRFNNPKELQKLAGLALVENSSGKHKGETTISRRGRKRLRYLLFEVAMSLVSKNQEFRELHNYYTTRRLNPLKKMQSLMAIAAKLIRVFYAMLTKGVDYDPKKMVSDIKRPAVYLQAA

SEQ ID NO: 387452 - protein, 387 aa, unidentified
MPQPNDLSRSLVTLEQDSTLIAVIEMGQSSWLVAGIVPGIERQPLKKLAADQDGLLQLLHRWRQEAAQAGHPIKRIAVAYEAGRDGFWLARWLRAREIEAYVIHPSSVPVSREHRRAKTDRLDTELLKRAFLGWLRGEPKHCSMAAIPTVEDEDARRPSRERESLVGECTRIVNRVKANLARLGIRGFRPRLAHAPKRLETLRTPEGTAVPANTLAELQRDMVHLRFVKQQIKEIETARAKRLEQASEGGRDAMVRLLARVVGIGIETADMLVQEVFSRKLAGSQGGGAVCGLTGAPDESGQKRRERGLAKAGNARVRHAMIELAWGHLLHQKDSALAEWYQKRTVDARGGTRKTMIVALARKLLIALWRLVTTGEAPAGLLLRPAA

SEQ ID NO: 387453 - protein, 346 aa, unidentified
MTTVDATRPVTGGVDTHLDLNVAAALDPLGGLLGLAEFPTTKQGHVELLGFLQGFGPVARVGIEGTSSYGAGIARFLRRSGIEVVEVDRPNRQARRRTGKSDPADALEAARAALSGRAQGAGKTKDGNVEAIRTLVVAKRSCRSTKIKTLNQIRHLSFTAPEDLRERLKGVSRQQLGAAAAALRPRAGSDPVTFATKTALSTLGRRVLALDEEKEHLDRLLAELVEATAPSLLDVFGVGVDTAATLLTTVGDNPGRIVSEAAFAHLCGVAPIPASSGKVNRLRLNRGGDRQANSALWGVVITRMRNDPRTKAYVERRLKEGRSKSEIIRVLKRYVAREVYKHLPVG

SEQ ID NO: 387454 - protein, 406 aa, unidentified
MVPNDGRSEMAVAVGIDVAKEFHWAAAVDERGGELVSRRVDNEPAQIQALIDELERVRAECGPVTVGIDVVGGIASLLTATLAEAGFALVHVPGLAVNRARQGTTGGEHKSDPRDARVIADQVRTRSDLRAIEPTGELDVELRLLVGRRRELVTDQTRRIGRLRDLLASIHPGLERIVEPTQKASLWLLSRYVTPAEIRRAGRSRLLNHLLRGGRLPRPQLERLADAALAAAQAQRLALPGERLAADLVRELAREALAVRERLKTLDADLEQALGHHPDAALIRSLPGMGATLTAEFIAEAGGIGRFPTPDRLAAAAGLAPVLRQSGKVRYLQRARGGNKALKRVLYQSAFCSLSHPASRAFYARKRREGKRHHQAVIALARRRVDVLHALLRTRQPYRYREPRAA

SEQ ID NO: 387455 - protein, 337 aa, unidentified
MIHVGVDLHQRFCYVTVMDARGKILQQRTVSNEAAELRRWARSLPEPAQVVMEACSFWPAFQKNLSGEVSKLVLVHPARVRAIAEAGLKNDRVDSEMLAHLSRCHLLPEAWMADEATQQARQRVRLRVALGQQRARAKNLLQSVLHQEGRLKPVSDVFGKKGQAWLRELELTAAGREAVDSYGELIAHYDRLIDERQQKLEQAAEQSAEARWLATIPGIGGYLAMVIVAEIGDIRRFANKKALANYAGLVPRVRESAGKRHDGSLTRQGSKLLRWAMIQAAHGATRGSPAIRAWYQARRQRKRAQVARVALARKLLTCVWALLRHGVGFEESVFATR

SEQ ID NO: 387456 - protein, 345 aa, unidentified
MIIGCDFHPSWQQIAWLDTETGETGEQKLANAGGDAERFYRQLPAPVLIGMESTGNSHWLVDLLAELGHELWVGDAGQIRASYVRRQKTDKRDAGHILKLLVEGRFPRVWMPSSEVRDLRQLLLHRHKLVVIRARVKNELQHLCLNKGVQCKRKLWTKVGQQMLCELRLRPWAGRRRDDLLGLLAMLDRQIDPLDEAVKAEAQRDKRALLLQTQPGVGPITALAYVLTMGDVTRFPRGKQVASYLGLIPREHSSGGRQHLGAISKQGNRMLRMLLVEAAQTAVRLDPEFRKEYQHRCHQKPKAVAKVAAARKLAVRLYWMLRTQQAYPEVVRIESSPRVRLVGEN

SEQ ID NO: 387457 - protein, 312 aa, unidentified
MEKLSYGGIDVSKDRLDVVVLPEGWFFSVSNDTAGWAELVARLRPLAVSAIGLEPSGGYERGIIRALLAAGLSVRRINPNKLRQFARARGILAKNDRLDARLIAEYVAIMPTRVVQRDDAVERLAEIVTMRRQLCDEHVAVENQAAHLEDAMLRRLSKRRLVRLEADIRLLDKRLAEMVATNAAFAQPYELLTSMPGVGPVLAFTLIALLPELGKMSRKQIAALVGLAPYDFDSGKLRGHRSIYGGRMPIRNVLYMAALSASRYNPALKTFSNRLAHANKKSKVIIVAVMRKMITTLNAMLRDNAAWQPQSN

SEQ ID NO: 387458 - protein, 482 aa, unidentified
MKKRNIYPNQSQQLLNLFEQAANNAKVMCVPIDYAKKDHVVMFCNGYGDILRKPFSVKNSPQGVDYLTDQVMRSCRQRAISEKHVFFGGEEVGSFADNFVSTLRSQGWLVAGVNAHEAKTQRENLQASTDRLDLMGIAKSLLNRRANCSPAQSGIYLNMRTVARHRRKLVDITTEVRNRIHAVVDRLFPGFLNEKKSGITPFSKSSLWLMQERFSAPQIRRRRRSSLIEALRRLGTKKPEDTADMLQQYATEVLKPPQEYVHMLQLSLTQHVKHFCCLQESIGQLEKEIAVNLAQTQGAFLTSVRGIGIVLAAGVSAEIGNPYEQKPLNNLVSYCGIIPRVKQTGGPQGQTKTGKVAKRCNRILKDYIVKSASHLGLHGPEDLKSDYQRRDAAEQHADFGMARRYLRMAMCLMRTSQTYLPSQLRKAQAQIQQRADYYVMTWPQLRDKWQKSGALETAFKADQPLGQWRKIVQQFYGIKLTL

SEQ ID NO: 387459 - protein, 424 aa, unidentified
MNLTQNDRLKQVTSDTLIVGVDVGSQIHFCRAFDWRGFELSRRVFKFSNTGMGFLTFLRWTEELMNKTEMKKVIVGCEPTGCYWLTFQKFLQDHAIQLVTVNPFTVNRSMELDDNSPEKSDLKDPKTIALLVKDGRYSTSYLPSGVYAEIREASVCRDQIMKQHVRLSNQIQGWLQKFFPEYFECYAEWDSTSGLMLLKEAPLPQDILKIGAGGINQIWRDAKVRAAGIKRAQTLVEAAQNSVGLEAGEAARLEIWVLVNDYILKAEQLKRLDEYLEEKVKEVPNVEKLFAIKGVGMSTVTGFIAEVGDIGRFTDPKQIQKLAGLEIVKKSSGKKKGQPRISKRGRRKLRRTMYESARALMTWNPAFQDVFLYYRNRTRKPLGSMQAKIAVACKAIRVFYVVLQTGCDFDEEKFRRDIIRPEAA

SEQ ID NO: 387460 - protein, 319 aa, unidentified
MIPTPVFVGLDVAKATLDVALRPSGERWSVSNDEAGVAALVDRLRPLPPTLVVCEATGGFERAAIAMLAAAGLLVVVANPRQIRDFARATGQLAKTDQIDAAILALFAERVRPTPRPLPDEAAQLLDALLTRRRQLLEMLVAEKNRLGFAPRPLHKGIQQHIRWLERQLDDVTKDLADQIERSPVWRAKDDLLQSVPGVGPIVSAVLLAELPELGALTHKQLATLAGVAPLARDSGTLRGKRMVWGGRAGVRTALYLAALCGRRWNPQLRVFYERLLAAGKPKKVALIACARKLLTILNAMLRDNTRWEAPVPASQHSC

SEQ ID NO: 387461 - protein, 480 aa, unidentified
MSSKCNVPSEKNQTAKYTKSLEIVNPCCAGLDIHKEKIWVCTSPFRDGVAPEVSTFATDTASLGKLALYLQERKITTVAMESTGVYWLSAFLMLRQENLNPILVNPCDIKNIKGRPKSDRADCVWICRLHSYGFLRASFVPADTVLDLRSLYYAHEKFTAESASTIQRMNDELVKMNIRVDLILTDLSGVSGVRLVEAILRGVRSPESLYQLLDKQIAKKDKNTILCYLKGRDQAGNISILCSWYRVYLKLREEISCINEQIYGILQSLPKKADAKDIPRVKKNYREDKLDFPYELRPIFFEIYGVDLTQLPGIGAGVLLALICMVGTDLSPWPTAKHFVSWLGLAPINKESAGHCKSSSTRRIHNLLGNAFKMAAMAAKRTKTYIGRTARQLASRILPKKAKVAMARKLAELVYNILQNGMDLKVKTEEQYEQRRKQRDIRFFVKGLCKYVVNGKLLPEVEEAYHEYCQGMKAASLTNA

SEQ ID NO: 387462 - protein, 489 aa, unidentified
MRKATTSTVAPLTLPCAHESVYVGIDVGKQRHIAGLVSAGLLARHERFEGCPVLAFDNSREGFRSLIDRIQTLCPLEQAYVMLEKTGHYHVALVDYLLEQDLSVYLVHVHERPRGLTKTDKRDALNLANHLYNQLEKGVQFADRSELARRALPPSEPAAQLKGLMGHRYELIHECTRRKNKLTALCDQLFPELPQVFRDPNSPTALRVRERYPTAAAVANADLEELWAVKGRTHPGRKQLAYLQTLAAQSIGVHDPIRLQGLVFEQEQLIHELQLLERHLEEIACKEEHILQASREGRILRSIPGIGVHAAAAILAAIGNIDNFPNAAALKAYFGWAPAIRQSGVSVNSTTLSRAGERTMKAMMYLVAMKAIQDPGPWADLYERLVERGCSYDERRREYSGKKRILGRIAGQMIALLYGLLRSDVELRARTPAHEPLPEPLLYDATLHHAHQTGAYHSMKGPARPARIVRLARRAEPHQELCREPTTQQ

SEQ ID NO: 387463 - protein, 407 aa, unidentified
MDSLKTVFGIDVSSRKSNVCIMVNGQKVNDYAISNDMVGFNQLLGDLKQVTNPQIIFEATGVYSRRLQAFLDMHDLRYVMMNPLEAKRKTKDDLHQNKTDKLDALYLAKLQSEHPQRLAYVQSEEYQELMANNRIYEQASHDLITNKNRLHKAIQLTFPEIEHLLANPRGKNYWSIVLKFPHPNIVLETKEADIIDFLKSLSGIGEKRANDLAQRLIRLAKLACPAVKKSSAHIRGLEMAINNILSAEETCQTALKEMAKLAPKRDLEILKSIPGIAENTALRIISELGDIRRFNNANQLNAFVGVDPQVYESGNLTAHLSISKRGTAIGRKVLYLAINQIQSAKKAGNPCHIADYYEKRKRSSETASHKKAAIASIHKLLRTIFALITNDQLYSYDIAKHNQRLLS

SEQ ID NO: 387464 - protein, 357 aa, unidentified
MVHVGLDLHHRNSFVRALTEAGELVPGRRVGHDHMEQLWEYLGQFGDQPKRVVFEATANARWMYRLLKQDPTIEPVAVTPHKVRIIAETVAKTDQIDATVLATLSRMDALPRAFLPDEELEQLREMVRYRGVLVRLRTRAKNLVNGVLVRQGLLRPYGNIFGMLGRRWLLEVSLPPVMRLQVDQWLELIDVYEAKIQGAEEKLYQELARGERWAPDVRILTSAPAVGRLTAVTILAELGEYRRFGGRSAVSCFVGLVPRSKRSDRSSRYGHISKRGSSTLRSILVEVAITAARKVPRYGELLARVKAKKGAKTARVAVARQLLEDCWTMLMKREPFRFEPSQRSARPVQAESLTRAG

SEQ ID NO: 387465 - protein, 358 aa, unidentified
MAVTEGTRRIVGGVDTHKDLHVAAVVDEQDRVMETRSFATTRQGYRQMLAWMRSFGELQRIGIESTGSYGAGLLRFMQQAGITVLEVTTPDKQDRRRRGKNDDLDAQNAAHAAFAGQRTVTPRSRDGMIESLRVLMACRKTAVSARRVALQMIHNTIVCAPDGLRDQLRNLTRMQLVRTLGSWRPDLTAYRDLESAYRIGLKSLGRRYLELHDEIADLDAMIAAIVDELAPNLIARNSIGHVGAAQLLLTAGGNPERLRSEASFASLCGVSPVPASSGKTVRHRLNRGGDRAANSALHIIAIGRLRTDQRTKDYVARRIAEGHSKLDAIRALKRYLAREVFTLVTQRRREINATQIAA

SEQ ID NO: 387466 - protein, 492 aa, unidentified
MNGQRDRPNPTEPEFLEEGTQMIYSVGIDLHQGQHRARCLDDRAQSCDSFSFQTTPAGLAILEERIFRDGANPIVVLEPAGLPWKMVAVYLRSRHPNCRLVKAKTQKVAALRRYLRGPVKSDRLDALTLAKMPFIDPEKLVDIYLPPAKIHVLQRLTRQRKRMESAISGRKIRISAIVDGYLPGVRRAFSDAWSMPVRAFLRSRLNPYAVVREGEGALHTYLSKACPRSKWTRAETHLIFLACHSVADVCELSRSAGTVDEEFFTDLQDEIARELRLMESEEAESEALARRIMELYREVYSSDNLTSIPGVGEHTAPIFLSAVGDPARFHSQSAFANWEGVVPGARQSSDMEAKGLRMTKAGPSIMRMGLYQAGDVGRRTDPQLAAVYYREMVHHGKNHRQAMGAVMSHLGARVFAVLKENRPYELRDIDGNPISKDNARRLILSKYQVPEEIRRERRRRNPKGINSVVALRKNRGMATHRINEAAKAPQPA

SEQ ID NO: 387467 - protein, 368 aa, unidentified
MTLVTKRPTRAVTIGVDTHSLVHHAAALDANGQMLGDRRFSTDLVGYQQLLDWADGFGTISAVGVECTGSYGAGLTRHLLAAGLDVLEVNRGHALVRSRSGKNDVIDAEAAARKVLSGECSSPAKDTTGAVEAIRNLHLIRDSAVKSRTATLVQLRDILVTAPAALRGRLNAKTLQAKAMQARSLRPDLVRLDEPEQAAKYALRELGRRAFELTAQINDVDKHLNRLVTAVAPTTMTLPQVGPVSAAQLLITAGENISRFPSEAAFARLCGVAPIPVASGKSHRMRLHRGGNRQANRAIYLITVGRLKSDPRSQAYLERKQSQGHSKSDVIRSLKRFVARELYYALKKDLQLHTRIVPDTNVSIGSAA

SEQ ID NO: 387468 - protein, 362 aa, unidentified
MTESSDYESVQVFIGVDAGKDTHHAVTVNRSGKRLFDKALPNDENKLRSLISDLKQHGQILLVVDQPATIGALPVAVARSEGVLVGYLSGLAMRRIADLHAGEAKTDARDAAIIAEAARTLPHALRTLKLADEQIAELSMLCGFDDDLAAQTTQVSNRIRGLLTQIHPALERVLGPRLDHPAVLDLLQRYPSPDKLASLGEKKLATQLCKLAPRLGKRLAADITRALTEQTVVVPGTNAAVVVLPRLALQLITLRKQRDEVALEVEQRVLAHPLYPVLTSMPGVGVRTAARLLTEVACRAFASAAHLAAYAGLAPVTRRSGSSIRGEHPSRRGNKTLKRALFLSAFSALRDPISRALTTHAK

SEQ ID NO: 387469 - protein, 418 aa, unidentified
MKSMEITAVGIDVSKSKSTVAIRRPGGVIVARPFDISHSNHDLEKLVSILKTTGGDIRVVMEHTSNYWKPIALTLKEAGFYVSVVNAMLIHDFSDNSIRKLKTDRADSLKIANYALTFWNELPPFNDEDETRLVLREQSRMYERLSSTATALRNGLIALADQTFPAIDQAFGHAIKNADGHEKWVDFFSIYWHRDCVLRLSIEKFTESYRKWCLRRNYKFRTNTAHKLYALAQDAVPTLPKNNGTKALVLQACKSLNAVCEAKQATQEEMNRLASLLPEYEVVMQMEGTGPITGPALMAEIGDVRRFKNKKALVAFAGIDAPPFQSGNFESKSRHVSKRGSPHLRRTVFLVANIILTLSHKDNSVFCFMDKKRAEGKHYYVYTLAGSAKFLRIYYARVTEYLRAQEPTATAICSDCKD

SEQ ID NO: 387470 - protein, 346 aa, unidentified
MSHKTAATVAHTIGIDTGKNTLHLIGLDDQGAIVLREKIARGRIAARLANVPRCLIGIEAGMATHYVARELSALGHDVKQVPPAYSKPFRQGHKNDFRDAYAVAEAVQRPSTRCVPVKTDDQLDLQALHRVRSRLVGQRTAVINQIRSFLLEHGIAVRQGLRFPRQQLPDILAKRSDVLSLRMIRIMEDLSGDWRRLEERIEHVTKEIEVLAHGSESCRQLMTVPGIGPLIASAMVAAIGNGAAFAKGRDFAAWLGLVPKQMSTGDRTILGRISKRGNRYLRTLLMQGARVILLRPANWAKHSFGPWLTAAANRLHHNVLATALANKLARIAWTVLMQARSYEARV

SEQ ID NO: 387471 - protein, 411 aa, unidentified
MEEILCGIDWASDHHDVALIDVEGIKLGRRRISDDAAGLGELTGMFAGHGAGPGTVKIAIETERGLLVASLRAAGYDIYPVNPKAVDRYRDRHHLARGKSDAADAMVLAHILRTDAHLHRPLPADSPAARAIEVLARAHQDLVWSRQHEVNRLRSLLAGYYPAALAAFGDLTTRTAMTVLAAAPTPAAAAQLTTSDLLDLLAAAGRGRRRADARRLAEVFAAPQMRQPAAVEQAMGDAATAVITTITAMNTAVTALAQRIDASFEQHPDAAIYHSMPALGPILSARVPGEFGDDRTRWPDPASRRAYAGSAPITRASGKKRVVLARSIRNRRLYDAAHWWAFAALSVSPGARAYYHQRRAAGDGHQAALRRLASKLIGQLHHCLQHRVPYDEATAWTRHQEQSQPAPPAAA

SEQ ID NO: 387472 - protein, 428 aa, unidentified
MDGRDCVRVKEFRKLRKEIRGSDEYLIVGIDVAKSKNNAFFGTSTGKTLLKRLVFENTFEGFDRLLTQTESIRVQHDLQEVVFGLEPTANYHKPLAEFLIKRCHNVVLVSGVAVKRNRELLDGRWDKHDAKDAANVADLISQGKINFYEYASVELRDLKGLLSLKRRLKKLEHGLRIRIRNHLLAQYFPEMDKFYGHGESENLAIVRWCLSPDVISGLGYEKFFQMVTTRANGISQENRLRAIWEQAPLSIGCDVTESVEFEAEVLVETLSRIREIIRSIDERIRKFGCRIPEFEYLLTIPGFGPDTSAKVIAALGNPFRFDNAKQVLKLAGFDLSANRSGETSYSATPVISKKGKAHLRYALYQAAFIASIKNKRFIAYYTNTIRGREGEKGIKTKMRVKLAAKMLVIAWTLMKKREPFNPDYLKID

SEQ ID NO: 387473 - protein, 308 aa, unidentified
MIVQNYVGCDISKQRLDFFDEASGRCQRIANQGDAIEAYVAGLCADRDFVVMEATGIHDRLLRHALAKAGVAFSRHNPAHTHHYAKSTTQRAKTDRLDARMLSDYGRRYQPAPEPAPCEKGEHLQSLARHRDHLVEIRARLKRYLSEAFDADVVDDLQDVIADFDTRIDALESRIVKTIRQAEDTALDYALMVSVPGVSTITALSLLAHMPELGQRSPKSIAALAGLAPFDNESGKLKHRSKITGGRPRVRRALYMAALGAIRANDRFKAFYVALAARSGSKKLAIVAVARKLLVTLNAIIRDKTAFT

SEQ ID NO: 387474 - protein, 387 aa, unidentified
MSQPNDLSRSLVPFDQETTLVAVIELSQSSWLIAGTVPGVERQPLKKIVPDEAALLRLLHRWRDEASQGGRTITRMVVAFEAGRDGFWLARWLAKHGVEVHVIHATSVAISREHKRAKTDRLDTAMLMRVFLGWLRGERGHCGMVAVPTIEEEDAKRPSRERESLVGERTRVINRMKAALARLGIRGFKPELRKAPQRLDALRTPEGSPIPPNMLDEMRRDLARLGVLREQIAAIEQARLQRLEQAPPSGPNAMVRLLASVIGVGVETADMLVQEVLSRNLCDRRAVARYAGLTGSPDESGSKRREKGLAKSGNARVRRGLIQLAWRFLLFQKDSALAQWFQSRTEGVRGARKTKMIVALARKLLIALWRMVTFGEVPQGVVLRQPG

SEQ ID NO: 387475 - protein, 425 aa, unidentified
MKTYILRDRKAVERQNRARRDRAVNTLVNAVCDPAPTPTPTTTLTGPVLYIGLDVHNDTIAVSLAPSDSTEVRRYGIIGGQHDDVLRLIKKLSAAHPGVALKFCYEAGPRGYPLCRFIGSHGAQCIIVAPSKVPRQPGDRVKTDRRDADQLARLFRAGELTGIYVPDPQDEAVRDLLRARYQSQKQQHRARQQLKMFLLRHNIRYAGTKAWTAAHLRFLATVKLPFAEQQFVFQEMVNVISEAGQRLERYQKEIAGVVEGWRWKPVVQALMSLRGVALLTAATLVAELGDLNRFESAPRLMSYLGLCPSEHSTGKDRQQGGITKLGNGIARKAIIEAAWNNSLAPRISRTVLARQEALPTAVTEAAWNAQLRLHHRYRHLTGVGRKKSQVAAAALGRELAGFVWAIGRMVKPSAAPTEAGKPKAA

SEQ ID NO: 387476 - protein, 375 aa, unidentified
MKEKLRFLGLDVHAETIAVAVAEPEGEVRSLGTIPNRAESIRKLIKKLGPAARLRACYEAGPTGYVLYWQLAELGVECEVVAPTLVPVKAGDRVKTDRRDAEKLARCYRSGDLTPVWVPDAGSEALRDLVRAREAAKQDQARARHRLSKFLLRSGQRPPAGVRPWTRPYLIWVAQLRFTQIAQESTRQDYLHEVEHMRERVARLEQAIMEAVKLASPALQQVINDLQALRGIADISAVTIASELGQVSRFDSARQLMGYCGVVPSEDSSGKRTRRGGITKTGNAHLRRIVVEAAWSYRRPPRIWYGLRRRQESISEEAKEIAWKAQHRLHKRYMKLGAAGKDQRKIVTAVARELLGFIWAIGTRAETVSRQQVAA

SEQ ID NO: 387477 - protein, 343 aa, unidentified
MQTITTIGLDIAKSVFQVHGVDAGGQVIVRRQLKRSYVLTFFQKLSPCLVGIEACGSAHHWSRELQALGHTVRLIPPAYVKPYVKRQKNDAADAEAICEAVTRANMRFVPTKTPEQQSGLVLHRTRHLFIRQQTAVINAIRAHLAEFGIVAPVGRHGVEELLNVVTDPNDRRVPEMARACLSAFGAQLRRIQEQVREFDRLIRAWHRSDEMSMRLDDVPGVGPVLATAVVATVADPKSFRSGRNFSAWIGIVPKQHSSGGKNRLGNISKQGDRYLRGLFVAGALAVIRYAKIHGTKHRPWLTALLARRPTKVAAIALANKLARMVWAMMARGERYKEPVALAA

SEQ ID NO: 387478 - protein, 326 aa, unidentified
MFFIGIDVSKAKLDCCLLLDVASNKRRAKVVANSKTGIVDLLVWCTKQQVPVHELHAIMEGTGVYHEQAALALSDAGATVSIVNPAQVKDFGRSLGVRTKTDGVDSFVLARYGALLKPKSWTPPAQEARTLQALLSRREAIAQDLQRERNRLEKADATDTPSLIRQSIDDSIDFLEKQLTKLQQDIDDHINKHPNLKDDRGLLMSIPAVGPQVSNHLLSVMHNHDFQSAEQLAAYLGLVPVERQSGTSVQGRPRLSKAGPARIRAVLYMAAIVATKHNPHVKALYQRLQERGKTKMSALGAAMRKLVHLCFGVLKTREAYQADYAI

SEQ ID NO: 387479 - protein, 343 aa, unidentified
MDHFAGLDISVKETCICIVDDTGRILREVKVASEPEALLQVLRGPAYCFKRIGLEAGPLSQWLFSALAEADLPVICVETRHMQAVLKAQINKTDRNDARGIAQMMRVGLYRPVHVKTLRSQKLRMLLTHRKLLQSKAIAIENDLRGTLRNFGLKVRMVGTMKFEARIKELVENLPDLAVLVEPLLIVRQVLREQFGILHRRLLAIVRDDEVCRRLMTVPGVGPVVALTYRATVDVPARFRNSKAVGAVFGLTPSKYQSGEINRTGAISRCGDEMMRMMLYEAAQVMLLRSAKWSWLKAWAMKIARHRGMKKAIVALARRLAVIMHRIWVDGTEFRWARESAVA

SEQ ID NO: 387480 - protein, 373 aa, unidentified
MNYSTVYVGMDVHKETFSLCCYTNEKEQAEYSQKVDGHYSKVLNYLEAMRFHYGDDAVFICGYEAGCLGFTLYHQLTSHNVKCVILAPTTMPKPAGKKKVKTDKRDAALIARCLAHRDYSPVHIPTEQDEQVKEYIRMRQDHKLALKKVKQQILAFCLRHNYRYDETKNHWTQTHLQWLRALKPEGIYQEILTEYLATYGQLTDKLERLDHRIEELAAQPEYQEKVQHMSCFLGIKTQTALSTLVEVGDFKRFASAQQFASYLGLTPGEDSSGGDQNRLGITKAGNSHTRTLLIETAQSYTRNQIGYKSKTLKARQYGNPADIITYADKANERLRRKYYRMVLNQGKKANVAKTAVARELACFIWGMMTGNTQ

SEQ ID NO: 387481 - protein, 320 aa, unidentified
MSLLPLGIDVSKAKLDCALMLGSKFRTKVFANSPQGFAQLAAWLQRQTCEAVHVGMEATGIYWETVALFLSDAGHRGSVINPALAKAHGQSLGLRRKTDAADAKLLADFCREKQPPAWRPPSDNERRLRALVRRHQGLVEMQTQEKNRRESLREDVRDSVEAHLAWLAAEITRIEQAIAKLLDEDDSLRGQRDLLDSIPGLGERTIAVLLAYGVHGEHFQSARQFAAFAGLSPRLHESGSSVHRKPRMSKAGHAFLRRALYMPAMTALYKTAWGKRFRNRLAARGKPPKLIIGAMMRKLAQVAFGVVKSGAPFNPALHGA

SEQ ID NO: 387482 - protein, 482 aa, unidentified
MKKRNIYQNQSQELLYLFENAGSNDKVMCVPMDYAKKDHLVMFCNGHGDILRKPFSVKNTPEGLSYIEDQVIRSCTKRGIKKEHVFFGGEDANSFAKNFVSTLRSKGFLVANVNAHDAKKQRESVQASTDRIDLMGIAAMLLNCRGNCCPAQSGIYRNLRLLVRHRRKLVQMLTEVKNRVHGIVDELFPGFLKEQNTGIVAFTESSLYLMEDRFSPKQICRRKRKKLIEILNRFGTSHAEQTAAKLQQYAAKVLHAPVEYVGTMQLSLSQHVKHIRCLKESIAQMEKEIASNLAQTQGAFLTSVRGIGLVLAAGVTAEIGAPNDQKPLNNLSSYAGIVPRVKQTGGIEGKTYTGPVARRCNRILKDYVVQSAHHLGWHGPKDLMNDYKRRDASGQHANFGMGRRYLRMAMCLMRTSQVYLPSALRKEGYTLEEKAGYYMMNWPYLRGKWKKVDALEEAFAINRPLGMWRQIVQELYGIKLKL

SEQ ID NO: 387483 - protein, 420 aa, unidentified
MKDFAITDFAAIIGIDWADRKHDVCELTVGSNDYQLSVIKHKPQALQDWALSLQKRYPGQSVAVACELKKGPLIYALSAYPHIILFPLNPTMVAQYRKAFANSGAKDDPSDARLQAELLNLYMHKLKPLRPECPQVRALAQLVEYRRKLVQDRIKVSNRLTATLKNYYPQVLEWFADKDTTIFCDFVTRWPSLPDAKKAQRRTLNTFFNQHNSRYASVNETRISAIKSACALTTDAGVIEPNKMMAEMLVAQLKLLITSIERLDGEIKQRYSTLPDRKIFDSLPGAGAQMAPRLLVAFGTDRDRYQAAADLQKYGGVAPVIERSGKQSWTHWRYSCPKFLRQTFVEWAGISIRYSFWAKAYYEQQMAKGKPHNTAIRSLAFKWIRIVFRCWQTSTPYDESVYLEALRKRNSPLLQYAANN

SEQ ID NO: 387484 - protein, 462 aa, unidentified
MTVPKTKGSRTKATPLPTSLPAIRPLVAGLDVGSSEHWICGPARADGQPNVRGFGTTTDQLQALADWLAEQGVESVAMESTSVYWIPIYELLESRGIEALLVNARQLHNVPGRKTDVTDCQWLQLLHSCGLLRGSFRPSEAITRLRALQRQLANLVAERTRCVQWMQKALDQMNVQVHRAVTDLTGTTGLAIVRAIVGGERDPARLALHRDYRCRKSAAEIARYLTGTWRDEHLFNLTSALRLFDALEAEIAAYDAQLLTAVESLQPPDRQADPVAPPPHPAQEKAIKARGEQQARTTLWRFAGVDLTRIDGISAGAAQVVLTEVGPDLAAFPSEDQFVSWLRLCPRTPISGGKPLKKRRNGLGANRIAGVLRMAATSLQRSKTALGAAFRRIARHKGGAVAVFATARQLAQLIYRMLRYGHDYVDIGEQAYDQRFLVRRFAALTESARSLGYTLVPTAATE

SEQ ID NO: 387485 - protein, 358 aa, unidentified
MHRCTTQSAGQIIGQVAGLQVIGLDIAKSVFQLHTVDMSTGEIVNVQLKRAKVLGHFANRAPCLIGIEACGGAHHWARELTAQGHAVQLIHAKAVRPFVNGNKTDATDARAIWLAIQQPGTKFVGVKTLAQQATLTLHRQREMLMRMKIMQINALRGLLYEFGATLARGKKALLGELELALEALANSIPQYVVDSLREQAQRIKQLAIDIKAIEVRLAEVLRIDVDMKRVAAIPGVGLLSATAAIATMGEAKAFKSGREFCAWLGLVPKQRGTGGRVNLLGISKRGDTYLRTLLIHGARAVLRHAKEPGPWLEQLQARRPTNVVIVAQAAKMARTIWAVTARQQDYQRGHQSTRPLGA

SEQ ID NO: 387486 - protein, 443 aa, unidentified
MEVVYRRCCGIDVHKDFITACVLVNEPGKQREVRKKEFRTYWSDLQKLKLWLYASKVEQVGMESTGVYWKPVWNVLEGHFPLLLANPYHMRNIPGQKTDQKDSEWISELLAYGLLRPSFVPPRPVQELRDLTRYRAKLTGEHNRVHSRIAKILEDANVKLGSVASDILGVTGRRVIEAIIAGQEHPDWLADKACGTLRAKRDQLRLALKGRITDHHRYMLRELMADLDRIEAKILRLETEIADRLKPHASAIERLMTIPGLKLVTAWSIIAEMGTDMSAFPDAAHAASWAGLAPGNNQSGGKRRNSRITKGNRWLRRALVQSAWAVSHKSNCFLTAQFYRRAASQGEKKAIVATAHQLLIIAFYILRDGTVYREKGGDYFDQLNPERTKRKLMARLERMGFDVTLRNSTPNPVPSPPAPPPSARRRGRPCKCVERGIDCKHSQ

SEQ ID NO: 387487 - protein, 304 aa, unidentified
MEHYAGLDVSVKETSVCVVDGAGQVVREVKVASEPGAILGVLADEAFTLKRIGLEAGPLSQWLYGALAEADLPVICVETRHMKAALSAQINKSDRNDARGITQMMRVGLYRPVPVKTLASQKRRMLLTSRQLLQAKAHDIESDLRGTLRNFGLKVDPVSRGKFEARIRELVVDCPGLAAITGPLLIAWRTLREQFAVLHRRLLAVVGDDAVCHRLMTVPGVGPVVALTFRATVDMPNRFANSKAVGAVFGLTPRQHQSGEVNRMGYVSKCGDAMMRAMLFEAAQVMLTRTTLHGSLLCLPAPGY

SEQ ID NO: 387488 - protein, 390 aa, unidentified
MIYVGIDIAKLNHFASAISSDGEILIEPFKFTNDGDGFQLLVSKLNSLNAEPDSIIIGLESTAHYGDNLIRYLVAESFQVCVLNPIKTSTMRKNNIRKTKTDKVDTYIIAKTLMMQDSYRFYTFYDLNLMDLKTMGRFYQKTVKQRTRLKIQLTAYVDEVFPELQYFFKSGLHQKSVYALLKEAPTPEAIASMHMTHLANLLVKTSHGHFNRDNAKELRVLARKSVGASDSALSIQITHSIAQIELLDSQLQKIEDEMAEIMKFNDSVIMTIPGIGCINGGMILGEIGDIHRFSNPCKLLAFAGLDPTVYQSGNFQARRTRMSKRGSKVLRYALINAAHNVVKNNSTFKAYYDAKMAEGRTHYNALGHCAGKLVRVIWKMMTDDVEFNLD

SEQ ID NO: 387489 - protein, 402 aa, unidentified
MNAVGIDVSKSKSVVAIMRPFGEIVSTPFEIKHTASDIHSLIELINSVEGESRIVMEHTGRYYEVLAHQLSEANLFVSAINPKLIKDFDNDSLRKVKSDKADAVKIARYALDKWQNLKQYNVMDELRNQLKTMNRQFGFYMKHKTAMKNNLIGILDQTYPGVNTYFDSPARSDGSQKWVDFASTYWHVDCVRKMSLNAFIDHYQNWCKRKKYNFSQSKAEEIYGKAKELVPVLPKDAITKLIIKQAVDQLNSASTTVESLRTLMNETASKLPEYPVVMAMKGVGTSLGPQLMAEIGDVSRFTHKSAITAFAGVDPGVNESGTYEQKSVPTSKRGSADLRKTLFQVMDVLIKTHPQDDPVYQFLDKKRAQGKPYYVYMTAGANKFLRIYYGRVKEYLSSLPES

SEQ ID NO: 387490 - protein, 355 aa, unidentified
MESTKYVGLDVHKEATTIAVMNSAGKLIMESIIETKAITIRQFIQGLHGDLHVTFEEGTWAAWLYDLLKPYVTKVVVCDPRKNTLLKVGNKSDRIDPKKLAELLRNGSLSEVYHGENGVRTLKELARSYLTISKDLGRVMNRVKALYRSWAIPCAGTQVYALCHRSEWLSKITEAGVRRRAEHYYQQLDALQTLRREVRKDLLLEGRKHNATKLLRQVPCIGPIRAAQLVALMQTPHRFRTKRQLWTYIGLGLETRDSAQYRYVEGQLQRSKKPQQLRGLNSNHNHDLKNIFKGAATTASVSAGPFHDFYQALLTKGMRPTMARLTLARKIAAITLIVWKKGARFDPQHLKQQAA

SEQ ID NO: 387491 - protein, 412 aa, unidentified
MEVLYPCCCGLDVHKKSITACVLWAEEKGKSRKEKRRFGTFTQDLLRLADWLRECGVTHVAMESTGVYWKPVWNILEGQFEVLLVNAQHIKAVPGRKTDQKDSEWIGDLLQHGLLRASFVPPRPTRELRDLTRYRVSLTQEINRIANRVQKVLEDANIKLASVATDALGASGRAMLEAMLAGEQDSMRLAEMSQGKLRNKIPELRLALEGRMSEHHRFLLRQLYDHLLFTEGKLREIEQEIARRMCPFEEEVARLRTIPGVDRVTAWGLLAEIGLNMNQFPSAAHLASWACLCPGSSESAGKRLSGKMRKGNVSLRRCLAQAAWAISMTKNNYLSALYRRIAARRGAKRAVMAVAHALLVIAYHMLKRGENYRELGADHFDRIDVNRIRRSLVRRLERLGHKATLEPVEQTA

SEQ ID NO: 387492 - protein, 317 aa, unidentified
MRFYTNQHQFYCGIDLHARSMYVCIMSHDGEMLVHRNMQAAPEPFLKAIAPYRDGLVVAVECIFTWYWLADLCAQEGIPFVLGHALYMKAIHGGKAKHDKIDSQKIATLLRGGMLPKAYVYPAEMRATRDVLRRRTHLMRTRAELLAHVQNTHAQYTLPDIGKKIAYKANREGVAERFDDPAVQQTIEVDLDLITYDDQMLSDLELFILKTAKQHDAHPLYLLQTVPGIGKILSLVLLDEIHQIDRFPRVQDFASYCRLVKCAKESGANAWALLGTRSGTLTSHGPFLKRPRCSFVGTSPDKSIWPGWRKSMTKAKR

SEQ ID NO: 387493 - protein, 348 aa, unidentified
MKKLVAGMDLHSNNVVIGVMDLDGLRVASGKVACELKAVEQFLAPFKPRLEQVAVESTYNWYWLVDGLQAKKYPVRLANPAKMEPYSGLKHGDDTSDAFFLAELLRLKILPTGYIYDAQLRPVRDLLRRRMLLVQQRTALLLSFKSLYTRTTGQALALNQLKALAIPEAQQLYTHPANQLIAGMQLEHIEQLNASIAQLEKSVLDSARELPGYARLTTLPGVGRILGMTITMEVGDSQRFADAGNFASYCRTVKAERISNEKKKGENNAKCGNKYLAWAFVEAANFARRYDEQCRQWYDRKAAKTNPIIATKALACKLAKAAWHVMTADVDYDAQRVFGPRPTPALKT

SEQ ID NO: 387494 - protein, 347 aa, unidentified
MSDVHILAIDLAKRSFQVCATDRGGAVLFNRTISRAKLMQMLDAHEPCIVAMEACSAAHYWGRRLIALGHEVRLVPPQHAKAFRRVHKSDAHDVVSIAEAALRPNVHFVPVKTVAQQDLQLLGRIRERLVAQRTAIINQIRGLAREYGVNFAKSREALLEQLPIALADAQNDLSPIAREELKNLLQQVRDLTEEHVKIMKRITALASEDPAYDRLRTIPGIGPTIAPALLASIGHAQQFASARQCSAWAGLVPRQNSTGGRVQLGSITKNGDRCLRVLLIHGARTVVRWADKHSHPQSRWIKDLVARRGKNKAIVALANKLMRIVWVVLTRGVEYDMHKAFRAQPAS

SEQ ID NO: 387495 - protein, 312 aa, unidentified
MPCFIDIDVAKAQWDIALRPSGERWAVPNDARGVTTLVDRFQALHPTLIVLEAPGGLERAVTGAWATAGLPVVVVHPRQVRDCARATGQLATTAAWEARALAHCADVIRPTPRPLPDAQTQERRALLGRRQPLIGMRTAAQHRLAGTGERLTQDIEAHITWLHERLATLDDDLETVLRASPLWRDNDALLQSAPGLGPVCARTLRLALPAWGTLTRQQIAAVVGVAPLNGDRGTLRGRRSIWGGRAHVRTVLSMGTRVATRHNPRIKALYERLLAAGKVKKVALTACIHKFLTILNAMLKHRTPWQAQEVES

SEQ ID NO: 387496 - protein, 430 aa, unidentified
MGLIMATAIPPEHDEQPISYEWFVGIDWGSQKHQVCMLDRNRQVVGERVVDHDGASLAQLVTWLLTVSQGQPQRVSVGIEVPRGPIVEGLIERGFHVFALNPKQLDRFRDRHSVAGAKDDRRDAFVLADSLRTDRPSFRRLRLDAPQLFMLRELSRAEETLLEEFRRTTNRLREQLHRFYPQMLQLSAAADEAWLWDLIALVPTPAHATTVTADQVHQVLKAHRIRRIKADEVLVCLQAQALPAAPGVLEAAQVHCAFLLPCLRVLAEQLRSCAQQVEALLHTLAEERDEAGGPSDVAIVQSLPGVGRKITAWLFAEAAQPLTERAYQVLRTQGGVAPVTKQSGKRRQVVMRRGCNPRLRHALYHMARVAAQRDLHFSGVYEALRAKGQRHGQALRNIGDRLLRLLMAMLRHRTCYDASRIRCEPVVQMG

SEQ ID NO: 387497 - protein, 315 aa, unidentified
MDTPFVGIDVSKETLDVAVLPGGGRKTFRNDDLGCEQLTTWLLDVEPVIVVLEATGGFEMLAASTLSSAGLPVAVVNPRQVRNFAKALGKLAKTDAIDALVIAHFAQAVKPKNRPLPDDQALALKALVTRRRQLIEMLVAEQNRLAGAHPRVKPAIRISIDWLRTQIEEVDRTIATSITDSPLWREKEELLTSVKGVGPVVASSLICLLPELGILNRKQISALVGVCPYNRDSGAYRGTRSIRGGRADIRSILYMAALSATRHNPVIKAFYQRLKQAGKVSKVALVACMRKLLTILNALLRTNQKWNAARTLSLT

SEQ ID NO: 387498 - protein, 421 aa, unidentified
MEVVSARCAGLDVHRSVIVACARLGEGRGRVRKVTGQFVTTRAGLERLRAWLQELGVTHIGMERTGVYWMPVDAVLEQAGGFELIVVNAQHAKAIKGRKTDVKDAEWLAELLRHGLVRGSFVPPRPIRELRDLTRYRRTLVENQGSERRRLIKLLEIADIKLAGVISDIFGVSGRAILRALIAGDQTAVEISRLARGSLRKKRGQLIDALAGELATHQRQILALQLARVEADEADIAALDQQIAERLAPYAAPIARLMTIPGIDWVVAVTVIAEIGVDMSAFASAGQLAAWAGACPGNNESAGKRKPTGARTGNPYLKTALCNAAIAASRKRGSFFKAKYHKLKSRRGGWRAALAIAHKLIVCIYHMLSTTAPYRELGEDYLDKRDTQRAARRYVRRLRDLGFSVLLQPLSQPQTAAANAL

SEQ ID NO: 387499 - protein, 340 aa, unidentified
MDNIGLDLHKRESQLCILTSDGEVVERRIQTSRERFTAVLGERAPARILVEAATESEWVAQHLEALGHEVIVADPNCAPMYATRSRRVKTDRRDARTLAEACQLAAYRRVHRLSPARRHVQVELTVRDALIRTRTRYVAVVKARVRREGLRVPGGDPEHTVAKLMALPLSVAVAAELAPLVALLEPLNAQIVAADARLAALAAADAVVQRLMTAPTIGPVTAVAYVATLDDVGRFATARRVAAYLGLAPTERSSGEQQRRGPISKTGNPRVRCLLVEAGWRILRSTQPAAAPLRAWAERIAARRGRAIAAVALARRLAGILYAMWRDDADYRAAAISAVV

SEQ ID NO: 387500 - protein, 339 aa, unidentified
MRILYVGIDLAKNVFAVHGVDEHGKAVLVRPSVARAKLHELIATLPACTIGMEACSGAHHWARLFLQHGHTVRLMAPKFVAPYRLSGKQGKNDAADAMAICEAVQRPNMRFVPVKSQDEQARLCVHRVRQGLVEQRTATINRIRGLLAEFGIVLPQRAATVRREATVHLEDLPGWANTAIGDLLSDVHRLDERIAEYDHHVLQMARDDQRSRALMQLSGIGNTTASALVSTIGNAHDFKNGRQLAAWLGLVPGQYSSGGKTRLGSITKAGDRYLRTLLVLGARAVLAAARTKVDRLSRWALALEERRGYWKAVVAIAAKNARMAWAVLAKGENFKLLEA

SEQ ID NO: 387501 - protein, 392 aa, unidentified
MICVGIDVAKDKHDCFIMSSEGEVLADVFTVSNSKEGFEHLLQTINTCTGIGNSKIKVGLEATGHYSYNLLGFLLDNGLTTFVINPLHTNLYRKSQSLRKTKTDRVDARTIASMLMSDMSLKPYTNIAYHNSELKSLTRYRFDKVKERAALKSSVARLVNFLFPELEKLLPTLHTASSYALLSELPSAKHIAEVHLTHLTNLLYVASKGRYSKDKAIQIREAARNSIGTYMPAKALELKHTVKLIKEFNNEIAEIESEIQSIMGKIDSPITTIPGISLRMGAMIIAEVGDFNNFDSPDKILAFAGLSPSTYQSGQLNNCYAHMEKRGSRYLRYALFNATKLVCYWNPLFADYLAKKRSEGKHYNVAVSHAAKKLVRLIFALQKSGQPYMANS

SEQ ID NO: 387502 - protein, 404 aa, unidentified
MHAAAVTASTVVVAVDVGKSSAALSVTDAGRHRLLGPVELSMTRSALVDLVEKVRGVLPGIGGPVKVGVEAAGHYHRPLIELSAWPAGWEVLELNPAHVTEQRRVQGRRRVKTDAIDLEAITELLLAGRGVPVTGHDLVIGELVAWSAHRARRIQTRTATKNQLLGQLDRSFPGLTLALPDVLGCKIGRLVAAEFADPARLASLGVTRLIRFAAARDLQVRRPLAERLVKAAGDALPTTDAAVARRVLAADLVLLGDLDSQIVAVEAELARLLPVSPFHPLTSVPGWGVVRASSYGAAVGAPTRWPGSAQLYRAAGLSPMQYESAGHRRDGSISREGSVELRRALIDLGIGLWHNEPAAKAYAAGLKARGKRGGIIACALAHRANRIAFALVRDQAAYDPARWT

SEQ ID NO: 387503 - protein, 474 aa, unidentified
MARTRSGPASPPVPGDAGAEVTDEPVQVISRAAAIDVAKGSGMVCMRLPHESRAGRRTQKVWEVTATFAAVVALMDHLVCQGVERLVLESTSDYWRIWYYLAEAAGLEVWLVNARDVKHLPGRSKTDRLDCVWLCKLNEWGMLRRSFVPPEPVRDLRALTRLRANLTHDRVRHQNRIEKILEDSLLKVSSVISDLMGGSGRRFLQALADGERSPAALAALGDYRLHASKSELQEALTGRFRDIHGFEIGMLLKLIDDLSAKITELDERIEAQLENVPGLDGVCTSCGQPGPDGPCTGCGEPVLGVIARLDEITGIGRGAAQVIVAELGTDMTQFPTPGHAASWAKLTPRAIQSGAASKAGRTGKGNPYLRGATGAAVMTAARTETFLGARYRRHARRRGKQKAIVAGCRTIIEIAWHVIADPGFRYIELGPDYHDQLDPGRKTRDKIRQLEKLNPGMTVTLTPRPEPGGQAPAA

SEQ ID NO: 387504 - protein, 359 aa, unidentified
MTMLAEPNEKIEDPTVLDAVVGGDTHRDTHQLEMLTGAGVMISTISIDNDADGYAAAIAWIAQHAPGPRVLVGLEGTRSYGVGLCRAVQTAGLQVVEVEQPKKGQRRGRGKSDPIDAHLAALTVLRMPADRKALPRSDGDREAMRILLVARNEISTTRTAQINRLRALLLLGDDEDRALSRGAMSKAHLDRIGRRRGRRDETREQAVRRGEARRLAIAIRAADLELTANHKQLKTLVQAFAPGLLDRKGVGPFSGAQAIVSFSHVGRCRDDAAFAALAGASPLPASSGRTDRHRLNRGGDRQLNRALHTIMLTRWRDCTRTNAYIQKRRNEGLSDRDIRRCLKRYIARELFRALTAVGA

SEQ ID NO: 387505 - protein, 418 aa, unidentified
MPRPNGRSRYTTGSVADQLCILRDRDAAGRLQAVLDLIERHKAKWILATDVRVVVSYEAGPDAFWIYRTLRARGIECYVVDPASIPVERHKRRAKTDRLDAIKLVINLRAWLRGERDRMRVVRVPSPQDEASRHLMRDRAQLQKEVLQHRDRMRKLLATLGCWENVEHKGFASRLAGNEVRCHDGTPLPPELSQRLLRECERLAFVERQFAALETALHGSLPAAASSRVEHLTNLKGIGRVGAQRLALELFWRSFDNRRQVGACVGLVPQPYDSGDSQVDQGISKQGNRRVRALLIEIAWSWLRYQPDSALTNWFYQRTQAMSSSRRIRRVAIVAVARRLAIALWRYLKGTASCQKVPSSSRHSSHTLDETQQLASRLRQHKGSEVYASVEVPGYLCGNRLKDGTRAPEKSGRSAHAG

SEQ ID NO: 387506 - protein, 355 aa, unidentified
MERYIGMDVHAASCTLAVISEKGRKLKDFPVETNGQALVEAIRMIPGHKHLVMEEGLQSAWLYETLSPHVDELVVAGITQSRGSKSDKRDAYGLAEKLRVGNLDKHVFKAPRQFTQLREFSRTHMTLVTDVVRTQARIKSVYRSRGVLVTGVDVYSSRRREEWLKQLPSSTKIRATRLYDHLDFLLEQKKQAEADLLREGKKHPIVKILETAPGFGPIRAARLVPIVITPHRFRTKRQFWSYCGLGLVTRSSSDWVQTTDGAWIKSRVPLTRGLSRQHNHFLKSIFKGAATTVITQRNKDPIHTRYERLLDGGTKPTLAKLSLARMIAATVLRMWKNEEEYDPGRAGLPTQTRKG

SEQ ID NO: 387507 - protein, 384 aa, unidentified
MHTEKHFTLKPLQFDLFCGMDVDKKSISITFVSHDGFVKSIKIAYDSSNLIAYVQKRFADKRIAFVYEAGPTGFGLYDDLTAAGFVCLVVAPTQISRSAADRVKTNRIDSRKLAEDLRGGKIRGIQVPTRIYRDLRHLVHLREIFVRQQAATKVRIKLLLLLEGIRFPAFTPNERWSAAVLLRLQSLKTEPEVRFKLDHYLITLQFFKNQLHSINKEMLGFCKRNSDLWACVKLLCTIPGIGSVISIYLLARIADWRYLQTSRQIGHLLGLVPVERSTGDNVRKGAISRMGDATTRSKLVEAAWMAIRKDPELNNFYQRIKNRNPNQFASQKAAVAVARKLTTRIYAVLKYQRPYVIKTSGGDPVLNSTPGNQLPVVRARKRIP

SEQ ID NO: 387508 - protein, 411 aa, unidentified
MLEVKAERCAGIDVGKKFLAVCVMIGPANEKPAVEVRRFGTTVKELERLRTWLQETACTEAVMESTGSYWKPVFNILEGSLKIILANPEQVKALRGKKTDPKDSRWLASLLRHGLVQASFIPPQDIRELRDLTRRRRTLLSDGSAERNRVQKVLEDANVKIGDVLSDVFGVSGQAMLEALLEKKLNPPEIAQLVHHRLQPKIPQIMEALEGHRMTDHHRMLIRQSLDHMRYIEAMIAELDTAIGERLRPYQKQVKLACTVPGIGPTGAASLLAETGMDMSPDGPFPDCHHLASWAGICPGNNESAGKQKSGRTRKGNRWLRATLNQTAWAASAKKNSIFQLRFQKLKVRRGAKRAVTAVAHAQLIALYWTLRNGTPYQEQTRQIEQDRKEAQIRHHLSQLTKLGYELVPAS

SEQ ID NO: 387509 - protein, 411 aa, unidentified
MGADSDRRSGRVRLSNPPTLEATVRIATDRPQAPTAIRTNLGAIFLSMELSRTTWLLTSLSPGGGERMSKHAVRSGDVAGLLARFSQLRDKVRLRTGQVVPIIVMQEAGLDGFWIHRLLQDEGIESYVVDPASIAMSRRRRRAKTDKIDGESLVRALLAYKRGEPRVCAMVKAPTPQEEDRRRICRERKTLTAERVQHVNRIKGLLFAQGICDYEPLLRKRRERLEELRTGDGRPLPHHLKAQIGRELDRLELILQQIRSVETERDVLLSPTKDGTPAPGAMLKSLKGIGPEFAGVLWSEGLYRSFSNRRQVAAYAGLAPTPWQSGSVAHEQGVSKAGNPRLRTTMIQLAWLWVRHQPGSILTQWFHQRVQFNGGRIRKVLIVALARKLLIAFWKYVTAGIVPEGAEIMAA

SEQ ID NO: 387510 - protein, 318 aa, unidentified
MDKLPAAERFVGIDVSKGRVDVHVRPDATAFACTTDPDGLAELVNRLKPLQPKLIAMEASGGYEGVVAAALAEAGLPVAIVNPRQVRRFAGALGRLAKTDAIDAGVIAHFADALCPDAKPMADALSLRLRELLARRRQLVVMINAEKQRLGKAADTLAQRSFRTILRSLEAEQKRIDRALDKLIEESPVFCARQDLLKSVPGIGDVVARTLIVELPELGTVDRHQIAALAGVAPMNRDSGRFRGKRRIQGGRVEVRAPLYMACLVAIRYNPPLRAFYRRLREAGKPARVALVAVMRKLLSMLNAILRDNKRWAHDAQS

SEQ ID NO: 387511 - protein, 350 aa, unidentified
MWFVGLDVHKKVTTMCILNQRGVVVKEERLVGPACMIADRLAAVRATRLRLPQLAVCYEASCGYGPLHDQLKSVASRVVVAHPSRLRLIFNSKRKNDRVDAKKLAMLLLLGHVPAIHVPSIQVRAWRQMIEHRHRTVAKRTATKNALRSLLRNHAIPAPHRKGLWTRAGRAWLAALTLPDEAAALQRDLLLAELAQFDQQIKRMDRELNRLAQSHPGVGLLKTIPGVGPRTAEAIVAYIDRPTRFLRTKCVGSYFGLVPCQDQSADRNHLGHITREGPSRARHLLTEAAWRGIRCSDHVRSYFERIQHGDPERKKIALVATAHYLVRVMLAMLRTGEVWRYDTKKKDKAA

SEQ ID NO: 387512 - protein, 338 aa, unidentified
MTVVTVGIDLAKNVFAVHGVNAAGKAILVKPLVRRAKLLELIATLPACLIGMEACSGVHYWAREFQKMGHTVRIMVPQLVSPYRMGGRHGKNDAADAAAICEAVARPNMRFVPVKSIEQQGQLFVHRAHQSYVSERTTLINRIRGLLSELGIVLPQAFKAFLSGVAQVLEDLPGYCNQVIGDLLNELFHIEEKIKNSEKLIPQLARDNSAAQLLMQFRGVGSMTATAIVASIGNGHDFRNGCQFSAWLGLTPRQQSSGGKARLGRITKAGDSYLRTLLVLGAKSVLLGAAKNDDPVSKWALQLKERQGYGRALVAIVAKNARMCWAMLHLKDEFRFPS

SEQ ID NO: 387513 - protein, 327 aa, unidentified
MGDTTMVLGIDVSKKTLDVALLGVHPKPQHKVFTNDAAGHAQLLHWLGQHSASTVHACLEATGTWAQDVALALDEAGHIVSLVNPAQIHAFARTGLKRTKTDKADALLIARFCQMHQPAAWKPLLPHVQQLQGLVRRLEHLEEMLTIENNRLGAGGVTGLVKESLAEHIAYLTGQIEKTRRQIKDHIDHNPDLKQQAGLLESIPGIGAATAALLMAELGEITHFESARQVAAFAGLVPRIRESGTSVRGRSRLSKMGSSRLRKALYFPAITALRFNPIIKAFGLRLSAQGKSKMLIVGAAMRKLLHLAYGVLKSRQPFNPDFSSQTS

SEQ ID NO: 387514 - protein, 254 aa, unidentified
MNYYTGIDVSKQTLKMFDGSKECEVPNEKGLKTFKKLLKKSYGKEWKDVGLIYEPTGPYSNYLREFASESKLKVYEVNPKKSANFAKALGNRSKTDTIDAKMLYRFHVLLKEGDLSIPGIDEITEQLGSFIGSYEIIQKTRTMLSNHLHSMEYKSGVDTKLKESIKKEVKHLTQMEENLEKEIEVFVENNQETREDLKNLLSIKGIGVISAINLIYLFRKYPDANRNEITALAGLDPIKRQSGSSLNGGRKITC

SEQ ID NO: 387515 - protein, 401 aa, unidentified
MKRILRIGMDVHSTNYTLCAMEPVISEDDRIFANIQVTPDYKNILMFIENLKMKLGLDAEYDIQCGYEAGCLGYSLYNQLTAAGVKCVILAPTTMLTPQGQRVKTDARDALMIAQCLSYGGYHAVYIPTEEDDSVKEYLRMRDDHKTALKKIKQQINALSLRHGYHYEGTKWTIKHVAWLRKLELLPLYRETLDEYMASYDEQTAKLERFDKRIGELASQSSYEEKAKRLGCFLGIKTHTALSLLVETGDFSRFAKGSTYAAFLGLAPGENSSGEKINRRGITKAGNRHLGQLLIEAARGICKGAIGHKSRELRARQSGNTAEVIAYADRANTRLRSRYYKLIRHGKKKNVAVAAVARELACFVWGMMTDNTGMKMAERNSMDRQKSAAECSFLPQNKVNN

SEQ ID NO: 387516 - protein, 387 aa, unidentified
MIYVGIDIAKLNHFASALSSDGEVLIEPFKFTNDSDGFFMLLSKLSSFDKDSIVIGLESTAHYGNNLLMFLVPKGYKVCLINPIQTAVLRKNNIRKTKTDKVDTYIIAKTLMMNDLRYVTLQDIGLIQLKNLGRFRLKMVKQRTRLKIQLTSYVDQVFPELQYFFKSGIHHKGCYALLKEAPSPEAVASMHLTHLTHLLKTNSHGHFKKETALELRVLAQKSVGGGDKSLSIQIAQSIEQIELLDSQLKRTEQEITDIITSLDSVIMTIPGIGAVNGGMILGEIGDIKRFSSPSKLLAFAGLDPSVYQSGNFQAKRTRMSKRGSRAFRYALMNAAHNVVKNNATFKAYYDKKRDEGRSHYNALGHCAGKLVRIIHKMLTDDVTFDLD

SEQ ID NO: 387517 - protein, 461 aa, unidentified
MQIIHRCCCGLDVHKKLIVACLISLNEAGEFQKEIRHFTTMTKDILVLADWLTSVGCTHVAMESTGVYWRPIWNLLEGLFELLLVNAQHMKTVPGRKTDIKDAEWIADLLQHGLLRASFVPPAPQRHLRELTRYRSTLLAERARLVNRLHKVLEDTNLKLTAVVTNIMGLSARDMLNALLQGETKPEVLAKLARGKLRKKREDLEQALVGRVDDHHRFLLTSLLTHIDFLDEQVADCNGKIEQFLSAPSDQKAEQVSCASDDQPQEQAPVSSTLVGTEAALAQDRVPEQGPKVPLSSQQAIALLDSIPGVNQRIAEIFLAEVGTDMQRFPTAGHLASWVGICPGNHQSAGKQIRGTTRKGDRWLRQALIEAAQGAMRTKDTYLSAQGRRLTHRRGKKRAVVAVAHTILIIAYHILQRQQPYQDLGSNYFDERERSAIARQSVHRLEQLGFKVTLETAGEAA

SEQ ID NO: 387518 - protein, 387 aa, unidentified
MRKPHDNSKASPAAFIQDNTLIAVIELSLSSWLVAGLIPGVSREPLKKLEPSPEDLLKLLHRWRDESIEAGRLITRIAVAYETGRDSFWLARWLRERDIDAHVIHANSVTVSREHRRAKTDRLDTAMLKRGFLGWLRGERGHCTVAIVPTMEEEDAKRPHREREGLVHEQTRVINRMKSALIQFGVRNFNPKLRKASVKLETVRTPEGKSLPPNTIAALRREMERLKIIKEQIKAIEQARLQRFEQKPEALTNRMVYLLVRIYGLGLETADLLVQELLSRTLRDRKAVARYAGLTGSPDESGSKRREKGLSRSGNARVRKIMIQLAWRMVKFQPDSALVQWFKQRTENAKGSRKPMIVALARKLIIALWHYANDGLIPEGFRLHSAA

SEQ ID NO: 387519 - protein, 320 aa, unidentified
MTPPAIFVGIDVSKARLDVAQAPAAPAWAAANSGEGISELVQRLQRLAPALIVLEATGGYESAAVAALMAASLPVVVVNPRQVRDFARAKNRLAKTDKIDAQVLADFGEAVRPELRPLPDVAAKELGALVRRRQQIVEMLTAETNRSFLATAAVGKDIEEHVQWLRNRLKDLNRDLNEAIRSTPGWRERDDLLRSEKGVGPVLSLVLTADLPELGQLNRKKISTLVGLAPLNRDSGQFRGKRKIWGGRPTVRAALYMGTLVATRHNSVIRAFYQRLITSGKPKKLALTACMHKFLIILNGIARDAEALSLTPGLASQDSC

SEQ ID NO: 387520 - protein, 322 aa, unidentified
MYEVILALDWSKSNMAIARLDKDRDTPRVFERPTDIAYLKKYISNIKESKSVTIEETSSAHYLYSELIELVDEVIVVDPYRNRLLLDGPKNDKRDAANLAMLTRSKNLMKLVHHEISENYEIRKLISAYEDLIKASVRAKNQLAAYELNNTKRMPTDSFVISQIKQTIICIENSRKEYEKKFAELAKNHKDIKRIAKIDGIGIKSAVKIVGVILDAKRFSNYRKFLAYCGLVKYRKVSGDRDYGARITRYSRTLKTVFKMAALTAITNDTPFKEYYENLISKGVFSHNARNCVARLIAKTVLAVIKNGVKYDVKIIKQKIGN

SEQ ID NO: 387521 - protein, 365 aa, unidentified
MMETVYCGVDFHARMQTIAYCDSANGEIQLAQLDHRKDDVRGFYSQFTGQVIVGMESGGYSSWFEAMLEELGHTVWIGHAIEIRRRANWRQKNDRRDAELVLEIMLRGDFPRIHSHSRESVEVLRMLRYRARMIKMRTMICNNLQAIAMSCGLSERSRMLSRAGQERLKSARMTPVIKQQSEELLTLLVPINERIGRVDKWLKQQASIDDRVKLLMTHPGVGVLTALGVVHTLEPFNRFSKQRSVVAYVGLEPMERSSAERKRYIGISKAGSRLLRFLLGEAAHIAVRFDSELKQFHERIGKRRGKAKATVAVARKLLIRCWIMLREDIDYSEFRRRGVEARLARLGHRPTMPEVVIERPASSDR

SEQ ID NO: 387522 - protein, 381 aa, unidentified
MSTPATRHVQESTTAGTLFVAFELSEKTWKLGFTTGPGQKPRERTVTARQQEHVLNEIAQAKRRFGLPETASVISCYEAGREGFWLHRFLQAHGLTNHVVDSSSIEVNRRRRRAKSDGLDVRKLLSMLMRYEQGERHVWQVVKVPSVEAEDQRHLHRDLETLKQERASTTTRIQGLLSSQGLRVTSLTKLPEQLEALRLWDGSPLPPGLRRRVLRVYAHHTFLSEQIAALEAERRAQLQASTDASIDKVRQLMQLKGIGINGAWLLVMEFFSWRAFKNRREVGGLAGFTPTPYQSGESAREQGITKSGNRHVRWMTTELAWSWLRFQPDSALSVWFRERFGGGGKRLRRIGIVAVARKLLIALWRFLETGVIPAGAVLKEV

SEQ ID NO: 387523 - protein, 397 aa, unidentified
MIAVGIDVSKSKSTVAILNGDGSIRAKPFDVHHVADELQALVDYIKRASEPPTILMEPTSHYHYPLLKAFTEAELPVCLINPYQMKKYGDTELRKAKTDKRDSLRIAQYALEKSYSLIPYTPQDQKYEDLRFLSRQYSQRISTLTVAKVQLLSLLDETMPGITTILPLKSRDPDNCVLLRFIKRFKSFDVIRKMGKTRFLDSYQVLVKKTKDRFAGSKGLAIYELVLNSVTTRGENPLSAMTQDQCVDLVSTSQKAADEINLQMRIIAETMPEYKVLRSMAGVGNRLGPIILGEIGDIRRFHSGKALNAYAGNDAPPYQSGQFESRNRHISKRGNPALRKACFEVMQALKLTKPQDDPVYLFLLKKEQEGKPYNVAKMAAVNKFLRIYYARAMELYK

SEQ ID NO: 387524 - protein, 434 aa, unidentified
MSNGSGVSRGDRDRNARLGRLRGAVPVVNAVVGIDLADLKQMVVVTDHDSKVLARRTFRCKAWDLGAALDWAADRAGRAGFAGVTVACEPTGHRWRGLGQLAVERGMSFVCVQPLLSSLARKGEDLTSDKTDDKDAVLIARLTAQLRCYLPEPVDPVWGRLRHLGARREQLLETHIRCVQQIRDLLECVWPAVLDAAAQPFKSMTWVAAVSVVVARDDGNLARTRRLGLERFTRLVRAEVTRRGKTKPCLRIVRKVFAALTETAGVVEHRQAALARIGWTLTDWDRACADQDLVEGRMVAVLGQLGLTDLVCSIDGLSPVGAAAILAETGDLSRFTSARALRTTGQAGRPGSAGAEVRHVRRQVAPVRRGTPAAAGRGVAGSMGMPPEQPGVRRPLPTPDQPRDQPAQAHPGPDHRRRRDPAAAVRRHHHRAAL

SEQ ID NO: 387525 - protein, 397 aa, unidentified
MTITCGIDWAEAHHDVAVMDGDGKVVGRRKIDTGVAGFGELMSLLAEHCEDPTVVPVAIETDKNLIVVALQTAGLTVFPINPRAVARYRERHGQSGKKSDPGDAALLADVLRTDRHQHRQLPLITDGGRAVKALARQHQEAIWSLHQMTSRLRSVLLEFYPQALQAFPNLKHKAALTVLTAASTPELGSRLTARRIVALLQRCGRRNDPALVEQILTDLKTAALRQPAVVEAALGTTVVGLLGIITAMHAAVEQLQTALAVEFEQHPLAPVLRSAPGLGPVLAARVLAEVGDDDNRFTTAGGLRAFAGTAPVTRASGRSRKVSARRVRNKRLADACHWWAFAALTKSPGARAHYDRRRAAGDHHNAALRNLANKLTRASSRCTSSAATKARHTNTQP

SEQ ID NO: 387526 - protein, 331 aa, unidentified
MSTSWLGVDMGKTSLVAAVCADDERVLGSFRNDASGFADLAQQLASCARAAELHLVVEPTSGYELALVAFAYEQGWQVSLPNPRHVRNWAKGMGRRTKTDRQDALLLARYGLACQPAAQAPLAQEVSELDSLLKRRQDLEQILQQEKNRLQGMAGRPGIAPAVHESLAQVIAALQEALRQVEEALAQHLQQHAQLHAEAERLLTIPGIGRKVVLPLLVILHRWHTLTAGTGSTKGLTAFLGLDPKTHVSGSSIWRRPVISKMGNAEVRRLLYMGALSAVHGRNPLHIFYERLVGRGKARKLAVVAAAHKLLTWAWTIFLHQTTWNPALHTN

SEQ ID NO: 387527 - protein, 345 aa, unidentified
MAGMSAEYRLYVGVDIAADTFTAAWQLAGGRPTTPLACEQTPAGYAGLQRRLMATGVASADALVVMEATGNYWVALAVALHEAGYRVAVVNPRQAHHFAKAQLRRSKTDALDARDLAQLATALQPAPWSPPPAVYHEARQRLVARDGLLAMRTQARNQRHALLQWPVVVEGVRQHLDELIADLDRRIASLEGEIAAALSESVWAESLACLTSAPGIGLVTAAWLLVSTLNFTLCPGPAALTAYAGLAPMPRESGRSIRGRPAIGHDGNGRLRTALYMATLSAARYNPAIKTFYNRLRAGGKPLKVARCAAARKLLHLAWALGTKRQRFDPDHKQQQHEPIPRMAA

SEQ ID NO: 387528 - protein, 455 aa, unidentified
MAKQTTRETPAIETVNIGAAAVDIGSREHMAAVNPDVTDAPVRAFGTFTHDLHDLAEWFKMHGVTSVAMESTGVYWIPAYEILEQHGFEVILVNARYAKNVPGRKTDVSDASWLRQLHSYGLLRGSFRPSAQIATLRAYLRQRERLVEYAAAHIQHMQKALMEMNLQLHHVVSDITGVTGMRIIRAIVDGERDLDVLASHRDVRCKASVETIKAALNGNDRPEHIFALTQSLALYDFYQSKMLECDRHLEATLGVLGSDNEYDRSQLPRPRTKTKQVSTPSFDVRAALFGVLGVDLTEIHGMGPSLSLKLVGECGTDLRAWPSAKHLTSWLCLAPGNKISGGKVLSSRTRRSSSRAAALLRLAAVTIGRSDTALGAFYRRLAARAGKAKAVTATARKIAVLFYNTLRYGMTYKDPGASHYEERYRNRVLGNLKRRAKSFGYDLQELPPEADIAVS

SEQ ID NO: 387529 - protein, 419 aa, unidentified
MSKSNIARQLAQVQPGTLHAGVDLALEQNVVVVINEKAERLDHFSFPQDRGGYDYFLRRLEGLRQKYQASGVVVVMEPSNYFWKLLARELEEKQITYHLVNAYTVKKHREGDQLDRSKDDRRDAGQIAELSRNGNYTETHLQKGAYEELRQYATLHDQSVQGIQRERQVLWGLVGQVFPELSRVFKNPVGETSRALLVTCASAAIIRQLSIEDFIAQVRAAYAGKRLLVSKLRRAHQLAATSIGVTEGLEAIQLAIQVHLAELQTFQKQLKRVTTAMAACLATLPEAPYLLSVKSLQAVSAAIFLAEVGDPKRYQAAAQWVKLAGIQPAPNNSGKKQRSQTPMSHQGRTRLRTMLFFTCLRMVRVDNHFAQIYAHLQRRQNNPLTKMQALGVLMNKLLHILWALIHNQTFYNSSFGQSI

SEQ ID NO: 387530 - protein, 336 aa, unidentified
MRYIGVDLHTTQITVCYLTEKEEVAIAKFQLCEIERFVSGLSKKDEIAVEATGNTRWFVEQVHSAVSRVVLVNPRQFDVVKNSVKKTDRNDAINLALFLKADMLPEVRAKRQEADKVQSLVGTRTKLVRLKTSLINKIHALSVSNGRKLRKTSLASEKGLGKVLEEEWTAIERIELDIIIEQIRSLKAGIKKLDKAITEESEKLKGFANLVSISGIGSLSAGILLSVIGEASDFANADKLASYFGIVPRVSNSNETVNHGRITKRGSKTGRTTLVQCSLAAIKKNGYLKKYYEQVKARRGHGKAKIALARKYLKIIYSTLTNNWVFADFNNFELAR

SEQ ID NO: 387531 - protein, 298 aa, unidentified
MDYFAGLDVSMEETHVCVVDRDGLVIHEAKVPSTPADIKAALARAPACRQVVFETGRMAPMLHHGLTACGVPVICIESRQARQALKSFTTHKTDRNDARGLAHLARTGFFKPVYVKSLQAHAIRSLIIARKKLVGQRVTLENQIRGLAVVFGIRLPRALSSTFIAKALQASERINGLSAAMRGLIAARDAVLSAVAAIDADMKKLAKASQVCRRLMTIPGVGHLTALAFAAAVDDHKRFRRSRDLGAYLGLVPRRYQSGEVDYTGSISKCGDRRMRTLLYEAANVMLTRYKGALKLKD

SEQ ID NO: 387532 - protein, 370 aa, unidentified
MLDTTTFVGLDVHARSIKAVSLDVMTGEVRCAAFGYDAGAVAEWVRSVDPKARCVYESGVTGFDLQKRLSGLGVDCVVGAVSKMIKPSADRRRKNDRNDAEFLARMLSVGNVVEVWVPDDECEAARDLTRALEDARDDLSRSKQRLSKFLLRHGLAFDERTPTGRRKGNWTRAHWSWIESIRFAEGADNDVLAYYVDAVRRAAEEKARLEGLVEAEARKPRWRRRVDSLRCLKGVDTASAADLVFEAGEFSRFRNARSFAAWVGLTPSEHSSGESDRRGAITKAGNKHLRKALVEAAWHYLTCSGRPKGLAKGQAPDRVARRHAAKGVRRLVERREALLARGVHGNKANVATARELACWVWAVGLMAEEA

SEQ ID NO: 387533 - protein, 338 aa, unidentified
MLCYAGIDLHATNSVLVVIDEEDRMLYQRRLRNDLALILSALERYQTTVQGVVVESTYNWYWLVDGLMDAGYRVHLAHAPALPQYSGLKHADDQHDARWLAHLLRLGLLPTGYIYPKAERAVRDLLRKRSQLVRHKTMVVLSLQSLLTRLTGSRLSLPRLRQLTPAAVHGLVSFPEQAQSVRSSLTLLQCLEQEIRRIEETVREAGRTQPGYALLQTIPGIGPILAGTILLETGDIRRFATVGHFASYCRCVGSEYVSNGKRKGAGNTKNGNKYLSWAFIEAAHFAIRYEAVIRNYYQRKQARTHPLVALKAVAHKLARACYHMLGKQDPFDLQRAFG

SEQ ID NO: 387534 - protein, 357 aa, unidentified
MHTTQLISFAKVHFFIGLDAHLRNWKVTIRLDGLELKTFSMNPSPLELIAYLKKNYPDGIYHIVYEAGFCGFWALRIFRQHNIDCIIVNPADVPTTNKEKVNKSDPIDSRKLARTHENKDLHGIYIPDTFHEELRALMRLRYRIIQSQTRIKNRIKGLLYCQGIQIPLQFSGSARWSHAFILWLGQLQMKTSAGNFTLQNLILQLKEIRQHNKNVLQQLRTEARHPDIAPIMKALQGVPGVAFITAMYLYTEIMDMKRFANDNHLVSFVGLVPSTQTSDENVYVNGISVRQNPFLRTMMIEAAWTAVREDPAMTLKFKELSKRMKSQDAIIRIAKKLVTRVRHVWLKQEEYVYALVA

SEQ ID NO: 387535 - protein, 339 aa, unidentified
MAILFVGIDLAKNVFALHGVDEHGKAALVRASVLRSRLHQLVAALPPCTIGMEACSGAHHWARLFMQHGHTVRLMAPKFVAPYRMSGKRGKNDAADAQAICEAVQRPNMRFVPVKSQDEQARLCVHRVRQGLVEQRTATINRIRGLLSEFGIVLAQKAATVRREAAARLEDLPGWANTAVGDSLSELHRLDDRIAEYDYHVVVMAREDERSRALMQLQGIGSTTASALVSTIGNARDFKNGRQLAAWLGLVPGQYSSGGKTRLGSITKAGDGYLRTLLVLGAKAVLAAARNKEDRLSRWAMALEVRRGYWKAVIAIAAKNARMAWAVLAKGEDFKLIEA

SEQ ID NO: 387536 - protein, 347 aa, unidentified
MRFYTNLHPYYCGIDLHARLLYVCIIDDKGEILVHKKISDSPEALLTLLTPYIGNIVVGVECMHCWYWVSDFCLENNIDFVLGHALYMKAIHGGKTKNDKIDSFKIAKLLRGGNFPIAYTYPNTMRATRDLLRRRTKIVRHGAMLKGHVVNTNSQYNLPATELNLKNISARQALRERIDDPIVQRNIDMDMAILDFYAKELAQVEWFVEKQAKNHNPVYLELLKSVPGIGKILSLTILYEIGDVLRFESVQKFASYSRLVKCKAESAGKTYGTQGNKIGNAHLKWAFSEAAVLYLRGNDKARAYLNQLQKRMSKAKALSALAHKLGRCVYFMLKNKTVFDEERFLKG

SEQ ID NO: 387537 - protein, 273 aa, unidentified
MDQYFVGIDLHRQYFTYHATDKKGKDLLREKLPNSFDALDYLMRQFPSSPKVVIEATRNWMWLVKALKERGCKVTLAHPLRTKAIASARIKTDSLDAKTLCHLLRSNLIPCSYIANEKEQDNRELGRGRIALVHYQTMIKNRVRAILGKENLNYPGSDLFGKKGRAWLKRQRLSETKRQMVEIYLSYLDNLVKAINQVENLIQNKSSRLLEVKLLTSIPGIGTTTAFLLASEIGDIQRFNTAKQFASYFGLVPRLNQSGNHRYYGRITKLGNP

SEQ ID NO: 387538 - protein, 356 aa, unidentified
MNKISKLDFEGQQIYVGMDVHKKSWSVSIITDKFEHKTFTQPPEVITLVNYLKRNFPGASYKSVYEAGYCGFWIHDRLQEHGVQCLVVNPADVPTKDKERSKKNDRVDCRKLARSLRSGDIEGIYVPSRPKVEDRSLIRTRQSMVKKQTRCKNQIKSILHFYGIQIPEELVNGNWSKLFITWIDNIRMERASGNFALKVHLEDLNNMRKLISDITRAIRSLANSEEYRQNVRLLKTVPGISTLTAMTLLTELYDISRFTNFDKLCSYVGLIPDTDSSGDTDIKKGITNRRNRQLRNILIESSWVAVRKDPALLMSFNELSKKMQKNNAIVRIARKLLNRIRYVLKNKQEYVSAVVQ

SEQ ID NO: 387539 - protein, 348 aa, unidentified
MSKHSVPAGDIAGLLRRFAQLKEKARARTGRDFPIVVIQETGLDGFWIHRMLQSEGIESHVVDAASILISRRGRRAKTDRIDGETLVRTLMAFKRGEPRVCSMARAPTPQEEDRRRVCRERRTLVGERVRHVNRIKGLLFAQGVFGYQPLRKGRREQLEELRTGDGRPLPVHLMAQIVRELDRLEVVLEQLKTVEAERNALLKPATGAAASPPAMLLELKGIGPETAAVLWSEGLFRQFDNRRQVAAYAGLAPTPWQSGSIDHEQGVSKAGNPRLRTTMVELAWLWLQNQPASALSLWFHERVRRLGGRMRKTTVVALARKLLIALWRYTTAGVVIEGAVMKSAPATI

SEQ ID NO: 387540 - protein, 429 aa, unidentified
MGMVLGHATPRVHWSLETAQMIGVPFTTGTVSLELGYVTVVCYLTPFTYRKGGDQMYIGLDVHKKHVYATVKRKDGRIVEQRNFENDKKSLQEFVASLRRGKHHAVLEASSSWMQTYDFLEAQGIDVCLAHPLKLRAIAEERIKNDRIDSETLAELLRLDGIPKCWVPPAEIRELRNITRHRASLTRTRTQIKNEIHSLLAKKGVKAEFSDLFGKEGIEFLKSLKLNTTERTMLTSYLKVLEPLTNEIAATSRYITLLANRRKEVQLLLTIPGINVYSAMLILAEIGDIKRFRSAGSLCCWAGLVTSVYKSDETVYYGRITKQGSKWLRWILAQCAYIAIRHPGRIRDFYLRVEKRRGNKVAIVATARKMLRIIYYMLTRNEPYRDADKLLTIRKQKAAKREARDYPVEDLDKMLESMEEYRHLTWNSA

SEQ ID NO: 387541 - protein, 428 aa, unidentified
MEEITEEPVQVVARVCAIDIGKAGLVACVRVPHASRPDRRVQEVREYATVTPALLALADWLRVERVELVAMEATSDYWKPVFYLLEAEGFTCWLLNAKHVKNVPGRPKTDRLDAAWLAKVVERGMCRPSLVHPKPIRQLRDVTRYRRSLVREQTREKQRLEKTLEDAQIKLDSVISDLHGVSGRQMLQAMVDGQRDPKVLAELARTSMRRKIPQLREALTGHFNDHHAFICATMLRRIDALAADIAELDVRIEQMIAPFAQAVDKLDEITGVGVRSAQEIVAELGVDMSVFPTAAHLVSWAKFSPIDAKSAGRKKGNSTGKGNPWLAGALGEVVAGLARTDTFLGQRYRRLVRRRGKKRAIVAVGNSVLTIVWHLLSDPNARYQDLGPGYYESRISKQRRQRDLIRQLEQLTGQKVNLQPQPGLPAAA

SEQ ID NO: 387542 - protein, 369 aa, unidentified
MSKVRFIGLDVHKDSITIAVADQDGSAPQVVATVPHENRALLKQLKKLGSSSQLRCCYEAGPTGFGLCRTLQGAGIDCIVVAPSLIPKQAGDRVKTDSRDAVKLARFLRSGDLTAVHVPDEHTEAMRDLERAREDAKRAERSARNVLSKFLLRHGCRYTGKSKTWSSKYLDWIRTLHFEYEAQQRVVVSYLHAVEQATARVAQLTGDIAEMVETWSLKPLVKALQALRGVKLVSAVTIAAELGEMSRFRTAPQLMAYIGLVPSEHSSGGTKKRGGITRTGNQHVRKTLVESAWSYRHRASMSYEIRRRNEGASEQVRAIAWKAQQRLHRRYLRLQGRGKNKQQTVTALARELAGFIWAIGRQPVLLEAA

SEQ ID NO: 387543 - protein, 404 aa, unidentified
MKGPIVSIDVSKGKSDYQAFKEMNVKYTGSRSIKHTKEGFDEIVSLVREMEKKLETEVCVVYEATGVYHRVLKKVLEDNNIKQFIINPLLSAKTRKNDSLRSPKTDKLDPKSIAKTYYSHSLHNSHKPETIYHELRELSRYYEDILVHLRKDKVAFRAQLDVVFPGYDTLYDDLYGPVALAVIEKYPHPEMLQKKKINTVSKVIQSKTCHRQAMSDTMADKAIEYSKTIYSGCDKDDIEVLILQKFIKKLKEDMAEAERTIGEMIKLVQELPDFSIIKSIPGIGDNLAARIIAELGDMTRFKKKNELVAFAGLDPRISESGQNDGDHMHITKKGNKRLRCLLYLAVTCSIRLKRDDNSIKDFYIKKKQQSNPMCSKAAKTACASKLVRIIYSMCKTGELYQYNK

SEQ ID NO: 387544 - protein, 422 aa, unidentified
MLEETQETEEIIQRVAALDVGKAELTCCVRVPGQVSSGRRAQEVRTYQTMTRWLLVLADRLAELGVTRVVMEATSDYWKGIYYLLEAHGFEVWLVNARDVKHLPGRPKTDTLDAVWLCKLAERQMLRPSFVPPGPIRQLRDVTRYRADLVAVRTAEKQRVEKLLEDAQIKLSVVASDIFGVSGRAMLAALIQGERDPKRLAQLARARMRAKLSLLVEAFSGFFTDQHAFLLGKMLTRVDQLDADLAELDAKLQALIAPLAGAVERLDEIPGVGQTAAHLLIAEIGTDMTRFPTAGHLVSWAKFAPGVKESAGKRKGSGSTGHGNPYLARVLGEAAVAAGKTDTFLGERYRRIARRRGAKKAIVAVGRSILVIAWHLLSDPEVHFHDLGAGFYDTRINAERAKHNHIRQLEALGYKVTLEPAA

SEQ ID NO: 387545 - protein, 344 aa, unidentified
MERKFKLIFGIDISKLTLDATYFFEGTPHYLQVPNNANGISQLVGTIRELGVDWQGVLVCCENTGSYTEKLSMVMKSLEVTFWVVHPIIMKGYRLDLQRVKNDKVDSLKIAEFALAHQHKATHFHHPDQKTKELKELCLLRKQLIGIRQRTLNFIASENDKAIPGILNTVIYDQLKFFLTGLIKDVEKSIQLLINSERAISGYYKILLSIPGVGPVIAQHILSVTDGFKKITDYKSFACYVGIAPFARSSGTSIKYRPRTSKKANQELKAEMHQGALSVIREGQIFYSYYKSMMDKGKHHLWIINSIMNMIAKCIFNLVTKMTEFNKEIFVKNKKSWQNNLVMS

SEQ ID NO: 387546 - protein, 403 aa, unidentified
MNAVGIDISKGKSMIAVMRSFGEIVASPFEVNHTGSELSKLAHMLKSLNGETKVIMECTGVYYMPIAYALHEAGLFVSVIHAQLIHNFGNNSIRKDKTDKKDSVKIANYGLANWLDLPEYIPEEDIRHMLKTYSRQYTQYCKVKTKFKLNLISLFDQTFPGVNELFTSPPRKKDGHEKWLDFAACFWHCQCICTLSQKVFVERYRRWCKRAGYNFSQHKAEDIYVESLGHFAVIPKNDTTKFLITQAISQINAIAETISLLASEMNRLASLLPEYPIVMEFCGVGTVLGPQLIAEIGDVYRYQQKSSLVRFAGLEPVENQSGTFDGKRKISKQGSPHLRKTLFQVMDCLIKHAPVDDPVFQFLDRKRAEGKHYYSYMNAGCAKFLRIYYARVMEYLNRLDDNA

SEQ ID NO: 387547 - protein, 408 aa, unidentified
MTVVGIDVSKGKSMVAAMKPGGELVAAPYEVRHSDIELSRLALDVLCMEPDTRVVMEATGRYHEPVAALLHSEGIFVSILNPLLIKQSGAGSLRKVKSDPKDALKIAKYGLDNWSTLREYTPTEAIRQQLKLCERQCDLYSKNIVMLTNNLISLSDKTFPGVNELFSSPEKADGHLKWVDFYRTFWHCDCINRMSPDAFGERYKKWCKKKGYHFSADATDALYAASCGLYTTLPRDNNAKLLVTVAADQLIALRENQSKLEAEMLNLCKQLPEYETVMAMYGVGKSTGPHLMAELGDIRRFPHRSSIVAFAGVDPGVVGSGKMQLSSVATSKRGSPQLRKALFQVVSTYVKRKPENEAVYQFYAKKRDEGKPFFVCTTAAANKFLRIYYARVKECLNAAESAVQTEEG

SEQ ID NO: 387548 - protein, 393 aa, unidentified
MICVGIDVAKDKHDCFIISSEGEILADVFTIQNNAEGFDTLLQTIRRCVCPGDKIKVGLEATGHYSYNILGFLLDKGLDTYVINPLHTNLYRKSLSLRKTKTDRVDARTIAAMLMSDVDLKSYTDTAYHNEELKSLTRYRFDKVRERAKLKQSVSRLVTILFPELEKLVPSLHMASVYALLSEFPGAKQVAGAHLTHLKAVLYDASKGRYGRDMATTLRDAARCSVGSVMPAKSLELQHTIRLIRELDAEIEDIETAIQSMMDEIQSPITTIPGIGVRMGAMILAEIGDFSRFDSPDKILAYAGMSPSTYQSGQLSLSGTYSHMEKRGSRYLRYALYNATKYVCLWNPTFAAYLAKKRAEGKHYNVALSHAAKKLVRLIYAIEKSQKPYCSAA

SEQ ID NO: 387549 - protein, 340 aa, unidentified
MKTIATIGLDLAKNVFQVHGVDDAGNVLVRRQLRRAEVLRFFSSVQPSLVGIEACGSSHYWAREIEKLGHTVKLMPAGYVKPYVKRGKTDAADAEAICEAVTRPTMRFVAAKSAEQQSVLMMHKVRELLVRQRTMLINSLRGHLSEFGIIGAGGAKNVPKLVEHFHEMQITLPEVARTMLWAIIDQLQRLGAEVVKIEKKIVDAVRSDAVARRLLSIPGVGPITASAITAAVADIKNFSSGRRFASWLGLTPRPHSSGGKERMSGISKQGDGYIRKLLVVGATAIIRFAKNGSSASHDWAVSLMERKPARVVTVALANKTARIIWALLIREQRYVKAVTA

SEQ ID NO: 387550 - protein, 394 aa, unidentified
MKGIKLHLGLDVHKDSITIAIAPAGLHHEIRLYGTITHDLGRLEVALGRIRKAHPGAQLEVAYEAGPCGFGIARRLKQLKVPCLVAAPSLIPKQPGSPFKTDKRDARSIARLLRAGELTGVYVPDPTDEAIRDLCRARTDAVDDLRRCRLRLKAFLLRHGYRYHGKANWSQPHMRYLRELVLPHPAMKAILEEYLQGIDAAHQRVQRLEASMLNLLETWRLKPAVQALMALRGFQLVAAMITVSELGDIHRFAHPRQLMTYLGLVSTEDSSGPRQRLGKISRCGNGHQRWILTECAEHYLRPPKVSKELSRRQEGQPPEVCALSWKAQNRLHLRFSRLLARRLPRNKAKVAVARELCGFLWAVLRTQNCYTQPSTTITRPARRKTTATSARKEP

SEQ ID NO: 387551 - protein, 370 aa, unidentified
MVEMHGVAGIDPHKNTATVAVIDSCGGRRGSRSFTIDEAGIGELLSFLVDSELIIDRVGIEGSAFLGRPLVLALGAAGYDTREVQANRTAERRSRRRRAKTDNEDAEAIARETLAHADLPPAGKRSTPDEDWEALGAVRNWRESLVLQRVRLLTEAEAVLVALPVAVRATLPLTSRVLPQLKALADGSVDLDGLGLADQIKVDRLVASLTDITTLTTRINELDRKIPALLERLGCTLTSIHGIGVVTAMDLLVEVGDPCRFTSEAQFARWCGAAPVALSSGEGDGPPRRHRLDLGGNRAVNSILHGVHVTQVRCHPPAKAYMARQTEQHKPKRSARRSHKRHLANVIIRHMWKDASRLSAVTDQALLTAA

SEQ ID NO: 387552 - protein, 390 aa, unidentified
MAAVMIGVDPHKASHTAVVISAAEEVLGELRVHACVAQAERLLAWATAWPQRTWAVEGAGGLGHLLAQQLVAAGERVLDVPPKLGARVRLLAAGDMNKNDPNDARSVAVAALRSADVREVRADDHAAVLKIWSKRYRDLSRTRTQVICRLHAVLCDLVPGGVPKVITAARAARILRALRGGSDAVAAARRELAAAYLDDLRRIDAQQRETRKKLAVAVAATGTSLTGLFGVGPVIAAAVIGDVRDVSRFGSRDHFAAYSGTAPVEVSSGPRKIYRLSRRGNRRLNHAIHMAAITQIHHRHSQGRAYHDKKRAEGKTGKEALRSLKRQMWFLAGVVAVSCMLAVVLGAHGALAQTSTTATPGRSCTVVQQVSVGLDLTCRWAPAWPGRAAT

SEQ ID NO: 387553 - protein, 342 aa, unidentified
MEYGAIDLHTKESEIRIVDGDGRVVLERRVSTTRERLTAVFGARPPMRVLLESGTGSEWVAQHLEGFGHEVVVADPNYTPMYGSRTRRIKTDRRDVAALAEANRRGVYRPAHRVSAAQRDVRRRLRVRDQLVHVRRQAINLLRAQLRAEGVRVPTGAAETFVVRFERSAVSTAARAAMAPLLELLAAVAPLITQAEQWARSAARADAVTLRLMTAPGVGPIVALAYQATIDDVGRFTAPGAVASYLGLVPREDSSGERQRKGAITKAGPSRMRVLLIQSAWHVWRSPSGSAALHAWARRLADRRGRRIAIVAVARRLARILWAMWRDRRAFDAARVGRPVAA

SEQ ID NO: 387554 - protein, 355 aa, unidentified
MDSKKYIGMDVHKESISIAVRNGAGKIVMECVIETKASMILQFFDGLRGDLQVTFEEGTSAAWLYDLLKPRVTKLLVCDPRKNASMREGNQNDQIDARRLAELLRLNHLHPVYHGEHGLRSLKELVRSYLTITKDLGRVMTRVKAIYRSWAIPCSGKQVYSPRHRAEWLGKIGEPGVRRRAEFYYQQLDALRTVRQEVRRELLAEGKKHQAWKRLCQIPSIGPIRSAVLLGILQTPHRFRTKRQLWAYSGFGIETQSSADHRRVNGQLQRVKKQSSIRGLNRNCNHDLKNLFKGAAIVASSKPGPFQEFYAALVTKGLRPEMARLTLARKIATIVLIVWKRGACFDAQHLKPQTA

SEQ ID NO: 387555 - protein, 342 aa, unidentified
METSTVGLDLAKSIFQVHAINGAGEAIVRKALRRSQVVPFFTKLPPCLVGMEACGTSHHWARELMKLGHNVQLMPPAYVKPYVKRGKTDANDAEAICEAVTRPTMRFVPVKSREHQAALALHRTRSLLVKQRTQLVNMMRSLLAEFGIAMPRGLRHALEAARQLTDGSAPDMPKLAERLVTSLARQISAAHEELALLEKELLAWHRSNERSQRLATIPCIGVVAATALAASVTDPERFRSGRQFAASLGLTPLQKSSGGKEKQGRISKMGDRYLRQLLVVGMTSLVRRARTAPGSVDPRITAMLQRRPARVVTVAAANRAARVAWAIMTRGETYRKPLAAAA

SEQ ID NO: 387556 - protein, 345 aa, unidentified
MSNVPLFVGLDYHQDSIQVCVLNQKGQVLLNRSVANDSKELGRMVEPLGQVRQVGIEACCGAADLGEELVEQRGWKVSLGHPAYIAKIKSSPDKSDYCDGRLLADLTRVGYLPRVWLAPAHIRELRQLVNHRQRLVNQARALKLQVGAILREQRVKIDPERGGRWTKVWMASVRDNQRLSQHARWIVDELLDDLKYMGCKMARAEQRLREATASDPVVKRLMEQAGIGEVTAWVLRAYVGDFGRFKRAKQLSRYCGLSPCNASSGHKVADAGLIDGCNKLLRLTIVQAAHRLIRTHPRWRQMADGLRRRGKPACVIVGAVGNRWLRNLHHAMKGSITEQGGMRTN

SEQ ID NO: 387557 - protein, 349 aa, unidentified
MTVTIVEEARPVTGGVDTHAGTHVAAALDPVGGLLGVEEFPATAAGYARLLGWLGGFGTVCLVGIEGTGSYGAGLARHITAAGVRVVEVDRSDRQDRRRAGKSDPLDAVSAARAAQSGRARGAPKGRDGAVEAIRTLMVARRSAAGERTRTINQARALVLTGPDDLRTRFARHTPAALITGLASLRPRPGSTVGYATRIALRELGRRAQFLDGQLTRLDELIVPLVTARAPGLLALYGIGPRTAALLLIAAGDHPGRLHSEAAWAHLCGAAPIPASSGKVTRHRLNPGGDRQANHALWRIVFTRLGSDPATRAYAERRTAEGKSKAEIIRCLKRYVAREVYPHLRPAGG

SEQ ID NO: 387558 - protein, 322 aa, unidentified
MNPQFDPEMYVGIDVSKAQLDVAIGQEGETWQAANTAAGIQATIQRLEAYPPRLVVVESTGGLEKPLVKALQAAGLPVALVHPGRVRKFAAGIGYFAKTDRLDARLLAWFGFAAHPHPKPQPEPACEVLSELVRRRNQLIEMLTAERNRRSTCPASMLEALEEHITWLSAERDRLTTQIETMLATQPEFHDKDTILQSTKGVGPILSATLQAELPELGRYSHKQIASLVGVAPFSHESGQHQGKRQIKGGRSGIRCTLYLATLSAIRYNSVIRAHYQQLIDRGKLRMVAIVACMRKLLVILNAMIRDMRPWLPKVIPVTLDS

SEQ ID NO: 387559 - protein, 332 aa, unidentified
MQFKHFVGIDISKLTLDVYIHHKSLHHKFTNDQQGFDSLLKWIYHRTLETTPLEIVFCFEHSGFYSLLLAIYMQKHECNFSMISPLQIKRSLGIVRGKNDKIDSRRIAEYAYEKRDKYLPTKVPSEAILKLHPLMTLRDRLARDRGVFVGTMKEQSKFLPIDQIPVLMESYTHIIKSLDTEIKAIEKAIKAIVNDDSELKRTFELITGIKGIGLLVGVYLIIYTHNFSRFETWRKCACFAGIVPFQNSSGTSLQSRSHVHPIANKQIKKMLHIAALSAAHTDKEISIFYKRKVQDGKSKMCVLNIIRNKLLARAFAVAKRGTEYVDVMKYVA

SEQ ID NO: 387560 - protein, 426 aa, unidentified
MNANNDETSNDYAAFIAIDWADQQHVFSLQVAGQRKKETGVLTQKPEVIGPWVAQLRERFGGRPVAIAVEQSRGALIHALLSYDFIVIYPLHPTTVAKFREAFKSSGAKSDPLDTHQILEIVTKHLDLLKPLNPDTEETRLLGRLVEDRRKAVDLRTSHIQALLASLKEYFPQAIELANGNLTSRLACDLLKKWPTFPAFQQAKPSTIKRFYYGHNIRSPKVLEEVLNLAQTAQPLTTDPAIVESGSRLSQTHAQLIQTLNPIIEAYDRHIEKVFQAHPEAHLFSQLPGAGPALAPRLLSFFGTDRSRYETAQNVHSFSGIAPVTKSSGKTKVVYFRRACPKFDRQTFHEFARLSLAKCQWARNFVDYYKAKGHKYHTIIRALAFKWIRILFRCWQDRTPYSDDTYLKALKKRGSIFATLHLEQKS

SEQ ID NO: 387561 - protein, 363 aa, unidentified
MRDPRTVAVGLDVHKSSVCLAAVRADELLREVTLPYDPERVEQELRAWPGARVAYEAGPTGFGLYRHLVAGGIDCEVVAPGLVPTRPGDRVKTDKRDARRLAALHGGGLLTAIFVPSPELEALRDLVRAREDARLDRMRARHRLGKFVLRHDRRMPTTCWGPTRRAWLGRQAFELPGQQQAFDDYLFNVDQIDRRIGVMEAEIARLAADGPHAELIGRLRCLRGIDTLTAVGLVCEVGDFERFKTAQQFMSFVGLVPSERSSGEGRRQGSITKAGSAHARRLLVESAWNSRRRPTVGYELARRHRDQDPAVLERAWRAQQRLHRRWQRMAGRGKPHQKIVVACARELAGFVWAIATNQPLRTA

SEQ ID NO: 387562 - protein, 333 aa, unidentified
MNCVGIDVSHKELVVVVSVKGKARKAKSYKNTAAGFITIIQLLAKLKGHVKVCLEATGVYHFDLAVSLSRAEDIEVMVINPKVSSNFAKVLMKRSKTDALDAEILAIYCERMPFEAWIRPASEKIALRAHSRRMAALSKLKAQNKNQLHALISTEETPELIIEQINELIAVLDQQIDVQREAALELIKGHAELKASFDLVTSIKGIADTSGIQILAELMILPSDMSAKQWVAHAGLDPRAFESGSSVSKKPRISKAGNKYIRQAIYMPALVATRFEPHIKGYYLHMINDNGLKKMQAICAVMRKLLHAIHGMLKTNKKFDGERFYTFPAEAKS

SEQ ID NO: 387563 - protein, 389 aa, unidentified
MYFVGIDISKFKHDCFITTESGEFVINSFTITNNNDGFLELHSVLKSLASQEEIRIGFESTAHYALNLKLFLEKAHYSFMEFNPVLLAKFNKSQTLRRTKTDAIDCASIARWLMTVEYKPHPVGFYHTYSLKSLTRLRDTLVKQRSFYIVKITNVLDHIFPEFKPFFKNHFTKTAFYLLENYGTAEKMSRMNSASYENLHKVSRGKFSMQKFLKLKELASNTVGESNEIFSSQLNSLMTLYKQACREVDSLEQQIIKLIEEVNPHTLSIPGIGPLSAAVIYAEYGDVSKFGSPSQMLSFAGLEPGYYQSGTSEHRGHMVKRGSSHLRFTLMNLCIPLIQYNMVFAEYYAKKRNEGKTHRVACSHVIKKLIRVIFTLEKNDIDFDPTKLR

SEQ ID NO: 387564 - protein, 339 aa, unidentified
MYYSGIDLHYDNCYITTLDDNGTLVKQQRVENVRELITAYFQSLPGSHIAVVESTTGWYWLNDLLEELGIELVLAHAKYLKAIAYAKVKTDKVDSHTLATLLRQNLIPRAHKISRERRDLRDAMRARLRMVHKRTACALSVQTIGVKFNIPQEHPALLPEPYQLQVSLLQEQERMLSDHILALEKSLHPTLIPDDDIQRMLYVPGIGKISAFTIYLEIDTIDRFSSDKHFVSYCRLVPAADNSNRRAHQRSSKDGNKYLKIAFSDAAVRAIQFYPEIKSFYNKMLRRTNPPIARTIVAKELARIVYYILKNKTPYKGFKGLPISHQKSAQWPRLSSPNP

SEQ ID NO: 387565 - protein, 407 aa, unidentified
MDTRFAVVIGLDVGKTGHHACALDPDGNRLFDKPLVQDEAELRELFTNLLKHGEVLMVVDQPNTIGALPIAVARDAGCTVAYLPGLAMRKAADLYPGRSKTDARDAFIIADTARTMPHTLRQVDRDNEILSALKVLAGFDEDLAHETTRALNRIRSLLTQIHPALERVFVGGSLATALVLDLLEKFGGPTGLKTAGRGRVLRFARSHSRRDPEALIDQIFTALGEQTVVVPATAAVELVIPRVAGQVKELKEQRATVARDVEAMLEDFRLASVLMSMPGIGIKTAAQILLNIGDGSTFETPGHLAAYAGIAPVTRRSGTSIRGEFPARSGNKRLKNALFYSAWVASNHDPISKDYYDRKRAQGKRHNAAVICLARRRCNVIFAMLRDGTYYQAPEPVPTPESTALAA

SEQ ID NO: 387566 - protein, 359 aa, unidentified
MNATTIGVDLAKNVFVACVADGAGRVVETREFNRAGFLAWLATLPQGTVVAMEACGGAHCWGRTMAALGLEPRLMAAEFVRAYRKRQAVKNDRADAAAIVAALHAPGMRFIPVKTEAQQQRLAWHSLRLGWIEERTALLNRIRGLLAEFGMVVETGATRLRRWLAEHEFDTAQPAPIRLLIQNVRDQLDALDLRIAECDRQIAAQPANDAAARRARELPGVGLLTADAVSASVGDATQFHNGRQFAAWLGLTPSQYSSGGKPKLGRITRRGDDYLRSLLVQGARSVLAATLRKARTAPDTLTRLQQWIVSLNARVGYHKTLVAIANKHARQLWAVLAKGEAYNPEAWRQWGEVAEQAAA

SEQ ID NO: 387567 - protein, 420 aa, unidentified
MTSQNSIPADAVLVAIDIAKVRNEVLIEALGHKRRRRLSVLNTRAEHDHLIEILQSYDRPVVCAFEATGNYHRPIAWRLVEAGFETRLVSSLALARTREALHNSWDKNDPKDAQVILHMLRIHSTQVYHDPLRAGINDVQELSKTHEAIANAKTEIQHRILTHYLPLYFPEIERFRGNSRSDWFFAFLDAFPTPSSITTLTKEKFVEAAWDVVGRKVSKSQILMDIYETARTSIGLPLPPDAPAIRMFRMVVAEARSLIRQRNEIEAQADDLLRHSRDYQILRQIPGIGPINALTIIAEAGDLRRFHHHRQFLKFCGLDLSTQQSGQYRGQTRLSKFGNARLRRTLWIAGQVAIRQRENGFRHKFERYVARDRDNPDLRRKAMTAITAKMARVVHAVIKNGSDYRPFVEGRVPGGRTSVS

SEQ ID NO: 387568 - protein, 310 aa, unidentified
MEHSLFVGIDVAKDRLDVHVRPTDEVFSLTHDETGVGQLVARLRELGPRLIVLEATGGYEVTVAVALAAAGLPLVVANPRQIRDFARATGQLAKTDRLDARATALFAEAVRPAVRPLADEQARALGELVTRRRQVLEMLGAELNRRRLVRDRQLQRRIAAHIKWLERALQELEQDLHTTIRATPVWRDTEDLLRSVPGIGPVTAFTLIADLPELGRLTRREIAALVGVAPMNRDSGTLRGRRMITGGRSAVRRVLYMATLVAIRRNPALTAFYQRLRGSRPAKVALIAAMRKLLTILNAILRDHRPWQPA

SEQ ID NO: 387569 - protein, 415 aa, unidentified
MALKIVYKICCGIDVHKTFVVACIASTNDKGITSYESHRFSTYTSGLKTLLQWLLDRNCKDVCMESTGKYWIPVYNILESDCSIVLAHPKYVKAIRGKKTDKKDAKWIADLFKHDLVAGSFMPPADIRQLRDLMRYRFKLTCFMSSEKNRLQNCLTVSNIQLASVVSDTFGKSSQRILDKILENPDDTSFDIEPLIHGSMKKKLPELELAIDGFITPEQAGKLKVIKKHFEDLESRKAELEKLILALASPYQQELDLILTAPSFKNKFTAIGIISEIGVNMEAFPSAKHLCSWAGLTPTNNESAGKKKSVRVSKAGCYIKPLLVQCANSVVKSEKHPEIRNRYLRLRKRRGHKKAIIAIARMLLTALYNMLKNKEPYNAELYRKSDVLPVNREITIEQAILMAQFQGYKIKSAAE

SEQ ID NO: 387570 - protein, 396 aa, unidentified
MQQEAPEAFAAFVGLDWADAKHDVCLQAAGSEQREHSSLDHTPEAIEAWVCSLQKRFEGKPIAIGLELNKGPIVFALRKYHFLVLFPINPLTLARYREAFTPSRAKDDPTDAALQLELLRTHRDKLQPLKPQSPIMRALAQLVEHRRRVVGDKVRITNRLTSTLKNYFPQALQWFQDKDTVIFCDFLSRWPTLKAAQLARRSPLETFFREHHVRSADVIAQRINAIKAALPLTTDEGIITPNVLLVQALVSQLRATLQAIQDFDTTIAQHAQRHPDFSLFQTLPGAGPVFAPRLLVAFGEQRERYASAAELQQFAGIAPVTERSGKKCWVHWRFQCPTFLRQTFVEWAAESIRHSFWARVYYQQQRDAGKAHQAAVRALAFKWIRILFRQQSFSHI

SEQ ID NO: 387571 - protein, 409 aa, unidentified
MRYYLGVDWADQTHAVWVVDERGTKVARRTVPHTAEGLSEWGRELDEWRAQGTELWAAIERPEGRVVDFLLDHGVVVYAVNPKALDRARDRFRQSEAKSDPFDARVLADFLRTDHAQLHALRPSSEAAQELKLLTDDYQRQIRQQTRLVNQLTTTLKAYYPRGLEVAELPTALAREFLQAYPTPAALTALTERQWQRWARAHRLSEARTRELWAGLQRPQLPVPAHVVRAKARLMQSLVAQLTLVVEVVGAYREAIEDFFARIPAAQWIRTLPIGDHGITAPTLWARLGDAPGRWESFRHLQAQAGTVPVTIRSGKQQVVRFRFACDKSLRYVIDHVAFLSLRWSEWARAYYDEQRARGHSYRQALRALSAKWLKIIFVMWERHVPYDEQYHLATMTRQQLRLRQKQIA

SEQ ID NO: 387572 - protein, 456 aa, unidentified
MGHARARKISAQLVEDEEYQLRYERVAGIDVAKAKADVCTRLPPAREGGRRVSRVEEVPATAREVLALAGRLLADGAQLVVMEATSDYWRIWFYLLEAAGLRVQLVNSRHARQLAGRPKTDQKDAQWIARLAEMGLLRPSFVPPPEIRALRDLTRTRLMLVRDRTREWQRLEKLLEGALVKLSSAVHSMARTKTARHILEAIAGGERDPEKLAALAHGGVKGGHAAVRQALEGMRLGGHHPRLIRVHLDHITLLDRSVAAIEDEIETALDAIPGAWGISADGVPSPAPGPDAAALDAVARLAEIPGVSPGLARAVIAEVGLDMTRFPTPAHLAAWAGLAPVARQSGPRARKPAKGHGDACLKGYCTQASLGASNTDTFLGERFRRLSRRIGGIRAQCAVGRSILVIIWHLLSDPGARFRDLGPGWHERKADRDRKIRTHLRQLQALGLDVTVTPAA

SEQ ID NO: 387573 - protein, 408 aa, unidentified
MERYYLGVDWGDKTHQLHVANQSGEKIKEMTVQQTPEQMAELGRWLDESRNQGIELWAAIEKPHGRIVDFLLDHGVVVYPVNPKALDRARDRFRMSQSKSDSFDAYVLADFLRTDHARLRALEPNSAQAQELKMLTRDYHRLVRQKTRLLNQIGITLKEYYPRPLDVFDDLETKIALDFLKGHPTPQALSKLTRRGWNRFAKRDHHLSEARSNELWEKLNQPQLAIPAHVVRAKAKLLLALVVQLQASVKAVDSYSEEIEGFFAAMPAAELGKTLPGGKSGTTVPTIWAELGDANNRWKSFRHLQAEAGGVPVTQASGKSRVVQFRFACNKHLRRTMYWFSFNSLNRCEWANKYYRDQRAKGHSQHQALRALGAKWLKIIFVMWRDHRPYDENYHLANIARQKMRQAA

SEQ ID NO: 387574 - protein, 364 aa, unidentified
MDDPRQIREQVTLGVDTHAELHVAAALDERGRLLGTCAIPTTATGFAELVRWTSQYGELARVGMAGTGSYGAGLARWLRARNVDVVEVDRPDRRTRRRRGKSDGVDAEAAARAVLAGTATAQPKAGNGAMEMVRTLRVARQSAIKARTQAANELHALIVTAPDAMRADLRRLTIPPLVATAAAFRRSAELTTPTAATKLTLKSIATRYQHLAAEIDALDKHLDELVAPAAPALVAIKGVCTDIAATLLTVAGDNPERLASEGAFAHLVGVAPIEASSGKIIRYRLDRGGDRQGNRALYLLAVGCMGWDPATKAYVARRTAEGRTKPEIIRCLKRYIARELYPVLLAATSTITPSDRSSSPAEAA

SEQ ID NO: 387575 - protein, 377 aa, unidentified
MQMEVTMNTVIHIGIDVHKDSYSLSAFHFSSNRSFGQSRTDSKGSLVIKYVERLRKEHPGCEFVCGYEAGPTGFGLYRELERAGIPCVVMAPTTLPRASGNRVKNDRLDAQELARHLAFGTYSAVQVPTPQDEAVKNFSRLRNTRKESLKKAKQNLLSFLLRMGRTFSEGKSYWTHLHFKWLKGQKFDDMVDQETFDEYLQEVHDQQEKVERYNQRIDELAERDEYREKVARLCCFRGIETHTALSLVSEIGDFSRFATAQQFSAFLGLVPSEESSGQRERRGAITKAGNTRLRMLLIEGAKSTLRTSILGKKSKRLLARQKGNDAEVVAYADRANRRLHRVYGRLTTRGVHHNKATVAVARELSCFVWGMMNGRIG

SEQ ID NO: 387576 - protein, 426 aa, unidentified
MKCNQNQRILQVSESKMIIGIDVASEIHYARAFDNRGIEQAKVFRFTNNREGFEAFVKWSDAIRLKSGKKDTIVGLEPTGHYWFNLAQHIKNESMKIVLVNPFAVKRSKELDDNNPTKNDRKDPKTIAMLVKDGRYMEPYIPEGVYAELRVAMNTRWQIVKNLNSIKNQIDRWLRIYFPEFLQVFADWEGVAALIALHEFSTPAQVMQKGVAGIVGRWKQDKIRAVGIKRAERLVEAAKASTGITEGLIAADMELKILLEDYDRKMTQYNALMEMVEKLMPQIPGVAEVLKIKGIGLVTAAGFIAEVGDISRFSHPKQIQKFAGLNLRENSSGKHKGKSGISKRGRKRLRAILFRAMMPLVAKNKEFKAIHDYYTTRPNNPLKKIQSLILLCCKLIRVMYAILAKAVRYEPEKLLSDMRKDELLAA

SEQ ID NO: 387577 - protein, 352 aa, unidentified
MMVIGIDPHKRTHTAVAVDEVGRKKGERTVRARDEGHIQLLAWARKLAPDQRIWAVEDVRHVSGGLVRDLLAAGETVIPVPPNRTAGERRGGRERGKSDPIDALAIARLALREPDLPTARLDEDTRPIRLLVDHREGLIAERTRLINRVLWLIHDLDPDLAAAVTKLKQISTRRKLVAQLQALPASTAQRVALAQIALIDSLSTEIDAIHKELKPLVEARVPRLLTIVGVNVLTAAKLLGEIGDITRFRNSSAFARHNGTAPIPVWSGNDDRHRLNRGGNRQLNTTLHRIAITQARCHEGARALIKRRQETTRDTGKGSLRVLKRHLSDVIYRALVDDHNRHRDQETPAGTE

SEQ ID NO: 387578 - protein, 387 aa, unidentified
MPQLNDLSRSLVALDQDSTIIAVVELSQSSWLVAGVLPGIERQPQKKLEPSAERLLGLLHRWRDEAVRAGKKITRIALAFEAGRDGFWLARWLNARGVEAHVIHPSSVAVSREHRRAKTDRLDTEMLKRGFLGWLRGERGHCTMARVPTMAEEDAKRPNRERECLVGERTRIVNRIKATLARMGIRNFKPTLRKAAERLATVRTPEGMPLPPNTLAELQRDMARLGFVVSQIREIEQARQKRLEQETETGPHAMVRQVARVIGIGIETADMLVHEVLSRPMRDRKAVARYAGLTGSPDESGARRREQGLARAGNARVRRGMIQLAWRFLRFQNQSALAQWYRARTADSRLGMRKTMIVALARKLLIALWRFVTTGETLDGVILRPAG

SEQ ID NO: 387579 - protein, 457 aa, unidentified
MPQPKRSRSRTGLSAVHPAAAAIDIGATMHVAAVGPDRDTEPVRTFQTFTDDLHRLADWFARCGVKTVAMESTGVYWIPVFEILEQRGFEVMVVNARDGKHVPGRKTDVSDAEWLQRLHEYGLLRPSFRPQAEIAGLRAYLRQRERLLDYAAAHIQHMQKALMQMNLQLHHVVSDITGVTGMNIIRAIVAGERDPNVLASHRERGCHASVETICQALVGNYREEHVFALSQAIELYDVYQTKVAACDRQIEVILKRLKESATPPASKLLPPKHRSRQPNAPSFDARAALHAILGVDLTQIHGLGPYLALKLVGECGINLTAWPTAKHFTSWLGLAPHNKISGGKVLSSKTPRTSNRAASLLRLAAVSVGRTDTALGAFYRRLAARAGKAKAITATARKIAVLFYNTLRHGMSYADPGATYYEERYRRRVLGNLQRRAKSLGYVLQQADRDPTQVVVS

SEQ ID NO: 387580 - protein, 358 aa, unidentified
MAGPQPIVADVYTYVVGVDTHAATHHYAIIEARTGGLIDHAEFPTHTAGLLRAADWIARRTAEATAGEVDRVLVSIEGTRSYGAQLTAVLSQTGYRVVDAPTPKRERGSGKNDQIDAVVAARGSLHKHLDQLADARSGETSATLQVLLSARNSITGERTRAINALTALLRVHDLGVDARRKPTRQTIRSIAAWRTRRGDTPTQAVARREAIRLATRILALDAEATSNDKQLHDIVAATAPTLLDLPGVGPVNAATVLTAWSHPGRVRNEASFAKIAGVCPLEVSSGRRHEHRLNRAGDRQLNRALHSIASNRMKYHPATRDYVARRTAESLTKPRIRRCLKRYIAREIYRHLAALDTL

SEQ ID NO: 387581 - protein, 309 aa, unidentified
MKHEEKVYCGVDVSKKHLDAWINGKMVRFENTVKGTHSLMTRAGEVHFVFESTGGYERMAAWMIMAAGGAASIVNPARVRHYAIGIGQLAKTDAIDARVITAFAGSTHPEPAKKPSKQQRSLTALVDRRQQLTEMRTAETNRLETAGDPIFHKMVQKHLRWIHREIEGIEKKITETILENADMKEKAKCIQRIAGLGKVCSATLLAHLPEIGTISRQRVAALVGLAPYNRDSGNSSKPRHIHGGRKRLRACLYMAAVCAIQHNPVMKEFYTRLVEINHRPKKVALTAVMRKLLIAANSAVKNPDFAIVV

SEQ ID NO: 387582 - protein, 344 aa, unidentified
MMIVGCDFHPAWQQVSIFDAETGEISERKLVNGDGEAERFYSSLPVPSLIGIEACGNSQWLLDLLERLGHQVWVGDAAQIRASYVRKQKTDRRDAAHILRLLMEGRFPRLWTPTAEQRDLRQLLVHRQKLVEIRTRVKNGLQHLMLNRGVQKKRTLWSAAGQQALRELPLQGWAAQRRHDLLQLLAGLDEQIGHLDQAAQAAAEQHPQARLLMTQPGVGPITSLAFALTIGDAARFRRGKQVASYLGLIPREYSSGGRQQLGSISKQGNRMVRMLLVEAVHNVTRRDESFRKPYLHRCHRMAKGVAKVAAARRLAVRLYWMMRTQTAYPEIVRIESSPRVALVD

SEQ ID NO: 387583 - protein, 276 aa, unidentified
MNVKTIGIDLAKNVFQIHGVDEHGKRLFNKQLRRAQMASFFANIPPCLIGMEACASAHFWANKLISMGHNVKLMAPQFVKPYVKTNKHDAADAEAICEAVTRPNMRFVPVKTAEQQAVLALHRSRQSFIKQRTAQANQIRGLLAEFGIVVPRGIQQLQRRLPELVEDADNPLPVLFRTQLSLLQHHMAYLFDVIATLDKQIEQCYRQNALCQRIGKIPGIGPVTASALSATIGKANNFENGRQLAAWLGLGPRQHSSGGKQALLGISKRGDTYLRT

SEQ ID NO: 387584 - protein, 423 aa, unidentified
MAVCRENPVDLCNEQLRYSWGRIQDQDDEEPCERSDAALTRSVSLSVKEERIMRYYTGQHQYYCGVDLHARTMYLCIVNQADEILYHKEIPTNADLFVEKLAPYREDVVVSVECIFTWYWLADLCAEQKIPFVLGHALYMKAIHGSKTKNDRIDSKKIAKLLRAGMIPMAYVYPKPMRSTRDLLRRRMHFVRQRADLLTHIQQTNYQYNLPKIGKTLKYKGNREGVAERFEDESARKTVEVDLELIAYYDTMIRQLELHLVHSAKAHDPAVLQILQTIPGIGKILSLVILYEIQDIHRFPKVQNFTSYARLIRPKKTSAGKSYGNGNGRIGNSYLKWAFSEAVMLFLRETPEAQPYIRRMERKYGKDKAKGIVAHRLGRTVYYMLKKTQVFDIKKFVNQASASPHGAGRQSNRDAPSSQAVSQ

SEQ ID NO: 387585 - protein, 336 aa, unidentified
MCTLPVIVGLDYSSGTVQVCVLNQQGEVVGNRACANDWQSIVKFAESRGTVVRAAIESCSGAADLADELVMRAGWHVDLAHPGYVARMKQSPDKTDYQDARLVADLERVGYLPRVWLAPEPIRELRRLVRYRQQLVEQRKAVKLRIRALLREQRCRPPEAVNPWTRAWLAWAEKDAELGVQSRWIMARHLQELRHVVDAIKQAEKRLTEATADDPMIATLRKQPGIGPVTSWTLRAEIGRFDRFRTGKQLARFCGTSPRNASSGERVADAGLIRAASPTLRATIIETAHRLIRTDARWGQMAARLRARGKPGSVAAAAVANRWIRKLYHQMREQAA

SEQ ID NO: 387586 - protein, 408 aa, unidentified
MRVIGLDVHRSMAVVAVLEKRRLSSGGRVDLTRDAVIKFGRKLRSDDEVVIEATVNTATIVRLLRPFVGRVVIANPLQVRAIAHAKIKTDKIDAAVLAKLHASGFLPEVWMPDEATETLRRLVAQRTQIIQQMTRAKNRIHSVLHANLIPPYPGEVFSVAGRAWLDIQPLALDEKLAIQRHLADLDCRASDLRVLDRQLAQRALNDKRVERLMTISGIHVTVALGLLAAIGDISRFASPEKLVSYLGLNPSVRQSGNAPAHHGRISKQGRAHARAMLVEAAWAAGRAPGPLRAFFVRIQSRRGKQVAAVATARKITVLAWHLLTKDENYAWARPALLNAKLRKVELLAGQPAAKGRRPGRAHAYNNRAVRKQESAWLEQAEQAYTRFVANWQAKPARRTGAANGTRRS

SEQ ID NO: 387587 - protein, 343 aa, unidentified
MVAYVGLDVSLKQTSICVVNQLGSIVREGVVDSEPEAIAAFVRLNAPGAVRIGLETGPTATWLWTELKQLGLPVICIDARHAKAVLKMQINKSDRNDAAGIARIMQTGWFKEVRVKDLDSHSVRALLASRALLVKIKRDLENQIRGLLKNVGLVIGRAKFNVFTVRAEELIEDRPELMAVVRPLLKARQAIEQQTDDLDRKVLKLARYDAQVRRFMTAPGVGPITALCFKATIDDPTRFKRSRSVGAYVGLTTRRHASGEVDWTGRISKCGDAMLRSYLFEAAGVLLTRVPKWSALKAWGIRLAKRSGLRKAKVAVARKLAVILHRMWIDGTEFNWSTKKAAA

SEQ ID NO: 387588 - protein, 354 aa, unidentified
MKRSTKYVALDVHQATTVASVREEHGRVIARTILPTEAPTLLEFFGGMRGAIQVAFEEGTQAQWLHELLTPLVDRVVVCDRRGEPRQGNKGDFVDADQLSERLRRGGLRAVYHGNGRRATLKELTRTYQNLVEDSTRVMLRLKALYRARGIRAPGRGVYHPRNRARWLAELQDAGARFRAAALYAELAVLRELRPKAKAAMVTEARRDPAWDLLRTMPFFGPVRVAVLLATMQTPWRFRTKRNLWAYAGLAVVTRTSAEYVLVAGRPVRRRRAPLTRGLNPNHNRVLKDVFKGAATAATAQPGPLQDWYQALLARGMREELARVTLTRKLAAITLRLWKKGEHYDPTQLTTQAR

SEQ ID NO: 387589 - protein, 362 aa, unidentified
MLYLGCDVHKNYTTVSFVTEDGKVADTSSFYNDVKELKSLLGKFPKEEFSAVLEAGLNWGVIYDMLDSLPEVKNVSLAHPPKVKAIASAKIKTDKIDSKILGQLLRTDLIPEVWIPCKETRILKDIVRSRAFIVKIKTMIKNRIHDILRKSHINPPDVKDIFGKYGRMWLEKIELSDKRADKLLRYHLQLKGVFEDMEIELKKWINKEMKTNEDLKLVKTIPGIREVFGPIIVLEIDDINRFPDPAHLHSYSGLVPSTHISGNTSYHGRLIRGNRWLRWAFIEGAHTSVRISPYFREYYGRIKRKAGSQAASVASGRKLATIVYKVLKEKRPYIEEYRIKQNIGRSPSVRPSGGITSRSFQE

SEQ ID NO: 387590 - protein, 359 aa, unidentified
MARTSQPDSTRQVVVGVDTHKYIHVAVALDQHGARLGELSVGADSRGYQELHDWARGYGRVKTFGVEGTGSYGVGLSKFLRRAGVRVLEVNRSDRQLRYQHGKSDPLDAESAARSVLNGTATNTPKSAEGACEMIRQIKVARDGARKARSAALIALKSIVINAPSELRESLASLTTVAFVQRCASYRPGDVDSVHASTKYTLRSLARRWITLGEEIVDHDKLLDRLTEETAPTLREAFGIGPDVAAEMLIVFGDNPERIHSEAAFAKLCGVCLIPASSGLTNKHRLYRGGHRQANAALYRTIVVRMQYHAPTIACVSRRTEEGLTKKDIIRCLKRHLAREIYQRVMADHHARMSNAEAA

SEQ ID NO: 387591 - protein, 421 aa, unidentified
MPNIEIGVDSMVKENFIYVGIDLHKATHTAVMIDCYNQKLGEITFPNRPADFPKLVTKVKKCNTDAKEVVYGLENAYGYGRPLAVWLIDKGYFVKDVNTAISHRQAKHRGAMYRKSDSDDAEAIALATLNMLDKLPDACPNDAYWSLGQLVHRRDNIMKQRTRLVNQLHEQLCIAYPSYKQFFNDISRPTALYFWEHYPSRKYLKGKSVEDLRAELVPVSHNKCSTKTCEKILDAVASDKVKNNAYQDARDMVTLSIVSDLQHYDSQLAEVDKMLEQMYKMLGCTLTTIPGVNVITAVKILAEIGDIKRFSNANKLAQFAGIAPLHLSSSGKGKDVATKQGNRRLQATIYFLAIQMVQVSSKGTPRNPVVRAYYEKRKAEGKTSQQALICISRRLISIIYGMLKHGTEYRMPVVESAGENR

SEQ ID NO: 387592 - protein, 368 aa, unidentified
MRKNLRFVGLDVHKDSISVAVAESGREPARLLETIPADEWLLLKVLDRLGPKSHLRVCYEAGPIGYGLARRLNEQGICCVVVAPSLVPNQKNRRIKTDRRDAIRLAHFLRSGDLVEVTVPQAQTEAMRDLERAREDAIQMERVAHQQLDKFLLRHGRRWSAGCKWTCKHWKWIKLQEFPEEASRRVLGDYIHAVEQASARVQRLTADISELVDRWTLGPLVRALQSLRGVDLVTAVVLAAEIGDFKRFRTPKQLMAYLGLVPSEHSSGSDRRQGGITRTGNRHARWVLVEAAWNYRFRPCASRRIDARRQLVAAGIQAIAQRAEQRLSRRFKRLIDRGKSSQKAATAVARELVGFVWAIAQEDQLLAA

SEQ ID NO: 387593 - protein, 344 aa, unidentified
MNEAYDDKQFVGIDVHRRRSVLVRMSESGELLGWERILNDRDRLAEVMAQAGEHPEVVLEATYGWYWVADAVAGMGANVHLAHPLGVKAFSYRRVKNDVRDAGDLADLLRMGRLPEAWIAPPATRELRELVRHRAKLVHARTSLRCQVHAVLAGQGVPVSVSDLFGVEGSKLLDELVLPQVYRYRIDSLRRLIAAFDVEIDATARLSRERLGQDQGFAAVKTIPGVGPILGAVFVAEIGDVSRFPGPAQLASWAGLTPKHYESDTTVHRGRITKQGSRLVRWAAVEAVQRTEKGTRLWVLRERVAARRGRNIATVAAARELVEMVFYALRDHTVRRLSQPPLAA

SEQ ID NO: 387594 - protein, 426 aa, unidentified
MNSQRSCSEPSFGAFVAMDWADQKHVWSLQPAGSENREHGEIPHTPEAIDAWAGDLARRFPGRPIALGVEQSRGALVFMLSKYAHFHIYPIHPRAAAQFRAALYPSGAKDDPVDADLLLDLLLQHRRHLRRLNPDTEATRMVQHLVEVRRRLVNEKTRQSNRLTATLKLYFPQILDWFDVDSELVGALLERWSTLESLRKARPATLRRFFTAHNCRRSDLIEQRIELIRQAVPAVQDQAIVRPAVAIVEVLVKLIGTLRQGIAELDRQIEQATEAHPDYAIFRSFPGAGPVMAPRLLAALGSQRDRYATAAELQQFSGIAPVLVRSGKSAWVHHRWACPKFLRQTFHEWAGHSIGFCDWARAYYQQQRARGAAHHAAVRALAFKWIRIVFRCWKDRVSYDDARYLRSLRQRGSPLVRRLAIQEETA

SEQ ID NO: 387595 - protein, 413 aa, unidentified
MKVIYNNCCGIDVHKTFLIATIIRTTGRKIDYLKKRFSTHNKDILRFKQWLTQHECYDLCMESTGKYWIPVFNLLEDNMNVVIANPKWVRAVKGNKDDKKDSKWIGELFRLGLVPSSFIPPKDIRILRELTRYRYKLVSTRSSEKNRFQNSFTVCNIALDSVVSDMFGVSASAISNYILTSDTFDSDHCVSLLKGRLKKKSDEVIESIDGYHMMQPQKDRALIIRQHIDYLDQMIATIDAYLDELIQPYEPLVKLLCSIPGVKRQSAIIIISEIGSDMSVFGDQKKISSWAGLAPSSNESAGKKKSVKISRAGVYLKPALAQVAHAAKKSTTTPYYKIKFDRIAKRRGKKRAIIAISRMILVAIYHMIQTGELWNPIDLITIDTPEHILQRKKDKAIKEATKLLIKEGILKVS

SEQ ID NO: 387596 - protein, 342 aa, unidentified
MELHTIGIDLGKTVFHLVGLNLRGEVVVRKKFSRLQLLRFTANRQVQLIGMEACGGSHFLGRALREQGHEVRLIPAQYVKPYVKTNKRDYIDAEAIAEAVGRPTMRFVPIKTDDQLDLQSLHRVRERWVMRRAAVVNQIRGLLLERGITLRKGRCHLDAALPGILEDATIKLSGAVRLLLAQLKLELDQLATRLEEADALVQKTAQESEVCRRLDAIPGIGPLTATALIAAIGNGAAFRKGREFAAWVGLVPRKHSTGGKQKLLGISKRGSSYLRRLFVQGARAVLQFREKQSSGLSAWLAQLTARTHYNVAGVALANKLARMAWAVLTTGEAYRAPVLACR

SEQ ID NO: 387597 - protein, 391 aa, unidentified
MICVGIDVAKDKHDCFILSSEGEVLADVFTISNNAEGFGTLLQTIRRCTRPSDKIKVGLEATGHYSYNILGFLLDCGLPTYVINPLHTNLYRKSLSLRKTKTDRVDARTIATMLMSDVDLKSYTDTSYHNDELKSLTRYRFDKVRERAKLKTSISRLVCILFPELEKLVPSLHMASVYALLSEFPGAKQIASTHLTRLTNLLHETSKGRYGREKATQIRDAARNSIGSAMPAKSLELKHTIRLIGELDEEIEEIEKEINSIMEVVHSPITTIPGIGTRMGAMILAEVGDFSNFDSPDKILAYAGLSPSTYQSGQLTNCYSHMEKRGSRYLRYAIFNATKFVCNWDPNFAAYLAKKRAEGKHYNVAISHAAKKLVRLIYAMEKSRQPYRTAA

SEQ ID NO: 387598 - protein, 401 aa, unidentified
MAALLQDIRATGCPMSQASDLTRCLAPYDQATTLIAVIELSLSSWLIAGMVPGLARQPLKKMAPDEAGLLRLLERWREEAVKAGSAINRISVAFEAGRDGFWLARWLRTRGIDAHVIHSSSVAVSREHRRAKTDRLDTALLMRVFIGWLRGERGHCSMVAVPSIEEEDAKRPNRERENLVGERTRIINRMKSALARLGIRGFKPELRKAPQRLDTLSTPEGMPIPINTLDEFRRDLVRLALVREQIDAIERTRIAQLEAAPKTGPHAMVRLLAKILGLGIETADMLVNEVLSRNLRDRRAVARYAGLTGSPDESGKKRRERGLAKAGNARVRRGLVQLAWRFLLFQKESALVLWFRARTESAAGVRKTKMIVALARKLLIALWRMVTTGEVPAGVVLRPSP

SEQ ID NO: 387599 - protein, 453 aa, unidentified
MPNKPAPAFDETRRNVAGIDIAGHADHYVCGPRRDDGGHDVAHFGTTTAELHKLLAWLTERGVESAAMESTSVYWIPVADLLEANGVEVVLVDTREVRMVPGRKSDVKDCQWLQRLHSCGLLRGGFRPPENVAAVRTVLRERESLTGMRTQCIQQMQKSLDQMNIRVHHAVSDIDGKTGMAIIAAVVAGERDPAALARLRDPRCGKGEKEIAGHLSGVWREEHLFNLGQAYRTLLFIDERLAEYDAKAAAMLRALAEASGKTPPPPPPAGEERTRKDTRDAEGKRDLQRIMGFDMTRLPGIGYDTAAVVLCEIGPDFARFPTERHFAAYIGLAPSLGKSAGKNVRQRKRCRNTSRAGRALRMAASTLYRSQTELGAFFRSVARRTDRKTAVKATARRMAHMIYRAVRYGAAYLDRGAEAYEKRMRERTLRTVRLLIKSHKINELELSTAFVAS

SEQ ID NO: 387600 - protein, 405 aa, unidentified
MLGVGIDWAEDFHLVALGRPGDGVIDSARVEHRPKAIDVLIAKIAELEPDPAEVRVVIESRHGLLVERLVDAGYVVVPVNPDLVARRRGPAKKKDDTEDARIACLLALDRFERLRPLVPHGEIAGELRAIARDDERAARDERRLLNRLRQDLITTFPAALDIGGSDLGGPTFLRMLERWPTTDALASASRDDLEGFARSCRHSRPTSFADKVQSALGGDHFVPRDYLVRAKADTIRLAATQLLAIEAQRRAWERRMGELLLGAPRRGRAKQPREDERGQCFPGGEIYLSFPGLGDRLAARVAAEIGDHPEQFCSPNALQCYAGKAPVTRRSGKSELVVACRLAHNGFLGNAVQMWAFCSLRGSGWAREFYDGQRARGKGHHAALRALGNRWLEVPLTEAAPWVEP

SEQ ID NO: 387601 - protein, 277 aa, unidentified
MEHYAGLDVSVKETSVCVVDGAGQVVREVKVASEPGAILGVLADEAFTLKRIGLEAGPLSQWLYGALAEADLPVICVETRHMKAALSAQVNKSDRNDARGITQMMRVGLYRPVPVKTLASQKRRMLLTSRQLLQAKAHDIESDLRGTLRNFGLKVDPVSRGKFEARIRELVVDCPGLAAITGPLLIAWRTLREQFAVLHRQLLAVVRDDAVCHRLMTVPGVGPVVALTFRATVDVPSRFANSKAVGAVFGLTPRQHQSGEVESSAGWWSDVVRRDDG

SEQ ID NO: 387602 - protein, 346 aa, unidentified
MAHFVGLDVSVKETAVCVVDQAGKVVLEQKVASEPDDIVTLLASIGVDYGRVGIEAGPLSQWLFNGMAEADLPVVCVETRHMKSLLKAQQINKSDRHDARGIAQMMRVGLFKPVHVKTLASQEKRMLLTARKLIQRKMLDVESDLRGTLRNFGLKVGVVGKARFEVRIRELVEGLPRLAAIVEPLLTIRRVMRQEFTRLHKMLLDVVRQDPVCRRLMTAPGVGAVVALTYRATVDQPQRFVHSRAVGAHVGLTPRRHQSGEIDYDGGISKSGDTMLRTMLYEAAQMLLTQSRHWSWLKAWGMRVAQRRGIRRAIVAVARRLAVILHRMWTDGTDFRWGSEPAAAVA

SEQ ID NO: 387603 - protein, 372 aa, unidentified
MNYNTVYVGMDVHKESFTLCSCKYEDEKASHYQRTPASYKNVLRYLAFLRTIYGEDTRFVCGYEAGCLGYSLYHQLENFNVECVILAPTTMLEQRSKRRIKTDKRDAEIIARSLAQHNYSPVHIPTETDNQTKEFIRMRDDHKAELKKIKQQILSFCLRQGYQYDGSGNWTAKHVKWLRSLKPAGLYKEILDEYLLTYTILIDKLNRLDQRIEELASKEEYTESVSKLTCFLGIKTHTALSVIVEVGDFQRFVSARKFAGYLGLVPGQHSSGDDRNGLGITKAGNTHVRRLLVESAQSYTRGKIGYKSRVLRSRQAGNSPQVINYADRANERLRRRYYKMVLKDGKKYNIAKTAIARELACFIWGMMTDNIY

SEQ ID NO: 387604 - protein, 423 aa, unidentified
MSYRIAGIDVHKKMLAVVVADVEVQGEYQFERIRYGSNPEQLRLLAAWLIEHEVEEVVMESTAQYWKPVWGALEQYWKPSGQKRETTGPMSGTLHLAQAQSNRGPRGRKKDFPDAERLVKRLVANELSLSFVPDAEQRLWRTVMRRKYQLTRNRVQLQNRLEALLEEAHIKLSSLVSDLLGASARRMLKALADGETDPAALASLADKNLRATPAQLCDALGACTELNPVYRRLLKMFLEELQLIDQQIGQLDQEMATLLGQHQAAVERLAEVPGLGVDSAQQIIAEVGATAATFPSAKQLSSWVGACPGDEESAGVSKSHRSPKGNRHMRRILNQCANAAAKSKGTIFEIVYRRLVSRLGHNQTIGAIAHRLCRLIWIILHQNVRYEERGPSVSAKSRQRRTHRMIRELRHLGYRVEPVVTTL

SEQ ID NO: 387605 - protein, 335 aa, unidentified
MSKITMIGIDTAKSVFHLVGIDAGGNYVYRKKLSRKRLLPTLAKLEVCQVVLEACAASHHWARCIEQLGHRVRLIAPQHVKPYRRGQKNDYRDAEAIISAALSPGMNFVGVKSVEQQAEQALHRVRSRLLSHRTAAANGLRGLLGEFGLAFPKGIAPVRQGAVGFVDSGQAEALGLTELVWDVLNEIDQLQQRIDKYQRQIEQQVRHDAISRRLCDELQGVGELSASALRVKVADPRDFDSGRNFSAYLGLSPGHTGTGGKVKIGKIGRSHDPYLRQLLIHGGRSVVSHLGDKQDEQSRWLRRLRDRQGFNVASVAMAHKNARQAWAIMVKEQVL

SEQ ID NO: 387606 - protein, 417 aa, unidentified
MSMSPSASSQEKATIKYVCGIDIGSQSCAGCICRPDKSLVGKPMVFANSKDGWDILLDKLNHLDALPQEILIGMEATARYSENLYHALGQLGYRLCLLHPGQTHQFHERQGLRAKTDRLDAMTIARVLLSGEARAGYIPSEQVATYRELVRLHSQLSEEAARYQNQIHALVVVLFPEFTQVFADPCLPTALAVLTVYPSARAMAQAKEGALYALLHAQKHAHYGHPTAKKLLSLASTSVSSGQAEAGRSVSLRMLCEQLEQTQKHLEWLQNELEHLLATDPAVEGLQQIPEFGIKTVAVLRAELGDVGRFARTDQVIAYAGLDVRIKESGLWKGQAKLSKRGSGLLRQMLYLAALRSIHLERSAFGAYYRRLVERGLKKVSALMAVMRKMLAVAVHLLKHEQQDYDPSKVGVGNLAG

SEQ ID NO: 387607 - protein, 409 aa, unidentified
MDVIHPKCAGLDVHKDSVVACARLVTGQKATHEVKTFGTTTRDLLALADWLTARGCTHVAMEATGVYWKPVWHVLEGSFELVLANAMHIRNIPGRKTDVNDATWIADLLAHGLIRGSFVPAPPLQDLRDLTRTRTQLVRERARHILRIQKTLENANLKLASVLTDVLGVTGRNLLEALIAGEASPERLADLAHDPRLKASRAEFVEALHGRITPHHRFILALHLRQIDALDTAVREIEARLEDALAPFRAAVARLTTIRGIAETAAHVLIAEIGVDMSHFPSAGHLISWAGLCPRLHESAGKRRSTRTRHGNRWLKTMLVQAAWGAVRHHHGGYLRAQFVRLRSRRGPKKAILAVAASMLTAAYYMLRDGTDYRDLGADHFDRREKAKLARRLITRLHDLGFTVEVRAA

SEQ ID NO: 387608 - protein, 352 aa, unidentified
MAKVEFDDLMSIGIDIGKDTFHIVGFDHNGQRVLRKQIKRLALVTTFEKLPRCIVGMEACLSAHFVSRTLRKMGFEPRIIPAIYVKPFNKGQKNDYNDAEAIAEAALRPNLNAVSEKSQDQLDLQALHRVRSRLVSRRTATINQIRAFLIEQGITVRKGLRALRNSFEAILEERKDEISLRMRKILIGLYGDWMWMDDRINAVSKEIEDISRTEENCVNVMTVPGIGPMISTAMVAAVGEGEAFDRGRDFAAWVGLVPRQYSTGGRTILGRITKRGSRYLRMLFVQAAKVILMRPHRWPDFSFGAWLTRASERMHRNKLAIALANKLARMAWSILKHKTAFDAPRDEIMAGV

SEQ ID NO: 387609 - protein, 308 aa, unidentified
MPAFAERDGKFEIFVYVSKTGAAFSVPNTPAGHSNLQRKLGPVEGQIIALELTGGYEWVIWEALDAAGHDVRQVSAAHVRAFSRATGALAKTDPIDARLIADFIAFRPTSGRKLPAKKLRYLNVLSTKRRQLVELRKRLKCQIKQHDNDLMVALDAELLELLSRQIRGLEDAIQTQIMEDPQMKQHAKILRPIPGIGPVLCAVLIGEMPELGMIGDKQIAALAGVAPINRDSGRMDGRRSIKGGRYIIRSLLYQAALVASTHNKTLKAFASRLKEKGKPHKVILIAVARKLLTTANVLMAKNQLWRTT

SEQ ID NO: 387610 - protein, 365 aa, unidentified
MSKQQNQRKRAKGKKIQFKNIEELAQINLNAAGIDIGASEHWVSIPAGRDEEHVRCFSCFTSDLHALADWLKECGITSVAMESTGVYWIPVFQILETKGFEVKLVNAHFIKTVPGRKSDVLDCQWIQQLHTYGLLSGSFRPDDQVCVLRSYIRQRDNLIRSSSTHIQRMQKALSEMNLHLHQVLSDITGVTGLKIIQAIIAGERDPSILATYRDRRVKSTQADIEAALTGDYRPEHVFILSQELYLYQTYLAQIEKCDLAIQKCFENFEDKNQDQPPLKITRKSQNKRRNAPNFDLRSHLYRISGVDFTSIDGLDVLTVQTIISEVGLDPKRFKSAKNFVSWLGLCPGSRISGGKALSSQREQSC

SEQ ID NO: 387611 - protein, 355 aa, unidentified
MATIAHNDVEVTGGVDTHKDTHTAAALDAAGRTLGSAQFPATTAGYAALLAWLTGFGRLMLVGVEGTGAYGAGLARFLREHGVALVEVDRPDRKTRRWQGKSDPVDAQAAARAALAAHATGIPKRRDGRVEALRALRVARRSAIQQRADTQRQMHTLVVTAPEPLRSQLRGLRAAELVAHCAAVAADPAGAEQPLSATTLALRSLARRHQQLTTEITDLDTVIAPLVQLINPQLTALHGIGPDVAGQLLVTAGDNPDRLRSEAAFAMLCGVAPLPASSGRTNRHRLNRGGDRQANCALYRVALCRLRWDPQTRAYAERRTKEGMSKKEIIRCLKRYLAREIYPLLIPSKDLELAT

SEQ ID NO: 387612 - protein, 362 aa, unidentified
MFVAGIDAHTRYVVVTIVNRSGELIVKPTRVRVEQSERLLTLLAPYRPLQAVMETSSSWPWLHEVLSGAGIDFVLAHARRLRAIAEANYKRDEIDAELLARMQLAGCIPPVYPTPFAQREWATLIRHRTALVMQRTAVVNRLHAQLHQRGLHLERGRLLTRAGRQWLKREAWPALSLEQRAVVRSHLRIIRGLGPLIRALDRRIAEVAASIPEAQLLRTIPGIGAHRALIVCAEALPIGRFRTPGHLASYAGLVPTSRQTGLRPVHHGPIPGGANRWLRGALVRAVVSHVQHAPDSWLTHYYLTQKPRLGWPVARVATARKLTRAIHAMLRTTTPWTNEGPTTGSTIRPGVSSHERMPQCTH

SEQ ID NO: 387613 - protein, 465 aa, unidentified
MKRQRRRHSPKPRVSPSVLERINPHAAGIDCGAAEHFVAVPPDRDATPVRSFATFTGDLYRLADWLTACHVTSVAMEATGVYWIPLYEILETRGFTVLLVNARHVKNVPGRKSDVSDCEWLRDLHIVGLLRGSFRPTDGIVALRAYLRHRETLIQTAGSSIQRMQKALVQMNVQLPLVVSDITGVTGLRILRDIVVGRTDPHTLAQHRDYRCHASEAEIVAALTGNYRPEHVFSLRQNLEAFDHTQQQLAACDTAIEAHLQTLAAHATPATTPLPAARPRQKPRDNEPRFELRTPLHQLTGVDLSQLNGIGPYNALRLLSEIGTDMTRWPTDKHFTSWLTLAPQNKISGGRLLSSRTRPSANRAAAILRLAAMNLGRTQTALGAFYRRLAFRVGKAKAITATARKLAILVYRTLKDGLVYADPGADAYDAQHRTHVVRRLRQRAANLGFALVNVSTGEVVEGTVS

SEQ ID NO: 387614 - protein, 430 aa, unidentified
MKSNTQNAKIEAITEKTLVLGIDVGSETHYARAFDYRGIEYSKKPFKFSNTEAGFVTFKEWILDLKERHEKDKVVPGMEPTGHYWFNLGKFLQDNEMKPVLVNPHHVKKSKELDDNNPTKNDRKDPKVIAGLVREGRYMIPYLPDGVYADLRTASNIRFQLQAELTRIQNRISRWFNIYFPEYKTVYGKPDAKSGMLILKAAPLPEDILTLGIDGVNQIWRDAKLRAVGKARAKTLIEAAEHSVGSKEGAVSARMEIRMLLEDYESRSIRLQEVMTLIEGLVKQIPMAEKLLEIKGVGIRTVSGFLAEVGDISRFNNPKELQKLAGLALVENSSGKHKGETTISRRGRKRLRYLLFEVAMSLVAKNPEFRELHNYYTTRRLNPLKKMQSLMAIAAKLIRVFYAMLTKGVDYDPKKMVSDIKRPAVYLQAA

SEQ ID NO: 387615 - protein, 428 aa, unidentified
METPTLNPELVAWIGLDWADQAHEIRLQAVGSRRVESLRVEQKPEALHAWVAQLRARFPQGKVAVALEQSRGAVIYALMNYDFLLLYPVPPKGLARYREAFFTSGAKSDPGDADLLLEMVHSHRDRLRLWQPDDALTRQLRLLVEHRRRTVDDRTALTNRLTDLLKTYFPQALEWAGDLRKLAACEFLSQWPSLKALQAAGRPTWRRFYRCHRRLSAEELDQLLQAIAQARPLTEDRALVEASVLMTQTLIEQLRAVIAALARLDQALEKLFEQHPDQGLFQGLPGAGEALAPRLAAAFGSNRHRYQSAEELQQFSGIAPVTESSGKTCWVHWRMACPKFLRQTFHEFADASRKKSRWAEAYYQRRRQDGVSHHAAIRALAYKWIRILYRCWKTSTPYDESVYLQALRRRHSPLWLAATALSIQEGHA

SEQ ID NO: 387616 - protein, 410 aa, unidentified
MLELFVGDDWAEEHHDVELMDPAGRRLGRARLPEGVTGMARLHAMIAAQLGEGVEDAVVKVGIETDRGPWAQALIAAGYEVFAVNPLQAARYRERHSVSGAKSDKADAHTLADMVRTDSHQLRPVAADSPRAEAIKVVARTHKTLIWERTRHTQRLRHALREYFPAALEAFEDLAASDTLELLSKAPDPAAAARLSISQISAALRRAGRRKIEEKAAVIQTALRAEHLRQPEVVAAAYAASVQSTVAVLKVLVEQVKTLQGQVESHFGRHPVAEIILSQPGLGPILGARVLGEFGDAADRYVSAKSRKNYAGTSPITRASGKKKLVLARFVHNDRLIDALAAQAFAALSASPGARAYYDRIRARGVGHRAALRQLANRLVGILHGCLKTGTAYDETTAWPADATDSPAAA

SEQ ID NO: 387617 - protein, 464 aa, unidentified
MKTRLQNQKKKKTKINLDSLPLLEPNAAGIDIAHREHWCAVPSDRCPKPVRPFGTFTADLEKMADWLQECGIKTVAMESTGVYWIPAFQVLEGRGFKVVLVNARHVKNVSGRKSDVLDCQWIQRLHSYGLLNASFRPADAMCVLRSYLRYRDDLVCARSVQCQHMQKALQQMNVQLHQVLSDVTGLSGLRIIQAILAGERDAKKMAALADRRVQASQATIQKALRGDYRAEHLFVLQSALDLYQAYERKIHLCDEQIIAQLAQLPPRVDVAQKPLPPRKPGRSWLQDMVAGTDLREELYRCTGVDLTAIEGLGVLTAQVVISEVGLDMARWPSEKHFCSWVGLCPDNRISGGKVLSSHTPHVLNRVADALRIAAATLERSKTALGAFYRRMRARLGAASAITATAHKLARIIYRLLKHGELYVRQGMEAYENKYRERLLHNLKKTAATFGFELTPAQQLPPSVS

SEQ ID NO: 387618 - protein, 332 aa, unidentified
MNVTSLQEGQVAGGVDTHQDLHVAGVVDHTGKVLETKSFPTTRHGYLSLITWLRSFGDVARVGVECTGSYGAGLTRYLGSADIPTLEVTRPDKSLRRAQGKSDDYDAIAAAVAALYGQRVQVAKDRDGQVEALRVLRTTRKTAIKCRRATLQQLHNTIVAASDKIREQYRGETKMHLLRKLSASRPTRESFRDPDVATQIALKSLAKRVLEFNDEIADLDELIEKLVKELAGPLLELPGMGIESAGEFLVAAGDNPERLGSEASFAMMCGACPIPASSGKTNRHRLNRGGNRQANSALHIVVLSRIRIDERTQAYVTRRLAEGLSKRCLSTF

SEQ ID NO: 387619 - protein, 371 aa, unidentified
MEHTRFVGLDIHKERISITVAESGRSGPVEYLGEIANDPGAIRKLCERLGRPGTPLTFCYEAGPCGYGVHRQLTGLGHRCDVVAPSLIPKRSGDRVKTNRRDATMLARLHRAGELTSVWVPDADHEAMRDLVRLRSVVRQIVTHARQHLQGFLLRHGRKHGLGTAWRMAYRRWLSTLAFDHPAQQIAFQDYVDAVTDAERRLQRVEEQISSLLPEWTLRPVVDALQAMRGIALINAVVLVAEVGDFTRFSNPRQLMAYFGLVPAERSSGETARRGGITKTGNSHVRHALVEGAWAYRMRARIGRHKVDRIEALPKAVRDIGWKAQVRLCARYRRLTARGKTANVVNVAIAREMVGFIWSIACTIQSAPKAA

SEQ ID NO: 387620 - protein, 335 aa, unidentified
MIKSVIGIDVSMGSFHGCFKKRFDDGKNKIIATRSFVNTEKGFNELLTWTKKNNNEGIEVIFVMEATGVYYENLAHFLYSQKQLVSVVLANKMKNYFKSLNIKTKTDKVDSKVIAMYGIERSVEYWAPMSGCYKELRDLCRELLALKKDINRAKNQLHAMQLSHDKHKRIMEIKSSQIEFYENAIHEIRAEIKTLIGKDDKLNEKLLKVVSIPGIGWETAVILISETNGFLMFKNIRQLVSYAGMDVSHNESGNFKGNSRISKKGNDKIRQVLYMPALSATRANVSIKSLYQRVCEKNPDAKKKGIIAAMRKLLILVFTIWRKEQEYDRAYVWTR

SEQ ID NO: 387621 - protein, 414 aa, unidentified
MSNRTPAYAVTVGIDWADLKHDVFERHPDGSLHHQQISSSPEAITDWPFALRSVSAEGRVAVAVEQRRGPLFHCLSQCLEWMDLYPINPQTLARYRQAFYTSRAKDDPIDSQLLEDLLRSHPDRLRIYQPAPELERKLELFCQQRRKIVGLAVKLENQLCSTLKEYYPVAIDLCAPAALRTSMTLDFLQRWPTFGSLKKARPETLRSFYYAHNSRSESLIKARLEKFAAALPITEDSAVIEPLAFVTKMLVTELRTITRTIDQLDERIAELFRQHPDHQLFESFPGAGAQLAPRLLCAFGADRSRWSDPSQIQKTSGIAPVLERSGKSCWVHRRLFRPKFLCQTFHEFAGESIPRSEWAKTFYQSQRQKGKSHHSAVRILAFKWIRVIFRCWKSHTPYNETFYLDALKKRHKDT

SEQ ID NO: 387622 - protein, 453 aa, unidentified
MRVVGIDTGVTSKHCAVVVDSEGTKDSKPILFGTSIQEYDRMIEEANKGGKTDIFAIETAGEAWYTLALHLHKKGYQVAIVSPEKSHDFRKSLRKHTKTNRIDASSIARSLIIDRTSITYFSPRTTKIEALRRLTRRYTSLQKEQAAHRTIIRAELRSLLPSWRQPEGIFTMPYKKWFKKGVDPWYWNETNKAELQELLKDPVETERIIEACEQTRKIYSNIHQEGLDSGVLAVQQEVAILELLEDQIKELKRKISQIYRELDEDRVLTSICGFGEFTAAVILGEVGDITRFRNSAGFSSYCGVVPKRNDTGDTHRQGQKMTKQGNRHLRRVLFLAALSGTRTDPELATIYYRQKEVLKKHHNKAMGFVMNALARRIYAVLKRNPHLFSGGKGEKAPYIIKIEGITVDKKVAREWIEKNKKTTSKKNGSRAGKYPPETVKDVSRISNGLPLIV

SEQ ID NO: 387623 - protein, 393 aa, unidentified
MICVGIDVAKDKHDCFILSSEGEVLADVFTIQNNAEGFDMLLQTIRRCARPEDKIKVGLEATGHYSYNILGFLLDKGLPTYVINPLHTNLYRKSLSLRKTKTDRVDARTIAAMLMSDVDLKSYTDTAYHNEELKSLTRYRFDKVRERAKLKQSVSRLVTILFPELEKLVPTLHMASVYALLSEFPGAKQVAEAHLTHLKAVLYGASKGRYGRDMATTLRDAARCSVGSVMPAKSLELQHTIRLIRELDAEIEDIETAIQSMMDEIQSPITTIPGIGVRMGAMILAEIGDFSRFDSPDKILAYAGMSPSTYQSGQLSLSGAYSHMEKRGSRYLRYALYNATKYVCHWDPTFAAYLAKKRGEGKHYNVAISHAAKKLVRLIYAMEKSKQSYRNAA

SEQ ID NO: 387624 - protein, 366 aa, unidentified
MTDRQGNVVGVDPHKHTLSATVLDERGGIIGTSHYRVSGDGHRALEAWALSFGAVTRWGIEGANGLGRHTSVYLCRQGHDVRDVCPTRTAERARGRHQGKSDVLDSERIARETLAHPELPVAFKRAGEDTGPDETAELMALWHKERRSVLKTRQHLLNEAEPLLNELPEELRGRLPDTKAVRPRLAALRQRRGAWPAATALRLRLLEDHRRTILELDRRDKEITKELAKLVRSVGSTLDGLCGLDIRSTAEILVEVGDPRRFTEGGFARFSGTAPLPASSGEGPGQPVRHRLNRGGNRQVNAVLHRMAVTQLRCDERAQRIRDNAKRRGHTRKEAMRILRRHLAAVVYRRMIRDLKAGEAPLHLVA

SEQ ID NO: 387625 - protein, 427 aa, unidentified
MEEPTKSKAVGWGGYEYFLGLDWAKDHHAIVVLAPDGHKVLDVQIAQDAQGWQSLRKKLVAVAGANLAVVAATVETTCGPAVERLFELGCALYPINPKAGQRYRERKVPGGGKSDSLDAWCFADALRTDGHAWRRLAPEDPCLQELRLLCRDERHLIRQRTALVNQLRQALLEYYPAALEAFDDWTVPGPWDFVLRFPTPAALVQAGKQAWDKFLHSHHLYRPSTYAKRLEIFGRAAQFCGTEPVTKAKSLLAVSLAKELGTLQRQLSDYRERIAQLFREHPDHELFGSLPGAGDTLAPRLLSECGQDRQRFEDHEALQCYAGTAPVSFSSGQLHVVRFRRACNRDLRAAVHLWADCSRKTCTWAQVYYEHKRQEGKSHACALRCLGQRWLKILWKLWQTRQPYNEQVHTRNQVRHGSWGLALAAPQ

SEQ ID NO: 387626 - protein, 343 aa, unidentified
MYYIGLDIHKKTISYCVKDASGQIYREGKIGSTRCELDSWIKTLPQPRMIAMEATIFTGWIYDHLLPHAEKVKVANPLMLRAIAAAKRKNDRIDSNKIADCLRCDFLPECYMASTAMRDRRRTLRYRNLVLKQMTQMKNRISGLLMETGVSYNKQRLHKLGYFMDLMSCNEEVNENIRPLLKLSRETVVRSQRLDYALVHSLERDPLLAERLKRLRTIPGVGPITALTWALEIGDVSRFQSVKQAVSYCGLCSAERSSADKLVRMPISKQRNKHIQQVLVEAAKLAPRYSHELALVYDRERQRGNKNRATLAVARKLVAYMLAVERRQQNFVPIGELGGTAAA

SEQ ID NO: 387627 - protein, 342 aa, unidentified
MEYYVGLDVSLKQTSICVVDQTGLVVREGVVDSDPEAISVYVRSRVPDAIRIGLETGPTSTWLWTELKRLGLPVICIDARHAKAVLKMQINKSDRNDAIGIARIMQTGWFKEVHVKDIDSHSVRALLASRALLVKIKRDLENQVRGLLKNLGLVIGRATFNVFAVRAEELIEDRPELLAAIRPLLEARKAIEQQVSELDRKVMKLARRDAQVRRFMTAPGVGPITALAFKATIDDPTRFARSRSVGAYVGLTSRRHASGEVDWSGRISKCGDAMLRSYLFEAAGVLLTRVPKWCAVKAWGARLAKRIGLSKAKVAVARKLAVILHRMWIDGTEFNWSKEIAA

SEQ ID NO: 387628 - protein, 342 aa, unidentified
MSVYVGIDVHRKRSQVAVIDQAGQVLANRNVPNGVEPILKVIGGLPPGTAAAFEACYGTSWLVELLEDYGFDPHLVHPSRCKAIASARLKNDKVDAAILAQLLRADLLPEAWIAPPPVRQLRALLRHRVALVRLRTRLRNRIHAIVADYGHDRPAGGYWTGPGRAWLAALPLPAVSRELIGDDLGLIDALQERIDRLDGEICQRARSDPRVKILTQLPGVGPFTALMILAEVGGIRRFASARQLASWAGLTPTVRGSDRVAHYGHISKEGSAWLRWVLCEAAQTAKRSPQFAATFQRIAQRRGKKIATTAIARKLATRAWHLLADTGPGAAPQPAAPQTAAR

SEQ ID NO: 387629 - protein, 349 aa, unidentified
MLKGLIKSVIALLTTDGEVVCIDRLDYSELEKSAQALSSTTFAMEPCTEMNYLVQKLEAWGHRCLVIGGKNVQNYVENHFSGQKTDLNDAQALAFLAQDTQLRTIKAKDVEQQKYASLTTLREQYIKQYRQTIVSLKGICQAWGLNISKGISGKARLKDLIENHAAFPEELKESLVDMVTHAQTAQKALNKITKTLEELAKSDKVCQLIQTIPGLGSICSCRLRATVGDIKRFKSPKDFPAYYGLVPRSIATGHNERKGKITHRGDRTMRSLMVQAAGSLVNMATKGKLKSKQLTKWILKKQKEKMPWGKLVCAVAAKLLRIVRAVLISNKPYNSKIAGVAKCSLPKGS

SEQ ID NO: 387630 - protein, 353 aa, unidentified
MRTYYVGMDVHRATIAIVVLNGAGKVVEQLVVETSATRVRCYLKQLQGRVYVTFEEGTQAQWLYDVVQPLVTEVIVCNPRHNKLLKAGNKSDLIDAQKLAELLRNGALKAVDHRDHGVRALKELVRNYDCLVSDTTRVMNRLKAMFRQQAIACGGHEVYRQDRRAVWLAKLTERGAKARASSLYRQLAALKALRHEAKLAMVREARRGAAYLWLMSVPRLGAVSVAQLLAVVGTPHRFRTKRQFWSYVGLAVVTSSTADMEVVDGVLRRSRRPVATRGLNRNHNHLLKRVFKNAATSACQSAPFKQHYERRLQQGMDPALARLTVARQLSAITLSLWKRGEKFQAERMKRQAA

SEQ ID NO: 387631 - protein, 400 aa, unidentified
MLSIGIDVSKGKSTVCGMKPGGEIVYTPFEVQHTREGMSELVSLLRSSGEEVRAVLESTGSYHCPVVAALLENGIFVSVVNSLRMKRFCSQSIRKVKTDRIDAMQIALYGLAYWQELQPTKLPEDTYRELQLLARQYYQMTSLLIKAKVDFNAICDQVLPGMQELMSDHAGRHKLSDFVLRYRHTTRILEMGETRFRKDYCKWAEKKGYRNCERMAALIFATAQNGIPVLPNAPSTQIVITEAIRVLHTVEASRDAILTQMQALAKTLPEYSLVREMPCIGDTLAPRLIAEIGDVRRFHSKRALIAYAGIDAPPYQSGKFCANNRHISKRGNRYLRKTGYEVMQSYVMHKPANDPIFTFIEKKRGEGKSGKLAMVAGLNKFLRVYYGKVTELYRSLPTIE

SEQ ID NO: 387632 - protein, 361 aa, unidentified
MDKYIGFDISSKDVSVCVIQKNQRERYATIGPDAGSMRKFLVNEKKDGSRVNVTFEISGQAGFLYDSLIDCVDSIKVANPDKMTWIYRTSKKNDRFDARKMAVLLSIGEIPAVHMPSKEVRQWRMIICHRKKLLAALVTAKNRIRALLKSQGISSAGNKGKWWNIRNRLWMRQFCGVDFDPENLWRMQMGNLLDELEQKEKQVALVTEYLDGYLDKQAGGELLMSIRGVGPRTAEAVLAFTDDVERFASSKEYCGYFGVTPKLDESGSSRRLGHISKKGPSVVRWVLVESSWKVIRYSTAIRAFYDRVRAGQKGRKKIAIVAVARKLLSIMRAMLLTGATFDDKFVSSVDYGKIEMLRKSA

SEQ ID NO: 387633 - protein, 371 aa, unidentified
MKSIVNIGMDIHKEQYTLCSYSFIDDELRNEQTVKPEIKMVLKYVEKVRNSYDGEVEIVCGYEAGCLGYTVYHQLEDHGVKCVILAPTTMGITNTGRIKTDRRDAGNIARCLAFHTYSEVHVPTTEDESVKEFIRMRDDQKKARKIIKQQILALVLRHGYRYEDGRNYWTMKHMKWLKSLRLGGTVQESLEEYLITYEYLTNKLERLDKRIEELAAGDRYCEKVKRLSCLIGVKTHTALATIVEIGDFKRFAKPEKLAAFVGLVPGENSSGGNQYRGHITKAGNSHVRRLLVEAAQSYTRGAIGHKSVALKQRQNGNTPQVIAYADKANERLRRKFYRMVLRNGTKRNVAATAIARELACFMWGLMTDNVA

SEQ ID NO: 387634 - protein, 453 aa, unidentified
MCLEDRPVLEPNAAGIDVGAREMFVAVPPGRDENPVRVFATFTEDLERLTDWLEQCGVTTVSLESTGVYWIPLFEILEQRGIRPCLVNARHMKNVPGRRTDWHECQWLQFLHSVGLLRAAFRPGQDVCAVRTILRHRNELVAAASQHVQHMHKALTQMNLQIHHVISDITGLTGRAIVDAILAGQRDGAELAKLRDPHIKADTETIRKSLEGNWRPEHLFTLGQSRDLYRIYQQQIVNCDLEIEKMLQEFEPRTDPAERPLPPDRKRNRGGSKRRKKNGHPHPEFDLRTEAYKLFGVDVSQIPGLEENALPLFSEVGRDMSRWPSAAHFVSWLALCPDNDISGGKLLWRGARRVKNRAGHLFRMAAYALHRSLTPLGNYLRRMKAKLGPQAATMATAHKIAVIFYTMIKNQVEYDETIWDARDAQREKKLQAKLKRQAKQLGYELVPIEPQAA

SEQ ID NO: 387635 - protein, 343 aa, unidentified
MKISRVGIDLAKNVFQLHGTDHQGKAVWKRKLTRDKWVQSLLDKIEPGCEMGMEACAGAHHWARVLQSRGFTVKLVPPQFVKPYVKSNKNDANDAEAICEAMGRPNMRYVQVKTVHQQDMQATHRIRSELMNHRKAKANQIRGLVAEYGLVAPQQHHCLRAAIPDWLEDAENGLTGMFRRLLYGLWADLDRLDRRIVELDKEIEHLAKSDPVAQRLQQLRGVGPLIATALVATIGSGTQFKRGREMAASLGLTPKQYSSGGKERLLGISKRGDSYLRSLLIHGARSVILHAKHKEDRLSCWMRELAARRHINVAAVALANKTARMAWVMMTKDVDYDPALMTG

SEQ ID NO: 387636 - protein, 447 aa, unidentified
MADVNSKRRRRARLTVVHPRAAGIDIGSRFHVVAVPSELDDEPVRKFTSFTKDLKLLAEWLLLIGVTTVAMESTGIYWVPLYEILVAKGIEVYLVNARHAKNVPGRKTDICDAQWLQQLHSYGLIRASFQPDQRIAELRTYFRQRDLLIRYRSSHQQHMQKALMQMNLQLHHVVKDITGLTGRRIIDAILSGERDPQKLASLRDQRCKESQDTIAAALQGNYQEDHLFELKVAVDLFDSYTAKIKECELAGQSLLTQLAGDQFVAPDKQAGDWRIRGNGFSFNPKALIESISGHNLLSLPGLGPTTVITLISECGLDMTRWPSEKHFVSWLGLSPQNKISGGKVLSSRTRQGATRAGSAFWMAAVPLSRTNTALGAFQRRLAARIGKSKALIATARKIAILYYKTLRYGMSFQDPGASSYQQATRERQLQGLQRRAKAMGYQLVATS

SEQ ID NO: 387637 - protein, 389 aa, unidentified
MPTVADRPEAQTAIQTNLAAIFISLELSRSIWLITSLSPGGGEKMSKHSVPAGDIAALLARFSELKQKALARTGKSFPIVTIQEAGLDGFWLHRVLQSEGIESHVVDPASIATSRRRRRAKTDRIDGEALLRALLAFKRGEPRVCAMVRVPTPEEEDRRRLCRERKVLIAERVKHVNRVKGLLFSQGVSGYEPLRRDRRQRLDELTTGDSRPLPTHLKTQISRELDRLELLLDQIKAAEAERDALLAAQQAATPAPAGRMLLDLKGIGPEFAANLWLEGLFRHFDNRRQLASYAGLAPTPWQSGSVDREQGVSKAGNPRLRTTLIQLAWLWLRHQPQSALAQWFKERVSRNGGRLKKTTIVALARKLLVALWKYVTAGVVIEGAVMKAA

SEQ ID NO: 387638 - protein, 347 aa, unidentified
MTVYIGVDFHARQQTVSYLTTEDGENQQVELEHEKEVVRAFYEQFRGQKVIVGFESSGYAAWFEELLEDLEYETWIGHARAIRQFARRRQKNDRRDADLILELMVRGDFPRLYRYSRESRETLQQLRYRQRLVKMRTMVINSLRFMVGSRGITLRGTLQSRPGQARLQQVALPGPMGQQRDELLRLLQEIQQKVETVEEWLKQKAEADPGVQRLRTHPGIGLLSGLGLVHTLESIERFSDSRKVTAYVGLDPVEDSSGERRRMGSISKQGSRLLRLLLVEAGQVAARRDPELGQVYRRVTLRRGHATAKVAVARRLLVRAFIMLRDEIDYAEFCRRGVAARSSRGNA

SEQ ID NO: 387639 - protein, 311 aa, unidentified
MASFLGIDVSSLSLDALVRPQGIKISVRNDPTGFEELVKSLRGLSIKRVLLEATGGYERDVMRFLQDANYKVIRVNPKRARWFADSLGIKAKTDAIDAAVLAHFAEVIPDKPTLKTSPERALLRELLQQRDRLVQQRDDDRRRLKQAQSALVAIFLKTNLQHFASQIKLVEQAIKRQAAVLNDERIAKLDEVKGIGIVTATKLVALLPELGHVESREIASLVGVAPFNHDSGKSVGKRFISGGRFEVRRALYMACLVAVKHNPTLKARYEALRGRGKLAKVALVACMRIFIVRLNAMLRSGTPWRDDLPQP

SEQ ID NO: 387640 - protein, 443 aa, unidentified
MNNDRSLTKGDFHLVRPNAAGIDVASEMHFVAVPVGRDQQPVKKFGSFTQDLHELARWLKKCQIDTVAMESTGIYWIQLYLILEEYGFEVFLVNARHIKNVSGRKSDVSDCQWIQQLHSYGLLNASFQPDLFGRELRTYMRHRKSLTQNYATQVQLMQKAFEQMNIKLQIVLTDITGKSGISIIEAILSGERDAKYLASLADPRVKASKEDLIKSLQGNWRDEHLFELRQAYELYQIFKEKIKECDRQIELALQKQDYNHSGDDLKQKPRPRGRNNFEFNATIYLKKILGVDITEIFGISEVSAMQIVSETGIDMSKWATQKHFVSWLNLAPNNRISGGKQLRSKKIKKKNKAGQAFLFAASSLLRSNHWLGTFMRRISARHGAPVAIKATARKIALIFYKMIKEQTEFNPLPIETYNQLFKERKIQYIKNQAFKLGFQLIQL

SEQ ID NO: 387641 - protein, 410 aa, unidentified
MEVLYPHCAGLDVHKDTVVACVRHIVNGTVRREVRTFKTTTTELLALSDWLAAEKCTHIAMEATGVYWKPVWHILSDGNFSLVLANAAHVKNVPGRKTDVNDATWLADLLAHGLIRGSFVPDPQTQEMRNLLRTRKQLTRERSRHVQRLQKTLEDANIKLDSEISDIMGLSGRKMMEALIAGESDPEQLARLAHRRIKAPPEALREALRGRITPHHRFLLRLHLQQIDAIDKVIADIDREVDAVVEPFRTTVLLLTTIPGVDELSACVILAEIGRDMSRFPTAGHLISWAGLCPRNDESAGKRRSTRMRKGAAWLKTTLVQCAAAATRKKASYLQAQFHRLRSRRGAKKAIGALAASILTIVYHMLLGGELYRDLGPDHFDRRAKATQTKRLVTRLQNLGYAVHITPLPA

SEQ ID NO: 387642 - protein, 349 aa, unidentified
MGKNSTRKEIKVLGIDTRENSFHLHGVDAKGNPVFREHYSRAKMLEFMANLKPCLVGIEACPGAHHVARELKNMGHDVRMMVAQRVKPYVKNKKNNRLDSAAICEAVQQPMMRFVTIKSLEQQDIKSLHRMRNKTISHRTALNNMIYKLLMDYGVVIPTGPDQVRSLIPKILNDTGNGLTEWFRDELRQLNDQLLHFDRRIHGFDGQIKDISRENQSCRMLETIPGIDPLTSTALIAAIGDVSVFKNGRAMAAWLGLVPRQHSTEEGTCLARIGNQGDAYLKMLLLHGARSALIQAREKKDRLSRWVTKLEKRRGWNVATVALAAKNARIVWALLAKGETFKVAEAEES

SEQ ID NO: 387643 - protein, 395 aa, unidentified
MSAEGEAIRSNDYRKDTTVKAPSTRPAAVLGLDVGKSSHWACLIDRDGEVLASAPVRNREAELDALFASAPAGTLVVVDQFRNIGSLAVRRARAAGLGVAYLPGLAASRAAGLFAGEAKTDERDAAVIARTALGVPDSLSGVPGRGEALEAARALSSQRDHVVACATRDKNRLRAVLLESCPALEAAVDLSDRRWLELLAGFGGAWGIARSGAEGPRAEAAGEVAAASTAPPPALVEAENRQVRFLAARISEALDEAGALEAETAALLEGDETYACLLTVPGIGPRTAAQLAVSVDIGRFPDHDHLASYCGIAPRVRSSGTSVRSVRASRRGDARLKSLLIFSCNSLVRSSGRYGEYYRACGARGMGHGRALKAVARKRLRAIYAVMRDRVPYRE

SEQ ID NO: 387644 - protein, 341 aa, unidentified
MSKFIRIAIDLGKNYFQVHGLESEGGRSISRKIKRSKVHEVCWQIEPCRVGMEACGSAHYWARELTAMGHEVVLIPPAYIKPYVKRGKNDAVDAAAICEAMSRPNMRFVPVKSAEQQAVLMLHKTRDLLVKQRTMAVNALRGHLAEFGVVAAKGIGRVDELLALAKADAALPPVARTAVTCMAQHLEALDLSIGAVDEEIAKAHRQNPVSRLLDEIPGVGTLIASATAASVSDPGVFKSGRDFAAWLGLTPRQNSSGGKERLGAITKQGNRYIRKMLVTGATSVLRVAGKRKGALADWINALRARKPERLVAVALANKLARICWAIMTTGEGFRTDTYVKA

SEQ ID NO: 387645 - protein, 426 aa, unidentified
MTTPAGDSLQPDQMHVVHPRAAGLDVHKLQITASVRLCQPGGGVDSATRQFSALPPGLSALTQWLESHRVTAAAMEATGIFWQAPWEALEAAGITPQLLHAQFVKQVQGRKSDVADSLWLARICQFDLCRPSYVPPRKFRQLRQLSRYRRKLVGERSRARNRIHKTLDHDGLRLGGALSDIFGRNGRKILAGLAEGLPPEEILASLSGHVRHKRELLEQVLEAQLDAHAVWKLGDLLRAHEAANQSIAELDARLAEGLAEMVEQVHLLETLPGIDRGSACAILVELGPDLTAFDKTANVAAWAGLAPGNNESAGKRRSGRLRRGNATLRATLAECAHGAVRTKGSQFHGYHNMLTARMPYKQAILATAHKLLRTIVAMLRDQRPYIDPGIDYDKLLVDRNAARWLRKLDEHGYLERIRSGGQPVAA

SEQ ID NO: 387646 - protein, 380 aa, unidentified
MEEARMRQEKTGEVVTSYYGIDLHKDQITWHCIHKTGNGETARESGKICTDRILEELVPMLTVNDSYLIVEASGSSFFFYSLVEAHCKKAFVVNPVAFRELYMTGKKTDRIDAKKLAERLKYHIECDDDESGFPEVFVPDADIVKIRKMVTAYELIVKQGTQIKNQAKSVFRSKLMSVAVDIMEKGLEDALKDKRIDEADRSILIMLKRIYDTLMEEKEEIKKQILLLGSFRFREEVKLLMSIPGISLMSATVFMADICTVERFRSEKKMTSYLASVGTVDSSGGITRNGGLSRRGRRTSYRYILQGLEHIVNGNKDFQKFKERHALTRSNKVRAAIVRKTFVSMYFMLKNKEAYRYLNEAIYARKIRDLKKYGIDFKCA

SEQ ID NO: 387647 - protein, 365 aa, unidentified
MKKIAYVGIDYHLKTLTCAVLIEGEKELFDTMRFTNIDKNIKKYMKKLSDTYDIRTCYEASCNGYSFQRKMQSWGYHCDVIAPSLIPKKPGDRRKNDFRDARTLVQNYAHGMLTIVHPPTEQEEAVRSLIRCRIAMKKNEKSLKQQINSLLLAQGLHWEKSKWTIQHRIWLKKIESQDENTQLVLDEYLGLLEYLSSRIQYLDQKIEDIANSKIYAPSVKKLKAFKGIRTLTAMLLIAEITDFRRFPNPRALMAYLGLIPSEDTSDDKQKGGTITKAGNSRCRTQIVESVIHYIKRPIISATMKSNLKNVDAYSANIAIKCMKRLHKRYWFLVMKGKNSNKAKTAIAREFVGFIWAMMQPEPAAI

SEQ ID NO: 387648 - protein, 340 aa, unidentified
MGKISMIGLDLAKSVFQVHGVDGSGAAVLKQKLRRERVLGFFAGLEPCVVVMEACGSGHYWAREIAKCGHETKLIPASYVKPFVKRQKNDAADAEAICEAASRPIMRFVACKSETQQASAVVFRARDLLVRQRTQIINALRGHLAEFGFVVPKGPAHVTRLLAIVEEDTALPESIRAPLQGMVAALRVLEAEVAKLDKEIAARAKSDADARRLMTIPGVGPITATALLSIAPPVAAFENGRHFAAWLGLAPRQHSSGGKDKLGRITKAGDKTLRRLLIIGASAVLRHAAIKPPPAGSWLARMMAGKPRMLVAVALANKMARIIWALLRNGTSYQASSAAA

SEQ ID NO: 387649 - protein, 423 aa, unidentified
MAYRIAGIDVHKKKLAVVVADVEVEDDYQFERRWFGSNPEQLRVLSEWLIEQHVEEAVMESTAQYWKPVWGALERYWKPISQVREGASRMSGTLHLAQALSNRGRRGRKTDFQDAARLIKRLVSQELVLSFVPDAEQRVWRTLTRTRYQRTREKVRLQNQLEALLEEAHIKLSSLVSDLLGASARRMLNAIAEGEMDPAALAALADQRLRATPVQLQDALGACTELNPVYRRLIKMTLTSLQSVEQQIGQLDQEIANLLQQHQDAVERLALVPGLGVDSAQQIIAEVGVKAATFPSAAKLSSWVGACPGKEESAGQNRSRHSPSGNRQMRRVLNQAANAAVKRKGSVFELLYRRLISRLGHNKTIGVIANRLCHLIWIILHNGVHYEERGPAVSEQSKQRHATKMIRKLRLLGYRVEPLQKPA

SEQ ID NO: 387650 - protein, 366 aa, unidentified
MSLNRVAVLFEPERSPDRPHGQIAFTRMGLKMKSYKRVIGIDICTERLDIADSNSKIEKAIEYTVDTIKKKIIKLVKEPSETLVVCEATGGLEYLLVDALHDAKIDVVVANPARVRDFAKGHGYFEKSDAIDAQMLQLYGQQVKVSLAKPRTLEERNFIALSRRRTQLLQLVSQESNRLRQCMDTQAKALIQEMLKALKMQLKAVDSAIEKCLESQAKTDPKIDVIRSVPGVGPVMTATLVAELPELGSLSRAKIAKLVGVAPMIKQSGKSEGKRRARGGRGSVRRVLYMSALVATKKNSVINKFYIRLLSQGKPKKLALVACMRKLLTMLNDMVRQQKKWEEKKKSVAGSTVSNRPAPAHVLDKV

SEQ ID NO: 387651 - protein, 357 aa, unidentified
MVQKHTILDWLGQHVYIGLDVHKRSWVVAIVTEQVDFRTFTQPPDVKVLISYLHRHFPNATYHCVYEAGYCGYWICDELRAYGVECSVINPADVPTTDKEQKHKTNKVDARKLARSLRNGELMPIYVPSRTALEDRTLIRSRQMFVSKQTRCKNQIKALLSFYGITVPEDIIDRYWSARYVAWLESLSLQSPSGTYVLKTLLSELAHLRKNVLDTTRAIRTLARTEAYAVNVVYLTTISGISTLVAMILLTEIITLDRFRSLDHLSCFVGLVPGESSSGDKRTMTGMTERKNRYLRWILIESAWVAIRHDESLALAFNTLSRRMSKNQSIVRIARKLLNRIHFVLKHQQPCIVLKAA

SEQ ID NO: 387652 - protein, 345 aa, unidentified
MGHFAGLDVSVKETSVCIVDDTGRLVREVKVASEPEALVPVLTNPLYRFKRIGLEAGPLSQWLFSALAGAGLPVICVETRHMRAVLQAQINKTDRNDARGMAQMMRVGLYRPVHVKTLRSQKLRMLLTHRKLLQSKAIALDNDLRGTLRNFGLKVGMVGKVKFEARIQELVENLPDLAELVEPMLIVRRTLREQIGILHGRLLAIVRNDDVCRRLMTVPGVGPVVALTYRATVDVPARFRNSKAVGAVFGLTPARYQSGEIDRPGAISKCGDEMMRAMLYEAAHIMLVRSTKWSWLKAWAMKIVRQRGMKKAIVALARRLAVIMHRIWVDGTEFRWAREQAAAAA

SEQ ID NO: 387653 - protein, 412 aa, unidentified
MEVLYPCCCGLDVHKKSITACVLWAGGKGAVRKEKRRFGTFTPELLSLADWLRACGVTHVAMESTGVYWKPVWNILEGQFEIVLVNAQHIKAVPGRKTDQKDSEWIADLLQHGLLRGSFVPPRETRELRDLTRYRVSLTEECNRIANRIQKVLEDANIKLASVATDALGASGRAMIQAIIDGEQNPGLLADMAKGLLRNKISELQSALAGRITAHHRFMLAQLMDDLRHAEAKMERVEEEIKRHTFPFGDDVARLCTIPGIDRVTAWGLVAELGLNMDQFPSAGHAASWAGLCPGNFETAGKRLSGKTRKGNAFLRRCLANAAWAVSTKKSSYLSALFRRIAARRGNKRAILAVAHAMLVIAYCLLKRKEEYKELGVNYFDQLNAEGLRRSLVRRLERLGHQVTLQPRPVTG

SEQ ID NO: 387654 - protein, 364 aa, unidentified
MNTTTVGVDLAKYLFSICMMDSHGRVQFRRDFRRDAFAAWLAQLPAGTMVAMEACSGAHHWARRCLELGLQPRLMAAQFVAPFRKSQRSKNDRNDAEAIATAARQGNMRFVAVKTVDQQARLSWHRVREGYKDENLEVMNRLRGLLAELGIVIAKSAIALRRALPAILERADLPGAFVAAIQDLRGHWQQIQERIRVCDQRVEAHAQADERCRRIRALTGIGALTSDAVVACVGNGCDFKNGRQMAAWLGLVPMQHSTGGHDRLGQISRAGDAYLRTLLIQGARSSVLQASRVPADKASPEQIWINQLATRMPFGKLLVAIANKHARQIWAMLARGDAYDPHAWLHHPMTQRNASRRRALAVAA

SEQ ID NO: 387655 - protein, 327 aa, unidentified
MRQLKSLTEKVKTTVAFDVCKAALDVHIRVDGKAFQVPNTYEGFDQIALVLADYDVSLILMESTGGYEDAAACNFQSLGYDVAVINPRHGRNFAMAMGKFAKTDRIDAAVLADFAAVIDSRPDRARFIKPPTDAERKFLSQMVARRRQVVDLLTTEKQRLSHADDYAKQSIDKVIGFIESQLDEINKDVSFYLKKNYSSLSKMLSKIPGIGELSVGLLIGDVPELGQIGNRQLSAVIGVAPFNHDSGKMRGKRCISGGRQNVRNVLFMGVMSATRFNPVIKAFYDRLINKGKPKRVAYIACVHKLLRIINAMVRDGTSFNPDLHTVI

SEQ ID NO: 387656 - protein, 344 aa, unidentified
MRIAVLGVDLGKNVCSIVGLDASGAVVLRRRVRRDTLIELVAKLPACIVGMEACCGAHHIGGVFAAQGHDVRLMSPEYVRPYVKAQKNDDRDAEGIAEAATRPTMRFVEMKTVDQLDMQTLHRSRDRLVGERTALINQLRAVLLERGIVVPQGKHKFEQYLIIMMDEHEGEGLSARMRMLVTDVRAQWRDLDRRIGAFDAEFARWAKENEDARRLGTIPGVGVTISTALIAAVGNASTFEHGRDLAAWLGLVPRQSTTGGKPRLMGISKRGNKYLRKLLIHGARAALPHVAEKDTALGRWAKNLLSRVHHNVAVVAFAKKLARICWAVLRSGQKFAANGAPSAV

SEQ ID NO: 387657 - protein, 413 aa, unidentified
MRTGGLDVHKSFIVAYIFDVFFEKDDDGKPVVKAKDVALGRFERTWEGLDRLAEFLEKNETKKVVMESSGPYSYMVYMALDSAGFDVWMAHPRDNKTNDQLKTDKRDAERLVKRFVVGEIRAYKLPTDPKIIRLKRLTRFRMKMVSRLISVKNEIRKTLDEVGIDLKKAFSTLGKGAIAIVSGLVRGLSVDAIISSNQSLAKKRDVIDEILKSRGKLDDALIFEIKSLLRLLREIERQIESAEKRIENALSDLEEETKLLTTIPGVGLQSVAIILAEIGGISRFPSPKNLASYAGLVPSVYQSGDEIVYGKLRKDCNRRLRYILYQVALKAIKYSPRLRKFYERLRSRGKKHKQAVIAVARKIAMAIWHILTRRTPWSENLKRGYVPRRRRFKRITMKQALKILRELGYEVLA

SEQ ID NO: 387658 - protein, 412 aa, unidentified
MLYSTSIGLDVHARSISAAAFVFETGEVVQRTFGYDPDAVAAWAATLPQPAGCLYESGPTGFDLQRRLVALGLPCHVGAVSKMVRPSGDRVKTDRRDALFLSRLLAVGEFVECAPPTPAMEAARDLSRAREDAREALMRARHQLSKFLPGKGHVWPRGRSTWTRAHREWLRSIELDDPCERLVLEEYVAQVRECEERRDRLDSAIAERSGADDLAGVTSRLRALRGVSTVTAFGIAVEIGDFSRFASPRALMSYVGLVPSESSSGETTSRGGITKTGNSHVRRLLVEAAWHHARPLSPASETDVASSAGLPAEAAGIAARANRRPRRRYLDLRARGKGANVANVAVARELVGFCWALALCGRAAEPRNHPPARAARPRRVGHPAIRLCAARPGLATRDPRPAELPSRSVGMR

SEQ ID NO: 387659 - protein, 359 aa, unidentified
MKYIGLDCHKQYDFATSIDSETGEIKSKKLAHTKEEFKAFIGGRNNTKMVIESCWNWSKTYELAKDLVDEVILAHPLKIKAIASAKIKTDAIDSRTLAQLLKADLIPQAHLREADNRVKQRVIRHRAFMVAMRTRVKNKIGDMVNNRLLSATVEETRPKNLFSKRGKGENGVAWLKSLEWSVEEDKRIFESAMRLIEHLSNEISASNQMVEDIYKKDKDAQLLSTIPGIGKTLAVLISTEIDGIGRFKSPSRLCSYAGLVPSTHSSGGKTYHGKMILEGNRWLRWALIEAAVPASYADAGIKQRLEALRKIKNANVAKAIIARWLLKVVYHVLKDGRPYVPSELRDASRSRLSIALASS

SEQ ID NO: 387660 - protein, 334 aa, unidentified
MDRIPVFVGLDYHKDSVRVCVEDVDGQVLGNQGCANDVRRVLTYAEGFGCVQGAAIESCEGAADFAEELIAEGSWKVQLAHPGYVRRLRQNPDKTDHSDARLLADLQRVGYVPRVWLAPQSVRELRRLVRYRRQLVNERRAIKLRIRSLLREHRRQCDAPRWGKAWFTWMRNVALPDSSRWILDRHLGRLEQLNAAIVEVEKYLESKTQDDFVVQKLLKLKGVGPVTAWVLRAEVGRFDRFRSGKQLARFCGLTPRNVSSGARQADAGLIQACNRDLRSVLIEAGHRLKRYDKRWSALADRLRKAGKPGSVIAAAVANRWMRWLYHEMKAPVAA

SEQ ID NO: 387661 - protein, 351 aa, unidentified
MSETIGTAIAVVGIDIGKNSFHAVGLNDRGAIVLRQKWSRSQIGTRLANLRPCLIGMEACVGAHHLSRKLKALGHDARLMPAKYVRPYSKGQKNDFRDAEAIAEAVQRPTMKFVATKTIDQLDLQALHRVRERLVSQRTGIANQIRAFLLERGIAVRQGLRFLRAELPRILAAPSDVVSPRMIRLIEDLAGDWHRLDARINGLSDEIEGIARRDINCERLMSVPGIGPIISSAMVAAIGNGEAFAKGRDFAAWLGLVPRQISTGDRTILGKISKRGNRYLRVLFVQAAWVVLVQPKSWQRYGLKPWIEAAKTRLHRNVLAVALANKLARIAWSVLACGRSFESNTAAAQSV

SEQ ID NO: 387662 - protein, 432 aa, unidentified
MNESIPAASLEGVAAYIGIDWADQKHDVVLRSAAEPNKVEHRVIEHQPGALMEWIGQLQQRFGGHGQILVCLEQSRGALIHHLMGYGFLELYPVNPLQLARYRETFSPGGAKDDQPDAELLCELLYCHRDRLRAWKADSELTRKLAFFNEGRREAVDQRTRLSNAIKSQLKVYFPLALELLNQDTSTALAADLLLRWPSLEALQKQIPHRLRKFFYAHNCRGESTMLERLELVQQAQALTQDSAVIEPATVRVQMLARQLKNLLPDIARYDQKIAELFAAHPDRFLFENLPGAGRVLAPRLLSALGSDPNRWESAQEIATLYGVAPVRRASGKKSGKKGEKKASVRFRQACPKFLRQSFHEFAGCSIRYCGWARAHYEAQRAQGKGHHVALRALAFKWIRILFACWKQRIPYDPQRYLQALQQRASPYATAC

SEQ ID NO: 387663 - protein, 348 aa, unidentified
MKFYTQQHRYTCGIDLHARSLYVCILDDTGQTRVHKNIKATPEALLKLIADYQDDLIIGVECMFSWYWIADFCADHGIEFVLGHALYMKAIHGGKAKNDKIDSEKIARLLKGGMFPCAYVYPREMRSTRDLMRRRTKLSRDRGELMAHIHNTLSQYNLPAHPKNLRYDLHREPMRHAFTDPSAQRSVDLDLDRIAFYDEQLSKLEWYLKRSAKAFDANTIIRLKSVHGIGDILSLALLYEIHDINRFPRVQDFVSYCRLVKCQRESAGKIHGTGGARIGNPYLRWAFGEAAALFLRGNPEAQRWLEKKTRKHNKAKALTILAHKLGRAVYYMLKRETLFDQDRFLASS

SEQ ID NO: 387664 - protein, 408 aa, unidentified
MNTLYVGIDVSSKSNVVYLMLPNGDKHSNFSVANSHEGSTLLVKKIYSALTSHSLDTVLIGLEATSVYGVNLVYFLREDATLAPFNRKIHVLNPKQVKKFHDTYNDLPKNDYVDSFVIADCLRFGRINKEVYMGEYRYKALQNLTRARFFAVQNLVKEKQRFMNVLFKKYSTMTQEKVFSDAFSTTALAVYDEFESAEALANMDLHELTDFIIEKGKNRFPDPDAVAKAIQKAARSSYRLPKTVNDSVNQVLSISITSMKALESQIKEFDKAIIALMELLPNVLISIPGIGPVYSAGIMAEIGDINRFDNQASLAKYAGLAWKQHQSGGFEAEVTRLIPSGNRFLKYYLCEAAFSLVRCDKEYSDFYHLKYKEVNRCQHKRALALTARKFVRLVFRLLKDNRLYCPAK

SEQ ID NO: 387665 - protein, 355 aa, unidentified
MNDEKYIGLDVHQATIVVAVMDSTGKLVMESILETKAATILQFFAGLRGTLSVTFEEGTWSAWLYDLLHSRVDKLVVCNPRKNALLKDGNKSDRIDARKLAELLRGNQLKPVYHGETGVRMLRELSRSYLTIVKDLSRVMNRLKAVYRSWAIPCAGRDVYYRRHRAQWLAKIREAGVRRRAERLYEQLDMLQHLRQQARRELLAESRKHTITAKLRQIPYLGPIRVALAVALIQTPHRFRTKRQLWAYSGLALETRTSAEYRFVEGQVRRSKKLLSIRGLNKDHNHDLKGLFKGAATMASVRPGPFQDFYTAALAKGIKPTMARLTLARKIAAITLTLWKKGENFDAEKLKSQAA

SEQ ID NO: 387666 - protein, 375 aa, unidentified
MTASLQVNDSGVGAVLYMAFELSDKKWRLAFGDGRRQRQVVIAAGALEALREQIGQVKEKWALAADTAVVSCYEAGRDGFWLHRQLAAWGIVNHVVDAGSIEVARRARRAKTDRLDAQGLLEKLMRYANGERRVWRVVRVPEPQWEDLRQLHRERDELKKDCNAVRNRITSKLVAQGLRLVPGQDFLERLETLRLFDGRALPAHLKAGLRREYERLQLAQTQLRAVEGGIRALIESADGLEQVRALMQLPGIGWVGAWTLVAELFGWREIRNRRELAALVGLVPVPYNSGTMVREQGISKAGNRRVRALLIQLAWLWLRYQPHSKHSRWFRERFGGGSQRQRRIGIVALARRLVIDLWRFAESGIVPDGTRLKVA

SEQ ID NO: 387667 - protein, 376 aa, unidentified
MKKYKLQTKAIANGTELWMGIDAHMDSFQVTVLDREKIMFRGRIEANQKNVVALAQRMPNCKVHAVYEAGPTGYQLLRWLEAESISAFITAPSMVPTRGGDRVKTDKRDSLRLAENLRGGQLKPILERSDENYHDRELLRTRQQLLEHRSDACRQIRSKLLFHGIVPPGDLGKTWSKAFLEWLESSPTGNRPLDVSLEALAGTYRDLTRRIDHLDAEIKEMSETETYHDNVAIVKSIPGVGVWTAMCLLVELYKPQDFDNEGALAHYIGLTPSEFSTGEQVRRGRITRTGNERVRAALVEASWRVKRQDPELQAFYERISKTNNRGPKRAIVAVARKLAVRIRAMLRDGQVYRLPPKEEARALAEPGGVVQDSIAN

SEQ ID NO: 387668 - protein, 349 aa, unidentified
MQIKSQIRSIGIDLGKTTFHLVALGTRSQIVVRKKFSRSQLLIYTANLPASLIGMEAGVGSHFLGRALREQGHEVRLIPAQFVRPFVKSNKNDYRDAEAIAEAVERENMRFVPIKTEDQLDLQALHRVRDRLVARRTSVINQIRAFLLERGISFRKGPASLRRQMPEILENVDAKLSPGMRRLLDFLWQEWKGLQAQIESLNTDLEQIASSDPSCVRLQQIPGVGPLVSTAVVSAIGNGAAFKRGREFAAWLGLVPRQWSTGGKTKLLGISKRGNPYLRKMFIHGARAAVLRVKREGSTLGKWMSGLETRAARNVVIVATANKLARISWAVLASGNDYHPMHKAAVFSN

SEQ ID NO: 387669 - protein, 482 aa, unidentified
MKKRNIYQNQSQELLSLFEEAGSSAKVMCVPMDYAKKDHLVMFCNGHGDILRKPFSVKNSPEGIEYLIDQVTRSCRRRGIKREHVFLGGEDANSFAENFVSTLRFKGLLVAGVNAHDAKKQRVNLQASTDRIDLMGIATMLLNCRANCCPAATGIYRNLRTLVRHRRKLVVMLTEVKNRAHGIVDRLFPGFLNENKSGIVPFTQSSLYLMENRFSPKQIRRRRRQKLIEILKRLGTSKAEETALKLQQYAAKVLHTPDEYIDTLQISLAQHVKHIRCLKESIVQLEKEIAVNLAQTQGAFLTSVRGIGIVLAAGVSAEIGDPYEQKPLNNVISYSGIIPRVKQTGGVDGKTYTGHVAKRCNRILKDYVVKSAYHLGLYGPEDLMADYKRRDASGQHADFGIGRRYLRMAMSLMRTSQVYLSPRLRKADTALEERAGHYLTSWPFLRDKWKKAGALEAAFSKDRPLGLWRQIVQKLYDIKLKL

SEQ ID NO: 387670 - protein, 372 aa, unidentified
MNYNTVYVGMDVHKESFTLCAYTIDAEKGSHFQRTEADYKNVLKYLEFLRTVYGNNANFICGYEAGCLGYTLYHQLTEHQVNCMILAPTTMLEQRSKRRIKTDRRDAEIIAKCLAQHNYSPVHIPTATDEETKEFLRMRDDHKLALKKVKQQILAFCLRHNYRYDGNSHWTAAHIKWLKSLNPEALYKEILDEYLLTYTTLSDKLERLDKRIEELASKDEYRESVKKLCCFIGIKTHTALSVLVEVGDFQRFASAQNFASYIGLVPGEDSSGDGQTRLGITKAGNRHVRMLLTEASQCYARGQIGFKSKELKSRQAGNSPQVIAYADKANERLRRRYYKMVLGKSKKHNVAKTAIARELACFMWGMMTDRIA

SEQ ID NO: 387671 - protein, 360 aa, unidentified
MQTQRNELNFEGQNIYVGLDVHLKSWTACIMTEHLEHKKFTQPPEAKVLYNYLTRNFPGATYHSVYESGFSGFWAHRQLEALGIHSMVTNAADVPTGQKEKIQKDDAVDSRKLARSLRSGDLEAIYVPSESILEERSLIRTRAALVKDMTRFKQRIKSFLYFFGIRIPERFNKSGSHWSKNFMRWLKEEVKLSQETGRQSLDILIQEVEEQRKLLLLVNRQVTSLSTNERYASNVRLLKTIPGIGLLTAMTLLTEMETVERFADTDHFAAYVGLVPNRHNSGDVKNDGEMTFRGQSTLKKCIIEATWIAACRDPALSLAYNRYVQRMNSNNAIIRIARKLLNRICFVLKNKKEYVTCIVK

SEQ ID NO: 387672 - protein, 409 aa, unidentified
MLFVGDDWAEDHHDVELVDEHGKVLAKRRFPEGLDGVTRLHALIAEHLPDPGPEPDPRLEVLVGIETERGPWVASLLAAGYTVYAINPRSAARYRERHTISGAKSDAGDAHALAEIVRLDRAGHRPVAGDSTLAEGIKLAARAHQGLVWERTRHVLRLRSALREFYPVALQAFPDLDEPDALELLGKAPDPDTAAALPRRTLVAALTRARRRHVQARAEELQGVLRAKELRQPAPVQAAFAAIVTAEVAVITTLNEQIEILGQVVGEHFGRHPAAEMITSLPGLGVILGARLLGEFGDDPKRYVDAKARKSYAGTAPITKASGKKKAVLSRHARNKHLADAAQQWAFSSMRGSPGAKAYYQQIRARGISHQPALRQLANRWVGILHGCLKTGTLYDEDTAWAHIHNRAA

SEQ ID NO: 387673 - protein, 416 aa, unidentified
MTHSEVQERKPTVKKNNRQGREKAGVVKPCKQTQQQERAERRAEALLRKLEANAARVVETRQEAPAYYIGVDVGDRKSHFCMLNAAGKVVIEESVATTREALTAYFSQVKRSWMVLEVGTHSAWISELLEGLGHRVVVANARKVRAIYGNRRKNDRVDARTLARLLRVDEELLHGIRHRGAAARQSLTVLRARDAMVQVRSKLINSMRGLVKSHGRRLPACSVESFVGKVRDAIPESLKGALAPMLEQIESLTLSIRKYDRSVTVLAKKHKETGSLRQVKGVGELISVAYVLTVEDPGRFRKSREVGPYLGMVPRQDDSGDSSPQLRITKTGDRMLRRLMVTAAQYILGHHGEDCDLRRYGLRIAARGGKNGKKRAVVAVARKLAVLLHRLWVTGEEYEPLRNSRQEQSQGRQAAA

SEQ ID NO: 387674 - protein, 349 aa, unidentified
MQYVGVDHHKKFSYLSVMNEKGTVVKEGRINNTKEALSRFLGSSQEPKSAVLEAGRNWTVMYDWLEEELDEVKLANPRKVKAIAEAKIKTDKIDATILAHLLRSDLIPEAYVPKAETRIIKNILRQRMFFVKLSSMTKNRIHNILDRHPKLRGQIDPSDLFGKQGLEWLLKVDLPKEDKRLLDEQLDLLSYLTDKIKSSNQVVEKLGLKDKRVKLLMTIPGIGKFFALLIASEIDNIQRFRNKDKLASYAGLIPSVHSSADKTFYGKIVNHGNRHLRWALIEAVWPAIRKDLHLRSVYQKIKQHKNANIAKVAVARRLSIIVYRVLSENRTYITNYSGCPHNSLAVANN

SEQ ID NO: 387675 - protein, 420 aa, unidentified
MKAYNINDFAALIGIDWADTKHDICEHPSNTQKYHYGIIKSKPEALHDWAMSLKQRYPNQQIAVACELKKGPLIYALAKYSHLTLFTINPSSVANYRKAFTPSNAKDDPSDALIQVEILTLHMDKLTVIEPESAAMRSLAQLVEYRRSLVQDSVDLSNKITATLKNYYPQALEWFKEKDTFIFCDFISKWPSLTKVKRAKKQTLLDFFNSHNSHYAQVNDARILSIKSAMPLTEDIGVIEPNQLLVEVLIVQFKVLLKGIESLDKVIKQAYKVQQDKPIFDSLPGAGPQLAPRLLVAFGSNRERYNDASDLQKYAGIAPVIERSGKKMWTHWRYSCPTFLRQTFVEWAGFSIRYSFWAKAYYEQQKSKGKPHNSIIRSLAFKWIRILFRCWKTSTPYDESKYLEALKRRGSPLLKFAINS

SEQ ID NO: 387676 - protein, 381 aa, unidentified
MQSNHTVPTILVAIELSTATWLVAVRVPGSEKPHLHRVDGGDTAALLALIASVRARAAHQLNAEIGIVCCFEAGRDGFWLHRLLTTRGITNYVLEPTSVLVNRRARRAKTDRLDAEGMLRVLAAYLRGDHQVCSMVRVPTPDEEDAKRMHRARENLVQERLRIENRIEALLFTQGIRKRPSLRSWERDLAILRTGDGREIPRHLLAELDRLRRRLVMTLELIREVEAERDQATKTQPQDQACRKIAALCRIRGISDNFAAVLTREVFYRSFDNRRQIASYVGITPMPYQSGGIDRDRRISRAGNPRARTTMIQLAWLWLRYQPGSELARWFRERVGTLAGRTRRIAIVAMARKLLIALWRYTESGVIPAGAEIRAETPVAA

SEQ ID NO: 387677 - protein, 319 aa, unidentified
MTITYPIAGIDIGKDTLDISLLHANGSFEAFSFANEKASRKKLARRLEAKGVRLVVLEATGGYELPVMAALAEEGIAFARVNPARVRAFAKSMGQLAKTDRLDARCLALYGERVRPKPTPMPSENESQLNALTLRRRQLVGMRQKERNRAHRAGEPDIAHSIERAIAFLSEEIDAIDAAIETLIASVPEMAERRDLIDSVPGIAANTANVLLAGLPEIGRMGTRKLRKLVGVAPLNDDSAERRGERHIAGGRAHLRQALYMAAQTGYRHNPALKALYQRIRAKGKSHKVAIIACIGKMLAILNAIIRSKKPFDPKFATP

SEQ ID NO: 387678 - protein, 316 aa, unidentified
MEHTSSLPDVFVGIDVAKKQLDVHILPTGTRMTVARDAGGLDQLVTQLRELSPRLVVLEATGGFEAIVTATLGGAELPVLAVNPRQIRDFARACGRLAKTDALDAEVIALFAERIRPALRPLPDEATRLLGELAARRRQIVEMITAETHRRRAASAKRVQKRLDAHMAWLQKELSSLETDIDDAIRESPLWCEDQALLTSVPGIGKVVARTLLAELPELGHLDRRAMAALVGIAPMNRDSGQFRGKRTIRGGRGTVRAALYMAAWVGVRFNPVLKEFYQRLIAAGKPRKVAIVACMHKLLTVLNAMMKSRTTWKHA

SEQ ID NO: 387679 - protein, 356 aa, unidentified
MQNDHKSSESVILGVDTHLDIHVGAVISQAGKLLGTHIIQTNQTGYLELLDWARSFGCLERAGIEGTGTYGAALTRYLIKNGIYVVEVNRPDRSKRRLEGKSDPLDAENAARSVLSGSSKAIPKMQSGACEALRIISVARRSAVKARTQAINQLRALLVSAPQDVRDKLWKSKPHECVTACINSEVSEYSPLRIALCNTLRSLAKRWMALTEELNELDESLDKLTRKYASHLRSQFGVGPQTAATLLAVAGDNPERLKNEAALASLCGVNPLPASSGKTVRHRLNRGGSREANNALWTIALVRMRSDPRTRIYVDRRTGEGLSTKEILRCLKRYIVRELYPLILSDLAYANRPLLT

SEQ ID NO: 387680 - protein, 416 aa, unidentified
MEVVYPRCGGLDVHKKSVSACIVIREQGKVDKAERRFGTYTGQLEELASWLGEHEVSHVVREATGVYWKPVWNVLEGRFELMLVNPQHIKALSGKKCDRGDAAHLADLLQHGLLHGSYIPSPAIRQLRDLTRNRARTTQEAARIKNRIQKILEEANLKLGSVASEVLGTSGRRMLKQVVAGEQDPAKLADLALGRLRKKRAQLLPALAGKVTDHHRRMLDKLLRALEVREREIAEDEADIRRAIAPFAKAVQAWMQEPGVDEITAWSLVAEMGPDMAQFPTAEQAASWSCVCPGNYESAGKQRDGRTRQGNPWLRAAICEAAWGATHSKKSYFHAQYRRLCPRRGPQRALLAVAHSMIVVGYYLLKYDLLFKDLGADFFDQRNREHAARRAVKRLSALGFEVILKERTPEMAPSTP

SEQ ID NO: 387681 - protein, 317 aa, unidentified
MPQGTCVVGLDVAKRKVDACIRSMGLRLSTPSTPEGEAELLAWVRTNRVDRAVMEASGGYERRWAEALRADGVEVRIVDPKRIRHFAKAAGRLAKNDPIDADTIAWFAEAFPAADPQPHDAAREELDRLVQARAALKDEEDRIKQQHEHRPPPIVAQALAAVAKAIRAERRKLEAVIAARIKANPAFARPAEIIHSVPGLADQTAAGVIAWAPELGRISNGAAAALIGAAPYDDDSGGRKGARHIKGGRRKLRNLLYMPVMGAATQHNPVLKAYYQRLRARGKEAKVALIACMRKLIVILNTMLARDETWNPARAAA

SEQ ID NO: 387682 - protein, 331 aa, unidentified
MNYIGMDIHKQFTVAVVKDEQGNRLAQEKFDNSKENFSKFLEEYKPEETKIVMESTCVWEYIYEILEAMNYCVKLANPVRTRAIAEARIKTDSVDADTLADLLRANLIAESYIPPKEIRLLRELARERRTFIKQTTQIKNRIHAILIRRGIKIPTTTLCKRTLLWLHSNTINEDILENYLDLLKFYGQKLDKINSRIRAIAEENKDAKLLMTIPGIAEIRAVDIASEIGEIERFPTADKICSYAGLVPSIHQSGSTLHFGRLIKQSSKALKWALIEVSWNIVRTKKSNTLQEFYKKLAKKKGKSKAICATARKLCCVIYAMLTNREEFRYS

SEQ ID NO: 387683 - protein, 343 aa, unidentified
MIGLDLAKNVFAVHGIDAAGNVVIRRSFRRAQLEKFFSKLPPAVVGMEACGGAHHWGRRLGGMGHEIRMMPAAYVTPYVKRNKNDGRDAEGVCEAAGRPTMRFVPVKSLESQAVLTMHRARSVLVRQRTMLGNSLRSMMAEFGAVAPKGLKGLYELMAQLAQPNDAIPELARTSLLELKKHWEALDASIRKMEAELVRSTKADATARRIMAIPGLGPIGASATLAKVPDARVFKRARDFVAWIGLTPRQFGTGGKQRSGGISKQGDRSLRMLFIVGACAHLRQEMRRGVTDPWLRRLLAERPFKVVAVAYAAKMARIVWAMLVSGEPYRPRGHARPAAAPLAA

SEQ ID NO: 387684 - protein, 404 aa, unidentified
MVFLGVDWAEEHHDAWLENEQGEMLGKARIANDVGGVRQLHELVAEHAADPSQVVVGIETDRGLLVAALVGAGYQIYAVNPLSVSRYRDRHKTSGAKSDRADAKLLADLVRSDRHNHRPLAGDSDLSEAIKVLARAHQDLVWTRKRFINRLRSALREFYPAALEAFETDLGGLDAIAVLERAPTPWQGRQLSQAKIVSALRKAGRQRYLEHKAAEIQRSLRSEQLQAPSQLQAAMATVVSSCVAMIKSLNLQLEQVGAEMTASFKGHPDAEIYLSLPGLGVVLSARVLGEFGDDRARFADAKARKAYAGTAPVTQSSGTKKIVLARFARNRRLGDACYWWAFSSLTCSPGANHYYRALRTRGKTHHQALRGLANRLVGILHACLAASQTYSESVAWPQPQKIAA

SEQ ID NO: 387685 - protein, 405 aa, unidentified
MDVIIERACGMDVHKDNITACIMKPDGKEIQTFSTKTVFLLKLIDWIKEHGCTHVAMESTSVYWKPIVNLLESEGIEFLVVNAQHMKALPGRKTDVKDAEWIAQLLRHGLLKASFIPNRIQRELRELVRYRRSIIEERARQHNRIQKVLEGANIKLGSVVSDIMGVSSKDMLRAIADGEDDPEKLANFARRTMKKKKEELELALQGYVNPHQRLMLKTILTHIDFLTEQIEMLDQEIAQRVSSYEEDIERLDSIPGIARRMAEQILAEIGTDVKKQFPTAAHLCSWAALVPGHNESAGKRKSTKSKKGNKYLKSALTEAAQSVRGSKNYLGALYRRTAGRKGNKRAVIVVAHAILRTAYYLLTRKEMYVDLGEDYFDKQRQVSIVRHSVRRLENLGYTVTITEAS

SEQ ID NO: 387686 - protein, 414 aa, unidentified
MKLFVGIDVSSQELETCFMNSDGDKLESFRVKNNLYGASHLRDRIVATADKLVVSEIHIGLEATSVYSWHPAMYLHQDPSLRERKAKVFTLNPKLISKFREAYADMDKTDRIDAWIIADRLRFGRLTTTIIMQEQYVALQRLTRMRFHLVHNLAREKQYFLQNLFYKCNAFTTEVDSSVFGHALMEMLSEKFSLDDIAEMDIADLADYLRDKGRNRFPDPERVARCIQQAARASYRLAKVVEDSIDLVLGTSIESIRSIQKQLKDLDKAIERILNGIQGAQCLLSVPGIGKVYAAGLLGELGDIERFKDQAAIAKYAGLTWRRHQSGGFEAENTTRMKSGNRFLRYYLVEAANSVRLRDEEFGEYYRKKYNEVPKNQHKRALVLTARKLVRLVDVLLRNGQLYTPRRKVNHAKD

SEQ ID NO: 387687 - protein, 432 aa, unidentified
MITHRPTPLANGPAWFVGFDWGSEHHRVALFDHAGKLVDRRTVAHAAEAYAELADWLLRTTGAEPTAIAVAIETTHGPAVDALIDRGFRVFGINPKQVDRFRDRYSVAGAKDDTRDADTLGRSLRTDPDAFRLLSPDNPLIVQLREATRVAATLTKDRGRLTSQLRDLLWRYYPQMLQLADDLGDAWILELIQHAPTPQNGARLHKRTIARILKTHRIRRLDAEQVHAILQQAPLPSAPGVVAAATSHIRLLLPRIRLLNAQIKQNNAAIDALTTQLTGPQSTQPGESVPGQNTEQRDVTILHSVPGIGRIVGATLLAEASAPLRRRDYHALRCLAGQAPVTKQSGKTRFVQRRLACNKRLAQAMYHWGRVAIVCDTTSKQRYAALRARGCSHGRALRSVVDRLLKLLCALLQRQVLFDRNHVSTMQQPAAA

SEQ ID NO: 387688 - protein, 293 aa, unidentified
MQKSCLGIDVSKPTFDVSLIVVVTGQKQPIVISKFDNDATGLKSFKVWLDDHHVTFDKNSLLVIENTGIYHRLIWDFCTTHLLPIFIGNAADLKWSFGIARGKNDKVDSMRLCDYAYKNYDEIKPTTGLNKVLITLKDLLSNRSKLIKLKNAIKQTLNELKGSNDKTTQSLMEKLNKAALDGLKKSIAQMDAELLKIVRQDEAILVNYKRMLSVPGIGKITATFIICCTNNFVIKVTGKQLANYAGVVPFENTSGTSVRGKSRVHFMANKELKSLLTMGALSAVQSYPEFTDY

SEQ ID NO: 387689 - protein, 390 aa, unidentified
MSQPNDSNKSVIPLEQDNTMIAVIEMGQASWLVAGIVPGLERQPLKKLGSDEQALFQLLQRWRNEAVQTGRTIKRLVVAYEAGRDGFWLARWLRARDIEAYVIHPNSVAVSREHRRAKTDRLDTELLKRAFLGWLRGEAGHCSMAAIPTIEEEDARRPNRERENLVGERTRIVNRMKATLARFGIRSFKFTLRHADERLNDLRTAEAASLPANTHAELRRDIARLRVVRDQIKEIEQQRLQRIEQAAPSEKGPHAMIRLLARVIGIGVETADMLVNEILSRQLRDRKAVARYAGLTGSPDESGKRRREKGLSRAGNARVRRGMIQLAWRFLMFQKDSALAQWYRARTAHARGGTRKTMIVALARKLLITLWRMVTTGEIPEGISLRPAVA

SEQ ID NO: 387690 - protein, 412 aa, unidentified
MTGKIAGIDVHKRVLMVAVEGETGEGEKEGFGLRRFGTTVAELEHLRAWLQTQGVEEIVMESTAQYWKPVWFTLEGQFRLFLAQAWSNRAPRGRKTDFKDAQRLVRRHRAGELTLSFVPDEVQRQMRSLTRRRFQLTRDRVRIQNQVESLLEETRIKLSSVVSDLFGGSGLRILEALSQGQRDPHALASLADARVQCGEEVLREALAANLGPMHRSLLQQHLEMLRLVETQIEQTAGLMAESMRSQVSEIERLTAIPGIRVLAAQQLIAEIGPRAAAFASAPQFCSWGGLAPGRNESAGHNSSSRCPKGNSFLRRTLCQIAQAAVRTKNSSFEQKFRRLVPRLGYLKAIWAIARSIAVVVWKILHDGVTYIERGTPSTPGAIKRRVQRLRKELRALGYSDDLKPLAPEVIAS

SEQ ID NO: 387691 - protein, 374 aa, unidentified
MSFTSDTILVALELSNSLWLVGTRMPGAQKSHMHRVTAGDTAALLALVEALRSRQTAISGHPSPLACCFEAGRDGFWLHRFLTAKSIPTYVVEPSSILVNRRAKRAKTDRLDAEGLLRVLAAYLAGDSEICSMVRVPTPEEEEGKRAHREREYLVQDRTRLENRILALLATQGIRARPSLRNWERDLAALKTGDGRPLPPRLAAEINRLRRRLGLVLDLIRELDAERTEIIAASPDDAVTSKVTALRSIYGVGDNFAAVLAREVFYRPFGNRKQLASYVGLAPMPHQSGDMDRDRRIGRAGNARARKTMVQLAWLWLRYQPESELSAWFRQRVGQLQGRTRRIAIVAMARKLLIALWRFTETGEIPAGSTLRAA

SEQ ID NO: 387692 - protein, 402 aa, unidentified
MNAVGIDVSKGKSMVAIMRPFGEIVSAPFEIKHTNSDINSLVELINSVEGESRIVMEHTGRYYEPLAHQLSAANLFVSAINPKLIKDFDNDSLRKVKSDKADAVKIARYALDKWQNLKQYSVMDELRNQLKTMNRQFSFYMKHKTAMKNNLIGILDQTYPGVNTYFDSPARSDGSQKWVDFASTYWHVDCVRKMSPKAFISHYQNWCKRKKYNFSQSKAEEIYGKAKELVPVLPKDDITKLIIRQAAEQLNSASATVESLRTLMDETASKLPEYPVVMAMKGVGSSLGPQLMAEIGDVSRFTHKGALTAFAGVDPGVNESGSYEQKSVPTSKRGSSNLRKTLFQVMDVLIKTHPQDDPVYQFLDKKRAQGKPYYVYMTAGTNKFLRIYYGRVKEYLASLPES

SEQ ID NO: 387693 - protein, 403 aa, unidentified
MKHVIAFDVSMGKSYMVIYNAQKQCVFESEIKHFKPDFEKLQEKIHKLTDETGESPEIVFEATGIYSRQLERFMQDNQYTYCLLNPLEAKLQCDSLRIHKTDRSDAHRLALTHFTVTRRVSTGTDNLFYQLKSLSRLYSELDGELSMIRSRMHKVIQLTFPELERMFTSRSDLFLNFVQLFPHPDCVLALSKTIIKNRIRANTNKKISNITAEKKAIQILEIAKTSYPAVSQNDVLCDQLKLYARRYQELLHQKECCINKMVYVAEQRAEYDIILSLPGIGPNTAVRLMAEIGDITRFNNNKQLNAFAGIDIRRFQSGKTFFKDKINKRGNKHLRKLLFLIIQNMIKQRRYGQNHIVEYYDKLKTQPYNKCHKVASIACVNKLLKLLFYLITHNMYYDYRLTA

SEQ ID NO: 387694 - protein, 346 aa, unidentified
MTIVEDRPVITGGVDTHADMHVAAALDPVGGLLGVQEFPATAAGYASLLSWLRSFGILDVAGVEGTGSYGAGLARHLAAAGVRVVEVDRPDRQDRARQGKSDPLDAVSAARAALSGRASGAPRGRDGAVEAIRALMVAKRSARQERTQAINQARALIVTGPDELRGRFAGHSPAALVDAIAALRPRPGDVPGYAIRVALRELGRRAQFLDAQLERLDELIGPLVTARAPGLLGLHGVGPDTAALLLVAAGDHPERLRSESSWAHLCGVAPIPASSGKTSRHRLNRGGNREANHALWRIVITRMSSHPATRAYVARRTKEGLSKKEIIRCLKRYVAREVYHQLRHSA

SEQ ID NO: 387695 - protein, 382 aa, unidentified
MDHYAGIDVSLEYSSVCVVEATGKIVREAKVLSEPEALIGWFGSQGLQLARIGLEAGPQSQWLYAALREAALAVELLETRHVRNALKTMPVKTDRKDARGIAELMRLGWQRPVHCKSLPAQETRALLTTRDLVQSKLHDVEMSLRGTLRGFGLKVGKTTPRRFEARILELVAGHASLQVIAKALLAVRGGLLREFNALEKRVRTMARSDTRARLLMSVPGVGPIVALTTIAREGGRERPFASAIDDPARFKSSKSVGAHFGMTPKKYQSGETDISGRISKIGDRAVRTVTYQAAHVMLTRPLKGCTALKSWAMKLAKRAGMKKAKVALARKLAVIMHRMLADGTPFADALSLAPCSAPSRPLRAACGGGQAASLDGACARRS

SEQ ID NO: 387696 - protein, 430 aa, unidentified
MTTHTYSTSPRAIIASHNQKISKNRAIQPLTVDLADQSIIKELNGKRPLGLDLATKKYRLCYQDDLGKMINVELRKNELRKMLRETPGKYHLCIEGCSGASYWERFARENGHKIKVVPGYVTRKLGWNQPKDDFNDAYNLYNALFNPLVPSCQTRTEDELAISALISQKEALLKSLNEQVNKTRSFLIETGEYDCVVKGGGSAVQAIELYISNHIHAASEHKYSIRCLEGFKRMILSLTREIDEINEILSEYGQTNKQVKLLLTIPGVGIETAVPIAIGAKNIERFESARQFQAYWGYHPTHGGSGGEIEMGKMSSNGDRALKRTLYESALSLNHQGRYKDEPRSEWIYTKVTQNKAAFKKGMIVIGAKILRTAYGVLKTGKPYNPAIDNSLGRIKTKIHKRSNPKYKEKNINAVLQNKYEQELTLAALG

SEQ ID NO: 387697 - protein, 402 aa, unidentified
MNCVGIDVSKGKSMIAVMRPFGEVVVSPFEVRHTASELSELARLLKNLDGETRVVMESTGNYHAPVAWLLHGAGLYVSVVNAMLVHDYGNNSLRRGKTDKKDAVKLANYGLDHWLTLPRYVPEEDTRLMLKTCYRQYQQYSKVQTMLKNNLISLLDTAFPDANRLFTSPPRADGSEKWVDFVATFWHCECVCGLSKKAFTAKYQKWCRKHGYNFSQDKALDIYASACGRFGVMPKTNTAKLLVEQAISQLQTTSAALAALKQEMQSLAASLPEYPVVMGMFGVGPTLGPQLIAEIGDVRRFHSKKALVAFAGIDAPPYQSGQIDVRSRSISKRGSASLRRTLFLVMGVLLQCAPMDEPVYQFMNKKRSEGKPYRVYMMASANKFLRIYYASVKAYLDSLEHD

SEQ ID NO: 387698 - protein, 487 aa, unidentified
MEPKYRRCCGIDVHKKSVTVCVLPPVGKPEMEVRKRNFRTFTRDLKQLRAWLKNCKVTEIAMESTGQYWRSIWNLLEDHFEKLILVNPQHIKGLNGHKTDPKDAQWIAELLETGKLKGSWVPAREIREVRDLTRQRVHVLEDMNRVKNRIEQLCQTGNIKVSSVATDLFGVSGRRMLKAVVEGKHDAGWMADYARGSLRGKRRELELALEGSFTGNQRWLLDKELRQLEWLESQIPVLEQEIERQLEPFQEAMRRLMTIPGIDRKTAWTIVAELGVDMGVFTDAKHLASWAGLCPGNRESGGKRMSGRTRKANRYVKRGMCQAAWAASHSKNTYLHAFYRRIQMRKGAPKAVMALAHHMIAIVYNTLARGEEYVELGGDYYDQRNKPRVVSRLVARLTRLGYYVSLKPVEPESSYEPSTVIELSLPQPRPAIPASHNPPSVPGSVAPAKPRRGRPCKCVERGIICKHTTSPEVNSLKQHDLSPSRFS

SEQ ID NO: 387699 - protein, 349 aa, unidentified
MRFYHHSHRFYCGIDLHARLLAICVLDHEGAIVLQTQIPASQQLLLDTLAPYRPDVVVAVECLFAWYWVADLCQAHNIPFVLGHALYMKAIHGGKSKNDDIDAEKIARLLRGGNIPVAYVYPKGLRETRDLLRRRMHLVHKRAELVTHIQIVNAQNNLPEFGKKLIYAKNRAELKIAERFQNPHVRKSVEVNLALIDALDGQIADLELYLERTAKVEDPQTYHLLKTIGGVGKILGLVLLYEIHDIRRFPEVGEFLSYARLVRCVHESAGKKLGYGGKKIGNAHLKWAFSEAVCLLLRSYPVVKIWLARKQKKHGKKKTLGILAAKLGRAVYHMLRKKEAFDVRRFLGQ

SEQ ID NO: 387700 - protein, 338 aa, unidentified
MTIYAGLDVSDKTTHICVVGADGAVVRRDCVASDPDVLARWLKRHCSGLTRVVLETGPLSAFLYHGLVERDVPVTCICARHAKGVLSTRVNKSDPHDAEGLAQLARTGWFKAVRIKDEATHITRAQLKIREQLVSAHGAMVNQLRGLLKLFGLRIGAATTPNKRAERLASLFAQRPELAPVMQPLVDSLTALEMQITRTTKMLANAAAADPVTARMMSVPGVGPITALIYKSSIEDPDRFARGADAGAFAGLVPRRSQSGARDYKGRISKAGDPLLRHALYEAANSLLARVKRPSALQSWGKALAETKGPKRARVALARKLAILLHRLWQSETEFRWA

SEQ ID NO: 387701 - protein, 343 aa, unidentified
MHTTEVTELYGGADLHGNNVFLALRDAQGKTVYKRRVKANLEAINMAMDPFWPRIKSLAVEATFNWYWFVDGMREQKRPVILANPAKMEQYEGLKETDDCTDAEWLAEQARLGILPECYVYPKAVRPIRDLLRRRILIVRQRTQSLLSLESLLSRQGLEAPDVDQLKRWTSDDVQELGLDEFSQLQAQTLRVLMQKQSELIETVEKAVLKKVKPSVEFKRIQQVPGIGMILGMTILLESGEFNRFPSAGNYASYCRAVKSRRSSNGKTKGQNNRKNGNPYLAWAYIEAATFAARYSARIQAWYERKKKRRNVAVAKKALACKLAKAVWHVMKGNDFDERMLFG

SEQ ID NO: 387702 - protein, 425 aa, unidentified
MKFTRNDPTNQRIERITNHHIIVGIDIAKDVHAAQITDFRGRMLTSRHLSFTNTKEGFEKLFHWFRETSAKHNKSSFLVGMEPTGHYWHNLADWLLEQGIEVVLVNPVTTHRNKENRDNSPSKNDPKDALVIADVVSRGYYTDYSPQQPVFQCIKAMMSTREYWSGQSTSLGNRIVRWIDLYFPEFRSVFQEWNGIRSLATLKAFALPDDLRDLNAEEVMEGWRNQGMRRVAGVSGKAKAVELLNAAAHSIGKSHTNDAARQEILRLILFYEQTQRTLDEMQQELESLLEQVPLTEQLRSIDGLGTITIACLLGCAGDLRHYAHGRQLLRRAGLNLAERTSGKHKGQVKLSKRGDSMLRKYLYMGILNLVKQNADFKKWHVQNQMRGMTKMASIFKLMGKLARILIGMVQRGETYRSQLHDVIAA

SEQ ID NO: 387703 - protein, 407 aa, unidentified
MEVICPRCAGLDVHKQTVVACVHIARDGAPLQEVRSFDTTTSGLLALADWLESFGVEHVAMEATGVYWKPVWHVLEGHFELVLANAAHVKNVPGRKTDVNDAMWLADLLAHGLIRASFVPPVAVQELRTLTRTRKQFVRERAAHVQRIEKVLEDAKLKLSVVLSDILGKGGRAVLQALVDGHSEPEYLASCITTRVKASRTELLEALRGRVSTHHRFMLKVHLSHIDALDKAVASIETEVGAGMKSFRQAAKLLSTMPGLSEVSANVVVAEIGIDMSRFATPGHLLSWSCMCPRNDESAGKRRSTRLRRGGQWLKTTLVQAAWAAIKVKGSYLQAQFHRLRARRGTKKAIVAVAASMLTAAWHMLRDGTEWNELGATHFDRADAAKTANRLIRRLQQIGYVVQATPA

SEQ ID NO: 387704 - protein, 402 aa, unidentified
MNPVVGLDISKEESHGQAFLARGKPFRGTFHFEHTRDGLANLHQVLKDVETASKLRPLLILEATGHYQSPVVQFLEEHHYIYIIINPLISNRLRKSQLRKVKTDAADAYLLGELHYKEEFEPFKKRGVQLLNLRYLTRQYESLSKMCVQTKLQFQAVLDQVFPAYKGVFGAMYSRISLWFLSKFPTSYSVLQTDEITLKAKMKELLSSKRGRSEGWINQRVQRLLDAAKQNPFQQTMYASHLINLKVLITLILQYQEHLAELEQNIDALAEEIEEYELIQSIPGIGHKIAATILSEIGEVDRFDHPKKLVAFAGIDPSVFASGKFTATRNRITKRGSRQLRYALVMAVQCGLIRSRNMRLKAFYDRKRAEGKPHKVALIACANKLIHWLYAILKNKKEFRPI

SEQ ID NO: 387705 - protein, 340 aa, unidentified
MLLYGGIDLHANNSVIVLLNEQDEVLYRKRLPNELSTILDQLAPYYTTLQGLAVESTYNWYWLVDGLMEAGYRVHLANPAAMQQYDGLKYTDDHSDARWLAHLLRLGVLPEGYIYPKAERAVRDLLRKRTHLVRQHTANVLSVQNILVRNTGARLSVKRLRELTKREIERLLPEADQILAVTSSLAVLDCLSQQIKTLEHTVQKRLKHTPAYEQLLTVQGIGAILAQTITLETGAISRFPTVGNYASYCRCVDSTKLSNGRRKGQGNVKNGNPYLSWAYMEAAQYAMRFQPAAQRFYQRKLAKSNKNMILARKAVAHKLARACYYIMRDLVPFDATKAFG

SEQ ID NO: 387706 - protein, 318 aa, unidentified
MGTAPSYYVGIDVAKAMLDVVIDPTGEYFQVPNTPEGHAQLVQRLEDLPVAAIVLEATGGYERPAAAALLAAGLPTCVVNPRQARDLARGLGQLAKTDRIDAGVLAYCAQHCPVRKRLPVPEKQAELEALVVRRRQLVALRATERMRLDQAAHGRTRRDITQTLAFFDKHLATIEKAIAELINADDHWLALAARLQSVPGVGPTTAATLLAELPELGQLNRQEIAALAGVAPYPRDSGTRKGKRMIRGGRSTLRNALYMAVLTARTWNDKIRLLHDRLMAAGKPFKVAQVACIRKLLTILNQIAKTGLAWNQHVPKTA

SEQ ID NO: 387707 - protein, 315 aa, unidentified
MSDMPCFVGIDVATAQLDIALRPSGERWAVPNDASGVMTLVDRVQALHPTLIVLEATGGLERAVTSALATAGLPVVVVHPRQVRDVARATGQLATTDALDARALAHCADVIRPTPRPRPDAQTQELRALLGRRQPLIGMRTAAQNRLAGTNARLTKDIAAHMTWRNAAIATLDDDLETILRASPLWRENDDLLQSAKGIGPVCARTLLLELPELGTLTRQQIAALVGVAPLHCDSGTLRGRRMIWGGRAHVRTVLYMGTLVATRFNPQIKVFYERLLAAGKVKKVALTACMHKLLTILNAMLKHRTPWQPQEVQS

SEQ ID NO: 387708 - protein, 345 aa, unidentified
MSEFYEGRQFVGMDLHRRRSVLVRMTESGEHLETVRILNDRDSLAEVMSRAGECPEVALEATYGWYWAADALAELGATVHLAHPLGVKAFSYRRVKNDQRDAADLADLLRMGRLPHAWIAPPETRELRELVRHRAKLVAMRSQCKAHVHAVLAKGGIWVPMSDLFGVEGNLLLDKVTMPAPYTARIASLRRFIEAFDAEIDLFTGLVQRRLTRDPGYTAIQQIPGIGPVLAAVLVAEIGDVHRFAGPAQLTCWAGLTPSHHESDTTVRRGRITKQGSRLVRWAAIESVKILPDTSHIGAIRERVAHRRGNRNIGAVAAARRQLELVFYGLRDHHVRALHRAPRAA

SEQ ID NO: 387709 - protein, 353 aa, unidentified
MRTYYVGMDVHQASIVIVVLNGTGKVIESTILKTGASAMRSYLQRLKGRVYVTFEEGTQAQWLYEVVQPLVTAVIVCDPRQNRLLSSGNKSDRIDAQKLAELLRNGSLKEVDHRDHGVRVLKELVRNYECLVQDTTRVMGRLKAIYRGQAIACKGHEIYRQDKSAKWLRKLKEPGRRARASFLYEQLAALRPLRQKAKLAMLREARRHAAQRWLLSVPRLGPVSVAQLLAIVGTPHRFRSKRQFWTYVGLAVVTRTTADQEVINGVLRRSRRPVATRGLNRNHNHLLKRVFKTAATSACHSGPFAAAYEARVERGMDPALARLTIARQIAAITLSLWKRGELFKVERMKLATT

SEQ ID NO: 387710 - protein, 336 aa, unidentified
MFQLGIDVSKKTLDLCLLREGVKGRVKTRKLQNDINAVSAVIAWLSKQHCKPEDVHIIMEATGAYHESLAYGLHKAGGRISLANPHRAREFARGMGMLTKNDRVDAYMLACYGALKAPEPWLPPPEEVRHLSALLRRRDALVADSTREKNRLEKYLATDTPSVIAESVEAMIGQLNAEIKRLDSLIRSHLNQHPELKKDFDLLTSIKSVGYQLGLNMLVILRSHDFTTAEQAAAFLGVVPVEKYSGTSVRGCPKLSKIGPPEIRAKLYLASLCGLRFNPLMKSMYERLCLRGKAKMCAIGALMRKLVHWCYGVLKTQKPFDVGYLSSDARSACKAA

SEQ ID NO: 387711 - protein, 349 aa, unidentified
MLYVGLDLSRNRLDYHAADRDGEPVAVGAAPPDADGLRHLVMRLGDAEVVAVIETMNGARFVHDQLELLGWDVRVADARRARALAPLACKTDRIDAWVLAELARRDLIPEVWLPEPTVRAERERARFRLHLVRHRSALKNRIHATLIAFGHPCPVSDLFGVGGRQLLDRLELPEAWRETLETSLYLVDELDEEIAECERELKCLGADHPYVPLLTTIPGIAWTLAYTIAAEIGDIRRFPSPVKLIGYTGLCPRVYQSGESDRRGPLRKNGPRYLRWALIEAAQHAARSPAYPYRPLYERTRARIGRNRGGKVAKVVIARKLAEAIWHMLNRNQPFNPCSGKRLVSLTAN

SEQ ID NO: 387712 - protein, 376 aa, unidentified
MKRCSEVFVGIDTAKAKNAVAIAEAGRQGEVRYLGEYGNTPDAVAKLVRKLGDRYETLHFCYEAGPTGYGLYRQILAMGHSCTVVAPSLIPRRPGERVKTNRRDALSLARLLRAAELTAVWVPDETHEAVRDLVRTRAMAIEDYRRKRQHISSFLLRHGRVYEGGTTWRGRHLRWLDGQSFAHAAQRFAFQEMLNAMRAAVERIDRLDAALVEIVPAWTMAPVVAAFQAMRGVGFLTATAVVAEAGDLRRFEHPRQLMAFLGLVPSERSTGDTRRQGGITKTGNSSARKALVEAAWTYRHSAGVGTTHQRRQQLLPQRVREIAWKAQSRLCARYRRLTAKGKRNTVVITAIAREIAAFLWAIAREVEPAPITLQTA

SEQ ID NO: 387713 - protein, 462 aa, unidentified
MTVRSAGVTAPQLPSDRLPCVHPNAAGLDIGADQIYACVPSDRDAQPVRAFATFTTDLHLLADWLIACAIDTVAMESTGIYWLAIYEILEARGIRVFLVNARQIKIPPGRKSDWKDCQWIQRLHMLGVLQGSFRPDAEMALLRAYLRDRAELIQHRAPHILHLQKALHQMNIQLDRVLSDITGTTGMAILRAIVAGERDPLILAQLRNPGCKSSEEKLVKAMEGTWQAPYLFILKQALELYDFYTQQLAACDTEIERSYGAMKPRFESEIDPATLPAAKPGSKSKNKPSFNARAELARVVGIDLVAVTGLSAASVQTIIAEIGTDMSKFPTVKHFGSWLGLAPHNDISGGKVLRSRTRKVVNRAGQAFRQAAQCVGRSDSALGAYYRRMRARLGPQQATVATAYKIARIVYTMLKKHMPFEAASAEAYDQQYRERELKYLQRKAAKLGFELAPKESTEPVPS

SEQ ID NO: 387714 - protein, 409 aa, unidentified
MERVLERCGGLDVHKKTVAACIVIPGTRGRRQQEVRTFGTTARELLALRDWLDANGVTHVAMESTGIYWKPVFYVLEGSFTCLLANAAHIAQVPGRKTDVKDCVWIAQLLEHGLLRGSFVPEAPIRDLRDLTRYRKVLIQERTRVTNRMHKVLEDAGIKLASVATRLLGASGRAMMEALVAGTTDPSMLADLAKGRLREKLPALREALVGRFRPHHAFLVSQLLAHVDYLDEAILGASVQIEGLMAPFAAEIERLDTIPGVNRRTAEVLIAETGADMSRFPTAKHLASWAGLCPGNNESAGKRMAGTARKGNRWLRTALVEAALSASRAKDSALAARYRRISRHRGHKKAVIAVAHAILVGVYYMLVRQVPYQELGPDYFDRRHTERVRRRAVQALERQGYRVILEPVA

SEQ ID NO: 387715 - protein, 438 aa, unidentified
MSNKVIFNLDELFISVGIDVGADFSWMSIALPNQQFVGKPFKILHNSIDSLTTAVSKIKEAEELYSLESRIFLESTGIYHYPLFCYLRDKGFNCSVINPIITKNSTNINIRKVHNNRFDSKKATLVGLKPDLKVSLMPSDLALNCRNLCREYYDLMDNRSAYVNKLQGELRMAFPQYLGIFSKVTINTSLTLLETYTSPSAFLEADKQEIIDIIKSTARFGLTYAQNKYNAIIQAATDANQFGYIIDSNIKRIRLYISFIRKYDEEINNILESLHELVDANEDADFVKQIHLIETFKGAGFLSAVSIMGEIGDFSAFSKPKQLFAYFGLDPAVKQSGKFEGTKVQMSKHDSAIARRVIHTLTLQSISISRNGEAKNPVLREYYLKKCDSKPKLVAMGAVSHKVCNMIFAILRDNKPFKIIAPQEHIKQYNAAKCDMTA

SEQ ID NO: 387716 - protein, 412 aa, unidentified
MEVLYSHCAGLDVHKDTVVACVRHMATGSVEREVRTFKTTTKDLLALSDWLAEHGCTHVAMEATGVYWKPVWHILSDGDFVLVLANAAHVKNVPGRKTDVNDATWLADLLAHGLIRGSFVPDEQTQEMRNLLRTRKQLVRECSRHIQRLQKTLEDANIKLDSVISDIMGLSGRAMIEALIAGESDPERLAQLAHRRIKAPPEALCEALRGRVTRHHRFLLRLHLKQIDAVNVAIDDIDQEVDAQIEPFRTAIQLLITIPGVSELSACVILAEIGHDMNRFPTAAHLISWAGLCPKNDESAGKRRSTRMRKGAPWLKTTLVQCARAAARKKASYFQAQYHRLRARRGDKKAIGAVAASILTTAYHMLKYGTLYEDLGPDYFDKRGKGKHVDRLINRLQNLGFAVQITPVEAAA

SEQ ID NO: 387717 - protein, 385 aa, unidentified
MGAQTFIPRDYDVFAGLDVDKKSISVTFTDHQGSLKSIRMPYSVELLVNHVRKHYGDKKVAFAYEAGPTGYGLYDGLVAQQYPCLIASPSMIPKAPGQRVKTNRLDSRGIAENLRGGQLKSIHVPTTLYRELRHLTQLRDALVSEVVAMKQRIKSLLLMEGLEFPPAPAGSQWSFMVKDKLRKLPCSSVVRFKLDQLLDNLEFNEKQVLKSTREIRRFCQNDPELFQCIGYVKTLPGIGWIVASQMMARIGDWRQIKNIRQLPAFLGLVPTESSTGERTERGSITHSGDPRLRSKLIQASWSAIRQDGELREFFRTVAKKHPRHIGPRVAIVAVAHKLSVRASVMLMKQRPYEVRQKVQSAPLTQEETVPQGTTRRRAVPGDKNS

SEQ ID NO: 387718 - protein, 405 aa, unidentified
MPVKSLCGGVFVFYVGIDIAKNKHEASVIDADGKPLLESISFSNSKQGCEKLLTLFARLDVSKDSVLIGMEATGHYWLSVHAFFFELGYDVKVINPIQSEAFRKMYIRQTKNDSKDAFIIAQIMRFGQFSATKLSEERIVALRQLSRYRLALVDSCGDCKRRIIALLDQVFPEYDRLFSDTFGVTSKEILLKYPTPEDMLAVSTRKLATLLAKSSRGRFGEEKAEQLKNAAADSFGVSFAKDAFSFQIQQLMEQILFLEKQVAELELKISALLEQMDSFITTIPGIGETLGAIILSEIGDIYRFDSPGKLVAFAGLDVKVNQSGEFTGTKTKISKRGSPYLRRAIWLAASRAAFCDPILSEYYQSLRARGKHHLTAVGAVARKLCNIIFAILRENRPYLPAPPKS

SEQ ID NO: 387719 - protein, 351 aa, unidentified
MMLIGVDYHPSFQTIAFFVEETGEYGEQELNHGDGQADRFYRDLKQRGICVRVGMEATGYARWFERLLAELGFELWIGDPAEIKAKRVKKQKFDREDARLLLRLLRENNFPQIWVAGPENRDLRQLLWHRHRLVQMRTRIMNQLWALAMNENKCWKKKLWSERGRAELEKLPLGFWASRRRQDLLELLDRMNPKIEELTATAEQEAKKRPDALRLMTHPGVGPLTALAYVLIIGTPTRFARGKQIGTYVGMIPSEESSGGKQRLGHISKQGNSLLRFLLVEAAQAAARVHPDWRRRYMHLAMRRHKSIAKVAMGRRLAIKLYWMWRNGCEYSQSGKCGSYAGQLGTGHGGK

SEQ ID NO: 387720 - protein, 344 aa, unidentified
MNTVRVVGIDIAKSVFQVCVWMNDGSVAWNKKISRSKLLDTIRQFEPGTLVAMEACATSHFWGRTFASMGYCVRLIPAQHVKAFVRSQKNDANDALAICETAFRPGIHFVSVKTTEQQDIKALRNTRQLMVEQRTALANQLRSLLAEYGFTIPVGILRLQQQLPELIEDASNSLTFTLRRLLSSLWEDMQALNERITRLDSEIAALSSQQIAYRHLLTIPGVGPLIAAAFLSEVDATQFSSGRELSAWCGLVPRQHSSGGKQRLSSVTKNGNRSLRTLIIHGARSVMRCVKKRDDSLSIWLQRLEARRGFLKTTVALANKLTRIIWRVLTDGIDFNMQKAVAMN

SEQ ID NO: 387721 - protein, 344 aa, unidentified
MDNHTQYSGFAGVDLAKKVMQIHFVTEDGEITDKSAKRAEFLDFFRNRTKCLIGMEACGASQDWARKLEAMGHEVHLMSPKAVKPFVSGQKNDYNDAIGIYKAMFNGVRRVPVKSTEIRDLQTLRRIRSQVTKDKVKEINHVRGLLAEYGIVMGKSITAFNKGIFSALESLKERGDVSPLVAEELRTTVEAIKAKIERQKKLDQEIEQLARGCKNYENFLKTPGVGPFTAAMLCVLLCDPSIFANGRQFAAYIGLAPRSRGSGGKNYVTGIPSKFNCDSESRAVLVECAQAIARCKNKSLWVEEILRRKPKKVALIAIANKLARQVWAMANKGESFKQMVVLTA

SEQ ID NO: 387722 - protein, 389 aa, unidentified
MTEVTTIGLDLAKTVFQVHGVDASGVVRVRRALRRSRVLAFFAKLPPCLVGMEACATAHYWAREIAKLGHEVRLIAPAYAKAYVRRNKNDAADAEAICEAVSRPSMRFVAIKSETQQAAAGIHRVREMLVKQRTMLINTLRGLMAEYGIVVAERPRHVGELVAILADPADERIPAPLHDGLMALVETLRGLEQRIERIEQQIVGWGRDNATCRHLITIPGYGPILSTAMAAMVIDPAAFTSARHFAASLGLVPRQEGTGGKVKLGPISKRGNGYLRRLLVNGAMSVLCSRRAKEDPWLAKLLETKERKLVACALANKMARIAWAVMMRQEDYRNRRHDQSCPRPERAWRRAHRRQDRCAHACGGGLRPVLTAAARSATAEPGRDGETAR

SEQ ID NO: 387723 - protein, 381 aa, unidentified
MTTESAHSTLQTSDQIVLYMAFELSQKQWKLGFTIGIGQKPRVRTITARDLDALQWEIRKACERFRLPENTPTFSCYEAGRDGFWLHRYLHTQGIVNLVVDSASIEVNRRMKRAKTDRLDVDKLLTMLMRYHLGEWKVWRIVTVPDAKTEDRRHLHREMAALKAERTRHINRIKGLLAGQGVSMPVKEDFLDRLGALRLWDRSALLSGLHARLVREYQRIQLINQQIHELEAHRREILRTSQRADIHQVRQLMGLRGIGINSAWLFVMEFFSWRAFRNRREVGALAGLTSTPYQSGGTSQEQGISKAGNRHVRAIAIEIAWCWLRFQPNSQLSCWYRQRFGHGSSRVRRIGIVALARKLLIALWRYLETGIPPEGAVLQPQ

SEQ ID NO: 387724 - protein, 321 aa, unidentified
MVYIGIDISKSSFIAAYPSTNGYRTKTYPNTIAGIRKFIATLSVAEHHCIMEATGNYCFLLLYLLHQSGIVVSLVNPKQIKHFARMMMAVTKTDEKDACMIAMYGEKMNPPVYKMPSQAIILLRQKKTVIRQLRKQLVASKNLRESLVVLPYRDKACVRALDKTIDFLTRQIEQLEAELADIASAEFDKQLKALTSTKGIGITLATALILTTGGFTYFDNAKQLSRFIGICPTYQQSGTSVNIKGHINRNGDEHLRSLLYVASWSALRSNAACRESYLRLKANGKPSKVALIAVANKLVRQAFAIATTDSTYIDGFVSTKK

SEQ ID NO: 387725 - protein, 412 aa, unidentified
MTVTNQFAAHVGLDWADKKHDVCVQFKNGERVFDVIEHTAEALDAWLTELHQKVKGRIAIALELKKGPVVYALQKYPFITVFPVHALSLARYRQAFSPSGAKDDPQDAELALELMLRYPQKIKAIEPDNADIRLLQQLVEQRRQLVEDKRRFVNRLINTLKQYYPQPLEWFSHRGSLLLCELIIRWPSLQQLKRARRETIRNFLNAKGGRAMALTEQRVASIDNAIPLTTDPSVIEANALIATALATQIKVVSEIIKTYDERIETLFDTLPDAGLFKSLPGMGPCMGPRMLAALGDNRDRFNNAEEIQNYAGIAPVTERSGQKSWVHWRWQCAKFVRQTFVEWAAKTVNSSYWARLYYQGLREKGKSHQSAIRALAFKWTRIIYRCWKTRTQYDEARYLLALEARHSPLLKP

SEQ ID NO: 387726 - protein, 451 aa, unidentified
MNNEPEIVLDDEHELVIERVAAIDVAKASGKVCMRMPHPSRPDRRMSKVRDVDATTRAVTELADDLLGEGIERVTVESTSDYWRIWFYLLEAAGLRVQLVNARDVKNVPGRPKTDKLDAVWLAKLTEKGLLRPSFVPPAPIRQLRDYTRFRVDLTRERARCWQRMEKLLEDALIKVSAVVSRMDSMSVRDMLEALIAGERDPRRLAGLARGKMRPKYNALVEALSGRFDEHHAELARMLLDQIDALGAQINTLTTRIDELLAALIDTPGPAADGSVRDRDGEVELMVTGLDAAERLAEITGIGPVSAQVIIAEIGLDMARFPTAAHLVSWAKLSPRTIQSGAIQRSGKAGKGNPYLKGALGEAAAVAARTDTFLGERYRRIVKRRGKLKALVAVARSILVIVWNLLSDPTARFHDLGPDYYTRRIDTERRARNHLAQLAALGYRVTVEPAA

SEQ ID NO: 387727 - protein, 321 aa, unidentified
MQEKSILGVDVSKSKIDVCLIVGEKIRHKLFDNNHKAFAKLVDWCTGQGASFMHVCMEATGHYMEDIAHYMNDLGYIVSIINPSQIKNYTKTELLRGKTDKSDAQAIAWFCLKHNPKAWIPQAKEERVLRDLLRCMDSLKKHKIQLHNRLENDKDDKIARNHLSKVIKSIEEEIEQIMVEINDHLNTYPDLMDKVKLISQIKGIGKLTSCFIIAEMPNTDNFKSAKEFAAYAGLTPGQHRSGSSVYKKSRICKIGSNRARKALYMPALVVKNHNKYFKFFCDRLIARGKAGKVVVVALMRKLLHVIYGMLKSKENFNPDLI

SEQ ID NO: 387728 - protein, 328 aa, unidentified
MGIDVAKATLDFCLLSKNATLLWQGQIQNDSQAIAQFLAQLQARGYKLAQIHFCCESTGVYGQPLAASLHQAALTLSVLNPAQVKFFAISVLRRTKNDKVDAEIIARFCRERKPLATRPLRPIESQLKLLVHERESRVNEQTRERNRAKKDPYQIALPKLIRQQRQSRLKQLAKEIAQFDTAIDSLIASDEGLKEQSRLLCSIPGIAKVTAAKLLAELAGKEFQSARQLAAYAGLTPQECRSGYSSYGKTVLCKIGNAFLRKALYLPAAVARRWCKPLRPWIALLESRKLHDLAIRGAIMRKLLHIAFGVLAHQQPFNPSLVFIPKTP

SEQ ID NO: 387729 - protein, 350 aa, unidentified
MMIIGCDLHTRYQQIAMLDLETGELVERRLEHENGEARAFYAALQGTVRVGIEATGHTHWFEAMLAELGHELWMGDAAKIRASVIRKQKTDARDAAHLLDLLRQDRFPQIWRPSPGERDLRQLVWHRQKLVWMRGAVKNQLHALAMGEGVCRKKKLFTVKGRKELEGLALGPWASYRRQELLRMFDELAAATAQLDLAVEQAAKNQPLAVRLMTHPGVGPVTSLAFVLIIGPVERFDRSKQVVSYLGLNPQEHSSGGKQRLGAISKQGNPMMRSLLVEAGHTAARFDPALKRMYQRLKFRRGASVAKVAVARKLAVRMYWMLRSTADYAQLVRMQGSPWATLVENSPSLG

SEQ ID NO: 387730 - protein, 350 aa, unidentified
MDLRKQAIGIDISKQTFTASLGSVSQNGAVRLSPAQSFANTKSGFNRLLRWSKTLIDTDVDVVFLMESTGVYYEKLAHHLHGIGKTVHVVLPNKSAHYAKSLNVKTKTDAVDARVLARLGLERNHKPWQPASPRLTELRNLTRYYVQLQEQKTVVNNMVQSKQAAHHVQSFIISSNKQLIRQIDRQIERCKQQIEHLIASDQGLSDRVDQLASIKGIGRLTVAVILAETRMFEGIENVRQVASYAGYDVVERESGTSVKGKTRISKKGNRYIRNALYFPAMVACRFNPDIREFYQRVITNKPSKMIGQVAVQRKLLVLMYSLYKNGTRYQEGYNRVAPTKIAEATRDSIA

SEQ ID NO: 387731 - protein, 370 aa, unidentified
MGEYSGAFVGFDTSKTKHAVAIAEGGRGGEVRFLGEIASSPVRVERLVGKLASRYDKLHFCYEAGPTGYGLYRQIRELGHDCTVVAPSLIPKRPGERIKTNRRDAVTLARLLRAGELTAVWVPDAVHEAVRDLVRARAAAAQDLRGKRQQLLSFLLRHGRIFSGRQHWTLAHRRWLAEQSFAHPAQQVVFQDAVEAIAEALARLQRLEQQLVAIVPSWSMAPVVEAYQAMRGASFLVAVTFAAEIGDVRRFDNPRQLMAFLGLVPGERSTGETIRRAGLTLAGNRHARRVLVEAAWSYRHPGRVSPTLRARLEGLPKPVRDTAWKAQVRLCARYRRLSAAGKKLPVVIAAIAREMAAFLWAIARHVAPAV

SEQ ID NO: 387732 - protein, 348 aa, unidentified
MVIVGCDFHPAWQQVAIFNPARGETVQAKLANGNGEAEQFYRSLPVPSLVGVESCGNSQWFVELLEGLGHEVWIGDAAQIRASYVRKQKTDRRDAAHILNLLKQGRFPRLWVPDVEVRDLRQLLLHRHRLVQIRTRVKNGLQHLAMNRGMQKKNKLWSAAGQRAFLQLPLQAWARCRREDLLSLLAKLEEQIKPLDVAVEKAALADAQARLLLTQPGVGSITALAFVVTLGDVSRFQRGKQVTSYLGLIPREHSSGGKQRLGSISKQGNGFVRMLLVEAAQSVVRLDESLRKKYQHRCHSKAKGVAKVAAARKLAVRLYWMLRTNTGYPEIVHNESSPRCPMVVRHGG

SEQ ID NO: 387733 - protein, 446 aa, unidentified
MRKSSKASRDLKIVNPNAAGIDIAAERHYVAIPEGRGARTIENFGCVTEELERMAQWLKACGITSVAMESTGVYWIPVCEILEDRGFEVVLVDPKQVKNIKGKKTDVHDAAWIQKLHSFGLLSGSFRPEAEIQAMRDLWRFRDTLVKSGARQIHVMQKALEQMNVQLHKVISDITGFSGLRILRAIVSGVRDPHQLAQLATRGIKAAPEQIAAALRGHYREQHLFVLAQTLQTYDFVRERIAECDVAIERAMNRLSGEHLVPPRPVRDRRYKNHPGFDLAREQIRITGVDLARIPCVSALTIQSVITECGVSPGHSFPTEKHFASWMGLAPNNQKTGGRVFSSKTRSRPLSAATALRVAAMSLQRSKTPLGDRFRSLKARIGTPKAITALAHLMARLIYRGLTRGQDYLDAGLRNLELVTQSKKVETLIRRAKYLGYQLTPLPQAP

SEQ ID NO: 387734 - protein, 331 aa, unidentified
MNYIGMDIHKQFTVAVVKDEQGNKLAEDKFDNSEENFSIFLKAFPPQETKTVIESSSVWEYIYEILDSMGYVVKLANPVRTRAIAEARIKTDSIDASTLADLLRANLVAESYIPPKDVRRLREITRERKTFVKQTTQIKNRIHAILTRRGVKIPTATLCKKTLIWLREKFAEDDVFIHYLNLLQYHETELKPIDNKISSLTEKNKDAKLLTTIPGIGPTRALDIVAEIGEINRFPSANRLCSYAGLVPSIYQSGSTLRFGRLIKQSSKNLKHNFIEASWNIVRTKESNPLQEFYKKLAKKKGKQKAICATARKMCCVVYAMLKNQKEFMVL

SEQ ID NO: 387735 - protein, 365 aa, unidentified
MNCVGIDVSHGKSIIVVMRPFGEVVVSPFEVLHTDSELSKLAGLLKSLDGETRVVMESTGYHHTPVAWLLHDAGLYVSVVNAMLVHDYGNNSLKRAKTDKKDAVKLANCGLDHWLTLPRYVPEEDTRLMLKTCYRKYQQYSKVQTMLKNNLISLLDIAFPDANRLFTSPPRADGSEKWVDFVAAFWHCECVCNLSEKAFTAKYHKWCRKHRYKFCEDKTLDIYSSACGHFGVIPKTDTAKLLVEQAVFQIRATSTTLAALKQEMQSLAASLPEYPVVMGMFGIGPALVPPLMAEIGDVRRFHSKKALVAVAGIDAPPYQFGQMDVRSHSISKRGSASLRRTLFLVMSVILQHAPMNEPVYQFMNK

SEQ ID NO: 387736 - protein, 343 aa, unidentified
MEYYAGIDVSLESSSLCVVDATGRIVRESKVASEPEALIAWLQSLGFDLARIGLEAGPLSQWLYAGLKQAGLAAELLETRHVRNAFKIMPVKTDRKDARGIAQLMRMGGFRSLHCKSLPAQETRSLLGARKLLQSKLHDIELSLRGTLRGFGLKVGKTTPKTFEARIRTLVADHPTLTLIAEALLRARAVLLDEFIKLDKKVHALARQDPRARLLTTAPGVGSMVALTYAAAIDDPARFRSSKTVGALFGLTPKKYQSGETDITGRISKTGDAAVRTALYEAANIILERPVKGGWLKAWALGVAKRAGMRKAKVALARKLAVVMHRMLVDGTPFDLNRVTATA

SEQ ID NO: 387737 - protein, 355 aa, unidentified
MTASYNYHIGVDYHKSYSHLVVQDSSGKTLRSGRVKNDRQSLGGFLERYRENSHAVVEATRNWMVMYDWLDDICDDVVLAHPLKVKAIADAKIKTDKIDATVLAHLLRADLVPEAWAPGERARELRVALRERMFYVRLRTMTKNRIVTVFDRYPEQTAQLKKLGDLFGKAGRIQLAQVNVSEIDRVQIDRGLDFIGDIDVRIKQSDATIRTMTKANANVKVLKTIPGIGEFFARLIDAEIDDISRFRNPKKLAAYAGLVPSTYSSGGKTFHGKIIKQGNKWLRWAFVEAVSPAIATDAQLRTQYDHLKIKGTNKARVAIARKLLTIAFQILRDQRAYEPRGTSTTEGASTISRLS

SEQ ID NO: 387738 - protein, 427 aa, unidentified
MQPIPNDAVLVAIDVAKARNEVLIEAANHRRRRRLTVLNNRTEHDRFVATLAGYNRPVMCAFEATGNYHRPLAWRLIEAGFEARLVSSMALARTREALHNGWDKNDPKDAQVILHMLRIGATQRYHDPLVAGINDVQELSKTHEAISRAKTEIQHRILTHYLPLYFPEIDRFKGNSRSDWFFAFLEQFPTPASITTLSKEAFVEAAWSVVGRKVSKERLLTDIYETAKASIGLPLAPDAPAIRMFRMVIAEARSLIRQRGEIEVMADELLGDSADFRLLRRIPGIGPINALTIIAEAGDLRRFSHHRQFLKFCGLDLATMQSGVFRSQTKLSKYGNARLRRTLWLAGQVAIRQRDNSFRDKFERYIARDRNNPDLKRKALTAITAKMARVVHAVIKSGSDYRPFIEGPAPGGRTSLSRSREGASATL

SEQ ID NO: 387739 - protein, 407 aa, unidentified
MSEFKNLVFVGIDPHKAEHVAIMIDHWGEVFFELTFPNQASGFETLLNHVNNHIPEGKTVVFGIEDTGGLGRSCAQWLTVRDKLVKGINPIMSSNKRNRQPHRSKTDQIDALAVAKVLITDYNQLPTVTVDEYYHALRQLANRREQLVKTSTRCKNQLHKLLHELYPNYKDFFSDPFGLTALAFWANYSHPSMLQGVGIKRLASFLKKHARNMSTAKAEEILSAVDKHQPLTIDDKMAIVVVKQIIEQLQQLQNHIVEMEQMIDEALLQSNSKLQTMPGVGPVVEITILSRVGPIEKFSSADKLARHAGIAPVDNSSGGTKRQRRSKSGDRRLNAAIHRIALNQISVDRNGVPKCPVALEYYERKISEGKTKLSALTCLKRRLCDIIYAMLRDKTAYREPDCRFPAA

SEQ ID NO: 387740 - protein, 337 aa, unidentified
MNYSGIDLHSNNSVIVVSDETDHVLCQRRVPNDLAVVLRTLEPYRQEIVGVVVESTYNWYWLVDGLQAAGYTVHLANTAAMKRYEGLKYSDDETDAAYLAQLLRLGILPTGYICPVEQRALRDLARKRLQLSRSRTQHILAVESNVARQTGGRIASRAVKQLTEQTLTSFGLSENVTAAMAANVAVIQTLNVQIEKLEARLRSEVRPQAEFKLLTTAPGIGEILATTVMLETASIERFAGVGNFASYARCVDSKRISNGKKKGEGNVKNGNRYLAWAFVEAANFARRYCPEAKRFYERKKTRTNNIVATKALAHKLARACYHMMKERKPFDVKRCFA

SEQ ID NO: 387741 - protein, 412 aa, unidentified
MKIAGIDVHKKVLMVVVVDASVPEEKPARRRFVTLPSELQRFRIWLQEQGVEEAVMESTAQYWRSVWLELEPHMRLHLAQAFSNRAPRGRKHDFKDAERLVRRLIADELILSFVPNGEQRIWRSLTRMKVQLTRDRVRLQNQIECLLEEMRIKLSIVVSNLLGASGLRILQALAKGETDAKRLAQLGDERLRCTEEQLVDALTGRVQPMHREMLALQLQRLQLIDQQMAQLNRMIAQAMRPHQEAVIRLAEVPGLGVDSAQQIIAEVGAQASTFSSAAELTSWVGTCPGKEESAEQNHSSRSAKGNKYLRRVLNQAAHAAVAKKGSHFQVVFRRLLPRLGYKSAIWAVAHRLCRLVWKILHEGVRFIEQGCEPDPRAKKERARMLARALRKLGYEVAIKPLNQVAATNGIRI

SEQ ID NO: 387742 - protein, 446 aa, unidentified
MQFKWNEKINQVTENTLVVGMDIAKHVHYACFVDERGRVIEKAFAVHQSKVGFESLYEKIRQTMKEAKKTDVIIGIEPTGHYWMNLAYFLDHYGIPLVMVNPMHVKRSKELDDNLPTKHDKKDALVIARLVKDGRFSYPRLLKDLEAELRIGSTLRSKLTEDLASIKNRIIRWLDRYFPEFTQVFPAFGKMALAALEMTPLPQDIEGKTAEELVFLYRKVEGMRTPQLPKAKLLIETSTNSIGLTEGTRMARHEIATLLRQYRLLENEIASVNSQLAEMAQTTMEYELLSSVPGLGDATIVDLLSEVGSFSLYENPRQLIKLAGLTLRENSSGQQKGQKHISKRGRKKLRYILFKVMVPLIRHNEAFKKLHEYYTTRQQNPLRGKQSMVVLCGKLLKILHGICKKKVRFNEQYMMKDLHCLAETAKHFLSARPITRRMTRRSQQNN

SEQ ID NO: 387743 - protein, 381 aa, unidentified
MPGVTPCLHPGQVRRWVSFDQHKFSIVAAVLPPDGGGPEVWRIETTERAIRRFIDKHGPEGLSVCYEAGPGGFALWRLLTSMGVACDVVAPSVIPVRKGDRVKTDRRDAKKLVTLYRAGMLRFVHPPTAELEGLRDLLRARDDVRCARMAARNRVLKQLLRHGRIFREGKTAWTKLHRAWLARQRLDDPLAQEALEQLLIHLDGIERQLATLDARLEEIAGGEWWAGQVEILTRFRGISTLTALGLIAEIGDFSRFAHPRELASWLGITPSEYSSGDQQHRGHITLSGNRHARRLLIEAAWHHRHPPRRPKTGPAPDERAWQAQVRLYHRYRHLTEHGKRTTVANVAVARELVGFLWAAMTNQPLRTTDTVNRDQPEEVAA

SEQ ID NO: 387744 - protein, 391 aa, unidentified
MSMYFIGIDISKYKHDCCIISAADQKVVSKVTIKNNKAGFNELLTIIHSLANPADIRIGFESTAHYALNLELFLENSLLTFMEVNPVLISEYKKSKTLRRTKTDSVDCESIARWLMTVEYKPHSKGFYHAYSLKSLTRLRDKLIRQRSFYLVKITNVLDHTFPEFKPFFNERLSKTALYLLENYGSAEKMARMNSASYEKLRSVSRGKFSPQQFLRLKELAANTVGVNNSIFDVELNSLLSLYKSLVKEIDTIEKEINKLIEEVHPHYMSVPGIGPLSAAVIYSEYGDISNFTNSGQMLAFAGIEPGINESGTESHGGKMVKRGSFQLRYTLINCCLPLIRFDMTFATYYAKKRGEGKPHRVAITHVAKKLIRVIYALESQDIDFNAQKLR

SEQ ID NO: 387745 - protein, 344 aa, unidentified
MDHFAGLDVSVKETSICIVDDAGKIVREVKVASEPEALLAVLKNPAYHFKRIGLEAGPLSQWLFSALAEAGLPVICVETRHMQAVLKAQINKTDRNDARGIAQMMRVGLYRPVHVKTLRSQKLRMLLTHRKLLQSKAIAIENDLRGTLRNFGLKVGMVGKVKFEARIRELVENLPDLAVLVEPMLIVQRTLREQIVILHRRLLAIVRDDEVCRRLMTTPGVGPVVALTYRATVDVPARFRKSKAVGAVFGLTCAKYQSGEVDRNGRISRCGDEMMRVMLYEAAQSMLRSKKWSWLKAWAMQIARRRGMKKAIVALARRLAVIMHRIWVDGTEFRWTREQATAAA

SEQ ID NO: 387746 - protein, 317 aa, unidentified
MVTSYQNFIGIDIGKFKNVVAIHKQKNAVEFDNNASGWQQLFQEFSDVLPNSLVTLENTGKYELGLSHFLTDKNIAVHRANTRKVKSFILSHGTLAKSDRSDARALAQYGCERHRTLSLFAPTSKEQSTLAALCQRRDDITQMRAQEKCRLEAPENDQIKESCQKTIEFFNSQINELNDTMQKIIDESHELQQHQKILKTVPGIGKKLSQDFLCLMPELGYLNRREVASLAGVAPHPKESGKAIGYRRIIGGRSNIRSKLFTAAMAAAKSKSVLGAFYSKLVESGKKKMVAITALMRKIIVIANARLKAAIISHSSN

SEQ ID NO: 387747 - protein, 343 aa, unidentified
MKLIRVGVDLAKNAFQVHGVDRNEKAAWRRKLMRENWLKVLLETVEPGCEIGMESCGGAHHWARRLQAHGFRVRMIAPQFVKAYVKSNKNDANDAEAICEAMSRPHMRFVSVKTVEQQDIQAVHRIRAELRKQRTAKGNQIRGLVAEYGLVAPKELVHLRRALPCWLEDAENGLSERFRRLLHGLWGDLRTLDERMAELDREIAAIAQSDPAAKRLQQLRGVGPIIATALVAAVGTGEQFANGRQMAAAFGLTPRQHSSGGKERLLGITKRGDAYLRVLLIHGARSVIRTSKGKDDRLSQWVTRLAGRSHPNVAVVAMANKTTRMAWAMLKNGTDYQPAMVTS

SEQ ID NO: 387748 - protein, 377 aa, unidentified
MALKIVYKICCGIDVHKTFVVACVATTNKQGVTTYDNHRFSTYTKGLKELLQWLLAHNCKDVCMESTGKYWIPVYNVLEEQCAIILAHPKYVKAIRGKKTDKKDAKWIADLFKHDLVSGSFMPPADIRQLRDLMRYRYKLTCFSSSEKNRLQNCLTVSNIQLGNVVSDTLGKSSQKILDKILENPLDTSFDIEPLIHGSMKKKLSELELASPYQQKLDIILTAPGINNPFTAIGVISEIGVNMEAFPSAKHLCSWAGLTPTNNESAGKEKSVRVSKAGCHIKPLLVQCANAVVTSKKHPEIRNRYLRLKKRRGHKKAIIAIARMLLTALYHMLKNEETYNAELYRKSDILPTEREITIEQAVIMAQFQGYKIKSAAE

SEQ ID NO: 387749 - protein, 341 aa, unidentified
MPIVTIGIDLAKNVFAIHGVDDAGKPVLIKPRVSRDQLVTLIAQLPPCLIGMEACSGAHHWARVFQQYGHTVKLMAPKLVAPYRMSGKRGKNDAADAAAICEAVTRPSMRFVPLKDEHQQATLCLHRTRQGFVEERTAAYNRMRGLLSEFGVVLPQSPERLRREIAPHLDALPGWTRRCIIDLLDHVSNIEDRLAEYDRAIGEIARTDERSKRLMKLRGIGPTTASALLASIGAGHDFKNGRQVAAWIGLTPSQYSSGGKERLGTITKTGDAYLRNLLVLGARSVMAGLGDKQDRFSRWVRDLIERRGYWRTAVAIAAKNARLAWATLKYGETFKHEPATA

SEQ ID NO: 387750 - protein, 344 aa, unidentified
MKYFTGIDVSLRSVSICVVDEVGGVQYEAKVPAEVELIVAALRRFSAEIKQVGLEAGTLTQYLTYGLKKAGYDVVCLEARQTAATLAAMRNKTDRNDARGLAQILRSGWYRTVHVKSLESHQVRALLASRKAILAKCVDLENELRGLLKIFGVRLASHVAHGSFDETVRAAVSAIPELSKSLLPLLDARTVLYKTYLKLDNVVKAVVRHDPVCQRLMTVPGVGPVTSLTFKAGVDDTDRFRSSRNVAAHFGLTPRRYQSGETDNPGRISKAGDVDVRQALYTAAHALLTRSYAWSTLKAWGLRLAKVRGLRRAVIAVARKLAVILHRMWVDGTDFRASRLQGAV

SEQ ID NO: 387751 - protein, 475 aa, unidentified
MMQAGFRRAWSDSEGDGPSALQHDLSTTLVLESHTNRSDGRDLIGALPSTVCVLSAVPAGGAIPSTTKVGRYSMTHEPTVVLGGVDTHLNVHVAAVVDDQGRLLESQEFPSSADGYRELLTWMRSFGTLERVGVEGTGAYGAGLARYLADEGVEVVEVNRPNRQMRRQRGKSDAVDAEAAARAVLNGEAAVVPKSKDGLVESIRVIRVAFTSARNSRTRVTLQIRDLILTAPDQLRAVLSPLPAELRVERCAKLRSGELTDPGEATKYTLRILARRYQRLTTEMTELSAGLDDLTARANPALRGAKGVGPDVAAILLVAAGDNPERLHTEAGFAALCGASPVQASSGKVTRHRLNRAGNRQANHALWTIATVRLTNDPATQAYMDRRTAEGKSRREVLRCLKRYIAREIFQLLTAPELVPVGTDLRVTRTNARVTLETAASALGISATHLSRLERGLQHNVTLAKRYEKWLADAA

SEQ ID NO: 387752 - protein, 354 aa, unidentified
MSQTANTAIAVIGIDIGKNSFHVVGHDARGAIVLRQKWSRGQVEARLANIPPCLIGMEACVGAHHLSRKLASLGHDARLMPAKYVRPYSKGQKNDFNDADAIAEAVQRPTMKFVATKTAEQLDLQALHRVRERLVSQRTGIINQIRAFMLERGIAVRQGIGFLRTELPTILATRTDALSPRMLRVIEELAGDWRRLDQRIDGLSGEIEALARQDQACSRLMTVPGIGPIISSAMVAAIGTGDVFSKGRDFGAWLGLVPKQISTGDRTILGKISRRGNRYLRVLFVQAAWVVLVRIKNWERYGLKSWIEAAKRRLHHNVLAIALANKLARIAWAVLAKGRAFELRTDDAGVVRPA

SEQ ID NO: 387753 - protein, 356 aa, unidentified
MVALQSRRGEMEQYVGLDVSLKMTAICIVDRAGKILREGMVASDPDAIATFVRLHAPHVVRIGLETGATSTWLWTELNRRGLPIICIDARHAKAALKMQINKSDRNDAVGIARIMQCGWYKEVHVKALESHAIKALLVSRALLVKIKRDLENQVRGLLKNLGLVIGRAKMNTFVRRAAELIEDEPELAAAVDPLLKARDAVEKQITDLDRKVMKLARHNVQVRRFMKVPGIGPITALCYLATIDDPTRFKRSRSVGAYVGLTSRRYASGEIDWTGRISKCGDRMLRSYLFEAAGVLLTRVEKWSVLKAWGMRVAKRSGFRKAKVAVARKFAVILHRMWVDGTEFKWTSKEAIGQPT

SEQ ID NO: 387754 - protein, 379 aa, unidentified
MRYFGLDVHKSYCEGAELLSDNTVRRFRFSNEKKEWKRFAKELDGNCKVALEATGNASMIYDILTARGAQVVVVNPIRTRAIAEARIKTDKVDAEILVRLLAADFVCASWVASKEERELRTLLHHRAALKKEVVGVKNRIHAVLASHAIKVPVSDLFGVKGRQFLRELEELPGVEKIVLTSNLKILEALEEEIAAIEKELNLRAIDLPGVETFLGIPGIDVLAALTILAEIGDIKRFASAKKLASFSGLVPSVHQSGKTRYTGHITKAGRSMLRWILIQVAQVAVRQPGALRDFYLRLKKRKGHKIAIVAAARKLLTIIWAMLTKNTEYRYLKEDLRQKKIRRMHKRALPYKVDNDLPQKITSLIGEEQTMTEIPSPAA

SEQ ID NO: 387755 - protein, 400 aa, unidentified
MLDGMRNMVAKPFEVVHTAQGFAALVEKLRQLDGEVRIVMEHTGRYYESFAMSMHRAGFFVSAVNPLLIKNYQGGINVRKVKTDKADAQKIAQFALDKWTILPHYTPMDTIRYNLKTLHRQFQLASKTKTALSNNLIALLEQSYPGANRYFDSPVRADGRQKWVDFVDTFWHVDCVARSSEHAFVERYRKWCKRHGYIFSEQQAIQLHADARQKFPLVPKSDTCKLLVREAVSQLNAVSRTVETYRAEMDRLASQLPEYETVMGMTGVGKSMGPQLMAEIGDLRCFAHQKSLVGFAGTDPIKEESGDKVSQSAPSSKRGSPYLRKTLFVIMTILLQLQPQEDPVYQFLDKKRSEGKPYYVYMTAGGTKFLRVYYGKVRDCLKAKGLWEVPASASQEVNPG

SEQ ID NO: 387756 - protein, 348 aa, unidentified
MSYYAGIDASLETVNVCIVDEEGNVLLERKIEAEPAAIVGLLREFGQPFARVGLEAGPTASWLYTELRAAELPAICMECRHVKAGLGAMRNKTDRNDARGIAHLVRLGWFRQVFVKSDEAQRVRMLLVSRNHLLNKMQDLENCIRGSLKVFGLRIGTVTRRIFEARVLELVDDSQSLRAITEPLLSARRAINEAFERLDLLCRKVASRDPVCKRLMTIPGVGVIVALTYRTGVDAPERFKRSRDVGAHFGLTPRRYSSGQTDYDGRISRCGDEMVRTALYQAANVLLHHGRWSSLRSWAMRIAKRRSVKAAKVALARKLAVVMHRMWSDGTVFRWSDAHPSDATAVTA

SEQ ID NO: 387757 - protein, 312 aa, unidentified
MKNICGVDISKARLDACIEPGSIRGSFANDPAGIAGLAAFCRQHRVELVAMEATGGYERRAFLLLWEQGLPCTVTNARQVRLYAEAMGVLEKTDTIDAHIIARFAQAKNLKPTPLPSSSQKRLKALVARLRQLTDDLTVQKQRRSSLFDDAEMLASIDEVIALLKRQSRTLEGEIGSMIDDDSLWACLSDTFRSIKGVADRTVAWIMADLPEIGTYSNKAIAKLVGVAPIANDSGKRRGKRPIRGGRAGVRSILFLVAAIAARYDKSLGEFRARLVAAGKEKMVIRIALARKLLVRLNAKARDARAQHANAT

SEQ ID NO: 387758 - protein, 342 aa, unidentified
MKQYVGLDVSQKETSVCVVNESGEVVFEGKAKSDPNALTELLRKRAPHAERVGFETGAMSSWLWHELRRVDLPVVCIDARHAHAVLSVRMNKSDQNDARGLAELVRIGWYREVKVKSEESQRIRAILVARSRLVSIRRDIENQIRSLVKEYGLLFPRAIALSFRKNVIELLGGDHQLSAAIEPLLMIHEQVCRQQGKFDDQVRRLARSDEISRRLMTVPGVGVVTALTFRHTIDDPSRFRSASTVGAYLGLTPRRHQSGETDTNGKISRWGDRLLRTYLFEAATVLLYRTKKWCSLKAWGMKLAKRIGMKKAKVAIARKIAVILHCIWVDGTAFEWGQAQAT

SEQ ID NO: 387759 - protein, 458 aa, unidentified
MAHRNSKKIPAQLVDDEDYQLRHEKVAGIDVAKDKGDVCTRLPAAREGGRRRSRVEQDVPARAAGILDLGAQLIADGVELVVMESTSDYWRIWYYLLESLGLAVALVNSSHARQLAGRPKTDRLDCQWLARLAEMGLLRPSFVPPPEIRALRDLTRARVQLVRDRARAWQRLEKLLEGALIKLSSELSSLAKVKTARLILDALADGQRDPAALAALALGSLQRRRADLEKSLDGMMIGAHHALLIRAHLNQVDSLSRSISAIEDEVAAALEAVPAAWGADQAGEPSPDPGPDAAALPAAARLAEVPGITLDLATAIIAETGLDMSAFPTAAHLVSWAGLAPVARQSGPRSRKPKKGQGNAYLKGHCTQAANGAAKTSSFLGERHGRLARRIGPNKAKCAVARSILVIVWHLLADPAARYHDLGADWHQRKAGRDKKLRSHIRQIQALGFNVTITPAAA

SEQ ID NO: 387760 - protein, 343 aa, unidentified
MQIRSVGIDLGKTTFHLVALGANGKVLLKKKFTQKQLIAFTANMQTCLIGMEACSGSHFLGRALREQGHDVKLIPAQFVKPFVKSNKNDFIDAEAIAEAVDRENMRFVAIKTDDQLDLQALHRVRDRLMARRTALINQIRAFLLERGLVFAKSPIRLREALPEVLENVNENLTPRMRNLVAMLWSEWKDLELQIVQMNDEVERIASSDAACRRLRQIPGIGPLVATAIVASIGNGAAFRKGREFAAWMGLLPKQHSTGGKARLYGISKRGNSYLRKILIHGARAVVLRSKRDRIAMGAWMTSLETRAPRNVLIVATAHKLARIAWAVLSTGQDYRAVPEALTV

SEQ ID NO: 387761 - protein, 408 aa, unidentified
MRTDASVTQMGLDIHRKFSTVTARDGQGKIVWRQRLEHADRPRMRKQIADWPSGAPVVLEGTFGWGWMSDELTAAGLDPHLASSGKVAAWRKARGMAKSNRKDADLLSELWSERGRWWEVWLAPPQVRQQREWLRFRMMLVRTQTALKNRIHAILHRHGILCEQSDLFGRDGRRFLNLLIAPQDATLPDSARAMLTGYLEMLDDVRLRIAEVTKQFRQQITASPAAMRLKTIPGIAWILSYTILAEIGRIERFPDAKRLASYSLLAPVANDSGDEDDEPPLGRHVGHFGRRTLKWAFIEAAHGAVRKGGRFRAIYDRRTNGGKRDKNRGYITVAHALCRVAYVCWKKQVDYTAEPPPRPGRRRGGHRRTHRAVVAKAASAKQTSRPELGQPEHPMAAAAVVGRLQASI

SEQ ID NO: 387762 - protein, 329 aa, unidentified
MGEANQTARVSLGIDGAKAQFAVAFLLPGKVARRPCARDATGFAALTTGVRQQGAEQVHACLEATGAYGAALALFLYEAGYPVSLVNPARISADAKSRLARTKTDQAAAALMAPFCQTQQPLPWMPPAAAVRARQALVRRVELRQELVQQEVNRQPSGSHSPAGRPSIAATLTFLRAEVAKTQRLIQEPRERSAALKQQLLLLRALPGVGSWTAARVLAESDAVRSAVDARQLAASAGLTPRERTSGSSVHRPPRLAKTGNSRLRRALYLPALVAMRHHPAVRALAERRRARGKRPLVIVGAALRTLLHLIYGVLQSGKPFDPALAMAA

SEQ ID NO: 387763 - protein, 323 aa, unidentified
MQPNSIATSWVGIDVSRDWLDVAVVREGVAIAGWRCSQGAEELLILAAKLKTFQVRGVIVEPTGGLERPLGVVLAAAGIAVMRINAKRIRDFARAHGVLAKTDAVDAFVLALFGERMQPEPRAWLDAERQQLCDFIARQQQLTQLRTAERNRLHRSQAAGPRNSIRRTLEFFAEELERIETELNAWWEEHGSAWREPEARLRSMPGVGPKTARVLLAHLPELGRLNRRQIASLAGLAPFACDSGHWRGQRHIRGGRAVVRVALYLASWTAVRRTGTFRAFYEHLVERGKPRQLALIAVARKMLLVLNEMMRTGRTWRENPIRA

SEQ ID NO: 387764 - protein, 354 aa, unidentified
MKRTTKYVALDVHQATTVASVREDSGRVIARSVLPTDGGAIMEFVRGMRGAVHVTFEEGTQAQWLHDLLAPLADRVVVCDRRGALRHGNKGDHVDADQLAELLRRGGLRAVYHGSAHRAGLKELTRTYQNLVEDSTRVMLRLKALFRARGIPTAGTAVYHRQQRARWLAQLPDGGARFRADALYAELDVLRQLRPKAKAAMVTEARQDPAWPVLRTIPFLGPVRVALLLATMQTPWRFRTKRNLWAYAGLAVVTRSSADYALVAGQPVRRRRAPMTRGLNRNHNRVLKDVFKGAATAATARPGPLQDVYHNVIARGTREELARLTLTRKLAALTLRLWKKGERYDPTKLTTPAR

SEQ ID NO: 387765 - protein, 406 aa, unidentified
MEGRCIGLDVHRDFCEVVIWDAGEVRNAPRVPARPGPLEHFAAALRATDRVALEATGNALAIARIIRPHVAEVVIVNTRRLAAISEAKQKTDRRDARTLAQLLAARIIEGNWQPDEDTRVLRRLVARRAGLVINRVRSKNEILAVLHRNLAPRPPMTDAFGVAGRRWLDQLALAVDERDTINAALRQIDFLTEEITTIEHHLAEFALRSEHARRLLTVPGVGLTTATTFLAHARDITRFPTPGRLVGYLGLDPKVRQSGNHDARPGRISKEGPALARHVLVEAALTAVRSPGPLRGFYERVRGRRGHQIAIVATARKMTALFWHLLTTERDYAYSLPTPTRKKLRSIELKAGLPRETPGGPHAPINRERRRELERQTMQQAQTAYERNVADWHRIQRERKTAPTRA

SEQ ID NO: 387766 - protein, 313 aa, unidentified
MKARPSEVFIGVDVSKERLDVAVAPSGETISFANSEDGIALLADFLKPRNPELVLFEATGGWEMNAVNHLAAQRLPLAVLNPRHVRDFAKATGQLAKTDTIDARILARFGQAVRPEVRPLKPLELRKLDALTTRRRQIVEMLSAEQNRLVSAPEWVRPDIEELIAILKKRVAAINRDLNKLIRKSPLWREKDKILQSFPGVGPVTASTIIAALPELGTLNRRQIAALVGVAPLNCDSGTHKGKRKIWGGRADIRSVLYMCAMTAARCNPIIRTFYLRLQRAGKPNKVARTACMRRVLVILNAMMRSNTCWQPT

SEQ ID NO: 387767 - protein, 366 aa, unidentified
MDAIYIGVDFHARQQTICYLKTETGELVISELQHQDKAQVRAFYQQFQGSVIIGLEASGYSPWFEAMLEELGHQVWLGDATEIRRRARWRQKSDRRDAELIWDLMVHNEFPLLHQAAPQSREILRMLRYRQKLIKVRTMSKNSLQAIALQAGLAKGSRLFTKDGQAEFQASAMSPALQWQRDHWFELLKPLNKQLLETMVWFKAQSKDDPVIARLRTHPGIGLLTALCIWHTLQPVSRFRNQRKVVAYAGFDPMVRSSAARVIYLGISKAGSRMLRYLLVEAVHTALRYDDDLKRFYKRVAERRGRPKAKVAAARKLLIRAYIMLRDEIDYAEFRRRAVAVGLPDEVKGQQKVPEVLIGQSTSPGA

SEQ ID NO: 387768 - protein, 346 aa, unidentified
MQHPTTIAVDLAKSVFEVAVSKQPGQVCLRRRLTRSQMAQFLANQPPSTVLMEACGTAHYWARLAQSFGHQALLLPAQHVCRYRLRDKTDHADTRALLEAHRNERIAPVPVKQLFQQSIAALHRIRSGWIATRTARLNTLRGLLRELGINIPLGAKLVLPRLSQALADPRGLIPEILHPALLATAAEIRQLEQNIQQVNRQLQTVSQSLPAACFLRSIPGIGLLTSTALIASVGDPSRFRSGRRLASSLGLVPREHSSGSSRRLGAITKRGDSYLRTLLTHGARAVLWAAKHDKNPDALQRWALAIEKRRGHNRATIALANKLARIAWAVWTKNTLYQPKTAQAVS

SEQ ID NO: 387769 - protein, 357 aa, unidentified
MKSQEIKYVGIDCGKKTLEVIRIGDNSLHQRQQFSTTEIGISKLINWLNPNDVVGLEAGSQSFRIAKSILNKGIQVIVLNPGDLATIYQSLKKTDKEDSLKIARLIQRFPIEELPVVPIPNDEEEDNRRLCTEQENWTRQLTQSKNRLHSLFTQAGLTHITKKHLRTKANREISVALLPSRYQKEAERILKVLDLVEQNLKLIEKEIQEALKKNKAYVQTIMSMPGIGMITSLAIMSYMGDCKRFSSAKQAAYYAGLVPRVDISGDTVRYGRIINRGCHSIRRVIVQAAWSLVRCQHGGKVKEFYQRLYLKKGAKKSIIATSRKMIEVLYVMIRTGKLFDSMPEKVLNRKLTQYGLM

SEQ ID NO: 387770 - protein, 407 aa, unidentified
MDILIERACGLDVHKKSITACVMTSEGKEIKTFRTHTVFLLDLIDWIKQHGCTHVAMESTGVFWKPIVNLLEAEDIQFLVVNAQHIKAVPGRKTDVKDAEWICNLLRHGLLKPSYIPDRNQRELRELVRYRRSLIQERSREHNRVQKVLEGANIKLAAVVSDIMGVSSRDMMGAMIDGEEDPQKLAAFARRTLKKKKEELELALRGNMSAHQRIMLKTMLTHVDFLNEQILELDTEVAKRLDPFQQDIERLDTIPGIGRRTAEQILAEVGTDVASRFPSAAHLCSWAGLVPGQNESAGKRKSSKTRKGNKYLRAALIEVAHSVCRSDNYLGAQYRRIAARKGRHRAAVAVAHSIMIIACHLLARKEDYKDLGSHYFELRQQEAIVKQAVRKLENLGFQVALSNSEAS

SEQ ID NO: 387771 - protein, 286 aa, unidentified
MSKHSIRAGDVAGLLMRLAQLKEKARGRTGRDFPIIAIQEAGLDGFWIHRVLQSEGIESHVVDAASILTSRRRRRAKTDGIDGETLVRTLLAYKRGEPRVCAMVKAPTPEEEDRRRICRERKTLVGERVEHVNRIKGLLFAQGVSEYEPLKRNRRARLEELKTGDGRPLPAHLKAQISRSFSNRRQLAAYAGLAPTPWQSGSVAHEQGVSKAGNPRLRTTMIQLAWLWLRHQPTSALSVWFQQRVQSNGSKMRKTMIVALARKLLVALWRYSTSGVVIEGAVMKTI

SEQ ID NO: 387772 - protein, 341 aa, unidentified
MQAVTTIGLDIAKSVFQVHDATGNVVIRRQLKRRYVLAFFQKLAPCVVGIEACATSHHWSRELKALGHTVRLMPPAYVKPYVKRQKNDAADAEAICEAVTRTNMRFVETKTPEQQSCLMLHRTRHLFIRQQTAVINAIRAHLAEFGIAARVGRHGVKDLLHVVADSSDRRLPEVARACLAALGVQLRMLKAQVLAFDRRIMAWHRSNETSKRLDEIPGVGPALATALVASVADPKAFRSARHFSAWVGLVPKQHSSRGKDRLGSISKQGDRYLRSLFTAGVLAVIRYAKIHGTKHRPWLTALLARRPTKVAAIALANKIARMAWAIMAKGERYKELAALAA

SEQ ID NO: 387773 - protein, 379 aa, unidentified
MKFYSGQHRHYCGVDLHTRSMYLCVQDHDGKKLLHHDYPADPQRFLHAIEPFRENLVVGCECTFCWYWLADLCLQQEIPFVLGHALYMKAIHGGKKKNDKIDSDKITALLRGGMFPVAYVYPAGMRETRDLLRRRMHLVYIRGGTLAHIQNTNSQYNLPPFSKRLCYAANRTDIAERFTNESVRKNVELDVDLIDHYDGLITKLELYLVEHAKIDDPYMFQLLRSVPGIGKVLALVLLYEIHQIVRFPSAGDFLSYSRLISSRGESAGKLKGVMGRKIGNAHLKWAFSEAACLMIRESDQAKRFVQRLEAKHGKPHALAVLRARIGRAVYYMLKRKEPFDLKRFFGETQSGKDATVQGSTTGSSSLVSSDGAVSTALGR

SEQ ID NO: 387774 - protein, 315 aa, unidentified
MEDSQVSVGIDVSKSCLDVAARPTGEVWQVTNDAGGIRDLSQQLLGMSPSLVVLEATGGLERALAAELAAAGLPVAVVNPRHVRDFARAAGALAKTDALDAQVLAHFGQAMEPEPRALPDAEAQDLQAMVGRRRQLVEMITAEKNRRRTVNARIRPQVEEHIRWLEKSLKDLDQDLGGFIQSSPMWRTKERIIRSAQGVGPVFTATALANLPELGRVSGRQISALVGVAPFNRDSGTLRGERTVWGGRRQVRAALYMAALVASRYNPVIKEFYQRLCSMGKPKKVALTACMRKLLVILNSMVKHGREWQPNPKTP

SEQ ID NO: 387775 - protein, 361 aa, unidentified
MTHRMTTQPDARKVIVGVDTHKHVHVAVAIDTWGIRLGDHSFVADSGGYRALITWADTHGRIEAFGIEGTGSYGAGLARAMRRAGQRVVEVNRGDRRTRRAAGKSDTVDAEVAARSVLAGQSTAIPKTADGAVEMMRQLKIARDTAVKARTTAMITLKQIVVTASPVLRETLQDLPDHALLTRCAGCRPGPIDTPTASAKHTLRALARRWLALAEEITTHDRHLARLTTETSPTLREGFGVGANIAAEMLIIFGDNPDRIRSEAAFAKLCGACPIPASSGMTTGRHRLYRGGHRQANAALYRAVIVRMRLHQPTIDYVARRAADGRTRREIIRCLKRFLAREIYQRVMTDFRARQHVIQAA

SEQ ID NO: 387776 - protein, 323 aa, unidentified
MYKVIGIDISKASFDVSYEKTKGKFYHSKFDNNARGFAKFRNIIDTVDHCIMEATGPYYLMLACYLYDNGVKVSVVNPLQVKHFVRMRMTKAKTDKKDAAMIALYGQSENPDLWQPDEVQVMQLQQMHTAVEGLQKQSTMLKNQLEAFSQLPVKEKNVMGTLKALLKTIKAKIAKLEDKMLEIANNYYRDTFFLLQTIPGIGPKTAIVLITITNNFKKFDDTKKLSAYVGLSPRVYQSGTSINGKGHITKMGNKYVRKLLYLCAWSAKQHNEQCKVMYDRLKEKKKPERVIKIAIANKLLRQAFAIATNCRVYDKNYEYKFGF

SEQ ID NO: 387777 - protein, 338 aa, unidentified
MAMYCGIDLHSRDCWLAILDDGLKVVREARIGNDLEAIREFLEPYREDLKGVAVESTFNWYWLVDGLEEAGYQMHLVNTWAVKQWEGLKYSDDRHDARWLAHLLALGILPEGYIYPKQERSVRDLLRRRAFLVRKRTSFLLAMRGAFECRTGLRTTSNEVKQWTASDVESHLDDPAEALGITCLLEPMKALDGQIRIIEKEALTRAKLRGEFVPLLTVWGIGKILALTMMYEVGEISRFRKVGNFASYCRLVKSARLSAGKRKGSGNARNGNPYLSWAFSEAAHFAVRYHPPAKKYFQRKRSKTNGIIAIRALAHKLARASYYVMKDQVDFDSERVFG

SEQ ID NO: 387778 - protein, 350 aa, unidentified
MVILGVDAHKRTHTLVAIDDAGRKLGERTVTATTDGHLQALQWAARWPSRRYAIEDCRHVSRRLEADLLAAGEVVARVPTQLMAGARKGGRERGKSDPIDALAVARAALREPNLPTAHLDGPARELRLLVDHREDLVTERTRMQNRLRWHLHELFPELEIQPRVVKRLHVLDALERRLADVDGTVASIARELIGRVRELSLRANSLERQIVRLVRQLAPNLLALAGCGPLSAAKLVGEVAGAARFRSKATFARWNGTAPIPVWSANDGRYRLNRGGNRKVNAALHRIAITQWRGEGPGQAYVQRRMTTGDSKTEALRLLRRRISDEVYKRLLADQTLAAGSQQGDPALAS

SEQ ID NO: 387779 - protein, 315 aa, unidentified
MSESQGPYVGIDVSKASLEVAVRPAGDSWSAANTPQGIARLIQRLAQVCPGLVVVESTGGLERPLLAELCFAHLPVALVNPGRVRDFAKSTGTLAKTDKLDAGVLAHFAEAVKPAVVVLPSEQEQLLSALMTRRRQLVEMLTAEKNHLLSTPGAIRNWVERNIASLEQQLAELNREIDDFIKHDPAFRDKEQILRSAPGVGPITAAILLSDLPELGKLDRKKIAALVGVAPFNRDSGPRSGKRQVKGGRAAVRTVLYMATVCAVRFNPALKAFYSRLLQNGKLKKVALVACMRKLLTFLNAMVRDSRAWTSGSVT

SEQ ID NO: 387780 - protein, 408 aa, unidentified
MRRVIGIDIHRTFGEVVIWEEGRLRHAGRVDMTRTALEGFGKGLRSTDEVVIEATGNCMAVSRVLSPFVARVVIANPLQVKAIAHAHVKTDKIDAGTLASLHAAGYLPEIWTPDAATERMRRLAARRFQIVRHRTRIKNEVHSILHAHLIPRCPHADLFSGVGRAWLLRQPVPEDERGAIERHIRELDRLTEDLAAVDKEIASDALDDEAIARLLTITGINLTVAAGIVAAIGDISRFPSPQKLVSYFGLNPRVRQSGLGAAHHGRISKVGRSHARAMLVEAAWAAAKTPGPLHAFFVRIRAKRGHQVAAVALARKLTVLCWHLLTKQTDYRWARPALIANKRRTMELKAGKPQKKGNKPGPAHAYNIKALRDQEMEIARHAEQAYEQFVAQWETRPKVRGRSKSAGL

SEQ ID NO: 387781 - protein, 394 aa, unidentified
MEDVLRSCCAGLDIHQKVIVACVIRSVEGKKCPEKFFSQFDTTTRGLLELSDWLTSYEVTHISMESTGVYWKCVWRILQNNFELQLANPRHIKNIPGKKTDMKDAEWIARLTRLGVVPTSFVPPEPIQELRDITRYRKHLTEDLNREKNRGHMVLQNAGIKLTSVIKDIYGKSGRALLYALVEGKEINEALILECVYTTLRRKVPQLIEALTGFMTVHYRKMLALHLKQIECLEKQLRVTEELIDEYLFPYEEYVEQLEEILGINCKTAAVVLAEIGIDMSVFPTESHLASWASVSPGNNQSAGKTRSRRVGKGNSYLKKVLSQGALAVSQGKKNRIQAFFFRIRRNAGHKKAVVATVHLVLRIIYHMFSKQSQYKELGEKYLQNQKAVVPAKY

SEQ ID NO: 387782 - protein, 374 aa, unidentified
MHTPKGLDELTSRLTAICGPEYKAELACIVETNHGLLITHLLEAGFAVYPVNPKTVDRKRSASGAKTDQIDAYLLAKHGRSEIVDLRRLEPDSPLIAELKTLTRDQDSLIQMQTRLVNQLTACLKAYYPVALTLFSKIQQPSTLHFLQHYPTPQAAMEATPQEIEAVLKESRHPTAKKTAIWIFAQLHQPHLTADEVTTRTKSRLLIALIRQLLPVMEEIAAYDQEIERLFLRHADSHLFAILPGAGKRLAPRLLAEIGEDRTRYRDAISLQALAGTSPVPYESGNYGKPHRRYACIKPLRNALHQFAWESTHTEAWARDYYERKRTEGKSHSVAVRALSNVWVRILFVTWLKREEYQAVIFERAQREHAHRAA

SEQ ID NO: 387783 - protein, 408 aa, unidentified
MTIFVGDDWAEDHHDIHLMSADGTTLASRRLPEGLAGVGGFHELVATHAEEPTQVVIGIETDRGLWVQALAAAGYQVFSVNPLAVARYRDRHQVSGAKSDAADAKLLADLVRTDRHNHRPIAGDSPDVEAVKVLARAHQNLIWARNRNTNTLRSALREYYPGALEAFDSLSDRDALAILGRAPTPAEAARLSISKIRSALKAAGRQRNLDARALEIQTALRVEQLAAAPAVTAAFGASTRAAVAIIAELNHQIADLEAQLATHFEAHPDADIYLSLPGLGVTLGARVLGEFGDDPNRYTTAKSRKNYAGTSPLTVASGKKRAVLARHVRNRRLYDVIDQWAFCALTNSPGARAFYDQHRAAGDTHHQALRALGNRLVGILHGCLRHHTAYDEHKAWAHRQTTPDAKAA

SEQ ID NO: 387784 - protein, 482 aa, unidentified
MKKRNIYQNRSQELLRLFEQAGSHSKVMCIPIDYAKKDHVVMFCNGYGDIVRKPFSVKNSAEGLTYLLDQVTRSCRRRGIKRQHVFFGGEDANSYCENFVNTLRSKGWIVAGVNARDAKKQRANLQASTDRLDLMGIATMLLNCRANCCPAQSGIYRNIRSLVRHRRELVVMSTAVRNRIHGVVDRLFPGFLDEKKSGIVAFTRSSLFLMEDRFSARQIRRRSRPKLIEILRRYGTSKAEATAEKLQQYAAQVLHTPVEHIDTLQLSLAQHVKHLRCLQESVDQLKKEISLNLAQTHGAFLTSVRGIGMILAAGLVAEIGDPNEQKPLNNLVSYAGIIPRVKQTGGVEGKTYTFSVAKRCNRILKDYVVKSAFHLGRYGPEDLMADYKRREASGQHADFGIGRRYLRMAMSLMRTSQVYLPPWLRGANSTMKERAGYYLETWPEFRDKWKKVGALEAAFSKDRPLGLWRQMIQELYDIELKL

SEQ ID NO: 387785 - protein, 343 aa, unidentified
MQTVTTIGLDIAKSVFQVHGVDAAGQVVVRRQLKRRYVLAFFEKLPPCLIGIEACASSHHWSRELQALGHKVRLMPPAYVRPYVKRQKNDAADAEAICEAVTRANMRFVETKTPEQQSCLMLHRTRHLFIRQQTAVINAIRAHLAEFGIVAPVGRNGVEELLGVVADASDKRLPEIARACLAALGAQLRMLKAQILEFDRMINAWHRSNETSKRLDEIPGVGPALATALVASVADPRAFRSGRDFSAWIGLVPKQHSSGGKDRLGGISKQGDRYLRSLFTAGALAVIRYAKIHGAKHRPWLTALLARRPTKVAAVALANKIARMAWAMMARGERYKEPVALAA

SEQ ID NO: 387786 - protein, 422 aa, unidentified
MLEETHDTEEIIGRVAALDIGKAELVCCVRVPSAQGSGKRAQEVRTYPTMTRSLLVLADRLRELGVTRVVMEATSDYWKSPFYVLEAHGLEVWLVNAKDVKHLPGRPKTDRLDAVWLAKVAERQMLRPSFVPPPPIRRLRDLTRYRADLVAVRTAEKNRVEKLLEDAQIKLSVVASDIFGVSGRDMMAALIAGERDPKALAQLARRRLRAKLSLLEEAFYGHFSDHHAFLLQTMLARIDQASADIATLEAHIEAEIAPFAQAADRLDEITGVGRAAAQVIIAEIGVDMGRFATPGHLASWARFAPGVKESAGKKKGKGTTGHGNPYLARVLGEAAAAAGKTSTFLGERYRRIARRRGTKKAMVAVGRSILIIIWHLLSDPDARFHDLGPGFYDTRIDADRKKRNHIRQLEALGYTVTLQPAA

SEQ ID NO: 387787 - protein, 371 aa, unidentified
MPPGGMPLSQASRRTRLSASAVSTITTIAHPEPSRVTVGVDTHGDLHVACALDQLGRHLATTRVATTPRGYRALLDWAQRLGEVEAWGVEGTGCYGAGLVRFLAAQGQLVWEVNRPDRQARRQRGKSDPVDAEAAARAVQAGRATAIPKAGDHLRVARTTAAKARTQTANALRALVVTAPAELREQLRGLSAGALASTAARMRPGPIATTTAATKLALRLLGERYQTLDGELARVDAELDRLTTQAAPELRQLCGVGPEIAGALLVAAGDNPLRLRSEAAFSMLCGASPIPASSGKTVRHRLNRGGNRQANSALYRIVVVRLRWHQPTRDYLARRTRQGLSKREIIRCLKRYVAREVFAALQAPTALAATA

SEQ ID NO: 387788 - protein, 411 aa, unidentified
MLFTGIDWADDHHDVALIDASATVLAEFRINHDADGFADLHRRIASYEADPRQVFVAIETSHGLVIDELLAHRYEVYAINPKAADRYRDRFSPSGSKSDALDARCLADMMRTDRHKHRPLRLPKEDYQVLGRLCHDLRKLIEERTRFDNQLTACLKEYYPQALGLFGQPDSAINVAFLRKFPDPVVLGGITREEFAEFFKDQKYTRPKLIERHWVRAKRRLPEPSAVSLRTGRMRMLALLDQLVTVKDHILKYERQIQELVETLPEHDTFSSLPGAGKRLVPEITAALGPNVEDAPLLFADAQSLARYSGELPCTWQSGKMKLVRARDACNKDYRRTFYDFAMASVHWSDWAKAYFQHCRRQGKRASTIYRCLAAKWIKIIYRLWKTKTRYDENYHVNQLKLRNISWAMAL

SEQ ID NO: 387789 - protein, 347 aa, unidentified
MVTLGSDSHKRSHTVVAVDENGCPLEERKVAATRAGHMEALAWAQRWPDRRWALENCRHLSRVLERDLLTAGEAVVQVSPKLMGNARRSGRELGKSDPIDAVAVARAALREAQLPVAQLEGKSRELKLLVDHREDLVGERTRIQNRLLWHLHELEPGFQVAASGLLRTVVLADVRRRIEVHTGVVAEIALDLVGRLVELTTSVKRLQRRIEALAGELAPSLLTLPGCAGLSAAKLVAETADVNRFHSSAAFAMHNGTAPIPVWSGNHERHRLNRGGNRQLNVALHRIAITQIRLGGEARVYVNRRMSLGNTKTEAIRALRRQISDEVYRRLRRDSSERLTAQDAVAA

SEQ ID NO: 387790 - protein, 404 aa, unidentified
MIFVGDDWSEEHHDIEIHDETGRRLVRKRLPEGIAGIAELHAMVAGHASDPAEVVVGIETDRGLWVAALVAVGYQVYAVNPKAVARYRERYGGGSGAKSDAADAKVLADLVRTDRHNHRLVAGDSEAGQGIKVLARAHQRLVWSCQRQVNSLRSLLREYYPAALAAFDDLDHPDALAVLGRAPTPAAGRRLSRSTIAATLRRGGRQRHVDTRAAEIHAALRAPQPQPPTVLADAYGAAVAAAVGVITEMTRQLASLEAELERAFDAHPDAEIIRSLPGLGTVLGARVLGEFGDDPNRYADARARKNYAGTSPITVASGKRRVVKARYIGNRHLADASYLWAFCALTHSAGARRYYDQLRAKAVEHDGALRALANRLVGILHHCLAKRMTYEEAKAWPTTEATAA

SEQ ID NO: 387791 - protein, 331 aa, unidentified
MVNLARKYNVGFDIHEEEFYGTVMDKEGNIITKGPVKYSKEGIQSFLSCFPSTDIIIAIEACGLARGVYKLLTELGYEVVLANPAKIKSLPGSNKTDPIDSKRLADLLRIGYLPITYMPSEDIIKLRDISRHRAQLVRMRAVTKVRIKSYLSRDGKKFPGKWNKNTLAKLKQMDPMIANFVNIIELLNDQIYHVEKKIKKISSCSYKLQLLTTIPGIADISAMLILGEIGDIKRFNNPKSLVKYAGLCPGVNQSGKKSYDVICNANNKWLKGIITEVSSRGAMLDRRYLRHYVRVRNRRGFKVARRSVARKMMIDIWHILTKEEPFKRSES

SEQ ID NO: 387792 - protein, 401 aa, unidentified
MISVGIDVSKEKSMVCILKPYGEIVASPYEVVHTERKVSELLALLGSLTGDVKVVMEATGAYHLPLLTLLKQAGLFVSVINPLAMKKYASMRIRKGKTDKLDAARIANYGLDNWFHLVDYKPSEEAYEELKMLGRQYSHYISIKISSKLAVGNLLDRTMPGIKKLLTDKRSEQPGKDKLSDFVAEYWHYDNITKKSEDRFVSDYCRWAKKKGYQANEAKAKAIYAMACSGIPTLSSSAASTKMLTLEAVRVLKEVNRTLAAILTQMQDLASVLPEYGVVRAMPGVGDVLAPRLIAEIGDIRRFYSGSALIAYSGIDSPPYESGNFIGTKRKISKRGSALLRKTGYEIMKCLKTIKPKQDAAVYQFMLKKESEGKPKKVAKIAALNKFLRIYYARVSEVYRR

SEQ ID NO: 387793 - protein, 426 aa, unidentified
MNLNSTGNDARESQPTLLVGIDWADSKHDLTVLDGSRRRHFRINSDTKDVTEMIQTLTELAGGRPIAVCLEKGRVRIIYHLMLHEHITLYPVDPKQVARYRESFTSSGAKDDQRDSYYLARLLAERRADLRPLKPDDPLTRKISLLCQTRRQMVDDKTGLIQGLHAVLKMFFPLLLTLPGSRLDVGLKQEIMRRWPDPRKFQKLNRQTLEKLLRRHRCGNDDQIAELIEKIRSTKPVTSDASLIEPLVIRLKTLAEQVKAIDKGIKQLETEIQVAMNQHPDAKLFTSLPGAGAALAPRLLAALGSDRDRWRDASELGSYSGILPVTRQSGKTKYVSRRRACPSYLKQTFHEFADCARKHCLWSRAYYDLQRAGGMAHHAAVRKLASRWQRILLSIWKKRIPYDDARYTEIIKRKLPALTAYLPNTQ

SEQ ID NO: 387794 - protein, 349 aa, unidentified
MGQVSTIGVDIAKSVFQVHGVDADGTVVIRKRVGRARVLEFFADLPPCRVGMEACATAHQWARELEELGHDTRLMPPTYVKAYVKRGKNDAADAMAICEAVTRPSMRFVPIKNVEQQSALMLHRTRDLLIRQRTQLINALRAHLAELGLVAAKGREGLHQLVTIVTECGDERLPCNARFACQAIVTQLHAVQIEISGLDKRITQIHRTNADSKRLDTIPGFGVILSTAVVATMTDPKAFRTGREFAAWIGLVPRQNSTGGKERLGSISKQGDRYLRRLLVVGAISVINCARARPYKYPWVIELLGRRPTKVVAVALANKMARIAWAVLAKGEPYRVPTRSSNAVVPAAA

SEQ ID NO: 387795 - protein, 339 aa, unidentified
MDVAVLGVDLAKNVFQLHGVIRSGKVVLRRRLSRERLLEHIAQLPPCLIGIEACAGAFYWQRQFAQHGHTVKIISPQYVKPFTCRSQKNDPTDAEATCTAVQQPRTRFVPPKSIEQQDVQTLHQARQRLVNHRTALVSQMRGILLDRGIVFAVGITRARTMIPRILHDSESALTSIARETIAELWDLFQDLDDRIARFDDEIDRVFQGSESCQRIAKIKGVGPKTATAIVAAIGNGSEFKNGRHLAAWLGLVPRQHSSGDRRLMLGITKRGDKHLRTLLVHGARAVVRTAPNKHDPISRFANALRARRGFNRATIAVANKNARIIWAVLHSGEAYRSAA

SEQ ID NO: 387796 - protein, 342 aa, unidentified
MKFYCGIDLSARDCHVCVIDEQLKVKVQQKLRNELPKIVQLLEPYKANLKIVVESTFNWYWLIDGLQAEGFEVVLAHTLGLYLITGAKVKTDRRDAYALAKLLLVGAVPAAYIYPVATRPVRDLLRRRLHLVQVRAGEYGSLRRLLLRQGILSSKQQEIKTATETELEQWFTHPLVRLHASQELQRIELYSQQIAELEKTILELAQTEQSYELLLKLPGVGQTIALTILYEVGELTRFASVKDFSSYCRVIPGIAQSGNVTRRGRGSKQGNHYLKAAFSQAAVHAVRCYPKVRRYYERQLKRHQGRGRQMICYNIIAHKLAQAAFHVLKEQTEYREELLFGR

SEQ ID NO: 387797 - protein, 343 aa, unidentified
MHIASIGIDLGKTNFHLVALGEHSKVVVRKKFSRKQLLAYTANLQTALIGLEACSGAHFIGTALRNQGHEVRLIPAQFVKPFLKSNKNDFLDAEAIAEAVARQNMRFVPIKTDDQLDLQAMHRVRDRLVHRRTAVINQIRGFLLERGLAFAKGPANLRNRMPAILEDAEQNITPRMRMLLEQIWQEWKRLENDIIIISEEIERISKEDAACQRLRQIPGIGPLVSTATVAAIGNGAAFSKGREFAAWLGLVPRQHSTGGHAKLYGISKRGNIYLRRMFIHGARAVLLRVKNKTGGFGPWVHQLELRAPRNKVIVAIANKLARIAWAVLSKQMDYRPTPAVATA

SEQ ID NO: 387798 - protein, 343 aa, unidentified
MAQSNLIAIDLAKNIFQVAQFQGSKLKSNKQASRRALLELLVKAKPSVVAMEACASAQYFARTAQSFGHKVMLLDPLFVKAFRQGQKTDANDAIAIAIASKVPNVRTCKILSIEEQALQSLSKVRALADKQKIQLSNQIRGLLLEFGIVINQSEAAFKAAIPDILEDAENTLPLELKHALALTYALYQQQCDNKVELQKQIERIVKQNDGCQRLMALEGVGPITAIELLSFLGDTTQFSNGRSAAACAGVTPLQHSTGGKAKIGCIPKRRGGALRRNLFLGARSIVSKLKNREASTEKERWIKSLLIRKGVKCAAIALANKTMRTAYALLKKGTNYEPTALTA

SEQ ID NO: 387799 - protein, 411 aa, unidentified
MEVVHARCAGLDVSKKDAKVCVRIAGAGRRKTVETVTTWSSMTNQILALRDHLIAERVTCAVMEATGDYWKPFYYLLEDAGFEVVLVNARHVKNLPGRKTDVSDATWLAQLGAHGLVRGSFVPPEPIRQLRDLTRARTAITRERGREAQRLEKLLEDAGIKLSAVASDVLGVSGRAMLDALIAGDRDPAALADLAKRRLRSKIPALTEALTGRFTEHHAFLARVHLDMIDHHTQAVQELTARIEALMEPFRGFHTLICSIPGIATLTADVIVAETGADMTRFPTAKHLASWAGTTPGNNESAGKVKSSKTRPGNPYLQGALGAAAMSCSQNPRTYLGARYRRIATRRGPQKANVAIQHSMLTAIWHMGTTGTLYDDPGGDYFTRLHPDRAKNRAIHQLEAMGYRVTLDHAS

SEQ ID NO: 387800 - protein, 326 aa, unidentified
MPGDGHVTKAIKEGGDMDVIIDKGCGLDVHKETVVACVMGEGIKKEIRTFSTMTEDLFRLKSWLSEKGITHVAMESTGPYWKPVFNVLEDSFEVILANARHIKNVPGRKTDVKDSEWICKLLRSGLLAASFVPPQAIRELRDLTRYRRKLTQSISAEKNRVQKVLEDANVKISSVVSDTFGVSASRMIEAIMAGNLNPESISDLAVGKLRGKKEELKKALVGNFQEHHRFMIQASLDHIGSLEKIIAGLDAEIDRELKDYHKEYELLQTIPGVKEQGAASIIAEIGADMGRFPSEGHLSSWAGMSPGNNESAGKKKVERRPTAIRI

SEQ ID NO: 387801 - protein, 532 aa, unidentified
MATKRNSRQSDAGRPFVIGKPNGIIQPRVQAVGPEHFGIVAVDCAKARSKWMLCDFYGQVLIPPTVVEHRRTELQLATVQLHEACERHGLRDHIVAVEMTGTYHRPVQRAFRQAGSETRLVHPFASRHYRLPASADTKTDDKDLEAIFRAAVNGFGLLEPPADETYQRLQLLARHRRDLVEKRAKLQCQIRQLLERCLPGYAALFLNNDLWVRPLALFIARRAGTANAIRAAGVKGVTQWLHGEKLRFQSRTVERLVTWSGNAADADPLAPHLARVWQALHDDWLEKTKQITRVERDMAEFLVKMPYLLLLSHPGINVISAGELAGEMGPIEHYAHAKAITGRAGLFPSRYQSDQVDRADGPLAHHRNARLRAAWLRVADNLIKCNAHFHGKFELWKQRGVTGRDIRCRVANRVTRAVFQMVSGRQMFQHPSRLDRQYVLDKLLTFHQEHDTPPHEILRDLQRAADQIPKHEQAAEAKPLQQRYAKYRHSRREGPQQINTILLAVLARYGITGLESELEAQGPIAIASVPST

SEQ ID NO: 387802 - protein, 418 aa, unidentified
MRVSGWAGRAVGLDVHRDFCVVAICEDGVVRSGGRVASTPEGIGTLAASLLRSDRVALEVTGSAWEVARLLEPHVDRVIVVSPDDTGIVQARAKTDRLDARTLAGLLSRGELESVWMPDERCRVMRRRLARREQLVRARTRSKNEILAVLQRRLQGRPPCSDLFGVKGRRWLAGLELPEEERESVDAGVRHIEFLDTEITGVERLIAQQALTWPEIRRLMTIPGVNLVCAASFLAAIGSADRFLTSRRLVAYLGLDPKVRQSGETPARSGRISKRGSASARWALVEAAWSVVLQPGPLRAFYERTRARRGHGKAIVATARKLATLCWCMLTRDEDYAHQQPSLTRQKLRRLELTAGAPKNTPDAAGRWATNPRIREAERDIARQAQASYERMVRDWQATAQTRKKKAGASVTPERTQV

SEQ ID NO: 387803 - protein, 410 aa, unidentified
MEVLHAHCAGLDVHKDSVVACVRHMVGGKVTTRVKTFMTATRELMALSEWLSAEGMTHIAMEATGVYWKPVWHILSEGEFELVLANAAHVKNVPGRKTDVNDATWLADLMAHGLIRPSFVPDEPTQQIRDLLRTRKQFVRERSSHTQRIQKTLEVANIKLDSVISDILGLSGRRMIEALIAGQTDPEVLAALAHERIHATRVELEASLRGRVTAHHRFMLRLHLNHLDALDAAIAVIDQEVDGHLEPFRAAIEMLSTIPGISSLSAEVLVSEIGIDMSRFPSPAQLISWAGLCPKNDQSAGKRRSKRMKKGAPWLKTTLIQCAWAATKKKGSYLQAQYLRLRSRRGAKQAIGAVAASILTAAYHMLKNGTLYQDLGANHFDNRAKGKQVLRLVNRLQNLGFAVQISPMAI

SEQ ID NO: 387804 - protein, 317 aa, unidentified
MSYTSRFVGIDISKSSFDLCILPDSRSASFANTAAGVARFLAFVAPLKGIERFLLEPTGGYERRVLDALLSARMPVARVNARQVRQFAGACGQLSKTDRIDAFILADYGRRMETELVLPASPAQMNMVSLVARYRQLSHMIVQEKNRREKLASRADDKTRVWIEESLQFLLDQRQAVVEAMTACLEADKALSGKVAVMMSLKGIGLRTACFLLAGLPELGSLDKGQIAKLIGVAPLNRDSGQMRGKRMIAGGRKPVRDALYIAALPAIRFDPHIRAFFEKLKSKGKPGKVALVAVMRKMIIILNARMREHHANAIDT

SEQ ID NO: 387805 - protein, 379 aa, unidentified
MKTNSDTTTALYIGLDVHKEKTSIAIADPGSKGEVRLHSEVATTQVALDRAIRRIAKSKNISVSQISICYEAGGCGMWIARMFMKMKAPCTVIAPSLIPIKSGDHVKTDKKDAIKLARLHRAGELVSVFVPDETDEAVRDLCRARVDAIDDRRRAKTRLLALLRRLGFNYSGKTTWTDAHRRYLRALSLPFPAHGVILEELIGQIDQLEARIARYESHMEHLYADWRHKPIVDAVMGLKGFQMIAAMMIVSEVGDFVRFTHPKQLMSYLGLTPGEYSSGGKSKRTGITKCGNSHARWILVECSTHYSKEAKISAHLSKRQENLPRWIREISWTAQNRLYLRSSSLRKRLMHHNKIKVSVARELCGVIWEIGYKIQSKAA

SEQ ID NO: 387806 - protein, 411 aa, unidentified
MEVMNKRCCGLDVHKESVVACLMVREGGKVHKEVRTFLTMTLDLVVLHDWLKAHQVTHVAMESTGIYWRPVFNLLEEDFTVLLVNAAHIKTVPGRKTDVKDCEWIADLLSHGLLRGSFIPPEPIRDLRDLTRYRKSLTDERVREVNRLQKFLEAANIKLSSVANDVMGASGRAMLEALTAGSTDPQVLSELAKGRLRKKLPELRKALEGRFRPHHRFMVGEILTHIDFLDEAIERISQEVSCRIVPFSKTVEVMDLVPGINQRAAEGILSEIGVDMNCFPTDGHAASWAGVCPGNNESAGKRKSGKTRKGDRWLRRYLIEAAWAASRKKGSYLSALYHRLVVRRGKKKAIVAVAHRLLVIIYHLLKDQGSYRELGPDHFNKVNAAHVQRHHVKRLESLGFKVILEPVAKAA

SEQ ID NO: 387807 - protein, 376 aa, unidentified
MVRPCSCPASDKLARGTKTRSTPCLQQHRPIAAIGIDIGKNSFHVVGQDTRGQIVLRQKWSRHQVEARFANMPPCLIGMEACVGAHHLSRRLKALGHDARLMPAKYVRPYSKGQKNDFRDAEAIAEAVQRPTMKFVATKTADQLDLQALHRVRERLVSQRTGIINQIRAFLLERGIAVRQGQRFLRAELPRILATPPDVLSSRMVRIIEDLAGDWRRLDERVEGLSNEIEAIARQDAGCERLMSVPGIGPIISSAMVAAIGAGDVFTKGRDFAAWLGLVPKQISTGDRTILGKISRRGNRYLRVLFVQAAWVVLIKPKIWERHGLKPWIEAARKRLHHNVLAIALANKLARIAWSVLARGRAFEARKMDQAANQSA

SEQ ID NO: 387808 - protein, 308 aa, unidentified
MLGVGIDVGKYFLDLARYGDSRIHRFDNNSVGIGRLIEHLAGAADLFVVLEATGGYEMAVLHALVHNGLTVSRVNPRQSRSFARASGQLAKTDALDAIGLADMAHCLHLRLPRYIEPEPWQSTLAAYVTRRAQLVIAVQQQEQQITALRVPALRKAAQRTLCALNSERLELEQQILALCAPQLTPAWRSIKGLGPIVQATLLSLLPELGSLSRQQIAKLVGVAPLNRDSGTLRGQRRIFGGRARVRAVLYMAALVAVRWQPEFKAFYRQLRARGKLAKVAIVACMRKLLVVLNARIRDERRQRTLVVA

SEQ ID NO: 387809 - protein, 353 aa, unidentified
MEKITTVGLDLAKQVMAVHAVDARGQVVLRKVLRRDALLAWSAVLSPCVMAMEACGGTHHWARELTRQGHTVRIMAAEFVKPFRKSGKNDANDAEAICTAVRQPNMRFVAIKSVQQQAALCVHRLRQGLVEERTALINRLRGLLTEFGVVAPLSPEKLRRELARCQDPEDLRLPAAVRELVGDQVTALDQLEARLAAYAEQIAAQARGSEVAKRLQSIAGVGPTTAAAMVATVGAPQEFRNGRQFAAWLGLTPKQHSTGGKTRLGRITKRGDAYLRTLLILGAKSALQAALRKPPEIRHRLQQWIVAVFSRIGYHKTLVAIANKHARIIWALLVKGENFDVRRLVPATDAAAA

SEQ ID NO: 387810 - protein, 310 aa, unidentified
MGGVNAAIEVGKHKLEIVLGSAGELWSETNEPRAVKRLAKRLAQAGCMRVLIEGGSYQNVLVAALRAAQLPVVIINPRRVREFAKSIGQLAKTDRIDARVLALYGERVQPPLRELPDEQSQAWHALWVRREQLIEMLVMEQNRLEHASKVLHRALRAHIDYLRKQVKRADDDLNRAVRDSTLWDKYELLSSVPGVGPVLSVALLSDLPELGRLNRGEIAALAGVAPFNQDSGTLRGQRKIEGGRPRLRRVLYIATVAAVRCNPVLKPFYLRLRAGGKPAKLALVAAMRRLLLILNAILKSQSAWRPPCPA

SEQ ID NO: 387811 - protein, 386 aa, unidentified
MYFVGIDISKYKHDCFICTETGEVIEENLSFTNTNEGFNQLLNLLKSLDNNQEIRIGFEATGHYGMNLKLFLEKNNYSFMEFNPALVKRFISTQTLRRTKTDKKDAMLITKYLISVDYKPHPRQFYHKYSLKSLSRMREKLVKQRSYYEVQITNTLDIIFPEFKPFFDNAFSKTSLYILSKYKTADKIKNMKDFDSIRKASRGKFTYANFIKLKELAKNSIGISNDIFETKLESLLNLHSQIEVEIKKLENKIETIIQNLNPPTLSIKGIGYISCAGIISEFGDLSRFKSADACVAFAGIEPSISQSGTESHTGHMVKHGSGHLRYFLMNAADYVFIHEPIFTEFYYKKRNEGKSHRVALTHVAKKLVRVIYKLESENIKFNSDIK

SEQ ID NO: 387812 - protein, 389 aa, unidentified
MKIFVGIDLAKLNHFAAAISSDGEILIEPFKFTNDADGFQLLVSKLESFDKNSIIIGLESTAHYGDNLVRYLVAEFYQVCVLNPIKTCQMRKNNVRKTKTDKVDTFVIAKTLMMQDDLRFITFFDLDMMDLKALGRFRQKTIKQRTRLKIQLTTYVDQVFPEIQYFFKSGLHQNAVYALLKEAPSPKEIASMHMTHLANLLKVNSHGHFTKEQAKELRVLAQKSVGANDSAISIQITQTIQQIELLDSQLEKIEAEMTDIMKFNDSVIMTIPGIGYINGGMILGEIGDIHRFSNPNKLLAFAGLDPSVYQSGNFQAKTTRMSKRGSRVLRYALVNAAWNVVRNNATFKAYYDAKRSEGRSHYNALGHCAGKLVRVIWKMLTDEVEFNLE

SEQ ID NO: 387813 - protein, 429 aa, unidentified
MNDVTDRHYLFNQMRSSVRGSEKYLLVGIDVAKNNHHAFFGTPNGRTLRKNMVFDNSTKGFESLRSIARDLQDQHGLVEVVYGLEPTASYHKPLAEYLIRRDEHVVYVSNVAVAKNRALLDGRWDKNDKKDAANVADLVGQGRCLYYEVPEESLRELRSLIAFRIRLKKEEHALRMRLRNNVFAQYFPELDKLYIRAGQPDDLVLSIAQHCLDPRDIAGMTFEAFLKLITTRKIRIEQVKRLRELWEAAKESAGCQVHDAARWEARSLVSKLKSVRETVKDNEKLMAKVAQQFPEYECLLSIPGFGPIVSAMVLAAIGNASRFENRKQVLRLAGLDLSAERSGKNSDSAKPVISKQGKAALRYALVQAAMVASSLNPDIRSYYSKLLKGRELERGIKLKMKVKLAAKLLVVAWTLMKSREQFNPSCFTG

SEQ ID NO: 387814 - protein, 345 aa, unidentified
MQNYTVLAIDLAKHVFQVVKTTGYGKAVFNKKMNRAELKELLRKEPKAMVVMEACGGSHYWCRLAESFGHQVKALPARQVKPFRQGQKTDANDAVAIATAARQPHLKPARVLSEEEQGLQCIEKMRELQIAHKTALSNQLRGLLFEFGIVMSKSDAALKKALPEILEDAENGLPGGFRTVLAQMWALYLTISSELEKLSQFQHQLTLQDEQSRALSALEGVGPVGALGLKLAIGNGVHFKNGRQAAACIGVTPVQHSSGGKENIGSISKLSGHKKLRSVLIQGAMAVLRHLAKREARNTKEQWLKALVQRRGTRIAAVALANKTVRTAWAMLSRQQEYQAPGLLA

SEQ ID NO: 387815 - protein, 381 aa, unidentified
MQKQPPPHSLFWAGIDLAKATFEAALWGHEEFRTMRGRSFPRGKEGASALLAWLREQAGPGGRIGLVMEATATFAEELGTWLLDLDPGLHVAIVNPLQTSAFLRSLGLRNKTDNLDAKALAHYGAERRPVPWEKPRSELATLKDLARVRMDLVHARTAMALRLKDHARASKPAAKAMASVIRTLDAQIKVLEGEIRKQLQAHAALAQQADRMDSVIGVGLLTAVTVMTELGDLRRFARSRQLTAFAGMSPRRKESGTSVHGKPRLCKQGSTRVRAALYLAASAAVRFNPDMKALYDRLLTQGKARRGDWLSVRSCANFSSSCGPSSRPTMTGFPAPEPPEGNASCYLDGELTTSLNISLPPLRSSPRCRRGRLTSLGPQPS

SEQ ID NO: 387816 - protein, 444 aa, unidentified
MEVLYSRCAALDVHKKTITACRVHTKSRGQKVQETTTFGTTTAELLRLLDWLLEWGCTHVAMESTGVYWKPVYNILEGHVEILLVNAQQVKQVPGRKTDVSDAEWLAELLRHGLLRGSFVPPRPQRELRDLTRQRSKLVQERAAVVNRLQKVLEDANIKLASVVSDVMGVSARAMLKEIVAGQTDPSVLADLARGRLRHKRAELEQALRGRVSDHHRFLLVTHLTHIDFLEEQIALFDREIAARIEQTPPPSMTPSQDSPAAPSEPGGGEGAPLTYAQAVELLDTIPGVDRRLAEVMVAEMGIDMSRFPSERHLASWAGVAPGNNESAGKRRSGKTPPGNRALRTGLVQAAHAAVRKKGSYLSAQYHRLAARRGKKRAIVAVAHSILVMAYHILSRQEPYRELGGNYFDERKREFVVNRLIHRLEKLGYQVVLEFKPVAALATT

SEQ ID NO: 387817 - protein, 391 aa, unidentified
MLPTRLREQNESDKFLIKGDSMPVRRILAKTIDTDLEYEAIGIDLAKNCVSAALLTTDGEVICIDRLDYSELEKSAQTLSPTTFAMEPCTEMNYLVQKLEAWGHRCLIIGGKNVRDYIESHFSGQKTDLNDAQALAFLTQDTQLRTITAKDLEQQKYASLTTLREQYIKQYRQTIVSLKGICQAWGLNISKGISGKARLRELIENHTAFPKELREGLVDMVTHAQTTQKTLNRITKTLEELAKNDQICQLIQTIPGLGPICSCRLRATIGDIKRFKKPKDFPAYYGLVARSIATGHNEKKGKITHRGDKTMRSLMVQGAGSVINMATKGKLKSRQLTKWVLKKQKEKMPWGKLVCAVAAKLLRIVRAVLNSGRPFNPKIAGVAKCSLPKVL

SEQ ID NO: 387818 - protein, 323 aa, unidentified
MTVYLGIDIASKKFDVAELCDGNYRCKAFENTSAGFLALYQWLGQSTMPDIHACLEATGDYGTSLATFLYENKIKVSVVNPARIKGFGASELSRTKTDKADSKLIARFCKAAVPNGWKPTPAPVRKLQALVRRISALSGMLRMECNRRENADANIQASLDRIISLLKTEIEFVRQEIKDHVRSDDELKKQDALIQSVPGIGAVSSNLILSFMSGKGFRKAKEVTAYLGLNPRHHQSGSSVRGKTRMSKMGDARLRSALYMPALVALRYNPDIKAFGQRLLLAGKPRMLVVGAVMRKLIHIVFGVLKSGTAFSSRIAVHSVVTS

SEQ ID NO: 387819 - protein, 342 aa, unidentified
MNAVHTVVGVDVAKNVFQAYWVVAETGEIRNMQIKRAKFLEHFAGRPRCLIGMEACGGAHHWARELSKHGHDVVLLPAKAVGAFVAGNKSDAIDARAIWTAAQQGGIKRVAVKSEAQQAVLALHRMRQQLVKVRTAQSNALRGLLMEYGEVFRQGRASLARGIAAALERIEQRLPRVVVESLMELWQRVGQIYGQVKQIERRLKSLLTEDRNAQRILQIPGVGMLTATAVSATMGQASAFASGREFAAWLGLVPAHTGTGGKTRMLGISKRGDSYVRTLLIHGARSVFSSTKHPGPWLQKISQRRPLNVAVVALANKMARTIWALLAHGRTYQPDYVSRAST

SEQ ID NO: 387820 - protein, 345 aa, unidentified
MMVTLGTDAHKRSHTIVAVDAAGAEIGSVTVAATTDGHLRAVGWAAQYTNKQWAIEDCRALSRRLEADLLGVGERVVRVPPKMMARARATARQVGKSDPIDALAVARAALREPDLPVAHLDGPSREVRLLVDYRESLVRDRTAAQNRLRWRLHELEPGYDPPAGSLNRYRTLDEIDELITTHDSIVADLARRETARIRQLTREANQLERDITQRVTDLAPTLIAIPGCGALTAAKLIGEAADITRFTNRDAYAMFAGVAPIPVWSANPNRFRLNRGGNRQTNAALHRIAITQMRIHPDAQAFIKRRIETGSTKREAIRILKRRLANVVYRTLHTDTQTTPLAQAA

SEQ ID NO: 387821 - protein, 309 aa, unidentified
MLTAEADKRKTKAVVNTAAGVQALLAWCAKHGAQPAQLHAILEPTGLYHEQAATALPQVRVSLVNPAQARDFAKALALRSKNDALDSYVLARYGQTLSPALWHPAPLHARQLRALLTRREALSKDLLRELNRKEKSQFSPSAPVVDGSIDKAIAFLREQIKQIERAIDQHIDNHPDLKQDCELLNSIPAIGPQAGNAILAVMHNRHIDSAQSLAAYLGVVPVQRQSGSSLNSCARLSKAGPSQVRATLYMAALVGTRHNPHIRALYQRLLKAGKSKKAALGAAMRKLVHLCFGVLKNRIPYQPNYAMNG

SEQ ID NO: 387822 - protein, 480 aa, unidentified
MRADKRWHTRKEKKEWARRLQSNDPGLDVIHPQAAGIDVGNASHYVAVRPDRDLEPVRQFKCFTADLHRLADWLKGCGVRTIAMQSTGVYWIPLYDILEERGFEVYLVNARHTKNLPGRKSDVQECQWLLKLHTYGLLNNSFQPTSQIRVLRTYWRQRAEHVQAAASCIQRMQKALTQMNVQLANVISDLSGLTGQLIVRAIVGGERDPQKLAALRDRRVHASADEVAKSLEGNWRPELLFLVKQEVDTYDTYQKRITECDEQLQQQLASFASKATGVAAAPASELQGDEQPKKTKTRPKKLAKNAPRFNLQQELQRVAGVDLTRIDGIDVMVAQTILAEVGLDMGRWKTEGNFVSWLGLCPDNRITGDKVVGRGTRHVVNRAATSLRMAANALLRSQTYLGAQYRRLRTKLGAPKAITAMAHRLARLVYRMLKYGQRYVDKGANYYEQRYRNQQLQFLRKKAAQLGFQLTEAEAKAQTA

SEQ ID NO: 387823 - protein, 338 aa, unidentified
MEAYAGIDLHSSTNFTAVLGDHDQRLFGKRLPNRMEAVLSALESFKENLKGVVVESTYNWYWLVDGLQAHGYTVHLANPSAIKQYEGLKHTDDKWDSFWLAHMLRLNILPEGYIYPKENRPVRDLLRRRLLFVRHRTSHILSLQSMVSRNHGTRISCNAIKRLDPGDAALMFDHPQLVAGARNSIAAIRFLTNRIKDIEREVSSQVTLRDEFKALLTIPGIGEILGLTIMLEVGDINRFPQVGNYSSYCRCVRSERLSNGKKKDENNRKNGNRYLSWAYVEAANFTIRWCPHAHRFYQRKMAKANGIVAIKALSNKLARASYYLMRDQVPYDAGKLFR

SEQ ID NO: 387824 - protein, 420 aa, unidentified
MKSFVPVAGVDVSKRFSDLCVLSPDNNVLLRQKIYHDMVSMKLAEKKLHEIELECGARPVVVMESTSHYHLILFQFFTDAGFEVIVVNPIQSGALKNINVRKVKNDRVDAYRIAMLYRLKVLRPSQIPTSSLRGLRLLTRQRSELKGDVARFKNRLTAYLDQIFPGYGEVFSDVGGSASRAVLHMCPTPEKLLNADGSLLAKAICEAGNKGPKFGAEKAAKLREAAGSAQVIGVRSASNASLIKNVLDIIEGLLAAIQRIEGEIKELVTQDTRLDEDVKLLCSIPGIGFSSAVVIAAEMGNISLFRKPKQLAAYFGLDPGEKQSGTFKGRKNKLSKRGSPQVRAVLHMAAVSSVSQNRDGTYRNPVLAEYYERKCAEKPCKVARVAVMRKLSNIIYAVLRDRRPFELRTPQEHMALLAAA

SEQ ID NO: 387825 - protein, 350 aa, unidentified
MVTLGGDSHKRTHTLVAVDENGRELAHKTVRATSVGHLEAMQWAVRWSARTWALEDCRHVSRRFEGDLLAAGELVIRVPSKMTGGERKVARTSGKSDPIDALAVARAALREPSLPVAKLEGAGREVRLLLDHREDLVGERTRIENRLRWHLHELQPEVEIPPRMLSRKRTLVGVEQGLRRHSGVVAEIALELVARIAELTRRINQLELEIKRRVELLTPALLQLHGCGPLCAAKLVGEAAGVSRFRSRAAFAMNNGTAPVQASSGNQKRHRLNRGGNRQLNAAIHRIAVTQLSRGGPARDYVTRRLALGNTKTEAVRALKRRISDEVYRRLLQDERRLESAVSTTTGAAA

SEQ ID NO: 387826 - protein, 315 aa, unidentified
MANLKKSKTAVNIGVDVGKQFLDVCIHEKALHWQEDNTIEGIKCILKRLSYYKVERLVMEATGRYEFELAQAAYSRGIPVCIVKPLRVRRYAGAIEQLAKTDKIDAALIAEFAFKVQPKVTPQKSKNLIAIKNLIARRRQLMGLRTQELNRIKIMGKDLAVSIRRIIRVLDAEIQRMEKRLAQHVEQQAVWTEKQTILKSAPGVGDTLVYTLLADLPELGELNNKEISALVGVAPVNRDSGRMRGKRRIQGGRANIRTVLYMATLSATQCNPVIKAFYKKLVAQGKNKKVALTACMRKFITILNTMVKNQTEWAI

SEQ ID NO: 387827 - protein, 347 aa, unidentified
MIIIGCDLHTRSQQIAMLDTETGEFEERRLEHEDGEAQRFYAGLKEPALVGMESRGYTRWFADRLAELGHELVVGEAGKIRAMETRKQKHDRRDAEHILNLLLRGDFPKIWLPSAEERDVRVLLEHRHQLVELRTRAQNGLQAIALSYGLRRRRRLWSERGQEELKELPLREGMGRRRADLLRLVRQLNIGIQELDGRIEQEVAQREEAQRRMTHPGVGPQTALATVLVLGPVERFPDDRHLTSYLGLIPQEDSSAGRQRFGHLTKQGNRLLRWLLVEAAQTASRSDPRLRRAYRRLAFRKGRAIAKVAMARKLAIRLYIMLRDKIDYTEFCRRGSHAGMLEDVALV

SEQ ID NO: 387828 - protein, 374 aa, unidentified
MNFIGIDLHTNKFTCCYRDEASSTEDPKKGRTIETFALDAEGLRSFYMTLTADTYVLVEATITSFSFVRLFKDRVKQVIIANTYELKQVSLSRCNTDKIDADKLCRIIKAQVLSGEQLVSPVTLPPVEIQELRGLFATYRLFKKQNTQLKNRIHSLLKEQLHGFTQEEIFGKRDRQEIRAISPGSPMHFQVNLLLDRLERDEADVELLQDKILLHAAPFMTQIDILTSMKGISVFIAIAIIADIIEVSRFKNSKAFTSYLRSAPRMSNSNTSTSNRGTNKMGRKLAATLIVNSLNHVLDASPKLNRWYDRLCQYKKPGMVRTGLRRRVFAEIYQMLKKGEYHYWRDIKKHEVKMAQYQRFLEKVNNNDIIQISA

SEQ ID NO: 387829 - protein, 362 aa, unidentified
MSSIALERTDVIVGVDTHKDEHVAVVIDGLGGRLGEYYLSVTNSGYTELLAWAKSLGRVHAFGVEGTGSYGMGLARFLRRHAQTVIEVSRPPRAGQRRLDGKSDPIDAEQAARHVLGGQATATPKVSDGAVEAIRLTRIARNTAVKAHTQAIVALKATLVTASDELRAELEPLSDYKLMTACVGLDSDGDPSDPDVAMRHVLCSLAGRWLALHEEIKIHTKRLKKLTTATAPRLLDAFGIGPDIAGELLVAAGDNTDRIRSDAAFAKLCGACPIPAGSGKTGGRHRLNRGGNRQANAALFRVVIVRMRWHAPTIAYVKRRTTEGLSKKEIIRCLKRYVAREVYNLLPPPRDNEKALSRACDL

SEQ ID NO: 387830 - protein, 391 aa, unidentified
MSMYFIGIDISKYKHDCCIISAADQKIVSKVTIKNNKAGFDELLTIINSLSNPEDIRIGFESTAHYALNLELFLESSLLTFMEVNPMLISEYKKSKTLRRTKTDSVDCESIARWLMTVEYKPHSKGFYHAYSLKSLTRLRDKLIRQRSFYLIKITNVLDHTFPEFKPFFNERLSKTALYLLENYGSAEKMARMNSASYEKLRSLSRGKFSPQQFLRLKELAANTVGVNNSIFDVELNSLLSLYKSLVKEINTIEKEINKLIEEVHPHYMSVPGIGPLSAAVIYSEYGDISNFTNPGQMLAFAGIEPGINESGTESHGGKMVKRGSSQLRYTLINCCLPLIRFDMTFATYYAKKRGEGKPHRVAITHVAKKLIRVIYALERQDIDFNAQKLR

SEQ ID NO: 387831 - protein, 311 aa, unidentified
MTVCGIDVSKDSLDVALGSSGPRFRVQYKECGIEKLIEKLEGVELVVLEATGGWELKVCMALVDAGLRISVVNPRQVRDFARATGQLAKTDAIDAKILAQFGESIPARQWSAPSAILQKLTALVRRRYQLVDDRKRERTRKALATSEELESLGRMCSVLDEEILLIESKIQTLITQCDDLQASNERLQTVPGVGPVTAAAVLTGLPELGKITGKQAAALVGAAPFAHDSGTFMGKRSIRAGRARVRKALYMAVLNSVRCEGPLKTFYRRLVDQGKPPKVALIACINKLIRWLNAMERDEIMWSQMKTATLP

SEQ ID NO: 387832 - protein, 387 aa, unidentified
MRRSNSRIVGLDVHPDSFAGAILEGSDPWEARVISTSTRVGLPMLEKWALHHTRESDCLVMEASGNAFAVAERLRAMKRKVLVLDSHSAGKVGKTYCATDRVDAIKIARIYLSALSPVVWQPDQKTRERREVFSAYQAVVKEATRLKQQIKSMLNEHCVRLESGFRLSHPRAIGRLAQRRQWTQAQQMLLQQLHAGLVGARARRQQLRHYMAQEILADPDLLRLTRLCGINLITLYGLIAAIGDIKRFASPRKLSAYFGLNPSVDQSGNYEGSTALRRHGRGAMRALLVQSAKKLLQVDNPLQKWGLAIAMRRGRNIAAVAVARKLCVAVWHVMQGHVIGAIERMDTLHTKLHKLATELGVPTIKQLGYETKEAFVQKKLYLLRSYP

SEQ ID NO: 387833 - protein, 376 aa, unidentified
MDYCTTIGIDVSDRTSKVCVMSKEGGARRVLVETTCATTKEGFGECLSKFDRAWPVVFETGTHCRWMKRHFESMGFKTIVANPSEVKLITDSNAKNDRGDARKLARIALADAELLKPVKLRGEGFQRMLRLHESRLLLVKCRTSMVVQIRCFAKSCGFRLPDCPAGRFHELDRSSWPPDFEQMVWPMMDMVETTNLKIAAYESMIRKLAATPEFKAMTERAREVYGVGLIGSTVVVAAIDGDASRFAHARDVGPYLGLTPKKSQSGESDPQLGITKAGNSLVRKVLVECANVVMMDNAPDTDLKLKGLRVGAGGGKVARKKAKAAVARGLAVLVVALLKDPGREYVPLSEDGRRGFERYHAERQCLPARKAAEKAP

SEQ ID NO: 387834 - protein, 401 aa, unidentified
MNCVGIDVSKGKSMIAVMRPLGEMVIPPFEVGHTDAELCELSRRLGGLEGETRIVMEATGNYHLPVASFLYDSGFYVSVVNAMLVHGYGNNNLRRVKTDKKDAVKLANYGLDHWLTLPRYIPEDEVRLMLKTTYRQYQQCTKVQTMLKNNLISLLDTAFPDANRLFTSPTRADGSEKWVDFISTFWHCECVCGLSEKAFTAKYQKWCKRHGYNFSQDKALDIYASACGHFSVMPKNDTTKILVEQAVSQLQATSAALAALRNEMQSLAASLPEYPIVMGMFGVGPALGPQLMAEIGDVRRFHSKKALVAFAGIAAPPYQSGQMEIRSRSISKRGSAVLRRTLFLVMSAILRCSPADEPVYQFMDRKRTEGKPYRVYMMASANKFLRIYYATVKQYLDSLEA

SEQ ID NO: 387835 - protein, 376 aa, unidentified
MNYSTVYVGMDVHKETFSLCCYTNEKEEAKYPQKVKGHYSKVLNYIEAMRFHYGDDALFICGYEAGCLGFTLYHQLTSHGVKCIILAPTTMLQPKGKKKIKTDKRDAALIARCLAHHDYKPVHVPTEQDEQTKEYIRMRDDHKLALKKVKQQILAFCLRHNYRFDGTCSNWTQAHLKWLRALQLEGLYQETLKEYMLTYDQLVDKLERLDKRIEELASNETYKEKVSKLSCFIGVKAVTALAIVTEVGDFNRFVSARQFSSYLGLTPGENTSADDQNRLSITKAGNRHVRLLLVEAAQSLARGQVGFKSKALKTRQAGNLPEVIAYADKANERLRRRYYRMVLHNDKKPNVAKTAIARELACFMWGMLTGKIAALP

SEQ ID NO: 387836 - protein, 295 aa, unidentified
MEYYAGLDVSLRSCALCIVDTKGKVLFERELACEIKDIAECLSGFPHPIERVGFEAGTMSQHRFFGLQAQGFDVVCMEARQVNAALSAMRNKTDKNDARGIAQVLRTGWFSPVHMKSREAHGQRALLSTRKALLNKTIDLANEVRGLLKIFGLRLPKSVSHGSFDDIVRPVIQMDDVLTHALLPLLDARIALYQHYLELDRRVKRAASHDDVCMRLMTVPGVGPIAALTFKAAIDDPSRFKSSRTVAAHFGLTPRRYQSGEVDNPGRISRAGDRDVRSTLYSAANAMLMRTMWCS

SEQ ID NO: 387837 - protein, 451 aa, unidentified
MPKSRSTSKPAGLPIIHPFAAGIDIGSRFHVAAVSPDLCDEPVQTFQAFTSDLERMADWLVATGTKTVVMESTGVYWVAAFEVLESRGLEVILANAREARAVPGRKSDVNDAQWLQRLHACGLLRASFRPGRDIAELRAYLRARERHSDYAAAHIQHMQKALTFMNIQLHHVISTITGVTGMRIIRAIVAGERDPERLAAMRDVRCKESSETIRAALVGNYQPEHLFALKQALSLYDFYQQCIDECDVEIERTVAGLNIDRPVPEAPLPKAKHRSKMPSDPNFDVRSAMYQLAGTDLTQIHGIGPFLALRLIGECGTDLSRWRTAKHFTSWLTLSPGCKISGGKVLSSHTRKTSSRITVALRLAAVTVGRSNTALGAFYRRLAGRIGNAKAVTATARKIAVLFYNAMRYGMDYRDPGADHYEQQYRDRVIKQLHRRAAQFGYALQPQETPA

SEQ ID NO: 387838 - protein, 371 aa, unidentified
MNSILYVGMDVHKESYTLCCYSFDRDKVEYRQTIPSDYRIVLKYLEQVRRKYSEEVEFICGYEAGCLGYSLYHQLTAHGVKCIILAPTTMGITNTNRVKTDRKDAANIARCLAFHTYSAVYVPDSEDNAVKEYLRMRDDQKLALKKIKQQITAFVLRLGKQYTGGKSLWTENHLKWLRGLDLTLLEKETLQEYLITYDYLTDKLERLDARIEELARNERYGERVRRLSCFIGIKPHTALSLLVEVGDFRRFEKAPNFAGFLGLVPGEDSSGGGRNRLAITKAGNSHLRRLLVESSQSYSRGTIGFKSKELKKRQEGNPPEVVAYADRANERLRRRYYRMTLKNGAKRNVAIVAVARELACFIWGMMTDEIA

SEQ ID NO: 387839 - protein, 337 aa, unidentified
MERRYVGIDLHRRRSVIYAMTAEGEKVSCVRIANDPVALSLAVADAGEDADVVIEATYGWYWAVDLLQADGHRVHLAHPSGNDWGNRRVKNDERDARDLADLLRLGRLAEAWIAPPATRELRELVRYRAKLVALRSGLKAQVHAVMAKEGVLPGVLDMFGPGGNTQLDALELAPAYTNRIESLRDLIERYDREVAMFERLIHQQLRDHTGYQAIQALTGVGRTIAGIFVAEIGDVNRFRSAAALCSWAGLTPRHRESDTKVVRGRITKMGSRLVRWAALEAVARYHGGTWLQRDFRRITDRRGKNKARVAVARKLLTLVYYGLRDGEIRCVADQQAA

SEQ ID NO: 387840 - protein, 339 aa, unidentified
MMIVGCDFHPGWQQVAVFDSETGEIRELRLHNESGEAERFYRSLPVPTLVGLEACGNTQWFEDLLDRLGHEVWIGDAAAIRASYVRKQKTDRRDAGHILKLLIEGRFPRLWRPSAAERDVRQLLIHRDRLVGIRSRVKNGLQHLMLNKGRQMKFKLWSEAGQQQLRELPLEGWAAQRRKDLLHLLGQITPLIEELNRAVEQAAYANERARLLMTQPGVGPITALAYVLTMGDVSRFKRGKQIGSYLGLIPSEHSSSKRRRLGSISKQGSPFLRMLLVESAQTVTRLDEGFRKQYQHRCHRKMKAVAKVAAARRLAVRLYWMLRSNTAYPEIARIEGSPR

SEQ ID NO: 387841 - protein, 408 aa, unidentified
MEVLYPRCAGLDLGKDTLVACVRIHGREVQQECRTFGMTTRELLALSDWLSTHAVTHVAMEATGTYWKAVWHLLETAFTLVLANAAHIKGVPGRKSDVNDAMWIADLLAHGLIRGSFVPPEPIQDVRDLTRTRKQLVREIAQHTQRIQKTLDIANLKITGLISDVLGVTGRSILRALIAGETDPVRLADLARGTLKAKRAALIEALTGRVTAHQCRLLKLHLHLIEQLEAAVAELDQQLGDALAPFRDAVTRLDAIPGINTIVAQAIIGEIGLDMTRFPTHEDLVSWACLCRRLNDSAGKRKSTRTRKGGGWLKTVLVQAAWAASRTKDSYLRAQFLRLRARRSPKKAAVAVAASMLTAIYYMLRDGTEYRDLGANYFDTLDHSHLTKRLVTRLEHLGYRVELRKVAA

SEQ ID NO: 387842 - protein, 343 aa, unidentified
MKFVGVDLHKKTISLCVMMVVGGKRKVACRKRFNCQDTASIRKFFEGLGTFQVVVEATSSYEWFLLLVEDLADRWVLAHPKKLRVIAESTHKSDRIDAEILAKFLALDMIPEAYRPSKRIHQYRVLVRHRRWIQSRITSLKCKVRHKAAHHNADIASLFSERGLDHLAGIAMSDADRFETENLLEQLALCQEQLKKVDKELRKFAKTAPAAEREARAVLDTMPEVGAVTIDVVLSELGDWRRFRSAKRVVSYAGLDPGSRESDGKARQLKISKEGSRLMRWALVETAWRLTNKYRRWREVFEKLKRNTGSAKRAIVGVARRVLCVMFAMLREGQAYRMPGLAA

SEQ ID NO: 387843 - protein, 409 aa, unidentified
MSNEFQWFLGIDWGSEKHRLCLMECGGKILEQKWVEHSGSALAELVDWLRRLTSGVPGQAAVAIEVPRGALVETLLEHGFAVFSINPKQLDRFRDRYSPAGAKDDERDALVLADSLRTDRHCFRAVRIDDPQIIRLRELSRLEDDLLAERNRLSNQLWEQLRRYFPALLKLSSSAGEPWLWDLLHRAPTPERAAKLKPAQIARILDQHRIRRLNAQQVHEMLASAPLRLAAGAAEAATEHVALLLPRLRLLHQQQADVARRQEKLLQELATPAGETGEHRDAAILLSLPGAGRKVTATMLGEASQAIAERDYHALRCLAGCAPVTLQSGKKKIVLMRYSCNERLRNALYHWAFASIAHDPAAKRFYAASRARGQTHARALRGFADRQLAVAITMLRHHTLYDPNRRAAA

SEQ ID NO: 387844 - protein, 435 aa, unidentified
MEKIRTNVGGIDIGARKVFTSIEGQPVVSHFTFTEDFYKLRDYLLEYKVESIAMEATGVYWVILYEILEQAGIDVWLVDGRQTRQVPGRKTDVKDCQWIQELHSYGLLNRCLVVDADIKELRSYLRLREDHINSSSMHINQMQKALTLMNIRLKEVLSQIHGASGIAIIEAILNGERDKQVLVSLCHRSVLKKKKELVLKALEGRYTEAGLFELKQAHQGYKFYLQQVNECDKRIDVVINRIGKSGAGQELKKKRKAVRHHKPNVENLGPNLLNIFDGKDATLISGITDYTWMQLLAETGPDLTRWPSEKHFTSWLGLSPGQHRSGKMRRNARKKGRPKAGQIFRIIAQGLINSKDVAIGSFGRRLRGRKGPKIAIKAMARKLAVLYWRVMVNGLDYAEKGIQHYEEQILLNKMKSVHRLAKELDLNIVEKQHVT

SEQ ID NO: 387845 - protein, 310 aa, unidentified
MEPLFVGIDVAKERLDVHLQPGGETFTVARNDQGLADLVRRLQPRGVTLIALEATGGYEVLVAATLAAAALPVAVVNPRQIRDFARATGRLAKTDRLDAHTIAVFAATVRPAARPVADAHARLLGELVARRRQLVDMLVAEQNRRRLIEEPALRRRVDAHIQWLEYAVRELDSDIDTTVRSSPIWRATDDLLRSVPGIGPITAHTLIAELPELGRLDRRKIAALVGVAPINRDSGTLRGRRMIAGGRAVVRHVLYMATLSAIRHNAVIAAFYLRLVNAGRPGKLALTAAMRKLLVILNAILRDQRPWQPA

SEQ ID NO: 387846 - protein, 389 aa, unidentified
MLLDHPSDGPTAIRTQFGAIFVSLELSRSNWLITSLSPGKGEKMSKHSVTAGDVAGLMRLFADLRRKAEARTGESYPIITIQEAGLDGFWLHRVLQQNGIESHVVDPASIATPRRRRHAKTDRLDGETLLRALLAYKRGEPRVCAMVVAPSPEEEDRRRICRERRSLIAERITHVNRIKGLLFAQGISGYEPLRRDRRARLEALRTGDRRELPSHLKAQIGRELDRIELLLEQIEAVETERDALLAAARKPASEEAAPDVVTMLLALKGMGANFAAVLWSEAFYRQFSNRRQVAAYAGLAATPWQSGGIRHEQGVSKAGNPRVRTTMIQLAWLWIRHQPQSALTRWFKERSPRGRKRAIVALARKLLVALWKYVTQGVVIEGAVMKPAA

SEQ ID NO: 387847 - protein, 414 aa, unidentified
MEVLYSHCAGLDVHKKTVVVCRLGMDSQRRKVKAIETFGTTTAELLRLSDWLTEGECTHAAMESTGEFWKPIWNLLKGNFELLLVNAQHVKRVPGRKTDVQDAEWLADLLQHGLLKASFIPPIEQRDRRDLTRQRTQLVRDRVRVVNRIQKVLEGANIKLSSVVSRIDGVSSRAILQELVADHLDPAQLDELVRGRLRNKLPELEQALSGRVRAHHRFLLAQHLAHLDFLEEQVAAYSQEIERLTAPFEELVTLLDTIPGVARTTAELILAEVGPDLSRFPTADHLASWAGLVAGNNESAGKRLSGKMRKGSQWLRVGLAQAAQAAARQKNSHLAAHYHRLAGRRGKKRATMAVAHSILVIAYHIIQRHEPYQDLGSNYFDERRKLSTANRLTRRLEKLGYQVAITPLATPAAS

SEQ ID NO: 387848 - protein, 320 aa, unidentified
MEKEKEYVGIDVAKSSMDIAVHATEQRWSFPNDDYGISKTVSLLRKLAPVLVVMEASGGIELTLTAALASAGLPLAVVNPRQVRDFAKATGKLAKTDTLDARVMAHFAATVRPVPRPLPNAQAEKFSSILARRRQVIEMLTAEKNRFGTANKAVRQGIEAHIKWLEQELSNIDDELRQSIQRSPVWREKGNLLRSVPGVGPVLSTTLLAELPELGILNRRQIAALVGVAPLNRDSGTMRGKRTVWGGRAPVRAALYMATLVATRYNPVIRRFYQHLCTAGKAKKVAITACMRKLLVILNAMLKHRAPWCYVNAQMFGLCH

SEQ ID NO: 387849 - protein, 335 aa, unidentified
MKHYAGIDLSMETSHVCVVDADGRKVGMQCVDSAPEAIAAVLERHGPIERAVIETGRMSPSVALGLRELGIAIVCIDARQAHQSLKAMKANKTDPHDAAGLAQLARTGFYKEVHVKSPAAHGVRSVITARGHLVEARVRLDNTIRGLCATFGIRLGAGQGERFIARMRAAASIPGLGEAVASLLRARERLVEEIGQMDRQLKAISTASPACQALMSIPGVGVQTSAAFAAAIDDASRFKRSRTAGAYFGLVPRRHQSGELDWTGRITKQGDGTVRKLLYEAANSILTRTRQSFALKTWALKIAKRRGLRKARVALARRLAVIMHAMLRDGTLFEA

SEQ ID NO: 387850 - protein, 403 aa, unidentified
MNAVGIDVSKGKSMVAIIRPLGEIVAAPFGIKHSASDIKSLVNLIHSVEGESRIVMEHTGRYYEVLAHQLSKADLFVSAINPKLIKDFDNDSLRKVKSDKADAVKIARYALDKWQNLKQYSVMDELRNQLKTMNRQFNFYMKHKTAMKNNLIGILDQTYPGINTYFDSPARSDGSQKWVDFASTYWHVDCVRKMSLHAFIDHYQKWCKRKKYNFSLSKAEEIYGKAKELVPVLPKDGITKLIIKQAVDQLNSASVTVEELRSLMNETASKLPEYPIVMQMKGVGPSLGPQLIAEIGDVTRFTHKGALTAFAGVDPGVNGSGSYEQKSVPTSKRGSAALRKTLFQVMDVLIKTMPQDDPVYQFLDKKRAQGKAYYVYMTAGANKFLRIYYGRVKEYLSSLPESE

SEQ ID NO: 387851 - protein, 357 aa, unidentified
MKYIGCDFHPSFQQIAMLDKETGELVERRLLHTEEARVFYEGLKEPVVVGIEASGNTHWFESLLARCQHQLWIGDAAAISRQEGRKQKHDRRAAELILKLMLENRFPKIWVPTVAERDLRQLLIHRQHLVRMRTRVKNQLQHMALNQGWQKKRKLWSEAGLELLRQLKLEPWAGQRRDTLLEMLEELEEKIQPLDQAVAQQAQACAAARRLATHPGVGPVISLATVLTLGDVARFADSRSWVSYLGLNPSEHSSGQRRRLGGISKQGNPFLRYLLVEGAASAARGDEDLGRMYARLKARRHHGVAKVAVARKLAVRLYWMARTEKSYPEVVRTQGSQSHPVAERRAVQLNRPPASHQ

SEQ ID NO: 387852 - protein, 414 aa, unidentified
MELLHERCAALDIGKKDLKACVRTPSVRRKHSRSQQIRTFATTTNALLELRDWLVAERVSLVVLEATGDYWRGAFYLLEDDLNVILVNAAHAKGLPGRKTDVCDASWLCQLGECGLLRASFVPPEPIRQPRDLTRYRTTLATERTREAQRLEKELEDAGIKLSSVATDILGVSGRAMLAALIDGERDAQVLAEMAKARMRPKIPQLVAALTGNFGEHHAFLCRLHLERIDQLSAAIGELSARIEEQMRPFARQLEHLMTIPGVGQTVAEVIVAETGADMSRFRTAENLASWAGVCPGHHESAGKRKSGRTRHGDRWLCGALGTAAMAAARTRDSTYLGARYRRLAPRLGKKKAIVAVEHSILTAAWHMLTDDVDYHDLGGDYFARLDPERAMRRIVRQANALGYTVRFDPIQAA

SEQ ID NO: 387853 - protein, 412 aa, unidentified
MIAIDQFAAHVGLDWADKKHDVCVQFKNGERIFHVVEHTPEALDIWLNELHQKVKGRIAIALELKKGPVVYALQKYPFVTVFPVHALSLARYRQAFSPSGAKDDPQDAELALELMLRYPQKIKAIEPDNADIRLLQQLVEQRRLLVEDKRRFVNRLINTLKQYYPQPLEWFSHRDSSLFCELIIRWPSLQQLKRARSDTIRHFMNAKGGPAVAYTEQRIASIAIAIPLTTDKSVIEANALMATGLASQIKLVGDLIRTYDERIESLFDTLPDADLFKSLPGMGPCMGPRMLAALGDNRNRFNSAEEIQNYAGIAPVTERSGQKSWVHWRWQCAKFVRQTFVEWAAKTVNSSYWAKLYYQGLREKGKSHQSAIRALAFKWIRIIYRCWKTRTQYDEAKYLLALEARHSPLLKS

SEQ ID NO: 387854 - protein, 367 aa, unidentified
MKKVSTTAAKQIRNFSQQKLTIGLDLGDRSSWYCVLNEAGEVLLEQRLATTPKAMQEVFGGMPRCRIALETGMHSPWVSRVLSELGHEVIVAHARNVRLIGESRKKDDRLDARTLGRLARIDPQLLSPVKHRSAKAQAHLTVIRARAGLVRSRTALINTARGVTKSYGERLRGCNPRNMNPEKAEGLSPELQAALAPLLAAIEALSERIHEYNQQIEKIARESYPQVARLEQVKGVGTLIALTYMLTLEDPHRFRKSRDVGCYVGLQPGRRNSGQSEPQLHISKEGDPYLRTLLVQGAHHILGPFGADSDLRRWGLKLAERGGKNGKKRAVIATARKLAVLLHRLWVSGKAYEPLWNSSPVRMTVAA

SEQ ID NO: 387855 - protein, 456 aa, unidentified
MAKRSMFVGMDVHKESIDISVAEEGRAGEVRHYGVIPGDLEAVAKVLRALRGPTRRLRFVYEAGPCGFGIHRYLTAEGEDCVVVNPSSMPKRSGDRIKTDRRDGASLARLHRAGELTTIYVPTPDDEALRDLVRAREDAVGLATQAKHRLKAFLLRQGRRYPGRAGWTQPYRRWLADLSFPRTPQHIALREYRDTIDETEQRVARITAQVREVVPEWRWAPVVDALQALRGVSFVTAVGLVVEVGDIRRFTHPRELTAYLGLVPSEHSSGPSVRRGGITKAGNPHARRLLAEAAWAYQGPPRIGRQALYRQEALPKVICDIAWKAQVRLTGRFKARRARQGQTQGRDRDRPRTHRLHLGHCPGGAPARVGARAHSGPVGRRHRGSVENPRERYGQRFGATSVPRARTAPRRTTVWAVPNPRISAASTVARTRCRRLTGSDTRRARKEQAQERDSQR

SEQ ID NO: 387856 - protein, 304 aa, unidentified
MFGIGIDVSGENLDVAVHEQAFRQFKNSKRGWNSLIRWLQQWPAKQVVLEASGGYEQKALDALHEAGLPMVRINPGRGRSFASATGKQAKTDRIDAMVLAHMADALKLTRYVPPAAWQRRLGELCQRRRHLVQMRVSEHQRMRAFSEPSLISMLNQHLREIQKSIKQLDATIAALLAEQEGWRDFAKLKGAGPVLMATLACELPELGRLSGKAISALVGVAPMNRESGTWKGRRSISGGRAVVREALYMAALTAKRYEPRLKEFFESLVKQGKPGKVALVAVMRKMLVILNARKRDAEAQMASA

SEQ ID NO: 387857 - protein, 338 aa, unidentified
MLHVGLDLHKRFSTVTVMDDNGTILERDKLYHDDRARLTEFFRRLAGKAVVTVEATRNWYWLYELLEELGVTVKLANARKVRLIAEAKLKSDKVDPGSLAQLERTGFLPEAYIPPRVVRDNREYLRYRLTLVRLRTGLKNKVHALLDKLGISHTFADLFCPAGRRFLSQLALRPVYQEELTNYLALMDDMEHRIVAITKEIQRQLKPDAQAKLLITIPGIGHLTAYLLLNEIGDIKRFPTPGKLCSYGGIVPIVRQSADHRWQGHITREGNRYIRWALTESACKAPNKDYVLGSFHRRVAFRRGPLKARVAVARKLLVAVWYVLTYGEPYKVTAFPTV

SEQ ID NO: 387858 - protein, 348 aa, unidentified
MEYIAFDCHKHYTYAVVEDERGRVVREGRIPHERGALMEFLSRHEPGSPVAVETVGNWYWIVDEIEGAGCIPRLVHAGKAKLMLGMVNKTDKLDARGLNKLQRAGTLPEVWIPPGELRDKRELPRARMVLVRERTRLKQRIHATLAKYGIQVGASDLFGVKGRQLLWANLPLLPPHTRYVTEGLLQQIDALDEEIQAIEGKMREVLSPTREVRLLETLPGVGFILAVVMALEVGDVGRFPDAEHLASYAGMVPRVHSSGGKTRYGRTRQDVNRYLKWAYSEAGNVVARHHKAHPHRHVSLLYARIRKNRGHQVAVRAVGRHLAEATYWMLKRGEPYRDPKLWSGRSGA

SEQ ID NO: 387859 - protein, 406 aa, unidentified
MKQIVSVGIDVSKGKSTVCAMIHPNTIIKESFEVLHTVEEMSMLADYIGSLDGEIRIVMESTGHYHLPVAQFLYQKGFFVCVENAYIIRQFSRIMLHGAKTDPLDAKKLAKYGLAYWSELKPYKFHPSCYTELSLLSKQYQTYIKLLIAAKQNVIHLMDEMLPGFKEALDTASSVQFSKVKYVDFAKEFYHVDMIKTMGKEIFRENYKQWCKEKGYRFQSEKADELFHLAEDGIPTLPTEFPSTRLCMEVATEQVSQLGYALEQILSQMQNLAKTLPEYQTIRQMGGMGEKLCVRFIADIGDVRRFHNGKALVAYAGIDAPPYQSGQYTGTKRRISKRRNSALRKTGYEVMKSLKSHPPKTDTRVYDFIIKKENEGKSKKQAKIAGLNKFLQIYYARVMEIYKNIA

SEQ ID NO: 387860 - protein, 417 aa, unidentified
MRKARAIVGVDCGEQRHRFVMIDENGEREASCWVANDLGKIFQAFDELGSLSKTGKLEVVTESIGSLGAIVSQAVHGRGDELFVVSTKALRHYRDLEGQPHKSDDRDAYLAARMQLFGMEGVRTPAPVSEEEQVLARLIRLRFRLMDQKKALGLRLRSRLLDLAPVMASKDWDGPGHSSRAMVAILQRWPGLVGLERAHRKSIEKLLRKVTRNGDACVKMAKHLREAAKTIALEGLVREVLTMEMTMLVDQLEANHQQLGQVRKRENELVDAHPVGQRLLTMPSVGYRTAAVLLAESLPQARVRSEAQLATYSGLTPLSRQSGNSSRSRLSRGVNRFLASAHYMSAVNACTRSPIDKTYHDKKRKDFKGHPAEFKKATIALARQRHKVIYRILVKDEIYDASRLAASTVERARKTAV

SEQ ID NO: 387861 - protein, 341 aa, unidentified
MSIVGAFDVHRRQLTFDCLDTVTGEVQRGRVVPADREHLRAWLARFAGQDDVHFALEGCTGWRYVVEELSAAGITAHLAEPADTAALRGKKRHAKTDKTDSRHMRVHLAAGDLPECWIPPAHVLEARAVVRLYKDLLDERGAWHQRIAATLFHQGVPAGPSMCTAQGRAAVAGMRLSPAGGQAVETGLRQIDRLTSELDPLRRQLDMMSRRQSGCRALRVTQYGIGAVTAVAIWAELGDVRRFASSADAVRHTGLDITVYSSDGKRSAGHLSRQGPALLRWALYESAKCAARPSAPDHGYYTAARDRRTAGLATLSVARKLARRCYHTLRELGEEALAPAA

SEQ ID NO: 387862 - protein, 412 aa, unidentified
MKDLLEISCGLDVHKEKIVACILTGPLGKPTRSEIREFSTLIPDMIALRNWIVSKNCHHVAMESTGIYWMPIYEILEDAFYGDITLLVVNARHMKNVPGKKTDMRDSEWISTLLRAGLLNGSFIPEKKIREFRDLNRYRKSVIRDITSQKNRIEKFLQSSGFRLSSFISDIFGASGRNIILHLIEHGQIDKTALDSCLKTKTRNRIDEILMSVNGTLSEHQKAFLRILMTHYDSLKKHLAEIETSLEEDMAPFALQVEQLNSIYGISTTASCAIIAEIGIDMEPFKTAEHICSWAGLCPGNNESAGKRKSTSVTKGNPYIKSMLCEIAWVIAGKRNTYLSAWYWRIKQKKGAKKAIVALARKLLVIIYTMLKQGTLFDESCFETRRKHCEQKQLSRYIRELEKHGYHVEAQS

SEQ ID NO: 387863 - protein, 388 aa, unidentified
MPQSNDLSRSLAAFDQDRTLIAVIEMSQSNWLVAGLVPGLERRPLKKLSPDEDALLKLVQRWRNEAAQAGREITRIVIAYEAGRDGFWLARWLRRRGIEAYVIHPSSVAVSREHRRAKTDRLDTELLMRAFLGWLRGEKRHCSMAAIPTIEDEDAKRPSREHEKLVGDRTRLVNRMKAMLARFGIRTFKPTLRKAADRLDDLRTAEGTPLPENTRAELRRDMMRLRMVREQIKEIEQERLRKLTAAPAEKGPPTMVRFIARIIGIGIETADMLVSEILSRGLRDSKAVARYAGLTGAPDESGRRRREKGLAKAGNARVRRGMIQLAWRFLIFQKDSALAQWYRARTADAHGATRKRMIVALARKLLIALWRMATTGEIPEGISLRAAP

SEQ ID NO: 387864 - protein, 385 aa, unidentified
MKYVVKFYFIPSNEFFIPVSLILFASDNKMSIKNTKPKKYNYFIGIDVSKNKLDYAVMRGPELLFHQVTRNDPDEIRRLVGELKILPSFTLSKALFCMENTGIYCNHLIRYLREAQANFAVENPLQIKASIGLVREKHDKGDAILIARYAQKNHTGIRLWEERSAAIVELMNLSTLRIRIVTMSLVMKTPLKEQQRFITKELQSLSASLCKKSLDALKGDLRKVDTRIRQVIKADKRLKRLFRIILSVPGIGSVTAVQIITITNEFKNIADPRKFACYSGIVPFKRGSGTLSFKPRLSTFANKRIKSLLHLCALNAIQHDAELKAYYERKTGTEKKNKLSVINAIRNKIVQRVFACVKQDRLFQKRLPVEHPAVVEDSAIPELIT

SEQ ID NO: 387865 - protein, 415 aa, unidentified
MSLGGYIMQVTFGIDVSKSNSTVCELIGESKNELTITNDRPGFIQLLHELAAFSKHPQIIFEATGVYSRRLQAFLEDYGYEYVVLNPLKAKKEMNMGLRYNKTDKTDAYHLALIQRLYRHPVNQSESQTYKQLNALSRFYDQLTSDLVIAKNRLHQALQSTFPEIENLFSIARGKNYWQIVARYPHCDLVRKDDKKQIINWLMKLKGIAFNHAQRTTDKLIELAHLAYPVVSCSDMEVQQAQYYARRLLNLSNQRQRIITKMVKLAKTLPNHDLENLESIPGFAQTTAVRVLAELGDLRRFSNPNKINAFIGIDPGRYQSGEMDSNLSITKHGNAVARKLLYRAIGQIDNAAKTNPCHIADYYESKKLSSQTKGFKKIAIASIHKLIRTIYALIINDQPYDYNIATHNQKDFSRN

SEQ ID NO: 387866 - protein, 339 aa, unidentified
MQITTIGIDLAKSVFQVHGVDAAGNVVVKKQVRRTDMPEFFANLPPCLIGMEACGSAHYWARKLEGMGHTVKLMAPQFVKPYVKTNKNDAADAEAICEAVRRPNMRFVPINYVEQQAILALHRARQGFVKARTAQGNQIRGMLAEFGLIIPKGLAFVRERVPLLLDEAGDELPGAFRTLILRLLEQLKALDRQVGELELQIQVWHRSNALSKRLEKIPGIGPITASALVASVGDAKNFKNGRQLAAWLGLVPRQHSTGGRANLLGISKRGDTYLRTLLIHGARAVIRYAEGKARQDWLHRLLGRRNKNIAAVALANKNARTVWALLARDREFRSDFAGA

SEQ ID NO: 387867 - protein, 442 aa, unidentified
MCGSSVNGFYFTKKGVMTMQVTYPICCGIDVHKSFLVATIIKTTNGFEPSYQKKRFSTFNNSILEFKTWLIQNNCRDVCMESTGKYWIPVFNLLEDEINVTIANPKWVKAVKGNKDDVKDSKWIGDLFRLGLVKGSFIPCKPIRILREYTRYRYKLVSCRSSEKNRYQNSLTVCNVALDSVVSDIFGKSSTSIIDYLLNQTNDSINHEEIASKLLKSLKSKSDAVIESIEGYQMTDAQKYRMRLIRSHIDYITAELNDVNSIIDKFISSNTDYLNAVQLLCTIPGVKYDSAITIISEIGIDMTQFSNSKRLCCWAGLTPGSNESAGKKKSVRITRAGVYLKPALVQCAHAAVKSTKSPYYKNKYERIVKRRGKKRAIIAIARMILTAIFKILTTGEVWNPCDLYKVDMPVALVEKQKTKAIKQAIKLLQKEALLPLDFAVIT

SEQ ID NO: 387868 - protein, 283 aa, unidentified
MSNVTTVGIDLAKNVFSLHGVDSHGQVLMRRTISRSKLLSVVAQLPPCVIGMETCSGAHEWARQFKDLGHDPRLMSARFVRPYRKSGKNDGNDAEAICEAVSRPSMRFVPIKSVEQQAILTLHRVRQGFIEERTATINRIRGLIAEFGVALPQRASEVRRGATASLERLPTLAAGAVRDLLDHVEVLTNRIERYQLELEAHTRTDPRAQRIQALSGIGAVSASAIVASVSDAREFTSARQFAAWLGLVPRQYSTGGKARLGHITKRGDAYLRTLLVLGARPAG

SEQ ID NO: 387869 - protein, 347 aa, unidentified
MGVYIGVDFHARKQTVSYLTTEDGEIQRVELEHEKDVVQAFYEQFRGQKVIVGFESSGYAAWFEEMLEELEYETWIGHAGAIRQLARRRQKNDRRDADLILELMVQGDFPRLHRYSRESRETLQQLRYRQRLVKMRTMVINSLRFMVGSRGVTLRGTLQSRPGQARLQQVALPGPLGQQRDELLKLLVEIQQKVATAEEWLKQKAESDVRVQRLRTHPGIGLLSGLGLVATLESIERFSHSRKVTAYVGLDPVEDSSGERRRMGSISKQGSRLLRLLLVEAGQVAARRDPELGNVYRRVVLRRGHAKAKVAVARRLLVRAFIMLRDEIDYAEFCRRGVAARSSRGNA

SEQ ID NO: 387870 - protein, 438 aa, unidentified
MERFPLVNPHAAGIDVGDTEMVVAVSPNVCDQNVRTFGAFTCDYEQIICWLQECKVTHVALESTGVYWVQLYLLLERVGFEVTLANAKHIKNVSGRKDDENDAVWIQRLHSCGLISGSFQPDLQTRGLRDLMRHRRSLVRDQSRCTNRIIKAMELMNIKVQTVISDIDGKTGKAILEAILNGERDATVLASLADKRVKASKETLIKSLQANWNTQHLFLLKQQYSTYNFISSQIKEADLQIEKQVQALTASLHEGELCPINVDHPRKRSTRKNTIPFHATAHLHALLGVDLTQVPGISEVSALEIISEIGTDMNRWPTENHFTSWLGIVPNTKKSGGKIISNKIMKKKHRAGQALRIAASTMYHSKSPLGDFFRRKQAKGGPSKAILATATKIAISIYMMIKNKTPYQPERMKESQDKFKQDQIRKLETRLAQLKSAA

SEQ ID NO: 387871 - protein, 350 aa, unidentified
MLRTVGIDLGKTVFHLVGLDAPGNVIVKKRFSRTQLLRYLANTPVCLVGMEACCGAHHLGAGLAAQGHQVRLIPAQFVRPFVKSNKNDYKDAEAIAEAVQRPTMRFVPIKTKDQLDLQSLHRVRDRLVSRRTSLVNQIRAFLLERGLTFRQGRPYLRKRMALILEDAELNLSPLMRQLLDQLWQEWKTVEEQIEAISRAIERIADQDAACQRLQQIPGVGPLVATAMVAAIGNGSAFIKGRDFAAWLGLVPRQHSTGGQAKLLGISKRGNPYLRRLFIHGARSILTVANREKIAFGAWIEQLESHVHRNVAIVAVANKLARIAWAVLARAETYHWPVTFSTTPSDHSQTA

SEQ ID NO: 387872 - protein, 391 aa, unidentified
MIFVGIDVAKDKHDCFILNSEGTVLADVFTIANNRIGFETLLSRIQSCSQGESKIKVGLEATGHYSYNLLGFLLDSGLTTYVINPLHTNLYRKSLSLRRTKTDRIDARTIAMMLMSDVDLKSYSNTAYHNEELKSLTRYRFDKVKERAKLKSSVARLVNILFPELEKLVSSLHIAVVYALLSNYPGASYIANANTEELAETLCTASKGRYTKSKTAEIQVAAGVSIGSKMPAKSMELQHTMALIRELDKEISEVESAIDKITSQMDSPIFTIPGIGRHMGAMILAEVGDFSNFASADKLLAYAGLSPSTYQSGQLQNCYAHMEKRGSRYLRYALFNAAKYVCLWCPTFSAYLEKKRSEGKHYNVAISHAAKKLVRLIFAMQRSGKAFLADY

SEQ ID NO: 387873 - protein, 387 aa, unidentified
MAKQNDLSRCLVTLEQDATVIAVIEMGQSSWLVAGIVPGLERSPLKKLSPDQDALLQILHRWRKEAVRAGRAIKRIVVAYEAGRDGFWLARWLRAREIEAHVIHPSSVPVSREHRRAKTDRLDTELLKRAFLGWLRGEPKHCSMASIPSLADEDAKRPGRERQSLVGERTRIINRLKANLARLGIRGFRANLAQASGRLEALRTPEGAAIPTNTMAELHRDMDHLRFVKQQIKEIETTRAKRLAEAPDEQRPAMVRLLARVVGVGIETADMLVQEVFSRNIRDRKALARYAGLTGAPDESGKKRRERGLAKAGNARVRRGMIELAWGHLVHQKASALTAWYRKRTSDARGATRKTMIVALARKLLIALWRLVTTGETPAGLTLRPAA

SEQ ID NO: 387874 - protein, 355 aa, unidentified
MNSEKYIGLDVHQATIVVAVLDSTGKLVMESILDTEAATILQFFAGLRGTVSVTFEEGTWSVWLYDLLNPHVDKLVVCNPRKNALLKDGNKSDRIDARKLAELLRGNQLKPVYHGETGVRMLRELSRSYLTIVKDLSRVMNRLKAVYRSWAIPCVGRDVYYTRNRAQWLDKIREAGVRRRAERLYEQLDMLQHLRQQARRELLAEGRKHAVTAQLRQIPYLGPIRSVLAVALMQTPHRFRTKRQLWAYSGLALETRISAEYRLVEGQVRRSKKLLSIRGLNKDHNHDLKGLFKGAATMASVRPGPFQDFYQAALAKGIKPTMARLTLARKIAAITLTLWKKGENFDAEKLKSQAA

SEQ ID NO: 387875 - protein, 502 aa, unidentified
MTEYSTCTVGIDLGDRKSVACIYSPGVVVDWFEFAMTPDGVRAAFAGKGYRTVAMEAGAQSGWVTRLLQDLGYKPLVANPRKLKAISANERKNDRNDALILAKLVTADASLLHPIEHRSEARELGMTVLRSRDTLVRTRTKLISTVRAMCKGVGARLKSGGADGFASREAEVPEVLAPATAGLFAALRVLNEQIAVYDTQLEVMLETQFPEGRLVRQVRGVGPVTALAFVLTIEDPKRFPDGRTAAAYLGLVPRRDQSGAVDKQLGISKTGNTFVRRLLTQCAQYILGPLGHDCDLRRWGHTLMERGGKSAKKRAITATARKLVVLIFRLWKRDEVWIPLYNADSSSAPPADADRPKPAVLADCACDFDDTGDRGRRRIDCSATDGSDPSMHQPQAGQPKSANRSVGNGTTSSAKKAPKKNPARHAGLPAPHPATANGDRGGPNPGDGVAPSPGPTTPSSAAGSHGGPQNKDRGPVRPATCVGPQPPRGKLTPRSEKDHPHP

SEQ ID NO: 387876 - protein, 338 aa, unidentified
MAERYVGIDLHRRRSVIHAMDADGKEISTVRIFNEPQRLVNAVAAAVDGRDAEVVVEACYGWYWAVDLLQAEGHRVHLSHPSGNNWGHRRVKNDERDARDLADLCRLGRLAEAWIAPPEIRQLRELVRYRHRLSQLRAGLKAQVHAVMAKEGVLPAASNLFGTIGGRRQLDELVVADAFLIRLESLRDLIELYDRQIAMLDANIAERLREDRGYRAIQQLNGIGPVLAAILVAEIGDVGRFRSAEALCSWAGLTPLHRESDTTVHRGPITKMGSPLVRWAVQEGIARHKGDTKLRADFARIAERRGKHKARIAVARKLLTLVFYGLRDGEIRALATTR

SEQ ID NO: 387877 - protein, 375 aa, unidentified
MPRMPQAPEPSHAHVDATAVDPDVVDPDEVVLGVDTHKGVHVAAVISALGVLLGTRSFPTTASGYQQMLRWATGFGAVRRAGVECTGSYGAALARHLVGEQIEVIEVNQPDKATRRRRGKTDTADAEAAAHAVLSGRASASAKAGDGPVEMVRIFKLAKASAIKSRTQAINQLKAVLVGADPQLRDSLSGLSNPTLIRRCSQLDAGTPRDATTAAAYTLALLARRILELTTEIDDLNRQITDTLSAHAPRLLERNGVGPDTAAALLITAGDNPERLHNEASFAALCGVSPVEASSGKTQRRRLNRGGDRRANSALHTIVLSRLRWDPDTRAYLARRIANGKTRREAVRCLKRYVAREIYQLITQPTEPPPCARAA

SEQ ID NO: 387878 - protein, 346 aa, unidentified
MKKFFVGIDFSKRRMDVSIVEKDFPEQTIDYKQFINNAEGAKEMCEWVEYTTNTSTKFEGEVLFCCEHTGSYCLEVCDYLSENGKYIWLGNPLDIKRSMGMVRGKDDILDSRRIATFAAEKHHKAILYIRPEDSTRALKYLLSIRNTLVEHKKALACQIKENFPKLHNAALLCEIENEIKHILDSIKTEIKKIEKMMLDIILSNKEYKHTFDILTSMKGVALINAAALIVFTDNFKRFSFNSRKICTYWGVTPFRNESGDSIRRGTHTSSCHNYWLKAILSEAVLCAIRYNERLKTYFLRLLAKGKHRNVALNNTKNKLLKTLVAMVRDGKKFDENYVSIPQTCAV

SEQ ID NO: 387879 - protein, 343 aa, unidentified
MQTVTTIGVDIAKPVFQVHGIDAAGQVVIRRQLRRRHVLTFFQKLPPCLVGIEACASSHYWSRELQVLGHTVRLMPPAYVKPYVKRQKNDATDAEAICEAVSRPNMRFVETKTAEQQSCLMLHRTRHLFIRQQTAVINSIRAQLAELGIVAPVGRRGVDQLLVIVADPSDKRLPEIARICIAALGAQLQMLKLRILEFDRLIRAWHRSNEVSRRLDRIPGVGPALATALVASIPDPKVFRSGRDFSAWIGLVPKQNSSGGKDRLGNISKRGDRYLRSLFTTGALAVIRYAKIHGTRHRPWLTALLARRPTKVAAIALANKLARMAWAMMARNEDYKEPVALAA

SEQ ID NO: 387880 - protein, 488 aa, unidentified
MSTPRKRKEKKGSDAQRSASKRKARDSHCQQGDGNRRRSKLTITNPDAAGIDVGARIHYVAVPEGRAEVSVRSFGAYTAQLDELVQWLKDCRIKTVAMESTGVYWIPLFQKLEEAGFEVLLVDARQAKHVPGRKSDVQDCQWLQQLHSYGLLRAAFRPEDSICRLRTLQRHRKNLVESAAMWIQHMQKALNEMNLHLHHVLSDISGRSGLAILDAILAGERDPKKLASLADRRVEKSQAQIEAALTGDYRPELLFVLSQSLHNYRQMQEQIAQCDLSIEKQLAKMADCPNPNQASEPIQQSQDSTGCKPRKRKPKDALELSLAGHLKRILGVDLTTIPGLNILAVLNLLSEIGTNMAKWRNEKAFVSWLGLSPNNKISGQRVLSSRTRKVVNRAATTLRLAVMILGKTNTPLGSFYRRKRAQLGAPKAITATARKLGCLIYRLIKNGQGYKEPDLHTYELKYKDQILNSLRKRANSFGFDLVQVPKAA

SEQ ID NO: 387881 - protein, 394 aa, unidentified
MYFVGIDVSKYKHDCFIVTEAGEVIKDTFTFDNTRTGFDQFFSILDGLGPKNEIKIGLEATGHYMNNLMKHLSVKGYSFILLNPIIVSQFRHSETLRRTKTDKVDARLIAQVIASKEFISYPLQAYHFPDLKTLTRLRDRLIKQRSLYLVMLTNQLDLSFPEFKEFFEGRLKSKTAQFILSKYGISSRIANMNSQSFEVLNKVSRGKFSYAKFAKLKDLAKNTIGCSSEIDEMLFALTINLYKSINEAITNIESKIADIMERLDSPTASIPGIGIISAATIIAEYGDISRFANDGQMLAYAGLDCGRYQSGTSDFPGRMVKHGSGYLRQALMNVAETCMIHLPSFYDYYLKKRNEGKSHRVALSHIARKLVRLIYKLETSHAHFDLSVFISQHQ

SEQ ID NO: 387882 - protein, 397 aa, unidentified
MIAVGIDVSKSKSTVAILNGDGSIRAKPFDVHHVADELQALVDYIKRTSEPPTILMEPTSHYHYPLLKAFTEAELPVCLINPYQMKKYGDTELRKAKTDKRDSLRIAQYALKKSYSLIPYTPQDQKYEDLRFLSRQYSQRISTLTVAKVQLLSLLDETMPGITTILPLKSRDPDNCVLLRFIKRFKSFDVIRKMGKTRFLDSYQVLVKKTKDRFAGSKGLAIYELVLNSVTTRGENPLSAMTQDQCVDLVSTSQKAADEINLQMRIIAETMPEYKVLRSMAGVGDRLGPIILGEIGDIRRFHSGKALNAYAGNDAPPYQSGQFESRNRHISKRGNPALRKACFEVMQALKLTKPQDDPVYLFLLKKEQEGKPYNVAKMAAVNKFLRIYYARAMELYK

SEQ ID NO: 387883 - protein, 450 aa, unidentified
MAKRKIKSEKSQQPLLITHPNAAGIDIGCAFHYIAVPPDRDDRPVREFPSFTEDLNALADWLQECGIDTVAMESTGVYWIPLYEILEARGFNVLLVNARHVKNVSGRKSDVLDCQWLQQLMTYGLLNGAFRPVDEICVLRSLWRQRGALLKLQAQHVQHMQKALIQMNIQLANVISDIVGETGQRILRAIVAGERDSQVLAALKGGRIRANEAEIAKSLQGNWRSEHLFALKQALNGFDFIGQQITECDQEIKAQLERLQSHDGEPDKGRKLGKMRNAPQFDLRTQLYKMCGVDLTRIDGINVTTASAVLSEIGVDMSRFPTVRHFTSWLGLCPGTKITGGKMISGKSKRTANRAAQALKLAAAGLRGSQSALGAYYRRLCARMDKPKAITAAAHKLARLIYTLLTKGEEYTDKGQDYYEQQYRQRVVSQLSKRAEKLGFKLIDIEQPAF

SEQ ID NO: 387884 - protein, 340 aa, unidentified
MKEVTTIGLDIAKQIFHAHGAGSSGAPVFSRRITRQKLIQFFASQPRCVVAMEACAGAHHWGRELMRLGHEVRLIPPAYVKPFVKRQKNDAADAEAICEAAQRPTMRLVPVKSEAQQASAAVFRARDLLVRQRTQLLNALRGLLAEHGWVAPKGLFHASAMMAKIEGPSCELPASARDVFLVMIASVRALDERIHLLDREITKRAREDETARRLMTIPGIGPITATALLALAPAPESFRKGRDFAAWVGLTPLQRSTGGKAKLGSITRMGELTLRRLLILGSAAVVLHASKRGAAKGSWLEQMMARKPRMLVTVAFANKTARIVWALLAKGGVYRAPAVA

SEQ ID NO: 387885 - protein, 400 aa, unidentified
MNDSDEIGVFLGLDVGKTNHHGHGLTPAGKKVFDKQLPNTEPKLRDVFEKLKAKFGTVLVIVDQPASIGALPLTVARDAGCKVAYLPGLSMRRIADLYPGEAKTDARDAAVIADAARTMPHTLRSLEVTDEITAELTVLVGFDQDLAAEATRTSNRIRGLLTQFHPSLERVLGPRLDHQAVTWLLERYGSPASLRKAGRRKLVEVIRPKAPRMAGRLIDEVFEALDEQTVVVPGTGTLDIVIPSLARSLGAVHEQRQATEAQISALLEAHPLSKVLTSMPGIAVRTAATLLVTVGDGSSFPTAAHLASYAGLAPTTKSSGTSIHGEHAPRSGNRQLKRAMFLSAFAALHDPASRTYYDKCRARGKTHTQALLRLARQRINVLFAMLRDGTFYEARTPRLA

SEQ ID NO: 387886 - protein, 400 aa, unidentified
MPQLWAGIDAGKGHHHCVVIDEDGDRLLSRRIVNDEAEILDLLAEVSALAETRHVCWATDLNGGAAGLLLSILTDHQQLVHYVPGRAVHHAARTYRGDGKTDAKDAGIIADQARMRRDLQSHRTDDQLSTELRLLTARRTDLVVDRTRAISRLRAVLLDYFPALEAEFEFAKMKAAVVLVSRYQTPDGLRRVGQRRLTAWLKSQHCYRPAVVAERAITAANRQQTTVAGQSVAASIVAGLANDILRLHETVEDIDQQIALRLEGDRHAQILQSIPGFGPLLAAEFIASTGGNISQFESADRLAGVAGLAPAPRDSGRITGNHHRPKRYDRRLLRVCYLAAQTAAIYCPISRAFYERKRAEGKTHKQAVIALARRRINVIWAMLRDDAMFASPPRPALNSA

SEQ ID NO: 387887 - protein, 345 aa, unidentified
MKFKFTLGVDMSKEWFNFCLMNAEFQTLWQGQVDNNEESIFKFLTQLSQREEVTKAQAVLADIVLIMEHTGIYVQHLVKCYLSKAGPVSLVHASKVSDLLAGKQKWDEKTDQMDARRLAEYGIRYKDKLELWQAKEPTLIKLRVLQRQRRRLKDAMNLLEVPVNESVQFDSVAVSELLKTNQQATIQALKNDLKNIEKQLQQLMESDVELTQLFNLITSVPGVGAVTAREVIITTSAFKDFTPKQAKQFARYAGVTPKDKQSGKMKKRKRTSKRGNKKLKSLLTMGATSLIGTNSELGFYYLKKIEEGKRHFSVINAMRNKLILRIFAVVRNQVTYKKNMNICLD

SEQ ID NO: 387888 - protein, 355 aa, unidentified
MSQEKYIGMDVHQATISVAVLDSRGKLIMESILETKAATILEFLQGLHGSLSVTFEEGTSAAWLHDLLKPHVTRLVVCDPRRNALLKDGSKSDRIDARKLAELLRGNQLTSVYHGEHGMRTLKELGRSYVTITQDLVRVMSRIKALYRSWAIPCSGTSVYAPRHRAEWLDKIPEPGVRLRAERFYQQLDLLQPVRQQARRDLLTESRKHHAVKLLRQIPSIGPIRAALLVAQLQTPHRFRTKRQLWAYSGFALKTHDSGEYRYVRGKLQRNQERMTVRGLNNNHNPDVKNLFKGAAISASTHPGPLYDFYIALLEKGMRPTMARLTLARKIASITLTIWKKGVDFDATQLHRQEA

SEQ ID NO: 387889 - protein, 434 aa, unidentified
MSNKVIFNLDELFISVGIDVGADFSWMSIALPNQQFVGKPFKILHNSIDSLTTAVSKIKEAEELYSLESRIFLESTGIYHYPLFCYLRDKGFNCSVINPIITKNSTNINIRKVHNDRFDSKKAALVGLKPDLKVSLMPSDLALNCRNLCREYYDLMDNRSAYVNKLQGELRMAFPQYLGIFSKVTINTSLTLLETYTSPSAFLEADKQEIIDIIKSTARFGLTYAQNKYNAIIQAATDANQFGYIIDSNIKRIRLYISFIRKYDEEINSILESLHELVDANEDTDFVKQIHLIKTFKGAGFLSAVSIMGEIGDFSAFSKPKQLFAYFGLDPAVKQSGKFEGTKVQMSKRGSAIARRLTLQSISISRNGEAKNPVLREYYLKKCDSKPKLVAMGAVSHKVCNMIFAILRDNKPFKIIAPQEHIKQYNAAKCDMTA

SEQ ID NO: 387890 - protein, 411 aa, unidentified
METVVRRCAGLDVHKLTIVAAVRIITDDGEVVVHTETFGTTSPDILRLNDWLASYQIRVVGMESTGVFWKPVYALLETEFECWLLNAAHLRNVPGRKTDVADAAWIAQLVAHGLVRPSFVPPREIRELRELTRYRKAVIQERSREAQRLHKVLQDTGLKLDNVATDVLGKSGRAILTALIEGTHDPNVLADLARGRLRKKIPALREALVGWFSPTHRVLITEILAHLDFLDESIERLSADIATMLAPFASAIDLLDTIPGVNRRTAEVILAECGADMSRFGSAQRLASWAGICPGNNESAGKHFSGKTRRGSKWLRTALVESAEAMSRTKGNYLSAQYARIKGRHGHNKAIIAVAHSILIIAYHILDRQEPYRELGGDYFIQRQAKEAYQRKLVKQLERMGYEVSLTDRAA

SEQ ID NO: 387891 - protein, 391 aa, unidentified
MKSSHHIDTPAAGAKDGTLYVAFELSKSKWLIGLLVSGESKLSRHVVAGGDTAAVWQLISKKRAAAEKKLGRPVRVVSCYEAGFDGFWLDRWLAEHGIENRVLDPSSIEMPRRARQAKTDRLDLERLMRVLIRHDGGEPRVCSVVRPPSPEQEDDRRLTRERERLIGERTAHGNRIKGLLHGQGVRDVEPRRKDFGEQLARARTGDGRVLPSKLVAEIEREHARLLLIAEQLAEVEGQMKTEREAAAPDSRAVQVNRLIELKSIGAVGGETLVNEVFWRDFHNRREVGAYFGLVGTPFDSGQSAREQGISKSGNGRARTLAIQLSWLWLRHQPDSALSRWYRERVGDQKGRVKRIAIVALARKLMVALWRFLTQGLVPENAIVRAAAPAGR

SEQ ID NO: 387892 - protein, 318 aa, unidentified
MTYTQQQTALYVGIDGSKETLAVATYPTHQVKVIPNDADHCEALADELAQQSVQCVLLEGSGGFEKLIVRALQQAGVPMAIVPPQRARYFAKSLRGNLKTDRVDARLLARFASCYLALEATEVPAVQAQLKELWARREQLVQMLESEKKRVQVATHPLVRASLERTIAGLHAELAQIEAAIEALVAPDEALAQKAALLQTVVGVGWVVASGLLAELPELGQVSHKVIAALAGLAPVRRESGRWRGSARIGGGRCRVRRLLYLAAVVAVSHDARWKAVYQALLAKGKAKKVALCAVARRILVVMNAMVRDGRAYERKRE

SEQ ID NO: 387893 - protein, 495 aa, unidentified
MNRRGTAIPFERLRKTTYPIQRRQPPLMMEEAMAQRNRGNRPIRAGFQLTYPNAAGIDIGSAAHYVAVPPGRDDEPVREFSSVTAELQRLADWLRACGVDTVAMESTGVYWIPLYELLDARGFTVLLVNARHVKHVPGRKSDVLDCQWLQQLLSFGLLRGAFRPQDQRCALRALTRQRAMLLRSQGRSVQHLQKALTQMNIQLANVISDVVGETGQKILRAIVAGERDGQALAALRSGRIRASGEEIAKSLQGTWRHEHLFALKQALAAFDFTATQIAECDVEIEQQLVTLQLCDDTPPPGKKRSRARNAPKFDLRTQLFQLCGVDLTRIDGIDVTTALTVLSEVGPDLSAFPTVKHFTSWLGLCPGTKITGGKVLSGKTQRNAKRAAQALRLAAAALRSSQSALGAYFRRLCSRMDKPKAVTAAAHKLARLIYTLLTKGEQYTDQGQNYYEQRYRERVIRQLTKRAEQFGLALVPSDANQAPTSPLVPASVGVS

SEQ ID NO: 387894 - protein, 348 aa, unidentified
MVADSLDVVIGVDTHRDAHALALVATASGALLLEAVVEASTDGYRDALELARAHAPGRRVWAIEGTGCYGAGLARFLLARGERVLEVDRPRRERRAQRGKSDALDALRAARSLLGGEQLARPRQAGAREALRGLISTRESAVGARRAALNQLRALIVTCPEPLRAELRPLTRARLLRRLRGTRPRRHADRQLRGTLLAMRLLAVRIEALTLEQRELEGEIVALVRELAPQLLAQPGVGPISAAHVLLAWSHKGRLRNEAAFARLAGAPPIPASSGKVVRHRLDRGGDRKLNRALHTIILTRRRTDPDTIAYIQRRVSEGKSDRDAVRSLKRYLARSLFRQLEAPPHPA

SEQ ID NO: 387895 - protein, 428 aa, unidentified
MVAVVIGVDPHKGSHTAAAVSAAEELLGELRVGACADQVQQLLAWAAAWPERTWAVEGAGGLGQLLARQLLAAGECVLDIQPKLAARVRLLAAGNTNKNDPNDARSVAVAALRSVGVREACREDHSAVLKVWSERYKDLGRARTQVACRLHAVLCELIPGGVRKRITAGQTGRILASITPADAVAAARWQLAAEHAADLRGIDARIRQTRKKIDAAVRGAGTSLTGIFGVGPVIAAAVIGEVRDVSRFPSRDHFASYNGTAPIEVSSGGRKIDRLSGRGNRRLNHAIHMAAVTRVRHRHSDGRAYYDKKLAEGKTGKEALRALKRQVSDAIYTTLQADAARAAARPAPDEPGRATGERLFSQRGRLTPPAPALRASHSRTRHQLTAPPATPADPAPAPSRTAATPSERAGGSRTGAQPGRTAAPAGRP

SEQ ID NO: 387896 - protein, 391 aa, unidentified
MIYIGIDVAKDKHDCFITNSDGEVLFKAFTITNNLDGFNDLYQKIETVMKDITKVKVGLEATGHYSYNLLGYLIDKGLPTYVINPLHTNLYRKSLSLRQTKTDKVDARTIASILMSDVNLKSYSDISYHNEELKSLTRYRFDKVKERAKLKSSVSRLICILFPELEKLVPTLHMASVYALLSEFPGAKQVANAHLTRLTNLLSEASKGRYSKDTAITFRDAARTSIGSNMPAKSLELKHTIKLIKELDSEIDEIENEIKIIMDEINSPILSIPGINYRMGAMIIAEIGDFSRFDSPDKILAYAGFSPSTYQSGHLYGAYAHMEKRGSRYLRYALYNATKYVCHWDPTFTVYLAKKRAEGKHYNVAISHAVKKLIRVIYHLEKTNQQYIKAS

SEQ ID NO: 387897 - protein, 368 aa, unidentified
MRDASTFVGLDVHKNTISVALLRPGQPVLEWSLANETAAVCRLIRRLEREAEGGLHCCYEAGPTGFVLQRQLTRAGIDCRVIAPSLIPVKPGARIKTDRRDARKLAELLRAGLLTEVMPPTEEEEAVRDLTRSRDDAQRDLTRARNRLSKFLLRRGCVYVVGRKPTWSAKYRAWLRALTFPRRADQIVFEDYLLAVEQVEGRLEGLNEEIESVAQEQPWRERVQALRCFHGIDTVTAVALVAEIHDPQRFPHPRQLMSYLGLVPREHTSGMRERRGGITGTGNRHVRRLLVEAAWHYRHKPVVGRDLRLRRRGQSPKAIALADRALRRLTLRQRRMLYQGKHPNLVNIAVARELAGFVWNVLHPASAN

SEQ ID NO: 387898 - protein, 360 aa, unidentified
MTGTMTWAAMDVHARSTYAASMDVITGELTRQRFDTGAVEPVVGWLASLPGPVRCCYEAGPTGFGLYRAAVAAGIDCQVIAPSKTPRPPGDRHKSDRRDTDLLLRQLMAGALTAIVVPSPTFEAARDLARAREQVRVDLMRCRHRLSKLLLRHGRVWDRSTWTNVHREWLGSQTFAHQNTELAFIDNLAACDGLTARKQTLDERLSWVATDPEFWPLVRRLRAFRGIDTLSALILVLEVADFTRFPRAVQLGSWLGLVPSREQSGESDRNGSITKTGSKYARRILVEAAWHYARPPRIGKTLYERQEGLPDHVLQIARRAQTRLYRVHRRMQERKKPGNVITVACARELACFLWAAATAP

SEQ ID NO: 387899 - protein, 355 aa, unidentified
MSQEKYIGMDVHQATISVAVMDARGKLIMECLLETKAATILEFIQGLRGTLALTFEEGTSAAWLHDLLKPHVSRLVVCDPRKNALLKDGNKSDRVDARKLAELLRTNQVKPVYHGKHGTRALKELGRSYLTITKDVTRVMNRIKAVYRSWAIPCAGTSVYTPRHRAEWLAKLVEPGVRIRAEHLYQQLDSLEPVRLEARRELLLESRKHAAVKLLRQIPSIGPIRAALLVALLQTPHRFRTKRQLWAYSGFAVEIHDSGEYRSVRGKLQRNRERITVRGLNDNHNKDVKSLFKSAAISASTRPGPLQDFYVARVESGMRPTMARLTLARKIAAITLTLWKKGVSFDPKQLQRQAA

SEQ ID NO: 387900 - protein, 427 aa, unidentified
MVDETPGDNPVTREVFFVTEGQITVGVDVGSHMHRVAIGIPEKKIAEEFDLPHNKDGFERFFGRISHYEKTYQVPVVVAMEGFNGYARPLDRMVQEKGYRLLNVNNLKLRRFKEIFPSPAKTDVIDARKILELVRLQPLLSDQEVILQEVRDVPKEHQILKRLTRRRRQLVCEKAAVLNRMQSDLHAVSPELAELATNKDGLAFLRFLTCREDLRQLERVQKRTLLGIKGIGEGFAGKVKEWQKKAQFSEEAEYAGPMIIEDARRILELKERIKALDKQIGEFCERSRLAGIVRSIPGFGLTCTSEIVAEVATIDRFRSEKSLAMYLGMAPLDNSSGKRRGTRHAKQVNIRARSAMMTAMNRHILRVEESERYYRKKRNEGKKHNQAIRSLGRHMVRVLWSMIRDGHLYENRKINNIMEVVKEAIPA

SEQ ID NO: 387901 - protein, 357 aa, unidentified
MHDLTTNIFPATIGLDLGNKNTQCAVYGADCERIEERKVTTNREQITTLLKRFAGARIVMEASTASRWIFNLAKQLGHEVIIANPRCIPIITSSVRKCDRNDARLLAELGQLRPSLLSPVTLRDDCFQELRTLLFARQQLVKQRTALVCFIRSEVRVLGHSLPSCGTKVFAKKCRALIPESLQTALNPIFDVIQNMTDGANQFDESIIEISKNDFPQTEVLRQVHGVGPLIALAFVATIGDPGRFAKSRTIGAYLGLVPRIKQSGKSDPALSITKCGDRFMRSLLVSAATKILGPKGEDCELRRFGERIAAQGGKRAKARARIAVARKLGTLLHALLRTGEVYEPLRSCESADVQVA

SEQ ID NO: 387902 - protein, 349 aa, unidentified
MGVVCRIGLDIAKLYFQVHGVDKHGGEVFNKKLRRTEVLPFFANLPSCLIGLEACGGAHYWARELAKLDAGHTVRLISPRLIKPFIINNKTDAADARAICEVVGRPATRFVTGKTVEQQDMLAWHRVRERKVRERTALVNQARALLGEQGIIMPQGISHVRKLLPLVIEDLDNKLSMSARDYMSELYTELVEYDEAIARYESRIKAFAKANEACQRLQNIPGVGPLTSTAIVAQMGSAAQFKNGRAFAACLGLTPKEYSSGGKQKLLGITKRGNRYIRKLLIQGARIVLRYGLLRPEEDASPRLQWLRSLFGRRGRQIAAVALANKTARIIWALLSSGEAYQPSSVQVG

SEQ ID NO: 387903 - protein, 362 aa, unidentified
MVYFKYKLVKMKKMVKQVLGIDVSQDGLVVCLGKMYDDWTPELVAHKTFENTAKGFPALLDWVAKLTDESTRVGYAMEATGVYHEPFAYFLHDQGMDVHVIVPNKISNYARTLDVKTVTDKTASEAIAMFGLERKLDNWEPPKGIYRRLQQLTRERGQLMDESTVIKNRLHAEKAGAKPNKKSIERGTTRLELIGKQLKEIMAGVSELISTDSETQAIVLLVCSITGIGLLTAATILGETNGFELIRNKKQLASYAGLDVREKQSGTSVKGKPSISKKGNKHLRRAMHLPALAAIRHDERFKAIFARLVPKHGIKMKAAVAVQRKLLEMVYTVFKTKKKYDKGYFKKEQMKKEEEVMEVVVE

SEQ ID NO: 387904 - protein, 428 aa, unidentified
MNCNTQNAKIASITEKTLIVGIDVGSETHYARAFDWRNYEYAKKPLAFSNTEAGFQTFMAWMEDIAEKHGKTAVIPGMEPTGHYWFALGKFLQDSGMKPVHVNPHHVKKSKELDDNNPNKNDRKDPKTIAALVNEGRFSYPYIPTGIYAEIRSLSNLRFQAQEELTRIKNRIARWFAIYFPEYKDVYGDLTAVSGRMVLKAAPLPGDIRKLGVEGVNQIWRDAKLRGAGMKRAKTLVSAAEHSVGSKEAPEAARMELRDLLDDLDVYALRLEGVLWKLEEKLREIPYIDKLMEIKGIGLITVGGFLAEVGDIGRFDNPKQLQKLAGYAIVANESGKHNGKSRISHRGRKRLRYVLYEAAISLIGKNEAFREIHEYYRTRKENPLKKKQSVVAVACKIIRVFYAILTKGVAYDEAKLLGDIRRPQMQEV

SEQ ID NO: 387905 - protein, 332 aa, unidentified
MGVVIDGVGKVLGTLIAPAGIHGYQQLLQWSRSFGACTRAGVEGTGTYGAGLARILRDAGIEVLEVNRTDRSKRRLRGKSDPTDAENAARAVLSGEATAIPKLQSGVVEAMRAITVARRSAVKAKTQAINQLRSLLVTAPDPIRSKLMKSKPEDCVQACIQMRVLGTTPLLKALSRTLRILAKRWTVLAAELRELDAMLEALARRAAHRMLDRFGVGPYTAATLMVVAGDNPERLRNDAALAALCGASPLPASSGKTQRHRLNRGGSREANNALWTIAMVRMRSDARTRAYVARRTAEGLSSKEIQRCLKRYIVRELYPLILADLRDATVTS

SEQ ID NO: 387906 - protein, 385 aa, unidentified
MTQAPGTGTVIDYERTLILAIELSNTSWVLAAQIPGLPGVKAKRSIDPTPEALMAAIENYRGRAEKAGRNVDRVIAVYEAGWSGFWLVRWLAKHGVEEAHVIQPSSVPVDRRARRAKSDGIDAELLLRTLLAWLRGEPRVCSMVPIPAEADEDARRRVRERAELISERVGLVNRIGAVLATLGAGEYNPLRRDRRQRLDELQTALGDSLPTNAHAKIARMLDRLELLLIQITELEQSRDAVLEDENPDRASSMIQQLAKLRGIGVQSATVLVREGFVREFVNGKALGSYAGLTATPYSSGGIEREQGIGKAGNARLRTVMVELAWLWQRYQPGSAQVRWFRERSGTGRRVRKVMVVALARKLLIALWRFATQGVVPEGAVMKPAS

SEQ ID NO: 387907 - protein, 357 aa, unidentified
MTSMTMVTGPVTGGVDTHGQTHHAAAIDQVGRQLGDREFPATPAGYRTLLAWLCGHGRVERVGVEGTGAYGAGLARHLRAADIRVVEVDRPDRQGRRSHGKSDPLDAYAAARAALAGTASGAPKTRDGRVEAIRALRVARCGAIKARTQSTNQLKSLLVTAPAELREQLRQLSTTALIATCARLRPTSELSDPEQATKTALRRLARRHQHLNEEITEADAELRALVTTAAPRLLALPGVGVEVAGQLLTSAGDNPDRLRSEAAFAHLCGVAPIPASSGRTHRHRLNRGGDRAANSALYTVVLVRLRHHERTRAYAARRTQEGLSKREIMRCLKRYVAREIYTALQPASQQEDLVETA

SEQ ID NO: 387908 - protein, 342 aa, unidentified
MDRLSLVTRICKVGFTMENELHFIGIDVAKAKLDVDILRPDGRHRCKKFDNTLSGHEALVRWLRGHDVNRAHVCMESTSTYMEDAAAHLSDAGYTVSIINPALSKAFAQSEGLRSKTDKVDARMLAHFCREKRPSAWEAPHPTERALKALVLRHQALTEMQTQEKNRRETAPEVQLASIDILLGCLSAELARIEKQIKDLTDNDPDMKRRRKLLNSIPGIGEKTAAVLLAYTGLRLKFGTARQFAAYAGLTPVQHESGSSVMRASRMSKAGPVQLRKALYMPALSALYHTAWGKAFRKRLEESGKRAKVIIGAMMRKLAQVAYGVLKSGKAFDASQHELLIA

SEQ ID NO: 387909 - protein, 410 aa, unidentified
MKQLFVGIDVGSQNNAIYLMKPNGEKHSSFSVQNNQGGAKLLSEKIVSALESQRLERVVIGMEATSIYGDNLVYALREDGKLGRYPRKIHVLNPKQVSKFKEAYSDLPKNDDVDAFVIADKLRFGRINKEVYMDDYRYKALQTLTRARFYAVQGLTREKQRFANYLFLKFSGLAQDKNIPNTSATTLALVEYFETVDELARISLDELTAFLIKTGRGRFADPEATAKAIQAAAKGSYRLPRTVNDSVSQAMSVSIATMRALDNQIKSLDKAIEQQLEIIPNTLTSVPGIGKVYSAGMIAEIGDINRFHSHASVAKYAGLAWTQHQSSTFEAEDTRLIRSGNRFLRYYLLEAANSVRRCDSEFRRYYDLKYKEVKKHQHKRALALTARKLVRLVFRLLKDNRLYNPPEKRA

SEQ ID NO: 387910 - protein, 393 aa, unidentified
MICVGIDVAKDKHDCFILSSEGEVLADVFTISNNAEGFDTLLQTIHRCARPEDKIKVGLEATGHYSYNILGFLLDKGLHTFVINPLHTNLYRKSLSLRKTKTDRVDARTIAAMLMSDVDLKSYTDTAYHNEELKSLTRYRFDKVKERAKLKQSVSRLVTILFPELEKLVPTLHMASVYALLSEFPGAKQIARAHLTHLKALLNDASKGRYGRDMATELRDAARCSVGSVMPAKSLELQHTIRLIRELNTEIEDIESAIQTIMEEMQSPITTIPGIGFRMGAMILAEIGDFSRFDSPDKILAYAGMSPSTYQSGQLSLSGTYSHMEKRGSKYLRYALYNATKYVCLWDSTFEAYLAKKRAEGKHYNVALSHAAKKLVRLIYAMEKSRQPYNSVA

SEQ ID NO: 387911 - protein, 326 aa, unidentified
MAMLSFCGIDVSKDRLDVMVLPEQQSFSVGNDAAGWAELIARLRGFTIAAIGLEASGGYERGAMRALLAAGLPACQVNPFKLRQFARASGVLAKNDPLDTRMIASFVAIMPTRPARPRSPALERLAEMLAVRRQLNADKVAAGNAARLLEDPMLQRLSRRRIARLAADIDMLDRHLVEIVETDAALAYRYRLLTSMPGVGLVVACTLIALLPELGTMSRKQVAALVGVAPYAFESGKFKGRRCIWGGRAPVREALYMAAMSAGNWNPVLKAFRKRLKGAGKMAKVVIVAVMRKMITMLNAMVRDDIVWADHLHGRHSVPTAWQPLR

SEQ ID NO: 387912 - protein, 429 aa, unidentified
MIMGFTKPIEHFNPQRKKVITMNTLYVGIDVSSKSNVVYLMLPNGNKHSNFSVANSHEGSTQLVKRIRSALTSHSLDTVLIGLEATSVFGDNLVYFLREDATLAPFNRKIHVLNPKQVKKFHDAYNDLPKNDFMDSFVIADCLRFGRINKEVYLGDYHYKALQNLTRARFFAVQNLVKEKQRFMNVLFKKYSTMTQEKVFSDTFSTTALAVYDEFESAEALANMDLHELTDFIIEKGKNRFPDPDAVAKAIQKAARSSYRLPKTVNDSVNQVLSISITSMKALESQIKEFDKAIKSQMELLPNVLISISGIGPVYSAGIMAEIGDINRFNSQAALAKYAGLAWKQHQSGGFESEVTRLIPSGNRFLKYYLCEAAFSLVRCDKEYSDFYHLKYKEVNRCQHKRALALTARKFVRLVFRLLKDNRLYCPAK

SEQ ID NO: 387913 - protein, 325 aa, unidentified
MSQIWVGIDVCKAWLDVHIRPEQKIYRLPNTEAGVKELISQLPDPTEVGRIILEATGGMELTSALTLHQAGFPVVVINPRQSRNFAKATNQLAKTDKVDAKILAFFGEALRPEVRTMAAEETRQLNDLVTRRRQIVEMLTAERNRLASIRGKAREDIEANIEWLNQRLKGIDEQIAQQIKESTLWTEQEAILTSVPGVGLVVASTLLSSLPELGTLTPKQISSLVGLAPMNCDSGQMRGKRRITGGRAQVRSALYMAALVATRYNPVIRDFYNRLLERGKLKKVALTACMHKLLIILNAMLKQKTEWRKVAVTPATPVKVTNELA

SEQ ID NO: 387914 - protein, 330 aa, unidentified
MHRSVIARIDEFGNELGWVRIDNDPKAVVAECRKAGKGAPVAIEATYGWYWAVDALLKAKFDVHLAHPYGMKALRKRKRVKTDPKDAYELATLLRLGSLPEAYISPPELRELRELVRHRQKLVKLQTAVKAGVRALLAKHNIRIPGRDLNGGKAIAVLDDLQLPGTYATRLASQRRLLMVLADEIAIVEADLARRLKDHPGYTRLLSIGGVGPTLAAIFVAEIGDVGRFKDAAALCCWAGITPRHYASDKTVRRGHVSKEGNALVRWAAVEAVQRNCEPSIRAVRDGIIARRGKDARNTAKVAAGRVMLEAVYYLLRDGHSRRLHPAVAA

SEQ ID NO: 387915 - protein, 339 aa, unidentified
MKLYGGNDLHSNNNVLVLIDERDRLVYEKRLPNKLEVVEKELRPFRKNLVGLAVESTYNWYWLVDGLMEAGYRMHLVNTAAVKQYEGLKYTEDRHDARHLAHLLRLGILPEGYIYPKAQRGVRDLLRKRLQLVEQQTANVLSVGSLITRLTGRTPSCRHIKRLSEEGLVRMGIEGEWKLGLQANLSVLQCLAVQIDEVERAVLARVKSESGFESLLSVAGVGKILALTIWLETGDISRFASVGNYASYCRCVGSKRLTNGKKKGQGNRKNGNKYLGWAYVEAANFARRYYAPVERFYQRKRAKTNAVVATKACAHKLARASYYVMRDQVLFDIDRAFAK

SEQ ID NO: 387916 - protein, 354 aa, unidentified
MNAQKYTIGIDLGDRRHAVCVLNARGTIVCEEAVINTRECLTVFAQRHPGALVVMETGTHSPWVSRLFEAQGHRVIVANARKVRAISTNPTKNDQEDARMLARLGRADPALLSPVQHRSEAAQRALVHLKVRDALVRSRVSQINTVRFLLKSLGVQLPRSVKATAFVRKFREHASTADATLVEPLLQTIDALNARIKELDVRLEAMADESYPQTARLRQVDGVGPLTALCFVLTVENPARFPQTRSVGAYLGLVPRRDQSGLTDKQLPITKAGNTQLRCLLVNCAHYILGPFGPPSHLRDTGERIAARGGKSAKKRAVIAVARKLAVTLLALWKSGAEYQPLPPAVSPSNRLAA

SEQ ID NO: 387917 - protein, 318 aa, unidentified
MTRSADVEWSSVGIDVSKAELVIAVAPSGERWTSATTPEALVAFVARVKTVAPSVVVMEATAGYDVPVAVACAAAGLPVAVVNPRQIRAFAQAIGRTAKTDPIDAEVIALCGERVRPEPRPLPDADTQALAALVARRRQLLEMLHAERQRLEQATATAVRRDLRQHVTWLKRRVADTDDELQKRIQKSPAWREKDDLLRSVPGIGPAVSRTLLAELPELGQLDRRTIAALVGVAPMNRDSGRFRGKRMIWGGRASVRQALYMAALVASRYNAPLRTFYQRLQAAGKPKKLALVAVMRKLLTILNAMVKHNTEWQQQAA

SEQ ID NO: 387918 - protein, 416 aa, unidentified
MTDPQKSSTFERYLAIDAHKHYVVVGGLNAQLEIVLPARKMDMERYPQWAKENLTPRDCLVIEASTNTWDLFDVTAAVAGKVMVAHPLAVKLIANARVKTDKQDVFRLARLLAGGLIPEVWVPPEHVRELRTLIAHRRRLIQMRTMTRNRLHSLAHRYNLTLPEGGPFADKNQDWWKGLSLSPVEKLRLQQNLALLEFLEPEVKAVDAELARLSNCDPWKDAFPYLVQLPGFGLIVVMTILSAIGDIQRFPTSKQLVGYSGLGASLHQSGEENYSGHITKQGRKELRYALVEAAWVAVTSSPYWREQYQKLSHRMSANKAIVAIARRLLVAVWHVLTERAADRRADPDMVASKLMVWSWKLNEVQRGGLTSRQFVRYGLMRLKIGQEIDCIKRQGNRPIASVEEVLERLPELNLNI

SEQ ID NO: 387919 - protein, 376 aa, unidentified
MEWSASLPKRPQVGHDVSFTENIKTEVRQTMNNNTAKGPITVLGIDLAKQSFQLHGVDEDGHVVLKKKLNRKQLSAFVANLPVCLIGLEACGGSHHWVRIFTEMGHTVRMMAPQFVKPYVKSNKNDAVDAEAICEAVQRPNMRFVPAKSIEQQDIQSIHRIRSQLVARRTAQANQIRGLLMEYGIIISQGIKCIRKNLPDILEDGENVLTVIFREQLSALYDEMVHLDERVDVLEQSLKTICNQNKDCKRLLTIPGVGLMTATALIAAIGDISAFKSGRELAAWLGLVPRQHSTGGKPTLLGISKRGDSYIRTLLIHGGRAVVRCAHKHEDKRSQWVGEVEQRRGKNITAVAVANKNARIAWALLTKKEDYQAKAA

SEQ ID NO: 387920 - protein, 356 aa, unidentified
MMVGAFDVHRRQITYDWVDRATGEARRGQIAPATRQVLRSWLGELPSGDGHFAVEGCTGWRFVAEELAAAGLTAHLAEPADTATLRGRKRRAKTDRADARHLRELLEQDRLPESWIPPAHILDLRELVRLRKTLIDQRTQWKQRIHAVLFHHGLPTPPQTVGTQAGRAWLAAVTLPPPSRLLVDVGVAEIDTTTHRLEPISVWLRAYARRQPGCQALMRELFGVGPLCATTILAELGDARRFAGGDAVVRYSGLDVTVYASDGKRSPGHLARQGPEVLRWALFEAAKSSARRTAPDHAYYRQVKDRLTANRATLSTARRLARHARHVLVELGDQALAPVCGDQLPPLLPLPLPQAA

SEQ ID NO: 387921 - protein, 340 aa, unidentified
MGEITTIGLDLAKQVFQVHGIDADGTTVLRKQLRRSQVLSFFSRLAPCLVGMEACATAHYWGRELAALGHEVRLMPAQYVKAYIKRNKNDAADAEAICEAVVRPTMRFVPAKTAEQQAALLLHRGRERLVRQRTGLVNALRGHLAEFGVIAPQGLRNVGKLIAVVRDVGDARLPDLARQVLEVLAAQIEQLEGAVAAVEKQLMAWHKSNPVSQRLATIPGIGPIIASAIAASVAEPGGFRSGREFAAWLGLVPRQNSTGGKHRLGGISKRGNQYLRRLLINGASANLLRSKATKADPWVIGLRRRRPSLVVAVALANKTARIAWAVMQRNENYQRMAAAA

SEQ ID NO: 387922 - protein, 422 aa, unidentified
MLEETHDTEELIARVAALDIGKAELVCCVRVPSAQGSGKRAQEVRTYPTMTRSLLVLADRLRQLGVTRVVMEATSDYWRSPFYLLEAHGFEVWLVNARDVKHLPGRPKTDKLDAVWLCKVAERQMLRPSFVPPPPIRMLRDLTRYRADLVAARTADKNRVDKLLEDAQIKLSVVASDIFGVSGRDMLAALIAGERDPKVLAQLARRRLRAKLSLLEEAFHGRFSDHHAFLLQTMLSRIDQASADIAALDAKIDQQIAPFAPAVDQLDEIIGVGRTAAQVIIAEIGVEMGRFPTPGHLVSWARFAPGVKESAGKRKGKATTGHGNPYLARVLGEAAVAAGRTNTFLGERYRRIARRRGAKRAIVAVGRSILIIIWHLLSDPTARFHDLGPGFYDTRSNADRRKRNHVRQLEALGYKVTLQPAA

SEQ ID NO: 387923 - protein, 384 aa, unidentified
MMFDPRDARQEFEKFLSGRNLNERNLNLANGCEAFFLVPGVERQPLKKLKTDEHALLALLERWRGEAMRSGNAITRIVVAYEAGRDGFWLARWLRAQGIEAHVIHAASIAVSREHRRAKTDRLDTELLKRAFLGWLRGERDHCKMVAIPTVAEEDARRPGRERESLVGDATRIINRIKSALARLGIRTFKPTLKKATALLNDLRTPDGDPIPPNTLDEIKRDMERRQLICEQIRRIEQERVKRLEQAPDTGPNVMVHLLARVMGIGIETADTLVREVLTRNLRDRRARYGGLTGAPSRSGNINREKGLARSGNPRVRRCMIGLAWRFVRLQKDGPLVKWFELRTANARGSRKTMIVAVARKLLIALWGLVHEGVVSEGMVMRPA

SEQ ID NO: 387924 - protein, 362 aa, unidentified
MKYFIGLDVSMKETNICIVDKDGKIIKEGKVTSDPDAIMKYIHKTKLDIEKVALESGCLSNWLAKNLLEQGCPVVCVDARHIAAVLKMTINKTDKNDARGIANAVRCNMYREVYIKSNNSVEKSTLLGARECFSDQKTRFTNTIRGLFKGYGVRFSESATSSSARQTEKFFKRAREEAEKLDDSVNFSLQELISFAEKLHEKVKEFDKKIATVVKDDKEVQLLQSSPGIGPITALTFTMIIDDPIRFKKSRSVGAYLGMTPKQYSSGETHHQGRISKCGPGRLRRLLRQAGSYILSRSRRNSKLKAWGLKLTKKIGKQKAALAVGRKLAVIMHRMLITGKEFEYEEEKVIQEEVKKAVRKAA

SEQ ID NO: 387925 - protein, 341 aa, unidentified
MHMRKVTSRTTNGKISESPDFDHFVSLDWAERSVAIGHLRRRDKDPVVMERPSDIALLKDYLNTLRGTIVLTFEETTTAHWLYLELRDCVDRVIICNPYRNHLLNEGPKTDKIDAAKLVLLLRAGLLKEVFHSNDELYDLRLLVSAYTDLIRAGVRLQNQRSALERGHGDTSAHASFILEHLDKDIEHYRQSKNDYTTIFDQFCRRLGPLKLLLPVTGIGTIAAVTIVAIVVDARRFLRSGKYLSYCGLVKLEKSSGGRSYGQRKPQFSRPLKAVYKIAALSAIQGNNPVREYYDALLAKGLPEHHARHQVARYLATVTYGILKTGTPYDPYRWRKSISIA

SEQ ID NO: 387926 - protein, 354 aa, unidentified
MNENTSLETIGCDRGDKMSEICRLCSDGSQERATVRTTMKGMTAFFSRPRCHVVIEVGPHSRWVSELLHQLGHQATVANPRQVRLISGGTHKSDRRDCELLARLGRVDVELLAPISHRGRESQADLAVAKGRDILVATRTKLVNHIRGVLKSFGLQLPRCDAECFGRKTRELVPTELKAALDPLYETLVVLEQQIREHDKTVERIAKRYPDVKVVSQVNGVGTLTALVYILTIEDKGRFERSRMAGAFLGLQPRKSQSGNDDPQLKITKAGDPFMRRLLVNSANYILGPFGKDCDLRRWGTELAKRGGKNAKKRAKVAVARKLAVLLHRLWTTGEVYQPIGYRQRVVRDQQIAA

SEQ ID NO: 387927 - protein, 346 aa, unidentified
MITIGVDPHKDTHTAAAVKDASGEFIDELTIPATDAGAELLLEWAHGPAGDGELRFALEDVRNVSGRLERFLLDRREVVLRVGTRLMVGTRKSARTFGKSDSIDALAIARAALREPNLPRATHRPELRELKLLLDHREDLVGERTAVVSRLRWHLHELDPELEPFARTLNREPVRRGLAQRLARHGSGVQVRICRELIARIGETTRAEQALRAEIATLIGPLAPGLLAISGVGDLIAARLLVETGGARFATDAQLARHAGCAPIEVSSGRVRRHRLSRMGNRKLNAALHQVVLTQARVHPPARAYLDKKRAEGKSNKEAFRCLKRHLVRVVWRALQEPSVVAAYGT

SEQ ID NO: 387928 - protein, 338 aa, unidentified
MRHLGVDLHSNNLLVCYRSEKGEQRFAKFALSQIDQFREQLLPTDVVAVEATATSRWFIKGIASLVSAVEVVNPRQFEVIARSVKKTDRADAANLAEFSSKLLLPTVRQKTDAQAEVQSLCALRTHLVEMRSALFNRRHSIVIASGRQETKRSVKSALGRRRLLAQSGWSVLEQVQLEIIARQIEAFDHSIVEAEEKIADAGAQLSGYANLLSIKGIGTSSAALFAAVIGEIGDFADAGKLASYLGVVPKVSNSNQSIRHGRITKQGNKAARTALVQCALVASKFSAYLKQFYDSVKARRGSGKAKIALARKFLTVIYHTLKHDWLFTDFPNFVKTEG

SEQ ID NO: 387929 - protein, 353 aa, unidentified
MDEKQLYWVGVDVSKDDFDAAVVAPGQYPSAEVIRGLPAQTFRRDPKGVKEFVRWLRGLVPGSPLEARVVMEATGEYSIQLTAMISKRCPDLFPSIVNPQRTKGFRESLGLRNKTDRLDARALAFYGLSHRPDPYEPLSPAQAELRSLSRCRGNLINDRTAHQARLRQKSISPVSRDCYREVVTVLNKKITALEKEMLRVIRSDEDLKRDYALLVTIPGVGFVTAATALGELGDLRRFGSSRQIGAHAGVTASHNDSGKSTPPARMSKKGNARLRRALYMASLSASKHNPHMKIVYQRLEGKGKAKKVALGAVMRKLIVLMRAIVVSGRPYERKWKTQWKNTPENLATAAKGA

SEQ ID NO: 387930 - protein, 378 aa, unidentified
MNRIIKIGMDVHTTNYTLCIFEPSFEHDGTVHCITQVKPEVKNIIHVIETFKKKHENEELNIVCGYEAGCLGYSLYHELKEKGIECVILAPTTMKTEKGGRKLKNDYRDAKMIAECLAYGGYSAVHVPTELDNSVKEFIRMRDDIKENLKSIKQQIIAFLTRNGKQFDGKSYWTQKHIDWINTISFSEPLLQDTLKEYMIEYNHLCDRVETLDKQIEEVSLKEEYVEKVQQLQCLIGIKTHTALSLIVETSDFNRFKKGNMYSAYLGLIPGDDSSGGHENKLGITKAGNSHLRKLLVEAAQGYTRGRVGFKSKDLKARQEKCGSEVVAYADRANERLRRKYYRMTLRGKRYNVAKTAVARELACFVWGIMTDYIDLCS

SEQ ID NO: 387931 - protein, 350 aa, unidentified
MMIIGCDLHTRYQQIAVLDTETGELVERRLEHENGEARAFYAALQGTVRVGIEATGYTHWFEGLLAELGHELWMGDAAKIRASVIRKQKTDARDAEHLLNLLRQDRFPQIWRPSPAERDLRQLVWHRQKLVWMRGAVKNQLHALAMGEGVCRKKKLFTAKGRKELEGLALGPWASYRRQELLRMFDELAAATAQLDLAVEQAAKNQPLAVRLMTHPGVGPVTSLAFVLIIGPVERFERSKQVVSYLGLNPQEHSSGGKQRLGAISKQGNPMMRSLLVEAGHTAARLDPALKRMYQRLKFRRGASVAKVAVARKLAVRMYWMLRSTADYAQLVRMQGSPWATLVENSPSLG

SEQ ID NO: 387932 - protein, 398 aa, unidentified
MSMYFIGIDISKYKHDCCIISAADQKVVSKVTIKNNKAGFNELLTIIHSLANPADIRIGFESTAHYALNLELFLENANHSFMEINPVLIKDFKKSQTLRRTKTDSIDCELIARWLMTVEYKPHSKGFYHAYSLKSLTRLRDKLIRQRSFYLVKITNVLDHTFPEFKPFFNERLSKTALYLLENYGSAEKMARMNSASYEKLRSVSRGKFSPQQFLRLKELAANTVGVNNSIFDVELNSLLSLYKSLVKEIDTIEKEINKLIEEVHPHYMSVPGIGPLSAAVIYSEYGDISNFTNPGQMLAFAGIEPGINESGTESHGGKMVKRGSSQLCYTLINWNLLSIIPIADLILQIVRKLFYINACINDEKSLKISVLSQIRKAINMLKVLKLYDFQICQFFNK

SEQ ID NO: 387933 - protein, 407 aa, unidentified
MRLVQIVGYLNELRPIQHSNYYKMKTNSSAPQTLYLGLDVHKAETVIAILESDRDAEPRHYGSIATTQHALERAMRRIVKKQDIQLSDLHVCYEASGCGFWIARRLIQMGVRCDVIAPSLIPVKSGDRVKTDKRDAMKLAKNLRSNDLVSVNIPDSTDEAIRDLCRARTDAVDDLRRAKTRLLAMLRRLGYNYDGKTHWTEAHKRYLRHLTLPDKAHNRVLEDNITTIDFHVKRIAKLEEGMLQLLDDWQRKPLVDALMAFKGFKHVAAMVTVSEIGTFSRFEHPKKLMAFLGLVPTENSSGTKQKRGGISKCGNPHARWILIEQATHYRVPPKVSAQLSARQEGTAPWIKELSWKTQTRLSHRFKMLKKRQLHHNKIKVSVARELTAFIWELGTRIEAKQDTATQN

SEQ ID NO: 387934 - protein, 424 aa, unidentified
MNFKMQDKQNQLIERISDTHLIVGVDIAQQFHVARAVNFRGIVVGDPLTFENNEEGFVKLQNWIEKLKRLKNLDSTIVGMEPTGHYWKNLSNWLVKQKIEVVTVNPHLVKRNKENRDNTQSKSDKKDALVIADMVKNGYYSFVRPSSESFEKLRVLISNRDVIVKRLVSSTNQIHRWVDIVFPELRQVFKDVTCKGAIATLRLFPTPNEIASFEPLDVMRGWKSLMQRQPGLKKAQLLINLAKSSIGTGQALDAYKFHLEQLLEEYDLAIKQLERVEQQVKEVLNKIPFARKLLMIKGISEISLAGILGEAGDLSGFSHGNSLLRHAGLHLAEASSGKWKGQIVLSKRGRSRLRRFLYLATMSLVMNNPEFKAIHAYNVKVKKMKKMKSIMKLVGKLARIFVGIAKRNESYCANKLQETIPLAA

SEQ ID NO: 387935 - protein, 345 aa, unidentified
MYRTRVGVDLAKKVIQVCIYKNKKVQSNIEMTPEAFLYWLINNKPVTIIFEACSTSNYWKQKAIEAGHDARLISAKLVSVVRQNQKTDKNDALAIVQATFMPDVTYIGGKTVEQQQLQSIKRLRELAVKQQDASQKQLIALLFELNIKISSRKGGIISAIEGVLEDATNDLSAECRRAIFLAKEHLRGLFESAHHYDDCINKSVAAHPACKKLMKLEGVGPMNAINLYIALGCAEIGTFSKGKDASACIGLTPIQHSSGGIVKLGSIGKFCKNSRLRSQLVCGATAAVQHAVKRKAKTKKDVWIQDLVERRGKKCAAVALANKTVRTAFAMLTQGTEYKAELLAA

SEQ ID NO: 387936 - protein, 424 aa, unidentified
MENDSTLYVGLDVHKDSITIAYALGAGEVELLGKIGTTKADIDRLCKRLQSKARRIRIVYEAGPCGYGLYRQLVQKGFDCMVCAPSLIPRKPGERVKTDRRDAIKLVRTLRAGDLSAVYVPGVEDEAFRDLARAWVSAKDDLKRGRQRLKAFLLSHGVRYTGRSDWGAAHRRWLSAFAFDNAWQQLAFEELRRTIEDRLAQCERLEAALREAVVSWRFYPAILGLQAMRGVQFTTAVGMLAELGDLSRFAHPRQLMAWLGVTPSEHSSGEKRRQGSITKNGNNHQERQQLREKAARRSSLELPVPSPREPRDPAPPRRHPQAHRGSRLGRSGAPVPTLSEARRARQGEEHRRGRGRPRAQRVHLGHQSARDVADRTARSTPRLTRNSNHLPTTGGTVSRRRRSPAYEQPASRLRNGLHPTCGPR

SEQ ID NO: 387937 - protein, 315 aa, unidentified
MQQKRELFVGIDVSKRQLDVALGAGGELWREANEPVAHAALSARLGSLQPALIVVEATGGYETALVAELAGAGLPVAVVNPRQVREFARAAGQLAKTDALDARVLALFGERMRPQLRRLSNEQERELKALVARRRQLVEMLVAEQNRLATTPQLLHHALRSHIDFLRKELRRSNRELDQFLRGSPLWQEKQALLRSVPGVGPVLCATLLGAVPELGSLSRRAIAKLVGVAPLDRQSGRWQGRSMIGGGRATVRAALYMGALTAVRRNFTLRDFYDRLCKLGKPKKVALTAVMRKLLTILNAMLKQRTAWRPACVA

SEQ ID NO: 387938 - protein, 389 aa, unidentified
MPQINDLSRSLSSFEQDRTLIVVVEVSLSSWLVAGILPGVARQPMKKLGPAEDALLALICRWKDEASRAGRNIMRVCVAYEAGRDGFWLARWLLTHGIETYVIHSASVSVSREQRRAKTDRLDTELLKRTFLGWLRGERGHCSMAAIPTIQEEDARRPNREREKLVGDRTRIINRIKATLIRFGIRTFKPTLRKAEERLEALRTAEGVPLLENTRAELHRDMARLRMIQEQIKEIEQRRLRDLESVSSAKPGPHAMVRLIARVIGIGIETADMLVHEILLRNLRDRQALARYAGLTGSPDESGSRRREKGLSRSGNARVRRGMIQLAWRFLQFQKESALAQWYRDRTADRRSSTRKTMIVALARKLLIALWLLAKTGQIPEGVLLRPAT

SEQ ID NO: 387939 - protein, 339 aa, unidentified
MQLTPVGVDIAKSVFQVHHVDPETGEIVNKAIKRAGFLEYFANRLPCLIGMEACGGAQHWARELVKLGHEVKLMPARLVKAFNIGNKSDAADAKAIWLAVQQPCKAVAVKTEDQQAVLAMHRVRQQLVKIRTMQINALRGLLTEYGEVMGASRAALNKGMPGALEKLADRLPAMLIETLRERYSELAKLDEQIGRIEQRLKVWMRRDKACQAIAEIPGVGLLTATTAVATMGDAKVFRSGREFAAYIGLVPRQSGSGGKVNLLGISKRGDTYLRTLLIHGARSVLAHAKESGAWVEQIRKRRPPNVVTVALANKMARTIWAVLAHERKYDKGSVSAAAA

SEQ ID NO: 387940 - protein, 494 aa, unidentified
MSDRKTKAPPPHTRQARAPATLTPGPSDDLRRAAQDRRRADECARIAALPVQHTHAAGIDAGDASHWVCVDATPDGADPVREFAAHTAGLRQLVAWLELCGVTTVALEATGAYGHVLFLTLLEAGFTTIMIPPQFARQIKGRPKTDRRDCQWIQRLHNLGLLPSVFRPDAATHTLRDYVRQRGNLVRLSGQHIQRMQKALELMNLKLTSVLGDITGVTGLKVLRALLAGQHDPVQLAKLRDRRCKHSADEIATALDGRYRPEHLLELRCSLTLWDNYQEMIAVVDDAIAEQLRSMRRQTELPPLPPRIRVRGRKPHDPRFDVRTALYYATGVDLTAIEGIDELHALTLVSELGSDLSKWPTLKQFTSWLGLCPNWKKTGGKVQSSQTRRGKNRAARALRLAAWALMRSKSYLGAYLRRQRSRLGAPKAITAAAHKLARIVYHLMRYGVAYLKQTEEAYAEQVRARLEKQLRRRAAELGFELRKLEPAAAPTVEG

SEQ ID NO: 387941 - protein, 330 aa, unidentified
MGTAATYFAGIDVSKDTLDACLLGPDGATRAKRFANDPAGHAALRAWADRHAPGGTVHYCMEATGPYSTALATDLHRAGRAVSVANPARVKAHMRACGQGNKTDPADARAIATFARDRRPRASAPPSPEVRELQGLVRRRDDLRRMAAAEKTRLDAPDLTPAARKSITRVVSLLSREADRVQAAAEAAAAGTPGLAADLALLESVPGVGRQTATTLLAELPPVAELRSAESAAAYAGLAPREFTSGKSVQKRTRLSKAGNARLRTALYLPTLTAVRFNPVLKGFFARLVAAGKPKMQAVGACMRKLVMVCYGVLKNRAPFDPAWASRRTT

SEQ ID NO: 387942 - protein, 341 aa, unidentified
MNVKTIGIDLAKNVFQIHGVDEHGKRLFNKQLRRAQMASFFANIPPCLIGMEACASAHFWANKLISMGHNVKLMAPQFVKPYVKTNKHDAADAEAICEAVTRPNMRFVPVKTAEQQAVLALHRSRQSFIKQRTAQANQIRGLLAEFGIVVPRGIQQLQRRLPELVEDADNPLPVLFRTQLSLLQHHMAYLFDVIATLDKQIEQCYRQNALCQRIGKIPGIGPVTASALIATIGKANNFENGRQLAAWLGLVPRQHSSGGKQVLLGISKRGDTYLRTLLIHGARAVLQSAKHKQDAVSSWANQLMARRNKNIASVALANKNARTVWALLAKEREYCAPIISA

SEQ ID NO: 387943 - protein, 321 aa, unidentified
MIYLGLDVSKLTVDCCFMYNGKTEYLKISNDSDGLTTLLEYIKINHCETIHACCESTGTYYLKLAEFLYRHDIPVSVVNPLAIKNYARLKLSRIKTDKQDSKLIAGFCENQKPKTWQPETPLQQQMKNLNRRSEQLKNILVMEKNRLQVADEYTESSINETITFLQNQIESVNRQIQELIDSDTGLKHKQQLLETIPGIGKTTATWLLSVLINPDKYPNSKHFVSYLGLTPVIKDSGTSVRGKPSISKMGDRAVRKALYMPSRSACTRTKLWRPWYERKLKEGKHPKEIYVAMMRKLCTYAYTCLQKGEPFDINLHKTVDK

SEQ ID NO: 387944 - protein, 420 aa, unidentified
MSVQEAAVSLLQRVLFYVGIDWAAETHAVCVLDATGRIRAQFTIGHTAAGFADLLRRLARLAGDPAEVAVGIERPDGRLVDVLLEAGYPVVPVSPNAIKTWRDGEVLSGAKSDAGDAAVIAEYVRLRAHRLQPATPYTAETKALRTVVRTREDIVDMRVAAANQLSALLDAHWPGAKAIFADVESAIALAFLTRYPTYLSARQLGEKRLHAFCVKHGYSGRRSAAELLTRLRGAPAGSTDEALTDAVRDAVLAQVAVLTALTAAEKNLGRSVVAHLGEHPDAAIFTSLPRSGQINAAQVLAEWGDSRAAYDSPDAVAALAGVTPVTKASGKYRAVHFRWACNKHLRKAITCFADNSRHASPWAADVYARAIARGHDHPHAVRVLARAWIRVIYRCWIDGVPYDPNKHGNAGKLRETATAA

SEQ ID NO: 387945 - protein, 398 aa, unidentified
MRTRLGGALELRDAPAPDRCLYVGIDVHKDRHTAVLTNCFGHRLLELTVGNTAEDFQTFVAAIEREATERGLTPQVALEDSTGYGFRLARYLADAGLPVKTVAPILVDRLRRHETHPEKTDSLDALGVARVLIQRMDSLPSYSVTPAEETAKALKELTLDRSFLVKEQTRMKNQLHRLLHAAYNSAYRDKFTDPFSQKALRYWRRCPVPRKATDVPGDPVLLARQIRRKIERLAYCREQIQDLEDDLRECLRASGQYLDTMSGCGPVLAVLVLAEVGDIVRFRSPSALAKYAGLSPRERSSGKTVRHRKTRAGNRRLNLALHRIALSQISPTGNPAARQYFQKKLAEGKTKVHALCCLKRRLVDIIYAMLKHRQPYRYTPTVAHGVNSNTPQGEHPTA

SEQ ID NO: 387946 - protein, 349 aa, unidentified
MSIYIGMDLHKKTTSFCAMTKEGEILRECKVPTVSEEVEKFIKSFGKKENLKIVLEPVSQSGYYADFLESLDVEVHLAHPKRVKAIAFAKVKTDKIDAKVLADLLRSNLLPESYHAPREIRLLKEKSRSRSSLVEIRTQLKNKVHAILFRNAIVYPKTTLFTKQGRTWLEKLELSLEYRNHLNSNLKIIDSINHEIVSIEKDIKQTVEENESLRFLKTIPGVGHITALTILSEIGDINRFPDPRHLHSYAGLVPRVYASGENAKYGRITKEGSKFLRYVMIETAHHQLLLKRSLVGLKWYYQRIASRKNNQTAAVATARKLLTVVWKVLKEKRPYQERLPKTMFIVSSI

SEQ ID NO: 387947 - protein, 354 aa, unidentified
MRKMQEFIVKGNRIFIGLEDSKRTWKVCVRCERTIVHEASMPAKYEVLRSYLEKRFPECTINVMYEAGFQGFWLHDLLVEDGYECVVTPPNKVSCPKSDRVKTDRRDARLLAKNIESGLYTSCGVPDRELREDRQISRTLEQVKKKIKAQKNQIRKMFDYHGLNDGLPKKKTWTDRDYRSLRTMELPYPLKVSLDADLTILETLLAVKDDLRKKLRALCQKERYKAGVQAKQSIPGIGWETAIRLTVEWGDLDRFRDGKHLASYTGLTSSEYSTGETVRRGRITKQGRPQVRGWLIECAWRAYTKDPVLLAKYRSVLHNSGSAKKAIVAVARKLVVRMWSLERTHQTYQLGVIE

SEQ ID NO: 387948 - protein, 451 aa, unidentified
MDQGNNGLSRGDRNRNARLAALRAVLPRDHAVLGIDLAQSRQAAVLADHDSRVLARWRPRCSPWKLGELLDRALRKALAAGFSGITVACEPTGHRWMVIAQLAAERGMPLVCVQPLVVARGREAEDYTRGKSDDRDAVLIARLAAQLHCYLPEQAGQGWARLRHLGARRSRLIEASTMCVQQLRDLLEVAWPAVLPAAAKPLESATWLACLWVALERGDGDLGAVHAMGRDRFIAAARGGLGAWGARRICQRIAAAAYAALADPAQVAAQRPGALERAFSVLGDWRTIRGELADVNARMLQALEAMGVLEVAGSIPGVSALQVAAILAETGDPSRFPTARAMVKHAGLAPCENSSGNHAGQAGISRRGRPTLRLAAWRAVWGALRHNPVYAARHASLTGRAEDQLTDQQARAAIAASLLRQIHAIITRRIPWDAGIAAGRRRPSQEVNAAA

SEQ ID NO: 387949 - protein, 420 aa, unidentified
MDVMVDRCAGLDVHRDEVVATVRVPGTGRRRFDQETRTFRTTLAGLALLAGWLGDVGVTLVGMESTGVYWKTVFQVLEDRFECWLLNAQHMRNVPGRKTDVKDSEWICQLVQHGLVRPSFVPPTEIRRLRDLTRLRKAQANERTRTIQRLEKVLQDAGIKLSSVASTSYSKSARAMLEALLAGVTDPAQLAELSKGRMRAKIPQLREALQSRFQIEHHGIMVAQLLSHIDALDAAQRNLTERIEHVLAPHQQIVELLCTIPGVQAHAAQVLIAECGLDMSVFPTSGHFVSWAGACPGHHQSAGRRRSGRMRPGPRWLTAQLTESAKAAVRTKETYISAHYAQLRGRRGEPKAIGAIRHDLLIAYYYIVKDKVPYRDLGPTWQHKRYSVEHRARRLQRQLEALGYAVTLDKTDQPEVEQAA

SEQ ID NO: 387950 - protein, 352 aa, unidentified
MVSAELEGAAVKVIGIDSHKATLAGCAVDELGTPVDERTLGNDRAGHVALADWARSLGVDRIGIEGSGRYGAAAARRLAAAGFDVRDVPPHLSYRERLRTRRPGKSDPTDALAIARVAAREQTLPPVRLADRSEDLGLLVTARDELVAEATQLRNRIHADLVVLLPGYGERVPNLVARRHRRGVALELATLSGVRAELARSRLSRLEETDAATKLLERRLDALLVGHPLLALPGVRVLLAARILAETGDVRRFRSADAFAMFSGTAPIPASSGQTERMRLNRGGDRQLNRALHAMALIQGRYHDRAKAYLARKRAEGKTQREAIRCLARKLARVVFEVLRRSTLATADAFAA

SEQ ID NO: 387951 - protein, 321 aa, unidentified
MIDDCDRVISEKRLDNDLDLITQHLKPFARDLTGIVVESTYNWYWLVDGLIENHYTVHLANTLAIKQYNSIKHTNDETDARFLAHLLRLNILPTGYIYPKAQRHVRDVLRRRLLLVRQRTAQLLSLQSMIMRHTGKRLTSHQVKRLTQEKLPLYFSDAATLFTAGHALQLMQQLKTQVEEIEEFVLSYCKQNTPFSIITSTPGIGKILGMTILLETGPIERFSQVGHYSSYARCVPTDKISNGKSKGKGNARNGNRYLAMAFVEAAHYATIWEPAIKRYYQRKCRKVPLMVAKKTIANKLTRACYHMLKNNTAFDITRAFG

SEQ ID NO: 387952 - protein, 397 aa, unidentified
MYIVGIDIAKRKHEAAVIDGEGTVIIKPFSFTNNCSGYNRLLAMLAKAKLPLDEVSFAMEATGHYWLALFTRLQKEGFRVQVINPVQTNSIRSFYIRQAKTDPRDALLIAEVIRFGHFSESTLHPENIYELRELCRGRHAIVSMQADVKRKVVALLDQVFPEYETAFTNMFSDTSMAILQTCPTPKELSEMCLEELCHLIEVSSRKRFRTEKAQELQALARNSFGFAMAGDVFSTMIRLYAKHLDFLKQQVQEMDRKIAEIMDTLDTPITTITGIGPTLGAYILSEIGDISRFSSAAKLAAYAGIDPTMRQSGEYNGVRNRMSKRGSPYLRHAIWLAASSAVLHDPALKLYFQKKRDEGKPYMASVGHACRKMVSIIYAVMRDNKAYTPYIPNEISA

SEQ ID NO: 387953 - protein, 419 aa, unidentified
MEGSITWVGIDAHKKTLAIAVLAPGAIKPEEFTINNDEGSIKKLVRRLHRDARGREVRICYEAGTCGYALQRRLEASGKVVCEVIAPSLIPVKPGERIKTDKRDARKLAELYRAGVLTTVSPPSPEQEAIRDLCRCREDVRADLGRCRHRLVKMLVRRGFVFNSTSRLWSEAHRRWLQAIAFENEIDRTIMAEYVLAIDQAERRLRAMNAELEKAAQLPLYREHVAWLRCFRGVDTIVAMIFIAELHGVERFESPRALSAYLGLVPSLHASGESAKRGGITKTGNGHIRRALIQAAWQYRHRKGVGPKLRTRQEGQPARVLTISDEAQRRLSGRYQRLIARGKMPTKVVVAIARELVGFLWAALRDDRETARHGARSSAQIEGAKANAAPRSSSRAKIKRPSKTGVGQRREARKEKRAA

SEQ ID NO: 387954 - protein, 339 aa, unidentified
MQVTTIGLDLAKNVFQVHGITADGTVAFNRSLRRAQVVTFFQKLAPCLIGMEACGSSHYWARELSKLGHVVKLIAPVYVKPYVKRGKSDAADAEAICEAVTRPTMRFVEVKSPEQQAILSNHRARDLIVRQRTQTINMLRGLLAEFGIIFAQGVGHAVRFAKRTHEGYLPDLPQAACDVVIDLSGQLLTLHARVNWYGRRMAAAAKSEPRIALLETIPGIGPITASAIVATLGSGEQFRSGRDLSAWLGLTPINKSTGGKERLGRISKMGDRYIRRLMVVGMISRMKQIRENPERSDPWFADILQRKPAKLAAIAMANKTARIIWAVLSRNEPYAARTV

SEQ ID NO: 387955 - protein, 369 aa, unidentified
MSVYVGIDVHRKRSQVAVISQDGEVLANRNVPNGVKPILSVIGGLPPGTPAAFEAAFGWGWLVELLEDYGFEPHLVHPLQCKAIASARLKNDKVDAAILGQLLRANLLPEAWIAPPPVRQLRALLRHRIQLVRLRTLLRNRIHAILADHGHDRPGGCWSGPGRAWLAALELPAVSREVIEDGLALIDALQEPIDRLDGEIRQHARTDPRVKVLTQLPGVGPFTAVVIVAETGDIGRFGSARKLASWAGLTPTVRGSDRTVRHGHISKQGSAWLRWILCEAAQTAKRHPDFAASYQAIAGRRGKKIATTAVARKLLTRAYHLLTSAEVQAQATATAPAPAPPACFTEPGGRQAPGELALSHEPAMPRSMI

SEQ ID NO: 387956 - protein, 396 aa, unidentified
MYYLGIDIGKNNHVASMMDGEGQVIFKAFSFPNTTDGGNALLEKFNRFASSTSSVEIGMEATGHYWLSLYSFLHEKGYMIHVVNPILTDGWRKGVEIRKRKTDGIDSVLIADLIRYGNFMETSLSDETILSLRNLCRFRSYLVDSIGDLKLKTICVLDQVFPEYQSVFSDIFGQTSRELLKNFQSLDDWVNLDMKKLLGVLEQIKLKTFARKKIDQVSSLAKSSFGVSFCKDSFSFQLKLLIEQISFVDDQVKAVEKEIEALLEKMNSPITSITGIGFITGATILGEIGDISRFSSPAKLVAYAGIDASVSQSGDYHSTNNRMSKRGSPYLRRALFQAAFVASQRDPILKAFYLKKRAEGKHHYTAIGAVSRKLCYVIFAILKENRPYEVRPVSVD

SEQ ID NO: 387957 - protein, 389 aa, unidentified
MFYVGIDISKFKHDCFIVTEAGEVVCDSFSIKNDSDGFTELLSVLDSLDPKENVRIGFESTGHYALNLKLFLEKAHYSFMEFNPVLLSKFNKSQSLRRTKTDAIDSISIARWLMTVDYKPYPIGFYHTYALKSLTRLRDSLVKQRSLYIVKITNVLDHVFPEFKPFFNNRFSKTALYLLENYGSAKSIAKMNSRSYDALRSVSRGKFSMQKFLKLKELAKNTVGCDHELFTCQLNSLLSLYKQLANEVDSLEDQIESLIAEIDPKTLSIPGIGPLSAAVIYAEYGDLSKFNSPAQMLSFAGLEPGYYQSGTSEHGGGMVKRGSSHLRYTLMNLCIPLIQYNMTFAEYYHKKRNEGKSHRVACSHLVKKLIRVIFTLEKNGINFDPTKLR

SEQ ID NO: 387958 - protein, 392 aa, unidentified
MLFVGIDVASKKHDVAITTFGQSILSKPFTISNDYQGFKKLRDEILSHTEYLDDVRIGIEETGIYSKNISEFLALCGFTVHMINPILTSHSRKSSSVRLTKTDKIDAISIARYVEFNFKRLNPYTTSLYIYNEIKSLSRARLDIQTKLIKAKTEWTRLLDISFPEFRTHYNQHSKWVYTLFNSYATPIEISKMHTSTLTKIIATQGNRLVQAENIKQLAKITIGNSSASTKILLKNTLSDILHFTNQMRIFEKAIYELIKEHFHNLLTIPGVGSITAGLIVGEIGSIARFKSPESLVAFAGVDPTVFESGQFKAKNVHISKRGSKYLRTALYTSTKVAIINPKIKDNKFRDKYHKKIAQGKHHNSAIFSAVKNIVNTIYKLLQTGENFDYSI

SEQ ID NO: 387959 - protein, 421 aa, unidentified
MASEILLESGVITITTLFVGIDVGKKSNSVRVLDSDGSTLCRFTAPNNLDGAEKIADKLKSILLNTDFSTVLIGMESTSVYADHLATFLRNNTFLKKWECKVFILNAKQTSKFKESYADLPKTDDIDAFVIADFLRFGRLPRDVCQDDKYVALRNLTRARFQAAQSLSREKNRFLETLFYKFSALDSSGVFSNTFGAASLGVITEFLSVDDIIYMPLEELAAFINEKGKSHFVDPTQIARELQAAARSSYRLSKTVNDSVNQLLAIRLVGIRAIQNQIKDLDKAIESFMALFPNVLTSIGGIGPVYSAGLLAEIGGVTRFPNHAALAKYGGLVWKKHQSGGFEAANTKLILSGNKYLKYYLLEAANKVRMHDAEFKRYYHCKFKEVPKHQHKRALALTARKLVRLVYSLLSANRLYRPPTV

SEQ ID NO: 387960 - protein, 418 aa, unidentified
MQIVHTHCAGLDVHKKTVVACRVYEDEHGRRLQDIRTFQTFTSALVELLDWLKEVRVTHAAMESTGDYWKPVFNVLENELEVILVNAHHVKAVPGRKTDVKDSEWLADLLQHGLLRPSFIPPPAQRDLRDLTRLRTNLVRERTQVVQRLHTVLETANIKLTSVATDITGASGRAMLEAIIHEQGDPETMARLAKGKLREKRDLLEQALSGRVRPHHRFLLVEHLVHLDFLDEQIALVSDEIDRQSRDTDSTNEETLSLLDTIPGVGRPLAQTIMAEIGNQVSSFPSAKHLAAWAGLAPGNNESAGKRRPGPIGHGDTWLRTGLVQAAQAASKMRQCYLAAQYHRIAARRGAKRAIIAVAHSIITIIWHMLTRREPYRDLGPDYLDNRNKERNVNRLTRRLEKLGFRVSLEPVTAPATP

SEQ ID NO: 387961 - protein, 365 aa, unidentified
MIHVPNDVPVLAMDVHKNTISAAVLEADSVSPVVDKISSDDEMVRRLVGRFPEPRRVWACYEAGPTGYELARLLDSLGVHCEVIAPSLIPARPGDRIKTDRRDARRLALLFRAGQLSGVRVPTVAEEAVRDLCRARADMVLDQTRGRHRLGKFLLRHGRVWRGGDNWTLKHMVWIRAQRFDDPALTATFGHYQATLVARETAVDAIDADLRLWFARAPFAECVSRLGAYRGITALGALTLASEVCDWRRFPTASMFMGFCGLVPSEHSSGERTHRGGITHAGNTHLRTQLVESAWAYKARPAAGAVLKRRQEGLDPAVVARAWTAQLRLCAKFARLDARKNNRKTVVTAIARELAGFVWAEMTAA

SEQ ID NO: 387962 - protein, 349 aa, unidentified
MKIIGCDFHPSYQQIAVLDSVTGEMVEKALSHERKEEVRSFYAELEGPVRVGIEASGQSQWFERMLTELGHEVWIGDAAKIRASCERKQKTDRRDAELLLRLLAEDRFPRIWVPTAAERDDRQLLLHRHKLVRMRTQVKNQLQALALNQGVQQKRKLWSEAGRKQLESLPLLPWASRRRAELLQLLDQLEASISELDRAVAEQASARPAARRLMTHPGVGPITALAFTLTIGPSERFQRGKQVASYLGLIPIEHSSGGRRQRLGHISKQGNPFLRGLLVEAVQSAVQHEPEMRRAYQRLAQRKCRALAKVAMARKLAVRLYWMLRLQVNYAQLIQGSHAGQPGTFCGRG

SEQ ID NO: 387963 - protein, 409 aa, unidentified
MQVVYPRCAGLDVHKKDVYACALVVDENGQKRQQIRKFSTVTVELLKLADWLQSHAVTHVAMEATGVYWRPIWAILEGQFELLLVNPHHVKAMPGRKTDAKDCEWLAALLQHGLVRGSFVPPTEIQDLRDLTRYRIELTQSQNRVANRIQKVLEQANIKLSSVASDTLGVSGQLMIQAIIDGEEDPERLADLAKRKLRQRIPELQVALSGRIRPHHRFMLREHFDEWKTLSERIQRVEQEIDRAIAPFEQAVMRWKTIPGIDRVTACCLVAELGVNMAQYPSAQHLASWAGICPGHNESGGKRMSGKIREGNRWLRRALCQAAWAATRKKNSYLSAQFKRLSSRRGVKRALIAVAHSILIIAYTMMKNAQDYKEVGGDYFERLNHTQLQRHLIRRLQRLGLTVTVQLAT

SEQ ID NO: 387964 - protein, 350 aa, unidentified
MLIIGCDFHSRFQQIAMLDGQTGKVMERRLEHATGEARAFYAGLPGPARVGMEATGYAQWFEALLAEQGHELWVGDAAEIHAAKVRKQKTDSRDACHLLDWLLQNRFPRIWIPSPQERDVRQLLRHRYKLICSRTSVMNQLHALAMGQGVCRKQKLWTAAGRRELESLALGPWASRRRGALLQMLDWFDASLQELDQAVMEEAHSRPAAVRLMEHSGIGPVTALSLVLTVGPIERFEKSKQLVSYLGLNPRESSSGGKQRLGSISKQGNSMLRSLLVEAAQTASRYDLELRRHYLRLKFRRGSGVAKVAIARKLVVRLYWKLREQVSSVPPARTQGSPGNFLVESTPSAK

SEQ ID NO: 387965 - protein, 316 aa, unidentified
MQTGLNVGADIASKTVVVACAAGTFAPRTLCNERATLRAWLQTLPAGSRLGLESTGSYHQLLADLAQAAGLTVYVLNARDLNKYAEGVGRRGKTDRLDAQLIARFIAHEHAQLHAYVPRSAAQCRLEQLLKRRGKLVARQASLQQGWQGVAGVQAELAVVAAAYRRLLARVDALVAQTLEALPETRTRVQQVRTIPGYGVLGSVAMAHALTRLPFANVDAFIAHTGLDPRPQDSGNKHGRRRLSKRGPAELRRMLHICAMSATRSKVWQPYYRAQRAKGLSGTAAVVVLARKMARTAYGVCRNQTTFDPSRLFSTA

SEQ ID NO: 387966 - protein, 346 aa, unidentified
MNITTIGIDLAKSVFQLHGIDSSGKVLIKKQIKRAQMAEYFVSLKPCLVGMEACGSAHHWARKLESFGHTVKLMPPQYVKPYVKTNKNDAADAEAICEAVTRPNMHFVPIKSTVQQAILSLHRIRQGYVKARTAQANQIRGLLAEFGLEIPQGIGYISKRVPDIIEDASNELPGILRIEIQSLLEHLNELDTRADNCEKKIVAWHKQSETSKKLEAIPGIGPLTATALIASIGDAKNFKNGRQVAAWIGLVPRQHSSGGKQNLLGISKRGDIYLRTLLIHGARSVIYRSGQKENPTDTQGWLNQLTERRNKNVAAVALANKNARIVWALLNHNRDYQDNHKMLVAA

SEQ ID NO: 387967 - protein, 338 aa, unidentified
MVLIGIDPHKASHTAVVIDDDEQELARVKVVADKSQVAALLDFAQSYVPRRWAIESAGGLGFLLAQQLVRAGEDVVDVPATLAARVRLLGSGRGSKNDPNDALSTAIAALRDPYLRTVIVEDHAMVLRLLADRHQDLTSLRTQAACRLHALLAALTPGGVQRRLSAAGAASRLRSIHPANSVQAQRKEMATDLVADIRRLDKNIAEVKKRTKTAVAASGTTVTDVYGVGPIVAALLIGHSGDITRFPSSGHYASYNGTAPIEASSGTVVRHRLNPRGNRQLNHALHMAAVTQLRNDTPGRAYYLAKIDAGKSKKEARRALKRKISDQVYRRLRADAAT

SEQ ID NO: 387968 - protein, 422 aa, unidentified
MLAESHDEEQIIARVAALDIAKAELVCCVRVPSPAGGKRRLQEVTTHSTMTQALTELANRLVEMGVQRVVMEATSSYWKPVFYLLEAHGLDPWLVNARDVKHLPGRPKTDVLDAVWLCKVAERQMLRPSFVPPWPIRRLRDLTRYRTDLVAARTAEKNRVEKLLEDACIKLSVVASDIFGVSGRAMLAALVAGERDPKVLAQLARARMRGKIDRLEQAFDGHFADHHRFLLSRMLSRIEGLDADIAAIDAQIEAQLAPFAEAAAHLDEIPGIGSVAAAAIIAEIGVDMSRFPTAGHLCSWAKFAPGINSSAGKTKRSASSGHGDPYLARVLGEAAVGTTKTDTFLAARYRRIARRRGQPRAVVAVGRSILVIIWHLLQDPDARYQDLGAEHYNRHVDPSAKKRSHIRQLEALGYTVTLTPAA

SEQ ID NO: 387969 - protein, 411 aa, unidentified
MLFVGDDWAEAHHDVEIVGADGRRLAKRRLPEGVDGLARLHALVADHLGRDDDVADVVVGIETDRGPWVQALIAAGYTVYALNPVQVARYRQRHVSSGAKSDPGDAHTLAEVVRLDRAHHRPVAGDSDIAEHVKVLARTHQSLIWSRQRQTNMLRSMLREFYPGALEAFGDDLAGRDALAVLAIAPSPLAGRGLSKTRIAAALRRGGRQRNIQATTERIAAALHGEQLAARAGVVEAYAASVTALVAVITTLAGQVESLRAQVEAGFGRHPDAEIYLSQPGLGPVLGARVLAEFGDDPHRYADARARKNYSGMSPITRASGTKRVVLARYARNRRLADALYQQAFATLSASPGARAYYDRHRARGATHHQALRALANRLVGILHGCLTHRAFYDEHTAWHTLENASTPAAA

SEQ ID NO: 387970 - protein, 394 aa, unidentified
MKLIGIDIGKNKHFFCVMDQQTGEIISQPVSFSNDKEGFDFLVQKIKSYPKDSILIGMEDTGHYHFALLKYLLDLQYTVALINPKTTDFNRKMQGGITKNDKLDTINICDVLDTPERKKQYRITKVNSFDLYEQKQLTRHHHNLKEEENVYKNRLQKCIDIVFPEFNKLFNSKYGIVYMNILKMFGSAENIANTDIRTIRKCFEIEGRGNRISLTPERLKECARSSIGISSSAEVIQIKHLTAQIELIEEQLTEIDKKIEEFSIQNNSPILSIPGISHFSGTSILAELGDISNYSKPSQIIKFAGVAPLHYESSQFNAQHTAITKKGSKYLRKTLYQIILPVIRHNHVFYKYYQLKISQGKGHRCAQGHCVRKLLRIIYHLLKTNQQFDPQLLR

SEQ ID NO: 387971 - protein, 366 aa, unidentified
MKKISTVQVFRNEIFKEQKLTIGVDLGDRWSFYCVLDEAGKILLEQKLATTPEAMKQTFGKIPRSLIAMETGTHSPWVSRLLAELGHKLIVAHAQKVELITKSNRKDDRHDARTLARLARIDPELLGPVRHRSAKAQIHLTVIRARAELVNARTALVNAVRGLVKSYGQRLPKCGTQQVNRELAAELNTELREVLEPLLKEIESLNERVKEYDERMEKIAKEVYPQVSLLKQVKGVGTQIALTYVLTIEDPHRFLKSREVGCFLGLKPGRRNSGESEPQKGISKEGDRYLRTMMVQGAHHILEPFGEDSDLRRWGLKLAKRGGKNAKKRAVVAVARKLAVLLHRLWVSGEVYEPLRNSQKAMRAVA

SEQ ID NO: 387972 - protein, 430 aa, unidentified
MKSNTQNAKIEAITENTLVLGIDIGSETHYARAFDYRGIEYSKKPFKFSNTEAGFMSFKAWIQDMKEMYEKDKVVPGMEPTGHYWFNLGKFLQDNEMRPVLVNPHHVKKSKELDDNHPTKNDRKDPKVIAGLVREGRYMIPYLPEGVYADLRTASNIRFQLQAELTRIQNRISRWFNIYFPEYKTVYGKPDAKSGMMILKVAPLPEDILTLGIDGVNQIWRDAKMRAVGKARAKTLMEAAEHSVGSKEGAVSARMEIRMLLEDYESRNVRLQKVMALIEELVKQIPMAEKLLEIKGVGIKTVSGFLAEVGDISRFNNPKELQKLAGLALVENSSGKHKGETRISRRGRKRLRYLLFEVAMSLVSKNAEFKELHIYYTTRRINPLKKMQSLMAVAAKALRIFYAILTKGVAYDPKKMINDIKRPKIYLQAA

SEQ ID NO: 387973 - protein, 437 aa, unidentified
MDPSKQQLIAGKHIVGIDPAKKKHQAVILTPDGLQLGKSFCFDVSYEGYSNTLWKKVTFLVPNCNPENIVFAIETSCNLWMTLAFYLKAEGYTVVMVSPLTTHLSRPMAHHDFSRTDPKDALLVASNAHHGNFDLYQEYSSSTNAMHRLGITYDKLRKELAQNRARLRAALEHLFPEFLTILEPDTQTAHYLLKRYLFPQEFLDMDREREAKAITAISRHQHGMNTLLQLQHLAQRSIGVRKTLEECPAERLTVNCWLALIETLTAQIETIFSALVGLAQQLPEYDFLRSLKGVSHLSAALFLAEVRDIHRFRHYKQIQKNAGLNLRLSQSGQYVGARHIAHIGNRRLQWLLYCMAEETAKWIPEVRIKFLRRQLKSSKYRKNIIASTSSLLKLIMVLVKEQRPYQMRSETLDQMRALELQVAQRKEERQKQKKHAA

SEQ ID NO: 387974 - protein, 389 aa, unidentified
MLKQENEYREGERTAVGIDPCKEFLQLAILSPDGKQEFKKLPLLPSITAEIVRSTVPERTQIGIESYGSYGKLFVFELLKKGYDVREVNPSISQKLTDLITEDHSDCLDAVSIAKALVLIPDLPKVSFTEKKLMLAKLSRLRKRLVKDLNGYLNRLHIALTESYGAVYRSLFQTIFTGKALGYFERYPTINDAFSQRKKVIAIIGEEKWALLEQAGQWEKSIYLGLLKIEIRCLIRIIKALQASKKELEEKLKEVGAEDEDVKLLKSFPGIDYITAATLLSEIGNIERFEKEGCLSSYCGVSPVMWQSGTAKVKTKRRKRYSRRLKGILYFISLSQIRLNPESKDYYWRKRREGKTHWQAMNALSRQLIKIIYYMLKNRECYQRETVVH

SEQ ID NO: 387975 - protein, 368 aa, unidentified
MNRKSSKLFVGMDVHKESIDIAVAEEAGEVRHHARIGGEINALSRAVRKLESLGRPLVFVYEAGPCGFAIYRMLKARGHECWVVAPSNTPRRVRDRIKTDRRDSLKLTGLARAGELTPIYVPDQADEAMRDLVRTREDAVAMQRQARHRLAALLLRNDIRYTGKTAWTEAHRRWIARLILPATPQRIAFEEYVQAVKESTERVQRLTRSIEQELAHWRWQPVVDALQACRGIQLIHAARIVAELGDLSRFSHPRELMAYLGLIPSENSSGDHRRQGAITKAGNNSARRALVEAAWAYRHGPAVSSIIVRRQGGLPKAAIAIAWKAQLRLCARFRRFSARGINRNKIVVAIARELSGFIWAIGQQVKPN

SEQ ID NO: 387976 - protein, 343 aa, unidentified
MDYYVGLDVSLRTVAVCVIDTGGKLVFERSVACEIEDIVHCLRDLPKPVMQIGFEAGAMSQHLFFGLRGAGFDVVCMEARQVNAALSAMRNKTDKTDARGIAQVLRSGWYSPVYIKSREAHALRALLSSRKAVQKKCIDLANEVRGLFRIFGLRLPSRVDQGSFDDRVRPLIEADPDLSHALLPLLDARAVLYRTYRELDRRVKQAASHDETCLRFMAIPGVGPIAALTFRAAVDDPSRFTSSRTVAHFGLTPRRYQSGEMDNPGRISKAGDPDVRATLYSAASAMMMRSVASSEIKSWGLRLMRRKGRRRAVVAVARKLAVIMHRMWADGTEFRLEPLKGAT

SEQ ID NO: 387977 - protein, 385 aa, unidentified
MKEQTFVAREFEIFGGLDVAKKSIAVTFMSHQGILQSFSMPYRAENLLSYVGKHFEGKKVAFAYEAGPTGWGLYDRLTAGGHLCVVVAPSMIPKVPGQRVKTNRLDSQKLSEHLRGGQLKSVHVPTESYRQLRQLVQLRDTFVQDIVAMKLRIKAMLLFEGLEFPPAPAGSQWSLIVRGKLKKVSCSSAVRFKLDQLMESVESTEKRVIQTIKEIRRFYQQDPELSQAMKYLKSIPGIGEIVASHLLARVGDPQQIGNVRQLAGFIGLVPTERSTGDRVARGSITRSGDGRLRSKLIQAAWSAIRQDPELREFYRSVYQRHPRDRAARKAIVAVARKLTTRIYAVLKQQRSYVVRKIVHSAPLTQEQTSPQGTTRRRAEPGQSLS

SEQ ID NO: 387978 - protein, 369 aa, unidentified
MEHSKEIFVGIDVSKLRNAIAVAEGGRGGEVRFVGEVDASAEGMRRVVKKLAGSSERAHFCYEAGPTGYGLHRLITSLGHACSVVAPSLIPRKPGDHVKTNRRDAVTLARLLRAGELTAVWVPDEGHEAMRDLVRARASAVETLRVHRQQVGAFMLRHGRVFLRPKTWTMRYLIWLQEQKFDHPAHQIALQEMVEAVRTAKERVERLEATIEAFVPSRSLAPVVHALRALRGVDLIVAVTFVSEIGDLRRFENPRQLMGYLGLVPTERSTGDRVARGGITKAGNARVRQMLVESAWTYRHPPRIGARKLYRFEQTTPKVREIAWKAQTRLTARYRALSARGKKTTVVCVAIARELAGFMWSVGREVQPA

SEQ ID NO: 387979 - protein, 383 aa, unidentified
MKAVCGLDVHKDSVYLCILSEFGELIEKVFGVLTFQLEEMRDLMLHHHVVEVSMESTSVYWIPIWRVLSPHFKLNLANPYFIKQLPGRKSDVKDAQWIAECTMKELISGSFVPHETIQQLRQYDRRIFDLNEEIVRKLSKLDAVLQRCNIRLSNYVSNVDSKSYKAVVRAISQGITDPEELVKLIHGRIINHHGIDVITASLKGVVSLAEIDMISQLRDELDMAEAHKEKCQARMLEICEREFPEELKRLQTIPGIKERAATSLIAEIGTDMNKFETANHLASWSGLKPRNDESNKKIKSRSITHGNVYLRKTIIECAWAASRTKDCFFSRFSFHQTQVRKKNKMKVLVAVARKMLIAVWHVLHDNTIYIDFTTDRKTSRTKG

SEQ ID NO: 387980 - protein, 409 aa, unidentified
MSHKVSGIDVHKRVLVVVVADAAQEELQYECRRFGTTTSELRQLKTWLEQQGVTEVVMESTAQYWKPVWLELEPHFRLHLAQAQSNRAPRGRKHDFGDAQRLLRRLLAAELILSYVPDPQQRAWRTMTRSKVQLVRDRVRLHNQVECLLEEARIKLSSVISDLLGVSGRRILHALASGETDPVQLAQLGHQRLKCSAEQLQDALTGAAEPMHRQLLQLYLERLELIDAQMDRLDQMIAGALREHQDAVVRLAEVPGFGADSAQQVIAEVGPRAAAFGSAANLASWVGVCPGRQESAGHNQSGRSAKGNPYLRRLLTQAAQAAVHKKGSRMQAVFRRLLPRLGYQQAIWAIAHRLCRLVWKILHDQVRFREQGLVENLQNQKRRVQKMLQALRKLGYTAQLTPLTPGLTT

SEQ ID NO: 387981 - protein, 452 aa, unidentified
MKKEAVKKSVVKMATGLPVFNPHAAGIDIGDTLHCVAINDGNGGHEVKTTSAFTCDLHEIVDYCISNEVTTAAMESTGVYWLALYILLEEAGIDVYLVNAKHVKNVTGRKKDDTDAIWIQKLHTCGLLQKSFQPDNEIRQLRNYTRQRKNLILLASDAVRRMQKALELMNIKIHTVISDILGKTGMKMVKAMIAGERDPQILATLCDPRIKAPQEEIIKSLQGIWKEEYLFMLEQTVENYEFHQKQIKSCEEKIKQQLMKQVAIIKEGDITCLEETKKKSKAKPKKNQFDFSLSLYLIAIAGVDLCKIPGISEVTALEFLAEVGIDMSKWKSAKHFAAWLNLTPNTKISGGKIISSKMMKKKNKAGQYLRQAASCLSTNKTPIGDYYHRMRARLGGRGAALTTAHKLSRIIYTMLLKQTEYNAGMILDNQEKFREEKIKKLEKQLTRLKQAA

SEQ ID NO: 387982 - protein, 422 aa, unidentified
MLEETADREEIIERVAALDIGKAELVCCVRVPREGRRGRRLQEVETYSTMTGSLLRLSDRLRCLGVTRVVMEATSDYWKPVFYVLEAHGFETWLVNAKDVKHLPGRPKTDKLDAVWLCKVAERQMIRPSFVPPLEIRRLRDVTRYRVDLVGVRAAEKNRVEKLLEDAQIKLSVVASDIFGKSGRAMMGALVAGERNPKALAQLARSSMRRKISVLEEAFTGHFTEHHAFLLARMLARIDAIDADIAELDARIEEMIAPFAAAAGRLDEIPGIGRIAAAIIIAEVGTDMTRFPTAAHLASWAKFAPGVKESAGKKKGRGSTGHGDPYLARILGEAAVGASKTDSFLGERYRRIARRRGSKKAIVAVGRSLLVIIWHLLSDPEARYADLGSDFYHQRINPERRKRAHVHQLEALGYKVTLEPAA

SEQ ID NO: 387983 - protein, 376 aa, unidentified
MRTISAETPNTEVAVILGVDTHLDFHVAVALDHLGRRLGESSVPTTPKGYERLLRWAAGFGSLRCVGVEGTSSYGAGLTRHLRARGIEVLEVERPKHRRRSSRRNLQKSDPSDAERAARAVLAGEASGVPKSADGCVEMIRTLRAARRSAMKARTQAANQLQALRVTAPEQLRNRLRGLSTKELVRVAARFRLAGDPTDVPAATKFALRSVARRYETLSAEIAELDAHLGRLVEQAAPELVALPGIGTDNAATLLIVAGDNPKRLASEASFANLCGVSPVEASSGKVVRHRLNRGGNREANRALYMICLARMRRDPRTQEYVARRTQEGKSKREIIRCLKRYLAREVYRVLIFCGARSSPTGPREEAHIDAKSYAA

SEQ ID NO: 387984 - protein, 329 aa, unidentified
MKKLFIGIDVSKDVFDVCSMDESGNVIASKEVFSNTKVGIANFCKSLKRWSDCDIWICMEHTGHYGYLLASEFSQRDFKYALINPLEIKNSIGMTRGKNDAIDAYRIAYYALTHYRKLKPYVLPIKELQKLKTLVSMRDGYVKINVQLKNSLKALEIIHQSLNIRSQLNDHKLVIKRQEKSIEKVEKQIMEIIHNNETLNDTFKKVNTVIGVGMLTAVKCIIETDNFAKFKDGRKFSCHCGLAPFDYQSGSSVRGRTRTSSLSNKSLKSILFKAASTAIQHDPQLKNYYSQKVAEGKHKLSVLNAVANKIVLRIFAVANRNEPFVKLVA

SEQ ID NO: 387985 - protein, 336 aa, unidentified
MNTNEKNQACLFYVGVDLSKEKFDAVFLRSSQDPLHCIFNNKKSGIKRFISWLEKQEDFSFQQSLICMEHTGLYSRELVRALMQIHAPVWLESSLQIKKSLGFLRGKNDKIDAHRIAYYAEKYADRARLVQPNNETLQKLQDLLAARDRLLKSIGQLKRPLHELKRIDPDTYKYLQRINRPVINQLRKSLHQIKNEILQVINSDENLKRLYLLVTSVKGVGMVLCVQLLVYTHAFTRLQNSRQLACYAGVAPFEHTSGSSIKGRTHTSNFANMTLKSSLHLAAISSIQHNPDLKKYYHRKVLEGKSKMSVINAVRAKLLYRVLAVVKRGTPYQNVA

SEQ ID NO: 387986 - protein, 337 aa, unidentified
MEYFAGLDVSMEETHVCVVDRDGEIVHQGKVLSTPADLEAELARAPACRRIVFETGRMAPMLYHGLLERGLPVVCVESRQAYQALKSLATHKTDRNDARGLAHLARTGFFKPVHVKSLPAHAVRSLIIARKKLVGQRVMLENQIRGLAIVFGARLPRALSPAFIDQALRASAGINGLSVAMRGLVAARTAVLAAVAAIDADMKKMVRASDACRRLMTIPGVGQLTALAFVAAIDNPERFKRSRDIGAYLGLVPRRYQSGEVDYTGSISKCGDKRVRTLLYEAANVMLTRCKRPLKLRNWAFAIAKRSNMRKARIALARRLAIIMHAMLRDATESNPA

SEQ ID NO: 387987 - protein, 343 aa, unidentified
MKLIRVGVDLAKNVFQLHGVDRDERPVWRRRLSRAEWLKALQETLEPGCEIGMEACAGSHHWARLLEAKGYRVKLIAPQFMKPYVKSNKNDANDAEAICEAMSRPSMRFVTVKSVEQQDIQAAHRIRSGLIEARTAKTNQIRGLVSEYGLVAPKQIASLRTGIPDWLEDAENGLTARFRRLLHGLWQDLQALDTRIGELDREIQQIARSVPAAQRLQQLRGVGPMIATALVAAVGRGEQFANGRQMAAALGLTPRQQSSGGRERLLGISKRGDSYLRMLLIQGARSALQTAGNKTDRLSKWITSLCARSHPNAATVALANKTVRIAWALLSRESDYQIDYVAA

SEQ ID NO: 387988 - protein, 391 aa, unidentified
MISVGIDVAKDKHDCFIVSSEGKVLADVFTIPNSLEGFNCLLEKIQDCSSPEDKIKVGLEATGHYSYNILGFLLDSGLTTYVLNPLHTNLYRKSLSLRKTKTDRVDARTIAAMLLSAVGLKPYTDTAYHNEELKSLTRYRFDKVKERGKLKQSIARLVCILFPELENLVPTLHMVSVYALLEEFPSAKQIAEAHLTRLKTLLHDASRGRYGRDMAIEIRNAARGSIGSAMHAKSLELRHTIQLIGELDAEIEEIEAAIQAIMEQMHSPITTIPGIGYRMGAMILAEAGDFSRFDSPDKLLAYAGLSPSTYQSGQLKNCYAHMEKRGSRYLRYAIFNAAKYVCHWDTTFAAYLAKKRAQGKHYNVAISHAAKKLVRLIYALEKSRQPYCLAV

SEQ ID NO: 387989 - protein, 309 aa, unidentified
MEATVVGIDVSKDRLDVSVQPAGTALSYSRDAAGIERLIGTLATVAPQLVAVEATGGFETVVAASLAGAGLPVVVVNPAQVRAFAAALGQRAKTDPIDAQVIARFAGATRPQVRALPDAATQALADLVTRRRQIIQMIVAEGQREKRASVRAGKSIQRLLKSLRAELSEIEGEIDESVRGSPIWREKENLLASVPGVGSGTARTMLAELPELGTLDRRQIAALAGLAPFTRQSGKWRGKSFIGGGRTSVRTALFMAAMTAMRCNPALRAFHHRLRAAGKPKMVALIAVARKLLTILNAILRDNKQWQNA

SEQ ID NO: 387990 - protein, 337 aa, unidentified
MEKKFKYYVGVDVSKNTLDYCVVKENKEIFCFQSENSCKGIKSFIKELKSKDITDLNELLFCAEHTGIYNNPLLYFLKEKGGTIWLESALHIKRSMGLQRGKSDKVDAQRIAMFAYKNREDAKIFEAPREVIRQLKGLSGLRSQLIEAVKGFNVRIKEIKGFESKELARSIEANCKKTIAALNTDLKRVEQEIQRIIQSDNYLNQLFTIIKSVDGVGNVTATEVVISTNEFKNINDPRKFACYCGVVPFDHLSGTSVRGKSRVSSMANKVLKTLFHMSALSAIRVKGEFKDYFERKIKEGKNKMSVINAIRNKIIHRIFACIRENRPYQKIYSYLLV

SEQ ID NO: 387991 - protein, 457 aa, unidentified
MSQRKRDRKSRELPLVHPAAAAIDIGATMHVAAVGPDRDQEPVRTFRTFTDDLHRLADWFAGCGVKTVVMESTGVYWIPVFEILEQRGFEVMVVNARDAKHVPGRKTDVSDAEWLQRLHEYGLLRPSFRPQAEIAGLRAYLRQRERLQDYAAGHIQHMQKALMQMNLQLHHVVSDITGVTGMAIVRAIVAGERDPTVLASHRDRRCHASVETVCQALIGNYREEHVFALTQALELYDVYQTKVMACDKQIEAILTRLRKAAPRPVHKLPPARRRGDQKNAPTFDARAALHAILGVDLTQINGLGPYLALKLVGECGTNLAAWPTAKHFTSWLGLAPHNKISGGKVLSSKTRRTDNRAASLLRLAAGTLGRTDTALGAFYRRLSARIGKAKAITATARKIATLFYNTLRHGMAYTDPGAGYYEDRYRERVLRNLRRRAKSLGFVLVEPDPHAAQVVVS

SEQ ID NO: 387992 - protein, 427 aa, unidentified
MEAIFDVAAGIDVHRDILVVSVRRIERGREHVETRTYSTFHDALVQMVAWFDEQDVPVVGLESTGVYWKPVVLALRERSPSRLVWLVNPLDVKQVPGRKTDVKDSEWLSKLVMHGLVAPSYLPPTEQAELRELTRFRTKVVGNLTRCANRIVKQLESSGIKLASVCSDPLGKSARAMLEALLEGNKTVDEIADLARGKLRAKIPELQRALAGTFTKATRFILRQLLADLSHLERDIKALDEQIAQRLTPYQREVDLLLSMQGLDRVAIAAILAEIGPDMSVFEKADRLAAWGGVCPGSNESAGKSKRAPTRKGDKYLRTILVQAAQAGKNARNSFWREVYYRLVPRLGKPKTIMAIARKMLVAAFYMLRDGVPYRKPSMQPPPPAKAQRMVQQLTQRLADLGFHVQLSPIASPVPSAESETTLAPAT

SEQ ID NO: 387993 - protein, 425 aa, unidentified
MNFDSTDEPRFAAYVAIDWGDSKHVWSLQPADSDRRERGEIEHSPEAVAAWAAMLSARFGGQPVALAVEQSRGPLVFMLGKYEQLHVYPIHPRAAAQFRAALFPSGAKDDPSDAELLLDLLTHHRSRLRRLKPDTEQTRLVQHLVEGRRKLVNERTRQTNRLTAQLKLYFPQMLDWFDAVDSPLVGALLKRWPTLEALQKARPDTVRSFFTAHNCRSQELIERRLDQIRQTVPAVRDKALIEAAQAMTKVLVELIATLREGIASFDRQIAQAVAAHPDFAIFDSFPGAGPALAPRLLAAFGSQRERYQSAADLQTFSGIAPVTERSGKSQWVHVRWACPRFLRQTFHEWAAHSIGFCDWARAYYQQQRGRGNHHHAAVRALAFKWIRIAFRCWKHAVPYDDARYMQSLRRRGSPLIAALAKPELP

SEQ ID NO: 387994 - protein, 430 aa, unidentified
MKSNTQNAKIEAITEKTLVLGIDVGSEMHYARAFDYRVIEYSKKPFKFSNTEAGFATFKEWVLDLKERHEKDKVVPGMEPTGHYWFNLGKFLQDNEMKPVLVNPHHVKKSKELDDNNPTKNDRKDPKVIAGLVREGRYMIPYLPDGVYADLRTASNIRFQLQAELTRIQNRISRWFNIYFPEYKTVYGKPDAKSGMLILKAAPLPEDILTLGIDGVNQIWRDAKLRAVGKARAKTLIKAAEHSIGSKEGTMSARMEIRMLLEDYESQNMRLQEVMVLIEELVKEIPMAEKLLEIKGVGIRTVSGFLAEVGDISRFNNPKELQKLAGLALVENSSGKHKGKTTISRRGRKRLRYLLFEVAMSLVAKNPEFRELHNYYTTRRLNPLKKMQSLMAIAAKLIRVFYAMLTKGVDYDPKKMISDIKRPTVYLQAA

SEQ ID NO: 387995 - protein, 376 aa, unidentified
MKKNTTLTIGMDIGDRKCHVVVLAGNDADPTETAMVKTTRESMQSYFESKPISTVAIEVGTHSAWICTLLQSLGHTVIVANPRQVRLISNSWSKTDWADAEKLARLARIDPRLLHPIQHRGSEAQELAAFVRARDAAVRARTKFVNHIRGVVKGIGERLPQCSTPSFIKHMDTIPTERREALEPLKKCLEVLNNTIKHYDRVIEKKGSELGPVVSQLTQVDGIGTLTAVAYVSCIEDPHRFEASRTAGAFLGLCSRNKSSSSQDPELSISKCGDSYVRHLLVSAAHRIIGPFGKESDLRTWGIKLAGQGKNSKKRAAVAVARKLAVLLHQLWKTGDDYKPLKNPKVTKQIIDNTEEYKELFAKTKTKTKTKGSRKR

SEQ ID NO: 387996 - protein, 370 aa, unidentified
MEKYKFVGLDVHKETIAVAVAEPDGGEVRYLGEISNTADSVVKLVRRLRKEGGRLSFCYEAGPCGYGLHRQLRDLGQDCQVVAPSLIPRKPGDRVKTDRRDSLNLARLHRAGELTAVWVPDGAQEALRDLTRAREDMKHIQRQAKQRLLGFLLRHGKRFEGKDNWTQAHFRWFETVKFEQPVQQIVFQEYVDSVQAMTRRVEAFDEQMESAARESVFWPVIEGLMALRGVKLITATTTVAEIGDLRRFATAPQLMAYLGVVPSEHSSGESKSRGGITKTGNSHVRRVLVEAAWQYRYPARKTAVLQRRAERASEQVQEIAWKAQKRLCARYRLLEARGKLKVQVCIAVARELAGFIWAIGQTLPQPAART

SEQ ID NO: 387997 - protein, 332 aa, unidentified
MSVKNFVGIDVSKLSFDVFIREPRVHKQFKNELNGFEQFAQWLEKQTKNPLDSVLICFEHTGLYSLPLALFLEKEHIPFAMLSALEIKKSMGITRGKNDLVDSKRIAEFAYRFRDKISETKLPAADIRKIQSLLTLRYRLTTNMTGYVVSMNETLRTMREEDLPELFSAYQAQILILKEEIGKLEQAIKALIRNNPQLRTSYELITTVKGIGFVIASYLIVYTYNFTRFDNWRKFACYSGIAPFDYQSGTSVRGKTQVSSIANKQVKKMLHLAAMTAIHFDTELREYYIRRQADGKSKMAIINIIRNKMVSRVFAVIKRGTPFVDIKKYAGT

SEQ ID NO: 387998 - protein, 350 aa, unidentified
METTTVAIDLAKDVFQVAMANRAGRILDRQRLTRRQFERFLETLDSGVDVVMESCGTSQYWGRRLQSRGLRVRLLPVQYVRPYVRRNQTDRTDTDALVEAARCEDIRPVPVKTVEQQTRQALHRVRTQWQTTRVARINAMRGLLAEHGYAIPVGARTGCRRVGAILADPDTTVPAVLRQTLALVVEEVRVLEAQIVGIDRQLAALAAAHPIATRLPTIPGVGLLGATALVGAVSHIDRFRRGRECASWLGLTPRESSSGGTRRLGRISTRGDGHLRCLLVHGARAVLRSANYHTERSPDRLTRLHQWALSVAAHRGFHKAVVAVANKLARIVWAVWKYEVAFHPQPAAAA

SEQ ID NO: 387999 - protein, 422 aa, unidentified
MLEETADREEIIERVAALDIGKAELVCCVRVPREGRRGRRLQEVETYSTMTGSLLRLSDRLRCLGVTRVVMEATSDYWKPVFYVLEAHGFETWLVNAKDVKHLPGRPKTDKLDAVWLCKVAERQMIRPSFVPPLEIRRLRDVTRYRVDLVGVRAAEKNRVEKLLEDAQIKLSVVASDIFGKSGRAMMGALVAGERNPKALAQLARSSMRRKISVLEEAFTGHFTEHHAFLLARMLARIDAIDADIAELDARIEEMIAPFAAAAGRLDEIPGIGRIAAAIIIAEVGTDMTRFPTAAHLASWAKFAPGVKESAGKKNGRGSTGHGDPYLARILGEAAVGASKTDSFLGERYRRIARRRGSKKAIVAVGRSLLVIIWHLLSDPGARYADLGSDFYHQRINPERRKRAHVHQLEALGYKVTLKPAA

SEQ ID NO: 388000 - protein, 397 aa, unidentified
MYIVGIDIAKRKHEAAVIDGEGTVIIKPFSFTNNCSGYNRLLAMLTKAKLPLDEVSFAMEATGHYWLALFTRLQKEGFRVQVINPVQTNSIRSFYIRQVKTDPRDALLIAEVIRFGHFSESTLHPENIYELRELCRGRHAIVSMQADVKRKVVALLDQVFPEYETAFTNLFGDTSMAILQTCPTPKELSEMPLEELCHLIEVSSHKRFRMAKAQELQALARNSFGFAMAGGVFSTMIRLYAKHLDFLKQQVREMDRKIAEIMDTLDTPITTITGIGPTLGAYILSEIGDISRFSSAAKLAAYAGIDPTMRQSGEYNGVRNRMSKRGSPYLRHAIWLAASSAVLHDPALKLYFQKKRDEGKPYMASVGHACRKMVSIIYAVMRDNKAYTPYIPNEISA

SEQ ID NO: 388001 - protein, 420 aa, unidentified
MEEVSDERAELVERVAALDIGKASLVCCVRVPHESKPGARRQEVRTYATTTPALLGLRDWLICQGVTQVVMEATSSYWKPPFYLLEDGIECWVVNARDVKNVPGRPKTGRLDAVWLAKLAERGMLRPSFIPARPQRQLRDLTRYRRTLVQERTREKQRAEKLLEDAQVKLSSVISDIFGASGRDMLAALIAGQRDPRALAGLARKQMRAKISVLQEALTGHFTDHHAFLLGRMLDRADALTAQVDQLTTRIEEAISPFGAQTAQPDEIPGIGVTAAQEIIAEIGTDMTRFPTPGHLVSWAKFAPKARQPAGRSKAAGTGKGNPWLGGTIGEAAAGAARTSTFLASRCKRIVKRRGRKRALAAAGTSILVIAWHLLSDPDARYTDLGPHWHDRLAPHRRKRQLIAELERLSGRKVTLHDAA

SEQ ID NO: 388002 - protein, 362 aa, unidentified
MRIIGCDLHARQQTLAMLDTTTGEVVVLTLKHEGDNVREFYSSLPRPVRVGIEATGSMQWFVNLMEELGIECLVGHPATIRAAEPRKQKNDRRDAELILKLLVEGRFPAIWLPSKELQDLRSLLRHRHQWVRMRTRIQNALQSIALANGLRRGTALWSHDGQSRIASLSLAPHTAYRRSELQAMYEKFEAEIEKLNQRVEEQASKRPGARLLMSHPGVGPITALATEVFLGDPARFADSKALASYVGMIPREYSSGGRQRLGGLSKQGNPLLRFLWGEAGAHAARKDPELQRFYRRKLVQKGLGKASVAVARKLGIRLWIMLRDQIEYNEFCRRGQKQQKSSDACAGMPETRYGAKSHRPVD

SEQ ID NO: 388003 - protein, 358 aa, unidentified
MTTVSKKQKWFNAIHLTPADDLYVGIDAHKKSLHVAVFLNDAPAIDFVMPPDSEKLIDTLNRLRPALRMVVYEAGPTGYSLARAMQNVNLPVNVVAPSKTPRQSAPDSKTDSLDARKLAEYAAKGLLRHIAIPTRHQEAQRQLTRLREQLVAKQTRVKLQIKGFLLQHGIDQPQGLSRWSATAVEYLKKVRLSEQLQYCLDILLDELSFIIEQRKLTEQRIKEAFSEKPHSTMCKLLTTHPGVGPVIAAQFAAEIFNPRRFTDKTQLAKYVGLAPSVRQSGQMLRDGPILKTGRPQLRCSLIQGAWLWIRKDPNAYNTFCRLIHNTGHKNKAITAMARKLAVHLWKMACDNKPYSCAV

SEQ ID NO: 388004 - protein, 341 aa, unidentified
MKKITTLGIDLAKSIFHLVGCDEKGKEVFRKVTGRSELKKSVMGLPPCLIGMEACGSASYWAREFQKMGHDVKLIPPQYVKPFVKTNKNDFNDALGICEAVVRPNMTFASVKTEQEQDIQSLHRIRRQVLQFRTAIINQIRGLLAEYGIVLGPSPKKVRMALGQHLAPESPLSPLAKSNFILLLNQLTEIEVHLATCDERIKDMAQSHPVCKRLMRVPGIGVLTATALLASIGDPTRFRNGRQFAAWLGLVPRQHSSGGKNNLLGISKRGDAYLRTLLIHGGRAVAMRAPLKEDRRSRWVQELVSRRGMNIACVAVANKNARILWTMLAKGEEYRHSSKAS

SEQ ID NO: 388005 - protein, 484 aa, unidentified
MTEHSMAYVAFDTAKLHNAVAIAEAGRAGTIRFLGEFENTPVATAKLVRRLTARHGKLTFCYEAGPTGYGLYRQIKQLGQDCIVVAPSLIPRKPGKRVKTNRLDALSLAQQLRAGDLTAVWVPDERHEAVRELTRARHAAVVEWRAKCQQVSSMLLRLGRHYPGKTTWGKAHLAWLAGQKLAHLEQRIALEERLVAVRQAKERIERLERAIHEAVPAWSLAPLVTALMALRGVDFIAATMLLAEIGDLSRFRTPRELMAWLGLVPSESSTGEDTRRGPITKAGNRRARQILIECSWSYRHPPRVGAGKLARVAAAPADVRDIAWKAQQRLTGRYRALCRAGKPDVVAITAVARELAGFIWAIARAVAANAAATDAGATAAAADSGAASGADSGAAISSRNATQGNPAHGTQTTGRTRADRRRAPGTLPDTPQPALARAAADTPSPPDTATPRQPGAALARGGRRDRRLAGGVCRMAASHAGGNP

SEQ ID NO: 388006 - protein, 362 aa, unidentified
MLYLAIDQHRKQLTVNLRNETGDVLLKRQVSTEWPRVREFLEEVQRQALPEGGFVAILEVCGFNDWLLKLLDEYDCVETILIQPEKRSKKKTDRRDANTLGEILWVNRQRLLAGKKVQGIRRVQLPNEQDAADRQITALRKRLGQLRTRTINKIKHILRKHNLEQECPTKGIDTIKGRKWLGELALATIDRLEMDQLLVQWQLWNQQIENVETEIVKRQAQSKTAAVLATIPGCGAYGSLALASRIGSIERFPRPGSLANYWGLTPGCRNSGEVTDRLGSITKQGSGMARFILGQLVLHVLRRDAWMRTWYSRIKRRRGSKIARVAVMRRLATIIWHMVKHNEPYAIGGPPRRKLEVQLVQT

SEQ ID NO: 388007 - protein, 424 aa, unidentified
MNNFQFPDEIHPKMTRTYVGCDSHKDSHTFVFLNCFHDKLGVITVGSAPSEFPKFIKQAKKYLQVGTTFAFGFEDVSAYGRSFVKYLVDRGYLVKHVDSSKVATARGQVLHKTDLFDAECCARVLIDRFDELPNANPQDKYWVLSTLVTRHNAVVKMNTMTKNTLHHLLAQNYPHYKDFFGKITVKSGLVFYEKYPAPHLLENVTVEELNEMLKSATRRNELERAKLILETVKRDNVQPSEYQEQRDYTVRSLVRQVQNNLLELDGITAHIETILNDFQYPLASMKGIDVMTEARLISEIGDINRFKNANALAKYAGVAPVVFASGMTKLEMANARGNRKLNGLIHQVALSTITPRGKNKTVNNPIFYNYYQKKLSQGKTKTQALKCVQRRLINIIYAIMKHKRPYENTENGNVITENDRLKAI

SEQ ID NO: 388008 - protein, 486 aa, unidentified
MPSPKLQEKGQPSLTLHQYGVGVDCHSRFFQVCVLIPSGTEIIQIEQKVPALWPELRAAKDWLLHVLAEQGLVLSASDLRYTCESTGQYHMPLCLAWRGRPAIINPSDTGHVRRKTDRLDAGKLAQHSLHGLWRESWMAPDEIQELRVLANQRAKLVAERGRLTNRINSDMLRFGHGVGQLGKINGSLVRALIEDFCANGSVVAHREYFSDIRIPAGVVRVFDQRWKRVDGLDQEIKVIEDLCLKQIDGLTWRTGGGSTALGRQLRPHLQSIPGVGTQTVITWLGEIGDITRFGTVNKLLAYCGLDPSDEISAGKVIGTKTRKGNARLHAALRNAARAMLAHAPTCKFALWVRGYMGRHPRAGKSKAVHALARRIGKALYYCHLKNEPFDDSGYQALLSESSYPLCPVEEMGLSPGVVRRLKANGLQTSRQVVDAFYSDLGRRPGCGTVTVLAVGAWIDSQTKNSRDRTRKARSPEATGNLPAAEG

SEQ ID NO: 388009 - protein, 448 aa, unidentified
MSESSEAVPVPVPEPQWAAFAAIDWADQKNFWRLLAASSQRSEEGVLENTPEAVEAWAASLQQRFAGRPVAVCLEQSRGPLVYMLSKYPHLVLFPVHPTTAARYRETFTPSGAKADARDTASLLDLLVRHRERLHALQPDTVETRLLHFLVEERRRTVDEKTRQNNRLRDCLKLYFPQILQWFDDVTSPLVGDLLERWGDLKQLQGAHPGTLRKFFHEHNCRSQELMEQRIQAIHQALPATQDQAVVEAGTRIARGLVALLATLRSNIAAFDKRIAELVGYHPDAALFASLPGAGDVLVPRLIVAFGTHRDRYQNAEEMQRYSGIAPVKQSSGKSEWVHFRFACPKFLRQTFHEFASHSIAHSEWAKAYYEHLRNDEKKDHHAAVRSLAFKWIRIIFRCWKDGKPYDEEIYLQSLRRRSSLLGTTLELTTRFGCTMVAGFKKLSENNA

SEQ ID NO: 388010 - protein, 371 aa, unidentified
MKKNNSSKQHPSKGNCPKQGKETLAFYIGIDLGDKNSDVCVMNAAGEVEKEFRLRMNAADFEGYFRTIGRSRVALEAGGQSQWVAEVIEKCGHEVYVANPHKLRYITESDDKDDPGDAYKLAELVHFKPRLLHPIRHRSQALQADLSWIRGREAAVAVRTQLINTVRSLSKGFGERLQKCSTESFTAKLAEQIPAAIRRAVAPLLEVIDHLNEQIGYYDQMEEQIARERYGKYVLLTKVNGVGVHTALTYMLTIGDPERFEKSRQVGAFLGMRPRKQDSGASKPQLGITKAGDEFLRKTLVNCAHYMLGPHGADSDLRRFGLRICERGGKNGKKRAVIAVARKLSVLLHRLWVTGETYEALRNSKKQQAAA

SEQ ID NO: 388011 - protein, 396 aa, unidentified
MVTVGIDIGGRTHVVARCRDGQARADRETVRVSQSRAGFASLDAWLERQPEPVTLMTMESSGHYWMPLASHLRRREIPVAVVNPLAAKYFAKSRLARTKSDPADARSLAEMAMRDSPPTRDPLAGAELRQAARFAMTLVTEQAKVCQRLIRLVDLGFPELGELFEDPTCRTAREVLRIAPTAQAATRRRTSTLADANAGPGHRRLGQTKAERLQAAAAESIAVPELAAEVTFEVGLLLDQYDLLERQIDAADRRVASLLDGETAHRLRTIPGVGPAIAATLLAEIGDIERFTDFDQLLAYAGVHPAERSSGKKGANPETAWHMSKAGNSHLRAAAYRMAVVGVQHNPVIAAHYARKRAAGKSKMNALGHCMRKALSLVWGVWRNGADFDPDYGVEA

SEQ ID NO: 388012 - protein, 343 aa, unidentified
MKKITTVGLDLAKTVFQVHGIAEEGDVIVRRALRRSQVLDFFRALQPCLVGIEACGSAHYWAREIQALGHTVRMMPPAYVKAYVKRNKTDAADAEAICEAVTRPTMRYVPAKTQEEQAAGMVLKTRDLLIRQRTQAINALRAHLAELGIVRATGLVGIISLAAIVRDDSDLRLPGAARMALEELVEQIETVTARIERLDRKVLEAVRNDDSARRLTAIPGVGPIIAATVRAVVPDPAGFRTGRDFAAWIGLTPRAHSSGGKERIGSISKRGNQQLRTLLVAGATSVLKLARRGHQSSPWIAAMMLRRPFKVIAVALANKIARIIWALLVRGDSYRGAKMIVRA

SEQ ID NO: 388013 - protein, 427 aa, unidentified
MKHDNVNRYAEFCQFRKEIRGSVEYVIVGIDVAKERHHAFFGTATGQALLKRLLFDNSAGGFSELLERVGQLKTRHGLSKAVFALEPTGNYHKPLANWLLEQGQLLVLVSNHAIAENRQTLDGRWDKNDTKDSANVADLVSQGKCQFFEEPDADLLELRALLSLRKRLKKQEHSIRMQIRNGLVARHFPELDRHWGSCLTENLAIVRWCLDPRKISAMSFTDFLSLVTSRDRGQRQVRRLRTIYEVAASSVGCPVSEATVFEAQTLVERFHDVHRRIEQTEGQIETVCRRFPTYRRIRTIPGFGPYVCSQVLAKIGDPHRFKARKQVVRLAGFDLNAKRSGKRSQTAVPVISKRGNTDLRYALYQAALIASYHHAGFRALFTRYLKGREKERGIRTKMRVKLAAKMLVIAWTMMRTETDFDPNLLAV

SEQ ID NO: 388014 - protein, 501 aa, unidentified
MSIPLGRLTTRADSPAARAPFTHHIVEHRVPARNTQSAAPHTAPPTLPAESVPGRHAAGIDVGDATHWVCVAATPDGSDPVREFPAHTPGLRALVAWLRQCGVTSVAFEASGAYGRVLFLTLLEAGFEVLVTAPHFTRQIKGRPKTDRRDCQWIQRLHAHGMLPAVFQPDDATHTLRDYVRQRANLVRLSAQHVQRVQKALELMNLKLTTVLGDVTGVTGLKIVRAIVAGERDPRALAKLRDRRCQHTVEQIATALDGRYRPEHVTELRLCLHLWDAYREAIAQLDAQIATHLRTMRRATDLPPLPKRARVRGKKPHDPGFDVREALYLATGVDLTAIEGIDAIHALTLVSELGTDFTKWPTVKHFTSWLGLCPNWKKTGGKVQSSRTRLGKNRAAGALRLAAWGLMRSTSYMGAYLRRQRGRLGAPKAITATAHKLARVVYALMRHGVGYVKQSQEAYAEHTRAKVEKQFHRRAKELGYEVKKVEPPAATPEAGAPALVT

SEQ ID NO: 388015 - protein, 346 aa, unidentified
MRIIGCDLHARQQTISMVDIETGEVTEKVLLHEGEAVREFYAALPKPVLVGLEATGSMYWFLRLLEELGIEYRVGHPAAIRKAETRKQKHDRRDAELIRRLLEEKRFPQIWLPTSEQRDLRTLLQHRHQLVRMRVMTQNGLQGLALSQGLRRGAKLWSQAGQQELKGLSLAGFAAMRREQLQELRRELNQRLQQLDRAVREQAEQRAGARLLLSHPGVGPITALATEVFLGDARRFPNAKAVASYVGLIPSEHSSGGKQRNGRLSKQGNPLLRLLWVEAARAAARKDARLKQFYRKKLVQKGLGKAVVATARKLGIRLWILLRDQIDYTEFCRRAEQRCPRAGMPE

SEQ ID NO: 388016 - protein, 341 aa, unidentified
MTIKRVGIDLAKSVFQLHGVDGQEKVILRKQLRRTQMLDFFKKLPPCLIGMEACSSAHYWGRELQKLGHTVKLMAPQFVKPYVKSNKNDANDAEAICEAVARPTMRFVAIKTIAQQDIQAIHRIRSELVQQRTAKVNQIRGLLAEYGIVVGRRVEVLGKALPLLLEDAENGLSADFRLLLDGLRQDFATLNGRIDEMDKTIKALADSNADAKRLQQIPGIGPITATALVCAIGDGKQFKRGRDLAAWLGLTPRQHSSGGKDCLLGISKRGDAYLRTLLIHGARAVLKVAGQKDDPRSRWLQNLCSRRNKNIATVALANKNARIVWALLSKKTDFLPEGEPA

SEQ ID NO: 388017 - protein, 403 aa, unidentified
MNAVGIDVSKGISTVAVIRSFGEIVRMPFDVTHTADELNKLAEFIHSLDGETRVVMENTGRYHEPIANALYTAGIFVCVVNSKLTHDYGGDTIRYARTDKIDSLKIAGYCLEKWVKLKAYQPENECRKTLKMFNRQLAEYTKLKVMLKNNLTALLDQTFPDIKKLFSSPAREDGHEKWIDFVAHFWHGECVSSLSERVFAERYEKWCHKNDYNFSAKKAKDIYAVATKHAAVLSKNDFTKVLICTAVSQLLSLCETIAALKSELGNIASNLPEYDTVLAMHGVGKVLGPQLIAEIGDIRKFSKRTSPACFAGIEPPENQSGTYSPHSRRISKQGSPHLRKALFQVMQCVLQLKHANEVTFQFLDRKRAEGKPYKVYMIAGCNKFLRIYYSRVKECIDALENAS

SEQ ID NO: 388018 - protein, 465 aa, unidentified
MKKERIFIGIDVSKGYADFIILREDKSVLKENFQLDDNKTGHDIFTKLLKELSGGSQIICGVENTGGYERNWVHLIRGLSHQNKDIEVYKFNPKGVKHQIQSELKSTIDDAVSAKGIATYLINNYALFKSNWEKSISQRKEVTEGKMLNNMINSLIKQKTMKTNQLEKLVYQSFPELLRYFTYSTPKWIYHFLIKYPGAAAVKRGKLSGIASIKYITQEKAKYLKDLAKNSVASMQSELVEFMIKQQCEDILYIDKEIQILKNRLEKVFENDERVEIITSLKGIAKWSAAAFLVELGDEKRFETATQIVGFFGVNPSFKLSGDGIYKVKMSKQGSANMRSVLFIIANNLVLHEEYFKSLYAKYRAKGKKHFVVMGILMSKALRVLWGMLKTGTKFDSKIDQRNIKKNNQIEQKSQISKKARRMQELTTDAPISRSNLKKRRAILEPQSSVSDERTRSSKNSSVQI

SEQ ID NO: 388019 - protein, 341 aa, unidentified
MSVIIGIDPHKATHTAVAIDRDEQPIATLEVVADRCQTERLLAWAASLGFERTWAIESANGLGKLVAQQLVGVGEHVVDVPPTLSARVRLLGSTKAGKNDSNDALSTAIAGLRHCELRTVRVEDHNAVIRLLIDRYDGLVSLRTQATCRLHVVLRELIAGGAPRRLSANRAAKLLRGVHPAGVVAIEGKRLAVDLLADVRRLDQQIAAARSRITDAVEDSKSTLLELHGVGPIVAAYILGHVANPARFATPERFASYNGTAPIEASSGPRKRHRLNPRGNRKLNHAMHLIAVTQIRNDTPGRVYFQHKLADGKSKKEALRALKRRISDAVWRQLQVDLKLR

SEQ ID NO: 388020 - protein, 418 aa, unidentified
MKVVYPICCGVDVHKSFLVATLITSQGIIPHYSKKRFSTFNNSILKFKQWLIDNNCYDVCMESTGKYWVPIFNLLEDTVHITVANPKWVKAVKGNKDDTKDSKWIGDLFRLGLVPGSYIPEKPIRILREYTRYRSKLVSCRTSEKNRFQNAFTVCNVVLDAVVSDMFGKSASSITDYLISSDTFDPGYCTSLLQKSLKKKADAVVESIEGYQMTQEQKERMVMIRSHLEYITKCIVELDLKLDNMVESYESAIRLLCTLPGVDRTSAITIISEIGTDMSQFANSKRLCCWAGLTPGNNESAGKKKSVRITRAGVYLKPALVQVAHAAVKSDKSSYYRIKYERICKRRGKKRAIIAIARMILTAIYNMFVTGEEWNPSDLYKIDMPQEMLEKQKEKAIKQAVKLLISNGVIKAADISVA

SEQ ID NO: 388021 - protein, 369 aa, unidentified
MAKNTRFVGLDVHAETIAVAVAEGRNQVRSLGTIANRPEAVRRLLGKLGKTELKVCYEAGPTGYALYWELTRLGVQCEVIAPSLSTMKSGDRIKTDRRDAERLARSYQAGDLTAVWVPDSKHEALRDLVRAREATKEDQLRAKHRLLKYLLRYGQRPADDGRSWTATWWQWVRALRLPHPEQNATLLELILEVDHQGQRVERFDSAIDQTVATAPEQLRAIVDALQALRGVAKMTAVTLATEFGRFSRFETAGQVMSYTGMVPSEHSSGPKNRRGAITKTGNSHLRRVLVESAWHYRHQPKLCNRQKELQSSLAPKVAAIAWSAQQRLHRRYWALQNKSKPSAKIVTALARELAASSGRSASKPNNSSN

SEQ ID NO: 388022 - protein, 404 aa, unidentified
MYNAVGIDVSKGKSTVAILQPGGTVIRKPFDVSHTSQNLNELAKYLATLDGDTRIVMECTGRYHEPILKALSEAGLFVSAVNPHLVKNFGNNSLRKVKSDPADARKIARYTLDNWANLRQYSGMDNMRTQLKTLNSQFSFFMKQKVAAKANLIALLDNTYPGVNRLFDSPAREDGSEKWVDYAYSFWHVDCVRGIGLKAYTERYQAFCKRHHYNFQADKPEKLFNASKELVAVFPKEKTYKLLVQQSIQQLNLASGHVERLRREMNELASTLPEYNTVMGIYGVGKTYGPQLIAEIGDVSRFTHREALTAFAGVDPGVDESGQHKSKSNRASKVGSARLRKTLFQIMTTLLQNAPEDDPVYRFLDKKRSQEKPYYVYMTAGANKFLRIYYGKVKECLRNIEQES

SEQ ID NO: 388023 - protein, 400 aa, unidentified
MTAVWVGIDSGKRAHHCAVIDAAGRMVLSRRVANDESALLELITSVLALAGGDQVVWATDLNAGGAALVIALLADRGQQVLYIPGRIVHHAAATYRGDGKTDAKDARIIADQARMRTDLQPVHGGDQISTDLRLLTARRTDLVCDRVRAINRLRATMLEYFPALEAAFDYSKKAPLILLSGYQTPEAIRRTGASRLAAWLKKRGCRGSANVARKAVEAANAQHTVLRTEPVAAQLVAAIAGQITAIDTEIAQLDDVISERFAQHPDAPILLSMPGFGPVLAAAFLANTGGDLRAFQSADRLASVAGLAPAPRDSGRISGNHHRPRRFNRRLMRTCYLAALSSLKNSPASRAFYERKRAEGKSHKQALIALARRRISTLWAMLRDRTTYREPAPPALAPAA

SEQ ID NO: 388024 - protein, 431 aa, unidentified
MLHDHGFTKPIEHSNLITKEGDFMNPLYVGIDVSSKSNVVYFMLPNGDKHSNFSVANSHDGSTQLVKRICSVLSSESLDTVSIGLEATSVYGDNLVYFLREDASLASFNRKIHVLNPKQVNKFKESYNDLPKNDWVDSFVIADCLRFGRINKEVYIGDYHYKALQNLTRARYFAVCNLTKEKQRFMNVLFKKYSTMTQEKVFSDTFSTTALAVYDEFESAEALAYMDLQELTAFIIEKGKNRFPDPDAVAKAIQKAARSSYRLPKTVNDSVNQVLSISITSMKALESQIKEFDKAIAAQMELLPNVLISIPGIGPVYSAGIMAEIGDINRFDNQASLAKYAGLAWTQHQSGNFEAQNTRLIHSGNRFLKYYLCEAAFSLVRCDKEYKAFYHQKYKEVNRYQHKRALALTARKFVRLVFTLLKDNRLYRPAE

SEQ ID NO: 388025 - protein, 418 aa, unidentified
MMDSDKEIVCGADIHRDFLIATMISRSGLKLQERFNMNRDGLLAFRSWILNHRCQRLAVESTGGFWYPIFTILEGHVEFILANAYQIRNIEHKKTDKLDSERIAIYCLNNLITPSRIYPKDYRDLRSITRARETLVNARSKVKNQIHQLLSTCCIKLSSVISDSFGKSGRYIIDRLLEGKTIDQILSGIPSKRVRKKEDELREAIRNGIDPVQVFLIKANLDVIDDISKKIKILEAEIAIKVKPFEEDLKIALSVPGVGFISAATIIAEMGDYRDFSSADKMAKYFGIVPSVYQSAGKLRTGKITKTGSKHMRRILVEVAKAISRTKKNSKLKRFFQRILARCGKKNIAAVALARKVLCILHHLLMNHENYQEPEVKKTKPRIPSSVSPISMMDIDEMIKVISQAGYLVEKDLKEGCG

SEQ ID NO: 388026 - protein, 347 aa, unidentified
MNFYHSTHRHYCGIDLHARSLYVCIIDQQGEMLLHKEIKARPEPLLALLEPFRDDLVVGVECMHCWYWISDLCEEHGINFILGHALYMKAIHGGKTKNDRIDSFKIAMLMRGGNFPLAYVYPKEMRATRDLLRRRTRIVRHGAMLKAHAVNTLGQYNLPPSKANLNNPGGRSQLTAAFTDPDVQRNIDLDLAIVDCYQHELKKLEWHLEQQAKQHDPASLNVLKTIPGVGRILALTILYEVGDIQRFESVQKFASYARLVKCKAESAGKVYGTQGNKIGNAHLKWAFSEAAVLFIRNNDRAKRYVEKLQKRMNKPKALSALAHKLGRAVYFMLKDKRVFDEQRFLKG

SEQ ID NO: 388027 - protein, 359 aa, unidentified
MDSSPPQAVSYCTREFKRSDEESEMNSNVVGLDTAKSIFHVYSQTATDKPVKKKLKRAEMLSYFANLPVSLIGLEACGGAHYWARELAKLGHEVVLLNAKFVKAFVVGNKNDFNDAEAIFTAVTRPNKRTVAVKDDAQQDMQMLHRLRQERVAERTALANQMRGFLAERGIVLAAGLNSVRKGLALILEDADNTLTSTGRELFAEQYQRLVAIDADIKAHEQRISRLCEQNTLSKRFREVPGVGPITATILASDIGDGKGYNRARDYAASLGVVPRQHSSGDKQVLLGISKRGNHYLRTLLIHGARSVLKVCSGKTDPLSRWLQALIERKRSFNSICINSSKGTKIVSTYNQVDTYEGA

SEQ ID NO: 388028 - protein, 390 aa, unidentified
MEHSMQKLNDFSRSRIALEPDGTLIAVIEMSLSSWLVAGIVPGVERQPLKKLAVDESALLKLLHRWREEAEKAGRRIGRIAVAFEAGRDGFWLARWLKARSIEAYVIHAASVAVSREHRRAKTDRLDTELLKRAFLGWLRGERDHCKMVAIPSIKNEDAKRPNRERENLVSEQSRIINRMKAALIRLGIRGFNPKLKRAAGRLEDLRTPEGEPIPPNTLAELRRDMERRRLVRDQIRQIEEARLERLDHAPGDGPHAMVRLLVRVIGVGIETADMLVHEVLSRNMRDRRAVARYAGLTGSPDESGRKRREKGLARSGNGRVRRGMIQLAWRFLMHQKDSALAQWYRARTENALGARKPMIVALARKLLIALWRLVRQGVVPDGVVLRPAQ

SEQ ID NO: 388029 - protein, 342 aa, unidentified
MNRVYVGVDLGSSNFHQVAVNEAGVSKVNREFATSEANLIKAFADQRGEIHVHLEAGELAPWASSIISPLVTRVVCSHPQSNAWIAKDADKSDRIDAFKLADLLRLNRFKEVHYPQQQSRRDFKTLVQHYDELTQQQARLKTKIKARLRMQGVIVRGEGLFSTKGRKAVLAAVKSVAVRTAIKQLYAVLDQSIESQTEARLLMRRAAQAFPEIRIFETAPGIGPIGACRFSAYIHTPSRFSSTRRLWKYCRLSVSHRSSNGKPLRRPRLDRNGCGRLKDVTRKAFEAALRTQYDNGFKRAYLRALETTHDRTHARLTVQRKIASTLRAMWINQTPYDDQLMR

SEQ ID NO: 388030 - protein, 360 aa, unidentified
MAPATLPRNGQSIPFDHVVGIDTHRDFHVAVVLAPNGGKVGELTFPTSSEGYEQLVIWSEQFGIRPVFAMEGTGSYGAGLCRVLLDAAYDVIEVNRPDRAARRRHGKDDPVDAEAAARAFLAGTATIIPKRGGDQVEMIRLLKVAKDSAIDGRTRAMNQVRSLLVTAPVALRERLKGLGRSELITTCVSFRPGVLDGPMAAAKRALRSLARRIQALDAELEALMSDLDALTQAACPGLRQSYGIGVDGAAVLLTAVGDNPERIRSEAAFAAICGASPLEASSGNKRHHRLNRGGNRQANATLHRIAVVRLRWHEQTKAYAERRKAEGLSNKDILRCLKRFIAREVFHLLMGKPPRRTAAN

SEQ ID NO: 388031 - protein, 414 aa, unidentified
MDVIVDRCAALDVHKDTVMAAVRKPDGRARSEVVREFSTFTADLVRLAGWLTAEGVSQVVMEATGVFWRPVWHVLEERGGFELLLVNPRHVKNLPGRKTDVGDASWLAQLLECGLLRGSFVPTHEMARLRDLTRYRTKLTQERTREIQRVQKLLEDANIKLDSVISDVMGKSAREMLDALIAGVTDVETMAQLARTRMRPKIPELRLALEGRFDDHHRLMLRLHLRHIDDLSGMIVELDTKVDELMAPFDEAATRLLSIPGVGKRTAETIVAEIGVDMSRFPSPAHLASWVGLCPGNNESAGKHRSGKARKGNEALRTAMCEAAWAASHTRDTYLAAQYRRFKRRMGTRSEGKAIFAVAHTMIVIVWHLLADTTTYAELGADYFDKRNDSAARQRYLIRELEKLGNTVTLHPAA

SEQ ID NO: 388032 - protein, 343 aa, unidentified
MKITRVGVDLAKKVFQVHGVDRAGRPVWRRQLKRSNWLGVLTETVEPGCEIGMEACGGAHHWARELKSRGFEVKLISPQFVKPYLKSLKNDVNDAEAICEAMTRHHMRFVAVKTVEQQDIQAMHRVREGLMNYRKAKANQIRGLVAEYGLVAPRQMAPLRRAIPCWLEDAENGLRSAFRVLLHGLWEDLQSLDLRLKVLDKEIFALSENHADAKRLKQLRGIGPLVATAMVAQFGDGRHFKRGRQASASVGITPRHAGTGGKNYLFGITKKGNPYLRSILIHGARSVVSKAKHKDDRLSRWVTELAERKHLNVAAVALANKTVRIAWAMLRNGTDYDPELAMA

SEQ ID NO: 388033 - protein, 351 aa, unidentified
MRTSQQSLDTVSTIGIDVGKNTFHLVGFDPRGAIVLQQKVSRHQLGRRLSNIPCCLIGMETCSGTHFIARQLMALGHDVRLIPAQYVKPFLKGHKNDYRDAEAIAEAVQRPTMHFVSIKTPEQMDLLALHRVRSRLVRQRTGVANQIRGFLLERGITVRQGFMPLRKALPDILSSKSDALSPRMINLIGELVQDWRRLDERIASVSNEIEALAKQDENCQRLMSIPGVGPIVSSAVVAAIGNGTGFKQGRDFAAWLGLIPKQESTGDRTILGKISKRGNKYVRTLFVQAAHVVLERRPRTARQGLWPWIEQASKRLHRNMLAIALANKLARIAWAVLARGHAYQPRISANA

SEQ ID NO: 388034 - protein, 351 aa, unidentified
MWIIGCDYHPRMQEVALMETETGEYDERQLSHDHGEAEKFYRDLKQRGVNVRVGMEATGHARWFERLMAELGFELWIGDPAEIKATRVRKQKRDREDARLLLKLLREKRFPRVWVPPPENRDLRQLLWHRHRLVQMRTRIMNQLQAIAMGEGVRLRKSLWSRSGRAKLESLQLAPWAAKRRKDLLELLDHLTPKIEELNVAFEQEAWNRPEVRHLMTHPGVGPVTALAFVLIIGTPGRFACGKQIGSYLGLIPCEDSSGGRQRLGHISKQGSSLLRFLLVEAAQQAVRFDADWKRQYLHLAMRREKRIAKVAMARRLGVRLYWMWRTGWDGKQALQFGSHAGQLVRSHGLT

SEQ ID NO: 388035 - protein, 402 aa, unidentified
MNCVGIDVSKGKSTIAVMRPFGEVVVSPFEVCHTASELSELARLLKSLDGETRVVMESTGNYHAPVAWLLHGAGLYVSVVNAMLVHDYGNNSLRRGKTDKKDAVKLANYGLDHWLTLPRYVPEEDARLMLKTCYRQYQQYSKVQTMLKNNLISLLDTAFPDANRLFTSPPRADGSEKWVDFVATFWHCECVCGRSEKAFTTQYQKWCRKHGYNFSEDKALDIYASACRHFGVIPKTDTAKLLVEQAISQLQTTSSALAALKQEMQSLAASLPEYPVVMGMFGVGPTLGPQLLAEIGDVRRFHSKKALVAFAGIDAPPYQSGQIDVRSRSISKRGSASLRRTLFLVMSVILQCAPIDEPVYQFMDKKRSEGKPYRVYMMASANKFLRIYYASVKAYLESLEHD

SEQ ID NO: 388036 - protein, 320 aa, unidentified
MAQQGRIVGIDVAKLKADACIRSLQLRLSQPSTAQGQQDMITWLRRNEVGLAVMEASGGYERVWAEALRAAAIAVRIVDPKRVRYFAKSAGRLAKNDPIDAEMIAWFAETFAAAAEPAHDADRDALNRLVTARSLLVRLATPIRQLGEHGQPRVVENAQRAILKTIKAQLAKLEAAIEAKIAANAQFLARRAIIASVPGFGDHFVAGALAWLPELGRISNKAAAGLVGVAPYDDDSGQHRGERHIKGGRRDIRTLLYMAALGAATRHNPVVMAYYKRLRAQGKKTKVALVACMRKLVVILNTMLARGEMWNPTPRTTAVA

SEQ ID NO: 388037 - protein, 340 aa, unidentified
MAGVVIGIDPHKRSHTAFALDAREKRLGQVRVSASGRQVPALLDWAARWPKRSWAIEGASGLGRLLAQQLLAAGERVVDVPPKLAARVRLLDSGQTGKNDPNDARSVAVAALRAHDLAEVAVEDHTMVMRIWARRYRDLGRLRTQLLCRLHAVLCELVPGGFGKKELSVAQATEALDRIVTDSPVAQANLELARDLVADLTCLDEQRREVKRRTARAVTASGTSITGIYGVGPIVAGTVLGYVRDIRRFPTRDHFASYNGTAPIEVSSGDRVVYRLSRRGNRQMNYVIHMAAVSQIRHRGSEGRAYYDRKVRHEALDVRVEVRVLRRPAVAAAGLKLGAA

SEQ ID NO: 388038 - protein, 338 aa, unidentified
MQLYCGIDLHAKNSYLAIIDEQRQRIFKRNVTNDRQAILSFLAPYKPELAGIVVESTFNWYWLVDALMEEGYTVHLANPCAIQQYAGLKYIDDKHDAFWLAELLSLGILKEGYIYPKEQRPLRDLLRKRGHLMKLRTSLLVSLHNTMANACGRKIPSHHVLGREDRLSVHLCQNESLALMGQVSKASIDALTVQIKMIETHVEKQYKIEPTYLGLLSLPGVGKILGLTILLETGPIGRFRAVGNYVSYCRKAESTWKSSEKVKGKGNRKNGNRYLAWAFAEAADHAHRFDTASRNFYTRKLKERNSPIAHSALANKLARAAYYIMRDQVPYEEGKLFG

SEQ ID NO: 388039 - protein, 414 aa, unidentified
MVKSKAKSSSKARKQKSLKSLTPINPNAAGIDIGADSHWVSVPADRDEQNVQEFSCYTPDLYALANWLEQCKVTTVVMESTGVYWIPVFQILETRGLEVLLVNSHHVKTVPGRKSDVLDCQWLQKLHSYGLLAGSFRPQDEICVLRSYIRHRDNLIRTAGTHVQRMQKALTQMNLQLHRVISDITGKTGLKIIKAMIAGEQNPQKLAALRDGRIRRTEEEIAAAMTGDYREEHLFVLQQELQLYEFYQQQISQCDRQIEEYLTSLDSQIEIEESEEVTKQPPTRNYSSNVPAFDLASHLYRISGVDFTRIDGLGVLTVQTILSEVGLDPSRFPTVKHFTSWLGLCPGSRVSGGKVKSSRTRPVINRAANAFRLAAHALRRSQTALGAFFRRLRARLGAPKAVTATAHKRCDPAS

SEQ ID NO: 388040 - protein, 409 aa, unidentified
MKLYVGIDVSSTDLYTCIMDQEGNTCAQFKVDNHLLGATFLRDQLLLWANKRQPSEILIGMEATSVYSWHPTMFFHQQEELKSWHVKVFTINPKLIRKFKEAYTDLDKTDGIDAWIIADRLRFGRLKVTAIMHEQFIALQRLTRMRYHLVHQLTREKQYFLQHLFYKCSSFTQEVDSSVFGHAILELLLESFSLDEISQMDVQQLADFLRQKGRNRFADPECIAKSIQKAARSSYRLSKCVEDSIDLLLGLSIQSIRSLQAQIKELDKAITRHLEGIPNTLQTIPGIGPVYAAGILAEIGQIERFDNQAALAKYAGLTWSKHQSGRFQAEDTSLIRSGNRYLRYYLVEAANSVQRHDATFRTYYRKKYEEVPKHQHKRALVLTARKLVRVIDALLRNGQIYTPRKGEDR

SEQ ID NO: 388041 - protein, 415 aa, unidentified
MALKIVYKICCGIDVHKTFVVACIASTNSKGITTYERHRFSTYTSGLKDLLQWLLKRNCKDVCMESTGKYWIPIYNILENDCSIVLAHPKYVKAIRGKKTDKKDAKWIADLFKHDLVAGSFMPPADIRQLRDLMRYRFKLTCFQSSEKNRLQNCLTVSNIQLGNVVSDTFGKSAQAILDKILENPADTSFDLEPLVYKSLKKKLPELRDAIDGYITPEQAGKLKVIKAHYESLESRKAELEELILALAVPYQQELAILQTAPGISSGFTAIGIISEIGTNMEAFPSAKHLCSWAGLTPTNNESAGKKKSVRVSKAGCYIKPLLVQCANAVVTSKKHPEIRNRYLRLKKRRGHKKAIIAVARMLLTALYHMLKNGENYNAELYRKSDLPPIDCEITVEQALIIARNQGYRIKSATA

SEQ ID NO: 388042 - protein, 326 aa, unidentified
MAAATGHTMVTMTVAATPGGYQQLLELARRQPSRRIWAIESTGGYGAGLTRFLHAHQEQVAELDRPKRAARRHGAKSDPLDATRAAREALGRDQLAQPRATGRRAALSVRLAARRSAVQAATDAQRQLHALVIAAPQALRGRLQDCSTRQLVAACARLRVQASWDVETASTAATLRSLARRSRELTAEAADHRQAVLGLVRAWRPDLLTRTGVGPILAATVLCAWSHTGRCRSDAAFAMLGGAAPIPASSGQTIRVRLNRSGDRQLNQALYTVVLTRLRTDPATRAYATRRRAEGKTNREIKRCLVRYVARQLYRLLEAQPSVDAT

SEQ ID NO: 388043 - protein, 413 aa, unidentified
MELLYPCCCGLDVHRDTVVACLIRPSTEGQRTKEIRTFGTTTGELLALVDWLAPAGCTHVAMESTGVYWRPVYNLLEGRFQLLVANAAHIKAVPGRKTDVKDAEWIADLLQHGLLRASFIPSREQRELRDLTRTRTTLRDERSAAVNRLHKVLQDANIKLAGVATDVMGVSGRAILQAILSGTTDPATLAELAKGKLRKKRDKLEQALTGRVNAHHRLLITVHLELIDSLDEAIERLSQQIAEKLRPVEVELARLYTIPVVGQHTAEVLAAEIGLDMAQFPTAGHLASWAGMCPGNHESAGKHKGGKTRRGSKWLRRALIEAACAAGRARRTYLGGQYRRLVVRRGKKRAVVAVGHSILVIAYHLLKNHDTYRDLGPTYLDERRRARAQQRAIEQLQVLGYQVTITPKEVVAA

SEQ ID NO: 388044 - protein, 370 aa, unidentified
MRKDTSRNKQQIRSKKERETREGFEFYIGIDLGDKNSDVCVLDQSGEVSKEFRLRMKEADFRTYFASIPRSRVAIEAGGQSRWVAEVIEKCGHEVYVSNTRKVPYIHQSDDKDDPGDACKLAELLYFKPRLLHPVQHRSREAQVDLSWIRAREVLVKSRTQLINAVRGISKAFAERLEKCAAESVTAKLAGQIPEVIRGAVAPLLETIDHLNEQIRYYDEMEEHIARERYPKYRLLEQVSGVGVHTALSFMLTIGDPERFQKSRMVGSFLGMRPKKQESGESKPQLGITKAGDMYLRKTLVNCAHHILGPNRKDSDLRRFGQRICARGGKNAKKRAVIAVARKLAVLLHRLWITGEVYEPLRNSKQSKAA

SEQ ID NO: 388045 - protein, 307 aa, unidentified
MQDTIGIDISKDTLDCFQLSSSKHSQYRNGKLGHKALIKWLKSQGATLVVFEATGAYHRSLEATLARYEYPFVKVNPRQARRFAEATGKLAKTDRVDAAMLAKMGAVLDLPAQEPKSENINILRELLTARRALTKDNAAAKTRSHTTLHAVLKMQIGARQKQITLQLKQIDKIIAKMIDGNQELSRKFEILLSIPGIGQVTAFSMLIEMPELGTMTGKQSASLAGLAPISRQSGKWQGKERIQGGRAFFRRAMYMPALCIIRHNLSSKQKYDQMIKRGKPPKVAITAIMRKLVVLANVLLRDDRKMD

SEQ ID NO: 388046 - protein, 376 aa, unidentified
MQNDITLFVGLDVHKDSITVAYALGSGEVELLGKIGTSARDIDRLCKKLQSKAGHVKIVYEAGPLGYDLQRRLAAKGFDCMVCAPSLIPRKAGDRVKTDRRDAVKLVRSLRADDLSAVHVPTVEDEAFRDLARVWAAARDALKRARQALKSFLLAHAVRYTGTANWGPSHRRWISSFSFGNRWQDLAFSELRRAIEDRFAQCERLESALREAVTQWRFYPAVLALQTMRGIRFTTAVGLLSEIVDVTRFAHPRQLMAWLGVTPSEYSSGGSRRQGSITKTGNSLARKLLIEAAWSYRHTAKVSPEIQQRHEGVPKVIVDRAWDAQLRLCGRYRRMVAKGKNKNVAIVAIARELAGFIWDIGRLGIEQAINTPKPAV

SEQ ID NO: 388047 - protein, 346 aa, unidentified
MIVIGIDPHMKSHTAVALEAASGRRLAQQTVAGDQAGAEELLAWARRLGDERLFAIEDCRQVSARLERRLLPRGERLLRVPPKLMARARSSARSYGKSDPIDAECVARAALRQPQLPEARLAGPEHDVRLLSDHRDDLLGERKRAQSRLRWHLHDLECDLALPPRALDRYVWLDRVEAHLRGLGQTTRRRIALELVERCRELTVAVRALEREIRALMRQLAPELLALPGCSALSAAQLVGQVAGASRFVSEAAFAMHTGTAPLPASSGTTTRHRLNRRGNRRLNSVIHVIAVTQVRMHPPAIAFLERKRAEGMSTREALRCLKRHIARTVYKTMRRAEQARLAICC

SEQ ID NO: 388048 - protein, 410 aa, unidentified
MAGKKLWVGIDVGKQFHHACAVDADGKTVFSRKIKNRQVAIEELITRTTTKAGAEANDGEVVWALDMTSGSAALLVTLLIATGQPVRSVPGRLVNRMSGAFTGEAKTDAKDAHTIAETARLRSDLTPVTMPDQVVGDLQVLTARREDLMADWVRGVNRLRELLGSIFPSLEQAFDYSTRSALILLTGYQTPTGLRAAGEAGVAEYLRTQRAWAPGIPAMAATAVTVAAEQDLALPGETVTAPLIARLARQLLDLDREIKDLDKQLTTRFGEHPHAEIITSVDGFGPILGAELLADTGGDLATAFGTPDRLAAYTGLAPVPRDSGRIRGNLHRPQRYHRGLRRVFYLAALSAIKRPDGPSRAFYQRKRDEGKRHVQALIALARRLINLVWALIRDNRTFTTEAPTPTATAA

SEQ ID NO: 388049 - protein, 329 aa, unidentified
MNYIGMDVHKHFTYAVVKDSQGNRLAEDKFTNDSVNFELFLEPYKPEETKIVMESTGVWEYIYEILEAMNYEVKLANPVKTKAIAYAKVKTDAVDASTLADLLRANLVAESYIPTKEVRKLREITRLRKMAAKQKVQTENRLHALLTKRGIFLPKKTLCKKSFEFLTELNDPSISEYLDLIELQRQKENSVEKRIEALAENNKEAKILMSFPGVGPVRAMEILAEVGDITRFPTADKLCSYAGLVPSIKQSGSSLRFGRLMKQASKSLKHVFVQIAWSLTRTKESNCFQEFYKKLTKKKGKQKAICAAARKVCCTIHAMLRKKEEFRYS

SEQ ID NO: 388050 - protein, 358 aa, unidentified
MQKSYYVGLDVAQKKTQACVVDQDGKVIREKELNTHPAAIIGFIRKHFQSDVANIGLETGSLSPWLYRNLRQEGLPVVVLDAVHVSRALSMRRNKTDENDARGIAELVRMGVEWLGVVHVKSVACQSVRTQLTSRAMLVHQRVEMENTIRGMLKPYGCVVDSGHKCAATFRDRVIDALCLIEDRENIQLKTTVTPLLDMHGAIYRQIDVMDKQLQAMAESHPVCKRLMSVPGVGPVTALAFFTAIEDPTRFTNPADVSAYLGLTPRTHQSGEYERQGRITKRGDVVTRLHLVQAATVMMTSTKSWSSLKSWGVRLSKRIGFNKAKVAVARKLAVILFVMWRDGKDFAYGDKAKPMAVA

SEQ ID NO: 388051 - protein, 320 aa, unidentified
MEQRVRENIVGVDVAKDTLEVFELHSEEVYSIANEGEAIEQWLARWKVPIRLAIEPTNRYHEAVAQAAHARGHQVCMVDPYRLMHYREGIGQRVKADRQDAKLLAWYVSREEGEIRLWAPMTPGEQRFWHVLKRRATLVRARTQLKQSLTDLGSVQSDVDALLAQCNQTVIKMERALKSEAKALGWTAEVRRCQAIPGVGPLTALAMVATYHRGQFTRADAFIAFMGMDVRVRDSGQFRGRRKLTKKGDSELRRLLFNAAMQGRRSALWEPYYLALRARGFSTTAPFVALARKLARICFAVLQKRVDFDPDFRLRTCAVT

SEQ ID NO: 388052 - protein, 371 aa, unidentified
MKQQSKSSHITVGLDLGDRRHRFCALDERGEVVEQDSICNDRVSLRKLAGRYHGALGVMEAGAHSPWISRFLEALGWRVVVSNPRKVRAIYQHERKSDQRDALMLARIGRMDLALLYPVRHGTAEAQQDLLRIKLRDSLVRARVAVINSVRFTLKSLGYTVRNPSSARFHKVVMEEVPESVREMITPSVQALAELTARIKMLELEINTLAQMKYPQSAQLQQIPGVGPITALYFVLKIEDPNRFAHVRDVGAYAGLCPRRDQSGESDPQLRISKRGDAYLRRLLVSAAHYILGPFGPQSALRAYGLMLAADGTARAKKRATVAVARKLAVLLLSLWKSQQPYQSFPRARLNGQPEDRRSGTIALHRMEATD

SEQ ID NO: 388053 - protein, 344 aa, unidentified
MEITTIGLDLAKSVFQVHGVDAIGQVVIRRSLRRAQMLPFFTRLPSCLVGIEACGTSHYWARELIKLGHQVRLMPPAYVKPYVKRGKTDAADAEAVCEAVARPTMRFVPVKSPEQQAALSMHRTRDLLVKQRTQLINMIRGLLAEFGIDIPKGIERALLMARRIVDGEAPDVPMEAAKIVSTLSQQALDIHVRLREIDRDLAVCLRGNDVARRLMTIPGIGPVGATALAASVTDPHQFRSGRQFAAWLGLTPLQKSSGGKERLGRISKMGDKYLRKLLIVGMTSLVRRAKYNPKTVDPRLADLLARKPVRVATVAMANKTARVIWSIMARGETYHADHRPALAA

SEQ ID NO: 388054 - protein, 349 aa, unidentified
MLATTGQTIRVVGIDIGKNSFHIVGLDDRGAIVLRQKWSRGQVQARLANLPPCLIGMEACVGAHHLARRLQALGHDARLMPAKYVRPYSKGQKNDFRDAEAIAEAVQRPTMKFVIVKTSDQLDLQALHRVRERLVSQRTGIINQIRAFLLERGIAVRQGQRFLRAELPRILTAACEVLSPRMARVIEALADDWRRLDGRIDELSAEIQALADADSACERLMSVPGIGPIISSAMVAAIGTGEAFTKGRDFAAWLGLVPRQMSTGDRTILGRISKRGNRYLRVLFVQAAWVVLIKPTSWHRHGLKAWIEAAKKRLHHNVLAVALANKLARIAWSVLAHGRAFEVSRPQTA

SEQ ID NO: 388055 - protein, 402 aa, unidentified
MGEAVVGYDSVDVFVGVDVGKGEHHAVALDKAGQRLFDKALPNDEKKLRELIGGLKQHGTVLFVVDQPKTIGALPVAVAYDEGVLVGYLPGLSMRRIADLHAGEAKTDARDAAIIAEAARSMPHALRSLSLVDEQVSELSALCGFDDDLATQITAASNRIRGFLTQIHPALERVLGPQLGHPAVVDLLQRYPSPAALRAAGETRIANRLVKLAPRLGRRLATEIIQALSEQTVVVPGTSAAATVLAKLCEQLATLRRQRDEVALEVEHLLEAHPLYAVLTSMPGVGVRTCARLITELSGKDFASAAHLAAYAGLAPVTRRSGSSIRGEHSSHRGNKMLKRTFYLSAFAALNDAHSRAYYDRKRAQGKRHNQALIALARRRCDVIYAMMRDGTLYETPLENVA

SEQ ID NO: 388056 - protein, 373 aa, unidentified
MTSMPRRSRPDQPHADTTETAPEVILGVDTHKDAHVAAVLSATGGLLAVDTFPTTAAGYRKLLSWARSHGVLSRAGVEGTSSYGAAVARALSAAGITVVEVNQPDRAHRRLRGKTDALDAESAARAVLSGRATAIAKAGTGPVEATRILKLAKTSAVKSRTQAINQLKAVLVGADPALRESMTGLGTTRLLRACAHLPATAQTAGDVLDTTRFTLRLLARRVLSLTEEIDDLNTRLTITISAHAPDLLARNGVGPDTAAALLIAAGDNPDRLHSEGSFAALCGVSPVEASSGNSQRRRLNRGGDRQANAALHRVALSRLRWDQSTRDYVQRRVHDGKTRREAVRCLKRYIARELYPIITHPARSQPPALLTAA

SEQ ID NO: 388057 - protein, 404 aa, unidentified
MTSDDRPLISLGVDIGKTAHYAVAVDREGQTVYSKAIANDESALRLLVLWARAHQAVVIVDQPGGTAALLLKLCWDATIDIGYVPGLAMARARDFYAGESKTDPKDAFVLADVARAHPNRLVWLRETSTARAQLELLNSYDADLREDANRLTNRMRALLATYWPALERALDDRLDTIGGTTLLTRYPSAPQLRQAGAKRLVNLLRATHRVRQPEAWVEQLVVAAKSQTVVVPGAETAAGLVAELAEQLHRVLVRRQSLEKEIERAFFALPEASIIKSLPGIGPRLGARILIEIGDIRQFRTPAQLAAYAGLGPTPHQSGTSIRGNRITRFGNHRLKNAFFLAAFSSLKHPPSRSYYDRKRNEGKRHTQAVLCLARRRVDVLHAMLTTKTSYRAPTLQADLETAA

SEQ ID NO: 388058 - protein, 394 aa, unidentified
MRKPKRRKPLNDLSRCPTALNVNETLIAVIELSQKTWLVAGIIPGIERQPLKKLEPDENALLSLLDRWRKEAEKAGYKIKRVAVAFEAGRDGFWLARWLRARGIEAHVIHASSVAVPREHRRAKTDRLDTELLKRAFLGWLRGEREHCKMAAIPTIAEEDARRPSRERESLVGEQNRIINRMKAALARLGIRGFNPKLEKAADHLEDLRTPEGEPIPPNTLSELRRDMERRRFVMHQIRQIEAARLERLKQATRGRGGSHAMVRLLARVKSISVETADMLVHEALSRNLRDRRAVARYAGLTGSPEESGSKRREKGLARSGNIRVRRGMIQLAWRFLMFQKDSALARWYRTRTDNVPGSRKKMIVALARKLLIALWQFVRDGVVPEGFVLRPAQ

SEQ ID NO: 388059 - protein, 348 aa, unidentified
MTQILAIDLGKFKSVPCSYDSETADATFRTIRTCPQEVHDLLIELQPDRLVIEVCGIAGWIHDLATELGIAVEVANPQHEGWRWNKVKRKTDRDDALKLARLSAMNQLPTVYMPSRRVRQWKSLIAYRHALVDRRTAIKNTIRALLDVQGLRMPPGAKGWSIESIDRLKGLSRPIGRCGRDDLWRGHLHSELTALRQANELLERIEGRLDRIGAGDERVQRLQSMPSVGKRLSELVVATLDRPERFRSAREVSAYAGLVPRQFESGTMSRQGRICKQGPSLLRRLLVQIAWGMERRSAYVAALFQRISGGQKSRRKKAAVAVARKILVWCWAILRDGTRWRDPSPRAA

SEQ ID NO: 388060 - protein, 361 aa, unidentified
MELHVGLDVSLETTSLCIVDETGKKVLETSVASDPEAICIALRPHVSEVVRVGIEACSTGIWLARELRNEGLPVTVVEARHMRSALSAMRNKTDRNDAHGIAQMMRMGWFRAVHVKPVETQRLKTFLANRRLLKRKLIDLQNHLRGALRSHGLKVGTVAAGKFDSRVRELIEGSGDYMFQTMIESMLDVRAVLFEGFRKLHRILLLLVKHDPVCRRFMTVPGVGPVSALSYKVTIDDPTRFTRSRTVGAHLGLTPRKYQSGTSVDWGGRISKMGDVDTRGALCEAAASLLLRVQSYSALKAWGMRIAKRSSMMCAIVAVARKLAMILHRMWIDGTDFDAKSGAKITQKRKRDPRTGRLMPC

SEQ ID NO: 388061 - protein, 348 aa, unidentified
MVLIGSDFHPSWQQVSWLDRETGETGDQKLVHEAGSVEKFYRQFPAGSRIGMEATGNCQWFLELMAKLGHEVLVGDAAKIRASDARQQKHDKRDARLLVQLLAEDRFPRIWVPSREEKDLRQLLIHRYKLVRIRAQVKNGLQHLALNQGLQRKKRLWSEAGQKALCELPLAPWASRRREDLLKMRSELDAKIDLLDQAVMEAAEKNEKAKLLMTQPGVGPITSMAFVLTMGDVKRFPRGKQVASYLGLIPREYSSGGKQRLGSISKQGNSFLRMLLVEAAQGAARYDAGMRNEYLHRCHTKAKGVAKVAAARKLAIRLYWMLRSNTKYPEVVHVESSSRVPLVVRHGG

SEQ ID NO: 388062 - protein, 351 aa, unidentified
MNEHTVNPSDVSIGLDLGDRHSAICVFDRATGEIVEESRIPTKADSLRRRFQLESPVRVALEVGAQSPWISRLLVELGHEVVVANPRKLRLIYENDNKSDRVDAEYLARLAAADPKLLHPVEHGSEQVQCDRALLKARDRLLECQKKLVNAVRGMAKSLGCRLPACSTNAFPRRVRELIPEALRPAVDPLLEALEELRRQALHYEREVKRLCEERYPSTRLLQQVPGVGPITALDYVLTIDNPTRFSKSRTVGAYVGLRPARKESGRASPELHITKAGNPMLRRHLVNCAHYILGPFGPDCDLRRWGLELASRGNKTAKKTAVIAVARKLAVLLHRLWTSQQAYEPIRLGV

SEQ ID NO: 388063 - protein, 426 aa, unidentified
MARTRATRRCFGLDVHRDFAQVAIWQNGVVTQAGTFPTTPEQVRAFADSLGPRDEVALEATGNAWAIATVLTSRAGRVVVSNPAKTRAIAEAKIKTDKVDAAILANLLAADYLPPVWLADADTAALRRQVLRRAHIVRQRTRLKNRVHAILHANLVPRCPAADLFGIKGRAWLAEQDLPADEHAAVSALLRQLDFHAEELRLIDRDLGQVALDRPEVRRLMTIPGVDATVALSIVAAVGDFTRFRTPEKLVCYFGLNPRVRQSGGQPASHGRITKAGPAHARGMLVEAAWSASKAPGPLRAFYQRVRARRGMQIAVVATARKLAVLCWHLIIKSEDYAFAMPSLVAHKQRKLELRAGLPTQHGNRKGNAASYSLKDVRAAERDSAARAEAIYQRMVASWQPARPARKPPKPKVIAVGVAASKGTRL

SEQ ID NO: 388064 - protein, 346 aa, unidentified
MENIALDVHKHYTWARVENREGQQLYASRLAHGRGCIKNFVQRWTPGSPVAVETVGNWYWVVDEIEAGGGKPQLVNARLAKLMIGNVNKSDKLDAKGLNMLQRTGTLPTVWIAPSGVRDARELPRTRMVFSRQRTQLKNRVHSTLSKYGYVVDEVSDAFGKRGRQIIEELSNKLPPHTKQALDHVLDQLDEVMENLKAIETDMIQVFAPCPQTSWLQSLPGVGQILAVVIWTEIGSIERFNRAEQLASYSGLVAREHSSGGKFHYGAIRRDVNVYLKWAFVEAANSAILNRERCDYQHIGRLYQRIKPRRGHNRAKVAVARHLSEASFWMLKKGEPYREPVLSTQR

SEQ ID NO: 388065 - protein, 373 aa, unidentified
MKYTKFIGLDVHKETIAVAVAEEGREAAESLGTISNNPEAIAKLVRKLGSVNTLYFCYEAGPCGYGIYRQLTAAGSTCMVAAPSLIPRKPGERVKTDRRDAKKLAQLLRSGELTSVWVPDENQEALRDLVRAREDTKEDVIRKRNQIGKFLLRLEKRPPHGVKSWTIKYWQWLNSLDFKQAAQGIVLKEYIHALKEAEAREKRLEEEITELVKYSEQAPVIAALQSLRGVGLITAATVVAEAGDLSRFDSPKQLMSYVGLVPSEFSSAGSRHQGRITKSGNAHIRRVIVESAWHYRRPPAIGTGLKKRQEGQSEEIKAISWQAQHRLNLKFRRLSGRGKPSQTAAVAVARELLGFIWAISQEIRQKNDLQKIS

SEQ ID NO: 388066 - protein, 339 aa, unidentified
MNPIPVGVDIGKNVFQIHYIAPNSGEIINKSLKRANFLEYFANLEPCMIGMEACGGSQHWARSLSRLGHKVRLMAPRFAKAFNIGNKNDAADARAIWLAVQQPGNTVAVKSEAQQAVLALHRLRQQLVKFRTSQINCIRGLLGEYGEVMPASRRAFNANIAAVLDRVGDHIAAPLIDTLREQWAALAHLDEQIARIEERLKQWMSTDLSAQAIGAIPGVGLLTATAAVATIGDAKAFKSGREFAASIGLVPKQVGSGGRTTLLGISKRGDAYLRTLLVHCARVISVQLRSRHPWIEQLLKRRPYNVAVVALANKLARVIWAVLARGRPYQQDFVSTKPA

SEQ ID NO: 388067 - protein, 430 aa, unidentified
MKSNTQNAKIEAITEKTLVLGIDVGSETHYARAFDYRGIEYSKKPFKFSNTEAGFATFKEWILDLKERHEKDKVVPGMEPTGHYWFNLGKFLQDNEMKPVLVNPHHVKKSKELDDNNPTKNDRKDPKVIAGLVREGRYMIPYLPDGVYADLRTASNIRFQLQAELTRIQNRISRWFNIYFPEYKTVYGKPDAKSGMLILKAAPLPEDILTLGIDGVNQIWRDAKLRAVGKARAKTLIEAAEHSVGSKEGAVSARMEIRMLLEDYESRNIRLQEVMALIEGLVKQIPMAEKLLEIKGVGIRTVSGFLAEVGDISRFNNPKELQKLAGLALVENSSGKHKGETTISRRGRKRLRYLLFEVAMSLVAKNPEFRELHNYYTTRRLNPLKKMQSLMAIAAKLIRVFYAMLTKGVDYDPKKMVSDIKRPAVYIQAA

SEQ ID NO: 388068 - protein, 412 aa, unidentified
MTAKDQFAAHVGLDWADKKHDVCVQFKNGDRIFHVIEHTPEALDIWLNELHQRAKGRIAIAVELKKGPVVYALQKYPFVTVFPVHALSLARYRQAFWPSGAKDDPQDAELALDLMLRYPRKIKAIEADNPDIRLLQQLVEQRRLLVEDKRRFVNRLINTLKQYYPQPLEWFSHRDSSLFCELIIRWPSLQQLKRARSDTVRHFMNAKGGPAVAYTEQRVASIASAIPLTTDKTVIEANALMATALASQIKLTGDLIRTYDERIESLFDTLPDAELFKSLPGMGPCMGPRMLAALGDNRNRFNSAEEIQNYAGIAPVTERSGQKSWVHWRWQCAKFVRQTFVEWTAKTVNSSYWARLYYQGQREKGKSHQSAIRALAFKWIRIIYRCWKTRTRYDEAKYLLALEARKSPLLKP

SEQ ID NO: 388069 - protein, 364 aa, unidentified
MNCVVVNTELSSLEETRRQFNGGKAYIKLGIDVHQDFYVVVMQEGSSNPKPPQRFHKEAFLRWAAKLVCSGAQVYAVYEACGFGFSLQRRLSALGIECYVVCPQKLDEQNKRVKTDSLDARALCLKLDRFLQGNRHALALVRVPTEEEEQTRALHRQREQLVKVRKVLEAQGRSLMVNHGIEPVQQWWKRRAFAALSMPEWIRVLLRNTQPIVLSLQSQIDQLTLQLQNAATAEPPRGLGKMTSVIIDREIGNWHRFNNRWQIASYTGLCPGEYSSGQKRLQSCVTKHGNPRLRAALVELAWRMVRFQPNYRAVRKWNERLRKGALTTGSARKKAIVALARQLAIDLWRIRTGRLSHAQVGLEM

SEQ ID NO: 388070 - protein, 348 aa, unidentified
MDVVVERCAGLDVHRDEVVATVRVPGAGRRRWDQQTRTFRATLAGLSMLGDWLSGFGVTLVGMEATGVYWKTVFQALEERFECWLLNAHHLRNVPGRKTDVKDSEWICQLVQHGLVRPSFVPPVEIRRLRDLTRLRKAQINERARSIQRLEKVLQDVGIKLTSVASHTYSKSARAMLDALLSGVTDPEQLAELAKSRMRSKIPQLREALASRFQIEHHGVMVAQLLAHIDTLDAAIQNLNERIDLALAPHQHVVELLCTIPGVQAHAAQVLIAECGLDMGRFPTVGHFASWAGACPGHHESAGRRRSGQTPPRTPLADRRADRVREGRRPHQGHLSRRPLRSAARTTR

SEQ ID NO: 388071 - protein, 405 aa, unidentified
MTMRRRAWVGIDVGKTSHHACAIDETGKVVWNQKVSNEQRAIEQLVTRACKGAEQVQWAIDLTSPMALMLITVLLCAEQSVVYVPGRTVNTMTHAFRGEGKTDAKDARVIAETARLRNHLSNVVLPDELVVELTQLTGYRADLMADWVRGVNRLRALLGSIFPGLEAAFDYSTRTPLILVSGLCTPAEIRAAGIDGMTAFLVDNHAWPTGIVKSAATAAALANEQPLALPGEAGTAALVKRLACRLLELDREIKDIDKTITARFRDHPYARIIESLPGFGPGLGAEFLVVTRGDLASFATAGRLASYAGLVPVPKDSGRITGNLRRPKRYNRRLRRVFYLAALSSLRADGPSRRFYDRKRAERLIHTQALLALARRLIDVLWALLRDDREFTPEKPITATARLRS

SEQ ID NO: 388072 - protein, 350 aa, unidentified
MIIIGVDFHPEFQQIASVDTDTGEFQEKRLGQREEAETFYRGLAAAGQKVRVGMEASGHARWFERLLAELQIELWIGDAAEIRTRRVRKQKTDRQDAQLILKLMLKDDFPQIWVPSWENRDLRQLLWHRHRMVQARTRIMNQLQAVALNEGLRCKKRLWRKHGRQQLEAFRLAPWASRRRRDLLELMDRLNPTITELSQAIEQEVEKCPEARRLMTHPGVGALTALAFVLIIGKADRFRCGKQIASYLGLVPLEDSSGNRRRLGHITKQGSSMMRFLLVEAAQVTVRSVPEWRSKYLHLMMRRGRKTAKVAMARKLAVRLYWMMRKGWDYQQWSKFGSHVGQPGHRDGVQ

SEQ ID NO: 388073 - protein, 331 aa, unidentified
MFTLLYPPREACLGLDISQAKIDAALLRTGATFHAPFANSRAGLKQLQAWCRRHGVTTTLAVLEATGSYGELAATELHAAGWSVHLANARRIKDYARSLGRRNKTDRLDAELIAGFGATRQLPLWQPPSPAQQRLRSLLRRLHDLQTMLQAERNRCAACHDPLVSQSLTRIVRTLHKEGTALEAQLRAHLQSAPALHADVQRLCQIEGIGLRSAAWICAELPRHLPNARAAAAWLGVTPQIRQSGTALHRTAPVGAQANRHLRKVLFMAAMVARRHNPRLKTFADRLAANGKSKMAVLIAVLHKLIKISFALLQNQSTYNPLHNPLAPPKN

SEQ ID NO: 388074 - protein, 354 aa, unidentified
MSQKLNSEIAVIGIDIGKNSFHIVGQDRRGALLLRQKWSRGQVEARLANLPPCLIGMEACVGAHHLSRKLKALGHDARLMPAKYVRPYSKGEKNDYRDAEAIAEAVQRPTMKFVATKTADQLDLQALHRVRERLVSQRTGIINQIRAFLLERGIAVRQGLHFLRAELPGILAKCTDVLSPRMLHLIEDLATDWRRLDERIEGLSDEIGALARHDKGCERLMTVPGIGPIISSAIVAAIGTGDVFSKGRDFGAWLGLVPKQISTGDRTILGPISRRGNRYLRALFVQAAWVVLVKIKPEGWERYGLRSWIEAAKQRLHHNVLAIALANKLARIAWAVLHKGRAFECVKTNASRAA

SEQ ID NO: 388075 - protein, 363 aa, unidentified
MKIMVGIDLHSNNALCALMEEDGTRLLHKKLPCDLSAILGMLKPYKKRIGTIAVESTFNWYWLVDGLQDHGYQVVLANPARMKPYSGLKHTDDVSDAYFLAELLRLDILPTGHLHDRKTRPVRDLLRRRLLLVRQRTMLILSFKSLNERTLGTRLPLARVKAMNAEEARALFTAPADQLLGAEQVTLMSHLSGSITRLEKHILEEVASWTTYQRLQELPGIGRILGLTIALETGDAKRFADAGHFASYCRCVKSLRTSNDKKKGENNRKCGNKYLSWAFVEAAHFACRFDEQCRRFYDRKKQRTNPVIATKALACKLAKAAWHVMAEDTPYDPVRVFGSEKKKSLGKPAVSPPRGLDNKSPQN

SEQ ID NO: 388076 - protein, 393 aa, unidentified
MGKRAKVTQIGLDVHRKFSIAAARDASHKIVWRERLEHVDRNELRKRLSRWPAGTPVVLEGTFGWGWMSDEVKDAGLDPHLSSSRKVAAWREARGLAKSNKIDADLLSELWDQKPEMRGGELKRWWEVWLAPQEVRDQRELLRHRMSLVKVQTETKNRIHALLHRHGILSEFSDLFGVAGRRFLSLLMNDQQKLRETGRQTLKDQLILLDGLRRLIARATRQFKGQLKRSKPGQRLMTLPGISTVLAYTIIAEIGRVERFRKARSLARYSLLTPQADDSGEAREGKPIGRRIGHAGRHTLQWAWIEAARGAVRKDAYLRGIFNRRTDNGKKDRNRGYITVANVMCKIGHAMLSKQTDYQEVPPPRPGSKQANQKDYSRPGTGQPSPCLAACET

SEQ ID NO: 388077 - protein, 417 aa, unidentified
MQILVERGCGLDVHQATIVACLLIVLKNGTAQKQMRTFGTTTRELISLREWLLSEGCTHLAMESTGVYWKPIYAILEGAFHIVVANAQQVKKVPGRKTDVKDAEWLADLLCHGLLRSSFVPPQPIRELRDLTRYRRKLVESQATERNRLLKLLESANIKLASVATDVFGVSGRLMLRAMIAGKASAKEMADLAKGLLRKKIPQLELALEGRLEEHHRFLLKLQLDRLEAAEKDLAILERRIQEKLNPYVAQLTLLQEIPGVDWTLAAVIIAELGVDMSVFPTVTQLTSWAGMCPGNNESAGKRKSGRIPKGNVYLKTALVEAANAAAKAKGTYLRDKFYRLKARRGYKRATVAVAHKILVAIYHMLSQNVPYNDLGDLYLDKLNKHHLTRNLIHRLERLGYSVTLTPRNQETAAIAA

SEQ ID NO: 388078 - protein, 382 aa, unidentified
MDTALPPGMKGEAKKKGPSRTERHRCAKVELRHNHLRNGGPEMNATTYGLDVAKRVFQMYWVDAQTGEIVNRRFRRDELIRFLAQRPAGRVALEACGSGHWWARKIKAVGHEVVLLHAKFIRPFVQTNKTDAADARAIWTAVQQPEMRTVAAKTEDQQAMLSLHRMRALLVKFRTMQVNQLRGLLYEFGATFRAGRVAGLAEIRARMVELEEALPGTLIGSLQDQLQRIEALEQDINRLEQQIGAWQKQEAACRAIAAVPGIGKLTATALVATLGDAKTFKSGREFASFLGLVPRQSGTGGKIRLGSISKRGDPYLRTLLIHGARSVLYHAKVPTPWQREIRARRPANVAAVALAHKMARTAWAILAYGREYQRDYASVKAA

SEQ ID NO: 388079 - protein, 325 aa, unidentified
MQNQTIVGIDVSNATLDICVTSSSGQHSYIINNDIKAISKFFLAYPQSLIIGVENTGRYNWALYEVLKDLPHKVFVVSPLHLKKSLGLVRGKNDKIDAVRIAAFILKNHLDLPQWKPSTSSVQKLKILLTERNARIKAKSILLKQQKDHARMKHLGLDKYLQVLGKQQLAVLNRQIRQIENDMEALIKADEQMHKQAKLVRSIPGVGKVLCWTMIVKTENFTTITEPRKMACYSGVVPFSNQSGTSIRGKDRVSAYADKGVKTILHMAAMRAVRLKNDLRDFYLRKVAEGKNKMSVLNAIRNKIIHRIFAVVKNQTLYQNNLLLS

SEQ ID NO: 388080 - protein, 340 aa, unidentified
MRRLYAGTDLHSNNNFLGIIDEQGKKIFKKRLANDPGVVLENLEPFRRKMVGIVVESTYNWYWLVDALMDKGYQVHLANPAAIKQYQGLKHADDQHDAFWLAEMLRLGILPEGYIYPKEDRPIRDLLRKRGHLVRLRTSLILSLQNIITRNCGVHLNGNQIKRFKTNHVAPLLEGHEDLALTGKVSKECIDFLTRQIKQVEKVVQDKVRLKDQYQYLETIYGIGKILSLTIMLETGPVERFSKVGNYVSYCRKVPSKWTSNDKTKGKGNKKNGNKYLAWGFSEAAELARRYDNPARAYYNKKLAKTNFMTAHTALAHKLARAAYFVMRDQVPFDPGKVFA

SEQ ID NO: 388081 - protein, 419 aa, unidentified
MKTVEKSREGERYIGLDVHKHYITVGGMNKAQEIVVRPRNVDIERFQTWAEENLHKTDEVVLEATTNTWDVYDMIAPLVKRVVVAHPAEVKQIANARVKTDNQDVVRLIRLLIADIVPEVWVPPVEVRQLRALISYRWRLVKMTTAIQNRMHSLLHRHNIPKPEGKVDTGENREWWEALKLSALEDLRMKQELETLRLVRENIAEVDRELGRLSTSERWGDQSVYLMQNPGVGIVVTMTILSAVGDIRRFESPKKLVGYAGLGAGVHDSGQKHQDKGITKYGRKELRWALVEASWQAVRSNPRLKAEYEELCSRRHKHKNKAIVAIARKLLVGLWYMMQRKEASRHQSEADLAYKMLTWAWHMDKTALNGMTNQQFAKYELLQLKKGENLTRIVKGGLPRRIASKEEVLALKPELRPTQ

SEQ ID NO: 388082 - protein, 360 aa, unidentified
MQTQKTGLDFKGQNIFVGIDVHLKSWAVTILTDNLVHKTFTQPACVDTLSNYLNRNFPCGDYYSVYEAGFSGFWTHYKLKEMGINNIVINPADVPTTQKEHLQKDDPTDSRKLARSLRAGDLKAIYIPEPSTLEDRSLIRMRATLVRDMVRFKQRIKSFLHFYGISIPSEFDKSGTHWSRRFMKWLNQGVSLQHESGTQTLKILVQEAEQQRKLLLEVLRKIRVLSRSEKYATNMELLRSIPGVGFVTAITFLTEIENIARFENTDHFAGFVGLIPNRYSSGGKENNGDMTFRGQTALRKSLIESCWFAARLDPALAMSFNSYVRRMEPNKAIIRIARKVLNRMYYVLKNKREYVSGVVI

SEQ ID NO: 388083 - protein, 349 aa, unidentified
MKTKTVAKLWIGIDFHKKTWRVHFRSDVFSENPFSMEPNPDVLHTKVKKEYKDYEVSTVYECGCFGYSAHRKFKSYGWNSFVVNPSDIPRMSKQKFTKTDSIDARKLSKFLKAGLLTSNTVPEEKREHLRSLFRRRVHLVKNTRSIKVILKSQLLYFGIKIPDDLDNAAWTIAFKQWVKDIKWEYETGKQMMLSNIKQVEYLHLETNEISNQLRKYCRNNYKKYYQLLMSVPGVGPLTAICFISEVGDIKRFRNFKQLSCLVGMMPTTYQSADTNRTQGLTPRALRIMRSYLVEAAWQAVRIDPVLREYYKKHESKKPNDIIVKVARKLLSRIYGVLRTETEYELGIVK

SEQ ID NO: 388084 - protein, 354 aa, unidentified
MLAELVDSVVGVDTHRDTHEAEIAYPTGTAIGTRQISNDSSGFAELLAWISARAPGPRVVVAIEGSRSFGVGLARAVAAAGLTVIECEQPRREARRGKGKSDPIDAHLAVLAALRLDADRLPVPRADGDREALRILLGARHDLTVATTAQTNRLRALLLGGEDTDRDLARATLTDALLVAMTRRRGPRQATRGQAVRDGEIRRLARAVRDGRDALAANRALLQTIVDEIAPGLTHRRSVGAVTAAQAIVSFSHPGRCRSDAAVAALSGTSPLPASSGKTVRHRLNRGGDRALNSAIHTIAVTRMRCCPTTKEYVARRTAQGKSTREIRRCLKRYIARELYRALTARQSAAPAAD

SEQ ID NO: 388085 - protein, 385 aa, unidentified
MKSKTKNTSQQFQTYLGVDLGDKKHFVCATDKDGTILKEFSITNDRPALRQLCQDYPGGSVALEVGTHSPWISRFLTAEGMTVTVANARKLRAIYQNDRKCDELDARMLAKLLRVDRDLLSPIEHGSEQAQKDLVAIKIRDSLVRQRVHIIATVRGVIKSLGLRIPATCTTSFHLKAESFLTEHPEYESAITPALRSIKSLTEQIRVYEKDIQQAAKDHHPQAVRLQQIPSIGPITSMAFVLSIGDPKRFKDPRDVGAYLGLVPRRDQSGGTDKQLPISKAGNRYLRCLLVQCAQYLLGHFGPECALREQGLLLAARGGKAAKKKAVIAIARKLAVMMMAMWQKGTDYKPFPEGKKSEPDAAANKPAPASGKPVRASKASSKRAA

SEQ ID NO: 388086 - protein, 392 aa, unidentified
MIYVGIDAAKRKHDCCILDPQGKPYPVFSFSNSHDGFQSFFQKLFSICSDKGQIKIGLEATGPYSENLFNALVDRSLPVLRINPLLVKNFKSSMSLRRTKTDKVDAQAIAQMVKEKGDSLQTYSTSLYHMEELKSLTRYRLKLVGEQSKLRVSVSRLVTILFPELESLVSRLHLASIQALLIEWPGHQQLADCNLKRLTNLLKKYSRGQFGKPQAIAIQQAARQSIGRVSPSKSLELRQTLKKVAYVQQDLDEVEAQIKEMVDSLHSPILDIPGIGYTTGAMILAEVGDFNRFANADKLLAFSGMSPSKYESGEFKGTTGKMEKRGSSYLRYALYTAAKLVSQFAPQFKSYYQKKRAEQKPYNVALSHVAKKLTRVLYKLGTTGEAYQPQAA

SEQ ID NO: 388087 - protein, 443 aa, unidentified
MSKVNGLTRGDVRRNARKARLREMVPVSNAVLGIDLGDKKQALVLADRDERVLWRRSPQVRVHELGQYLDAAADRAARDGLAGVTVACEPTGARWMVVQELAAQRQMPFVCVQPLVSHVAREQQDLTGDKTDEGDCGLVGRLTWELHCYIPEQLDPGWAELRAAGRDRAVQITRATAAKQLIRDQLALTAPGLLEAHSDPLESATWLACLETIMDPQHGGELAAVTAMGWQAFAAAAAARLAGWDGRRLGPTAAKAFAALAGPQPVPRMLRAVRRRIAGALEDLKYARARRARTEAEMITMLGELGIDCERVCQIPGLTPAGLAAILAETGDLHQYESSSSVVKHAGMSPARNQSADFHGKTRMSRRGRPALRLAAWRATWAVLRYCDVLAAKHAALTSRDPGQARRRPGPCRLRRLAAALDLHPDRARHQLGPEDRRRRAQP

SEQ ID NO: 388088 - protein, 348 aa, unidentified
MRYFAGLDVSLEETAVCIIDEVGRIVREARVASEPEAPVRFFGACGMGMERVGLEACSLTAWLHAGLTKVDIPAICIETRQAKAAMGAMPNKTDRNDARGIAQIMRTGWYRAVHVKSSTCRSWRALLTARRMMLNKRRDLENGVRALLREAGLKVGAPSRKDFPARARDLAAGDAVLLGLVESLLAVIDVMTRQAEKLTKQVLDGVRVEPTCRRLMTVPGVGPLTALAFRATVDQPGRFRRSRDVGAHLGLTPKRYQSGETDIQGRISRCGDELARTALYEAAHTLLIRSTKWSVLRAWGMNVAKRRGMARARVAVARKLAVILHRMWTNGSDFRWGKQAATPAAAAA

SEQ ID NO: 388089 - protein, 323 aa, unidentified
MQGKVSPERSAMTPIYVGIDVCKTRLDVYLHPLGRGLTVANDPEGIKRLKRSLAAFEVAVVVMEATGKFHRAAHRSLHAGRLEVAIVDPLRSCLFAEALGTLGKTDGVDCRMLAIMGESLDPDVSEPPSALMESLQELVRCRAAAVAARTALLNQLAATQAQAAAIEIKRQLRAAEMAIENLGAEIERRIAAETVLARRLAILTSIPGVGAATAIAMIVGLSEIGSLSAKEAAMIVGLAPIACDSGESSGVRHIRGGRAQVRNAPYMAAVSAARFNPALKAFYGRLIANGKKAKVALTAVTRKLVVLANTLVRENRLWEPTHA

SEQ ID NO: 388090 - protein, 544 aa, unidentified
MSGRTTESAIADVAKASAGDTPVDQQVLAPYGVGIDCHSKFIAVCVLVQRKGRVQRVEKSFPVDWPSLTAARTWAVAAIGGSKAAEPLRYCIEPTGCYHMPVLRVWGGKPSVVNPLLAGPTRRKTGVLDARLLAHHSIMGMWPESFLASEAGLQLRVLWACRGEAMQAATRASNRINNIILRFGHVIAAKNPIRSSVGRALVETLLAGDVPPCPEVNPAGLPAPVRPVVAQLAADLDAATAREAAARRDAHKFVSARTWPGGAGRLPGADLLRLLMSVPGVGVTTALTWLSEVLDPGRFQCADQVAAFCGCDPSVKVSAGKVTDHVRRKGNSRLHKALLFAASGLMRQPLSAHGAWGLSIAGRHKKGGYRKATSAIARRLATSLWHVHRLGEPYDETKYHFGAEQRFMPGVLAEVGLSRAQAACLPPHLTRADELARLYRRGLLGGLPGLGKGGLEKISRWAESHRINESNKNERKPDGKGTDRGPFPARLGAGEEEGSKEIGRRAALLHQPVRKNRGQGRADGQVDRQSDATAPSGRGGPRGG

SEQ ID NO: 388091 - protein, 408 aa, unidentified
MMYNAVGIDASKGKSTVSIIRPAGVVVKRPYDVMHTASGLNDLISYIQSLEGETKAVVECTGRYHEPVLKVFSEANIFISAVNPKLIKGQNDNTLRHVKSDPADSRKIARYALDNWAELRQYSSMDTTREQLKTLNAQFDFFMKQKVAAKANLISLLDNTYPGVNKLFKSPAREDGSEKWVDFAYSFWHVDCVRKIGLKAFTERYKSFCKKHKYNFRTGKAQELFELSQELVTVFPKDKTYKMIIQQSIQQLNLASEHLEKLRKEMNDLASTLPEYETVMGMYGVGKTYGPQLIAELGDISRFTHREAITAYAGVDPGVDESGQRKRKSNAASKCGPSRLRKTLFQLMSTILQNKPANDPVYQFLDRKRSEGKNYYVYMTAGANKFLRIYYGKVKAHYRELEAQSQEQ

SEQ ID NO: 388092 - protein, 306 aa, unidentified
MCSYVGVDVSKDELVVHVMPSEQRHAFANSPTGVAELVQCLSSLQCKRIVFEASGGYERDLLDALHQAGLPGTRISPARPRALANAMGIKAKTDPIDARVLAVTAQLLPLENTQPLPEQTEQLREWLQLRTALVGERDGFRRRLKQTRHPLVRAQMQTWILSYRAQIEQVDQQIKALMAEQPAPLHKAPGLGPVLRATLAARLPELGTLDRRKITALVGLAPYNRDSGKKAGQRRIGGGRADVRRVLYMATWAAIRAKTPLAQTYERLVNLGKPKKLAVTACMRKYLIMLNAMKRDNAPWDPKQMA

SEQ ID NO: 388093 - protein, 470 aa, unidentified
MSRSQSPDPFAQGEIRSTEGLPVVNPHAAGADIGAESIYVCIPGPGQTQIVRSFGTYTADLHAIADWLVENGIQTIAMESTGIYWIPLFEVLEGGGIHCCLISGNMARRLPARHKTDVLDCQWIQTLHSLGLLTESFRPDADLIALRSLLRHRAQLIEHRSPHVLHMQKALIHMNIRLDQAVSDVTGQTGLAIIRAIVAGERDPHKLAALRNPRCKKTEDEIAQALTGTWREEHLFVLKQSLEFYDFYTRQIEACDLEIERTYSAIRPDWPDPAPDDREPLPPNKRGSHSKNLPKETPIRVRQHLRRLTGVDITAVDGLSLDLAQKIVSEIGTDMSQFPTVKHFTSWLRLCPNNQVTGGKTIRSSTGKSHNRARQAFLQAAASVACSDCAFGAFYRRLKARVGPAQAQVATAHKIARVVYHMLKFKVEYLPTSAQEYEQQFREREIRHLQRKAARLGFTLSPQPASGAVS

SEQ ID NO: 388094 - protein, 324 aa, unidentified
MRYFLGCDVAKAKVDVSCIDSTGIELWADTIVNEASAIAALLLTVAGGYPKDELVAVVESTGCYHQPVTEASYAVGVGCLVYNPIITKQQIKATVRGKKTDRTDATMIARLGLRGEGRLYTPEPYKSTKYHARSAQKLSVLANSFKRHHSHMVSLLEDELSHEAQQMMASIQGSIAAARKQLYKDMALSAEGEIFHRLQTIKGIGPYVAASIIGEIQDMARFKSAKALTAYAGLDPKVRQSGKTLNSTGRLTKRGSSYLRRSIFIAGSVARRYDPYLKALYDKKRAEGKSYTVATCAVARKLLAIVRAVWLSGQDYDPAFTDKV

SEQ ID NO: 388095 - protein, 359 aa, unidentified
MMVLGIDPHKKSHTVVALEAATGEPVAELTVAADRRGHERLIAWARRLTPERRFAIEDCRHVSGHLERALIAAGERCVRVPPKLMAQTRRSARRRGKSDAIDAACVARAALREPGLPEARLAGPERALRLLVDHRSDLVGERTRIQNRLRWHLHDLGLGLEVPAKALGRACWLARLEEELAPLPGVQARIARELVARCRTLSAEISGLGREIAVLTEELAPELLALPGCGALSAASLVGETAGAERFASAARFAMHAGVAPLPVSSGQSNRHRLNRRGNRQLNAALHRIALTQLRMHEPAQAFVARKRAEGKSTREALRCLKRHLARIVWRELRNAEARRELLPVCGDPPARAALPLAS

SEQ ID NO: 388096 - protein, 376 aa, unidentified
MAKSQAKRTSGSTPMVPVGEITGGVDTHKKFHVAAARDGLGRLLGTKRFEATLAGYVALLGWLAGFGPVTLVGVEGTGCYGAGLTGYLTGRGIRVVEVDRPNRQHRRRAGKSDPADAIAAATAAQSGAATTTPKPRTGPVESVRVLREARQLWTTARTAAINTLKALIITAPPGLREQLEPLSDTALISCCAGFEPIAAADSAIVLLDHETAVRHTLGELARTIAAHTTRIRELDTRLHALVEHIAPRTSGLFGIGPGRAAQLLLTATSPDRLHSEAAFARLTGVAPQDCGSGHTSGRHRLSRAGDRQANSVLYYIVLTRLAWHEPTRTYLAQRLNPNGGNKKHLIRCLKRYLAREIYPRLIADLTQLTRQSTPAA

SEQ ID NO: 388097 - protein, 476 aa, unidentified
MSDVDHGTDESEDVLLLLLTGLVSHNSEEDVVIQGNGLSRGDKRRNARLARMRALVPVENAILGIDLADVKQAVVLTDHDSRVLARKRVSAKAWELGPVLDWARRVARERGFVDVTVGCEPTGHRWRVLDQLAAQRDMALVCVQPMLVGRAREAEDYTRDKSDDKDAVLIARLVGRLCCYAPERADETWARLRQLGARRQRLVTEATACVQQLRDLLECAWPGVLGAAADPFGSTNWCAALAVVLERCDGHPERLARGGLARFEAAVRRELPRWGGSRRRRAIIEAVFVALVDPTGVSAQRRGALERARWVLADWQAANTGLAEVATRMVEVLDALELTELVTSIPGVSAVGAAAILAETGDPARFDSPRALVKHAGLCPRDNASGTFSGRSRISRRGRPRLRLAAWRAVWGALAHNPVMAARYRYLTTRQDNPLTDGQARAAIAAALLRWLHVITTRRVSWDATVASTEVMPLAA

SEQ ID NO: 388098 - protein, 520 aa, unidentified
MARRRRSSNRSQAPFASVHKPRGHITPRVQAAGPEHFGIVSVDCAKVRSKFLIADYFGNLLQPPTWVEHTRAELQHMVGLVRQTIDQHQLRDVVIAIEQTGTYHRPVQQVFRRASFDTRLVHPFASSRFRQAADGDLKTDDKDLAGIFRAAVNGFGLQDPVWPDHYQQLQLLSRHRRDLVRKNARLRCQIREYLHALMPGYAGCFSDLFDNPIAITLARQTGSAEAVRHAGLDGLRQLARANGSRVRHSTLATIYAWANTAPPAHPQPDLVRQFLATLDDDRLSKSPQISQLEQQCAHRLVSTPYVLLLAIPGINVVSAADVAGELGPIDFYAHANHITGRAGLMPARYQSDFVDRQGSLCHAGHRRLRVALLQCADNLITHNHHFQVRSTHWRQRGKDPRWIHVKVAKSFSRIAYAFVAGRTLFPHPCCQPRHYILDKLLEFHRLHDTPMPWVMLDIEAATAQLPRRTYDEEAQPLHERLHTINARRRGPQPLRDILPIVLARLGVAPLQSPAEDRDPG

SEQ ID NO: 388099 - protein, 357 aa, unidentified
MEAQTVDSLPPVAADHDPVRCLLAIELSKKSWIVAITTALSDKISRYTLDGCDWKGLMELMERIRTRVAREVSRPVEMISCYEAGYDGFWLHRLLERHGVRSHVIDPASVQVDRRARRAKTDHIDAKRLLRSLMAYLRGEPKVWSVLRVPSVAEEDDRRLHRERDRLIAERGQHVNRIKGLCAIHGIYDYEPMRRDRMLRLEQLHTGDGRELPSRLKAEIARELQRLELILGMLKEIEAERDAVALTEKVSEHTNSKKIQNLVKLKAIGAEIATVLTGEVFYRPFNNRHQVASYVGLTPSPFQSGSKCRDQGISKAGNPKARSTMIELALGLGADAGRACSVERAWPRGDARSAGAG

SEQ ID NO: 388100 - protein, 422 aa, unidentified
MMKANVKTRKINLEKVLVFGCDVGKAEITAYSENEKDSLLISHSDRFRNTNSSIILKLKEYERLALSRGYEGMCILCEPSGGYETRLMKMARKRGNLAFYVSSEATHKLRVVESNDSEKSDEKDPRIIHLLGKMDKVLKFREMNAARSMLKELDGIYENESLKASKLRNEISSLVERLFPDLETGRKFLYGKTGAALVSNFTLSPWKIVECGYKQFISTMKRSGTRDTAFLAKIWNCAKSSINQIMSVWEREILEERLAELYEDWQRHEVRKEKIKERMMELCSRFPEYHKLDKKELMSFPLVRVMAELGDPLDFSDQKQVLRYAGLNIRRMSSGKYEGKNRISKKGNPLLRKVLYQYVFSKMIKGGQVFQSYFEKKKKEKDIGLRAMVAVMRKTLKMIFGVARSSSTFDRERVFRSEGMAA

SEQ ID NO: 388101 - protein, 430 aa, unidentified
MKSNTQNKKIEAITEKTLVVGIDVGSETHYARAFDHRGIEYSKKPFKFSNDEAGFASFKAWILEYKEAHDKDKVVPGMEPTGHYWFNLGKFLQDNDMKPVLVNPHHVKKSKELDDNSQTKNDRKDPKVIAGLVREGRYMIPYLPDGVYADLRTASNMRFQIQSELTRILNRISRWFNIYFPEYKTVYGNLDAVSGMLVLKTAPLPKDILTLGVDGIDKIWRDAKLRAVGKKRAQTLVNAAEHSVGSKEGAIAARVEIRMLIEDYESRNARLQEVMALIEELVKKIPMTEKLLAIKGVGIKTVSGFLAEVGDISRFKSPKELQKLAGLALVENSSGKHKGETTISRRGRKRLRYLLFEVAMSLVSKNREFAELHNYYTTRKQNPLKKMQSLMVVAAKLIRVFYAMLTKGVDYDPKKMSGDIRRPVIGLQAA

SEQ ID NO: 388102 - protein, 456 aa, unidentified
MAHNVARKLISSKVDSILPDDQSLSVLNLQNYQEVILLSFKIFRFNCCGLDVHKTWIYACIGITDSNGRTEYKQARFSSFTKGLQELCDWLVKYNCNDVCMESTGKYWIPVFNILEKNNLWVTLSHPKYTKPQKGNKTDRKDAKWICDLYMCGMVKPSFIPPADIRQLRDLVRYRFKLTCMITGEKNRAQNCLTVSNFKLDDVFSDVFGKSSRSITEQILQHLGETFDVAPFVDGRCKTPIEEIQAAVDGAISTEQAVKLRQCLNHIDELEKHQAEIEREIFRLSDKYESILNLIRTVPGFDKNPLTAIQVLSEIGGDMSVFPTAKNLVSWAGCCPHNDQSNHKIKSTRISRAGSYFKPVLVQVANALIKSKKHPEFTTRYRRIKARRGHKKAIIAICRMILTAIWHILTDLKPYTPEGFLDSRPVNKEKVLTTSQALNLLKQRGYFIKDDPLSVS

SEQ ID NO: 388103 - protein, 423 aa, unidentified
MTNQHLKVIAGIDTHADTHHVAIIDETGRHITDKEFLAVGSGYRNIAAFITGFGPVIAAGVEGTGSYGAELARVLTGEGIRVLEVMRPNRQGRRLRGKSDPLDAYQAAEAALAGRNVATPKSRDGAVESMRVLRAERATAMRARVAVMTQIKSILTSAPEALRAKYRHLTRAAMMTALEKTRPAGDMTEPLIATAAVLKRLAVRYRILDQELGVIDAELDAILSVYAPMLRDLKGVGTDVASQLLVTVGDNPERIGSEGQFAALVGVAPIPASSGRTTRHRLSRGGDRQANKAIHHVALVRMRTDTRTRNYVAKRRAEGKSTTEIIRCLKRYIAREIYDQLIHPQPAPDAGALRILRKTKNITLQAASDSLHVWPTALSRLERGITRNDDFYQRYEDWLNSPSAEAAKTLPGLRIRPAAGLTP

SEQ ID NO: 388104 - protein, 367 aa, unidentified
MTVTIVDAARPVTGGADTHRDLNLAPCLVTGGVDTHLDVNVAAALDAIGGLLAVAEFPTTSAGHRELLGWLAGFGPVARAGVEGTGSYGAGLARFLRAAGVEVVEVDRPNRQARRRSGKSDPLDAIEAARAALSGRASGAAKSRDGNVEAIRALVVAKRSARSAKIQALNQIRHLSFTAPEQLRQRLAGVSRHHLAARAAALRPATGAGADPVVAATKTALRLLGRRVLALDEEKARIDALLSTLVTQTAPQLLEVFGIGVDTAAALLVTAGDNPGRLRSEAAWAHLCGTAPIPASSGKVTRYRLNRGGDRQANCALWGIVITRLGNDPRTRAYMARRLAEGRSKPEVIRILKRYVAREVYHRLPRP

SEQ ID NO: 388105 - protein, 336 aa, unidentified
MTIIRIGLDTSKHVFQIHGVDENEKPVLRRQLRRSEVEKFFAQLPPMRIGIEACGASHHWARLLRGLGHAVLLMPPQYIKGYVKRGKNDAIDAEAICEAMSRPTMRFVPVKTAEQQAALTMLGVRDLLVKQRTMLINALRGHAAEFGVAAAKGPHKIVELLQRLATGEGVPALAREMLGMLASQLEAVNGKLKAIEARLVAWHRQDQTSQCLATIPGVGPIAGVSFALKIPDARAFRSARHFAAWIGITPRENSTAGKHRPGKISHEGDESLRRLLVLGATAVIQRAKRGRASPWLLGLLARKPKKLAAVALANKMARVIWAMMISGEVYRRPQEA

SEQ ID NO: 388106 - protein, 362 aa, unidentified
MKKTIRERESEWKEKPDRTVGVDLGDRFSHYCVLNGDGEVMEEGRMRTSEEAFRRHWEAEPRQRIVMETGTHSPWISRLLRGFGHQVIVANARKVRAISENESKNDRQDAEMLARLGYCNPRLLKPIQHRSAERQRDLNLIRARDTLVRARTMLINSMRGVVKSAGGRLPPASSESFGARVSAAVPAELGTATQPLLRQIAGLTAEIRDLDQVIEKLTERYPEIRILRTVPGVGPVIAAAYVLTLDGVDAVEHSRSVGAFLGLRPKQSQSGDSDPEHNISKTGNIYLRRWLVQAAQYILGRYGPDSALRRWGLKLAQGGKRTKKRAVVAVARKLAVLLHHLWRTGQNYRPFPEAAVAAGSAA

SEQ ID NO: 388107 - protein, 404 aa, unidentified
MYNAVGIDVSKGKSTVAVLQPGGTVIRKPFDVSHTSQNLNELADYLSSLDGTTKIVMECTGRYHEPMIKALSEAGLFISIVNPHLIKNFGNNSLRKVKSDPADARKIARYTLDNWTELRQYSGMDNTRTQLKTLNSQFSFFMKQKVAAKANLIALLDNTYPGVNKLFDSPTREDGSEKWVDYAYSFWHADCVRKIGLKAFTERYMSFCKKHHYIFQQDKPEKLFNASKELVAVFPKEKTYKLLIQQSIQQLNLASEHVERLRREMNELASTLPEYSTVMGIYGVGKTYGPQLIAEIGDVSRFTHREALTAFAGVDPGVDESGQHTSKSNRASKVGSARLRKTLFQIMTTLLQNAPEADPVYRFLDKKRSQGKPYYVYMTAGANKFLRIYYGKVKECLRNLEQTE

SEQ ID NO: 388108 - protein, 310 aa, unidentified
MGVCVGVDVAKKHLDWVLGPNGEVERIENTTAAVMRFIRKLQKMDFDRVILESTGQYERLLFEALEDKGIPVCRINPYRVRRFGEGMGVLAKNDAIDAKLLALFGDKAEPEERPKKSERERLLGDLSARRRQLISNMTAEKNRLEHASGYVATETRSLIRVLERHIEKLEAKIDQMISENEKQRNDFKRLQSVPGVGPKVARTLLVDLPELGQLDRRRISSLVGLAPYANDSGQKIGKRSIHGGRAAPRTMLYLAAMVGSRCNPELIAMKQRLQAKGKPPKVILIACARKLLTILNAMVRDQTEWKTMPA

SEQ ID NO: 388109 - protein, 351 aa, unidentified
MKPSNENLIAVDLAKNVFEVAVSDQPKKVDERHRLSREKFLAFFVNRPQATVVMEACGTAHFWGRKLAGLGHTPILLPPQYVRPYVRRNKTDRADAEGMLEAYRNADIRPVPVKSLEQQTLIVLHRMRSAWLAERTARVNTLRGLLRELGFVIPLGVRQVLPKVWEVIGEAENDLPDPLRPIFAEACNEIRDLDGRIAMATEQIAALAEQTPLVQLLLTIPGIGLLTATALVACLGDVSRFPSARHLASYLGLTPREYSSASRRHLGHISKRGDGYLRMLLIHGARSVLLGAQRTKTPDRLRSWALRLRQTQKHNIVAVALANKLARIAWAVWKNRQPFVSSPAPEQTAAA

SEQ ID NO: 388110 - protein, 319 aa, unidentified
MSKKWLDVAIFVENSDLKGYSHTQVSNCKAGYKELLRWLKEHDVDASTCMYGMEHTGFYSDGLQHFLDKKGYRYTMLEPAVIKHYPIQPREKNDRLDAAKIADYLFRFKDRIRLSRVPDKTMEKLRELHKERKFYVEDRVGYLNRKQVVGKEEAKRLDKMISLLDKQVESVEEKIRDIIQADEALMESYLYLTSIKSIGFVNAVNAIVITQNFTVFKTARDYASYIGVAPHTKTSGTTVRWKPKPYRHCDLTAKADISEAAKCAVIHDVELKRFYERKCNGKDDADTVRKAMNAVKFKLVLRMFAVVRQKHTYKQLTTI

SEQ ID NO: 388111 - protein, 330 aa, unidentified
MSFKILKNNCCGLDVHKTWIYACIGITDSLKRTEYKEARFSSFSKGLQELCDWLSKYNCTDVCMESTGKYWIPVFNVLEKNNIWVTLSHPKYTKPQKGNKTDRKDAKWICDLYMCGMVKPSFIPPADIRELRDLVRYRFKLTCMITGEKNRAHNCLTVSNLKLDDVFSDIFGKSSRSITEQILQHPGETFDVAPFVDGRCKTPIEEIQAAVDGALSTEQAVKLRQCMNHIDELEMHKAEIEREIFRLSDKYESVLNLIRTIPGFDKNPLTAIQVLSEIGGDMSVFPTDKNLVSWAGCCPRNDQSNHKIKSTRISRAGSYFNQFWYKLQML

SEQ ID NO: 388112 - protein, 312 aa, unidentified
MPDTAEPHYVGLEIAKAQLDYAVNDKEVAQVANTTEGHTQLIVVLRRLRHPRVVCEASGGYERLVVAALLAAGIEVCVVPAGRARSFADSEGLLAKTDRIDALMLRRYGRSVKLRLAVPEDPLCTELRDLLDRRRDLLERLSVVQCQQETARPTLVRYLKREQRFLEKELQALQHQIEKHIDRDPTLKQKYERLQEMKGVGPVLAATLLAYVPELGNLPDATLSALVGVAPFPKDSGKTRFPRHVRGGRAAVRHVLYMAAVCASRSNPILAAFYQRLKAKGKPAKVCLIAVMRKMLTVLNRLLAKPNFVLAD

SEQ ID NO: 388113 - protein, 383 aa, unidentified
MKSVCGLDVHKDSVYLCILSEFGELIEKVFGVLTYQLEEMRDLMLHHHVIEVSMESTSVYWIPIWRVLSPHFKLNLANPYFIKQLPGRKSDVKDAQWIAECTMKELIRGSFVPPETIQQLRQYDRRIFDLNEEIVRKLSKLDAVLQRCNIRLSNYVSNVDSKSYKAVVRAISQGITAPEELVKLIHGRIINHHGIDVITASLKGVVSLAEIDMISQLRDELDMAEAHKEKCQARMLEICEREFPEELRRLQTIPGIKERTATSLIAEIGTDMNKFETANHLASWSGLKPRNDESNKKIKSRSITHGNVYLRKTIIECAWAASRTKDCFFSRFSYHQTQVRKKNKMKVLVAVARKMLIAVWHVLHDNTIYIDFTTDRKTSRTKG

SEQ ID NO: 388114 - protein, 371 aa, unidentified
MGNDITFVGLDVSKATISVGLAPGDRRQAASYFGSIAQQPAALDSLCRKLSREGTCLHFCYEAGPFGYGLHRQLTEWGHVCEVVAPSLIPKRPGDRVKTDRRDALSLATLLRAGQLTAVWVPDASHEAMRTLARLRWLAAGDVVRAKQQILSFCLIHDRVYRAGPTHWTKTHRNWLADQKFTHGALGLAYGELLGRLERAEEMAARTQLELREHLPEWSLYAVVEALQALRGFDWLNATTVVAEIGDFRRFPTAGHLMAYVGLVPSEYSSGDRRRRGQITKTGNRMVRRALVEAAWTYRYPARQSYRLRNRSSHLPEPIRDKAWQAQTRLCRRLRDLRRRGKPHNVALTAVARELAGHVWAIARMVEPVTA

SEQ ID NO: 388115 - protein, 370 aa, unidentified
MTGTMTWVGLDVHARSTHAAAVDVLTDPVRLNVLTGELRRARFGPGVEEVVSWLAGLSGPVRAVYEAGPTGFGLYRAARVAGIGIAVVAPSKTPRASGDRVKTDRKDAERLARLAMAGELSSVAVPDEFIEAARHLTRTREHARQDVLRARHRVSKLLLMHGRVYPGVTTWNREHRRWLAGQAFELAPTELAYVDLLAAVDGLVVRKDALDERLSRLAADERLWPTVARLRAFRGLDTLSALAIHLELGGDWQRFGSPRRLFAWLGLTPSLEQSGQSSVQGAITKTGSVYARRLLVEAAWHYARPPRIGVALDNRQTGQPDHILQIAWRAQHRLYRQHQRLRERGKPHNVTTIAVARELAGFLWAAATSP

SEQ ID NO: 388116 - protein, 344 aa, unidentified
MEPSHYVGLDVSQELTSVCVIDEQGAVVWRGKCATDPDVITRTIHKHAPSLVRAGLETGLLSNFLTRALRARGVPVVCLDARHAKAALRVQINKTDANDAHGLAQVVRTGWFREITIKSLDAQSLRLLLVARAQLVSQRQATANTLRGLMKAFGHVVRKGAGGLFARRVREVCDDNPALCAIAEPMLAVWQSLREQIRILDGQLLKRAKSDPAARRLMSIPAVGVIVALAYVAVIDSPERFRQSSTVGAYLGLTPRRYQSGDVDCAGHISKCGDGLLRSYLFQANATLTRKVTDSTLRSWGRALVARIGLRRTTVAVARKLAVIMHAVWKHDRDFDCAGMPARV

SEQ ID NO: 388117 - protein, 360 aa, unidentified
MRIIGCDLHARQQSVAMFDSETGEVVNRTLQHEGKEVREFYSQLPRPVLVGIEAIGPMQWFLNLLEELKIECRVGDATKIRAAEPRKQKHDRRDAELILKLLVENRFPAIWKPSQELLDLRALLLHRHQWVRLRTQIQNALQAIALAHGLRRGPSLWSYDGQAKIAFLPLPPHASYRRSMLQALYRQMEEEIAQLTTQVAEQAEQRSGARLLLTHPGVGPVTALATDVFLGDPQRFADGKALASYVGLIPREYSSGAHQRLGALTKQGSPFLRFLWNEAAAHAVRRDPDLQRFYRRKLVQKGLGKSRVAAARKLGIRLWIMLRDQIDYEEFCRRGQKQSSAACAGMLEVRFGANRHRPVG

SEQ ID NO: 388118 - protein, 417 aa, unidentified
MLKIVFPICCGIDVHKTFLVATIASTDRSSVTTYQTKRFSTFTKDLENLSKWLLDNQCADVCMESTGKYWIPVYNVLELTCEVILAHPKYVKSLRGKKTDRKDSVWIADLFKHGLVKASFIPEKAIRDLREVMRYRTKLVSMKSSEKNRYQNALTVSNVQLASVVSDTFGKSAQALINQLLQQPKDTSFDVLPFLHGSLKKKAEQISESLNGSIDDIQAQKIRSCTSHMAELDSHIEDLQVAADLLASPFTAALRIIESVPGIGHLSALTILSEIGTDMSKFLSAKHLCSWAGLTPCNDQSAGKKKSTRISRAGCYIKPILVQCALAAIKDKSFPYYGQRYQVLKHRRGHKKAIIAIARMMLSVIYTLLSRGELFSKELYEESLKNPMVILSPEEQFQRLAKKFGYVVVKVHEPVPV

SEQ ID NO: 388119 - protein, 392 aa, unidentified
MFYLGIDIGKNTHVASLMDEKAKVIFKAHSFSNTSDGAATLLEKITPYAAKLEIGMEATGHYWLSLYSFLIENHFVVHVINPIQTDGWRKGTEIRKRKTDIIDSVLIADFIRYGDFLETSLADEDTMSLRNLSRFRNYLVGSIGDLKRKTICVLDQIFPEYHHAFSDIFGKTSKELLLQLNSPSDYEDVSSDQLEELLSQVTLKGYAAKKFKDVSALAKTSFGITFCVDSFSFQLKLLIEQINFIEKQVSDVESQMSELLEKIKTPITTIPGIGNIIGATILGEVGDINRFSSGAKLVAYAGIDASVSQSGEYECTNNHMSKRGSPYLRKALFRAAFVASNSDPVFKAYYQKKRMEGKHHNVAVCAVARKLCYTIYAVVKNNVPYKVQAPRD

SEQ ID NO: 388120 - protein, 367 aa, unidentified
MKDSITVVGLDVHRNSIQIVTADTEGAMEVRPFGRIGGTMDALDRAVRKLVSRGSTLCFVYEAGPCGYEIYRHLTGKGFSCKVIAPSKTPKKSGDRIKNDRRDAETLARMERAGELTAIYVPREEDEAMRDLTRAREDAVKALKTARHQLNAFLLRYGQRYPGKASWTPSHLRWLSDVTLPHPSQQIVLQEYIHTVVACAERTARLTDQIMKLLPDWRMFPVVKALQALRGVAPIVATTTVAEIGDLSRFANPRQLMAYLGLVPSEDSSGESTHRGSITKTGNGHVRRVLVEAAHAYGFPARVSRHLLKRHEGVPQPVLDIAWKAQVRLCGKFRRLMARGKLKNKVVTAIARELSGFMWAIAREVEV

SEQ ID NO: 388121 - protein, 345 aa, unidentified
MQLHTIGIDLGKTVFHLVGLNLRGEVVVRKKFSRKQLLHFTANLQVELIGMEACGGSHFLGRALREQGHEVRLMPAQYVKPYVKTNKSDYIDAEAIAEAVGRPKMRFVPIKSDEQLDLQSLHRVRERWVMRRTAVINQIRGLLLERGITVRQGRGHIDAALPGILEDASAQLSGALRVLLVQLKLELDHLQMRIDEADAMINKAAGENEACRRLVAIPGIGPVTATAIIAAIGNGAAFKKGRGFSAWLGIVPGEYTTGGKQKLLGISKRGNSYLRRLFVQGARAVLQQRAKQSSGLSAWLAQLTTRTHSNVAAVALANKLARMAWAVLAKNEPYRPPMLVGAATA

SEQ ID NO: 388122 - protein, 343 aa, unidentified
MEYYVGLDVSLKQTSICVVNQTGSIVQEGVVDSDPEAIASFVRSRAPGTVRIGIETGPTTTWLWTELNRLGLPAICIDARHAKAVLKMQINKSDRNDAAGIARIMQTGWFKEVRVKNLDSHAIKALLASRALLVKIKRDLENQVRGLLKNLGLVIGRAKFNVFAVRAEELIEGRPELIAAVGPLLAARKAIEQQVSDLDRKVHKLARHDAQVRRFMTAPGVGPITALCFKATIDDPTRFKRSRSVGAYIGLTTRRHASGEIDWSGRISKCGDAMLRMYLFEAAGVLLTRVPKWSGLKAWGAKLTKRNGLRKAKVAVARKLAVILHRMWIDGTEFNWSTKKAAA

SEQ ID NO: 388123 - protein, 383 aa, unidentified
MKAVCGLDVHKDSIFLCILHSDGELFEQVFGVLTFQLEEMRKLLQKHHVFEVCMESTSIYWIPIWRVLSPHFTLRLVNPYFIKQLPGHKSDVKDAQWIAECTMKELVRGSFVPPEIIQQLRQYDRRIFDLNAEIVRKVSKVDGVLQRCNIRLSNYVSNIECKSYRDVVRRLSEGVTNPNELMKLVHGRIVNRHGAEKILASLTGVVSQAEIDVLRQLHEEIDIDESHRNECQQRMLEICEKHFPEELERLQKIPGIKERAATSLIAEIGTDMSKFETANHLASWSGLRPRNDESNKKIKSRKITHGNVYLRNTIIQCAWAASRQKDSFFSRFSYHQTIVRRKNKMKVIVAVARKLLITVWHVLHDKTDYVDFKPDREESANNG

SEQ ID NO: 388124 - protein, 385 aa, unidentified
MSQFSGSSQAAVDYNSTIIGAVELSEKKWVLAVQLPGVGRHSRHALDACGDGLVSFVERLKAKCAAAGRKIARVILTHEAGRDGFWLARFLARRGIEVRVMQPSSLPVDRRARRAKTDMIDVEMLLRTLMAWLRGEPRVCSMVPIPSEADEEARRAHREREDLTRERRSIVNKIDGILATLGVKGYKALRRDRREQLNCARQPGGEPIPQKARARIERLLDRLDLVLKLIDQVESARDAILRKDAPADEAERMIRSLTTLRSIGPDIATLLVREAFVRQFRNRRALAGYVGLGGTPFSSGGSEREQGIGKDGNRRVRAAMVELAWMWLRWQPDSALSVWFRTRVGAMGGRIRKIMIVALARKLLVALWRYVNDGVVPSGAKLKAA

SEQ ID NO: 388125 - protein, 445 aa, unidentified
MGQRTVGIDLAIRGDHVARILDDGRPHGKPIRFRLTSDSLNHLVTRLRDGVAPDSVITAVMEPTGMAWFPVAHWLKSAGITVIRVKGQRVRALRRYLSEHTKTDAADAYVLGAIPLFGGVPADPVYVPDAERHALQRLTRQRERLEDELTAIKRRLLDLVRWACPAVEAVLPDFRTNLTLAVLHDLLDPACVTKARRATLLRFVAQHASGNHPHSGPFAEALVDGLKAAATETLRLHGTAVDFTLLQLEAALEIDRLRLIEAQLTRLGREVEILYGKLHPSDALRTIPGIGVALGPLVLGVLHDVRRFAGLHQLRGFCGMFPRTSSSGGADHPGQAITQSGNNRIKRALYLAADAARRIDPGLAEVYWRLMVRKGHHHKQALCAVATRLVNRIGKVLRTGEGYELRDTDGTPISVADGKAIVAKRFTIPIEIRNARRKHRVESTA

SEQ ID NO: 388126 - protein, 356 aa, unidentified
MTSVTDPCELVDVIIGVDTHTRTHCAAAINTKTGAVLDQITINATAEGYQQLTEFADQRTTTRGWAIEGTGSFGAGLSRYLTARHELVIELDRPVRSARRNGAKSDPIDAIRAGREALQRDRIGTPRGAGDHARERQSLSLLLAARRSAVEGAASTKRQLFGLIVTAPDPIRQRFHGRSVSTFPAVAIRLRIPRTADIETRTTITTLRTLAHRIRTLTTEATTHEREIATIVRAWRPDLLAQPGIGPIVAATILCAWSHPGRIHSEAAFAMLAGVAPLPASSGQVTTRYRINRRGDRHLNRALHTIVICRTKHDERTRNYIERRTSEGKTPREIRRCLKRYIARDLYRLLETPALA

SEQ ID NO: 388127 - protein, 354 aa, unidentified
MSRKRTDAALVFIKPERLQAPNTSAHAQAGDAKTMSESQVVVGIDVAKAHVDCAVLGADFGARQFANDIDGHSALAAALQPLSVALVVMEATGGYESALACALQAAGLAVAVVNPKRARDFAKGIGRLAKTDRIDAEALAELAATLARRRDLARFIRPLPDAQQQELAALVTRRRQLLTMLGAERLRLQLATVKVRPSIDALIEAIRAQLEDIDAQMQAHLQEHFAALDDLLRSARGIGPIASATLIATLPELGRLSRREISALVGVAPMANDSGTSHGRRRITGGRFQVRRVLYMATLTATIHNPTIKAHYQRLLAAGKLPKVALVACMRKLLTMLNAMVRTQRRWSGEFHRA

SEQ ID NO: 388128 - protein, 402 aa, unidentified
MPEQQPILTRWIGLDIHKAYFVAVGVNAEKRTVFGPHKVPNEQLEDWIAKHLLPTDAVVMEMTTNTYLFYDTLVPYVGSVIAVHPPNVLLVTGVKVKTDKKAALTLAQLHAAGLLTGVWIPPVEVRELRAVIAQRSKMVRLRTQAKNRLTSLLHRTHRERPAQPFQPEQKAWWDSLPLTTIEKYIVASDLETLAFAGKQIDAIGEVLRQEAAKDERVPLLTQLPGIAMLTALTILAAIGPIERFEDAKHLVGYAGMGASVHDSGQMHATGHITKAGRRDLRGAMVDAANAAVRHHLYWKKVFERLEYRLGRSKAIVAIARRLLVAVWHILTNGVADRHADETSVAASMYKLAYEIKVNNLPKGTSARAFTRQQLDRLGIGQTMDVLPWGGKKVKLPPSQLNT

SEQ ID NO: 388129 - protein, 326 aa, unidentified
MQYILGIDVSKDKLDLVLITERGKFHKVISNNSEGYKALDKWLVSRQVEQVHACLEATGQYGEEVAEHLYKQGHAVSVVNPARIKHYGESKLHRNKTDKADADLIAEFCLKENPTLWQPLSPEIKHLRALVRRLEDLKTNCQQEKNRLSSGEKDEWVVKDLSTHVAYLETCIAATEKEIQNFIKQTPNLKKQQELLNSIPGIADKTSARLLAEIGDISTFESASQLAAYAGLNPKGFSSGSSVHKKTRISKQGRRELRSCLYMPGIVASNHNPVVRSLKVRLHDRRLANKAIIVAAMRKLLHIVYGVLKTQMPFDAEYHKQFNFSA

SEQ ID NO: 388130 - protein, 459 aa, unidentified
MTRKRKLELDIVNEDAAGIDVGSRSHFVAVGQSLEDVKEFGVYAEDLVGLCHWLHSFGIRTVAMESTGDYWQNLYVELIKHEFEVVLCNGKFTKHAKGKKTDVKDCRWIQKLHTLGLLTSSFLPDETTEILRTYCRQRGNWIALAASASKKMQKYLKFLNFRLDVVVKDVCGLTGLKIIEDIFNGNLDPQSLAEHRHFNCRKPKEEIAKALHGNNRKDYLFGLQQEYESYSFFQTKIKACDKEIEKLIKEHIMKNPEKSKLISNDKPYKRINKNAPEIRNFNQVAFQYFGGVDLMAIEGVSHATVMSIMSEIGIEGFKKFKCSKEFCSWLRLAPNNKISGGKVLSNRIPKGSNRLKIALRHSANAIGNLKDTHMSDFFNRISYRKGRQAAVSATARNLASIIWTMVTKKVPYSPPKEYMFLDQKRKLNLLKKIKKNIAKFIIKPDEIGFGNSLTLSAEF

SEQ ID NO: 388131 - protein, 383 aa, unidentified
MARSTPKASRTVPPAPAFPPQLAAANVHAAGIEVGAEAHFVAVPPPDDPQPVRGFGALTADLEAIAAWLVACAITTVALASTGVSWIPLFALLEARGFEVLLVDPQHVQKIKGRPTSAVHACPWIQRLHTFGLLASAFRPTDHVCVLRSDLRQRAMLLTSAAQHIQHMQKALTQMHIKLPHVVSESTGVTGLAIIHAILAGERDPGTLAQLRNAHCKHDEATIARALQGNWRDEHLFALAQALALYEVYHQKIAECDRHIEAYLQTFADRSEGQPLPPAPRPRKRGRHQPAFAVRAPLHRITGGDLTQIEGIDETTSLVILREMGLDRRRWPTVKHFTSWLGLCPHHRVSGGTVLSRRTKPCANRAATALRLAAACLHHRQSA

SEQ ID NO: 388132 - protein, 343 aa, unidentified
MQTVTTIGLDIAKSVFQVHGVDAGGHVVIRRQLKRRYVMAFFQKLPRCLVGIEACGSSHHWSRELQALGHTVRLMPPAYVKPYVKRHKNDAIDAEAICEAVTRVNMRFVATKTPEQQSCLTLHRTRHLFIRQQTSVINAIRAHLAEFGIVAPVGRHGVEQLLGVVADASDKRLPEVARACVAALGAQLQTLKAQILEFDRMIRAWHRSSEASRRLDDIPGVGPVLATALIASVGDPRAFRSGRDFSAWIGLVPRQNSSAGKDRLGSISKRGDRYLRSLFTTGALAVIRYAKIHGNRHRPWLTALLARRPTKVAAIALANKIARMAWAMMAKGERYKEPAALAA

SEQ ID NO: 388133 - protein, 415 aa, unidentified
MDTTFSNVAGLDVHHKSIQCAVRCHEPSGNLRKTSRSFGTMTVHLRAMADYLEAQGVTHVALESTGVLWKPVWNILEGRFTLLLVNPRHLKKVPGRKTDVSDAEWIAQLLQYGLLKGSFVPPREVRNLRDLTRDRAQLAAEKTRVANRIHKLLQDANIKLSAVASDILGKSGRAMLTALREGESNPDRMAEMALGLLRAKIPELRLALEGRVTVHHRFMLERLMKHLDFLEHEATVLSQEIARHISGLLSPEDMARLDAIPGVNQTTIENVIAEIGADMQVFPDEHHLSSWTGLCPGNEESAGRRLRSATRHGNRWLCRTLTEAAWAASHCKDSYLATQYRRLAARRGKKRALTAVGHSLLVVFYHVLKQRVEYKDLGRDYFDRLEPERLRRYLVRRLEALGHEVILNPRKTDAA

SEQ ID NO: 388134 - protein, 363 aa, unidentified
MSKTERIPRICVGVDLHKLQFTVSAINEETGEVVLTGVFKTNSEGYKEFCEKMHTAEAEQGCLVELAVEATGNARYFKNKMEAEGFSVVVVNTSKFKVITTSTKKTDANDAATLAFYLSKDMLPQSHLCDQTSEEIRRMLKTRSILVSSTVKIKNQIHGMLLGYGIETKASQFQSKKKRQELLKDLADQGYSQFTASSLEVTLSILDEICAQVKRIEAQIKEMVKEDEDVALLMTMPGIGFVGATTIASYTKDIQRFGGDFKRFSSYLGIVPSVHNSADTVRMGKITKRGPQDLRTAFVQVAMGIIRQPQNTSEWKLMKDYQAMKVSKGSGRAIIALTRKVARIVFAMLNKKEAFNPNLVVKC

SEQ ID NO: 388135 - protein, 454 aa, unidentified
MVPRNARKGRRRPGKARSDLTLTHANAAGIDIGCASHFVAVPADRDEQPVREFRSFTADLAALADWLTACGVDTVAMESTGVYWIPLFELLDSRGFKVLLVNARHVKNVSGRKSDVLDCQWLQQLMSYGLLSGAFRPDEQVCVLRALWRQRSMLLKDQARCVQHMQKALTQMNLQLANVISDVVGESGQRILRAILAGERDGYKLAALRNSRIHASDEEIARSLQGSWRPEHLFALKQAVARFDFLGIQLAEADQEIEGQLRVLQTHEGEPDKPRRRGRSRNAPKFDLRSQLYKVCGVDLTRIDGIDITTALAVVSEVGTDLARFPTVGHFTSWLGLCPGTRITGGKVVSGRTKRCANRAAEALRMAAAALRTSKSALGAYYRRLCSRMDRAKAITAAAHKLARLIYTLLTKGQEYTDQGQDYYEERYRERVLRSLSQRAAKLGMLMIPMENHG

SEQ ID NO: 388136 - protein, 418 aa, unidentified
MVISAAGTITNISFRRFRVISVGVDVSKGKSTVCVLKPYGEIVCSPFEVLHVEKELESLDSLLQKLDGEIRVVMEATGIYHLPILLFLQEKGYFVSVVNPYAMKKYAKDNSIRGAKTDRLDSVMIAHYGIEKWFKLQKYDSDEELYAELKLLGRRYRYYMELHVKALQELTHILDYVMPGIKKLFNSWDEASGKDKLSDFVERFWHFDLITSMSLDEFVDEYLIWAEEKKYHRSRSKAETVYELASGGISTLSSSTPSTKMLVQEAVTVLRAVDNSLSLILSRMQELAKSLPEYSTVRAMGGVGDVLAPKLIAEIGDVRRLHSAKALIAWAGIDPPPYESGQFVGSRRKITKRGSSTLRKVGYEVMRVLKSHKAPKDDAVYNYILKKEREGKDKKHAKIAGLNKFLRIYYARVMAVYQ

SEQ ID NO: 388137 - protein, 406 aa, unidentified
MWVSREAAFRSTDDWKDTTMPTEAATRAAVIGLDVGKFSHWACRVNGRGEVLESGPVANTERDLDELFGRVDAGTLVVVDQVRNIGSLAISRARLAGLPVAYLPGIAAHGAAKLFAGDAKTDERDAAVIAKTALGIPDSLLPVPRRDGRLEAARSMAAQRSHMVACSTRDKNRLRSLLLESCPAFEALTDLADPHWLKMMEALGGPWGIVDAGKASVGAVTRGADRSRIDAAIAAAASSTRPSEYQVMAENPQVRMLAGRIRESAGEAARLDAEIAALLAEDGTYACLLTVPGIGPRTASELVIGIDIDDFPDHDHLASYCGIAPRNRQSGKSISSVSSSRQGNKRLKNLLIFSCNSLTRSKGRFGDYYRSCRDRGMCHGEALKAVARKRLKVIYAIMRDKVPYSA

SEQ ID NO: 388138 - protein, 395 aa, unidentified
MFIVGIDIAKRSHEAIIIAEDGQVVRKAFSFRNNCTGYNLLLEQVRRLTLVKSQIVFAMESTAHYWLALYARLLKDGYAVMVLNPIQSHSLRELYIRKAKTDARDSLIIADLVRFGRCKASNVPQDKILALRELCRSRAYLVDMAADLKRKLIALLDRIFPEYESLFDSVFSKASIAVLSKYSTPQKVKNANLRKLTDLLMESSNGHFGEWKAHQLKEAACSSFGIDDSGGVYSMLLGMFLEQILSLTAQADSLEKQISVFFQEFNNPLTSIPGVGTVLAATILSEIGDITRFSSADKLLAYAGLDPSVKQSGEFKSNQNRMSKRGSPYLRRAIWLASTVAVHRDPMFQTYYEKKISEGLHYMNVIGHVSRKMTAVIFAVLRDGQPYQPILQSAG

SEQ ID NO: 388139 - protein, 335 aa, unidentified
MKSILSVGMDVHKNSFSLCAYDGYTGEIVSESTFASDVKLVIKFIEALKSRYENDVEIKCGYEAGCLGYSLYKSLTARGVDCVILAPTTMQVSAKNKMVKNDRMDALNIAKNLASGSYKSVYVPDEEDVEIKEYIRMIHDFKKELKRVKQEICAFVLRHGYQYDGKSKWTIRYMNWIRELEMSEIQRETLNEYIAEMENLNDKIDRFMNRINEIYQSERYHEKVSKLRCFKGIDTFAAMTIQVETADFERFPSAKAYASYTGLTTGEHSSGDKNNRIGQKGMDVNIIAYADKATERLKKKYQKLIERNVPRNKAIVAVARELACFIWGMETGNIH

SEQ ID NO: 388140 - protein, 457 aa, unidentified
MTGKNKPVQSRAMSPIHPRAAAIDVGAKMHVAAVGPDRASEPVRTFGTFTDDLNRLADWFQECGIETVAMESTGVYWIPVFEILEQRGFEVLLVNARDAKHVPGRKTDVSDAQWLQRLHEFGLLRASFLPKGEIAALRAYLRQRERLVELAASHIQHMQKALMQMNVQVHHVVSDIMGVTGMRILRAIVAGERDPGVLAANRDRRCHADVETIQRALTGNWRDEHLFALDQALALYDACQEKVAACDQKIEATLKRIEAQSAKPAGKLPPARSTKRQPNAVDFDVRTALHAVLGVDLTQIHGLGPYLALKLVGECGTDLSAWPNAKHFTSWLGLAPSNKISGGKVLSSRTRRSSNRAASLLRLAAVTVGRTDTALGAFFRRLSARVGKAKAVTATARKIAVLFYNTLRHGMDYADPGASYYEARYQQRVLANLQRRAKSLGYVLQQADAAPAANGVS

SEQ ID NO: 388141 - protein, 362 aa, unidentified
MAESTTFVAFDQHAATTMAAVLLPGQRTPALHPMTSDLGELRRFVRRLRASGGLRCCYEAGPCGFELQRALATDGVPCDVIAPALIPRRPGDRIKTDRRDASQLAVLSRAGALTTIHIPTEQEEAARDLLRCREDIRADLLRARHRLSKFLLRHGRRFTGTKKAWSKRHETWLRAQTWAIPALDQTHWAYLRAVDEAVARLRAVEADLQALLTLEPLRDRVARLRCFRGIDDLTALTIAAEFGDPRRFPTAPSTMAFVGLVPSEHSSGGKRAQGAITKTGNAHLRRVLVEAAWHYRHHPFVGRALQRRQTDAPPDVVARAWTAQQRLHRKYARLAARGKRKQHVVTAVARELTGFVWAVLTQ

SEQ ID NO: 388142 - protein, 441 aa, unidentified
MLAVVIADVAVEGQWRFCRRKFGATENELRQLMNWLEEQGVREVIMESTAQYWKPVWHQLEGHFELYLAQAQSNRAPRGRKRDFTDAERLLRRHVARELILSFVPNPEQRMWRTLTHTKYQLSRDRVRLQNQLESLLEDARIKLSGCVTDLLGVSSRRMLRALAAGETDAAHLADMAHAGLHATAEELRDALQAAATMNSLHRQILGLFLSRLELIENHMDALDTAIAAALRAHNDAVLRLADVPGFGIDSAQQVIAEVGPTAATFPSPEQLSSWVGACPGREESAEVSSSNRSPKGNRAMRRVLNQVANAAVKSKGSVFQIRYLKLRARLGHNKAIWAIVHRLCRLTWKMLHQGVAYIEYGKRLNPNAAKRRISKLVREYDGLVTMRNLRPYQQHSRGFRPCRRLARSEAECPEQMILTFSASFSVGAERDFSPRHKLHS

SEQ ID NO: 388143 - protein, 346 aa, unidentified
MNQIIRIGMDTSKHIFQLHGVDAAEQAVLRKRLRRKEVLAFFAKLPPTVIGMEACGAAHYWGRELRKLGHEVKLMAPQHVKAYVKRNKNDGRDAEGLCEAMSRPTMQFVPVKTEEQQAALMLAGVRQQLIARRTQLSNAIRGYAAEFGVTAAKGLDKIEPLLARIAQDESLPALARELFAIEGREYTQVQAELKAIEAKLMAWHRANAASRRLAQIPGVGPIGATALVMKTPDPRAFSSGRHFAAWLGLTPKDHSTAGKTRLGKITRAGDEVLRSLLVAGATAVIQQVRRGRGHPSPWLVALLKRKPPKLAAVALANKIARIAWKLMTTGESYDGARMPGASALAA

SEQ ID NO: 388144 - protein, 343 aa, unidentified
MYFIGLDVHKKTISFCMKDAAGCVLKEGKIGATRQELYTWLWTLPKPRTFAMEATMFTGWIYDCLLPHADKVKVAHPLMLRAIAAAKRKNDQIDASKIADCLRCDFLPECHMASREIRDRRRILRYRNLVVKQAVQMKNRVSGLLMETGVSYNKAKLHRKGYFHDLMWKHPEVSDSIRPLLNFCRERIEHSHKLDLRLVASLERDPLLKDRLERLRTVPGVGQITALTWALEIGDYTRFRSVKEAISYCGLCSAERSSADKLMRMPISKQRNKHIQRVLVEAAKLAVRQNHELGMVYDKELQRGNDNCASLAVARKLVAYMLAVDRRKQNFVPAEEFNATAAA

SEQ ID NO: 388145 - protein, 397 aa, unidentified
MIAVGIDISKAKSTVAVIDSDGTVLASPFTMAHTQPEMEAFVTYLKGLGEPTTILMEYTGHYHYPVLKKLQDEGFPVCIVNPYQMKKYGDVEIHKAKTDKKDALRIAAYALEKSYKLVPYSSMEQKYEDLKFLSRQYSQRITYVAKLKVQLIALLDQTMPGITRILPLNSRNPEKCALLLFIKRFKSFDEIQRIGKARFLASYDVLAKKASERSASSKGLSIYELAVDSITTRGENPYIWLSQNQCVDLLSATQNAADEIISQMRNIAETIPEYKVLRAMRGVGDRLGPIILAEIGDIRRFHSGKALNSYAGNDAPPYQSGQFESRNHHISKRGSSTLRKACYEVMQALKLTKPQDDPVYLFMLKKEQEGKPFNVAKMAGVNKFLRIYYARAMELYK

SEQ ID NO: 388146 - protein, 412 aa, unidentified
MNPVVGLDVSKGESQVQAFLDKGKPYRKSFSIKHTLEGLDSLLEFLWDIEKLANGKQPSVILESTGQYHMPVIQFLEEQQYVYIIVNPLVSHRARSTSLRKVKTDAIDAYHLCELYYKEELEPYKKRGIQLLNLRNLTRQQETVSSTAAQTKLQLQSILDQVFPEYRGVFGNLYSKISLQILSIFPTSKEVLSVSESDLTNKIAELCTTRSEKWAKEKVIKLREAALRNPFQNNLYQSHIFNLRMFINIVLQYQEHLSKLAAEIDALAKEIEEYEIIQSIPGVGEKIAATIISEIGEIERFNHPKKLVAFAGIDPSVYSSGRFTASINRITKRGSSRLRQALFMAVQCGIRDARKQKTSDEILPRNKKLREFYDKKREEGKPFRVAIIACANKLLHWIYALLKRKVPFRNED

SEQ ID NO: 388147 - protein, 341 aa, unidentified
MKDVKTVGLDLAKNVFYVHGVNAHGKTVLRKKLARSKVLEFFANLPPCLVGMEVGGGSHYWAREIGALGHDARMMSPQFVKPYVKTDKTDPNDAEGICEAVSRPTMRFVPVKNHNQQDIQSIHRIRERLVTARTALGNEIRGFLGEYGIAIPTGIRVLTKTLPELIADESNKLTPMMRELMLELLKELREINEAISQYNDRIESIRQSNPVAKRLTSIPGVGPITATAIVAHVSDASLFKNGRQFAAYLGLVPRQRGSGGKTRQLGISKRGDKYIRTMLVHGARVVVTRNESVQHTPKIRKWVHDLKERRGMNKATVALANKNARMAWAVMMKGEDFKWAA

SEQ ID NO: 388148 - protein, 410 aa, unidentified
MVCIGIDWSDQSHSFCIVDETGKKLHAFEIPHGQSGFEIAHERIAKYAPATQDALVAIETKDSLIVDFFLELGYSLHFLNPKQTDRFRDRHRMSSAKSDGFDAYVLADALRTDRHLFNALSALDDYSLKLRVLTRTREGLVQRKVAVSNELTAALKRYFPVALKLFGGLDTPEAICFLLAYPTYAQAKTVSVSRIHSVLKKAGLSERVAQRRAQTINSKLQEPQPTPAPSIVEAYPMAVKSLLRQMQSILEELDAVEEQIKVNYKDHPNKELLESLPGIASTLGPVLAAELGSDITRFADVRTLKAFAGSSPVTERSGKYCEIKFRRACNGRVRQALHLASRSAITSCRWARQLYDKLRSQGKSYGRALRAVANQLIEMLYTILLRRTPYSESYHLRMRELHSTTSSVLT

SEQ ID NO: 388149 - protein, 370 aa, unidentified
MLDTTTFVGLDVHARSIKAVSLDVMTGEVRAATFGYDAGAVAGWVRSVDPRARCVYESGVTGFDLQKRLSGLGVDCVVGAVSKMIKPSADRRRKNDRNDAEFLARMLSVGNVVEVWVPDDECEAARDLTRALEDARDDLSRSKQRLSKFLLRHGLVFDERTPTGRRKGNWTRAHWSWIESIRFAERADNDVLAYYVDAVRRAAEEKARLEGLVEAEARKPRWRKRVDSLRCLKGVDTASAADLVFEAGEFSRFRNARSFAAWVGLTPSEHSSGESDRRGAITKAGNKHLRKTLVEAAWHYLTCSGRPKDLARGQAPDRGARRHAAKGVRRLVERRGALLARGVHGNKANVATARELACWVWAVGLMAEEA

SEQ ID NO: 388150 - protein, 388 aa, unidentified
MNKIIYIGMDVHSTNFTLCSFEPGYGFEADKIFGQTQIKEDIFNSTVKYINKLKSMRPDVDVVCGYEAWCLGYNLHRKLKAKEIESVILAPTTMAVSRNSSKKKNDYRDAITIAKCLASSAYKAVYIPDDKDEDVRDFIRMRDDHKTALKQIKQQLNAFCLRHGHHYDKTKWTGLHLNWLRKLELSKLQRETVEEYLVTYETLTSKITALDIRIEDIASEERYAEKVNKLKCIKGIKTHTALSFVCEIGDFNRFKSADKFAGFIGLVSGECSSGNTERMLGITKAGNRHLRRLVVEISNTYRRGTVGRKSATLKERQKDMPKDVVAYADKATNRCQRKYLRMMFKGKNSNQAVAAVARELCCFIWGMMTGHHSRTAQAEVSVYRSELD

SEQ ID NO: 388151 - protein, 343 aa, unidentified
MSDKLYFGVDVSKHWLDIAYYDGVDVDWKRGHIRVDNDEKGFAQLGRWLDRLGVGKGTCIFCMEYTGLYSQEFRQWLERMKIVYGMVSPRKMHRFEPDLGEDERSLDRIKTDEMDSFRIAIYCKEHSMKIRRKPSHLPSDAYFKLKRLLAERRQYVKQSTLYKQQLHDIGKYDTEASRHRKEAELASLTENALQTSKEMEAIIREDADIRKNYGLLCSIKGIGLIVAAETIVLTENFTSITNPRRYACYVGIAPGRKESGVSIQGCDHVGRKGFTQAKADLSMAALHAIRFDKGIRAYWLRRKAEGKHSGVVLNAVKFKIVLRMFAVIRRQKPYVEMEEYGKK

SEQ ID NO: 388152 - protein, 355 aa, unidentified
MTSAKYIGMDVHKESISIAVRNSVGKVVMECVIETKASMILQFIDGLRGDLQVTFEEGTSAAWLYDLLKPHVTKLVVCDPRKNKSMREGNQNDKIDARRLAELLRLDHLTPVYHGEHGLRTLKELVRSYLTITKDLSRVMTRVKAIYRSWAIPCTGKQVYARCHRAEWLAKISEPGVRRRAEFYYQQLDALRVLRQEARRDLLTESKKHKAWKQLCEIPAIGPIRAAVLLGILQTPHRFRTKRPLWNYGGLAIEMHSSADHHSVHGQLQRSRKNVLVRGLNRNCNHDLKNLFKGAAAVASSKPGPFQEFYTALVAKGMRPEMARLTLARKIATIVLIVWKRGVHFDAQYLKPQTA

SEQ ID NO: 388153 - protein, 428 aa, unidentified
MSERDYNRQAARRQRVSKATLIVGVDVGKAFNAVGFMNKDGNVLGSCSKLYNSREGFEQFVKMIEGLKARHRLRDVLIGMEPTGHYWRKLAYFAIEHGYEVRFVRTTALKHHRELDESSSAKSDRRDALTIANITREGKYIDTVIEDGVLRQLRTLSKARERLLRYSVSAKNSLHAALDDYFPELHEIFRSMGARSLWVILEKCPFPEDVVLMKTSILQEMIARSSRKKAGSARKAKALYEAAQKSIGVKQIGTADRYRLRMCLEEVKRTVLTLKDMDRQLKSMAKDIPSASYLMSIPGIGYLSAAVFLGELGNPAHFHNARQIVKYAGYDPQESDSGSWIGRKFISKKGRWLLRKYLFFMSMRVVVLTKYFQEYYHRKLETKNRVGQLPRRKEILCAVAIKLIKVIFALLRDKRSFEDTASAAVVIA

SEQ ID NO: 388154 - protein, 396 aa, unidentified
MVTVGIDIGGRSHAVARCREGLPKADREILRMSQSRAGFAALDTWLDRQPEPVTLVTMESSGHYWMPLASHLRRQAVAVSVVNPLAAKYFAKSRLARTKSDPADARSLAEMAMRDAPPARDPLAGAELRQGARFAMILVTEQAKVCQRLIRLVELGFPELGELFDDPTCRTAREILRIAPTARAATRRRTSTLANANAGPGRRRLGQTKAKRLQAAAADSIAVPELDAEVAFEVGLLLNQYDLFERQIADADARVASLLDGELARRLQTIPGVGPSIAATLLAEIGDIGRFSEFDQLLAYAGVHPAERSSGRKGANRETAWHMSKAGNSQLRAAAYRMAVVGVQHNPVIAAHYARKRAAGKSKMNALGHCMRKALSLVWGVWRNGHDFDPLWGVEA

SEQ ID NO: 388155 - protein, 414 aa, unidentified
MTEITVTRFVGIDLHKRFVVIAAVDAQQNVLLRPTRRITLDDFPTWAAQHLSSRDAVVLEATGNAWWCYDQVAPLTGRAIVANPLQVKWIAAAAVKTDKHDAVKLAKLLAANLIPAVWVPPQPVRELRALLAHRHALVKQQTAAKNRLHSVLHRHNLTPPEGDLFAAHNRDWWATLDVSPTEWLRAQHDVATLDHLQQQLTDVETELGRLSMGAPWREHVPYLIQLPGLALLTAMTILAAIGDITRFPSAKQLVGYAGLGAGIHASGESQHEGHITKQGRRDLRRVLIEAAWSAVNTHPYWKGEFARLCRHKPQGVAIVAIARKLLVAVWHVLSERAADNHAEPAMVASKLMRWSWQLTPEQRGGLTSRQFIRYGLLHLQLGEELRGFTYGGQPRAIAPPAEILALFPELQAPA

SEQ ID NO: 388156 - protein, 422 aa, unidentified
MLAEARDDEVIIERIAAVDVGKAELACCVRVPDERRPRRRLQEVEVYPTMTRSLLRLADRLRCLGVTRVVMEATSDYWKPVFYVLEAAGFETWLVNAKDVKHLPGRPKTDKLDCIWLCKVAERQMIRPSFVPPPPIRRLRDMTRYRIDLVTTRTAEKQRAEKLLEDACIKLSVVASDIFGVSARAMMASLIAGERDPKVLAQLARTAMRRKISALEEAFTGHFTDHHAFLLAKMLARVDALDADIAELDAVIEQMIAPFASAAERLDEVTGIGLVAVAVIIAEIGTDMTRFPTSGHLVSWAKYAPGVKESAGKKKGAGTTGHGNPYLARVLGEAAIATSRTDTFLGERFRRIARRRGSKKAIVAVGRSILVIIWHLLSDPTVRYADLGPGFYDARISHSRRTHNHVRQLEALGYKVSLEPAA

SEQ ID NO: 388157 - protein, 341 aa, unidentified
MRIVGGLDVHRRQITFDYLDERSGQTRRGRIAPADRMLLRRWLQDTVADSPAAFAVEACTGWRFVVEELRRAGIEAHLAEPADTAAARGPKRRAKTDRTDARHLRELLAGGRLPESWIPPEQVCEMRARLQLFRDLREEHTAWVQRIHAILLHQGAAAIAGDLLGAGNRQRLEAAEELSSAGREAVAAALRILDALDAELAPLRKQIAVFARRQPGCRALQAQYGVGPITAVALWAELGDTRRFSASRKAVRHTGLDITVYSSDGKRPPGHLSRQGSPLLRWALFEAAKCAARPGSPDHAYYRQVADRLGGNRAALSVARKIARRAHHTLRALGDEALAPV

SEQ ID NO: 388158 - protein, 421 aa, unidentified
MKPQAPEAFAAFVGLDWADAKHDICLQVAGSARREFLRLEHRPEVIDAWVCTLRTRFNGQPIAVCLELNKGPIVSALQNYDFLVLFPVNPLTVAKYREAFTPSRAKDDPTDAELQVEILLKHRDKLTPLVPQSPTMRALTQLVEHRRRLVGDKVRLTNRLTSALKNYFPHVLQWFQEKDTAIFCDFLSRWPTLKTVQLARRATLESFFRAHRVRSADVITTRIEAIKNAVALTTDDGVIAPNTLLVQALVAQLRVTLQAIADFDTAIAQRTQAHPDFPLFDALPGAGAVFAPRLLVAFGEQRERFTSAEELQKYAGIAPVTERSGKKSWVHWRLQCPTFLRQTFVEWAAESIRHSFWAQVYYQQQRDKGKAHQAAVRALAFKWIRILYRCWQDRIPYDESTYLQALHRRGSSLLQNLAKVS

SEQ ID NO: 388159 - protein, 416 aa, unidentified
MLFIGDDWAEGHHDIELEDEAGRRLARARLPEGLEGITRLHALVAEHAPGSWAELPPDQVAGQVIVGIETDRGPWVTALRAAGYQVFAINPLSAARYRQRHSTSGAKSDAGDAHVLAEIVRLDRDHHRPIAGDSDLADAVKLLARAHQTAVWERTRQVLRLRATLREYFPAAVEAFEDLAAPDALALLARAPDPARAAKLTRGQLVAALRAARRHHVETRADTLLAVLRAPALRQSATLQGAYAAVVTGQVGIITALNAQITQLGQVVDEHFARHPAADIYLSQPGFGVVLAARTLGEFGDDKDRFATARARKNYSGQSPITRASGKKSVVLARYATNRRLGAALHLQAFAALGASPGARAYYDAIRARNIGHHAALRQLANRLVGILHGCLKTGTLYDENTAWQHHRTDIQPAAA

SEQ ID NO: 388160 - protein, 417 aa, unidentified
MKYYSSTTEYNCGIDLHARQMYVCVMDRQGRKLVHCNIKNNDFDYFLKLVEPYKHSLTVCCECMFGWYWLADACHAAGLAFVLAHALYVKAIHGGKNKNDRVDSEKLTHLLRSNLIPPAYVYPAAQRPLRALLRQRVFYVWRRSELLARIYSHQLAHNRTPAKQTRRVRDSWEEQLLKAEDHPLRQFALQNDMAMIRHFDHQISQLEEELQRQTKKVASRDYALLQSVPGIGEALGLTILYEIGPIERFPTVKDFVSYCRLVKGTVASAGKIKGLRGAKLGNPYLRWAFGEAAVIAKRDHALIGPLAQRLEAQMNGNKFKANTVVAIKMARAVYFMLKNKTVFDPDRLVAALQKPFSPGRRQPGRLTGCAQKVRPPSVADHSSCAPSTPVCVGPASNPALSIGTCGQWLTQPPTPSK

SEQ ID NO: 388161 - protein, 341 aa, unidentified
MTEYYYVGLDVHKKSVSCCVKKADGQIVDERSVPARREDLVAWAESVGRPWNGCMEATLFSGWIYDTLLPHAASLEVGHPLMIKAISASKRKNDRLDARTLADLLRCDLFPACYMPSPLERELRRVLRYRTLLVRVSTRMKNKTAGLLMEVGAEYVKGRLHGKRYFASLLETLKDTPESVKELLQMTHGNMAIFDAAQKRLVTELQNHPEIRERVERLMTIPGVGPITALTWALEIGDPHRFPSRKHAASYCGLCSAQVESAGKSKRGPLSKQRNKHLQSVLIEAAKLAPRWNDELERLYANERDRGANPNRATLAVARKLVGYLLSVDKNGHHFEPRQAA

SEQ ID NO: 388162 - protein, 367 aa, unidentified
MRKSITVAEEQTRNFAEKKYTVGLDLGDRWSWYCVLDDRGEVVFEQKLSTTPKALRDVFGAMPHSRVALETGTHSPWVSRLMKELGHETIVAQASKVRLIGQSRKKDDRLDARTLARLARIDPELLGPIQHRSARAQADLIMIRARAGLVRSRTALINVARGLTKSYGERLRGCSARNMDAEKRKGLSEELQLALEPLLRAIESLSQQILAYNQRIEQMAREGYPEVERLKQVKGVGTLIALAYVLTLEDPRRFAKSREAGCYVGLQPGRRNSGSSTPQLHISKEGDSYLRTLLVQGAQHILGPFGEDSDLRRWGLKLAERGGKNGKKRAVIAVARKLAVLLHRLWVSGEAYEPLRNQRAVELAAAA

SEQ ID NO: 388163 - protein, 378 aa, unidentified
MRIVCGLDVHKDSVYLCILSSTGEIVEKVFGVLTFQLAKMRDLMLKHHVQEVGMESTSVYWIPIWRVLEPHFKLKLVNPYFIKQLPGHKSDVKDAQWIAECMLKELVRGSFVPPERIQQLRQYDRRIFDLDDEINRKLSKLDAALQRCNIRLSNYVSNTDSKSYKEVVARISEGVTDPKVLVEEIHGRIINRHGRKTIIAALTGVITQADSDMMRQIREEIDVAERHKQECIDKMQEICEKEYSDQLRNLQTIPGVKLRAATSLIAEIGTDMSHFETANHLASWSGLKPRNDESNKVIKSKRITHGNRYLRRTIVECGWAASRTKGCFFSRFSYHQTQVRKKTKMKVQIAISRKLLICAWHILSKNVPYQDFCEREIS

SEQ ID NO: 388164 - protein, 402 aa, unidentified
MTTGQVWAGVDVGKEHHWVCVVDDTGAVVLSRKVVNDEQPIRELVAEIDRLAHEVSWTVDLTTVYAALLLMVLAGAGKPVRYLAGRAVWQASVTYRGGEAKTDAKDARVIADQSRMRGADLPVLHPDDDLITELRMLTAHRADLVADRTRTINRLRQQLVAVCPALERVAQLTQDRGWVVLLSRYQRPKTIRNSGVSRLTKVLADAGVRNAASIAQAAVAAAKAQTVRLPGEEVAAQLVAQLAREVTALDDRIKATDADIEGRFRRHPLAEVITSLPGIGFRLGAEFLAAVSDPSRIGSADQLAAWAGLAPVPRDSGKRTGRLHTPKRYSRRLRRVMYMSALTAIRCDPQSRAYYQAKRDEGKQSIQATICLARRRTNVLYALIRDNRTWQPDSPPITESAA

SEQ ID NO: 388165 - protein, 404 aa, unidentified
MRFIGLDVHRDFCEIAISEGSKARSAGRVNTTPEALTTLGNSLAPDDKVILESTGNALEIARILEPFVSEVVIANPMQVRAISHAKVKNDQFDARTLAELLAADLVPRVWIGDEQTRVLRRLTSRRSQLVRARTRPKNEITAVLVRNLKGRPPMTDLFGKQGRQWLAGLQFPADEHDTVQACLRQIDFLSIEIAHVDRQLAEKALTSPEIKRLMTIPGVGVTTAATLIAAIGDVHRFPTAKRLVGYLGLDPRVRQSGQRPAREGRISKQGSSACRHVLVEAAWSAIKTPGPLRAFYQRTRTRRGAQIAIVATARKLASLCWQLLTTDQDYAFKRQTIVDRKLRALELRAGAPTRPRTQRQPGTPTAKQRALLERQITEQAELAYQRLIQDWQATGSKTTSEATP

SEQ ID NO: 388166 - protein, 366 aa, unidentified
MREQDERNRITIGLDLGDRRHRFCVLDGKGEVVEEGTLSNKRESLSELSRRYRRALVVMEAGCHSPWISRHLEGAGCEVVVSNPRKTRAIYQHERKSDRRDALMLARIARMEPALLYPVQHGSAQAQHDLLRIKLRDSLVRARVGVINSLRFTLKSLGYAIANPSTERFHKVIQEQVPESVDSVIAPSVQALKELSLRIKLLDREIATLARSKYPETTWLEQIPGVGPITALYFVLKIQDPARFERVRDVGAFIGLCPRRDQSGENDPQLRISKRGDAYLRRLLVSAAQYILGPFGPPSALRQYGLALASGGTPRAKKRAVVAIARKLAVLLLTLWKNKSVYQAFPLSRDGEKMRTSDLERLRCIA

SEQ ID NO: 388167 - protein, 343 aa, unidentified
MDHFAGLDVSVKDTSVCIVDETGRIVREVKVASEPDALLAVLTNPAYHFKRIGLEAGPLSQWLFSVLAAAGLPVICVETRHMRAVLKAQINKTDRNDARGIAQMMRVGLYRPVHVKTLRSQKLRMLLTHRKLLQSKAIAIENDLRGTLRNFGLKVGMVGTVKFEARIKELIANLPDLAELIEPLLIARQVIRDQFAILHRRLLAIVRDDEVCRRLMTVPGVGPVVALTYRATVDVPARFRNSKAVGAVLGLTPAKHQSGERDQTGGISRCGDEMMRMMLYEAAQVMLMRSVKWSWLKAWAMKIAKHRGLKKAIVALARRLAVIMHRIWVDGTEFRWTREVTAI

SEQ ID NO: 388168 - protein, 353 aa, unidentified
MNSLVYIGMDLHKNTSTFSVKDGDGAVLDNRKIETEPSAIKGYLRKFPNASLAVEPVSQWYFYADLMQKLGVDVHLANPLKVKAIASARIKTDSIDAGVLCDLLRTNLLPEAYFSSPDVRFWKEMVRFRASLVNLRTQVKNKIHSILFKNALRHPFTDLFGVSGRKWLAALELDEHFAFNLNRYLELLDTCTRLVKETDEKIEQTVTDQPQARLLTSIPGISYCSALTIMAEIGTIDRFPSAKKLMGYAGLVPSTYASGETTRHGRITKQGSRWLRWTMIEIAQRQQLCKKTPGFGWYYDRVKKRKGTGAAAVATARKLLAVAWRILKDNRPFEVIPPRLEVQEAHRKTIVSS

SEQ ID NO: 388169 - protein, 387 aa, unidentified
MAQVNDLSRSLTAFDPISTLVVVVEMSKASWLVSGVVPGVERQPLKKLAPDATALLRLIERWRSEAIRAGRPINRIALAYEAGRDGFWLARWLIARGIEAHVIHSASVAVSRERKRAKTDRLDAAMLMRVFLGWLRGERGHCGMVVIPTMEEEAARRPSRERENLVNERSRITNRMKSALARLGIRGFKPHLRKAPERLAGLRTAEGTGLPANVIEEFRRDMARLALVREQIGSIEKTRAERLERAPDTGPHAMVRLLARVIGIGIETADMLVREILSRKLRDRRAVARYAGLTGSPDESGLKRREKGLAKAGNARVRRGLIQLAWRFLTFQKDSALAQWYRTRTEGPSGARRTTMIVALARKLLIALWRLVTTGEVPDGVELRPAA

SEQ ID NO: 388170 - protein, 415 aa, unidentified
MDLLHPRCAGLDVSKRDAKACVRIAREGRAGATSTATTWSSMTGQILALREHLIEQQVTLVVMEATGDYWKPFFYLLEDAPFEVLLVNARQVKNVPGRKTDVSDAKWLAQLAAHGLVHGSFVPPQPIRELRDLTRTRTAITRERTREWQRLEKLLEDAGIKLTSVATVISGPSGRDMLDAMIDGERNPAVLADLARARLRDKIPALTEALEGRFTAHHAFLTRLHLNLIDSCTATIAELTARIEVVIEPFRRARDLIATTPGIATLVADVVVAETGADMTRFPTAAHLASWTGTTPGSHESAGRVKSTKTRPGNPYLKGALGIAALSIARSGQPTRLSARYRRIAARRGPSKALVAIEHTVIVNIWHMLTADVGYADLGADYYTRRNPDSTKNRAVKQLRELGYHVTLDPLPATG

SEQ ID NO: 388171 - protein, 442 aa, unidentified
MKKEVKNEFRLVHPNAAGIDIAKDVHYASVPVDRDETPVRHFGSYTEDLHQLAIWLKQCEIDTVAMESTGIYWVQLFLILEEYGFDVFLVNARHIKNVTGRKSDVLDCQWIQQLHSFGLLNKSFQPENEIRELRTYMRHRKSLTQSYASQIQLMQKAFEQMNIKLQNVLTDICGKSGQFIIKAILAGERDPEVLVELVDHQVKASKEEIKKSLVGNWRAEHLFELKQAYELYLFFKEKISECDTQIENVLRKLDSGELTGEGGTKTPRGVYTKNRFNFNATNYLKGVIGIDVTKIFGISEVLALEIISETGIDMTKWPTKKHFTSWLNLVPNNRTSGGKLLKPKKVKKKNKAGQAFLMAAFALQRSNHWLGSFYRRIKAKQGPAVANKATARKIALIFYDMIKFQREFNPINNEAYDKHFAEQRIKYINNQAVKLGFQLIPA

SEQ ID NO: 388172 - protein, 406 aa, unidentified
MIRWFAGIDWADDHHDLVVLDESGRQLRTLRVTHTPAGLNQLTSALEQICGADAKDQLACFVETNRGLLIAALLEAGLAIYPVNPKTVDRRRNAAGLKTDQVDAYLLAKTGRSDLADLRRLRPDSALIQELKLLTRDQDSLIVSQTRVLNQLTACLKAYYPVALTLFSKLHQPSTIAFLRAYPTPQEAMASSETAIAAILKQAGHRRAAHAAARIVETLHQPHLLADDVTTRTKARLMLNLLAQLEPLMQQLAAYDEEIERLFLLSADSGVFASLPRAGKRLAPRLLAEIGDDRRRYVDAASLQALAGTAPVCYESGKYARAHRRYACLKPLRNAMQYFAWQSTLQEGWALAYYRRKRTEGKSHSVALRALANVWLRIIYAMWRDRTPYVRATFEAAQQHKLRKAA

SEQ ID NO: 388173 - protein, 404 aa, unidentified
MPIVAGIDVHKRSLMVVASSAEDPSQFRSRRFGTGGSELDALAQWLAWEGVREVVMESTAQYWKPVWLALESQFSLHLAQAHSNRAPHGRKTDFRDAQRLVRRFLAGELILSFVPDSDQRQLRLLTRRRVQQVRARLQAQAQLEALLEDCGVKLSSVISDLLGSSGRRILQALAEGESDPARLAALGDRRLQSGPARLADALQRPLSQVQRDVLRQALEQIAFLDQQIEQITAWIGQAMQAHQQSLARLCQVPGIRSVAAQQIIAELGPCAETFPSPEQLSSWAGVCPGRQESAGENRSGRSAKGNRYLRRVLCQCAQAAVRTRNSWFESKFRRLLPRLGFAKSIWAIAHHLLRLVWKILHENAAYEERCQRSSPQAILRRMQRLRQEWRRLGYDLQLVPISNE

SEQ ID NO: 388174 - protein, 389 aa, unidentified
MSQPFDASRSLTVLEQDSTIIAVIEMSQSKWLVSAVVPGVERQPLKKLDPDEEALRKLLHRWRNEAGQAGHEIKRIVVAYEAGRDGFWLARWLQARDVEAYVIHPASVAVSREHRRAKTDRLDTELLMRAFLGWLRGEKRHCSMAAIPTAEEEDAKRPNRERGNLVTDQTRIVNQIKAILARFGIRTFRPTLRKAAEKLDGLRTAEGTPLLENTRAELRRHLARLRVVREQIRAIEHERLRKFAAAPAGVKGPHAMVRLIARVVGVGVETADMLVNEVLSRHLRDRKAVARYAGLTGSPDESGRRRRERGLARAGNARVRCGMIQLAWRFLRFQKDSALAQWFDARTADGRGSTRKTMIVALARKLLIALWQLVTTGEMPRGVVLRPAS

SEQ ID NO: 388175 - protein, 385 aa, unidentified
MRFIALDVHRDFSEVAIAEGRQVRLAGRVETTPAGLELFAQSLGADDQVVLEATGNALAIARVIEPHVARVVLANPKAVKGATQTAKTDKLDARTLAQLLAAGFLPEVWTPDERTRALRRRISRRAQLVRQRTREKNQIHAILIRNLKARPPVTDLFGVQGRKWLSGQGLPDDEREMVEACLRGIDFLDREVLAIDRALAELVLASPEMRRLMTLPGVNFVTAAGLLAAIGDAKRFPTARHLVSYLGLDPRVRQSGSEPARHGRISKQGPGEARHVLVEAAWHAARTTGPLRAFAERVAARRGANVATVAVARKLAVIAGTCSPAGRTTPSSGPHSCARRSAGSSSWSAPSDAKGGGTPCASSQPASSTGSRRSSPPKPSSHTDG

SEQ ID NO: 388176 - protein, 329 aa, unidentified
MKLQHIIGADLSKKSIDLVCHLLTTHIQIENSIAGFKDLLQWMRKLKINASETMIVMEHTGLYSYCFEKFLHQHQIAFCKVNALAIKRSMGLVRGKTDKLDAARIAAYGFEKKDKLMIDVPASDALKRLQMLHSTRERLVKQRASIICAIKEYRYIGVPEKDIIMQTQLQLIKSFDKQIEKLMTEIETIINEQEALKQNFHLLQSIKGVGKILALTTIIKTFNFTRFANARKFACFCGTAPFPHNSGTTIKRKARVSHLADKQMKTLLDLSAKSAIQYDKELREYYLNRTEGGKSKMSTINVVRNKIIYRMFAVIKRQSPFLENYLQAA

SEQ ID NO: 388177 - protein, 462 aa, unidentified
MAGRDEIASTGKSRRQLASLPIIQWNVAGIDLGSERHWVCAPTLDRSGREVASFGATTAELLRMAEWLKARQVESVAMESTGVYWIAPHEVLEAQGLQLLLVDTRQLAQVPGRDKKSDPTDCEWIQRLHSCGLLRGSFRPEEAVCMLRTLVRDKANLVAESGDWLRRMQKSLDQMNVRVHRAVSDIDGVTGMAILRAIAGGERDSQKLAQLRDRRCSKTEQEIAEQLSGHWREDHVFSLQQALKIYDAVQERIAAYEQEILRKLGEMEGEEPHEPTAPPLQNANKARSIKYRGQEAKRQALYRMSGVDMTQIDAIGVETVEVVVSEYGSDLSRFPTEKQFVSHVTLAPRVPKSGGKPVRKKKRNSASTRVAAALRMAALSLRHSQTALGAYYRKIAQRRGGDIAVFATARKLACLVYRVLRWGQPYVDEGAAAYENRYRQHRIGRLAATAKELGYQLTPVSA

SEQ ID NO: 388178 - protein, 351 aa, unidentified
MDYSGTNIYIGLDTHLKNWKTTIRVGDIFFKTFSQDPDAETLSKYLKKNFPGGNYHSAYEASFSGFRAHRELTELGINNIVVNPADIPTTDKERKQKEDARDSRKIAEQLAASKLQGIYVPDIELEGDRSVVRFRKTLAKEIAKNKCRAKSFLYYHGIRIPQRFANKSRWSKPFTSWLEELELPTQSSRETLNSIISLVLFLRGEQYRTLKGIKALSQGERYKKNVELLVSIPGIGPVTAMTLLTELDDISRFKNLDSLCSYIGLIPMTNSTGDFDSVGPITKRQNKVLRSLIVESSWIAIRNDPALMLAYQKLIKRMKPSKAIIRISKKMLNRIRYVLKNQKPNVVSVVE

SEQ ID NO: 388179 - protein, 370 aa, unidentified
MKKNNTCLQNPRQRTKVRPGSLTIGMDLGDKSSRYCVLDEQGEIVQEGSVGTTKKALAQKFGALRRCRMAVEVGTHSPWVSRLLKSLGHEVIVANARQVKLISNSSRKDDRLDAQTLARLARVDPQLLRPIQHRSEEAQAHLMVIRVRAALVETRSSLVNTARGLAKSVGERLPKCDADQMGVERMEGLPAQLQQALRPLLEQIESVTEKIKESDGRIEQIARTEYPETTLLKQVRGVGTLIALTFVLTIDDRDRFQKSRDVGCYVGLRPKRSESGESQPQLRITKEGDAYLRKMLVQGAHYILGYRGPDTDLKRWGLGLASSHGGKNAKKRAIVAVARKLGILLHRLWVTGEVYEPLRNSQAQARTVAA

SEQ ID NO: 388180 - protein, 343 aa, unidentified
MEESQGLVVGVDTHKESHSAALVDELGAVLGSTDVEANQRGYVQLLEWARGRSSHRTWVVEGTGSYGAGLASFLVRCGEVVYEGDRPQRRKPGASGKSDQLDAIKVAREALAREHHALPRQRGNREAIRVLLSTREGAVSASRQALNQLYAFVVTAPEPIHERLVRLKGEQLVAACVRLRCTSAVIETSVTTRALRQVARRIRTLQAEAADYEAQLERLVAQTVPALLAEPGVGTITAAQLLVSWSHAGRIRNENAFAAMAGVAPVPASSGRVVRHRLNRQGDRRLNRALHVVAICRSSFHAKTKDYIARRTAEGKSSREIRRCLKRYLARRFFRLLQGLDNT

SEQ ID NO: 388181 - protein, 330 aa, unidentified
MEYSYFVGIDVSLKSLTVVISDANQNQRPAREFPNTPTGHRQLVNCLRRLKAGVHAVLEPTNVYHLKVSFALYAADGIDVSVISTSAASHFAKAAMQRAKTDRVDARTLAEYARVHEPAPWQPPRAEAMELRSISRHIDSLVKRQTALKCQRHSAKRGQAAAIVIQVLNAELRSLERRIDKLRKHAHAMIKADEQFARWYELLLSMDGIGMKTAIYILGELAVLPPGLTKKQWVAMAGLDPQPRESGISVNRPRRISKQGGARLRRAMFLPANTAARHCAQIRAFYEEKQGVTGSKLSALCVVMRKMLLAIWGMFHYDQPFNPTLFCQKN

SEQ ID NO: 388182 - protein, 344 aa, unidentified
MVACGLDRETGEVVERRLTPDHREIVGWIEALPGPVAVTYEAGPTGFCLARALEAAGISCQVAAPSKLIRPVGDRVKTDSRDAVHLARLLHLGQVTAVAVPTAGQEAARDLVRAREDCRADLMTARHRVSKLLLRQGIIYYGGKTWTGRHELWLRRQHFDNPALQLTYDAAFDAMTACLDRRERLEAAIEAMAADSEFTPVVQRLGCIRGIATLTAFGLATEIGDWHRLTGRTIGAYLGLVPSECSSGASRVQGAVTKTGNGHARRLLVEAAWHHRRPYRPGAVLRRRWDLACPAARTRGHAANRRLHQRWIDFDLRKKRSVVANMAVARELAGWCWSLAVLDE

SEQ ID NO: 388183 - protein, 457 aa, unidentified
MAKQGKNGGKKEPHETSRQVQTAKATLEKINLKVAGIDVGSEKNYVSVLDQPVRCFMSFTGEIIEMIAFLKENKIDAVVMEATGIYWLPLYEMLEKAGFKVCLVNGAHAKNVPGRKTDVLDSEWLRELHTYGLLRSSFIPDENIRLLRYFVRLREDHISMASSHINHIHKNLDAMNLKLHKVISSIMGVSGLKVVRAIISGERDPEKMLSLCSSEIKDKKRDEVLKSLTGNYRQEYIFGLKQALELWEYYQQKEDECDKEIESILREMTKNTPDPEALSKPKAVRGNAPEIKGFHLLMIKLIGDLDATAISGINDYNLMKIISETGTDLSKFKNAKHFTSWLGLTPGVSQSGKKRRKKRRKIFNRAGQALRQLARNVGNGKNSALCGFYKRIRARAGAVVAVKATARKIAVYLFNLLTKGEAFVDEGIKRYNQRYEAQQRKFLAAKAKEYGYKLVEA

SEQ ID NO: 388184 - protein, 332 aa, unidentified
MMAQNDLVVVGIDVAKDKVDGCIRPLSQRQTFPSTPEGRRALIRWLRKHKVGKAAMEASGGYEREWAKALREAGIEALIVDPKRVRNFARSAGRLAKNDLIDAEMIAWFAETFIEAKGQAYDAAREKLVQIVNARQALLDLQTSLRNRSEHSTPDVVQKMQARLLKTIALEVAKLEAVIAALIKATAHFTELAEIIESVPGLAKATSAGLIAAMPELGQVSNKTAAALLGVAPYDEDSGKRRGDRHIQGGRRKVRNLFYMACMGAATRHNPVLRAFYDRLIAKGKEPKVALTACMRKLIVILNIMIARGEKWDASRYELSDPTRLPPSACAA

SEQ ID NO: 388185 - protein, 412 aa, unidentified
MNIMPAPTLELAGLVAGIDTHTDTHTVAIVTETGKHLATETFPTTSNGYHQLTDFLTAHHVTVVGVEGTNSYGAAITRHLIDHGYEVFEVLRPTRALRRRDGKSDPVDALAAARQVLTGQALSIPKDTTGPVESLRMLQITRNQLVATAAKLVTLIKSLLITAPVNVRQRYTAMTTPTLIATLSRCRPSSDLSDPINGTLTSLKTLATTYNTLRAQCDELDNKITDLVEVINPEMTQIFGCRAINAAELIVSVGENPKRIRSQAALAHLWGVAPILASSGRTNRHRLNRGGDRHANAALHRIVLVRMCHDERTRDYVQRRTREGLSKKEIMRCLKRAIVREIYQVLCLGRPVKQSSGLRSDEFRALRSKKGLSQTQVARKLGCAPARISDIETGKRRLSELKLTYEEFLKSA

SEQ ID NO: 388186 - protein, 345 aa, unidentified
MIIGCDFHPSWQQVAWVDTETGETEEKKLVHASGEAEKFYRQLPGPALIGMESTGNCQWFVEMATAAGHEVWIGDAAKIRASEVRQQKHDRRDAALLLRLLMEGRFPRIWTPSSQQRDLRQLLIHRYKLVRLRAQAKNGLQHLAMNQGVQKKRRLWSEAGQKLLRELPLKPWASRRREDLLSVMALLDEKILSLDLAVAEAAEKDANARLLMSQPGVGPVTSLAFVLTLGDVSRFPRGKQVASYLGLIPREYSSGGQQRLGSISKQGNRFMRMLLVEAAQGAVRYDPQFRSEYLHRCHTKPKGVAKVAAARKLAIRLYWMLRTQKRYPEIVSIESRSRVPLVGAS

SEQ ID NO: 388187 - protein, 339 aa, unidentified
MAILFVGIDLAKNVFAIHGVDEHGKAALVRPSVQRARLHQLVAALPPCTVGMEACSGAHHWARLFAQHGHTVRLMAPKFVTPYRMSGKRGKNDAADAQAICEAVQRPNMRFVPIKSQDEQARLCVHRVRQGFVEQRTATINRLRGLLSEFGIVLAQKAATIRREAAAHLEDLPGWANTAVGDCLSEVHRLDERLAEYERHISRMAGEDLRSARLMQLQGVGCTTASALVSTIGDAHDFKNGRQLAAWLGLVPGQYSSGGKTRLGRITKAGDGYLRTLLVLGAKAVLAAARNKHDRLSRWALALEVRRGYWKAVIAIAAKNARMAWAVLAKGEEFKLIEA

SEQ ID NO: 388188 - protein, 435 aa, unidentified
MIEKIHPGYGAIDIGEEKIFIACGGCTEVRSFATFSADLQAAADYLCAQGVQRVAMEATGVYWIPLHDVLESRKIKVTVFNGANARNMPGRKSDVLDCQWHAMLHSHGLLVSCFLPPDEIRQLRCFYRMREDHLGLAAAHIQHMQKALDLMNIRLHAVISQLHGVSGLRVVRAILEGERRPEALAALCDEQILKKKHAKVLKSLEGYWQDHHLFALRQGLECYEFCQAQARACDEQIAALLERLNKDRPVQTPDSDRKIKKVRHNAPAINNLHGKLITLTGGRDATQLPGISPLSFMKLLAETGPDLSAWATEKHFTSWAGLAPGSNQSGKRRRWVPRKKTAVGQIFRECVLSIAKSKHLALGAHYRKLRGHRGAAVAVTAIARKVAALYYRLMTKGLAFVEEGVKRYEERYRKQQLHYLQKKAAALGYTLSAAA

SEQ ID NO: 388189 - protein, 364 aa, unidentified
MKKGSTMAAASNKNLHAKLTIGLDLGDRSSWYSVLDETGEVVSEKKVSTTPKAMREAFAAMPRSRVALETGTHSPWVSRLLEELGQEVIVAHARNVRLIGESRRKDDRLDARTLARLARIDPELLSPVKHRSRQAQADLMVIRARASLVRARTGLVNAARGLTKSYGERLRGCNPRNLDTEKAQALSPELQAALGPLLAALEALSERIAEYNRQIEAIAQQSYPRTALLKQVKGVGTLIALTYMLTLEDPHRFRKSRDAGCYAGLQPGRRNSGDSEPQMRISKEGNPYLRTLLVQGAHHILGPFGADSDLRRWGLKLAQRGGKNGKKRAVIATARKLAVLLHRLWVSGEVYEPLRGVNRMAAVA

SEQ ID NO: 388190 - protein, 398 aa, unidentified
MIYVGVDIGKDRHAAAAVSEAGESAMPPFYFTQDAGGFAALFGALEKLGGPGAAAVGMEATGHYWKVLRHALAKRGYRADVINPLITSREASADVRGRKSDKLDAVAVANVMRKGGHSPAPAAGAADTLKTLARHRRALVARRSDAKNRLAAALDVAFPEAAETLGGLSGAAAMAAVRAFPSARLAARADIRAVTSVFKKASGGRLGREDAKKFREAARHSLSLGMDTGGEEFVIPQTADEIRALDGRIDGVERRMQEEPRPEFAARLMSIKGAGRIQPLVIAAEIGDPARFAGAGMAGKVLAYAGCDPRVRESGKWKGRTKMSKRGSPTLRNALYLMATTVRLHTPHFNEIYKKHADKGKHHNVALSHVIRKIVDVMCGMYKTNTDFVSPETEVKPC

SEQ ID NO: 388191 - protein, 355 aa, unidentified
MAVTIVEEARPITCRTAITGGVDTHADTHVAAALDSVGGLLGVREFPATPVGYAGLLGWLGGFGTVALVGIEGTGSYGAGLARHVAAAGIRVVEVDRSDRQDRRRQGKSDPLDAVSAARAAQSGRARGAPKGRDGAVEAIRALMVARRSAAGERTRTINQARALLLTGPDDLRARFTRHTPAALVTGLASLRPRPGDVAGYAVRVALRELGRRAQFPDGQLGRLDELIVPLVTARAPGLLAVYGLGPRTAALLLIAAGDHPERLRSEAARAHLCGVAPIPASSGKVTRHRLNPGGDRQANHALWRIVFTRLGSDAATRAYAERRTAEGKSKAEIIRCLKRYVAREVYRQLRPAVG

SEQ ID NO: 388192 - protein, 391 aa, unidentified
MPTMTHPDPVEQTCTHTAGGELPGTQTIGTQTTGTQTTGTQTTGGEVTGGVDTHSDTHTAAVLDVTGRLLGHRQFPATPAGYAGLLGWLCGFGPLARVGMEGTGAYGAGLAHHLQTAGVELVEVDRPDRTTRRHRGKSDPVDAEAAARAAQAGRAVGVPKTRGGPTDALRSLRVARRSAVAARAQAQTQMKSLIVTAPDTLRTSLRELGNRELITHCATRRPDRSTATDPATATVLALRALARRHQHLSAEISELDTLIGPLVAALNPALLATAGVGVEVAGQLLVTAGDNPQRLVSEAAFAMLCGVAPLPASSGVTVRHRLNRGGDRQANSALYRIVLCRLHWDPRTRAYAARRTTEGMSKPEIIRCLKRYIAREIYTALLNPHHPTGTA

SEQ ID NO: 388193 - protein, 436 aa, unidentified
MNNAIEKQNVPERKSTQDILLWVGVDWADQKHCLVSSLPEGSDRKLHWVDQKAQKLDDFFLELRKKHPTGRIGVVLEQSRGALLYALLKYPFLRLYPVNPRCLADFRKAMVASGAKGDPSDADLLCELGCKHGERLRELELEDEATRQLVLLNEHRRGIVDEQTRLSNQLGSTLKCFYALILELFADDIVAPLALDFMERWPNLAVAQKAKPGVLRSFFHKHNSRSEEKIQERINAIRDARSLTEDAAVISCMQLLLQTLIARLRTVQSSIARYDEQIRVVFAGHAKAQVFASFPGVGPVFGPRLAAAFGTSLANFPDPYSMLCWSGVGPVQIQSGKTKVVNWRWARPKFLHQPFVEYARTSVLFCPWAREFFKFRTERGWGKFRIYRALAFKWIRILWRCWKDNVQYDEAKYLAGLQKRGVQLYASLYAAPATKT

SEQ ID NO: 388194 - protein, 402 aa, unidentified
MNAVGIDVSKGKSMVAIMRPFGEIVSAPFEIKHTASDIHSLVELINSVEGESRIVMEHTGRYYEVLAHQLLEANLFVSAINPKLIKDFDNDSLRKVKSDKADAVKIARYALDKWQNLKQYNVMDELRNQLKTMNRQFGFYMKHKTAMKNNLIGILDQTYPGVNTYFDSPARSDGSQKWVDFASTYWHVDCVRKMSLNAFIDHYQNWCKRKKYNFSQSKAEEIYGKAKELVPVLPKDAITKLIIKQAVDQLNSASTTVESLRTLMNETASKLPEYPVVMAMKGVGTSLGPQLMAEIGDVSRFTHKGAITAFAGVDPGVNESGSYEQKSVPTSKRGSSDLRKTLFQVMDVLIKTHPQDDPVYQFLDKKRAQGKPYYVYMTAGANKFLRIYYGRVKEYLASLPES

SEQ ID NO: 388195 - protein, 428 aa, unidentified
MNEERSRESSVAAQDIAVWVGLDWATEEHKICSYEVDTGKIQSRSLKHSAEALQQWLVDMRKQYGGAKVGIVLEQSRGAVLYALMNCDFLVLYPVNPQSLASYRKAFYTSGAKDDPDDAMLLMEMVRKHPDRFRAWKAEDEDTRTLRLLVEGRRKLVDQMTSLTNQLNSALKNYFPQALEWVGESGSLQACDFLQRWSTLSALQKVRPEVLRKFYVRHGSRKAETIDRRIGEIKKAVPLTTDKAAIMTGSMMVKAIVAQIRPLIESIEIYDQQIKQFFRKHPDRPVFESFPGAGSALAPRLLAVFGVDRERWTSAAEIQTFSGIAPVTERSGKSCWVHWRFACPKFVRQTFHEFAGSSIVWCKWAKGYYQSMRERGKPHQAAVRALAYKWIRILFACWKNRMPYNDEIFMQSLGRRGSHLVGRAAGLN

SEQ ID NO: 388196 - protein, 465 aa, unidentified
MTTGKKLWRNRKERKEWARRLQSEDPGLEVVHPHAAGIDVGNSAHYVAVRPDRDPEPVRRFECFTADLHHLADWLKSCGVKTVVMQSTGVYWIPLYEVLEDRGFEVYLVNARHTKNLPGRKSDVQESQWLLKLHTYGLLSNSFQPPAEIRVLRTYWRQRGEHVAGAAICILRMQKVLTQMNVQLANVISDISGLTGQTIIRAILNGERDPLKLAALSDWRVHASQEEIAKSLEGNWRPELLFVLQQEVDMYDTYQRRVTECDQQLQKHLSTFAGTLAVQAPPKGKAKTKKAAAKNAPRFDLSSELQRITGVDLTRIDGIDVMVSQTILSEVGLDMSRWKTEAHFSSWLGLCPDNRISGDKVLGRGTRRVVNRAATALRQAANTLLRSRSYLGAQFRRLRTKLGAPKAITAMAHRLARLVYRMLKYGQAYVDKGTEYYEHRFREQQIQLLTRKAAKFGLQITPIQA

SEQ ID NO: 388197 - protein, 343 aa, unidentified
MQTVTTIGLDIAKSVFQVHGVDADGNVVLRRQLKRRYVLAFFQKLPPCLIGIEACASSHYWSRELQALGHTVRLMPPAYVKPYVKRQKNDAADAEAICEAVTRPNMRFVPTKTQEQQSCLTLHRTRHLFIRQQTAVINSIRAYLAEFGIVAPVGRSGVETLLEVVANANDTRLPEIARACVAALGTQLLGLKTQILAFDRRIMAWHRSNEMSKRLDEIPGVGPALATALVASVADPKAFRSGRDFSAWIGLVPKQNSSGGKDKLGGISKQGDRYLRSLFTAGALAVIRYAKIHGTKHRPWLTALLARRPTKVAAIALANKMARMAWAMMTKDERYKEPIALAA

SEQ ID NO: 388198 - protein, 316 aa, unidentified
MLYVGIDIAKNKHDVTALNVQGKTVLKPLTFSNNKAGFELLDLSFRQLNQDCLIALEDTGHYAFNLLNFLHEQGYKVYTYTPLLIKEFAKSLSLRKTKTDKKDAHGIALKLLSDPNREQFQHDNRQVELKILARHIHRLKKKQSDWKVQYTRCLDIIFPELDKIVGKYSEYTYQLLTCYPNPQKRLEAGFDKLIEIKRLTASKIQDILSVAPRSIGTTSPAREFEIIENIKHYKRLIDKAEKCVNDLMAEFNSVITTVTGIGNRLGAVILAEIQNIHAFDNPAQLQAFAGLDSSIYQSGQIDLAGRMVKRGSPHLR

SEQ ID NO: 388199 - protein, 446 aa, unidentified
MAQRNRAFSRAGLQVTHPDAAAVDVGGATHYTAVRPDIDDPVRSFNCYTADLNAMADWFEQCGVKIVAMESTGVYWIPLYEVLERRGFEVLLVNAREVKNVSGRKSDVLDCQWLQQLLTFGLLRGAFRPADHMCALRSLCRQRARLLRDQGRYVQHMQKAMTLMNLQLANAISDVAGVTGQKIVRAIVDGERDPQVLATYRDCRVKATEQEIAASLLGNWRDEHLFALKQALGAFDFCASQLAECDAEVQRALTLLHAHDGTPAPGKRRSRSRNAPKFDVREHLFKVCGVDLTRIDGIDTTTAMTVISEIGVDMSRFKTVKHFCSWLGLCPGTKISGGKVLGKASKRSANRASQALKLAAAALRSSRSALGAYYRRMCARMDKGKAVTAAAHKLARLVYLMLTRGEEYVDQGQQYYEERYRERVVRGLAKKASELGLQLVPSAASA

SEQ ID NO: 388200 - protein, 356 aa, unidentified
MEKLTTVGIDLAKDVIAVCVLDVHGAAMERRVFRREAFERWAEQLPASNVAMEACGSAHHWGRWFAARGHTARLIAAEFVVAFRKGGKNDTADAEAVAIAARQPTMRFVPIKSVDQQAILAWHSVREGWKEERTALLNRMRGLLAEYGVVIARSADRFLAALPKLSEDSRLPDPVRALLLEAREQFAALHARLARCDAQIAAHARNSAAARRAGELLGVGPITSSALIATVPDARVFKSGRQFGAWLGLAPRQHGSGGKTRLGRISLRGNVYLRTLLIQGARSTLQSAINTEPSRASRLQRWIIELYARKGYYKTLIAIANKHARMLWAMLAKDQRYDAAAWQRHPMHQPPLAGNA

SEQ ID NO: 388201 - protein, 359 aa, unidentified
MQRKELSFKGQKIFIGIDVHKDSWRVAIVPEVGVVKGHSGRPSANDLLNFLKKHYPDGEYHAVYESGFSGFSTYYALQEVGIDCIVIHAADVPTTQYEETMKTDKVDAVKLVKSLKAGLLTGIYIHKRDDIDARAVVRLRKTIQKQLGGYKSRVKHLLHSNGVFFPERFSKPGSHWSKAFINWLKKEVVLLSSTRTSLDLLIAQVESIRQTLLMATRKVRELSRSERYSNDYELLTSIPGIGISVAMTLLTEIGDFRRFRNEREFASYLGLVPTSHSSGGKVSHGEKTFRGNKMLGPQIVEAAWISIFRDRGLGCAYISYKKRMEPQEAIVRVARKLSNIIFSVLKTGRKYEPYQWNEI

SEQ ID NO: 388202 - protein, 464 aa, unidentified
MKTRLQNQKKKKEKVNLDSLPLLEPNAAGIDIAHREHWCAVPSDRCEKPVRPFGTFTEDLEKMADWLQECGIQTVAMESTGVYWIAAFQVLERRGFKVLLVNARHVKNVSGRKSDILDCQWIQRLHSYGLLNASFRPADSMCVLRSYLRYRDDLVGARAVQCQHMQKALQQMNVQLHQVLSDVTGLSGLRIIEAILAGQRDVKKLAALADRRVHASQATIQKALQGDYRAEHLFVLQSALDLYQSYERKIHLCDEQIIAQLAQLPARVDLAEKPLPPRKPGRPWLQDMVAGTDLREELYRRTGVDLTAIEGIGVLTAQVVISEIGLDMKRWPSEKHFCSWVGLCPDNRISGGKVLSSHTRHVLNRVADALRIAAATLQRSKTALGAFYRRMRARLGAASAITATAHKLARIIYRLLKHGELYVRQGMEAYENKYRERLLHNLKKTAASFGFELTPTQQLPPSVS

SEQ ID NO: 388203 - protein, 337 aa, unidentified
MAKEKAVRWVGVDVSARWVDGSRAAADEPVSARQFANTPAGHGALASWLTQGGRRARVVLEATGLYSLDLALRLQRTARIEVMVINPRASKEFAGAWGQRARTDASAAQGLREYAARMPFTPWTPPGPQALALRTIMRRVVALIEARVQERNRLHALSATEAVPAVVRTDIRQHIRTLERRIARLEHEARALVEPAPALRAGFRHLCSVKGIGRRSALMILAEVAVLPGELTARQWVAHAGLDPRPIRSGTSVHPPVRMSKHGNVYMRRSLFMPALVAVRRNPAVQRFATELTARGKAPLQVLVAVMRKLLHAIYGMLKTDTDFDGEKFRRSAHAEG

SEQ ID NO: 388204 - protein, 346 aa, unidentified
MLHAGLDLSRRKVDVCLLSTQGEIVDEWASPPDADGLRGLAARAAMRGPAVRGVIESMNGARFVHDRLEEHGWDVLIADATKVKGLAPLACKTDKIDARVLATLSARDLVPEIWLPDPSIRRERELARFRLHLVRHRTTLKNRIHAALIAFGHPCPVSDLFGHAGRELLNRLAIPDPWRRNIEVSLRLIDDLELQIAQLTVQLKRQGADHRYIPLLVTAPGLGWINAFTVASEIGDIGRFASPAKLCGYTGLCPRVIQSGASDRRGPISKHGPKYLRWALFEAALNACKHPYYAERYQHTKRRLGRQRGPKVAQIELARKLTEAIWHMLTNNQPFAPAGAPFRLAA

SEQ ID NO: 388205 - protein, 411 aa, unidentified
MNDSGKRYIGLDVHKHYLIALGVNEQLNMVLPARRVELSHLESWMKKTLTRLDEVVLEMTTNTWQLYDELAAYAGSVTVVHPPHVALITRSQVMNDKIAASILARLLAKGLLVGIWVPPQEVRELRGLVAQRRKMTHLATQAKNRLHAVIQRHHLLPPEGNPFRESQKDWWLALPIGQLEKINLQSDLETLHFAETQLARLSAVMNKIAAQDEQISQLMQLAGFGVITAVTVWAAIGNIQRFVEPKHLVGYAGLGARVHDSGLTTRTGRITKAGRRDLRMVLVEAAQIAANTHPHWKAELARLEPRLGRNKAIVAIARKLLVAVWYILSKQVTDRFAEPAAIAQKLLKFAYQIGKNNRPAHQSAAQFVRQRLDALHLGSELTSISWGAKKPIPLPPSAWQEKERSDVPNLS

SEQ ID NO: 388206 - protein, 413 aa, unidentified
MDVLHPRCCGLDVHKSSISACILLREAGRVQKHRRRFGAMTQELQELAEWLRQFGVSQVAMESSGVYWKPVWNILEGQFTVVLVNAQHIKNVPGRKTDQKDAEWIAQLLQYGLLRPSYVPCEIIRDLRDLTRMRASLSQEASRISSRIQKVLEDANVKLASVATSVLGKSGRAMLEDIISGEDDPEHLASLALGHLRVKIPQLRLALEGKIRSHHRFLLRRLVDQIQFVEHEIALLDERLEEIAQQRPELSQAVARWDTIPGIDRVAAWALLAEIGDNMAQFPSAEHLASWAALCPGNHESAGKRLRGTTRQGSPWLGRMACQCAWAAARTKNTYLSSQFRRLAARRGKKRAIIAVAHTIIVIGYHLQKKQSNYEDLGGNYFDRIHSDGLKRYLVKRLQQLGHKVTLEPMEAA

SEQ ID NO: 388207 - protein, 340 aa, unidentified
MLYIGLDVHKEFCQACVIDESGRALSNERFSSTNEELDRFLDRFQDAKFVLESTGIWEFIYEGIERRGFEAVLAHPLKVRAIAEARVKTDKVDAETLAQLLRADLIPRSWIPPKDIRDLRQLVRQRAYLVRQASRFKNRIHAEILRRGVRRPENLKTPFAQRSIRWMRSLDIPTVTSCLNCLESVQVQVQEINAQLLVEFERRGDAQLIATVPGIGFYGALLILAEVDDVRRFHHPEKLCAYAGLVPTVSQSASSVKYGSISKDGSAYLRWILTESVHVHTRYEPGSQLSRFHARIAKRRGRRVATVATSRKLLRIIYWMLIRHEPFHSHGFNPVKRLHS

SEQ ID NO: 388208 - protein, 402 aa, unidentified
MNFFVGLDWASQAHAVCVLDVAGQVCWQGSVEHSAEGLAELRRRLARFGPPASLPIAIERPSGLVVDTLMDAGHPVVPIHPNALKASRPRYSAAGSKSDPGDAFILGDLLRTDGHRFRPLQPLSDATRALRALVRSRDDLVAARVALANQLRALLDCFWPGAAAIFADVDSPIALAFLSRYPTPHSAERLGEKRLTRFLVQHAYCGRRPVPELLTRLRAAPIAQTGELEAEASGEVVRALIAVLLPLVSQIQQLSAAIAAALPQHPDGPLLQSLPRSGSVNAAQILAELGDDRTRFSTDEQLAAEGGVAPVTHESGKHRAVSFRWACNKRLRQALTTFADNSRHASPWAAAIYAAARRRGCHHPHAIRVLARAWVRVLWRCWQDHRPYDVMLHCAAQRVAAA

SEQ ID NO: 388209 - protein, 347 aa, unidentified
METTYYSGIDLHKLTSHITTVRADGSLVKEANLKNHASLITAYFAGLPGSHQAVVESTSNWYWLADLLHEQGIDIRLAHAKYVKAIAYAKVKTDKVDAHTLAQLLRTDLIPAAHQVSPRRRAHRDILRTRLKLVHRKTMAVNATHLLCAKFNVKDILDLPPAYQLQAGCHLRQVELLDQEIKTLEEALYPELVPDADIQRLIQIPGIGRIVAFTVMLEIDTIERFESEGQFLSYCRLVPSARNSGGRKRQQTSRDGNRYLKLAFSHAAVRAIQFYREIKDFYRSKKRKKPDAVARTLVAKELARIVFYMLKKQENFNGCFKGKPLSRTKALPAVFNRSWPLRASPAA

SEQ ID NO: 388210 - protein, 375 aa, unidentified
MKNKVRFLGFDVHAETITVAIAEPDGEVRSLGTIANRAESIRKLVKKLGPSEQLKACYEAGPTGYVLYWQLAELGVACEVIAPTLVPMKAGDRVKTDRRDAERLARSHRSGDLTAVWVPDEGSEALRDLVRAREAAKADQLRARHRLSKFLLRTGRRPETKIKLWTGVPMTWVRQLRFEHPAQESTRLDYLHEVEHMAERVLRLEQAITDAIKLATPEMQEVIRGLQALRGIAEISAVTIVSELGTLSRFENARQLMGYSGAVPSENSSGKRVQRGSITKAGNAHLRRIAVEAAWSYRLRPGIGPRLRKRQENVPEEIKEIAWKAQIRLTKRYARLAAAGKDQRKIVTAVGRELLGFIWAIGIKAESAAMQKVAA

SEQ ID NO: 388211 - protein, 391 aa, unidentified
MTMYFVGIDISKYKHDCCIISAANQKVVSKFTFKNDKSGFEQLNLILNSLSTPEDIKIGFESTAHYALNLELFLENANHSFMEINPVLIKDFKKSQTLRRTKTDSIDCELIARWLMTVEYKPHSKGFYHSYSLKSLTRLRDRLIRQRSFYLVKITNVLDHTFPEFKPFFNERLSKTAIYLLENYGSAEKMAHMNSASYDKLRCASRGKFSIQQFLRLKELAANTVGVNNSIFDIELNSLLTLYNSLCKEIKTLEAEITKLIEEVHPHYMSIPGIGPISAAVIYAEYGDISNFSNPGQMLAFAGIEPGINDSGTESHGGRMVKHGSSQLRYVLLNACLPLIRFDITFATYYAKKRAEGKKHRVAITHVAKKLIRVIYALERQDVDFNVQKLR

SEQ ID NO: 388212 - protein, 381 aa, unidentified
MRTAYVEQHSANEPVLAVALELARASWKVALSDARRAPRLKTVDAPQPLARLEQVVQTIAETRALWALPASARVVVVYEAGQDGFWLQRALQARALEVLVIDPASLLMARRRRLAKTDRLDALRLVEALLAWLRGEQRRFQVVCPPSVEDEDRRHWGRERQQLQRELQQHRNRIEKLLATVGCWTRLDRAGRQQLAEGTLQDWAGQALGAALQARLQRELQRWQEARTQLRRLEHEHAQRFGTRQAEQVARLSQLRGIGTVGARQLVLELFWRQFRNRRQLGACVGLVPSPYDSGTLRVDQGISKQGNPRVRALLVEQAWLWLHYQPNSALSHWFAKKAGGDCRRSRRVAIVALARRLVIALWRYLERGELPAGATLKAVP

SEQ ID NO: 388213 - protein, 343 aa, unidentified
MTKISMIGLDLAKNVFQLHGVDASGAVVLKRQLRRAAVEKFFAQLPPCLVGMEACGSAHHWARVISRYGHEVRLMPPAYVKPYVKRNKNDGRDAEGVCEAVSRPTMRFVPIKSIAQQATLAVHGTRALLVRQRTMVANALRAALSELGIVAAQGYEGLRELMARLEEPSDEIPESMRGALVVLARHWQALDADERVLEQQIAKAVRCDRDAKRLMEVPGVGPIIASTVLAKVPDAKMFRSGRDFAAWIGLTGKDHGTGGKHRPGRISKQGDHVLRALLISGASAHLRQQMARGVSDPWLRDLLARRPYKVAMVAFAAKTARIIWAMLVKGEPYRDRASAPAAA

SEQ ID NO: 388214 - protein, 455 aa, unidentified
MYLPDWKWIPIRKGLLLMSNKVIFNLDELFISVGIDVGADFSWMSIALPNQQFVGKPYKILHNSIDSLTTAVSKIKEAEELYSLESRIFLESTGIYHYPLFCYLRDKGFNCSVINPIITKNSTNINIRKVHNDRFDSKKAALVGLKPDLKVSLMPSDLALNCRNLCREYYDLMDNRSAYVNKLQGELRMAFPQYLGIFSKVTINTSLTLLETYTSPSAFLKADKQEIIDIIKSTARFGLTYAQNKYNAIIQAATDANQFGYIIDSNIKRIRLYISFIRKYDEEINSILESLHELVDANEDSDFVKQIHLIETFKGAGFLSAVSIMGEIGDFSAFSKPKQLFAYFGLDPAVKQSGKFEGTKVQMSKRGSAIARRVIHTLTLQSISISRNREAKNPVLREYYLKKCDSKPKLVAMGAVSHKVCNMIFAILRDNKPFKIIAPQEHIKQYNAAKCDIAA

SEQ ID NO: 388215 - protein, 366 aa, unidentified
MKKISTVQADGNEILKEQKLTIGVDLGDRWSFYCVLDEAGQIILEQKVPTTAEAMKQTFSRIPQSRIALETGTHSPWVSRLFTELGHEVIVAHAQKVELITKSNRKDDRHDARTLARLARIDPELLGPIRHRSVQAQIHLTVIRARAELVSARTALVNAARGLVKSYGQRLPKCGTQQVSRELAAALSTELRDVLEPLLKEIESLNEGIKEYDARMEKIAKEVYPEVSLLKQVKGVGTQIALTYVLTIEDPHRFLKSREVGCFLGLRPGRRNSGESEPQKRISKAGDRYLRTMMVQGAHYILGPFGADSDLRRWGLKLAERGGKNAKKRAVVAVARKLAVLLHRLWVSGEVYEPLRNSQKAMRAVA

SEQ ID NO: 388216 - protein, 347 aa, unidentified
MDITTVGIDIAKRIFQIHGVNKNGKTVLKKKLMRDQVLIFMSNLPKCLVGIEACGGANYWAREISKLGHEVKLMAPQFVKPYVKTNKNDQADSEAICEAVSRPNMRFVPVKSVEQQDILSIHRVRERLVRNRTALANEIRGLLLEFGIAIPQGINKISTKLTEILDEGTLSQLSYQTFSELREEFLDNDKKIKELEKRLKIIASGLDRYKQLTIIPGIGLITATALIASVGNGSCFENGRQLSAWLGLVPRQNSSGGKEQLLSISKRGNVYLRTLLIQGARAVLNAKLRFTTEDQRARKDYSKFTEWMFNLSERRSHNIAVVAVANKLARVVFAVLSNDYNEYKVCS

SEQ ID NO: 388217 - protein, 323 aa, unidentified
MTNIPKSYIGVDISKNYLDVCILPNQNEFRIKNNADGFKQLFIQLSSHDVEQVVCEATGGYENAMIKALKSANYNTWQVEPGRIKAFIKSKGIRAKTDKIDAMMIAQFAQQNKCPHDKPILSDHQDQLRCLAERRYHFIKMIKAEKTRLQQQFEFVQKSLKNHIQYMENEVDELDKQMMDIIAKNDVLSKKAAILQSIPGIGNMTTSTLLATMPELGVMTNKQAGSLIGVAPITFHSGKKKEVAYTRGGRSLPRHALYMPALNACRFNDVFKSFYNRLREAGKSPKVAIIAVMRKIIETINAMLRNETKWNPIPLTTVVINED

SEQ ID NO: 388218 - protein, 350 aa, unidentified
MKIVGCDFHPSYQQVAIFNTETGEVEDKKLIHATGEAEKFYRELETPALVGMEATGNSRWFELMVEKLGHQLWIGDAAKIRASYVRKQKTDKRDAGHILKLLVEKRFPRLWVPDVRQRDMRQLLTHRHKLVRVRTRLKTELQHLALNQGIQKKRQLWNEKGRALLASLPLQGWAQQRRKDLLQLLELVEPQIEQLDKAVQQAAKADPQAVLLMSQPGVGPITALSFSVTIGDVSRFERSKQVSSYLGLIPTEHSSGSKRRLGSISKQGNVFLRALLVEAAQSVVRHDPGFRKEYQHRCHHKEKGIAKVAAARKLAVRLYWMLKSNKSYTELVLNGGSPRHPVAAKAKPLS

SEQ ID NO: 388219 - protein, 418 aa, unidentified
MTVTHSIPSTLLVAIDISKHRHEILNGIPGKKRRRRMTITNTRDDFQRLVTALASYELPVRVGFEATGNYHRPLTHHLGRGGVDLKLVSSVGLARTREALHNSWDKNDPKDAQVILHMLEIGAVQFFHDPLVTGIADIQELSKTHEIVSRSKTELWHRILTHYLPLYFPEAERFHRSSRTDWFLAFLEKYPTSHMITAMSREAFVADAWQVVGRKVSKERLLSDIYATAVGSVGLPVHPESDAVRMFRLVLAEGRSLVRQRNEIEVRAVELLSDLPDYQLLTTIPGIGPINALTILAEAGDLRRFRHHRQFLKFCGMDLATVQSGMFRGQSRISKYGNARLRRTFWMAGQVAVLKRTNSFRDKFERYIARDRHNAHLRRKAYTAIAAKMARTVHAVVKHGETYRPFFEGVSPGGRTLV

SEQ ID NO: 388220 - protein, 410 aa, unidentified
MEVLHPRCCGLDVHKATVVACVRRVIDGKAVKESRTFATITSSLFALSEWLTETKCTHVAMEATGVHWKPVWHILSDGDLELVLANAAHIKNVPGRKTDVKDAEWISDLLAHGLIRASFVPDTQTHEMRTFLRTRKQVVREKSSHIQRIQKTLEDANIKLDSVITDIMGLSGRKMIEALIAGEKDPAKLASLADHRVKASQGTLREALRGRVTRQHRFLLRLHLDQIDAFDEAIAKIDREVEASIAPFRTAVEQVSSVPGVKDLSARVIVSEIGTDMSRFASDAHLISWACLCPRNDESAGKRRSTRIRKGSPWLKTTLVQCAWAATRTKDSYLNAQFHRIKARRGPKKAIMAVAASILTAIYHMLKDGTFYQDLGPNHFDPRTKERQKNRLIKRLADLGYAVELVSQAS

SEQ ID NO: 388221 - protein, 345 aa, unidentified
MESDVGAVLTRAATVRKDALKRPLTIDRETGEVVDRQLKRGAFLEHFANREPCLIGMEACGSSQHWARRLSELGHQVKLMPGKLVKAFVTGNKNDVADARAIWAATSQPGIKTVAIKTEAQQAVLALHRMRQQLVIFRRSQSNCLRGLLSEYGEVMALGRAAMSRAMPDVLARLESRLPAVLIDSLREQWQRLSNMDEEIARIERRLRAWLQESDACKAIADIPGVGFLTATAAVAAMGNAKAFKSGREFAAWLGLVPAQIGTGGKVRLLGISKRGDRYLRTLLIHGARSVMKHVKDAESWAAKLRQRRPLNIVIVALANKMARTIWALLAHRCSYRADYTAAIA

SEQ ID NO: 388222 - protein, 412 aa, unidentified
MQDILECCCGLDIHKESIVACLLKGPVNKQPSSEIRVFSTLLSDLDSLKAWLVEENCMHVAMESTGIYWVPVYETLETAFDGRMSLIVANARHMKNVPGKKTDMKDAEWIATLLRAGLLNGSFIPEKDIREARDLTRYRKSVISDITSQKNRIEKFLQSCGFRLSSFISDIFGASGSAIIKHLYTHGSITIKDLDSCLKTQTRRRINEIMQAINGRLDKHQMQFLKMMFGHLESLKAHLSEVESQINSFICKYDHQIELIDGIPGIDKTAASTILAEIGTDMSKFKTAEHICSWAGLSPGNNESAGKKKRVNINKGNPYIKCILCEVAWIITRQRKSYLCAWYWRMKQRKGAKKAIVALARKLLVIIYTMLKTDTKYNENCFESRRLQTEKKRVARMVYELQKLGFEVKQPA

SEQ ID NO: 388223 - protein, 398 aa, unidentified
MEAARGVVLGFDVGRYSHHMTAIDARTGEVVASRGVEQTEPDIREAIEPYALGDAAVVVDQPGDLSSLLLAVARDMGLGVGFITPRAMAKGIELYGGELKSDAHDSFVIADLAARIPSLVRPVPERRADVEELASLMSYDRELTDDVRRAASRIHELPLATCPALGAVYAGQRVKQRLPLAMLARFGGAGGLSAAGRGEVEGWARGQPRCGARGLAFVGSALDAVGSQGVATTSSPFYDELLRIEAASLRSALDAREAVGARVDELLGRIPDAQVLLSMPGVGRVTAATFVSEVPDVGAFASAAKLAAYAGLAPRVRQSGRSLNSVTRPRAGNRRLKRALVLSAARSVDFCEESRAYYDRKRSEGRCHYSAVVALARRRINVMYAMLRDGKRYESRLG

SEQ ID NO: 388224 - protein, 404 aa, unidentified
MANNSLIGKSAVRLADKAGAGEASVASRANTSRQREFGRVQVFKAVTEQEPRRHRGTSPNSRLNRPSVFLSKTRAGASSYLQVWEKTMSEPVYVGIDVAKETFHVATCPNVLKTQLPNTRKGHRQLSQSLKNHTIALIVLEATGGYERPLTAELLSDSLPVVVVNPRQVRDFARGMGQWAKTDPIDAQVLARFAQIVKPAPKTHSTPQTAELSELVRRRRQLNDLRTQESNRLLMIHHPKVKKSIQKMIKTLNFQIDEIDRLIREHIDSDANFKNKDRILRSTPGVGPQTSAMLIANLPELGKLNRQEIAALAGLAPWDRSSGKSNSKAHIWGGRKEVRSVLYMAAFTACRFNPVIRALAERLKQKGKAYKVVITACMRKLLIILNTMVRNQTLWTPEKSVKNT

SEQ ID NO: 388225 - protein, 450 aa, unidentified
MSTLETVQPTPAAAPTPEYAAHIGLDWADQKHFWTMLVAGKKTRGQLNNTPEAIEVWAAELAHRFDGRPVALALEQSRGAVIAVLSKYAHLVLFPVHSTSLANYRKSFSPSGAKSDAVDGDLILDYLVKHPEKLRCLRPDTVPTRSLQFLTEERRKLVDAHTATLQSLIHWLKQVFPQIVRWFDDPGAPLVADLLIRWPTLQKLQKANPKTLLKFFHQHNCRSAERTQERLEQIRQAVPATNDPALLQAGILSIQNAARILASMRQGIAEFDRQIEVTYQAHPDRFITESLPGAGPALEPRLIAAAGSLRDRFESAYNMECCFGIAPVTEGSGNSLWIHWRWACSKFVRQTFHEWAACSIRTCDWARQFYDRQRANKKDHHAAVRALAFKWIRIFFRCWHDRVAYSDQRYEEALRTRAAQAKPAKTGDKVDFNVKWKSCAGFSKIDKVSS

SEQ ID NO: 388226 - protein, 340 aa, unidentified
MGDITTIGLDLAKSVFQVHAIDEAGSVVMRKRLRRSQVLAFFAKVPPCLVGLEACGTAHHWARELIALGHEARLMPPNYVKAYVKRNKHDVADAEAICEAVRRPSMRFVPVKTAEQQSALMMHRARDLLIRQRTMLVNALRGHLAEFGLIEAQGLHKVTRLIAIVMDETDGRVPDIARQVLKVIVNQIEDTQTRIAGLETQVIAWHKSNPVSQRLATIPGIGPIIATAIAATVADPNIFRSGREFAAWLGLVPRQTSTGGKARLGGISKRGDSYLRRLLVNSAHTVLLCSKQAKNDPWLTSLLSRKPRLVAAVALANKTARVVWAVMSRQDTYRHAAVAA

SEQ ID NO: 388227 - protein, 372 aa, unidentified
MKKVTRWVGLDVHAETIAVAVADKDGTVQSVGTIPNRPEAVRRAMKKLESGGKLHACYEAGPCGYGLYWQLAEMGIECDVVAPTLIPVKTGDRVKTDRRDAEKLARLLRSGDLTAVWVPDAEQQALRDLVRARHAAKRDQLRHRNRLGKFLLQLDVRRPEKVVAWGTKHMTWLDGQTMVHASHQEVFVDYLNEVKRAKERIDRLEKSINEGIDRAPKHLQELIAALQTLRGVAKIGAATLVTEVGRFTRFESARQLMAYVGVVPSEHSSGGSTHRGSISKTGNARMRHVVGEAAWSYRHRPSNGPALKKRQEGQSEDVKAIAWKAQHRLHKRFQKLSAAGKHHGRVVTAISRELLGFVWAIGCKIEAALDAA

SEQ ID NO: 388228 - protein, 345 aa, unidentified
MESMYYIGLDVHKKTISYCVKDASGQVLQEGKIGATRGELDSWMKTLPQPWSVAMEATIFTGWIYDHLLPHAAQVKVAHPLMLRAIAAAKKKNDRIDAGKIADGLRCDFLPECHMAPTEIRDRRRTLRYRHLLVRQMVQLKNRVSGLLMETGVSYSKQRLHKVGYFRELLSSNEEIHSNIRPLLKLSRDAIVRLQKTEYALVSSLQRDPLLADRIKRLRTVPGVGPITALTWALEMGEVSRFPSIKQAISYCGLCGDEKSSADKVIRTPLSKQRNKHIQRVLVEAAKLAPKENHELALVYETEKQKGNANRATLAVARKMVAYLLAVDRGQRDFVPAEDHRGAAA

SEQ ID NO: 388229 - protein, 480 aa, unidentified
MNVKARRTKKQVNVENQAIMLLSKEEWDRKIEVIKKELRSYTWRDLETNGKFAKNDKLSFITDDMLIAGCDIGSETHYIRAIDVRGRELSSGAFEFSNTSEGFANAKAWVLALAAKNDKKQIVLGLEPTGHYWFALAAWMISNGISVVQVNPYAVKQSKEIKDNSQLKDDRKDPKLIANLVKDGNYGMPYLPEKVYADMRRLSMFRDQLTEDRIRNINRLHRELKIYFPEYMDAFGKIDGAFTLEVLKVSAIPSDITALGAEGIKNIWHNVKLRGRGYSRANEIVSYAEKSVGLTDGTDAGREAIKWYAEQILRLDEQLAEIESVLHEKCREIPYAENILAINGVGENILAGILAEMGDISRFDDVKEIQKLSGMGLVACSSGKHKGQTKIRHRGRKRLRYWLFQAAKSAVSHADEFKQLHGYYTTRSNNPLKKMQSLVVIACKILRVIYTILKTGTTYDPQKLLKDIKHSAASQVPMAA

SEQ ID NO: 388230 - protein, 372 aa, unidentified
MSHMSELNTKTIVAGIDVHKYSHTAVAIDCFGQKLADHEFSNDYLSEFVAWLDSLGARENLLVALEDVNGYGGHIVKRLANENILMRYVPGILTERRRKQSIHREKSDPADAMRVAKVILTNYEETLPAKESIADPGERSAAANLDFFLAERRSLVAGQTILKNQLHALLHQYWGDHYADNFAKAFNPKSMAYYQKNLKPKNMADPEQPALAMSIKRRLERLKLLVSQIREIDAAMRTAAKDCQPVQALRQNLKGCGQITACALLAEVTTIKRFRTKAQFARYAGIAPIHKSSVSHKRLYTSPYGNRKVNRALHTIALYQISRADGLGRLYYEKKLAEGKTKLWALRCLKCQLANRVFQTLKHEYESRIKPV

SEQ ID NO: 388231 - protein, 343 aa, unidentified
MTNFVGLDVSQKITSICVVDDAGRRIWRGQCASRPDDIERIVRKQAGGDARIGIETGPMTPWLVHELRRFGLDPICLDARHARAALRMQLNKTDANDAEGLAHIMRTGWYRSVHVKSYVAHRARALLGARAQLVGMITRLSNHIRGVLKIFGLLPGGMRGLSFATRVETLLADRPDVIPIVSPMLAAWRQLRAQVTAFDKAVHAIVKSNPDCRLLMTVPGIGTLSVLAYVSAVEDPERFRRSRSVGAPLGLTPRQYQSGEVDRSGRISRCGDGLTRTLLYEAAVVILYRVKRSSPLKDWALAIAKRGGAGKARIALARKLSAILHSIWRSGVPFRWAEGSVPA

SEQ ID NO: 388232 - protein, 426 aa, unidentified
MRVMYERVAGIDVHKDMIKVGIRGPGHRAWTRKSEVLEYRTFYGVLLTMAADLRKRGVTHVVMEASGVYTEPVYYALAGQGFEQVAVINPAHAKALKGHKTDAKDALRLAELFECGLLRGSYIPSQELKDLRDLTRYRTKTVQARTSEIQRLAKALESAGIKLDSVVSELTGKSARLMIEGLIDGERRGQVLADLAIGRMRTAGKLADLSAALTGRFTDHHAALCRLHLDRITLFNAAVGGLEAKIAVRAAPYRRELDLLKSVDGFGDTVAHAWLAEIGPAPHEYFDSHEKLASWVTLCPGNHMSAGKRSHGRTGNAGTYIKPMLVQAAWSAIKTPGRLQARYHRLVRRLGGPKNPAAVKKAILAIAHTLLKIAYQVLKSGKPYEDPGADFYSRRESPEQRRAYLLRQLEKLSPGCVITITPAEAA

SEQ ID NO: 388233 - protein, 319 aa, unidentified
MEAMMGMDKSIRHVGLDVHQESIDVAVADGSVGAERAWNEVRHVGQIGGDLAALDKTLRRLMSAGHRLHVVYEAGPCGFVICRHLRLQGLDCEVVAPSTIPRKPGDRVKTDRRDAMMLARLTRANELGSVRVPDEVDEAMRDLVRAREDAVREQRNARHRLKALLLRHGVRYAGKTAWTPAHLRWSATVKLAQPTQQLAFQEYMHAISESTARVSRLEGAMREQAEPWALRPLVQALQALRGVQLIAAITLVAELQDFLRFEHPRKLMAYVGLVPSEHSSGQRRRQGSITKAGNSAARRGGMALPEWSEGDAHHCQAAR

SEQ ID NO: 388234 - protein, 325 aa, unidentified
MILGIDVSKDKVDVALFDGKQAVGSGTFTNTTAGFKKLSKWLSNKGAGQSWVCLEATGRYGEKLAEYFFKADHQVSVVNPARIRKYAQSQLRRNKNDQLDAVVIADFCRTQEPVLWRPPTPQKRDLQEMSRRLDGLIEQRTRETNRLKSGQACEVVLESLQDSLAFLDEQIAKLEARIRDHIDQHPDLKQEYHLLTSITGIGDKTAGKLMAELPDINRFDRVGQVVAYAGLSPQQHTSGSSVHKKSRLTKIGKQSLKTTMYFPALSAIRFNPIVKALAARLAGRDKDKMVIVGAAMRKLLQIVYGVLKSGKPFDPNYATLSQVTA

SEQ ID NO: 388235 - protein, 322 aa, unidentified
MAMLSFGGIDVSKDRLDVLVLPEEQCSSVPNDAAGWAKLVEQLRGFSISAIGIEASGGYERGAVRALLAAGMSVRQVNPFKLRQFARASGVLAKNDPLDARMIASFVAVMPTRPAQRQTPAAERLAEMLAVRRQLSAEKVAAENASRLLEDAMLQRLSRRRIARLAADIDMLDGHLVEVVGTDAALAHRYRLLTSMTGVGMVLACTLIALLPELGGMTRKQVAALVGVAPYAFESGTLKGRRCIWGGRANVRQVLYMAAMSASNWNPGLKAFHDRLKAAGKKPKVTIVAVMRKMITTLNAMLRDDVVWADRLRGRHSVPTVR

SEQ ID NO: 388236 - protein, 313 aa, unidentified
MSQNTMTTIHTGLDIAKLNLQLHLAGRLYDLPNTAAGHRRLLKLLASRPGVQVVCEATGGYEREVVAVLQQASVPVSVLNPARVRHFARAAGQRAKTDHIDAAVLSAYGQALQPKPTAPRTEQEQQLAELVRRRVQVLEILVAQRQQAERLTVTALRRQAQSLARRLERDLVQIEGQLKALRTHAIVLDERVQKLEAITGVGTITALGVLAELPELGTLNRRQAAALAGLAPHPRESGQWHGRRSIGGGRASVRRALYMAALVAARSNRQLKEFYQRLRSAGKPAKVALTAVMRKLIVLMNHLLKNPNFALQN

SEQ ID NO: 388237 - protein, 394 aa, unidentified
MKLIGIDIGKNKHFFCIMDQQTGEIISQPISFSNDKEGFDFLIQKIKSYSKDSVLIGMEDTGHYHFALLKYLLNLQYTVALINPKTTDFNRKIQGGITKNDKLDTINICDVLDTPERKKQYRITKVNSFDLYEQKQLTRHHHNLKEEENVYKNRLQKCIDIVFPEFNKLFNSKYGIVYMNILKMFGSAENIANTDIRTIRKCFEIEGRGNRISLTPERLKECARSSIGISSSAEVIQIKHLTAQIELIEEQLTEIDKKIEEFSIQNNSPILSIPGISHFSGTSILAELGDISNYSKPSQIIKFAGVAPLHYESSQFNAQHTSITKKGSKYLRKTLYQIILPVIRHNQVFYKYYQLKISQGKGHRCAQGHCVRKLLRIIYHLLKTNQQFDPQLLR

SEQ ID NO: 388238 - protein, 317 aa, unidentified
MTQTSTLTAGIDTSKEKLDIAVHGQSGCWEVANDQPGWRKLAQLLTEAGVRRVGIEATGGYERGVVEHLRAASFIVLVLQPIQVKAFGRARLRRAKNDKLDAALIAAFAASLDEVRDAPDSRLAELTEQLTFLEQIEEDIKRFKTRLEHIDKPGLRRFVLDDIARLKARRLSQIRHIAKQIRAHHDLAVRLDLVLSIPGIGERTALALLVRMPELGRVSREEAAALAGLAPFDNDSGQYKGQRRIAGGRARLRRSLFAAALPAAFRWNKAVMALYARLTAAGKAHNAALIACARKLLIYANTVVQRGKPWAEKPIGV

SEQ ID NO: 388239 - protein, 348 aa, unidentified
MTLTIVETRAVTGGVDTHADTHVAAALDSIGGMLGVREFPATPVGYAGLLGWLGGFGTVHLVGVEGTGSYGAGLARHLGAAGVRVVEVDRCDRQDRRRQGKSDPLDAVSAARAALSGRALGVPKGRDGAVEAIRALMVAKRSARGERTQTINQARALIVTGPDELRAKFARHSPAALVAELAALRPRAGDVPGYATQIALRELARRVEFFDAQLQRLDALIVPLVTTHAPGLLAVYGVGPDTAAMLLVAAGDEPARLRSEAAWAHLCAVAPIPASSGKVTRRRFNPGGDRQANHALWRIVITRMSAHPPTRAYVARRTAEGLSKKEIIRCLKRYIAREVYPHLRPAGG

SEQ ID NO: 388240 - protein, 339 aa, unidentified
MELYSGLDLHSRNTYIGILDTDFKRIFKKRVSNNLDLILETLEPFRDQLKGIVVESTYNWYWLVDGLMDAGYGCVHLANPSAIKQYEGLKHSDDQHDAFFLAQLLILGILPQGYIYPKEDRPVRDLARKRMFLVKHKTAHLLSLQSLIARCSGHRINSNQLRTFTSKDLQQLLKEEHLILSAQANLDSIAFIKQQIHRLEKVIKNKLKLSQTFNGLLTVPGIGNILAMTIMLEVGDIGRFAKVGNFTSYCRCAPTQRLSDGKSKGSGNRKNGNRYLSWAFSEAAQMSRRYNQRFRRYHDRTAAQTNTIVAARALSNKLARVCYYIMRDQVVFNEELILH

SEQ ID NO: 388241 - protein, 387 aa, unidentified
MAQVNDLSRSLTAFDPISTLVVVVEMSKASWLVNGVVPGVERQPLKKLEPDATALLRLIERWRNEAVRAGRPISRIALAYEAGRDGFWLARWLIARGIEAHVIHSASVAVSRERKRAKTDRLDAAMLMRVFLGWLRGERGHCGMVAIPTMEEEDARRPSRERESLVDERSRITNRMKSALARLGIRGFKPHLRKAPERLAGLRTAEGTGLPANIIEEFRRDMARLALVREQISSIEKTRAERLERAPDTGPHAMVRLLARVIGIGIETADMLVREILSRKLRDRRAVARYAGLTGSPDESGLKRREKGLAKAGNARVRRGLIQLAWRFLMFQKDSALAQWYRTRTEGPSGARKTTMIVALARKLLIALWRLVTTGEVPDGVELRPAA

SEQ ID NO: 388242 - protein, 408 aa, unidentified
MVCALKAQKGRKATKEVRLFGTMTRDLLALADWLRQLKVTHVAMESTGVFWKPIYNLLEGEFEILLVNAHHIKQVPGRKTDVKDCEWIADLLQHGLLKASFVPPKPVRELRDLTRQRAEITDDKTKIANRIQKVLEDANIKLSSVASDVLGASGRDMIQAIIAGEEDPANLAELARRRLRGKIPELKFALQGTVNDHHRFMLNLLFKQLQSLESILDQLTCRIVEVMTREDAQPSEGVLPFQESVRLLETIPGIRTLAAQTILPEIGTDMSQFPTDGNLSSWAGISSGNNESAGKRRNAKTPKGNRWLRRILVQVALAAGRTKDTYLGSQYRRFAARRGKNKAAVAVAHTILVIIYHVLKTRKPYHELGADYFDRLDPERLTRKLVKRLESLGHKVTLEPAEKAMPAA

SEQ ID NO: 388243 - protein, 412 aa, unidentified
MKVEHECCAGLDVHKRTVVACVLKGAPGKQPATETKSFGTTTPELMEMVEWLKSHAATHVAMEATGNYWMPVYNLLEGHFELIVANAAHMKAVPGRKTDVGDAHWIADLLRHGLLRASFIPSREQRDLRELTRHRSSLAAKRAQASNEMQKALESANIKLQSVVSDITGVSATEMLAEMLSGNTDAKELAQLAKRKLRSKIPELEKALSGNLRAHHRLILEQLLADIALFAAQIAELDAHIEALLQKDNDDIDRLDGMPGINRRVAEVIIAEAGTDMSRFPSAHHFASWIGLCPGQNESAGKRRSGKTRKGNRALRTALVESAHGAVRKKGSYFGAQYRRIAARRGKKKALIAVAHSLAVGIYHIVKNQTGYRELGEDFFDKLNPSRVLNRLTKRIQNLGFQVQVSPIPAAA

SEQ ID NO: 388244 - protein, 382 aa, unidentified
MRTASHTPPPIVTEAATFIGIDYHKKYSVWHAVDAAGCDLGKGRIEHHSPHDFTTLVKRWPNPRVVFEASMNWHWLYEELEQHMPAERLTLANPFKTRIIAEAQVKTDKIDARILALLLRAGLVSSVHIPCKETRQRKEVLRQRCFFVRQRTMLRNRIHRLLGAQHDLKLPVCSDLFGKKGMSFLEKLELAAPAGLLLKQQLEMLKNVQQRIKEDEKALEAMMSTTEAQKHVLSIPGMGPILASVVVSEIDDIGRFNSAQKLCGYIGLCPSTSSSGGKTYNGKLMKHCNKWLRWAFVEAAWVAMGCDSYFGDLYKKKRTLGKKANTAILCVARRMARITWQLLTHGRDYQKMPPAPPPKANAAQAKTKQTFPSRSNCTLVGC

SEQ ID NO: 388245 - protein, 347 aa, unidentified
MAHFVGLDVSVKETSVCVVDDAGKVILEQQVPTEPADIIALLTSLGVPFGRIGIEAGPLSQWLVNALTAADLPVICVETRHMKALLTAQQINKTDRNDARGIAQMMRVGLFKPVHVKTLVAQQQRMLLTSRKLLQRKLLDVEADLRGTLRNFGLKVGAVSGSRYEARVRELVEGFPGLAAIAEPLLNVRVMRQQFAVLHKMLLDNRVRGDPVCRRLMTAPGVGAVVALTYRATVDQPQRFVHSRAVGAHVGLTPKRYQSGEIDYDGRVSKCGDALLRTMLYEAAQSLLTHSTKWSWLKAWGMRVAQRRGIRRAIVAVARRLAVVLHRMWVDGSEFRWRKDSAVPATA

SEQ ID NO: 388246 - protein, 419 aa, unidentified
MLAKPHQAGVGAGSQYGRAGARSERRLRRRTKLVLCRATYVEVGPMTMMQHRQIRYIGLDVHKVSITVAIAEESGAPTSYGSIANDPAAIRKLMTRLGGPEVELRVAYEAGPTGYALHRQLAKMAIDCIVVAPSLIPKQPGNKVKTDRRDALKLARLLRSGDLIPVWVPDEAHEALRSLVRARADAKADQLRAKHRLSKLLLRQGCRPPSGVRTWSQRHVQWLRQLEFEHLPDRIVFADYLAEVTAAGERLKRLEAALYQCAQSSSQVAVIRALEAFRGIGFLSAVTLVAEAGDLRRFRTAPQFMAYAGLVPSESSSGGKQHRGPITKTGNSLLRHVLGETAHHARHAPRVSSKLKARQVAVPREIVELAWRAQLRLHARYRHLSSRIGSLKALTAIARELAGFIWAAGQVLQEVPTAA

SEQ ID NO: 388247 - protein, 317 aa, unidentified
MTFAGIDVSKTHLDLALVSNSPKPTRLRFPNSPEGRQALLAALAHHNPAWVALEPTSAYHLPLLKLLAENRLQVALVNPYHLAAFRKAKGERQKTDRQDALLLARYAQVYHGELWAYTLPPEALRELKALVGYREDLAGRERTILNQMEAAEWAGSKEVLALLQKELACVKGLLGEVEARIQALLATLPEAEVLMALPGVGPQVAAAVLALLPPELWGRAKRAASYAGLIPEREESGKSVERSRLSKKGPPLLRRKLYMGALVAVRHDPEMRAFYHRLLSRGKRKKQALVAVAHKLLRRMMGRLREYYATQLDQGVA

SEQ ID NO: 388248 - protein, 440 aa, unidentified
MQVGLSCTCPYDTQETESAMDNRWYHVNLSDWRSLIMFNAVGIDVSKGKSTVSVLQPGGTVVKKPFNVVHSSRSLNDLSRFILHLDGQTRVVMECTGRYHEPILHALHDAGIFVSAVNPHLIKNFGNNSIRKVKSDPADSRKIARYALDNWASLRQYSDMDTTRTQLKTLNSQMDFFTKQKVAARTNLISLMDMTYPGVNSLFSSPARDDGSEKWLDYAESFWHVDCVRKIGLKAFTERYQAFCKRNGYNFQPGKPEKLYLASKELVAVYPKDKVYKDLIMTGIEQLKSTTRHVEHIRHEMDALASTLPEYETVLSMRGVGKTLGPQLMAEIGDITNYTHREALTAFAGVDPGVNESGSFRSKSNPASKCGSSRLRKTLFLIMTSLLQTSPADDRVYQFLDRKRSEGKPYLVYMTAGANKFLRIYYGKVKACIAAQSKAE

SEQ ID NO: 388249 - protein, 315 aa, unidentified
MSESHANVGIDVAKDTLQVAVAPGQGWTCRNDEAGIASVVERLKALQPERIVLEATGGYEQALVAALGVAGLPVVMVNPRQVRHFAKALGILAKSDPIDAEVLRRFAAAVQPECRPLADAETRELEAVLARRRQLLDMLVAERQRLALAAPVVRGDLRAHIAWLVKRVKDSDRHLREKLRASPLWRERERLFRGVAGVGRVTVQTLCAGLPELGSLDRRKISALVGVAPFDCDSGAFRGQRHCWGGRAEVRAVLYMASVSAMRCNPVIRPFYLRLKAAGKPSKVALTACMRKLLTILNAMARDQTEWNPDLHVIA

SEQ ID NO: 388250 - protein, 378 aa, unidentified
MKKNNTVKQSLKKGTKKTTKGAQESITIGIDLGDKASRHCVLNGTGEVTEEGGVSSSKKGMMQMFGALRRCRIAMEVGGHSPWVSRLLIALGHEVIVANARQVKLISTSSRKNDRLDARVLARLARMDPELLRPIRHRSEQAQLHLLEIRARSVLMEARTSLVNAARGLVKALGERIPKCDPDQLGVEKLTSLPAPLQETLRPLLEEVSSLTEKIEVYNERIEQIARNEYPETELLKQIKGVGTLIALTFVLTVGDAGRFESSRDVGCYVGLRPKQSDSGESQPQLGITKEGDCYLRTMLVQGAHHILSARGPDTDLKRWGLKLAERGGKNAKKRAIVAVSRKLAVLLHRLWVTGEVYEPLRNSNARAAEKKQRLEGF

SEQ ID NO: 388251 - protein, 339 aa, unidentified
MSKRSIQIQETLYCGIDVSAKSLTVAIRRVGHPVGQRSFPNDPNGHRALIVWLRKAKSPVRVSLEATGIYSLDLAFALDAAEGIEVAVLNPKVANRFAQTIRRSKTDAADAEVLAEYTHRMPFKPWIAPSSNSVRLRSIVRHVESLSVQSAQNQNRLHAAHGSTSTPVCVVQDLKRSVASLELRIRRLRREAMALVREDEVLRKRYELLVSIPGIAQVSAMQLLAELSTLPPDLTVREWVAHSGLDPAHEISGSSVRKASHISRAGNRHLRRALYMPALVASRCDPHAKAFFESLLARNKARLQALIAVARKLLHAIYGIFRSGLEYEGTKLFPRITLS

SEQ ID NO: 388252 - protein, 375 aa, unidentified
MAEITRALIARVGVDLAKQVIQVHAVDAQGRRVVARAFKREQFMAWCVQLPTGCVVAMEACSSAHHWARKLRALGLDVRLIAANFVSPYRMEGKSGKNDATDAAAICEAASRPSMRFVPIKSREQQGVMSLHRVREGFKEERTACINRIRGVLAEFGLVFNKSPKALRAQLADVIEDAQNELDARARWVLQRAYDHWCELDEHMRWSDRQVGQHVRSCPQAKRAAKINGIGELGASAMTASVGDFKQFKAGHQFGAWMGIVPSQNSSGGKASLGRITKRGDDYLRTLMIQGAKSLVMSASKRDDPTSRWLVQLTARVGWQKACVAMANKNARILWAVMTREAGFDAQHVSEKPLAKKTVKERMAAVVPPLGACAA

SEQ ID NO: 388253 - protein, 323 aa, unidentified
MNHKVGNDNTVARFIGIDVSKQWLDVACLPERETRRFGNDCAGLEQLCAWIVPLAPELIVMEATGGFETNVATALAARGLALAVVNPKHVRDFARAFGILAKTDRIDALVLAAFAQKVHPPVRPLPDEERRELIDLVDRRRQLVTMRAEEKTRLTQATPAARQDIKEHIEWLNERLRRLDIDLTAKLRSSSLWKTKEQILTSAPGVGRVTVATLVARLPELGTLNRRAIAALTGVAPFARDSGQHRGRRMIWGGRADVRNVLYMATVTAARINPVIRSFYLRLKQAGKPPKVALTACMQKLLTILNTMVRTNQPWQTPPTQTI

SEQ ID NO: 388254 - protein, 428 aa, unidentified
MEITRNARKINLNHIVDVSVDVHRNNLCFFFEIDGTEFSDVCRNRTCVIRKRLLAYADIAKEHGRKGLRVICEPTGQYQNKLMRMARRLGFLTCYVNAESVAKFRVVETNDSNKTDKKDPRVIGTLGKLNKVIRFRMIGEQYLMLRKLHKIYDECDVAITSFRCRIHKLLVELFCDYSFKKDFLYSRSGRALVQEYGCNPYRIVSAGWDSFCQNMKKEASGIRVTTLERLWKDAESSCLNDMPPGYVEVLEGYLGDLLDDYYRMKERKEKITKEMIAILEKLRKDDPLIPPPTPNVISEKNLARLLAETGPLSDFENWRKLMRYAGLNLRTRQSGTFQGQHKISKKGRRLLRKVLQCIALPLVKKGRLYGDYYHKKKEVNKMPGNKAMTVIARHMLRKIYGWYRSDQAFDEERFFVCRSRYRKLKKAA

SEQ ID NO: 388255 - protein, 344 aa, unidentified
MGEVSTIGLDIAKSVFQVHGVDDAGTVLIRKRVSRAKVLEFFAELPPCLIGIEACPSAHHWGRELQELGHTVKLMPPSYVKAYLKRSKNDANDAAAICEAVTRPSMRFVPIKTKQQQTALMLHRTRQLLVRQRTMLSNALRGHLAELGIVSAKGRNGTGELLRIIADGADTRVPAAVRGILDVLARQYSALGTEIGSIDKSILALHRSCEASRRLAEIPGIGPIGATALVAEIGDWKTFASGRSLAAWIGLVPKQHTTGGKDRLGSITKQGNRYLRWLLVVGAMAVIRYARKHGTQKRPWLGRLMERRPTKVAAVALANKIARMAWAIMVRGERYKEPKLLLAA

SEQ ID NO: 388256 - protein, 413 aa, unidentified
MKKHTYRAQKVNSINWQQVKEQTLGEALVLAVDVAKSQQYALLTNQDHTKSWMMQWNHLEQTFYLLEQLKTLETPISVVMESTSTYGDSLRYQCRQAGFAIYQANAKKVHDAREIFDGVPSLHDAKSAWLIAKLHKDSITKLWSEPTNEERRMNALRLEYDLHQDQHLRNQNRLEAYMSRHWPEVLALMPLGSVTLEQLIKHYGSPQKVAAEAKQAALNMRSWGKTGLSAEKIAAVIASAITTLGEPCIEAECQFLIALASELEHSRLQKQEAKQALEALVDNDEGLREMGRVIGKVTTAVLVSLHLDPRRFTTPKSYQKALGVNLTEKSSGQINGRLRLSKRGSSVARRFLYMAALRLLIKDPLIDKWYKAKKDDRAKLKTVIALMRKLPLALWHIARGERFDASKLLKIAV

SEQ ID NO: 388257 - protein, 372 aa, unidentified
MPEVSSNAPFDVRVWVSLDVHKFSIVAAALPPAGGQPEVVQIETTRAAIRRLVERLGGPEGLAVCYEAGPGGFDLQRVLCELGVACDVVAPSLIPVRAGDRVKTDRRDAKKLVRLYRGGQLSFVAPPSPQTEGLRDLMRCRDDLRRARTAARHRVSKQLLRHGRVYRDGKTQWTKMHRGWVARQQLDDELAQAALFQMLIHLDGLDRQLDALDRDLETIARGERWADTVQILTRFRGIATRTALGLIAEIGDFARFRHPRELCAWLGIVPSEYSSGDQRHRGHITKTGNHHARRLLIEAAWSYQHPPRRPSRDPTPDPRAWHAQIRLHRRYHHLTAQRGKRSTVATVAVARELAGFLWAAATHQPFPTHTTA

SEQ ID NO: 388258 - protein, 351 aa, unidentified
MREAKQIDFDGQNIYVGIDVHKKSWQVSIYTEQFEHKTFTQPPVSEKLVSYLQRVFPGGEYHAVYEAGFSGFWTHDELKDMGVDCMVVHPGDVPTTDKERRHKTDSRDSRKLAKQLRSGDLSAIHVPGVRLREDRSLLRQRKTIRKEETRVKNRIKQFLHFRGVDIPVHFSSSYWSGSFIKWLEEVSLYCETGTATLSSLLRQLASLRKELACLSRDIRELSRTAAYRDGVKYLSSISGIGVLSAMVWLTELGNIHRFNSFDQLCSYVGLVPWEHSSGESEYTVGLDRRGNKVLRTLLIENAWVAVKKDSELMLAYSQYIKRMKGQQAIVRIARKLLRRIRFVLVNEQNLE

SEQ ID NO: 388259 - protein, 316 aa, unidentified
MQSPLNIGVDVAKDEVVVACADASFTPRSIRNSRVALSAWLRHLPAGSRIGLEATGSYHQCLADLAHALGFAVLVLNPKDVHYYAKGLGRRAKTDRVDAEVIARYVAHEHQKLHTYVPPSPEQRRMEQLLRRRARLVSLRVALQATMAELGSCRAQTEAVVRHLDALVVALEAQLQRLLKHSEASRQAQQRLQSIPGVGLIVGAGLGVALQRLPFKSADAFIAFAGLDPRPRDSGKKVGRRKLSKRGPAELRRLLFNAAMAGSRTKAWKPFYLRYRQRGLATTEALIVLARKIARTAWSVFYHQTTFDPARLQALT

SEQ ID NO: 388260 - protein, 360 aa, unidentified
MTSLAALVEVVIGVDTHVDTHTAAAVDTHTGGVLAEVTVITDPDGYAELVDFADRHSAVRAWAIEGTGGHGNGLTRLLVERGEMIIELDRPERPHRRGGEKSDPLDAVRAAREAMSRSELATPRSSGDRQALSVLLAARRSAVQAAGDAKRQIFALVIAAPETLRTRFRGKKSPAMLTAAARLRVHPNWDTETVTTAMVLRDLARRAVTLTSEANRHEQAILAIVRSWRPELLDQFGVGPVIAATILCAWSHPGRIRSEAAFAKLAGVAPIPANSGKIITHWRLSRHGDRQLNRALHTIAISRLRYDPTTKAYADRRTKEGKTRPEIRRCLKRYIARDLFRLLENPPTPPSARTSLTPTG

SEQ ID NO: 388261 - protein, 410 aa, unidentified
MLFIGVDLSDKTIDSCICNSSGDVLTINKFSFDDNGFSDFVYKINEHESDNPNCIIGIENPRSRLVDFLIQRGFNVIPTHPLSISKYRESRIPSKAKSDPMDARLIADYIREHHKSLRTIRMPDDTIRELSILLEDRDKLVEQKTKFSNQLTSTLKEYFPQALDAFGSITNKSALEFLARFDTHQEVKALLAGSSKKLDDVLVECGFFRADSRERFYNAMNEKPSSISQAVIKAKVRLKNALVGHLLLLVQQIEDYEKQIQKMLDETPNGGIFRTLPGADYVLGAKLLVLYASREFSSANEAQAFWGTCPYTSSSGSMTAIGFRKGCNHFGRNAFHQLAFCSLKSSQWAKKQNAKKRKEGKRSNHALRCIANTWVKITYAMWRSKTPYDESKHLASIASHIMNQPAFIQG

SEQ ID NO: 388262 - protein, 363 aa, unidentified
MEVAGRFVGIDLGKRTYEMCIVDQKGKITRTGGKTDFAGIERLCEKLNGDDAVAIEACNLAFRMERAIRKSVGCKVCIMNAGKLAVIYMSTRKTDKEDSLKLAKLLKNHDEDELPIVTPPSDEEWERRKLLSEYRSLKCQRTKEINKLHAIFEHNGYTQFARKDMSSENNRANILPLLKDYEKGEAERLVERLNLLERQIEQLLQKINAEVENDEKIQKAMTVPGIGPITALAYVAYVGDVKRFDNAHQVSNFIGFVPKVDNSCTICRSGHTTKKGNPLLRSLLVQAAWSSVKSKNGGALRDKYKYMAETRCIGKGKSIVTIARKLGELLYLLLKTDQEYKPQKFIIPEIRISKIAEEALKCS

SEQ ID NO: 388263 - protein, 445 aa, unidentified
MSVVHPSAAGIDVGSQEHYVAVPADRDPQPVRTFGCLTPQLHEMARWLTACGVDTVAMESTGVYWIPVVQILEQYDLDVVLVDARAVRHVPGRKSDVSDCQWIQQLHSVGLLRGAFRPGRQIEPLRAYWRQRADLVTQCARQIQRMQKAMEQMNVQLHKVLSDISGQSGMRIVRAILDGQRDPRALAALCDRRVKADAATVVMALTGDYQEHHLFSLRQAVDSYDFHQHKIAECDARIEDYMARTFPTRSDPDNPRGDAPQPSKRKPRKNEARFDLRQELYRITGADLTRIEGIDALTAQTLVCECGFDMSRFPTERDFCSWLCLCPNPKITGGQVKSSHTRKTNNRATAALRVAAQSLSRSRSALGAYFRRMRGRLGAAKAITATAHKLARLVYRLLKYGEAFVDMGQQAYEEQYRRHRIHALKKNAAELGFQLVPPDQPVYVS

SEQ ID NO: 388264 - protein, 411 aa, unidentified
MDVVHERCAGIDISKADAKVCVRVQGRGRRRTEQSVRTWGATTGQILALRDELLEQRVTLVVMEATGDYWKPFYYLLEDAGFEVVLANPRRVRAIPGRKSDVSDAVWLADLGAHGLVAGSLVPPPPIRQLRDLTRTRTAIIRERSREYQRLEKVLEDAGLKLSAQTSSLTLVSVRQMLEALVAGQRDPGVLAEMAQGQLRNKIPALAEALVGRFTEHHAFLVRLHLDLIDRHTQAIEQLSGRIDAAMEPFRGFHTLICTIPGVSTLVADVIVAETGGDMSRFPTAQHLASWAGTSPGSNESAGKVKSSATRPGNPHLKGALGIAARAAARSKGTFLSARHKRIAARRGPMRALVATERSILVTIWTMGHTGELYTDLGADYYRRRNPERSKQRALTQLRALGYQVTLSAAS

SEQ ID NO: 388265 - protein, 346 aa, unidentified
MTIVEPVRTVTGGVDTHLDVHVAAALDPLGGLLGSEPFEPTPTGYKALLVWLEGFGEVGKVGVEGTGSYGAGLARFLRRRRVEVVEVDRQNRQARRRQGKSDPLDAIEAARAALSGRAQGQAKSRDGAVEAIRVLVVAKRSARQARVKALTQVRHLGITAPDQLRCRMKGLSVPALVAEGAKFRPTRSTDPVTAATKASLSSLAHRIQALDREIAELDEMIDPLVAATAPDLLALFGVGPDTAAALLVAAGDNPERLRSEAAWAHLCGVSPLQASSGKVTRHRLDRGGDRQANSALWRIVMVRIAHDPDTTAYFERRVKEGRTKPEVIRILKRYVAREVYRHLPRG

SEQ ID NO: 388266 - protein, 355 aa, unidentified
MSQEKYIGMDVHQATVSVAVVDSGGKLIMECILETKAGTMVEFIKGLRGTLSVTFEEGTCAAWLHDLLKPHVSRLVVCDPRKNALLKDGSKSDRIDARKLAELLRGNQLTPVYHGDHGLRTLKELGRSYLTITGDLTRVMSRIKALYRSWAIPCSGTTVYAARHRSEWLAKIPQPGVRLRAERFYQQLDLLRPLHQQARCDFVVESHKHPAVKLLRQIPFIGPIRAALLVALLQTPHRFRTKRQLWAYSGFAVETHDSGEYRYVRGKLLRNRERISVRGLNDNYNHDLKNLFKSTAISASTRPGPLRDFYVALLAKGMRPTMARLTLARKIAAITLPMWKKGVDFDAKQLDQQAV

SEQ ID NO: 388267 - protein, 346 aa, unidentified
MVIIGIDSHKRTHTFVAVDTLGRRLADKTLPATTKGHLEALEWAERWPDKGWAIEDCRHLTRRLESDLLAGGEAVVRVPTRLMAAERRGERERGKSDPIDALAVARAALREPDLPVARLDGPARELKLLVDHREDLIRERVRMQARLRWHLHELFPGLVIRSRSLRHDGVFVELEARLDGVEGTVARIARELLVDIATLTKRSAELEREITALVRTVAPSLLALPGCGPLSAAKIVGETAGVSRFKSRAAFARWNGTAPLPVWSGSTNFRLNRGGNRQVNAALHRIAITQARGIGVGRNYVDARTGRGDSKREALRMLRRRLSDEVFRRLLLDEVAPTVAEVTLAA

SEQ ID NO: 388268 - protein, 310 aa, unidentified
MDVFVGIDVSKDRLDICVRPSGETFAVTRDGEGLEQLVERLRALHPVLVALEATGGYETVVASAVAAAHLPLAVINPRQIRDFARSTGKLAKTDRLDAAAIAHFAEAIRPPARPVADAEAQALGELVARRRQVIEMIVAEKNRRRLAGQPRVLKAIDRHVDLLQVELSELDRDIDGAIRKSAAWQADADLLASVPGVGKATLRTLIAELPELGRLDRRKIASLVGVAPINRDSGALRGRKTIAGGRAPVRTALYMAALVASRSNPVIAAHYQKLRAAGKAAKQALTACIRKLLVILNAILLDRKPWLLPA

SEQ ID NO: 388269 - protein, 404 aa, unidentified
MEADVIWVGIDVGRYTHALCGIDASGAIVWERQRVLNTTWAMRRALEKLRRVAKGRPLRFATEEPAGNASALLRMLAAAGETVYLAQPLRVYRFHLALGQPHKTDPYDAQVIAEFARQNASKLPPVRLGTPATQALRVLSRRAEALSKDLRRCLNRLRGVLAEYAPEWLACKVFRDWSSGAALGTLERYGRISKLRRARVSSLAKALSQWTQGRYGEAQARALIAAFAEVSLPPQLEEAYAQVICSLVSQIRSLIAERRQLRALVAAESESLPAVAVLQSEFGYGPETAAVIVSEVGDLTDFPTEAAFASYCGVTPLTRRSGVSRGSARLSRFTNKRLLRAVTQAALTAATHHAESRLYYQKKLAGRSDPRTKTLALIALARHRARRLYKLLRRASLPSAEVAA

SEQ ID NO: 388270 - protein, 388 aa, unidentified
MQSNDLSRSFTAFDQDNTLVIVIEMSEASWLVLGLVPGVERQPLKKLDADKDNLLKLVNRWREEAVKAGHPIERVVIAYEAGRDGFWLARWLRARGIEAYVMHPSSVAVSREHRRAKTDRLDTELLMRAFLGWLRGERRHCSMAAIPTLEEEDAKRPSREHEKLVGERTRIINRIKSTLARLGIKGFKPTLRNAEEKLGQVRSAEGTPLPENTREELRRDMARLRIVRMQLKEIEQQRLSKLKAAAPAEKGRHAMIELIARIVGVGVETADMLVVEILSRNLRDSKAVARYAGLTGSPDESGKRRREKGLARAGNARVRRGMIQLAWRFLRFQKDSALAEWFHARAVDGRKGTRKTMIVAVARKLLIALWRLATTGEIPAGVVLCPAA

SEQ ID NO: 388271 - protein, 300 aa, unidentified
MESKLEQLLERPSRSLPPRAGPAWPARILEAGVIYHVKEQLVYIGVDIAKSYLDAAMGNEKRRFSNDTIGHRELIKWVKQRKAPVQVICESSGGYERALVQRLARARVKISLVQANRVRQFARAAGILAKTDRIDAEVLCEFGRVMRPQTVTAARLEQEHLRELESQRRHLTRLLVMEQNRGAQASDASVQRLNRSLINQIKKQIEQLDLLIKGHIDQSHELSAKAAKLTSISGVGARTAALLLAQLPELGQLNRREVAALVGVAPFNRDSGRMRQTGNLWWPQTGASRALYGRSCSGAP

SEQ ID NO: 388272 - protein, 350 aa, unidentified
MIIIGCDYHPGFQQIAYVNTDTGDLSEERLGHKEQAEQFYQGLRTRGLTVRVGMEASGHARWFERLLDELQIELWIGDAAAVRTKRVRKQKTDRQDAQLLLRLLVENRFPRIWMPDAENRDLRQLLWHRHRLVQMRTRVMNQLHVAALNEGLRRKKALWRPAGRAQLESLALAPWASRRRQDLLDLLDQFTPKILELTRRLQEVVEKRPVARRLQTHPGVGPLTALAFELVIGTPERFQCAKQIASYVGLVPSEESSGDRRRLGHISKQGNALLRFLLVEAAQVTVRSDPQWRSQFFHLAMRRGRKIAKVAMARKLAVELYWMWRRGWDDNKMQQLGSHAGEPGNRHGVQ

SEQ ID NO: 388273 - protein, 406 aa, unidentified
MRCVIAFDVSRKSSTMAAYNEQGNCEFEGRLIHSKTGFSNLSKIIKDLSEKNNYTLEFVFEATGVYSAALERFLRENNLVYYSLNPLLAHLNTQSLRRNKTDISDAHQLAKNHFKNDYFQTYREDSYYEQMRTMSRRYDEIMKEKIQYKNRLHASLQLSFPDFDTAFINKSKLYYNLVQVFPHPNLILKRSKTVIKNRIKKCTKKNYSLKKLEERAILLIEIAKDSFPAVDETDYSCELVRDYAKKILEMEEEQDEIIQRMTEMSKDRKEYRILRSFPGIKDKLACRIIAELGDLTRFKNNKQLNAYAGIDIVRYQSGNMEYKDRINKRGNSRLRGILYFMIVSMLSAKGKQINHLVDYYYKLKKQPYNKHHKVAVVACMNKFLKVAFHLIQNDLLYDYEKASSQQ

SEQ ID NO: 388274 - protein, 310 aa, unidentified
MAATAVGIDVSKDKLDVHVLPQDESFGVPRNAKGIEDLAGRLKVLEPAVIAVEATGGFESVVAAGLAAEALPVVVINPAQIRAFARSLGQRAKSDPIDALVIARFAEATKPAVRPLPDEDTRFLSDLVTRRAQIIQMIVAEKQREKRVINRHLRKSIARLIKALEKEINAVDEEIDGMMRASPVWLENEQLLTSVPGVAKITSRTVLAELPELGALDRRRIASLVGYAPFTRQSGQWRGKSFIAGGRSHVRSVLFMAAMTAARCNPVLKAFYERLVAKGKPKMVAMVAVARKLLTILNAILRDKKPWQIA

SEQ ID NO: 388275 - protein, 341 aa, unidentified
MNVTTIGIDLAKTVFSIHGTDQHGKVVVRKRLNRPKLLPYIAQLPPCLIGMEACSGAHYWAREMTKLGHDVRIIAPRFVAPYRKSSKNDDNDAEAICEAVSRPNMRFVPIKTEDQQAVLCLHRIRRGLTKERTAQINQVRGLLAEFGLIIPQGRYAARRRVPEILEDAENGLPMLTRRLLNDINQRILQLDEEILAYDREIEAMARRDEQARRLMAIPGIGPQTATALLASAPDPRQFKSGRHFAAWLGLVPRQYSTGGKVRLGRITKRGDKYLRMLLIHGTRAVIAKLPDRNDRLSGWARDLVERRGYKRAAVALAAKNARIIWALLMNQTEFKTQPVEG

SEQ ID NO: 388276 - protein, 362 aa, unidentified
MLYTGIDQHSKQITVNVRNEAGDVIVRRQVSTRWAKMDAFVEEMKQHVAGQGGVLAVVEVCGFNHWLLVRLHAAGWQVIVVQPEESAAHKTDRRDASALSEVLWVNRERVRQGLPVRGLRQVQVPGPDEQADRRVTSLRRNVGRELTRTINRVKAVLRRHNLEQECPTKGLQTQAGLKWLHQLALPGVERIELDQQLSRLGLLRNQRQHLQMEIEERYARNAAAQRLSTIPGAGAYAALGLASRVGDVRRFRRPRSLANYWGLTPGSRNSGEATQRLGSITKQGSPLARFLLGQLVLHVLRKDTAMRLWFRQIKRRRGAKIARVAVMRRLAMIIWHMLTKSEDYLAGGPPRRRLKNERNNNN

SEQ ID NO: 388277 - protein, 360 aa, unidentified
MSAEGEAIRSNDYRKDTTVKAPSTRPAAVLGLDVGKSSHWACLIDRDGEVLASAPVRNREAELDALFASAPAGTLVVVDQFRNIGSLAVRRARAAGLGVAYLPGLAASRAAGLFAGEAKTDERDAAVIARTALGVPDSLSGVPGRGEALEAAVDLSDRRWLELLAGFGGAWGIARSGAGGPRAEAAGEAAAASTAPPPALVEAENRQVRFLAARISEALDEAGALEAETAALLEGDETYACLLTVPGIGPRTAAQLAVSVDIGRFPDHDHLASYCGIAPRVRSSGTSVRSVRASRRGDARLKSLLIFSCNSLVRSSGRYGEYYRACRARGMGHGRALKAVARKRLRAIYAVMRDRVPYRE

SEQ ID NO: 388278 - protein, 412 aa, unidentified
MDVVYRCCCGIDVHKDSVTVCVLWAETKGKSRQEKRMFATFTQDLLALSDWLHACGVTHVAMESTGVYWKPVWHILEGHFELLLVNAQHVKAIPGRKTDRKDSAWLAELLQHGLLKSSFVPPEPIRELRDLTRYRVNLAQECNRIANRIQKVMEDANLKLASVATDALGASGRAMLKAIITGERDVEKLADMSRGLLRRKIPELQLALEGYVSQHHRFLLQELLDHLEFVESKMTRLEQEIAERLRPFEDTVRRLCTVPGIDRVSAWGIISEIGLDMHQFEDAKHLASWAGLCPGNWESAGKRKSGRIRKGSAWLRRHLCQSAWGVSTKQKNYLSALFRRLAARRGVKRATIAVAHALLCIAYRILRDPVEYRDLGPDYFDKLHPVRLKNRLVKRLEGLGFQVTLEARSLPA

SEQ ID NO: 388279 - protein, 375 aa, unidentified
MKKDIRFIGLDVHAETIAVAVAEPNGEVRSLGVIPNRRESVRRLVRKLGPSVRVCYEAGPCGYVLYWQLSEMGVHCDVVAPTLVPVKAGDRIKTDRRDAEKLARSYRSGDLTPVWVPDAAHEALRDLVRAREAAKKDQLRARHRLQKFLLRRGLRPPEALKTWTAKHLAWVKTLRLEQAAQAATLLDYLTEVDHARERIERLERAIDQAIEAAPPAIRAVVEALQSLRGVARISAATIVAEVGQLSRFPKPRQLMGYTGVVPSEHSSGERVHRGAITKTGNAHLRRILVEAAWAYRHRPSLRGELQRRQKNASEQVKEIAWKAQVRLHYRYARLAGRGKLKQQIVTAVARELVGFVWAIGVATERQLAQQPARAA

SEQ ID NO: 388280 - protein, 364 aa, unidentified
MKRKVYVGMDVHKETIRIANLTNNTKEIVKEQQIKHNEVQIKKFVNKLKSEWNEIHSCYEAGVTGYPLYRYLKSLGVNCILVAPGKIPRQSSDKIKTDKRDAIKLAKLLRSGELESIHVPSEEDEAVRDYLRSRDSLRLDLGRNRQRLMKFLLRKGITYSATKYWTVSHNKWLNNLQFNNEILQETFNDYYSRVRVQEENLKAMDKRIQEIAESEPYREKVGILRCFRGVDYLTAMFLLCEVCDFKRFKTAGSFMSFLGLVPGEYSSGSKRKQTGITKTGSPRLRRILTEAAWQHRFPGTGSKVVTARRSGQPALVVALAEKASLRLHKKFRNLQQRGKTPQVIITAVSRELSGFLWAAMNLTT

SEQ ID NO: 388281 - protein, 325 aa, unidentified
MIIIGVDYHPEFQQIALLDTDSGEFREKRLSHPEEAEQFYRAWAAAGEKVRVGMEASGHARWFERLVAELGFELWLGDAADIQSKRARKQKTDRQDAQLILKLMLKDDFPRIWVPSWENRDLRQLFWHRHRMVQARTRLMNQRQAVAINEGLRCKKRLWRAKGRQQLESFRLAPWASRRRRDLLELLDRLNPTIAELSQAIGQEAEKCPEARRLMTHPGVGALTALAFALIIGDAKRFPCGKQVASYLGLVPLEKSSGNRRRLGHITKQGSSLLRFLLVEAAQVTVRSLPEWRSQYFRMVMRRGTQDRESGNGAPLGDSFVLDVA

SEQ ID NO: 388282 - protein, 338 aa, unidentified
MTVYAGLDLHATNTYVGVVDEENKVLHKQRFKNELPLILAGLDPFKKDIEGVVVESTFNWYWLVDGLMEKGYRVHLANVSAINQYEGLKQIDDKRSAFWLANPLRLGILPTGYIYPKEERPTRDLLRKRLQLVRHRTSHILSVKNILARNLGLRMKSEEVKKLEAPEVKRFFPDKEMQTAVLASLGLIRHLEDDITGIETMILKKLKITKEFAKLITLPGIGTILTLTIMLEVGNIRRFPTVGDYSSYCRCVKSIRTSAGKVIGYGNRKNGNKYLSWAYVEAAQFARRFHETVRTYYQKKMAKTNRIVAIKALSHKLTRASYYVMRDQVDYDPARLFR

SEQ ID NO: 388283 - protein, 354 aa, unidentified
MSQTPNTAIAVIGIDIGKNSFHVVGHDARGAIVLRQKWSRGQVEARLANIPPCLIGMEACVGAHHLSRKLASLGHDARLMPAKYVRPYSKGQKNDFNDADAIAEAVQRPTMKFVATKTAEQLDLQALHRVRERLVSQRTGIINQIRAFMLERGIAVRQGIGFLRTELPTILATRTDALSPRMLRVIEELAGDWRRLDQRIDGLSGEIEALARQDQACSRLMTVPGIGPIISSAMVAAIGTGDVFSKGRDFGAWLGLVPKQISTGDRTILGKISRRGNRYLRVLFVQAAWVVLVRIKNWERYGLKSWIEAAKKRLHHNVLAIALANKLARIAWAVLAKGRAFELTRTDDAGVRPA

SEQ ID NO: 388284 - protein, 406 aa, unidentified
MNYLGIDVSKSTSRYVFLDNDGEKFTKAFTLQNSQQHFQELLSKLKKLDLNPENLLLGIEATGIWWENLYTFLTENKFQVIVLNPHQTNKYREALRKKAKTDDIDAYVIAGLLRSNDFAANFIPEESIQILREMTKLRYNLIKDHKDYQRQAMSLLGLIFPEYSQTAIKNPFAVASLAVLKKYPTAKHLAEAKPKHIEKIVRSIKGNNFSIKEIQHLLVIAKTSIYSGRAKDARGLNLNILLSQVESLNKAISDLDQRTNDILSPTNDDDFYSFPGGNLLTIPGVGPKTLAALLSAIGADGQSFASGKQLIGLIGFFPKIYESGETRRDNKISRRGPKYLRSALYIAAVACIKHNKEFKSLYSKKISQGKTGKQALIYVAKKLAHLCLSMLKSGESYNPARVFMPV

SEQ ID NO: 388285 - protein, 319 aa, unidentified
MSTETTPLFVGIDVSKAHLDPATRPAQQLGRHANDPAGIAALVARLEPLSPALVVVEATGGLELPLLAALQVAGIPSAAINPRQARDFARAIGRLAKTDAIDAEVLAHFAEAVRPAARPLPSAEVRALDALLSRRQQLLEMQVMESNRLGSCSDPTVRADLERHLAWLKAEVAGADRRLAEAVKASPAWREKDELLRSIPGLGPVSSLTLIAALPELGSLDGGKLSALVGLAPFADDSGTRRGGRHVRGGRAAVRRVLYLAALSAVRHNPALKAFRDRLAARGKKAKVILTAVARKLLVIANAVIRTKRAWEPGLAMAR

SEQ ID NO: 388286 - protein, 396 aa, unidentified
MFQGQKHGRRTPARWKAPCPPFEVLHTKNGLKELVSFVRSLDGDTRIVMEHTGRYYEPMLQWLSASDLFVTAVNPKLIKDFGNNTLRRVKTDKADAKKIARYALDNWCDLRQHTGMDTTRTQLKTMNRQFAFCMRQRTACKNNLIALTDQVYPGANTYFESPARADGSQKWVDYVAAFWHVDYVCSMRLSTFTERYRKWCHRHGYNFQSDKPRMLWEKAKDLIAMLPMDKMTKSLVQTAVAQLNVLSKTVETLRTQMIELAEKLPEYPVVIAMNGVGATLASQLIAEIGDITRFPRRGSLTAFAGVDPGAKQSGTMQLRSNKTSKAGSPHLRRALFQIVSGLLMRAPDDPVYNFMDKKRTEGKPYYVYMTAGANKFLRIYYGRVNEYLAGLSKEQE

SEQ ID NO: 388287 - protein, 364 aa, unidentified
MSEDRRAVVVGLDVHKASVRLAAVRDGELLRERTLGYDHEQLLGEVRAWPGARVCQEAGPTGFGLHRALIAAGVDSVIVAPGLVPSRPGDRVKTDKRDARRLAALHAAGLLTEIFIPTEEHEALRDLVRAREDARLDRMRARHRLGKFCLRHERAMPTTCWGTTRRAWLGRQAFSLPGQQQAFDDYLFAVDQVDRRIERMQSELHRLASEGPHCELIGRLRCMRGIDTLTAIGLVAEAGDFTRFKSAEQFMSFVGLVPSERSSGERRRQGSITKAGSAHARRLLVESAWNGRRRPTVGYELSRRQRGQDPQVLEHAWRCQQRLHRRWSRMAGRGKPHQKIVVACARELAGFVWAIATEQPLRTR

SEQ ID NO: 388288 - protein, 387 aa, unidentified
MPASGPRPGQVAIQISLAAIFVSLELSRSTWLITSLVPGGGDKMSKHSVSSGDIAGLLDHFTKLREKAHARAGASFPIIAIQEAGLDGFWVHRVLERAGIESHVVDAASILTSRRRRRAKTDRIDGEALLRTLLAYKRGEPRVCTVVRAPSPEEEDRRRLCRERKTLVAERVAHVNRIKGVLFAQGISGYEPLRSDRRSRLEALRTGDGRPLPPYLKAQIGRELDRLELLLEQLKAVEAERNALLEPANDAAPVAVQALAGLRGIGPEFTAMLWSECLFRSFRNRRQVAAYAGLAPTPWQSGSVQHEQGVSKSGNPRLRSTMVQLAWLWLRHQPTSELSLWFRERVKRNNGRSKKTAIVALARKLLVALWKFSSSGVVIEGAMMKTA

SEQ ID NO: 388289 - protein, 412 aa, unidentified
MELLHRRCCGLDVHKETVVACLRLVSDGKVTTEVRTFQTTTADLLRLSEWLAANECTHVAMEATGVYWKPVWRILDDGEFALVLANAAHVKNVPGRKTDINDAMWLAELLAHGLIRASFVPDAQTQEMRNLLRTRKQLVREQSSHVLRVQKTLEDANIKLDSVLTDLMGKSGRAIIEALIAGETNPVKLAGLADRRVKASFEEFREALRGRVTRHHRFLLRLHLNQIDALDAAMATLDAQVEANLGPFRTAVELIGSIPGIKNLGAHVIVSEIGIDMSRFPSAAHLISWACICPRNDESAGKRRSNRVRKGGTWLKTTLVQCAWAAVKKKDSYLQAQFYRIKARRGPKKAIMAVVASILTAIYHMLKDGTMYKDLGRNHFDRRSSDQQKNRLVKRLVDLGYVVEIKPLAATA

SEQ ID NO: 388290 - protein, 344 aa, unidentified
MKIKLLGIDLAKNVFQLCALNQANKVLFNRTVRRAQLRSTIAKLEATIIAMEACSSAHYWGRSFEAMGHTVLLVPAQHVTPFVRGGKSDARDALAICEAAQRPNIHLVPIKTVEQQDIQLLHRLRQRQVQHSTALANQIRSLGREYGVIFPAGIKPLISHLPEALEDGSNELSPVARHALADQYQCLLDIRQAMGAFLLQIEQLAAQYPAYDDLQVLPGIGPMTASAYIAAIGNGRQFKRGRQVGAWLGLAPRQYGTGGELKLGGITKSGDRHLRTLMIHGARAVITRGLKTRPELAQWVQPIIDRQGFNKGVVALANKLARISWVIVSTGEPFDMKQAFKPAS

SEQ ID NO: 388291 - protein, 425 aa, unidentified
MREHDTRAEAGTVNPPGRGTMFEIEDVGVFLGLDVGKSNHHGHGLTLAGKKVFDKPLPNSEPKLRAVFDKLTAKFGTVLVIVDQPASIGALPLTVARDAGCRVAYLPGLAMRRIADLYPGEAKTDAKDAAVIADAARTMPHTLRSLELTDEITAELTVLVGFDQDLAAEATRTSNRIRGLLTQFHPSLERVLGPRLDHQAITWLLERYGSPAALRKAGRRRLVELIRPKAPRMAARLIDDVFDALDEQTVVVPGTGTLDIVVPSLAASLTAVHTQRRAMEAQINTLLETHPLSPVLTSMPGVGVRTAAVLLTTVGDGTSYPTAAHLASYAGLAPTTKQSGTSIHGEHAPRGGNRQLKRAMFLSAFACMNADPASRAYYDKQRARGKTHTQALLRLARQRVSVLFAMLRDGTFYQSRTPNDVELAA

SEQ ID NO: 388292 - protein, 366 aa, unidentified
MPTTPVRSTTLYVGVDVHKDTHTAVGLSPFGEKIFEMTIGNQDADFKALVKRTQMEASQYDLVAQFGLEDVHSWGERLSSFLVKEGLSVRAVAPILVDHLRQKATHPEKSDSLDARGVAEVMIQKIDTLPSYTITEASKESHQIRELSVEREWLVKERARLKNLLHILLHRIHNTVYRSLFKNPFSQKALSYWMRHIPHGTDGILLQRMKRALRRFRDLREEIVEIEKSLKGLMTTSGHTLHTASGCGTVIAAEIIGEVGDISRFRSPGSLAKYAGCAPRQHSSGKTVRWRKTRSGNRRLNRAFHRMALSQIGKTGNPAARAYFDRKIKEGKSKSQALVCLRRQMVNVVWMMMKYKTEYSLTHKND

SEQ ID NO: 388293 - protein, 322 aa, unidentified
MLSFCGIDVSKDRLDVMVLPDEYSSSVPNDPAGWAILVEQLRGFSITAIGIEASGGYERGAVRSLQAAGMPVRQVNPFKLRQFAKASGVLAKNDPLDARMIASFVGIMPTRPAQRTTPAAEQLVEMLAVRRQLSAEKTAAENASRLLEDLMLQRLSRRRIARLAADIELLDKRLVEIVATDATLAHRYRLLTSMPGVGPVLACTLIALLPELGGMSRKQVAALVGVAPYAFESGTLKGRRCIWGGRANVRQVLYMAAMSASNWNPVLKLFHDRLKGAGKLPKVVIVAVMRKMITTPTLNAMVRDDIAWADRLSGRHSVTTAR

SEQ ID NO: 388294 - protein, 357 aa, unidentified
MNGNKERPRVTAGLDLGDKYSYLCLLDTDGGEVIEEGRVRTTPEALRRRFASERPMCVAIEAGTHSPWVSRLLEECSHEVLVANARKLRLIYANKQKTDEVDAENLARLARVDPKLLYPLKHRGEDSQAHMALIRSREALVSARTQLVNHVRGAVKSFGARLPKCPARSFHNKAAEHIPEALRPALGPILEQIGSLTQRIRDYDRKLEEISKESYPETELLRQVEGIGPLTALTFMLTVEDPYRFEKSRSVGAYLGLVPARDQSGDRDPQKRISKEGDEMLRKLLVGSAHYILGPFGSDSDLRRHGEKIASRGGKNSKKRAVVAVARKLAVLLHSLWISAEVYEPLRNADRSGGRAA

SEQ ID NO: 388295 - protein, 376 aa, unidentified
MREKLRFLGLDVHAETIAVAVCDSSGEVRSLGTIANREDSIRKFIKKLDSPEQLRACYEAGPTGFVLYWQLTQLGVECMVVAPTLVPKKPGDRVKTDRRDALKLARSHRNGDLTAVWVPDEASEALRDLVRQREAAKQDQLRARHRLTKFLLRTGQRAPAGLKAWTERYMRWLAQVRYTQPAQEVTRLDCMNEVEHMSARVKRLEEAILEVVKQAPQAMQELIRGLQALRGIAHISAVTIATELGDVSSRFESARKLMGYSGVFPSENSSGKRIRKGAITKAGNAHLRRIVMESAWCYRHLPRVGEKLRKRHQGIPAEIIEIAWKAQNRLHKRYVKLAVAGKDQRKVITAVGRELLGFIWAIGVKAEQANRRPIAA

SEQ ID NO: 388296 - protein, 337 aa, unidentified
MKIYAGIDLHSNNNFVALIDEENKAVYKKRLLNDLTIVLEALKPYKDSVEGVVVESTYNWYWLADGLREAGYKVHLANVAANIQYSGIKCTGDESDALWLANLLRLNILSVGHIYPKEKRGIRELVRKRLILVGQQTACLLSVQGMIARYENVRITASKIKSSDAKMLDFIKDENVKFAAQSQLKVLDCVMEQIALLEKQIQKIIKPDPLFALLKSIPGIGPILAMTILLETGDIKRFKSVGNYSSYCRCVESKRVSNEKKKGVNNRKNGNAYLCWAFIEASNHATMSYPEIKKYYQRKLSKSMRVVAIKTIANKLSKACYFMLRDKVEFDMTKLFV

SEQ ID NO: 388297 - protein, 410 aa, unidentified
MQHATPPSATAPVAGVDWATDSNALCIIDGDGQVLRELVTAADTAGTRRLVEALDRHGVTKVAIERPDGPVVAALLAAGHTVVVIPPRQVRHLRARYGQAGNKHDRFDAFVLADVLRTDHRRLQPLHPDSPQTVVLRTTVRARTDLVETRVALCNQLRAHLRLVFPGAVGLFANLDAPISLAFLARFPSADAAAWLSHRRLAAWLAANRYSGRTPVAVLLGHLQDAPAGLGGEHGHAATATTLAYVHALVAVRDQITALEARIAEQLALHPDRLVFQSLPRAGTVRAAKLLAEVGDARGRFPTAASLAALAGAAPSTRQSGRHQVVTFRWACDKKLRDAVVDFAADSRRASPWAQTIYQRHRAAGKTHQHAVRILARAWLRVIWRCWQDHSPYNPALHGIRPHRRLPLAA

SEQ ID NO: 388298 - protein, 349 aa, unidentified
MLIIGCDFHSRFQQIAMVDTDTGELIECRLDHSGEAQKFYAGLQKPVRVGMEATGYGQWFERMLAKLGYELWIGDAAEIRAAMVRKQKTDSRDALHILDLLLANRFPRIWIPSPGERDLRQLLRHRHKMVCLRTSVRNQLQALAMGQGVYRKRKLWAAGGRTELEGLALDPWASRRRQELLDILDRLDPCLAELDRAVAKEAEQRPATCYLMEQPGVGPVTALMFVLTIGPVERFRGSKQVVSYLGLNPRESSSGGRQRLGAISKQGNSMARFLLVEAAQTAARYDEEIRRDYQRLKFRRGTAVAKVAIARKLAVRLYWKLRKQNSAVPPARMQGSSEHPVVDASLSRN

SEQ ID NO: 388299 - protein, 343 aa, unidentified
MYYIGLDVHKKTISYCVKDAAGRVHQEGKIGSTRRELDGWIRTMPQPRMIAMEATIFTGWIYDHLLPYAEKVKVAHPLMLRAIAAAKKKNDKIDAGKIADCLRCDFLPECHMASTEIRDRRRTLRYRNLLIKQMVQMKNRVSGLLMETGVSYNKQRLHKVGYFAELLTTNEEVNESIRPLLKLSREMICRSQRLDYALVSSLERDPLLKERLRRLRTVPGVGPITALTWALEIGDYTRFASIKQAISYCGLCGDEKSSADKVMRMPISKQRNKHIQRVLIEAAKLAARECHELAMVRARELERGNSNRATLAVARKMVCYMLAVERRKQDFVPAEKFSRTAAA

SEQ ID NO: 388300 - protein, 323 aa, unidentified
MNKGIKYFGIDISHLVFDVTDSDGNYYQFKNNPIGFKKFIKLLDIDSHCVMEATAYYHYQMAYYLLESGIKVSVENPLAVKRFIQMKLSKIKTDKSDSKLICEYAGQVDLKLWQGSSKNEIECLQIARALSVYTKQSTMLKNKLHGEAVLGNPSNVVVRSLKRSLKQLQKEIKSLEDTLLILVKQTHQDLLTRLKSIPGIGPKTAIMLVVLTDGFERFTSGSELCSYAGLTPLIRKSGSSVNGRSRISKIGNQKLRNLLFMCSFNACKYNKACREIYERLVAKGKSKKLALIAVCNKLLKQAFAIAKSGLVYDQTYRSVLVTN

SEQ ID NO: 388301 - protein, 392 aa, unidentified
MIYVGIDVAKSKHDCVILDDNAQILESVFTFSNSNNGFQKLLKAISNHSIQNSLDVTIALEATGHYSDNILHFLESHDFNVTVFNPLHTNLVRKSKNLRKIKTDKVDAYTLASMLIETSYVTTKPIPDYIHNLKSLTRSKARLVHMKSQIKVSIHRLVDIIFPELHSLVSTIHSASVYALFSQIGNTQMIANTHLTKFSNILHHASKGRFSKDKALAIREAAISSIGSNELTQLLEIQQLLRLLDSFETEIKITNKAIDDIMDSINSPITSIPGIGNTLGAVILAEIESIDDFETPAKLLAFAGMEPSIHQSGKFTSSHAKMVKRGSKYLRRALMMAAQLVSMRSDTFKNFKIKKNSEGKHHFVTLSHVARKLVRVIFHLLKTNSHFVEQSL

SEQ ID NO: 388302 - protein, 316 aa, unidentified
MDGSNQVSVGIDVAKATLDFHVLPSGQFQTLPNVKAGFKQLKKLLPNPEHCLIVLEATGGFEREVVAELIDAGFRVAVINPKRARDFARALGLVAKTDRIDARVLALFAEKVQPAPSEKTPEKQAEIQQLVARRRQLIDLKTQESNRWDVAHVKAAKNSIQAVINTLEAEIRGIEKVIESLVESDDEWRNKAQLIESVPGLGGVTAATVMADVPEIGKLNRQQISALIGLAPFNRDSGAMKGKRSISGGRKSVRCVLYMAAIAAKRCNPVIKAFAQRLAEHGKPFKVIITACMRKLLVILNAIVKSGRPWMAQITS

SEQ ID NO: 388303 - protein, 389 aa, unidentified
MKIFVGIDIAKLNHFAAAISSDGEILLEPFKFTNDADGFQLLVSKLESFDKNSIIIGLESTAHYGDNLVRYLVAEFYQVCVLNPIKTCQMRKNNVRKTKTDKVDTFVIAKTLMMQDDLRFITFFDLDMMDLKALGRFRQKTIKQRTRLKIQLTTYVDQVFPEIQYFFKSGLHQNAVYALLKEAPSPKEIASMHMTHLANLLKVNSHGHFTKEQAKELRVLAQKSVGANDSAISIQITQTIQQIELLDSQLEKIEVEMTDIMKFNDSVIMTIPGIGYINGGMILGEIGDIHRFSNPNKLLAFAGLDPSVYQSGNFQAKTTRMSKRGSRVLRYALVNAAWNVVRNNATFKAYYDAKRAEGRSHYNALGHCAGKLVRVIWKMLTDEVEFNLE

SEQ ID NO: 388304 - protein, 349 aa, unidentified
MPFNIIYKIQCKVMNYFYFIGIDISKLWFDAAIRQPGKPRYIRHRQFENSEKGFIAFLNWLKQNQINDFSLVFVCMEHTGVYTVPLCNFLSEQTITYTLIPGAEVTNSQGITRGKSDKLDAKRIAAYALKNREEIRVHTLPSEQIRILKTLLAYRERIIKARHGFMISIKEIKAFETDTVANSIEEDSRQMIDNCSKQIKKIDKQIDSCIETHPELDKNFKLLLSVPGIGRQNALYMIVFTKNFVSFNCPKKFAAYAGIAPFKNSSGKSLNSSSKVSQKANKKMKALLSSAVVCSLRSCTEYRLYYERQLEKGKNQYSVKNVIRNKIVARAFAVIRRNSKYVNTHAFAA

SEQ ID NO: 388305 - protein, 350 aa, unidentified
MRLFIGLDVSLAKTAICVISEHGQIVREAEARSEPEMLVSWLRQLDGAIAAIGLEAGPLSQWLYRGLTSAGLDVVLMETRQVKGALRAMPIKTDRRDAEGIARLLHLGWFRPVHCKSITAQEVRAVLGARKAIQQGMMALELSLRGLLRNFGLKVGAISRGRFDLRIRELTNGNAMLEAATEPMLRARASLRQELVGIERCVRQLAQEDPVCRRLMSMPGIGSVVALTFRSAIDDPARFTSSKKVGPWVGLTPSRNQSGERDVSGGITKAGDVTLRRALCQAATVMMHRGRSTWLRTWAAQIARRRGAKRAMVALARRIGVILHRMWIDDTDFRFESFVTSGLKSYPMPA

SEQ ID NO: 388306 - protein, 325 aa, unidentified
MTQAQIYIYGIDLGKNWFHLVAMDRMGHVLTKQKLTRSQLKQFISTTPPCRVAFEACPGSQYWGRLFQQAGFEPKIIPAQFVKPYLKSNKNDFNDATAIAEAGSRGTMRCVLWKSHEQLALQATHRVRQRFIVERPATVNQMRALLLEYGLTVPVGRKVFERSLPTILADAENGLPDFIRALVLRLRERWQQLDIQIDDMSLMLGQASSTSSLCQKISTVPGIGPIVSTALIAAIGNGSQFKKARDLSAWLGLVPRQYSTGGKSSLGGISKRDKSSLGEWVARLEVGHHHHVVLVALANKIMRICWKVLTSGRDYQPYPNTSSAV

SEQ ID NO: 388307 - protein, 379 aa, unidentified
MTQFPVLTSNEQSIYAALELSKNSWLLAIRVPGRDNPSLHPIKGGDAEGLMAKLGAARDRVAKVTGQVPKVTLCYEAGYDGFWLARLLEQRGVTCRVMDPASLQVNRRARRVKTDRIDVENLLHTIVAWHRGERHVCSMVVIPNVEEEDLRRSHRERERLVRERTAHINRIKALLFGQGIRGINVKARYKTLEPAKLITGEGHHLPERLSREIVREIERLAVVQEQIAAIERERDLAPTPCAATERKRHQLLCLNGIGQATAPILAREVYYRRFANRGQVASYLGVTPSPYDSGGSRRSQGISKAGNRRVRTVMIQLAWLWLKHQPQSALSQWFNRRTEGQSKRLRRIMIVALARKLAIALWRYLEHGLVPDGAIVKAR

SEQ ID NO: 388308 - protein, 338 aa, unidentified
MNIVFLGIDLAKNVFQLYGLNQAGKPVYTKRTDRKELLQTLANIPACLIGIEASTGAFYWQREFEKLGHKVKVISPQYVKPFVRGQKNDGNDAQAIAVALMQPTMQFVPPKSPEQQDIQALHRARQRIVNHRTATVCQIRGLLLDRGIPIGSAVSRARRAIPLILEDAENGLSSRMRRTIAELYDLFNDLERRIHFFDKEIETVFRQSEACQRIAKVKGIGPKTATAVVAAIGKGTEFKNGRHFAAWLGLVPRQHSSGDRQVLMNMTKKGDKHLRTLFIHGARAVVRVATNNNDGHMNQWVNQLKERRGFNKTTVAVANKNARIIWSMLRNETEYQVV

SEQ ID NO: 388309 - protein, 343 aa, unidentified
MQAITVVGLDIAKSVFQVHGVDALGSVVVRRQLKRRYVVAFFKKLQPCLVGIEACATSHHWSRELQALGHTVRLIPPAYVKPYVKRQKNDAADAEAICEAVQRPSMRFVPTKTPEQQSCLMLHRTRHLFIRQQTAVINTIRAHLAELGIVAPVGRNGVEQLLYAVADTKDDRIPDVARACLKALGALLGKLKAQILEFDRQINAWHRSNETSRRLDELPGVGPALATAPVASVADPKAFRSGRDFSAWIGLVPKQNSSGGREKLGSITKQGDRYLRSLFTTGALAVIRYAKIHGTKHRPWLARLLARRPTKVAAIALANKIARMAWAMMAKGESYREPVALAR

SEQ ID NO: 388310 - protein, 408 aa, unidentified
MQVLYARCAGLDVHKDTIVACVRCVSPPMHQEVRSFGTTTAELLKLADWLAEHDCTHVAMEATGVYWKPVWHVLEDEFELVLANAAHIRNVPGRKTDVNDAMWIADLLAHGLIRSSFVPPQAIQQLRDLTRTRKQLVREVSQHSLRIQKELEDANLKLGSVLSDVLGKSGRAMLDAIVAGETDPACLAALAQGTARNKTAELREALRGRITDHHRTMLRLHLQVVDALQRTLAELDAAVGKALAPIQQRARLLTTMPGISDLTASVVVAEIGVDMSRFPTAGHLVSWAGLCPRSDESAGKRRSNRVRKSGTWIKTTLVTAAWAAVRVKTSYLRAQFLRIKARRGAKKAILAVAASMLTAAFHMLRDGTEYNDLGSEHFDRQDKSKTIRRLLKRLQDLGCDVPELAHAA

SEQ ID NO: 388311 - protein, 345 aa, unidentified
MNYIGIDHHKQYSHMTLVDEKGNELKSGRVLNTMREVEAFLDGRGEEIMAVIETGRTSYVMVDLLREFGVDIRMAHASEVKAIAKAKIKTDKRDSRILAHLLRTDMIPEVYLRSEENRAAQRVLRHRAFYVEMRTRVKNKIRVLLAQQRIEQQEEWSRIKILFSVKGLEALSRLELVSPEKDLLGNLIVLYKHLEERIKGSDGLVKEVYSKLREAQLISTVPGFGGFLSVLAATEIADISRFGSVEKLHCYAGVIPSTHDSGERRYHGRIIKAGNRWLRWAVVEAVWPACKKDFDIRCFYDRRARRKKANVAKVATAKRLLTIIYRVLKEDREYIPYKRKGSAAL

SEQ ID NO: 388312 - protein, 369 aa, unidentified
MTFYVGVDLHKTQFTVHVRTEEKIESMNEIRMYPTTEIGYAEFCKRIRTYKATGAVVKLAVESTGNTKHFKNQMEKAGAEVIVVNTVKFKVINESVSKTDKHDAATLSEFLKDYKLPQSYLCSKETENMRRLIKSRERLVRAQVGQKNEIHALLVSLGLSDEPRSLQSKKGRQKVLDALESNNDYVLEAQSVKLMLDIIDTFAEKIKIIEKQLEELTKDDDMVKLLLTIRGCGKITAWIIRAYTEDISRFSNSKKYASFSGLVPKVRDSNETVHHGSITRHGPVELRTAFVQLFMGMRRCKDTKSWRMMQRYEYMKKNKGSGKSIISGARKVAEIVWALLTAKTEFDSARMTGTYKPMNLPEQALSVAI

SEQ ID NO: 388313 - protein, 363 aa, unidentified
MNSVYHTELSSHEGTRCQFNGTKADIKLGIDVHQDFYVVVMQEGGSNPKPPQRFHKEAFLHWAAKLVRCGVQVYAVYEACGFGFGLQRKLTALGIHCYVVCPQKLDEQNKRVKTDGLDARTLCLKLDRFVQGNRHALALVRVPTEEEERSRAIHRQREQLVKVRKVLEAQGRSLMVNHGIEPVQQWWKARAFAALDVPGWMKELLANSQPILLALQQKIDQLTLQLQSAAHCEPPRGLGKMTSVIIDREIGDWRRFNNRRQIASYTGLCPGEYSSGQKRLQGCVTKHGNPRLRAALVELAWRMVRFQPHYRAVRKWKERLAKGTLTTGAARKKAIVALARQLAVDLWRVRTGRLTPEQLGLAI

SEQ ID NO: 388314 - protein, 411 aa, unidentified
MKKLSESQAKRKANGRTRKTGERMPQDTKQAMTKLVAELTHRLAAESAAGNTENDPRATGVCPNLNRLTVGIDLGDKRSRYCILGPAGETLAEGDLATTKEGFDDMFQAIAASRVVIEVGTHSAWVRDVVVSWGHEVLVANARLMDGTKRRKRKNDRIDAYKLARLGRVDPQSLYPILHRSTEVRQDLIILRARDALVCVRTELINTIRGLVKSLGGRLPKCSSPSFPDKVADSLPAQVRQVLLPLVSQVKTLTESIATYDQRIEDLGNTKYQQTKLLRQVKGVGPITALAYVLTLEHPERFPKSRDVGPYLGLVPRQEDSGDKQPQLGISKAGDQMLRRLLVGSAHYVLGPFGPDMDLRRYGLRLCERGGKNAKKRAAVAVARKLAVLLHRLWTSGAIYEPLRQLNPAAA

SEQ ID NO: 388315 - protein, 400 aa, unidentified
MDERQQFRWFLGIDISKETYDACCITSHGDRLFNLSVSMDRKGFEELIKQLSALSITRDSVLVGMESTACYHINLYSFLVSLGYTVIVMNPLLISNFVKLQLRKTKTDKKDASVIAQFLVLNRDSLSQTILSSEISDLRDLSRQREGLVDQMSSTKTEIKRLLTMTFPELEQIVGVFSKSMLRLLCQYPSAASIKQARRSKIAKILIPGSYGKQTDASVDRIVKAAQGSVGTSSATKEIILRQKASLLIQLEQHLQELTDILIELCQEKMQGDMDILTSMKGIGEKSAMNFLIEVGGEIKQFENHKKVIAMAGLDPALYQSGKIDRKGKISKRGNRHLRRVIWQMTTRVIQFNERFRQYYLKRTQDGLPYKKAVLATAHKLIRVMFAMLKNKTLFDPRMN

SEQ ID NO: 388316 - protein, 433 aa, unidentified
MAEVPPDRRREAMAAFRMKRRDAMEVMFDRVAGLDVGKEAVTVCLRTPGSKGRRHAETRTFKTMSGSLRVMRDWLVGAGVSIAAMESTSAYWKPAFYCLEEVMEVWLLNAAHMKAVPGRKSDVRDAEWIAQLLEHGLLAPSFVPPPEIRRLRMLTRYRVQLMGDRRRDIVRLELMLEDASIKLSSVASSLKTVSARAMLTAMINGETDPLRVADLAKGRMRRKIPDLAQALTGHFDANHARLARSMLRRLDLVEQAMAELDQVIVEACRPWARQIELLQTIPGVGEKVAQVIIAETGGDMSRFPTAAHLAAWAGLAPAMNESAGKQSPAGKRHGNKWLTAMLVEAAGSVGRMHGKNYLAAQHARLMKRRGMGRAQVAVAHSMLVAAYWMLKRDEPYHDLGADWHRRRNDQAHTRRLVAQLERLGHKVIIDPAA

SEQ ID NO: 388317 - protein, 424 aa, unidentified
MKVTYQTCCGVDVHKSFLVATIVKTSGGIEPSYQKKRFSTFNNSILEFKQWLLDNDCHDVCMESTGKYWVPVFNLLEDEINVVIANPKWVKAVKGNKDDTKDSKWIGDLFRLGLVKGSYIPCKIVRILREYTRYRYKLVSCRSSEKNRYQNALTVCNVALDSVVSDIFGKSSTSIIDYLLEQSGTSINHEEIASKLLRSLKSKEDAVIESVEGYQMTDAQKYRMRLVRAHMDYITAEIKDVDKMIENMISSNPDFENAVQFLCTIPGVKRDSAVTIISEIGTDMSQFSSSKRLCCWAGLTPGSNESAGKKKSVRITRAGVYLKPALVQCAHAAVKSDKSPYYKKKYESLVKRRGKKRAIIAIARMILTAIYQMQSTGEQWNPSDLYKIDMPVALVEKQMAKAIKQAKKLLQREGILPPDEPLAS

SEQ ID NO: 388318 - protein, 428 aa, unidentified
MLIYRVAAIDVHKKMLAVVVADVAGEGEYQFERRKFGATPDQLHLLAQWLSQQEVEEVVMESTAQYWKPVWGALERYWKPGRQKRDGATKMSGTLHLCQAKSNRGPRGRKNDFADGERMIKRLVAQELVLSFVPDPEQRLWRTVTRRKWQLTRDRVRFQNQLESLLEQAHIKLSSWVSDLLGLSARRMLKALAAGETDPAALAALADCRLRATPEQLRDALGACAQLHGVYRRLLKMALEELQLMEEQIEKLDREAAGLLQQHQDAVQRVAGVPGFGTDSALQMIAEVGPEAAAFRSEKALASWVGVCPGDEESAGESKSTRSPKGNRNMRRLLNQAAQSAVKVKGSIFDVTFRRLLPRLGYKQAGWAIAHRLCRLLWKILHEGVRYEERGPAVSAKSKRTRTARMIKELQKLGYRVEAAPLAAITPA

SEQ ID NO: 388319 - protein, 331 aa, unidentified
MNLAGIDVANETFDIQRRCTEKITHRTFSNTKSGHQQAIAWLQRGCRQVRVCLEATGIYHLQLALALNRAPGIELMVLNPKAARRFAEAQMVRGKTDKVDALVLLHYLECMPFKPWSAPSHHRLELQSMAHRLAQLTKEQTRERSRLHAAERAGAHTRVAQHDTRVHIRYLERRYQLLETKAIELMKQYAIMAEDLALVDTVPGFAETAAMQVLAEVGVLPDDLQPQQWVAQAGLDPKPDESGTSVHSPRHISKQGNAKLRAALFFPSMSACRCDPNVRAFYEKLLARGKTKRAAQTAVMRKLLHSIWGILKHRQPWDGDKFCRIEKPMIA

SEQ ID NO: 388320 - protein, 339 aa, unidentified
MRQLYCGFDLHSNNVYCGIQDDADQRVFRRRMPNDINVILQELKPFKKELVGVVVESTYNWYWLVDGLMEAGHTVHLANPNAIKQYNGLKNVDDQTDAFHLAHLLRLGILPQGYIYPKEERPVRDLLRRRMLLVQQRTAHVLSLESLMMRHLGCRLKSREIENLDEHGLDSHLPDPTLRLAADTAISMVQHLNGRIKLLEKEVADRCKLKPEYAKLTTIIGVGPILATTIMLETGPIQRFASDSNYSSYCRCARAVKTSNDKKKGENNGKNGNKYLSWAFVEAANHCRRVCEPARKFCQRKTDKRNGVVAVKALACKLSKAAYFIMRDQEVFKLNKCFG

SEQ ID NO: 388321 - protein, 346 aa, unidentified
MEHYAGIDVSLELSSVCVVDTRGKIVKEAKVASEPEALVAFFKALSIAVKRIGLEAGPLSQWLHAGLRQAGFETVLLETRHVKAALSAMMVKTDRKDALGLAQLIRLGWFRSVHAKSIGSQEVRALLVARKQLLGRLIDVELSIRGILRGFGLKVGQVTRKAFEARIRELVTGQPTLERIAGAMLSARASLKVEYEKLHKAVLAIVREDAVCRRLMTVPGVGPLVAITFKSAVDDPSRIAKSKSVGALFGLTPRKYQSGEKDVTGGITRVGDEMVRTTLYEAANVLLSRITRFSKLKRWGMDVAKRRGSKRAKVALARKIGVILHRMWVDGTTYRWAAAEPIAAQT

SEQ ID NO: 388322 - protein, 381 aa, unidentified
MAATREDEYSALAPVLYLAFELGNDFWKLGFTVGMGQRPRERNIAARDLDALQREIRLAKKRFGLPETAPVLSCYEAGRDGFWLHRYLVEHGVQNLVVDSSSIEVNRRQRRAKTDRMDVGKLLGQLIRYRSGERKVWSVVRVPSPKDEDDRQLHRELSTLKKERTRQINRIKGLLASQGVRLPVKADFAQRLESVRTWDGSPLLARLQARLVREYERLEFVGKQIKELERQRVQEIRHSQDPKVDQVRALMRLNGIGVNSSWQFIMEFFGWREFRSGKEVGGLSGLAPTPYQSGSSYREQGMSKAGNRHIRAMAIEIAWGWLGYQPESELSRWYEKRFGQGSKRIRKIGIVALARRLLVELWRYLETGAIPEGAVLKTRLI

SEQ ID NO: 388323 - protein, 432 aa, unidentified
MEKIHVHAAGIDIGSRQVFVGLEEGPVRSFETFTSSLADVCKYLLENKVTTVAMEATGVYWYVLYDMLLETGLDVWLVDGRETRQVPGRKTDVKDCQWIQQLHSYGLLKRCYVSQGLIKELRSYERLREDHLRSASMHVQHMQKALIEMNIRIPEVLSQVHGKSGTALITAILGGERDRHKLVSLCDKKVRENKGEELYKALEGHYTDYGLFALGQAYQAYFFYQNQMRDCDKKIQTLLEKINKDKGLPEGVETGHRKPIRHNKPQIKNLGEHLLKVFDGRDATKLPGITDYNWLQLYSELGSDLSKWPSEKHFSSWLGLSSGQNDSGKRKKSKRKGKPAVGQIFKEMAHGLLNSKYIGLGAFAKRMRGRKGPAIAIKATARKLAVQYWRLMVKGSDFVEKGIEGYELMLKEQKSRQLQRLALEFNVQLIPV

SEQ ID NO: 388324 - protein, 340 aa, unidentified
MTIVMGLDQHRAQITTEWIDTETGEIGRARVAPAHREGVRRFFGRFAGQELEVALEATTGWRFVVEELRRAGAGVHLAEPAATSALRGNKKRPKTDRTDARHLRELLMIGRLPESWVPPDHLLDLRSKVRLRHTLVDQRGEWQQRIRAVLYHHGLPHRAELHLLSGEGRAWLEQVDVPDAAREQIMVAIAMTEALDVQIAPLDKQLRAYARRQLGCRALMAHYGIGELTSVAILAELGDCRRFSSSRQAVRYSGLDITVYQSDGRRSPGHLSRQGPPVLRWALYEAAQAARRPSAPDRGYYDQAAERLGGNRACLAIARKLLLRSYHTLRELGEEALQPA

SEQ ID NO: 388325 - protein, 367 aa, unidentified
MKNTIVHHEGAASLEAVGSKVKPRGGQIKIGLDMHARLYVAVAQYDHLLPKAARRLSPNEFVPWVEALLGQGHSVHVVYEACGFGFTLYRQLIATGAHCYIIAPCKLDEQCSRVKTDPRDATMLCQRLSRYLEGNTRELAVIRVPSQEEERARHVSRQRTQLVCHRQKLEAQGRSLLISHALPAPAHWWKEQTWRRLSKHLPAWITLRLGMARPALLSLQEQINALTSELEASAPSTLPRGLGKLTSVVLTREICDWHRFNNRRAISSYTGLCPGERSSGSKRVPGSVTKRGNPRVRAALVECAWRMVRFQPQYPPVQKRLAVLAKGSRALGAVRKKAIVAVARRLAVDLWRVHTGRRTAAELGLSI

SEQ ID NO: 388326 - protein, 355 aa, unidentified
MNQDKYIGMDVHQATISVAVMDSSGKLIMECILETKAATILEFIAGLRGTLSLTFEEGTSAAWLHDLLKPHVSHLVVCDPRRNALLKDGSKSDRIDARKLAELLHSNKLHAVYHGEHGLRTLKELGRSYLTITKDLTRVMSRIKALYRSWAIPCSGATVYARRHRAAWLAKILEPGVRLRAERLYQQLDLLQPVRQEARRDLLVESHQHHAVKLLRQIPSIGPIRAALLVALLQTPHRFRTKRQLWAYSGFAVETHDSGEYRFVRGKLVRNRERITVRGLNHNHNHDLKNLFKGAAISASTRPGPLCDFYVARVEKGMRPTMARLTLARKMVAITLTIWKKGVEFDAKPLNRQAA

SEQ ID NO: 388327 - protein, 365 aa, unidentified
MKDFTRIGMDTSKSVFQLHGVDSSDQPVLRRKLRRRQVVEFFRKLPAVQVGIEACGGSHHWARELAALGHDVKLLPAQHVKPYVRRNKNDAADAEAICEAMSRPRMQERFVPVKSVEQQAGLMLAGVRDQLIARRTQLSNTIRGYAAEFGLVAAKGLDKIEPLLTRIVADETVPELARTLFAELGREYAGLEVRLDQLEARLLAWHRHNELSVRLAEIPSIGPICAAGLVMKVTNPQAFRSGRDFAAWLGLTPKDHSTAGKLRMGVITRAGDEDLRRLLVNGATSVVQQVSKGRGKPMPWLTALIHRKPKKLVAVALANKTARIAWKLMVSGERYDPRGALVRRAERPATLPKGLAARAMAAQAA

SEQ ID NO: 388328 - protein, 328 aa, unidentified
MIDSTPISTQVHAAEVHIGVDVSKARLDVHIDPLGQTLSVDNTPAGIQSLLKTLKPLNVKLVLIEATGRYERRLAADLLEAAIPVTVVNPRQARDFAKSLGKLAKTDRIDAEVLAQFAKLGHHRLAEKTPEHLELLDQRVTRRRQVVAMLATEKTRLEQLTDKLAIRTVKRVMRVLDQQREDLDRDIAKLIESDDDWRNKAQILDSAPGIGPDTANQLVVDLPELGRLNRQEIAALVGVAPMNCDSGSLRGQRHIRGGRADVRTTLYMAAYNAMRCNPTIHAFAERLKKAGKPFKVVATACMRKLLIILNVMVKTNQHWNPELFLKTA

SEQ ID NO: 388329 - protein, 446 aa, unidentified
MKKSSRMSVIHPHAAGVDIGAEFHVVAVPPDADAAPVRTFQRFTGDLHRMSGWLKTCHITTIAMESTGFYWLPAFEIPEAAGFNVILVNARDAKNVPGRKTDVNDAQWLQKLHSFGLLRASFRPEHDISVLRSYLRQRERLTEYRAAHIQHMQKALMQMNVQLHHAVSDITGVTGLSIVRAIVSGERDPSVLIQYRDVRCKKTPEVLQQALTGNWQPEHLFAPEQSVAFFDFYQEKIRECDDQIETSLLQLSTGTEEPEGVLPSARHRTKQPNQLSFDVRPLLWKITGADLTQIHGFGPYLALKFVAECGTDMNRWPDASHFTSWLCLSPGNKISGGKVLSPKTRRSSSRIAAALRLAATTIGRSDTALGAFYRRLSSRIGKAKAVTATARKLAILFYNALKYGQKYVDPGADYYEERYRNRVLDGLKRRAKSLGYSLQQDPELCV

SEQ ID NO: 388330 - protein, 330 aa, unidentified
MLFVGVDGHKNTSQITVMDAASKILKRQRIVSTLEHFRQSLAEFSGPIKAVLEASYCWGPMYDWLDGLTDEVVLAHPSKVRAIAEARIKTDKIDSEILAHLLRADLIPRAYAPSKDVRALKRVLRQRLFLVQLRTMVKNRIRALLTQHSVELPKETLFSKLGLAWLQQVELPGPDGCVLREDTELLKVFAKKIASTDKLIEQLAEGDEAVPWLASLPGIGKFLSVVIRWEVDNINRFQEAKKFASYTGLVPSTYASANRMVHGRLTKRGNKWLRWAFIEAVTPAVRSSASLRAQYLRIKLRRGAKDARTARKLAELAWTVWTEQRCYEQR

SEQ ID NO: 388331 - protein, 415 aa, unidentified
MFKIIRSKCCGLDVHKTWIYACIGIADSSSRVDYKQARFSSFSKGLKQLSEWLAKYDCTEVCMESSGKYWIPVFNVLETTCDVTLAHPKYTKPQKGNKTDRKDAMWICDLFMCGMIKRSFIPPADIRELRELIRYRTKLTNMITGEKNRALNCLTVSNLKLDDVFTDVFGKSSSSIIRFMLDNPGVYFDVTPFIHGRCKTPVEEIQAAVDGAMSPAHAVKLRECMSHIDQLESHKRMVEQDILRLSAPYGDELALIRTVPGFDKNPMTAITILSEIGADMSVFPSAKHLVSWAGCCPRNDQSAKKIKSARISRAGVYLKPLLVQVANALIKSKHHPEFKERYRKLKARRGHKKAIIAICRMLLTAIWNVLSKAEPYSPAGYLSDHQVTEVKTLTQKQALNLLKSRGYVITDEEPA

SEQ ID NO: 388332 - protein, 416 aa, unidentified
MLGFAYAQPNLHGWADDHHDIFVTDDSAKTLDQFRIDHTCDGFALLHSHLANHQTSPGLVLIAIETSRGLLVHELLQKGYTVYAINPKAVNRYKDRHVLSKAKSDVLDALSLGHILRTDRHLFQPLKPLPEDYRLLDRLCSDLRKVVDEKSRVTNQVISCLKEFYPKALDIFSLDSQIFIDFVKAFPDHRALSACTKKAFLMFLKKHRYPCPAKAEELWKTVQAPTLQPDKVVARSGILRLRMLLDQFENLKEHITHYEQEIQAILEKIPESTSVKSLPGVGERLAPELVATLGPNCKDGHHRFQAAEEIAKLSGCVPVVRESGKWKTVSLRYACVKPLRRTFHDWAFASISRSSWARAFYDYHKERNQSHCTILRNLGKKWIKILFAVWSNGTSYDETLHIQNLKTRNVPWAMAL

SEQ ID NO: 388333 - protein, 375 aa, unidentified
MSSAATIYLGLDVHKESVTIAVLPSGALAPTRVDKLPNDLAKLRRFCERQASQGTVRACYEASGAGYVIQRAMTAWGYHCDVIAPSLIPIKPGQQRKHDSYDAAQLARLYRAGELTVVRIPTEAEERVRDVVRCRETFQREVLRSRHYILKFLARRGFVYREGTPWRQAHYEWLRRLAAASSPLAPEDRQVFGEYLGLLEYKLSRRDALDEQIEALALTPALASAVATLQCFRGIQQQAAMVLATEISDWQRFASPRQLMAYLGLVPREHSSGDRERRGSLTKAGNTHCRHVLVQAAWAYRFQPKIGVALKARQRGQSPVVIAHAWKAQHRLHTFYQRLAFRRRPQIAVVAVARELVGFLWAVMRDVTPLVPATA

SEQ ID NO: 388334 - protein, 395 aa, unidentified
MLYLGIDIAKHKHYASIMDSNGNPVEKPFPVYNHRKGGQALLTKIYQYIDSQNEIKIGMEATGHYWLALYSFLLDHGFSVIVLNPIQTNAWRKGTEIRKRKTDAIDATMIADIIRFGNFLETPLVDEKMFALKQLSRFRNSLVSSMGDLKRKSLVVLDQTFPEYQKMFSDVFGKTSTQLLLEYTSPSDYEQLSIDDLTQIIEQTSRNRLGKEKAHQIIESASHSFGITFGKEAFSFQLKMLMEQIHFIEIQLKQCEEQMDQLLIELDTPITTVPGIGPILGATILGEIGDIKRFDKPSKLVAYAGIDASVSQSGQYNSTSMSISKRGSSHLRRALFQAAVTGYKYDPILKAFYEKKKQQGKHYYVCICAVARKLCHIIYAILKNNKPYKVPIPIA

SEQ ID NO: 388335 - protein, 470 aa, unidentified
MAAVMIGVDPHKASHTAVAISVAEEPLGELRVRACAAQAERLLAWAAAWPQRIWAVEGAGGLGHLLARQLLAAGERVLDVPPKLGARVRLLAAGDTNKNDPDDARSVAVAALRSAGVREVRPDDHAAVLKIWSKRYRDLGRTRTQVVCRLHAVLCDLVPGGVSRPIYAARAARILEQITPPDAVAAARCELAAAFLEDLRRIDAQISESRKKLAAVVAATGTSLTGLFGVGPVIAAAVIGDVRDVSRFPGRNHFAAYDGTAPIEVSSGPRKIYRLSRRGNRRLNHAIHMAAVTQVSHRHSDGRAYYDKKLAEGKTRKEALRSLKRQVSNAIFACLQAGARRAAAHAKGPGGQQGNDSAACAAGSHPRHRLFGQATPGPGAHPTTPAASPAPGPASARGRAGHSSIAATLPSATPQVQVERPQRSEDERPGGAARQRPYSAARKALGQKFPLKAQRPKGTSHAAKRTDGTP

SEQ ID NO: 388336 - protein, 326 aa, unidentified
MDTVTTQYIGIDVSKAQLDCAMLQSDMQFVSMHFSNDANGHAALLAWLTQHTKDSLVVVEATGGYEAAMVAKLATNGLRVAVVNPRQVRDFAKATGVLAKTDAIDARVLAQFGRAIQPQVRAPKAEELTELEAVLTRRRQLIEMITTETHRRSMVTSRVIAKQIDQHLKWLAKQVDTADTDLGNMIKRSTLMQRKLDVLTSVPGVGRVTAVSLIAQLPELGTLNERQLSALVGVCPFNRDSGTLRGRRTIWGGRARVRAALYMAALVAARHNPLLKTFYQRLLAAGKAKKVALVAVMHKLLLILNAMIKRDQMWEPNYVHNQSKPA

SEQ ID NO: 388337 - protein, 400 aa, unidentified
MISVGIDVSKGKSTVCILKPYGEIVSKPFNITHTQKDLSELSSMLFRLNDEVKIVMEATGIYHLPVLTYLQEKGFFVSVINPYLMKSYRNESLRKAKTDKIDSRIIANYGIDHWFKIKEFQTSGEIYEELKLLGQQYRHYMKLHLLSLAELTHLLDLTMPGIKNLLASWNETNRKDKRSDFVERFWHYDVITSMSEQEFTEEYILWAKEKKYVPSQEKAKVIYTLAQESIPTLPSETSSVKILVTEAVRVLKEVDATLGLILSRMQEIAKTLPEYSVVREMGGVGNTLAPKLIAEIGDVRRFRNGKALVAFAGIDPPPYESGQFVGCNRKISKRGSASLRKVGYETMRSLKMRSRPEDPVYRYVVKKESEGKSKKSAKIAGLNKFLRIYYARVTELYKNI

SEQ ID NO: 388338 - protein, 555 aa, unidentified
MKKSTALHRITAEMAVNAGTFFISALLPMKGGKMASFDNNTMRGFRKEGKYTSSELSSSTLDDGTKVVTAPITNIKRRICGGIDVHKSVLMACACVTDKETLSAVFYVRQFTSSNSEIRRMAEWFAEYGVKDVCMESTGKYWIPVYDILEQNGMKPVLTHPKYVKQAKGRKTDFRDAIHIANLFRMDLVVASFIPPADIRDLRELCRYRLKLTYIRTSEKNRFQNSMTISKIRLDSVFTDPFGKSASRIMEYLINTPEDKIQDEKILSLVDRRVKASSEEILDSIHGYEFIGVQRDKLEIISKHIDDVNKCIDLIDKKLDYYRFKYASIINHLCTIPGVSTESALYILGEIGADMSVWNDSKSLASWAGLSPANNESAGKKKSTKIGKGGHYLKPLLVQCALASIKSTKKQPYFFRKYQTLKKRRGHKKAVIAIARKMLVSIYHMIKEDKDFLPIDYEQVMEQKQNDRELNLKNVILFLGERGVDAKVIRMIESQCSKEELSEGKAAETKLKKTAKEKQPESNTTAKPVKKRGSRKSSTRTKKETPSVQSSAATA

SEQ ID NO: 388339 - protein, 341 aa, unidentified
MSIATLGIDLGKTSMHVVGLDASGKPVYRKKLTRTALVRFLSNLAPCRIAMESCAGSHDIARKADSMGHDAVLLPAQFVRPYTKGQKNDNSDAEAIAEAATRPTMPTVSIKDATQQEIQFLHRTRQGWIKQRTETANRVRAMLLEFGITVPQRILNLRRALPGILEDAENDLTDGVRQLVADHWQQLQELDDRIADITQRIERIPVRDARAARLMSIPGIGPMIATAMVAAVGDGTQFTQGRGLSAWLGLVPQQFTTGGKPRLLGISKRGNRYLRTLLIHGARAVLQQAHRGDDALRRWIQQVNGRVHRNKAAVALANKLARIAWAVLTRGETFRASAAAA

SEQ ID NO: 388340 - protein, 371 aa, unidentified
MNTCERSKTLFVGIDVHKDTHTAVGLSPFGEKIFEMKIGNEAADFVSLVQKAQQEAHHVGLVPFFGLEDVHSWGERLSSFLVQEGLPVRAVAPILVDHARKHATHPEKNDSLDAQGVAEVMIRKIDSLPAYTLTKEAEIAKNIRDISFDREHLVKERTRIKNQLHVLLYRIFNTQYAKEFKNPFSVKALRHWMKARPKDISPFLMRSMKRKVKRLIDIREEIKELEHELEILTKESGHTIQTASGCGIVIAAEIIGEVGDISRFHSPAQLAKYAGCAPRECSSGKTIRWRKTRSGNRRLNRSFHRIALSQISRMGNVAAQTYFKRKVSEGKSKSQALVCLRRQMVNIIWMMMKHKTEYRLPVNEAGLSTEK

SEQ ID NO: 388341 - protein, 298 aa, unidentified
MSVYVGIDVHRERSQVAVVTEDGQVQVNRNVVNGSEPMLRLIGGLPAGTPVAFEAAYGWGWLVALLEDYGFDAHLVHPLRCKAIASARLKNDKVDAAILAQLLRADLLPEAWIAPAPVRQLRAQLRHRASLVRLGTQLRNRIHAVAADFGYDRTGSYWTGPGRGWLAELDLPPVSREIVTDCLASIDALAPVIERLDGELHQRAKADPRVKVLRTLPGVGEFTALVMLAEIGDITRFSSARKLASWAGLTPTVRGSDLTVRHGHIWKAGLGVAAVGPEPGGADRQALPAVRRHLRRHR

SEQ ID NO: 388342 - protein, 345 aa, unidentified
MKITTIGIDLAKNVFQVHGVDERGKAVLRKQLKRKDVVKFFANLEPCLIGMEACGSAHYWARKLAELGHTVRLMAPQFVKPYVKTNKNDRNDAEAICEAVARPNMRFVPVKTTEAQAVLALHRARQGFVKARTAQANQIRGLLAEFGIVIPKGIGHIAKRLPEILEDAENALPGMMRQLFERLGEQLKELDRQVGELERQIKLWHRENEPSRKLEAIAGIGPITASAFVASVGDAKSFKNARQVPAWLGMVPRQDSSGGKTTLGRISKRGDVYLRTLLIHGARSVIAQIERKPDQADGWLKKLLARRHKNVAAVALAAKNARIAWALLAHERSYQSDYVAKCAAA

SEQ ID NO: 388343 - protein, 344 aa, unidentified
MDHFGGLDVSVKETSICIVDDTGRIVREVKVASEPQALLKVLGNQAYRFKRIGLEAGPLSQWLFSALAEAELPVVCVETRHMQAVLKAQINKTDRNDARGIAQMIRVGLYRPVHVKTLRSQKLRMLLTHRKLLQSKAIAIENDLRGTLRNFGLKVGMVGKVRFEARIQELVENIPDLALLVEPLLIVRRALREQIVILHRRLLAIVREDEVCRRLMTTPGVGPVVALTYRATVDVPARFRKSKSVGAVFGLTCARYQSGEIDWSGKISRCGDEMMRTMLYEAAQSMMHSKKWSWLKAWAMQIARRRGMKKAIVALARRLAVIMHRIWVDGTEFRWTREKAAAAA

SEQ ID NO: 388344 - protein, 416 aa, unidentified
MELQRNKVCGIDVHKRFLIATILFRDGKKDTQRFSVTLEDLLKFRDWVIENGCEQVAIESTGIYWHPVHSVLEGKIDLIVANSYKIKHTPGRKTDVSDSEWIAELCLNGMIEPSRIFPKDDRELRRLTRAREGYVKQMTQEKNKIHQSLDSACIKLASVISDIFGKSGMYLLNCVLEGREIDDIIDGIPSGRLKKKADQIKESIKSRLDVSQVILIRGSLSLMKSIQERIDELDGEISARIQYRKNDLAIAMSIPGTGFVSATAILAEIGNYTDFKKPEQLAAWCGLVPSLYQSAEKTILGGITKQGSKHIRRMLIQVAYAISRTKDSKLKKFFLRIQAKKGSKVAAVALARKVLCILHHLLINQEMYIEDRDKKNMRQKPLIPPSPIEMSIQEMIDYIVRAGYVVTKSDSIGGFG

SEQ ID NO: 388345 - protein, 409 aa, unidentified
MEILYPRCAGLDVHKETVAVCVLTPGPGAEPSKQIEQFGTTTGELRRLRDWLRESGVTHAAMESTGVYWKPVFNILESACQIILVNARHVKQVPGRKTDKADCAWLASLLRHGLLQASFVPELEVRELRDLCRGRTKLVRECVQVGNRLRKVLEDANIKLDSVASNTLGVSGRDMIGALVRGCNDPAELAELARGRLRAKLPELEQALEGQVTAHHRFLLRELMRQLAFLEGQVARFEKQIERHMPPFEWAAELLMTMPGVDRTAACALIAEIGADMSRFASSRHLASWAGLCPGNNESAGKRRSGKSHRGNRWIKGLMTEIAWAASRKKDSYSRAQYRKLAGHRGKKRALVAVANSLLQAAWYMMTNRQSYHNLGADYYERLNRKDLERSLVRRLEKLGHKVILQDAA

SEQ ID NO: 388346 - protein, 367 aa, unidentified
MKKIIAEKTTRRIKQADGKLTIGLDLGDRSSSYCVVNKDGEVIKRGSVATTKKDLNRIFGALRHSRLALEAGTHSPWVSRHLKELGHEVIVANPRRVRLITASSNKNDRLDAEMLARLARVDPKMLYAIRHRGETAQADLTVIRTRASLVEARTRLINTVRGLTKSFGERLRKCDARYVNEEMAQGLPGPLKEAMGPLLKQIGQLSGRIKEFDEAIQKMARERYPEVELLTAIAGIGVLIALTFILTLEDPHRFQRSRDVGAYLGLRPRRRQSSQSDPQLGISKEGDVYLRKLLVQGAHVILGRSGEDSDLRRFGQKLAARGGKGAKKKARVAVARKLAVLMHHLWVTGEVYESLRKTQAPGEPVAA

SEQ ID NO: 388347 - protein, 483 aa, unidentified
MKSKPKEKNRKATDHRTQRHWHEMNRKQRRETMRKIQSEDLSLEVVHPDAAGIDIGNESHYAAVPPSRDNQPVRRFGCTTAELKAMAAWLKQCAIRTVAMQSTGVYWIAVYDILEQTGLEVYLVNARDTKNLPGRKSDVQESQWLMKLHTYGLLRNSFRPSQEIRTMRTYWRQRNDLVQAAARHIQRMQKALTQMNIQLANVLTDISGATGQAIIKAILGGERDPHKLAAFRDPRVKASEEQIAQSLEGNWQPDLLFVLKQEQDGYEFCQKQMAECDRQLAQYLQQREDRSQGAMLPVEKRKGRLKKKKGNAPRFDLRERLFCLTGTDLTRIDSIDVQTATTVISETGYDMSKWQTENHFVSWLRLRPDNRISGDKIIGKGRLPTNNRATIALKMAASTLRKSNTYLGAQFRRLRTKLGAPCAIKAMAAKLARLIYRMLRYCMKYADKGAAFYDLQYRQLQIKHLKRKAASLGYQVTQIPAAA

SEQ ID NO: 388348 - protein, 393 aa, unidentified
MYLVGIDIGKLKHSFCLLEKETGEILVEPVFFENNRDGFNALLSSFKHLPQKDILIGMEDTGHYNLALLKFLLDRNYQVALINPVATNLTRKMQGGISKNDKLDTLTICDVLSSSQRVKSYRISKYSSFDLYEQKQLTREHHNLKEEENQLSNRLQKCIDVVFPEFNSLFKSKYGIVYMNILKEFGSADAIAHADIRTLRKCFDTGRGKHISLTAQELKEAARNSIGFPSSSEATQIKHLVARIELIKEQIAEIDKKIEEFSLQNNSPILSIPGISHFSGTSILAELGDIHNYSKPSQIIKFAGVAPLTYESSQFTAQHTAITKKGCKYLRKTLYQIITPVIQYNPVFRKFYLLKIAQGKGHRCAQGHCVRKLMRVIYHLLSTGAQFDPALLR

SEQ ID NO: 388349 - protein, 382 aa, unidentified
MPTTPKGAKDVTTTGREGRRGKDSGTVVEGVVLGVDTHLDLHVTVALDCLGRHLGELAVPTTKKGYEMLVCWAEGFGPVGCAGVEGTSSYGAGLARHLRSAGIRVLEVERPKRRHLRRKGKSDSRDAESAARAVLAGETAGEPKSGDGRVEMIRVLRGARRSAVKARTQAANQLRGVRVTAPEALRRRLRGLSTKELVAGAARFRPGGNPGDVEEATRFALRSVARRYQALSEEIAQLDAQLHRLVAETAPELTSLPAIGTDHAATLLMVAGDNPERLGSEASFASLCGVSPVEASSGKVVRHRLNRGGNRDANRALHLICVVRMRIDQRTRRYAARRASEGKSKKEIIRCLKRYVAREVYRVLTTSVDFADSPRKRDASSL

SEQ ID NO: 388350 - protein, 456 aa, unidentified
MSKLSKPNPGLEEARAFTGMSQVHAHAAGVDVGAHEIMVCVGGVDATQIVRSFGSYTVDLQAIGRWLEEHEVETVAMESTGVYWIPLFEELERRGFHCHLISSRSLRRVPGRKSDVVDCQWIQTLHSYGLLESSFRPEADLVALRTLLRHRTQLIQHRAPHILHMQKALLQMNIQLSQALSDVSGATGQTIIRAIVAGEREPHKLAALRNYRCKKDEEEIARALTGTWRAEHLFILKQSLEFYDFYTQQIEACDLEIERTYGLTRSDWKEDELGALPEGKRNSHSKNAPKEIQVRKHLKRICGVDITAVHGVSASLAQTIVIEVGTDMSKFPNEKHFCSWLGLAPKNEISGGKVLKNSTLKTKNRAGQAFRMAAGSVMRADCAFGAFYRRQKARLGPAQAAVATAHLIARVVYRMLKYKVEYEPLSVIAYEQHYREQQLNYLQKKAAKFGFQLAPV

SEQ ID NO: 388351 - protein, 345 aa, unidentified
MQNYTVLAIDLAKYVFQVVKTTGYGKAVFNKKMNRAELKELLRKEPKAMVVMEACGGSHYWCRLAESFGHQVKALPARQVKPFRQGQKTDANDAVAIATAARQPHLKPARVLSEEEQGLQCIEKMRELQIAHKTALSNQLRGLLFEFGIVMSKSDAALKKALPEILEDAENGLPGGFRTVLAQMWALYLTISSELEKLSQFQHQLTLQDEQSRALSALEGVGPVGALGLKLAIGNGVHFKNGRQAAACIGVTPVQHSSGGKENIGSISKLSGHKKLRSVLIQGAMAVLRHLAKREARNTKEQWLKALVQRRGTRIAAVALANKTVRTAWAMLSRQQEYQAPGLLA

SEQ ID NO: 388352 - protein, 424 aa, unidentified
METMFRKCAGIDVHKLFVMTCVRVVDESGETHEEVRRFSTVTRELLEMGDWLKAKGVTHVAMESTGVFWKPVYNVLEEGFTVLLCNAQHLRQVPGRKTDVKDSQWIAQLLQCGLLRASFVPPRPIRELRDLTRHRAQLMGEINQTKNRIHKVLEDANIQLDCVATDIFGVSGRAMLEAMINGETRAGVLKGYARGRLRGKKEALHAALEGQIREHHQFMLKTHYDHLHYLEGEVFQIEQRIGKAIEDEPPNPPASEQPSSVPFLEALDQLDAIPGLNPRVIISVLAEIGTNMAQFPTPGHLASWAGLCPGNNESAGKRKSGKTTKGSPWLRRALTEAAWAASRSKKTYFGAQYARIARRRGKKRAIIAVAHSLLITIYHLLKYRRTYQDLGPDFFDRLNHQRLTNYLVKRLESLGHTVTIAKAA

SEQ ID NO: 388353 - protein, 442 aa, unidentified
MNQFTEKATKRRTAVSKSAEVVAKVQAASRTYGAYVGLDVHKDTIAIAVAECGRGQPDYRGEIANTPKKVGQLIERLSAQYGGEQLLFVYEAGPCGYGLYRQIVATGHACEVVAPSLIPRKAGERIKTDRRDALGLARLARSGDLSAVWVPGPEHEAIRDLTRAREDIKAMETRARQRLGAFLLRHGWVYRGGKSRWTQAHFRWLEQVKFDSPVQQIVLQEYIETVKEMQRRVAGLEGQMRQALTGWSLRPVVEGLMALRGVSLITAMTTLAELGDISRFDSPRQLMAYLGLVPSEHSSGGSRRQGAITKTGNGHVRRVLVEAAWNYRFPARKTRTIERRAEQTSEQVQAIAWAGAETTVRALPALSRSRQNQQAGHHSGGAGVGGLHLGHRLRSPGQDPRESGNGMSRSRQCLRFRVWRAGVENPWRSYEAHSPGRADPRK

SEQ ID NO: 388354 - protein, 438 aa, unidentified
MSNKVIFSLDELFISVGIDVGADFSWMSIALPNQQFVGKPYKILHNSIDSLTTAVSKIKEAEELYSLESRIFLESTGIYHYPLFCYLRDKGFNCSVINPIITKNSTNINIRKVHNDRFDSKKAALVGLKPDLKVSLMPSDLALNCRNLCREYFDLMDNRSAYVNKLQGELRMAFPQYLGIFSKVTINTSLTLLETYTSPSAFLEADKQEIIDIIRSTARFGLTYAQNKYNAIIQAATDANQFGYIIDSNIKRIRLYISFIRKYDEEINSILESLHKLVDANEDADFVKQIHLIETFKGAGFLSAVSIMGEIGDFSAFSKPKQLFAYFGLDPAVKQSGKFEGTKVQMSKRGSAIARRVIHTLTLQSISISRNGEAKNSVLREYYLKKCDSKPKLVAMGAVSHKVCNMIFAILRDNKPFKIIAPQEHIKQYNAAKCDIAA

SEQ ID NO: 388355 - protein, 411 aa, unidentified
MKDLLELCCGLDVHKDKIVACVLSGDIGKTATSEIKEFSTLNPDMITLREWLVSINCRHVAMESTGIYWQPIYEILEAASIEMTLLVVNARHMKNVPGKKTDMRDAEWIATLLRAGLLNGSFIPDKDIREFRRLTRYRKSIVQDITSQKNRIEKFLQSTGFRLSTFISSIFGVSGRNVISHLIEHGTIDIEALNGCLKTQTRLKINDIMVAVNGTLSESQRTFLSMLMAHLDMIENHLAEIEAQIQTAARQFESAISIVCSIEGLGVTSSSAVLAEIGIDMSRFKTAEHLCSWAGLSPGNNESAGKKKSACITKGNPYVKSMLCEIAWVIAGKRNLYLSRWYWRIKQRKGAKKAIIALARKLLVIIYTMLKNGTFFDEELFEIRRAAAEQQRTNRYIHELNKLGYTVELQA

SEQ ID NO: 388356 - protein, 405 aa, unidentified
MTARRRTKKEAERMYWVGFDVGKAFHWVCVLDGEGEEVLSRRVEATEEDLETACSEIAALGGERTVGIDLMGGPATLLEAVLIERGEKIFHVPGITVNRARDAYPGESKSDARDARVIADQLRLRRGSLQEIRPRNEVVAEMRVLVAHRRDLLQDQTRRAARLREVLLGVFPGLEAALDLKREGALLAVTKVATPAGARRLGRARLRRRWLKAKGVRKSQDLAGRIIAAAKAQHRELPAAEAKSALATELASEMLRTRGRIAELDRRLEELLAATAEAEIVRSLPGMGVVFTAEFLAEVGDSSRFASADSLAAAAGIAPVLRASGARSHRRRARRGNRVLKRVLYRSAFSCLSHHVRSEAFYRKKRAEGKSHHQAVIALARRRVNVLWAMLRDGETYREQPAQTA

SEQ ID NO: 388357 - protein, 385 aa, unidentified
MFYVGIDIAKTKHDLACINETGETVITNFRFANSYQGFHQLKLKLKQLSPITQDIHIALESTGHYNYNIVAFLRELGYTVFAYNPFIIKQFAKSQSLRKTKTDKKDALLIASKLRSDVTPEYYQTDKVMDELKELTRYQNRLIQSRSKCKNLYIRLLDIIFSEINSYVSNLHSHFVYELLTKYPSAQKIARARVSSLLKIKRLTADKAHQIQETAKQTIGNASSALSLELVQLIESIQHYDKQVNQTQEEINRLMTGLDSPITSIPGIGSRLDAIILAEIKTIHNFKNPNQLQAFAGLDPAIYQSGQMDNTGQMVKRGSSYLRYALIQAAKLISIYSPHFKTYLKLKISHGKHYNVAVILIAKKLIRVIYHLLKTNQTFDEVKLR

SEQ ID NO: 388358 - protein, 428 aa, unidentified
MRQIALDVHKTFCEVAIREGTKTYSAGRVATERETLELFAESLCPTDEVVMEATGPAMEIARILTPHVARVVVANAQEVRAISHARVKSDRFDARTLANLLGAGMLEGVWVPDAETQGLRRRVARRASLVRQRTRAKNEIHAALSRSLLGRLPVADLFTAEGRAWLQAQELGAEEAETVEGCLRQIDFLDAEVAEIDTKLAKWAVSSAEAKRLMSIPGVGAGVAVTLMAAIGDVSRFSGQRQLVAYLGLDPKVRQSGEEAPRHGRISKRGNGQARSALVEAAWMALRQPGPLRAFGERVRARKGAQVAAVAVARKLACIAWQLLTKEEDYVFAQPSKVRAKLRGAELRAGAPKLRRGHGGPRISATPAERESERELVQRGEVAYRRLIADWKASGPAKKGAGATPGRASSGPSTGQAARQAQAPGPAL

SEQ ID NO: 388359 - protein, 331 aa, unidentified
MGNVTTVGIDLAKNVFSLHGVDADGAVVLRKTVSRARLMEVVVQQPACLIGLEACSGAHEWARRFQELGHTVKLMAPRFVAPYRKNGKNDGNDAEAICEAVSRPSMRFVPIKTLEQQAVLCLHRVRQGFVEERTATINRLRGLLAEFGFVLPQKAGEVRRRATEWLEQMPPRAAGAIRDLREHLRVLDERVKEYERSIEAHARDHEQAKLVQQRLGIGPMSASAIVASVGDMREFKNGRQFSAWLGLVPRQHSTGGKQRLGHITGRGDPYLRTLLVMGARSVLQRASSQSDPLSRWALAVRERRGYHRACIAVAAKNTRVIWAMLNQHAAA

SEQ ID NO: 388360 - protein, 345 aa, unidentified
MRIIGLDIHRAFAEAVVWDDGKLKRMGRVDMRRPLLEAFAKKLSKEDVVVVEATGNASSVAAVIAPHVKKVVIANPKQVRIIAHAKIKTDTIDASVLAQLYASGFLPEVWIPDEPTQALRRQVTRRNQIVRQRSRLKNIIQSILHSHLIPSCPHADLCGASGRAWLFHQILPEDERLAVERHLREFDRLGEDLKVIERDLARSALGDEGVKRLMTIPGVDMVVGLAIVAAIGDAGRFEQSQKLVSYLGLNPSVRQSGPGPAYHGRITKQGRGHARGMLVEAAWAAARAPGPLRAFCESAPAAVSMSPLSPPPASSRLLSGICCAKAKAMPGPALRCTPENCAIWS

SEQ ID NO: 388361 - protein, 351 aa, unidentified
MIIIGCDFHTRYQQIAMANDETGELLLERRLDHQSGEAHTFYRNLQGPVCVGIESTGPIHGFERLLAELGHELWIGDAAKIRASEVRKQKTDERDARLILDLLLAKRFPKIWVPTPDERDLRQLLWHRHKLVCLRTMLGNQLHALAMSQGLCRKKALFTKKGRMELLHLALAPWASWRREELLKLLEQLAAPIAELKRAVMEEANRREDAVLLMTHPGIGPVISLAFVLAIGPITRFCRSKKIASYLGLNPTEHSSGGRRRLGAISKQGNTMVRWLLIEAVYPAVRKDPALRQDYLRLKFRRGHAVAKVAIARKLAVRMYWMLRSGAAYAQLVRMQGSSGATLMDASPSLG

SEQ ID NO: 388362 - protein, 413 aa, unidentified
MDVLHPRCCGLDVHKSSISACILLREAGRVQKHQHRFGAMTQDLRELAEWLRQFGVTQVAMESSGVYWKPVWNILEGQFTVVLANAQHIKNVPGRKTDQKDAEWIAQLLQYGLLRPSYVPCEIIRDLRDLTRMRASLSQEASRISSRIQKVLEDANVKLASVATNALGKSGRAMLEDIITGEDDPEHLASLALGHLRVKIPQLRLALEGKIRFHHRFLLRRLLDQMQFLEHEIALLEERLEDIGRQRPELAQAVARWDTIPGVDRVAAWVLLAEVGDNMAQFPTAEHLASWAALCPGNHESAGKRLRGTTRQGSPWLGRMACQCAWAAARTKNTYLSSQFRRLAARRGKKRAIIAVAHTLIVIGYHLQKNQSNYDDLGGNYFDRIHSDGLKRYLVKRLEQLGHKVTLEPIEAA

SEQ ID NO: 388363 - protein, 400 aa, unidentified
MFCGWDWGSTQHGICVIDDNGTVIKTWMIEHTEKGIAALFAELSQLGDPARIPVAIERGEGLVVGRIASAGHPVLMIEPASFKAARPRWGSAGAKSDAADAFMLADYARTDNHRLRRVEPVAQATRELATLVRARTALVQARTASSNQLWAILSEHWPGAAKVFHKLTSQVALAFLADYPTPQSAALLGEGRMRQFCHRHSYRGGKSAAALVGRLRAAPAAANPIAPKVLEAIIRGSIAQINLLNTEITHLEHELADALAAHPKTVLLESLPRVANVSLAALIAEIGPLLERCDNPEQVAALCGAAPVTRASGKSRSVGFRYTANKPARAAITGFADNSRHSSAWAGDCYRRARSRGARHPHAVRILARGWVRVIWACWTTDTPYTPSRHRGEQLLVAAT

SEQ ID NO: 388364 - protein, 318 aa, unidentified
MYLGLDIAKAKIDCCLMHETKYLHRTFENNQDGFIKLTGWLEKYTANKVYACCEATGSYSEAIADYLHDTGHKIAVVNPLRIKAFVTSELQNVKTDKQDAKSIAIYCQRNQPELYKPASPSERELKALTRYLDGLKDLLTSHTNRSLVAHHSVKPYIETSIKNTKAEIKVIEKVIQSRIKSDDDLDKQAKLLKSITAISDGTIPHILTLFADKQFKTAKQATKYVGLNPIIKQSGNKSTRHLAISKMGDKYIRSALYMPAVVAFRMAVYKPFIKRLKDKGKTNKQIICAMMRKLLVYCFTVLKTGSQFDPKTILNHQS

SEQ ID NO: 388365 - protein, 313 aa, unidentified
MKRYIGIDVSKARLDVAVHESGQCFSCDNTEAGVEALIKQMKELEPELIVMEATGGYERLCAAMLATAGLALSVVNPRQVRDFAKSKGILAKTDRLDARVLAHFGAAIEPKPRALPDAQQQLLDELMLRRRQIVAGLVAEKNRLGMAHTDAVKKSLREAIAFYERLLADVDRQVGEHIERSPLWRAREDLLRSFKGVGPVSSRTLIGDLPELGSLDRKRIAALVGVAPMAHDSGKRKGVRTIFGGRGQVRAALYMVAITAIRANAPIRQFYQRLRATGKPAKVAIVACMRKILIILNAMVRTQSRWNEHLLIS

SEQ ID NO: 388366 - protein, 377 aa, unidentified
MHSENIAAYIGLDVHKETLAVAIAAPERLGEVRYYGTINNEAQAVRRLFQKLQGLYGNILSCYEAGPCGFGLYHQLTAMNIKCQVIAPSRIPKSPTDRIKNDHRDAISLARLLRAGELTPVWIPDLTHEAMRDLIRARAAAKRDSRVARQRILSMLLRTDKRYAGKHWTGKHRTWLANQSFSQPSQQIAFQHYCQSLEQIEDRILQLDQEISRLLPEWSLCNLVCQLQALKGVGQLTAITLVAELGDFSRFSSPKQLMAFLGLVPGEYSIGNSIRPRGITKVGNSELRRLLYEAAWSYRTPAKVGAWLIYYRPDSVTQYSKDIAWKAQQRLCSRYRSLTAKGKKSQVAITAVARELTGFMWDIALAAQSPFSQQKQN

SEQ ID NO: 388367 - protein, 343 aa, unidentified
MDKDRIVAGLDVHKDTIYLCVMDNTEAVIFAKVYGTLTPDLELMCSEMVSHGVTEAAMESTSTYWVPVWNALCESMSLKLVNPYFIKQLPGRKSDVKDAQWIAECLLKNLIRGSFVPDKRVQDMRKYNRRIFDLNEDLTYNSNKQDAALQRCGFRLSNYVSRVNGKSYQKCVRAIITGITDPEELVKLIHGKTLRKYGRNIIKDAVTGDFHQADICLLKQYAELIEVIERQIEECRNALIAMCQEHFPKQFKRLQSIPGVKERAASAIIAETGADMKPFEKATNLVGWCGLKPRNDISNNKVKSNRTTHGNRFLRQILIEISWVASRTRNCFFSNFSYVQCTP

SEQ ID NO: 388368 - protein, 386 aa, unidentified
MQASTLCTPTKDHIGTIFVAIELSQRSWLVTIHAPDRDRMSRHKLAGGDHIGLLALIGKVRMRAEQKLGAAPAVVSCYEAGYDGFWLHRCLTAAGITNFVFDPASIAVDQRARRTKTDRIDGELAIRTLMAHWRGEPRVVRSVHVPSAEQEDARRQTRERQRLITEQTAHTNRMKALLRLIGMPVGNPRRRDWLIWLERQRDWQGQPVSPQLMAELKHEHARLMLLRDQIEVLSEAAAGVELSAAAAQMTQRCALLRRLKGVGPVFAATLTNEVFYKDFRNRREVAGYIGLAPSPWRSGGTDREQGISKSGNPRARHKAIELAWLWLQHQPESALSRWFLERTLNASKRFRRIAIVALARKLIVALWRYLTAGLVPQGAMFNMCNG

SEQ ID NO: 388369 - protein, 344 aa, unidentified
MQMSKELYIGVDVSKNWLDLACYDGISVDWKQGHIRVDNKPSGYHQITRWLKKQGTDKDHVLFCMEHTGLYGQDFRVWLEKEGLVYGMVNPRKMHRFEPDLGENDRALDRIKTDEMDSFRIAMYCEKHSRKIKASPSRLPGEAYFKLKRLMAERRQYTKQSVIYKQQLHDISAHDTEESRKRKQSGLDLLKSQIRQTDADILRIIDKDPCLKRNYDLLHSVKGVGLVVAVDTVVLTENFTLITNPRKYACYIGIAPAKKESGISIRGGNHVSRKGFTLAKADLTIVCLSAIKNDPNIKSYWQRKKAEGKHGGVVLNAIKFKIVLRMFAVIKRQTPFVEMDAYKR

SEQ ID NO: 388370 - protein, 347 aa, unidentified
MQQLFIGLDVHKKTWAVTIQEEHLVVKRFTMEANAAILVNYIQKHFPHHQVQCCYESCCCGYHIYHSLTAAGWQVLVVNPGDIARGHKLAVCKTDKIDSTHLAQELAAGRLTGIYIPSHEQEQFRSLFRRRNDLVKNIRRIKCSIKSMLLYYGIVLPKKYDTITWSKEMLQWLGQQHWSYTPATTAMHSRLAELEFLKTQFLQVSKELRIYTRKNHRQDYYLLRSLPGVGPLTAIGVLAEVGDIRRFKGIDRLSAYVGLVPAVHSSGGRTYTKGLTRRSKALLRSYLVEAAWVACKKDPVLMQYYQERKGGDHKKLIVKLAAKTLSRMYHVIKTGEPYQLEKVKALA

SEQ ID NO: 388371 - protein, 406 aa, unidentified
MTPQVCRIVDLPVYYELETNNGNRDYRIQIGGHYMNYNTVYVGMDVHKESFTLCSCKYEDEKASHYQRTPASYKNVLRYLAFLRTIYGEYTRFVCGYEAGCLGYSLYHQLENFNVECVILAPTTMLEQRSKRRIKTDKRDAEIIARSLAQHNYSPVHIPTETDNQTKEFIRMRDDHKAELKKIKQQILSFCLRQGYQYDGSGNWTAKHVKWLRSLKPTGLYKEILDEYLLTYTILTDKLNRLDQRIEELASKEEYKESVSKLTCFLGIKTHTALSVIVEVGDFQRFVSARKFAGYLGLVPGQHSSGDDRNGLGITKAGNTHVRRLLVESAQSYTRGKIGYKSRVLRSRQAGNSPQVINYADRANERLRRRYYKMVLKDGKKYNIAKTAIARELACFIWGMMTDNIY

SEQ ID NO: 388372 - protein, 426 aa, unidentified
MFAASVDEDQVIARVAALDIGKAELVCCVRLPASGGSKRRVQEVTTHSTMTRSLAELANRLVDLRVERVVMEATSDYWKPVFYLLEAHGLDPWLVNARDVRHLPGRPKTDVLDAVWLCKVAERQMLRPSFVPPRPIRVLRDLTRYRIDLVAARTAEKSRVEKLLEDAGIKLSVVASDIFGVSGRAMLAALIAGQRDPAVLADLARARMRAKISLLEEAFAGLPTGAFAEHHRFLLQRMLGRIDAIDADIAILDAEIEAHLAPFDQAVQRLDEIPGIGPVAAAIIIAEVGVDMTRFPTAGHLCSWAKFSPGIKSSAGKSKGSGSTGHGDRYLARVLGEAVVMAGRSDTFLGDRYRRIARRRGKKKAIVAVGRSMLVIIWHLLSEPDIPFHDLGADHYARTINTDARKRNHIRQLEALGYRVTLEPAA

SEQ ID NO: 388373 - protein, 373 aa, unidentified
MFHFTTLFIGMDVHKESFSLCYYDMMANQFKHSTKVDPNVSYIVNYVTELRRLYGQDAEVLCGYEAGCLGFTLYHQLQAHGIPCIVLAPTTVMKEGSKRVKTDKKDADQLAKALAFRSYRPVHTPTAEDEQVKEYIRMRTDHKVALKKIKQQILSFCLRHDFRYTEGSNHWTQKHVRWLRSLNPEGLYAEILTEYLLTYEKLVDQIERYDTRIEQLAQSDSYQEKVSQLSCFIGIKTLTALSIVAEIGDVNRFATAQNFSSYLGLTPSENSSGDKERRGAITKAGNSHVRRLLIEAAQSLAKGTIGYKSKELKRRQSGNRVEVIAYADKANERLRRRYRTLVLGKNKKQNVAKTAIAGELSGFIWGMMTGRIA

SEQ ID NO: 388374 - protein, 465 aa, unidentified
MAKKAKKMKKGKRSELLIVNINAAGIDIASTEYQVCVPEDRDSDPNRRFEAYTCDLHSIGQWLKQCGIETVAMEATGIYWVQLFMVLQEYGFDVVLCNAKHIKNIAEKKTDYVDASWIQLLHSYGLLRESFQPDNQIRQLKDLMRHRERIIQSMSQDILRIQKALEMMNIKVHKVLSDIKGKSGLNVLEAIIGGERKPSELAILIHHSVKAPREEIIKSLEGNWNDAQLFILKQSYECYCFAQKQIEDLDQSIKQLLIAYSLIAGESNNNKPIERALKRKSVQGNALHFDAEQYSYDILGVNLTRIPGISSLTCVKLISELGRDFPTKFPSYKHFCSWLNVAPNTKKSGGKILSSKVPKRKNFAGQALRVAANTLSHSKDYLGDYFRRMKSKLGHIQAIIAVAHKLARIIYHMVKEKVEYNESIDRIKNVNMLDKKRKSLQKRLAKIEAELSFYACNSSNLGLVR

SEQ ID NO: 388375 - protein, 485 aa, unidentified
MAEHSMAYVAFDTSKLHNAVALAEAGRAGEVRYLGEFENTPPATAKLLRKLGAKHGALSCCYEAGPTGYGLYRQIRQLGHDCIVVAPSLIPRKPGKRVKTNRLDALSLVKQLRAGELTAVWVPDARHEAMRELTRARGAAVLELRAKCQQVSSMLLRLGRHYPGRKTWGKAHMSWLAGQKLEHLEQRIALEERLVAVRQAQERIERLEHAIGEAVPAWSLAPLATALMALRGVDFIAATTLLAEIGDLGRFRTPRELMAWLGLVPSECSTGEDTRRGPITKAGNRRARQLLIECAWSYRHPPRVGRDKLARVSAAPPAVRDIAWKAQVRLTGRYRSLCRAGKPDVVAITAVARELSGFIWAIAHAVADGAAVAAADAKPTEADNSSAGTRPASQRSAISSRNGIHGKPAHGTQATGRARTDRRRTPGALPDTAKPAAGATAEGPAPAHTATQRQPGAALARGGRRDRRLAGGVCRMAAGAAGGNP

SEQ ID NO: 388376 - protein, 334 aa, unidentified
MTRFLVQSHPMRFYPQQHKAYWGIDLHARTMSLCILNQDGESLRHRNLKTHPEMFRRAMAPYREALVVAVACLFPWYGLADLCAQAQLPFVLGPALSLQASHGGKAKNDQSDAQQIAVLLRGGRLPQASGSPAARRATRDLRRRRMPRRRKRAELLTPLQHTKSPYNVPEIGKKIASKANRDGVAERCADPAGPQSIAVALALSAHYDRLLRAMELTLLTTAKPHDATTLSRRRTVPGLGEMLSLGLLYALHDIHRFPRGPDCVSYCRLVTCAKASAGKRYGTAGTKLGNASRTWAFAAATVLLLRAHPAGQQDLTRLEKKHAQGQVLTVLAHN

SEQ ID NO: 388377 - protein, 360 aa, unidentified
MFTERTSVGLDVHARSVAAAAIDGVTGELFQTRLTPAHDHIGDWVRSLPGPVVVAYEAGPTGFGLYRSLTAAGIRCEVAAPSKLQRPSGDRVKTDARDAVHLARLLRLDEVTAVSVPTIEQETARDLVRAREDARGDLMRARHRLSKLLLRHGRVYCDGKAWTARHDAWLRAQHLDTRAARLTLESDYDTVLTVTARRARLDAAILDLAAESEFTPLVRRLGCLRGVATLTAFALAVEIGDWTRFTGKTIGSFTGLVPSEHSSGGSRSQGEITKTGNGHARRLLVEAAWHHRPRYLISATMRARWQQAPPAARARGDLGNRRLHQRWATFDQRGKRSTIADVAIARELAGWCWSLAVMDD

SEQ ID NO: 388378 - protein, 494 aa, unidentified
MKTSNQTKTTSVYRNQNVLLRAVFERAGDTRKVLCVALDYAKRKHVALICDGNGDILRAAFPVENNPAGIDFLIKEVSATARRRKIPRNQIFLGGEDEAAYVANFTAALRDKGYLVVRVNASEAKENRENLTASTDALDLLGIAKTLLARRARLTGDPDRADPAYHHLREINRCRRGLVRQKTAASNRIHALVDQLFPGFLNDSKSGLCAFTGASLELMKERFSAPEVSRRRPAALANLLRRHHVHHPDETAAKIITLARGALPPAPHRVATLQRTLAATVDLYGCLERNASELRNEAALTLATTPYAMLTSIPGIGFVLAAGVAGELGEPKQLARVDSLCGYAGIVPHTFQSGGPDSAAVQGHASKRCNHILKDWVVQSAQKLHLYGPPELKDRITRWNANGQHGIFAAARRYLRLVRTLVLNEIPYLGPEGRARSADPDRLAASALHTWAVLQRKWRPIPGGLDLIADEAHPIGFWRRVIKETHGIDLPARP

SEQ ID NO: 388379 - protein, 312 aa, unidentified
MTMIRVGVDTSKHVFQIHGVDENEQPVLRRQIRRSEVVKFFAKLAPTRIGIEACGASHYWARLLRGLGHEVVLIPPQYIKPYVKRGKNDKIDAEAICEAMSRPGMRFVPIKTAEQQAGLTMLGARDLLVKQRTMLINAIRGHAAEFGVTVAKGPKQVGQLLQHLASDEGVPALAREMIGVLASQLDGLEIKLKTIEKRLMAWHRQDQISQCLATIPGIGPISGVSFALKVADPKAFRSGRHFASWIGITPRENSTAGRQKLGRISRAGDEDLRRLLVIGATAVIHAAKPGRTAPWLLALLVSGETYRQPAQA

SEQ ID NO: 388380 - protein, 336 aa, unidentified
MFQLGIDVSKKTLDLCLLREGVKGRVKTRKLQNDINAVSAVIAWLSKQHCKPEDVHIIMEATGVYHESLAYGLHKAGGRISLANPHRAREFARGMGMLTKNDRVDAYMLACYGALKAPEPWLPPPEEVRHLSALLRRRDALVADSTREKNRLEKYLATDTPSVIAESVEAMIGQLNAEIKRLDSLIRSHLNQHPELKKDFDLLTSIKSVGYQLGLNMLVILRSHDFTTAEQVAAFLGVVPVEKYSGTSVRGCPKLSKIGPPEIRAKLYLASLCGLRFNPLMKAMYERLCLRGKAKMCAIGALMRKLVHWCYGVLKTQKPFDVGYLSSYARSACKAA

SEQ ID NO: 388381 - protein, 422 aa, unidentified
MDRRAESGSERTTFVGFDWASDHHDVVVVDGEGRIVEEFRFDDTAEGWKSFRKRLSSYPPAAVAIETSSGATVERLLEPGYAVYPVNPLAAKRYRERKAPSGTKTDRFDAWSLADALRLDGHTWRPLKPNDPLTAELRLLCRDEIALIEQRTALICQLRAALGEYYPAALEAFEDWTSPSAWAFVEAFATPDALVKAGKRKWEKFLHIHKLYRPETYEKRLSLFAQAQTFCGSPATTKAKSMLAVALAAQLRVLESHLDKFRERIRELFAQHPDHELFGSLPGAGEKLAPRLLAELGDDRERFDSPEALQCYAGTAPVSYQSGKIKKARFRRACQKVLRQTVHLWANLSRTKCPWAEAYYQKKREEGQSHACALRCLGQRWLKILWKMWQSRTSYDAELHQRNQLQHGSWVLALIAPPVGSS

SEQ ID NO: 388382 - protein, 374 aa, unidentified
MTMMQHRRVRYIGLDVHKATIAVAIAEEEGSPSSYGTIANDPDAVRKLMRQLGGKGVDLQVAYEAGPTGYALHRQLTKLGITCMVVAPSLIPVRPGDKVKTDRRDALKLARLLRSGDLTAIWVPDREHEALRNLVRTRADAKVDELRAKHRLSKFLLRLGVHPPVGMRNWSLRYFQWLRQVEFEHLADRIVFGDYLAEVTAAGERIKRLEAALQQCAESSSQLRLIRALQAFRGIGFLSAVTIVAEVGTLRRFRTAPQLMAYAGSVPSESSSGSKQHRGAITKSGNSLLRHVLGEAAHHARHAPRVGGLLERRQQDLPREVIELAWRAQVRLHHRYRHLAARIGVHKTLTAVGRELAGFVWAMGQLLETVPAAA

SEQ ID NO: 388383 - protein, 356 aa, unidentified
MVAVMIGVDPHKASHTAVAIGVAEEPLGEFRVRACAAQAEQLLAWAQAWPQRTWAVEGAGGVGRLLAQQLLGAGEQVLDVPPKLAARVRLLQAGNTNKNDPNDAFSVAVAALRSPGVSEARRDDHVAVLKIWSKRYKDLGRIRTQAACRLHQVLCELIPGGVAGQITAGQAAHILESITPADAVAAARCELAAAFTADLRGIDAAIRDTRKKLATAVAAAGTSLTGLFGVGPVIAAAIIGDVRDVSRFAGRDNFAAYNGTAPIEVSSGQRKVHRLSRRGNRRMNHAIHMAAVTQIRFQGSKGRAYYDKKMAEGKTSKEALRALKRQVSDALYRRMKADARRAAASAAGPGGHRGNG

SEQ ID NO: 388384 - protein, 407 aa, unidentified
MEVLYARCAGLDVHKDTVVACVRIVEGNRVESKLRTFGTMTRDLDELAAWLAEHGCTHAAMEATGVYWKPVWHVLEEEIELILANAADIKNRPGRKTDACDAQWIAELLAHGLIAPSFVPPMAVQEMRSLTRTRKQLVREVVQHKLRIQKTLEDANIKLSSVISDVLGQGGRAILMAMIDGEEDPKRLASYAPRVHAPASTLIEALHGRVRDHHRFLLKLHIDQIDALEVAIGKIEKELQRVDHPFREARRRLITIPGFSDTVASVVVSEIGIDMSRFPTAGNLISWACMCPRSDESAGKRRSTRVRPGCVWLKTTMVQAAWAAVRVKNSYAHAQYMRIKSRRGSKKAILAVAASLLTAAYHMLRDNTDYKERGGGYFDTLNKAKTAQRLLKRLADLGYAATIQPAA

SEQ ID NO: 388385 - protein, 388 aa, unidentified
MPAAETPVAYLGIDVGKSSHSACALDAGGGVAFRAELANRPDDIDRLLERAGSGALVVVDQRRNIGALVLARAHAHGNPCAYLPGYAEKQARGMFPGIAKTDAIDAEVIARTALGVPGALRPAPEEPEGAASLRILSSQREFASSARTRAKNRLRATLLEADPALEGAVDPSSRWQVSVLAEFGGAAGCSAAGWRRFSGAARRAGAPAAGARRLWVALLASSRSGRPLPAGEDVAVRMLAREIASLDADIEELDSLVADSLAGDEVYECLLTVPGIGPKTAAALVTSIDISAFRGHDELASYCGVAPSDRRSGSSIRSTSPQRGGNRQLKNLLIFSCNSLIGTDNRFGRYYGECRARGMRHGKALKAVARKRLKVIYAIMRDAVPYAA

SEQ ID NO: 388386 - protein, 371 aa, unidentified
MEHNNIFIGMDVHKKSIDIAIAYEGRDGQVLHYGKIDGTLDALDKVVRKLVSKGGCLHFAYEAGPCGYQIYRHLTAKGFDCMVVAPSMIPKQSGNRTKNDQRDALMLARLHRSGDLTAVYVPAAEDEAMRDLTRAREDAKEDEKKGKQRLSAFLLRSGYRYSGRTPWTVAHRRWLADIKMPHASQQIVLQEYIDTYEQCNLRVKRITEQIRALMPQWRMYPVVQALQSLRGVSLIVAAATVAEIGSFKRFGHPEQLMQYLGLMPSEHSSGERVKRGPITKTGNRHVRRMLVEASWAYRLRARISRPLLKRQEDLPQNIRDIAWKAQVRLCGRYRHFWAKGKAKQVIITIIARELCGFIWAIAVEAEGAITG

SEQ ID NO: 388387 - protein, 454 aa, unidentified
MRKPQVVPDEDHEVMYERVAAVDVAKASGVVCMRTPDPARPGRFVNRIWDNVPATRAQIAGLGAELLRCQVQMVTLESTSDYWRIWHYVLETAGLAVQLVSPSQARNLKGRPKTDKLDAMWLARLTQQGMLRPSFVPPAAIRRVRDFTRARQDLVAERTRCLQRLEKLLEDAMIKITSVAADGLKAKSVVAMVAALAAGERDPRTLADLAKGPLRAKKDALAEALDGMFDSHHGVIAKMLLGQVAFLDQQITTMEDQAIAALAEVPGSWGVDASGQTGPGCGITPGSPVLAAAHRLAEIPGISVWLAIVIIAEIGLNMAAFPTPAHLVSWMGLCRSAAQSGTRHGKGKPKKGNSYARAAAGQAAIGAARTATFLGERYARIARRRGKAIAQAAVARSIMIIAWHLLNDPAARYRDLGPDWHASRINRDKKIRNHLRGLQALGVTVTITDDEQAA

SEQ ID NO: 388388 - protein, 463 aa, unidentified
MAVIRSSGLGASSPCVSLTRELFWHLRLLLRARIADSFIFGFSRPGRKELVMETLYDCCCGIDIHARTAVCCLIKAGKKDVRTFSTMTDDLLRLLDWLVAEHCTHVAIESTGVYWKPVFNILEGSLEVILVNARHIKAVPGRKTDVKDCEWLADLLRHGLLRASFIPPLFIRELRELTRYRQSLIREQTALANRIQKLVESGNIKLGQVASDALGVSGKLMLRALARGESDTEKISELAQRSMKRKKAELKRAVSGRMTSAQRWILTEMLDQYDEIESAIKRVEQKIDEEVESSEDPFVREAVELLDSIPGIAKTVAQIIVSEIGVDMNQFPTDRHVSSWAGMCPGNNESAGKQKSGKTTKGSTYLRAALVQAGWAASHQKGTYLSAKYKRLVKRMGKKKALVAIGHNLLVIAYHIMKQRVSYKELGEDYFDRKYKQGQRARLIRKLESLGLKVTVEELPEAA

SEQ ID NO: 388389 - protein, 343 aa, unidentified
MDHFAGLDVSVKETSVCIVDDTGRIVREVKVESEPDALLAVLKNPTYHFKRIGLEAGPLSQWLFSAVAEAGLPVICVETRHMRAVLKAQINKTDRNDARGMAQMMRAGLYRPVHVKTLRSQKLRMLLTHRKLLQSKAIAIDNDLRGTLRNFGLKVGMVGTVKFEARIKELVENLPDLAVLVEPLLIVRRVLREQIGILHRRLLVIVRDDEVCRRLMTVPGVGPVVALTYRATVDVPARFRNSKAVGAVFGLTPSKYQSGEINRTGAISRCGDEMMRVMLYEAAQVMLTRTIKWSWLKAWAMKIARHRGMKKAIVALARRLAVIMHRIWVDGTEFRWTRDVATA

SEQ ID NO: 388390 - protein, 315 aa, unidentified
MDAGAGTWVGIDVSKAHLDVAVFGGMQWRETSDPGGLARLTDRLVALHATLVVIEASGGYEAPVAAALAAAGVPLAIVNPRQVRRFAQALGVLAKTDRLDAAVLAHFGALVQPEPRPVPDAAQLALLELVQRRRQLVDMLVAEKQRRRTASGHVGQQIQEHVSWLEQRLDEIDRELRDMVRSSPVWREKDDLLRGAPGVGPALSATLLAELPELGTLNRRQIAALVGVAPLARDSGTLHGRRTCWAGRASVRSVLYMATLVATRFNPRIRTLYQRLRTAGKPKMVALVACMRQLVVALNAMLAHRTPWRMETLTP

SEQ ID NO: 388391 - protein, 359 aa, unidentified
MPSIAEQQRPVTGGVDTHSEVHVAAVVDQVGRILGSESFAATEAGYRAALAWMRRHGRLERVGVEGTGSYGTGLARYLTSQDVAVVEVIRPNRQARRRRGKSDTADAVAAALAALNGEASGTPKAHDGAVESIRALRVARRGAVKAATQAGNQLRDLIVTAPEPLRAKLVSLSTSARVARAARFRPGELTDPIAATKQAMASLARRYQRLHAEITELDAALEALLPQVTPAGFVAAQGVGPQVATTLLATLGDNPNRLRSEASFAALCGASPVDASSGKQRRHRLNRGGDRQANSALWRIVFVRMSHDPRTKAYVAKRTAEGKTTKEIMRCLKRYVAREVYKTLVRPTRPVALAAGAAT

SEQ ID NO: 388392 - protein, 289 aa, unidentified
MNKYRETYGVDISKDVFDVYGSLSGHHQFYNDESGFKKFLKGLPENSLVAMEATGYYHYRLAQFLYKNAVVVSVINPLSIKRFIQMKLAKVKTDKSDAKAICEYAQNNAVPVYNALTEVQSECLQLFRLLDTYLKQRTAVKNKVHGEEALGVPSKFVYRSLKRQRKQLDKEVKAIEEKILSLVKEDQEQQLTLLTSVPGIGQKTALFLIVITDGFSKFEKASQLCSYVGITPTTRESGSSVRGRARICLASDEQIARGRHETGNCEIYCSCAPLMPVSTTRLVEKSMSV

SEQ ID NO: 388393 - protein, 387 aa, unidentified
MQALLYCCCGVDVHDEMIETCIIKGFEDEPEIIRKQFQTKPKGLEDFTMHLIEHECFFISMESTGVYWRPVYEAIEDHCERFDKIVVTNAAHMRNVPGRKKDQDDAEWLATLLRHGLLKSSFVPERVFRDLREASRLYKKFVGERSRYVNRIMKLLQAHGFKLSNVLSDVLGASGRNILKALAVRGSLSVEDISSCVRGRPRRTPFEIHEAVSGSFNPDEQQLLSILLGKIETAERDMSTITSLMLDMMKPNQKALDIVDSVPGFDQLATMLLLAEISTTPHLSFDSASKLCAWAGLSPRNDESAGKTKSRKILPGSPYVKSIICQAAWAAVKSRNNPFREWFWSHKGKLGQKKAIIAVSRQLLTTIYTLLKNDTFYDPVVALANRR

SEQ ID NO: 388394 - protein, 480 aa, unidentified
MSLYRDTTMYENILSRLALSSFVIGATSPTQNLILATFGHHELSPHFVGARIAMSFERRSLARRQLAEEVKGMEVIYERCCGVDVHKKKVVACVIAPEGKEVRTFGTMTEDLLELAGWLKNWRVTHVAMESTGVYWKPIYNLLESEFTLVLGNAQHIKTVPGRKTDVKDAEWIADLLRHGLIRGSFVPERSQRELRELLRYRTSLVQEETREVNRIQKVLEGANIKLGDVASDVLGASGKAMLEAIVQGVDDPKALADLAKGRLRDKLPALERALHGLIGPHQRMVMQCQLRHLNFLDDEIARLDKEVARRMDPFEESIQQIDDIPGIATRTAQVILGEIGLDMTRFPTASHLASWAGVSPGNNMSAGKRKSGRTTRGNHWLRSALVQAARGAVRTSGTYLNAQYHRLAARRGDKRAIIAVAHSILVIIYNMLRNKTRYEDMGIEYFDKRDSQTIVRRTIRRFERMGYTVTIAERQPVFS

SEQ ID NO: 388395 - protein, 337 aa, unidentified
MDRRYVGIDLHRRRSVIYAMDGEGDRLFCERIDNDALRLLEVVSAAGAGAEVVIEATYGWYWAVDLLRDAGFSVHLAHPSGNDWGKRRVKNDERDARDLADLLRLGRLAEAWIAPPAVREARELVRYRARLVQLRSGLKAQVHAVMAKEGVLPGVTDMFGPKGQQLLDAMELGDAYQVRVESLRDLIEVYDREVASLERRIHELLRDDRGYQAIQALDGVGRTLGAIFVTEIGDITRFRSPEALCSWAGLTPRHRESDTKVVRGKITKQGSKLVRWAALEAIVRYHGGPALRDGFHRIAERRGTNKARIATARRLMTLVYYGLRDGEIRCLQQRAVA

SEQ ID NO: 388396 - protein, 419 aa, unidentified
MTQRQDNAAIAIIHPVCCGLDVHKEKISACLMKIDEQGREASEIREFATFTDELIKLREWLRGSECPIVAMESTGVYWRPVHNVLEHHLEVIVVNARHIKNVPGRKTDIADSRWLASLLKHGLLRGSFIPSKDIRQWRELSRQRRKVTESLSDYKKRVHKLFETANIKIASVVSDLFGKTGRRLIEQLCDESASSFSEQAVAGLACGRLRAKAAELYRSIQGYFEGHHRFQLCSLMRIITILESEIGMISDRLQLLMKDHDELLGRVAAIPGIGERSAQMIISEVGYHLDSFTDAASFASWAGLCPGNNESAGKRRSGRTAVQKHPFKTIMVEVAWAAVKTKGSYFKDKYHRLKSRRGAKKAIVAIAHRLVKALFQIIKHGERYRELGEGYLKSRKRTSLRALRHQAQAMGFQLVPVAE

SEQ ID NO: 388397 - protein, 357 aa, unidentified
MSETAPDADAVIGIDSHKSTHAAVAISALGARLGSLSTLANSCGYRALLDWARSLGFVRAVGIEGTGSCGAGLSRFLSERGCPLLEVNRPNRQLRYQRGKNDTLDAESAARSVLAGQVTARPKSGTSAVEMIRHLKVACDSAVKARSQAMHAIKAIIVSAPSALREQLNHLTGKMTLLRHLAALRPGPLTSTTSSAKASLRAIARRWLALDAKIKDHDANLGQFTQQLAPDLVQAHGMGTGTAAEMLILIGDNPERIRSEAALAKLCGACPIPASSGKTNRHRLNRGGNWQANAALYRVIVVRMRAHKLTLDYVSRRTAEGKSKPEIIRCLKRYVAREILGYLCCPAHPPAAATAAP

SEQ ID NO: 388398 - protein, 310 aa, unidentified
MGGINAAIDVGKHQLEVALGSNGELFSEPNQPRAIARLAKRLAQLGCERVLIEGGSYQNVLVAALRAAELPVVIINPRRVREFAKSIGRLAKTDHIDARVLADYGERIQPPVRELPDEQNQALRGLWVRREQLIEMLVMEENRLEHAPKALHRSLEAHIAYLRKQIKQADNDLDRAVRNSALWDKYELLSSVPGVGPVLSVALLSDLPELGRLNRREIAALAGVAPFNCDSGTLRGQRKIQGGRKRLRRVLYSATVASVRCNPTLRPFYQRLRGTGKPAKVALVAAMHKLLLILNAMLKTRTPWRPPCPA

SEQ ID NO: 388399 - protein, 341 aa, unidentified
MSEREYVGIDLHRRRSVIVRVDRDGKHLSTVRVANEPLEVVAAVAAAGPNPEVVLEATYGYYWLVDLLQELGASIHLANPSGLNWGNRRVKNDERDALDLVKKLRLGELPEAWIPPPEIRELRELVRYRAKAVRLRSGLKAQVHAVMAKNGILPARVDMFGPGGQAQLDAIGKDLPMNYVIRIESLRDLIEVYDREVTMLEREIHRHLKDHPGYRAIQQIPGVGPTFGAIFVAEIGDVTRFSSAEKLCSWAGLTPRHRESDTKVHRGRVTKQGSKLVRWAAIEAVAKNRGGTCLQADYHRLAERRGKQKARTAVARKLLVFVYYGLRDGVIRSLQPAQDAA

SEQ ID NO: 388400 - protein, 343 aa, unidentified
MDYFAGLDVSVKETSVCIVDDTGKIVREARVASEPEALLQVLTNTIYRFKRVGLEAGPLSQWLYSVLAEAGLPVICVETRHMRAVLKAQINKTDRNDARGIAQMMRVGLYRPVHVKTLRSQKLRMLLTHRKLLQSKAIAIENDLRATLRNFGLKVGIVGTVKFEARIKELVENLPDVAVLVEPLLVVRRVLREQVGMLHRRLLAIVRDDDVCRRLMTVPGVGAVVALTYRATVDVPARFRNSKAVGAVFGLTPSRYQSGESDRIGRISRCGDEMTRTMLYEAAQSMLVRSAKWSWLKAWAMKIARHRGMNKAIVALARRLAVIMHRIWVDGTEFRWTREVAAA

SEQ ID NO: 388401 - protein, 343 aa, unidentified
MKDTVFAIDLAKSVFQLAVSHHPGRVSKQYRLTRSQLLRFMGKQPAATVLMEACGSAHFWGRELDRLGHRVRLLPVRHVAPYRTGNKTDRIDVEAMLEAGRNEKICDVPVKSIDQQGLTALHRVRSRWLACRTARINTLRGLLREFGLVMPLGARRVVPQVRAWIDDAEVGIPTPIRAVLRELCDEIGELERRMRLVEDQLETIGSHIPAVSQLRTVPGIGPLTGTAIVAFVGSPQRFPSGRHFASYLGLTPRERSSGTSRHLGRISKRGDTYLRMLLIHGARAVLCHAKRPATQDALRRWALALEKKRGHNVAAVALANRIARIAWAIWSRNQEYREVNRQA

SEQ ID NO: 388402 - protein, 372 aa, unidentified
MTKDTLNVGLDTDKNAIDIAIAEPLPKGEVRYYGKIANDKTALLRVVKRLQKDGRPLRVCYEAGPCGYAIHRWLTDVAGVTCEVVAPSLIPRRSGDRVKTNRRDCLSLAKLLRAEELTAVWVPDPAHEAMRDLTRARAAAVADLVRCRQRLGSLLLRQHVRYAGKPWTKKHRAWLGRLAFPAPAHRLLMVELLEALDQTQARRDRFNAHIAELAPRWSLAWLVDALQVLRGYALINATTIVAEIGDVRRFANPRQLMDYVGLTVSEHSTGERVRRGRITKAGNGRARKALVEAAWTYTHPAKGAKTTAAQATPALRAIADKARHRLSARYRKLRARGKLAPVAVTAMARESLGFIWAIAQAAAPAPAPHGRR

SEQ ID NO: 388403 - protein, 394 aa, unidentified
MLKYCVGIDVSKTELQCCISVIDQLQKVTVKASAKFTNTKSGFTRLHQWITSRHKHQEVPLVVVMEATGIYYEQIAMYLSQQHYALSVVLPNKAKKYLQSTGLKSKNDKIDAQGLARMGAEQCLALWQPMDSYFYQLRELTRQHQSLQELKTTVNNQLHASEAGMYQNNLVINQLEALLITFDEQLHDLTTAIEKHIADKEEVKQKVDNICKIKGVGTLTVAVLLAETNGFVLFENSRQLVSYAGYDVVENQSGNHRGKTKISKKGNSHIRRAMHMPAFCVVSCEQPPFDGLFNRTLQRHGQKMKSYVAVQKKLLVIIYALWKNNSVYELNHRHNKDKHTGEKEQVLSSLPGLAQADPVAGQKNSASLPEQVALHKVNLLSNDRSLLPLCQEQK

SEQ ID NO: 388404 - protein, 362 aa, unidentified
MKKVSKESQRKQWAQDKPTMTMGLDMGDRFSHYCLLNEEGDVVEEGRMQSTEAAFRRHFASDPRMRVALECGTHSPWVSRLLTELGHQVIVANARKIRAITASESKNDRNDAEKLARFAAHDPRLLSPLEHRSSERQLDLNLIHARSTLVRARTMIVNAVRGLVKSGGGRLPACSTESLPTRAPAAIAPALAAVATPLIEQIALLNAQIGGMDKQIEKLAAKYPEISLLRTAPGVGPIVAAAYVLTLDRPDAVPYNRSAGAFLGLRPGQSQSGDSDPQRRISKTGNSCLRSLLVQSAQYILGRFGPDSALRRWGFNLAQSGGKRGKKRAIVAVARKLAVILHSMWRSGQRFQPFPQLAVAAA

SEQ ID NO: 388405 - protein, 326 aa, unidentified
MTLSHLLDNTFVGIDVGGAGLDVAWHRGDSAQYANRPDAIAELVRRLLAGPKVTRIAIEPTGGYEKPMVEALRQAKLPVELVHTSRFKGYRTMVGVKAKSDTSDARLLAAYAAAPDDVRGRKADRVELPQDALREELRELASRRDQLKHMIHAESCRLGITRHATLRQSILAHLETLRSEDKQVLQMMHALVRQRLDLRRDQKLLQTVKGLGVVSALTLIAAVPELGHLDNKQAAALIGVAPFVHKSGTLTAPARIHGGRAAVRRILYMAAVTASRYNPVLKSFYERLIAKGKPAKLALVALMRRLVVFANAVLRSGQPWKGAIPT

SEQ ID NO: 388406 - protein, 353 aa, unidentified
MLPDRTTITRRYRRSAYVVTVGIDLAKNVFAVHGVNAAGKAVLVKPLVRRAKLLELIATLPACLIGIEACTGAHYWAREFQKMGHTVRIMAPQLVSPYRMGGRHGKNDAADAAAICEAVTRPNMRFVPIKSVEQQGQLFVHRAHQGYVSERTALINRIRGLLSELGIVLPQAFKAFLSGVAQVLEDLPGYCNQVIGDLLNELYHIEEKIKNSEKLIQQLARDNSAAQLLMQFRGIGPMTATAIVASIGNGHDFKNGRQFSAWLGLTPRQQSSGGKARLGRITKAGDSYLRTLLVLGARSVLLGAAKNDDPVSRWALQLKERRGYGRALVAIAAKNARMCWAMLHLRDEFIFPA

SEQ ID NO: 388407 - protein, 360 aa, unidentified
MNAIHYIGFDVHKKTIAYCVKTADGHIVEEGTLQAQRMELCRWAKRRQVAWQGAMEATLFSAWIYDTLKPYAQQLSMGHPAKMKAITAGKKKSDCLDARTIADLLRCNLLPACYVLPPHLRDLRRLLRYRNLIVRQSVRMQNRMAGLLMESGAPFDRERLHRKKYFADLMKSLREVPESVKDLLRMSRGSMEMFESTQKQLIKRLLCDPALEQRLERLMSIDGVGPITALTWALEVADPHRFSSVADAVSYCGLTAAFRSSAGKQQRGPISKQRNAWLQTALIEAAKLAPRWNPQLAALHAQQRERGHANRATLQVARKLVAYLLAVDKNGQPFQVRTPPPRPKAKPRKRKQPATLASAA

SEQ ID NO: 388408 - protein, 411 aa, unidentified
MDRIYDKCCGIDVHKKLIVACFKKGNRQEVREFGATTRELLILADWLKDSGCEMTAMESTASYWKPLYNILESSGLKAMVVNAHHMKAVPGRKTDVKDAEWIADLLQHGLLRPSYIPDKDQRELRELVRYRKSLVGERTSELNRLQKMLEGANIKLSGTVSDINGKSARSILEYLLTGESIDGAKYDEMYEKKIIAHNLKATKEQIVDDLNGIMSPLQRRMMKELLNHLDELNIHIKNLDDEIDHFMKPEEKKASAAIQDVTGIGNTSAQAIISVIGTDMERFPTDSHISSWAGLCPGDNESAKKRKSGKTGKGNALLRTTLITCAHAAVKNKKSYFYAQFMRISSHRGKKRAYVAVAHSMLIAIYHILKDGVVFKDLGAEYYNQFNKERKINAYLKKLKALGWEAPVVAA

SEQ ID NO: 388409 - protein, 320 aa, unidentified
MHRDSTYATILDANGKIVSQRRMGNDKVLPYLSNYRIEKIGVEASNQIAPLYRLLSKKGYTVSVSHPKKTRYIAEAKIKSDRIDSKAIAELARLDALPPAYMPDQETAMLREKIRRRAFLVRERVRLRAKIKSLLTYEGIEPPSDYGLFTEKGAEWLHSIALEPIESYLRVIKPLDNEIKQLSKHLKELAEDDEDIKLLMTIPGVGYYTALLVKSEIGDINRFIDGDRLCSYAGLVPSTHASGGTVRHGNITKEGSRWLRWVMVEAAMTHVHKYNTSITKAYHRIAERRGRQVAIVAAARKLLMCCYAVLKNKHPYYDQT

SEQ ID NO: 388410 - protein, 411 aa, unidentified
MEAIIERAAGLDVHQGSVVACVILGSPGRRPSRETRTFGTTPRDLAALRAWLLELGVTHVGMEGTGVYWRPVHAALEGAFTLIVGNASHMRNVPGRETNVKDAEWIADLVRHGLVRASFVPPPEVRVLRDLVRHRKALAGTLAAERNRTLELLESAGIELAGVMSDVFGVSGMLMLEALADGTATPAAMADLAERRLRRKVDRLALALEGRPAEHQRLLLRLHIRRLGEIGRDLAELEAAIGAAMRPFAAQQALLVTIPGVDALTAAAIIAEIGADMGAFGSARRLAARAGLCPANRESAGKRKGHGTREGDPRLKAALVTAAVSAARAKGTYLRDKSHRLRARLGAKKAAVAVAHKILVAVFHILERAVPFADLGADYLDRLDKHRTAERLVRRLGALGYEVMLRPKAAA

SEQ ID NO: 388411 - protein, 424 aa, unidentified
MQYALPLVLPDVPAGGVCAGIDWATADHAACVVDMAGRVTDRFSAAHDKAGIAAMITRLRQGKVTEVAIERGDGPLVDALQAAGLTVVVITSRQVKNLRSRFGAAGAKDDRFDSFVLADTLRTDRARLRPLVPDTPATISLRMTVRARRDLVRHRVAACNQLRAHLAVAFPAGIRLFHDLDSPISLAFLARFGSQDAAADLDEQAIGAWLTTIAVRGRPAPASVLCARLHAAPPGATGAGGAAQACITAALTATLTTLSAQIKALETQIAGQLAAHPDRHIFTSLPRPGTVRAARLLAEIGDCRSRFPDPESLAGLAGVAPVTRRSGTRIAHGFRWSVNRQLRDAICDFAADSRHASPWAAAIYHDARARGKDHPLAVRITARAWTYVIWRCWHDSTAYDPAEHNALQAILAQQAAGSATQDNR

SEQ ID NO: 388412 - protein, 416 aa, unidentified
MKIVRPICCGMDVHKNIIVATIGITNKKTRITEYIQETFSTLNHDLLNLKQWLINHKCFDACMESTGKYWIPIFNILEDEINIYLTHPKYVKAIKGKKTDKKDSKWICDLFKHDLIKFSFIPPKEIRALREISRYRYKLVGMRSSERNRYQNCMTVSNIGIGSVFSDPFGKSAQAIMKEVLESDIIEDEKILKCIHGSCKNKDKILDSIKHCNIETDQRFKMNESMTHMEELQVHINNCEIEIMKRAAPMFDQFMHITQLPGISTLSAILIISEIGVDMKQFESDKQLTCWAGLAPANNESANKKKSVRISKAGQYLKPLLVQCALGAIKDKEGYFGIKYSRIKKRRGHKKAIIAIARMMLVSIYHMILTGETFNPSDYESFRNPKPPIKQQVLTEESAIEFLKKSGFDVSKLTKP

SEQ ID NO: 388413 - protein, 425 aa, unidentified
MTLHENVVPPEAEEDFAAWVAIDWADKKHVWALQETGSSRRQPGEIEASPEAVDAWVSELLLRFPGRRIAVALEQKRGALLCLLSKYAALVLYPVHPATVSRMRAALYPSNSKDDPKDADLLLDILLYHRKHLRRLDADTVETRKLQILVEDRRQLVDQATAYSNQLRAKLKLYYPQALRWLPDLHAVVAGEFLKRWPTLPLLQKARRETIEKFFHQHNCRSEELIQKRLEEIPQAVVATTDAAIVDSSVAMVLALVNLMDVLRTHIAALDREIAATAAAHPVLPIVASLPGAGPVMVPRLIAALGTQRQRFACASELSSATGIAPVKQASGQSEWIHFRWACPKFWRQSFHEWAGHSLAKSTWAQAYYREQIRKGKGHHAAVRALAFKWQRILFRCWQDGQPYDEQKYLAALRRRGSPYAQAAA

SEQ ID NO: 388414 - protein, 452 aa, unidentified
MDKKSKRIESLQLAVLRPGSAAIDVGSMMMMISYSDKEGNQNLLEVDAFTESLEHLATTLQKAGVTHVAMEATGVYWIVIYEILERQGFQVTLVNAKHFKNVDAQKTDVKDCQWLHQLHANGLLRASHIAEEVYRELRGYLHERNLLQKQKSDTLNRIHKLLTQMNIKVQHLISDIEGVSGMKLLRSIADGITDAKELLALIDVNKLKANEDDLLKSLQGIYKKQYVAILKNTLKSYDFFKDQMRVYEKLIEDVLKKMLPEDGNGYKPIIKGKTIYTRKNQYRINLKEYLKHIIGVDVTRIDGIDEISALEIIAVTGLNMNKWPSADHFASWLNLSPRPKISGGKIIGYEKRFTNNNATQAFRMAAQTMWQNKGSLGHLYRRLSAQKGSKKSNKAIARKLAVIFYHMVKNKTEYDKNKLQVNTERQRAKRVSFLSKEARKYGYVLQNAADSL

SEQ ID NO: 388415 - protein, 345 aa, unidentified
MNKSIPTSTTTVFCGIDVSAASLSVALIVPDHSVCQREFPNSASGYKALLGWLAKFNAPVRVSLEATGIYSLDLALALDAAASIEVAVLNPKLVNRFAQTLRRSKTDAADAVALAEYSQRMPFTAWKRPGVNHLRLRTIGRYIESLVVDLAEVKNRLHTAASTSTTPRAVLVDLKQAQAALLRRLAKMRREAMKLIQADELLRERFALLVSIPGIAEVSARQILSELVLLPPGMTVRQWVAYSGLDPVHQVSGNSVHKPSRISRAGNRHLRRALYMPTLSAVRNDPHLRAFYQALRQRHKTGLQALMAVARKLLHAIYGIFKSGKPYDGRRLFPQIQLAVESIAG

SEQ ID NO: 388416 - protein, 324 aa, unidentified
MEIVHTRCCGLDVHKKTVVACVLISQEDGLIERQVRTFKTMTADLLALADWLSSLNVTHVALESTGVYWRPVYNVLEDDQRTLLLVNPQHMRAVPGKKTDVKDAEWLADLLRHGLLRASFIPPAPIRVVRELTRYRKTVVQSRADEANRLQKTLEGANIKLASVATDVLGMSGRAMFAALLDGERDPEVLADLARGKLRAKLPQLRQALVGRVQPHHLVLISQILAHIDFLEEAIAQVQAEIERCLPPFDEALELVQSIPGIKEVAATAILAEIGTDMSRFPSAGHLSSWAGLCPTNKESAGKRMKGPANHGNVWLRAIMGEVA

SEQ ID NO: 388417 - protein, 349 aa, unidentified
MILVGCDLHTRKQQVALLNTTTGELRDQELSHIGDDVERFYAALSPPVTVGIESTGYSLWFHALLQRLGHTLLVGEAAKIRAMVVRKIKTDRRDARHLRDLLKDNRFPVVWIPDPTTRDLRALIKHRLRLVRIRTMVKNGLHAIALNQRLALGPSLWSRQGLAQLQALVLLPHTRRRREDSLELLHWLNRHIDELDLHVATAAAADPAARRLMTHPGVGPLTALATVLVLGPVGRFPSSKHVVSYIGLAPAISASADKYRLGHISKQGSALLRWVLGQAAPLATRGDAALKRIYFAVLRRRGRPKAKVALARRLLIRLYVMLRDQIDYDEFCRRGRTRREGLKLAGTPV

SEQ ID NO: 388418 - protein, 407 aa, unidentified
MERPAPDLQTVDYAASRERPWRRATYKWEPAMRNVRFVGLDVHAETIAVAVAEVGGEVRSLGTIPNRPESVRRLIGKPGKVEQLRVCYEAGPTGYVLYWQLSELGVHCEVVAPTLVPVKTGDRVKTDRRDAQKLARCYRAGDLTAVWVPDAAHEALRDLVRARLAGKRDQLRARHRLGKFLLRQGRRASEGTMPWTGKYLLWVKQQRFEHAAQEATLLDYLHEVEHAAERIVRLERGIDAAVESMPDSMRTLIAGSQCLRGIAKVSAVTLVSELGQLSRFGQARQLMGYAGMVSREHSSGERVGRGSISKAGNAHLRRIVTEAAWNYRHRPSLGTTLAARQSGQSETVKSIAWRAQHRLHTRYRALLARGKPKQKVITALGRELLGFIWAIGCELERTHTQEIRRAA

SEQ ID NO: 388419 - protein, 416 aa, unidentified
MNTWNEIKCYAGLDWAKDHHDVVVVNREGQIVADFRFSHSLEGWTQFQKAIAAFTPLAVVLETSQGLAVDKLMESDCLVFALHAKSAQRYRDRKIPSGNKTDRTDAWALAEALRTDGQQWKPLQTGDPLAEQIRLLCRDEMGLIQQRTLLVNQLQQALYEYYPVVLEAFEDWTLESTWDLVIEFPTPQVLQKAGRRRWEKFLHVHRLWRQKTAEERLAVFARATEFCGSPATLAAKSLLAVSLAKLLRTLQAQLDQYRHQITQLFEQHPHHDLFDSLPGAGVTLAPRLLGSLAAQPDRFTDPQTLQCLAGTAPVSYQSGQIHKVHIRYQCDKFLRQTVHLWSDCSRKTCAWAQVYYQKKRSEGKSHACALRCLGQRWLKILSKMWKTKSIYNSELHALNQQKHGSWVLALIPKKPA

SEQ ID NO: 388420 - protein, 392 aa, unidentified
MIYVGIDVAKDKHDCFITDPDGGVSFKPFTIQNNRQGFDELYQRIRSISEDLTKVKVGLEATGHYSYNLLGFLLDKGLTTFVINPLHTNLYRKSLSLRKTKTDKVDAHTIASMIMSDVNLKSYSDTSYHNEELKSLTRYRFDKVKERAKLKSSVSRLVCILFPELEKLVPTLHMASIYTLLSEFPSASAIAAAHLTRLTNLLSEASKGRYGKDTAILFRETAKNSIGSRMPAKSLELKHTIKLIEELTLEIDEIEAQIKQIMDTEIHSPILTIPGISYRMGAMIIAEIGDFSRFDSADRILAYAGMSPSTYQSGQLDNCYSHMEKRGSRYLRYALYNATKYVCLWDESFATYLTKKRAEGKHYNVALSHAAKKLVRLIYAMERSGQPYSKSA

SEQ ID NO: 388421 - protein, 336 aa, unidentified
MTIIRVGLDTSKHVFQIHGVDENEQPVSRRQIRRSEVVKFFAKLAPTRIGIEACGASHYWARVLRGLGHEVVLVPPQYIKPYVKRGKNDKIDAEAICEAMSRPSMRFVPIKTAEQQAALAMLGVRDLLVKQRTMLINAIRGHAAEFGLTVAKGPKQVNELLQRLASAAGVPALAREMVGVLASQLDGLDTKLKTIEKRLMAWHRQDQTSQCLATIPGIGPIAGVSFALKVANPQTFRSGRHFASWVGITPRENSTAGRQKLGRISRAGDEDLRRLLVIGATAVIRAAKPGRTSPWLLALPARKSKKLAAVALANKMARIVWAMMVSGETYRRPAQA

SEQ ID NO: 388422 - protein, 343 aa, unidentified
MEVAIGIDSHKGTLAAASVDALGRVIDVREFNNDPKGHRSLLQWVNRQGRPRRIGIEGALHYGSAAASRLLGQGEDVREVSPSLTHVERCRRSKGKSDPIDAVAIARVVAGEETLPPARRLALFSDLKLLVDYRDQLVRARTQVVNRVHADLVVLHPGYEETVPNLRARQHVARAHSLVVKDRSVRAELVRHRLRDILRLEAEIAEANHRIADRIREVDTTLTQIPGVGPLIAAKILGEVGEVSRIRSKASFALLSGTAPLAASSGQTHRHRLNRRGNRQLNWALHYIALVQSRTTPEAKAYLTRQREAGKSSKEAMRCLKRHLSNVVYRHLLMDGRRLEQAA

SEQ ID NO: 388423 - protein, 312 aa, unidentified
MDASIVGIDVSKDRLDVAVRPSGESFVTARSGAGIEDLAERLKKIAPRIVAIEATGGFETVVAAGLAAADLPVIVVNPAQVRAFAQALGKRAKTDPIDAAVIAHFAEATKAVPRPLPDEMTRLLADLIARRRQIVEMMAAEGQRARRVTDQRLKKSIARLRKALEKELAELDGEIDDHVRGSPVWVEKEDLLASVPGVGPVIARTLIAELPELGSLDRRKVAALVGLAPWTRQSGKWRGKSFIGGGRKTVRNALFMAAMVAARHNPILKSFRDKLVAAGKPKRVALIAVARKLLTILNAIVRDKRQWQPKTA

SEQ ID NO: 388424 - protein, 429 aa, unidentified
MNFVPVAGIDVGKRFSEMAILSPSNEGYARIRINHDSYTNFVRALELLKKAEKEFAVKPVIVMESTGHYHKILFHSLTKVGYTVHIINPIQSDSIKNIGVRKVKNDKVDARKIALLYRFEQLNTTNIPDEDIDCLRSLCRHYYKLSDQLTVYKNRLLGTVDQLFLSFTDVFKDISSVTALAILEKYPSPEDILKADRDELVSLIRQTSRKNLKWAISKYELLCAKAGDFSPLSVNSIANIAMLKANISMIRTLMQALKDALNAIYMLLEKDLKKDMPTLALTIDILCSIPGIGLLTAATIVAEVGDFSAFSKPDKLVAYFGIDPSVKQSGQFEGTKNKMSKRGSRLLRRVLFTTALANVRKKRNGKEHNPILYDYYRKKCLSKPKKVALGAVMRKLVTIIFAVVRDKKRFVLRTPEDHIKILMAKNLAA

SEQ ID NO: 388425 - protein, 415 aa, unidentified
MMEQRNKVCGVDIHKRFLIATILSRDGTKIQKRYSTDIDDLFGFRDWVLENNCDCVAIESTGVYWYPVNAVLENKIELILANARQIKHTPGRKTDSIDSEWIAEVALNNLIYPSRIFPKEERDLRRLARTRESLVKMRSQIKNQVHQGLESCSIKLSSVLSDNFGKSGRHILDGLIKGENIDRIIEEIPSKRVKNNEDKIRAAIRTGLDETQIFLIQSHLNTIDSLTKKLDEIDSEIKDKISGRKKDLQIAMSVPGIGFTAAATILAEIGNYRDFSTSDKLASWCGIVPNVYQSADKLITGSITKQGSKHIRWMLVQVAQAALKKRESRFRRFFLRIKARKGHNVAVVALARKILCILYHLLMNQEMYQEDGVTKSRQSKIDWSSARIDKMSLQSMIEIIAKAGYEVKKIKGQGG

SEQ ID NO: 388426 - protein, 322 aa, unidentified
MSVSNQRCAGIDVSKGTLDIAISNIASQFTVPNGTDGFTQVLRELKRNETKLILMEATGGLESCVACYLQSEGFDVVVINPRQARDFARAMGYLAKTDRIDARVLLQMSEVINQHPERERYIRPLPDAHRQILAAMVVRRRQLTIMLTAERNRLHPSHPLSHASIRSIISALKGELARIEGEMAIHIKEHFSELSELLNAVKGVGSATVAVLLAEVPELGSLSRREISALIGVAPVNRDSGTMRGRRTVFGGRASVRTALYMSALVGTRHNPVIKEFYTRLVAAGKPKKVALTACIRKLLTILNAMLKKNEAWDPMYHQHAS

SEQ ID NO: 388427 - protein, 344 aa, unidentified
MEEIIRIGMDTSKSVFQLHGVNAVEQPVLRKKLSRREMVKFFEKTPPTTIALEACGGSHHWARLLGSFGHEVKLIAPQLAKPYVKRGKNDAADAEALCEAMSRPTMRFVPVKTADQQAALMLVGLRERLIRNRTQLANAIRGFAMEFGIAAAKGMCRIEPLLERIAADQSLPALAREPFAMHGVEYRDLLAETKAVEEKLTALHRSDECSRRLAQIPGVGPVGASLLMIKTPDPRLFRSGRDFAAWIGLTPKDHSTAGKVRLGVITRAGDEMLRSILVVGATSLLQHVRAGRSRHASRWLIELLQRKKPKLVAVALANKIARIAWKLMVSGETYRRTEGQSATV

SEQ ID NO: 388428 - protein, 309 aa, unidentified
MEHFVGIDVAKDRLDVHLRPSGESFAVTRDGEGLVELVDRLQRLAPRLVVMEATGGYETIVASAVAAAHLPLAVVNPRQIRDFARATGKLAKTDAIDAAAIAHFAEAIRPPARPIADPEAQALGELVARRRQVIEMMVAERNRRRRVTQRRVVRGIDRHLELLQTELSELDRDIDGAIRGSPAWQADADLLASVPGVGPVTLRTLIAELPELGRLDRRKIAALVGVAPINRDSGSMRGRRSIAGGRPAVRTALFMAALVASKKNPVIAPYYSKLRAAGKTGKQALTACIRKLVVILNAILRDRKPWQPA

SEQ ID NO: 388429 - protein, 351 aa, unidentified
MYIIGVDYHPSFQQIAFLDPETGECGERRLNHSDGEAEKFYRELRQKGISARVGLEATGYSRWFERLLVELGIEVWIGNAAEIKAKRVRKQKTDRQDAQLLLKLLLENRFPRIWVPSPENRDLRQLLWHRHRLVQMRTRIMNQLQALAMNEGKRWKHRLWSAEGRAVLEKFPLAPWASRRRQDLLELLDRLNPTISELTAAVEQEARKCPEVLRLMTHPGVGPLTALAFVLIIGTPGRFHRGKQIGSYLGLIPKEDSSGGRQRLGHISKQGNALLRFLLVEAAQAAARYNQDWRQKYWHLAMRRETSIAKVALGRQLAVRLYWMWRNGWDYAQSVEFGSHAGQLVTGHGMN

SEQ ID NO: 388430 - protein, 483 aa, unidentified
MARRLVGIDLGIASSHTVRVLDETGQQVCRRRCEPTVASLTRIEDAASVGAPPGTVLEVVLEPTGPAWLPVAVFFASRGHRVFRVSSAKSADLRRFLSKHAKSNGIDAETLARLPLFSPGGLLPLELADAEHAALDRRVRACDRLTRAASEHKTRIKDLMRQLLPMTPLIEDIGVADLAVLERWADPRTLLKIGPSKLKSLIVKASHNHHGADRAEQWRHAAAAAVELYGNHPAIAWQDLAAEVVTEVRLLKAIQAQLAVHAARREEAYRWADHGQLARSLPGIAEVGGPVLAAAIGRAGRFPTGAQFKSYAGLAPRASETGNTDRKGQPMSKAGSSLLRATFFRAADTARKQDPQLAKIYYTQMVERGANHVKASCVVAAHLAERAWAVMARGMPYVVCDINGEPVTAEQAKTIIAKQWTVPPEVRARRRNTKTTKAGKAPQQVRAGQVQPSHEGAGNRGDLPHQRSSNTTPERVKELALKM

SEQ ID NO: 388431 - protein, 342 aa, unidentified
MQITTIGLDIAKNVFAVHGIDAAEKVVVRKQLRRGAMLAFFKALPPCLVGMEACATAHYWAREFTKLGHEVRLMPAKDVKAYVKRNKNDAADAEAICEAVRRPTMRFVRIKSAEQQGQLMQHRTRDLLMRQRTQVINALRAHLAELGIVAAQGDRGVKELLALVTDKEDTRLPIDARASVIVLAAQLEATQTAIGAIEKRIKMQHRSNEASQRVETIPGIGVIGATAIAATVADPTVFRSGRDFAAWIGLVPRQDSTGGKQKLGPISKQGDRYLRRILVIGAHSVLRRAMQNPEKYPWLTRLLARRHFKVVAVALANKMARMAWALLAHGGTYRAPALVAAA

SEQ ID NO: 388432 - protein, 420 aa, unidentified
MKVVYQTCCGVDVHKSFLVATIIKTTSGVQPSYQKKRFSTFNNSILQFKDWLIKNECRDVCMESTGKYWVPVFNLLEDEINVTIANPKWVKAVKGNKDDTKDSKWIGDLFRLGLVPGSYIPCKSIRILREFIRYRYKLTSSRSSEKNRYQNALTVCNVALDSVVSDIFGKSATSVIDYLIGQPDNSINHEEIASRLLRSLKKKSDSVIESIEGYQMTDSQKYRMRLVRAHMDYITSTINDIDTMLDSLIAPYENAVQLLCTIPGVDRNSAITVISEIGTDMTPFSNSRRLCCWAGLTPGNNESAGKKKSVRITRAGVYLKPALVQAAHAAVKSDKSPYYRQKYERIMKRRGKKRAIIAIARMILAAIYPMLFTGEVWNPTDLYKIDMPEPLKEKQKEKALKQAKKLLISEGILSESRLAS

SEQ ID NO: 388433 - protein, 355 aa, unidentified
MRIVGALDVHRSQIAFRWQDMETGEVRRGQIAPAARKPVREWLTDFEPVDAHFALEGTTGWRFVTEEIERAGFTAHLAEPAETSRARGPKRRAKTDRADCDHMSKLLIEGRLPGSWIPPEHILELRAQVRLRKTLVDQRTEWQQRMHAQLFHQGVPPGLKLWSRAGRASLDDVELSPAGRQVIETGVRMLDYLDTEIAPLDRELVSFARRQPGCRVLEDRLYGVGYLTAAAIVAELGDARRFKSSDDAVRYAGLDVTVYESNSKRAPGHLSRQGPAVLRWALYEAAQCAARKSSPDYGYYLKVRKRIDHPRACLSVARKLGRRAHHILRELGDEAIAPVTNCVPARPRSSVRSAA

SEQ ID NO: 388434 - protein, 334 aa, unidentified
MKQVNQIGVDVGSEELVCAMQCAGQRSPLATLANTAAGHKKFIRWATKGGHPARVCLEATGIYSLQFALALHHAKNVEVMVVNPRAIKDFVRACMQRAKTDAVDAGGILDYLDRMPFVAWQPPAPEVLELQAINRRIVQLTTELAREKNRRHASEFAGASADAIADDIEVNIRHLERRIERMHDSGLKLVRGVPALATKLAHLVSTKGIGDASAMRLLAELLVLPDDLAAPQWVAHAGLDPRPYESGTSIHRPRRISKVGNRHLRAALYMPALVAIQHEPNVKAFYDKLIAAGKKPLQAIVAVMRKLLHAIWGMLKHDQDFDGEKFFRIATKNT

SEQ ID NO: 388435 - protein, 351 aa, unidentified
MMIIGVDYHPSFQQIAFLIEETGECGERRLNHSDGEAGNFYRDLKAQGIGVRVGMEATGYSRWFERLLGELDFELWIGDPAEIKAKRVRKPKTDPEDARLLRKLLLEDRFPRIWVPSAENRDLRQLLWHRHRLVQMRTRIMNQLQALAMNENKCCKRKLWSEVGRAALEELPLAFWASRRRQELLELLDRMSPAIEELTFAAEREAKKRPEALRLMTHPGVGPLTALAFVLIIGTPERFGCAKQICNYVGLIPSEDSSGGRQRLGHITKQGSSLLRFLLVEAAQAAVRCNADWRRRYRHLAMRRQRSIAKVAMGRRLGARLYWMWRNSREYSPSLEFGSHAGELGIGNGGQ

SEQ ID NO: 388436 - protein, 312 aa, unidentified
MKPITEQPLYCAIDVSKDKLDLSAVELALPGQLDNNLAGFRQLIKAARKYPGRVQFVFESTGAYHLGLALALWQAQLPLSILNPARVRHYAKALGKAKTDPLDKELIGAFARSSRPQPTPAPDATTRELCELLQRRDSLIASRTAEQTRLAQSRHKLVRSQIDSSIRQLTQQLKQIDQLMAKLVASSAQLQLKVKTLCQVSGVGLLTAVTLLITVPELGTLGRNRIARLVGLAPLNDDSGKRSGKRFIQGGRFRPRCALYMASVTASVHNPILRTLYQRLLKAGKAKKLALTVLMRKLLVHLNSLMRQQLAT

SEQ ID NO: 388437 - protein, 307 aa, unidentified
MFVGIDVSKDRLDVHLRPSAESFAVARDGPGLERLVARLVAAGPELVVLEATGGFEITVAAAIAAGGLPLAVVNPAQIRAFARAIGRLAKTDRLDAELIARFAEQLRPEPRPVLDEQAQILAELVARRRQIVEMIGMESNRRRQARSAKVLRGIERTLAALQAALAELDQEIDGQVRGSPAWRAAEDLLTSVPGIGKITARTLIAELPELGRLDRRRIAALVGVAPVNRDSGAWRGHRAIAGGRSSVRHTLYMAPLSATSWNPAIRALYLRLRVRGRPAKAALVAAMRKLLTILNAIMRDRRPWQSA

SEQ ID NO: 388438 - protein, 402 aa, unidentified
MIYTGIDIAKSSHVIGAVDERGKDAAKPMQFANSAEGFGKCAAYLEGLGAPAEEMLVGMEATGHYWLPLFSFLHAQGYDVVVINPIRTDAMRRFKGSSRVKTDLVDCILIADTLRLGEFRPSKLGDESMVELRQLTRLHQGLKESVADLKRQVIVALDQVFPEYDSIFSDTFGESSKAFLRKCPTPEECRGVRVDALGNTLSRASRGKLGREKAEEIKGIAKESCGIDRGTRTLSFQIKLLVEQIDFIEGQIEEVEARIEEGIETTEPLILTIPGIGHILGAQIASEIGDIHRFRNASAVVSYAGINPSVSQSGKFSSSENHITKQGSPYLRRALYLAATAQLRLSTPFRDYYDKKRADGKSHREALIAVARKLVHVIYAVLSKQEPYRPDAVNANPASRSE

SEQ ID NO: 388439 - protein, 414 aa, unidentified
MLFVGDDWAEDHHDVELMDAAGRRLAAARLPEGVAGITRLHEMIGAQLGEDAGAGEDAGAGEVAIGIETDRGPWVSALVAAGYTVYAVNPLQAARYRERHGVSGAKSDKADAHTLADMVRTDAHQLRPVAADSPQAEAIKVVARAHKTLIWERTRHTLRLRYVLREYFPAALEAFDDLAAPDTLELLAKAPDPASAAKLNRSQIRAALKHARRRDIDMKTTRIQAALRSQQLGRAPVITAAYAATTRSIAAVLATLTEQISTLRGQVETHFGRHPDAEIILSQPGTGVLLGARVLAEFGDAPGRYADAKARKNYAGTSPITRQSGKRKITHARFVHNDRLVDALMSQAQSALLASPGARAYYDKQRARGLDHHAALRQLANRLVGILHGCLKTRTLYDEATAWSHHNQDQRTAA

SEQ ID NO: 388440 - protein, 318 aa, unidentified
MLIHYIDIAKRNFVIAVSSLSKTKTETNNPKGIAHTIEYLKKHKVALVVTESTGGLEIPAAKAIRRAGIAVIIANPRQTHQFAQSQPLTKTDAKDAKMPAFFAQMTAQKEDSQTMPYQPPTEAEEVLEALVNRRNQPADMRTAEKNRLHQVHETQVGSVKQLIAHFDRLIDESDKQIDDHTRTHFDGKAQVAEQIKGIGSITTATLMAMLPELGRLSHKRIAGLAGIAPHPREGGETKFKSRCFGGRSAVRKALYMATVAATRFEPLIRDFYQRLPSEGKPYKVAVTACMRKLLTISNARMRDYFAENDTAENGIRTA

SEQ ID NO: 388441 - protein, 363 aa, unidentified
MNYVGVDIHKKYSVLCALDESGRKLREGRVEGNSARGFAQFFAGLEGPSKAVVEACWNWGLIHDELEELEPVEEVVLAHPYKTRLIADAQIKTDRLDAHALGTLLRGNLVARAHVPGRETRARKNLLRQRLYWARLRTMLRNRIHALLDRQRELELPQCSDVFGVRGLGFLRRLELAEPDATLLREQLALHDLIAQQMKAQEKRIAAEFKTEAVHQHLLSVPGIGITLAAVIGCEIDQIERFNSAEKLCAYAGVVPTTHASGGKTSPGRLLPFCNKWLRWALVEASWVAIGCSPYFGSLYRQHRARGKKANTAILIVARRMCRIIWQLLEQKRDFEKLAPRPKLYSFPGCSALALTVNPALAS

SEQ ID NO: 388442 - protein, 423 aa, unidentified
MNNDMLDQNEYAAFVGLDWADQQHAVCVQAAGHTKVETYSLKQTADALAEWVIGLRSRFEGRKVAVALEQSKGALIYHLMSYDFLVLYPVNPLTLKQYRKAFRTSGAKDDPDDARSLMEIVKLHRDRLRAWVPDDVETRTLSMLVESRRKIVNERTRLTNRLTGLLKAYFPQALEWVGELASLRACDFLGKWPTLQAVQKAKRSELLKFYHQHGCKNDEVIQERIKQIRTARPLTDDQAVIKASAMMARAIVSQLPCVMEAIKQFDQEINHLFPEHPDHDLFDSFPGAGQVMGPRLLAAMGSDRSRFETAEEVERLSGIAPVTERSGKSKWIHRRFACSKFVRQTFHEFAKGSIIWSSWARAYYDQQRQSGKKHHAAVRALAYKWIRIIFHCWKERELYNEQRYLEALRRRRSRLAVVIADRS

SEQ ID NO: 388443 - protein, 403 aa, unidentified
MNAVGIDVSKGKSMVAIMRPFGEIVSTPFEIKHTTSDINSLVELIKSVEGESRIVMEHTGRYYEVLAHQLSEANLFVSAINPKLIKDFDNDSLRKVKSDKADAVKIARYALDKWQNLKQYSVMDELRNQLKTMNRQFGFYMKHKTAMKNNLIGILDQTYPGVNTYFDSPARSDGSQKWVDFASTYWHVDCVRKMSLNAFVDHYQNWCKRKKYNFSKSKAEEIYGKAKELVPVLPKDEITKLIIKQAIDQLNSSSTTVESLRTLMNETATKLPEYPIVMAMKGVGPSLGPQLMAEIGDVSRFTHKGAITAFAGVDPGVNESGSYEQKSVPTSKRGSSDLRKTLFQVMDVLIKTHPQDDPVYQFLDKKRAQGKPYYVYMTAGANKFLRIYYGRVKEYLASLPESK

SEQ ID NO: 388444 - protein, 340 aa, unidentified
MINNFLGIDISKDRFDVSLSFISNKGKRETRKRSFKNNDHGFQGLLSFLQKHNVEQVKACMEATGCYSEALAEFLHNSGHFVSVVNPACIRFYAKSKLIRQKNDQTDAEIIADYCQRQEPIRWAPPSPELKKLKHLYRCSAALKDELTLVNNHLEKKERLPKEVANAWEDLAMNIKQKIERIKNSLRELLNKHKELLENFQLLLTIPGIGEESAVAILAEVPNIKAFKDARQLAAYAGAIPRNITSGTSVHAKPRLSKSGSRTLCKAMYFPAIVAKNHNPTIMTFCKRLKEKGKHNMAIVGAAMRKLLHIVFGVLRSKKAFDPDHIKNYRARSLAESLVL

SEQ ID NO: 388445 - protein, 320 aa, unidentified
MSAPSVVAGIDVAKAHVDVAVLGGELDAERFDNEVEAHSTLACALEGLGVALVVMEATGGYETELACALQAAGLAVVVINPRRARDFAKSMGRLAKTDSVDARMLAELASVLVRREDLERFLRPLDNPQQQWLAALVTRRRQLLSMLLAERQRLQITPTKLHPSLEAIIAAIKAQLDDVEAQMVGHVREHFGELDRLLQSTQGIGPVASATLIAELPELGRLNRREIAALVGVAPIANDSGTTKGRRRIQGGRFEIRRVLYMATLTATRHNPAIKAFYERLVAAGKLPKVALVACMRKLLTILNAMVRTSTPWDSSLHHA

SEQ ID NO: 388446 - protein, 354 aa, unidentified
MIIIGVDFHPEFQQIAFMDTDSGEFQEKRLGHREEAEKFYRALAAAGQKVRVGMEASGHGRWFERLLAELQFELWIGDAAEIRTRRVRKQKTDRQDAQLILKLMLKDDFPQIWVPSWENRDLRQLLWHRHRMVQARTRIMNQLQAVALNEGLRCKKRLWRDSGRKQLESFALAPWASRRRRDLLELLDRLTPTIAELTQAIEQEVEKCPEAQRLATHPGVGALTALSFVLIIGRAERFRCGKQIASYLGLVPLEDSSGNRRRLGHITKQGNSLLRFLLVEAAQVTVRSDPEWRSKYFHLAMRRGRKIAKVAMARRLAVRLYWMWRKGWDYEQLKKFGSHAGQPVHRDGVQSITE

SEQ ID NO: 388447 - protein, 407 aa, unidentified
MNENGKRYIGLDVHKHYLIALGVDENLEVVLPARRVELAHLEAWMKKTLTRQDEVVLEMTTNTWQLYDELSAYAGSVTVVHPPHVALITRSQVMNDKIAASILARLLAKGLLVGIWVPPQDVREMRGLVMQRQKMTRLATQAKNRLHAVIQRHHLMPPEGNPFAKTNNGWWQALPLGKLEKMNLQSDLETLQFAGKQEVRLQEEMTGIAAENEEIGRLLHISGFGVITAVTVYAAIGDISRFEDAEHLVGYAGLGSRVHDSGLTIRTGKITKAGRRDLRVALVEAAHVAANSHPHWKAELARLQPRLGYNKAIVAIARKLLVTVWHVLARKVADCFAEPEKVSKKMLHFAYEVGKAKRAGKSAAQFARERMDTLGMGQDLTSIPWGSKKPIPLPPSTLKERSDVPNR

SEQ ID NO: 388448 - protein, 326 aa, unidentified
MQGKEASEQETKTKSTVGIDVSKYWLDVHVLPQGESLRVPNGCEGIRRLKRWLARFDIGLVVVEATGKWHRHAQRSLVASGIPTAVVDPFRVRMFAKAQGIFAKTDWLDARVLAQFAAVMAPPLRAPAPQAMQELAELVVARSSAVEAQTALKNQLAAAEGKFLKRQLARWTARAAKEIAALEGEILKRIKADQALARRYAILTSIPSFGFVVAATLIACLAEIGSTGAKQIGMLAGLAPIADQSGEREGSRVIWGGRARVRRILYLAAVTATRVNAGMKAFYLRLTESGKPAKVALIAVARKLVVLANTLINEDRIWGHQAPKHA

SEQ ID NO: 388449 - protein, 343 aa, unidentified
MTHYVGLDVSQKLTAICVVDDTGRRLWRGQCTSDPEQIERTVRRHGGEDARIGIETGPMTPWLVHELRGRGLAVTCLDARHARAALKMQINKTDQNDAEGLAQIMRTGWYRSVHVKSFDSHRARGLLGARAQLVGMTTRLSNHIRGVLKTFGMLPGAGRGLPFDRRVEILLADQVEVAPIVRPMLAAWRQLRQQTAAFDKAVRVLVKSSPICRHLMSVPGIGVLSVLAYVSMVEDPARFGRSRSVGAHLGLTPKQYQSGEIDRSGRISKCGDTLVRTLMYEAAVVLMTRVKRALGLKDWAQAIAKRSGAGKARVALARKLAVILHSMWRSGEPFRWPEQPAVV

SEQ ID NO: 388450 - protein, 344 aa, unidentified
MYYIGLDVHKKTISYCVKDAAGRVHQEGKIGSTRLELDCWIRSMPHPRIIAMEATIFTGWIYDHLLPHAEKVKVAHPLMLRAIAAAKKKNDKIDAGKIADCLRCDFLPECHMASTEIRDRRRTLRYRNLLIKQMVQMKNRVSGLLMETGVSYNKQRLHKVGYFAQLMSTNEEVPESIRPLLKLSREMIGRSQKLEYALVSSLERDPLLKERLTRLRTVPGVGPITALTWALEIGDFTRFSSSKQAISYCGLCGDEKSSADKVMRMPLSKQRNKHIQRVLIEAAKLAPRECHELAVIHARGLERGNPNRATLAVARKMVCYMLAVERRKQDFVAAEEFSRRTAAA

SEQ ID NO: 388451 - protein, 340 aa, unidentified
MAIVVGLDVHRAQITYDALNTATGEVATGRIAPADRVSLRTFLRRWAGEDVEAAVEATTGWRFVVEELQRAGATVQLAEPADTTAARGPKRRAKTDKRDARHLRDLLIERRLPQAWIAPEHILELRALVRLRKTLVDQRTEWLQRIHAVLFHHGVRLAVGRLDGRDAHQQLAALELSPAAQRQITVALAVIAHVNEQLGPLDRDLKAFARAQPGCRALMRHYGVGPQVACAILAELGDTRRFSSSRQAVRFAGLDVTVHESDTKRRAGHLSRQGPPVLRWAAFEAAESACKPASPDHAYYLELKQRVGANRAVLSIARKLLRRAHHTLRELGDDALAPAA

SEQ ID NO: 388452 - protein, 370 aa, unidentified
MSNATTFVGLDVHARSVKACAFVPETGETIRKSFGYEPGEIASWVSSLPQPARCVYESGVTGFHLCRELNAMGAACVIGAVSKMHKPAADRGRKTDRRDAQFLAVQLALGVVTEVHVPDAECEGARDLARALADARDDAVRAKQRLSKFLLRHGLVYDERNAAGQRRNRWTGDFWAWVGRIDLGDAAAMATLDHYCERVREADAAKAALEAKVKSLAQQPRWKPTCDALKCLKGIDAVTAASIACEADGFARFATASGFAVWVGLVPSEHSSGESRFRGGITKAGNKHLRKLLVEAAWHYKGASRSPKDLAKGQVVDAATRRHANAGVRRLVDRRRSMDDAGKQSSVANVAVARELACWCWAVGRMAEGA

SEQ ID NO: 388453 - protein, 412 aa, unidentified
MRIVYKRCCGLDVHKRVIVACLLLLDPDGEFRKEVRKFGTMTKDLLELLDWLQQSDCTHVAMESTGVYWKPIYNILEGQLEVAVVNAQHLKGVPGRKTDVLDSEWLAECFQLGLLKPSFIPPAPVREVRDLTRYRTSLIGERARTANRLQKVLEDANIKLAGVATDIQGVSAVAILREIVSGTTDPEVLADLAKGLLRKKRAQLIDALSGRVKPHHRFLIAEHLSQMEYLESAIQRINVELEERLRPFADEIEFLDSIPGISRQIAEVMLAEIGWDMSRFPTDKNLASWAGMCPGNNESAGKRRNGKTRKGSRWLRHALIEAAHGAARTKNKYLKAQYHRVAAHRGKKKALVAVGHSILIISYHLLTRRERYSDLGANYFDERDRNAVQRRCVKRLEKLGYEVDLKPATLVA

SEQ ID NO: 388454 - protein, 458 aa, unidentified
MPGRGAKGKHQAKLKPQDCTLGLQVVNPKAAGIDIGNEEHWVAVPPAMDGNPVRCFKCFTADLKAMANWLKECGIETVVMQSTGVYWMPAYDILEEAGIKVFLVNARDTRNLPGRKTDIQECQWLLKLHVYGLLRNSVLPESGIRVMRTYWRQRQQHVADAARCVQRMQKALTQMNLQLANVISDISGLSGERIIDAILEGERNPERLAELRDPRLKASKESIAGSLEGNWRPELLFVLKQEHETHGGYQRKIRECDDALGAHYQTLEAKADPTSLPPVRRDKRPRGNVPEKLDLRGELYRATGVDLTSIDGINILTAQTLTAEVGSDMSRFETEAHFVSFLGLCPNNKISGGKVIGRDKRKTVSRAGRALRMGACTLLRSQTYLGAQYRRLRTKLGAPKAMKAMANKLARIAYRMMKYGEKYVDKGNDFYEEKYRSQQVRMLTKKAAALGLQVVAIS

SEQ ID NO: 388455 - protein, 401 aa, unidentified
MQAVWAGIDSGKWTHHCVVIDQTGTVLLSKRVENDETVLLDLIETVAGIAGGDNVCWATDLNSGGAALLITLLAAHGQQLLYIPGRIVHHAAATYRGDGKTDAKDARIIADQARMRTDLQPVRGADQISVDLRLLTARRTDLICDRVRAINRLRATLLEYFPALERAFDYSKSKAALTLLSGYQTPDGLRRIGTSRLTTWLKKRGCRNSAAVAQKAIDAANSQNTMLATQATGSVLVTKLAAEITAFDHELVELDAQITERFTRHESADVLLSLPGFGVVLAATFLANIGGNLDGFDTVDRLAAVAGLAPVPRDSGRISGNLHRPHRFNRRLLRTCYLAALSSLKNSPASRVFYDRKRREGKSHKQALIALARRRINVIWAMLRDHTTYQEPAPTARPLVA

SEQ ID NO: 388456 - protein, 342 aa, unidentified
MESVQGLVVGVDTHKDTHSAAMVDELGGVLAALDVGANRNGYRSLLKWARCQSSGRIWVVEGTGSYGAGLAAFLSAEGEVVFEGDRPQRRKRGAAGKSDQLDAIKVAREALARPHPAVPRRRGQREAIRILLTTREGAVQAYRQGLNQLYALVVSAPEPIRERLIRLKGEQLIHACIRVRAASDLESSVTATTMRQIARRLNLLLSEAADYERQLAELVGAAAPSLLAEPGVGPITAAQVLISWSHAGRIRHEGAFAALAGVAPVPASSGRVVRHRLNHQGDRQLNRALHVVALSRSSFHKPTRAYIARRSAEGKSTREIRRCLKRYLARRFFRLLQRLDNP

SEQ ID NO: 388457 - protein, 437 aa, unidentified
MRVLYEHVAGIDVHKDMIKVAIRSPGEKPWTRKTEILEFRTFYGVLQEMARLLRRRGVTHVVMEASGVYTDPVYYALCEQDFAGVAVVNPAHARALRGHKTDAADCRRLAELFECGLLRGSYIPPAELREVRDLTRYRMKTVQARTSEIQRLGKALESAGIKLGSVASDITGVSATAMIDSLIDGERRGAVLADLAIGRMRTAGKLADLSMALTGRFTGHHALLCRLHRDRIAGLDAAVADLDDQIAGRAGRWQRELDLLKTVPGFGDVVAAAWLAEIGPAPHRHFASHEKLASWVTLCPGNNISARKRKHGRTGDAGTYIKPMLIQAAWNAIRTKGRLQARYSRLVRRFGGEKNPGAKKKAITAIAHTLLKIACQVLKSGVPYQDLGADFYTRRESPDQQRAYLERRLQKLYPGCAITITISPPEAALTSTVSNAP

SEQ ID NO: 388458 - protein, 339 aa, unidentified
MNEVTLIGIDLGKYSFHLHAQDATGRMVFRKKLSRHQLLRTLANVPSCRVVMEACAGSHWLARQLAGMGHEPRLISPQFVRPFVVGNKNDFGDAQAICEAACRPSMRFVSPRNEAQQTVSAMHRLRERLVRERTATVNQIHGFLLEFGISLPRGAALMSRLPTVLDHETLPPRLVGLVVRLHAQVHYLEEQIRQVVQDLKASLREDDKSRRLLEIPGIGPITASALAVELGDARQFANARQFAASIGLVPRQYSTGGKPTLLGISKRGDRNLRRLLVQCARAVMQHTASRTDALSLWVKTLSTRRHSNVVACALANKLARIAWAVLARGTHYQARALTT

SEQ ID NO: 388459 - protein, 461 aa, unidentified
MKKEKYYLGIDVSKGYADFTLLDGKKNPLEKVFQLDDNRKGHDTLKLIIQDKLKEHEIECLYCGLESTGGFENNWFASLSGWSKTMPVKVARLNPSGVKNNIAAGLNRNVTDALSSRYIGEYLIDHESKVSYDVEDNEYSNYRSLYTYILLQNKQKTQLINELKMLLYSGFPEMVRYCKEGVPIWVLELLVKYPTAEKVAKLKSAKLSKIRNITPEKAETIIARAKETVGSRLSSTQGFLIQSLAEQIMDKQAIIEKAKKFLTENCKGPEVDLVTSIIGIGKYSASCIMIEIENIYRFASPKKLVSYFGLHPELKDSGDKIKIYHISKKGRSSMRGVLYMCAQSAVLHDPHFKQIYHNHRSKGMNHRQAIVVIMHKLLRVIWGILMNKKPYEAATDKANQNKKVTAIKDENKLKEVKAKRRYQEADLEAPISNRQTKIRKVQSDSQVDMVEQIRDVPIARL

SEQ ID NO: 388460 - protein, 320 aa, unidentified
MPDKIVVGVDIAKLKFDVAVWLGDSKYKTKVFPNTPNGFKALSAWLEPYPSCHLCMEATGIYGVSLATYLSDSGFIVSVVNPFQVHSFGKSELLRNKTDKIDAKLIARYCSSQNPSEWKPAPLSERQLQALVRHLSNLNELLRMEENRLSVADKVIHPSLHELITALKQQIAETKQKIKSHINDDPDLKKNNKLLESIPGIGAILSATLLAYIGDASRFSHSGQIVAYAGLNPKLRESGLFKGRTRISKQGSAELRKALYMPALSAISCNRVVKAQWERLLLRNKGGKVGVCAAMRKLLQLAYGVLKSGKVFDAEISLVI

SEQ ID NO: 388461 - protein, 324 aa, unidentified
MNTIGIDVSKEKLDVALLREQDKVKTKAVANKQMGWQELLDWSLKNTGLPIGELHFVMEATGIYHEQLATFLYDAGAKVSVVNPAQIKFYGQGLGVRSKNDKKDSVVLARYGLKENPKSWQPEAQEIRELKALLARFDGIEKDLQREKNRQEKAQISLAPAEVINSLNLMIEQLKTERKRLSKLIEDHINKHQKLKENKALLESIPAVGKVIATRMLMVIGSRQFENAHQCAAYLGLIPVQHESGSSVKGRTRLSKAGNPIIRAKLYMAAVVATRYNPDIKAQYERLTSKGKSKMSALGAAMRKLVQICFGVLKHQQPYQPQTV

SEQ ID NO: 388462 - protein, 335 aa, unidentified
MKFKSFIGVDVSKLTLDLCLIDPDGEIKNFKIENDLSALKKFFDDVRKVVNIEKTLVCAEYTGHYSNPLKSYCLSHKIGLWLESGAEIKLRSGVQRRKNDKIDAGRIAQYAIRYTDKANLQAVEDEAIGESKLLLSERELYIKERAKYKTQIKDLKNFIEKKYYKDRKKRLEKHMALLSKSIEAIDRRIKELFKTTEKLSNQMEILKSIDGVGDQVAIHTIVSTGAFTKFSNGRKFACHVGVAPFSFESGTSQRSRSKVSHRANKKLKTLFHMAALSAIKMQGEFRDYFERKLAEGKKKMTIINSVRAKIINRIFALIRDNRKYEKSYQIGLVNP

SEQ ID NO: 388463 - protein, 347 aa, unidentified
MRFYNRQHRHYCGIDLHVKTMYVCILDGVGQVLLHRNMPATPAAFLEAVGPYREDLVVAAECMFTWYWLADVCTAEGIGFVLGHALAMKAIHGGKAKNDKLDSFKIATLLRGGLLPQAYVYPAAMRSTRDLLRRRLHLVRKRGQLLAHIQNTRAQYNLPEFGRRLAYPGNRDGVPEHFADASVRKSIDVDLALLERYDTLITDLELTLVRTAKQHDGDAFHRLRSVPGIGKVLALTILYEIHDITRFDRVQEFASYARLVKGRKESGGKMLGTSGAKMGNVHLKWAFSEASVLFLRHATGGKKFLTRLEKRHGKGKALSILAHKLGRAVFYMLTRHTVFSLEKFMAA

SEQ ID NO: 388464 - protein, 419 aa, unidentified
MSFKILKNNCCGLDVHKTWIYACIGITDSLKRTEYKEARFSSFTKGLNELCDWLSKYNCTDVCMESTGKYWIPVFNVLEKNNIWVTLSHPKYTKPQKGNKTDRKDAKWICDLYMCGMVKPSFIPPADIRELRDLVRYRFKLTCMITGEKNRAHNCLTVSNLKLDDVFSDIFGKSSRSITEQILQHPGETFDVAPFVDGRCKTPIEEIQAAVDGAISKEQAVKLRQCLNHIDELEMHKAEIEREIFRLSDKYESVLSLIRTVPGFDKTPMTAIQVLSEIGGDMSVFPTAKNLVSWAGCCPRNDQSNHKIKSTRISRAGSYFKPVLVQVANALIKSKKHPEFTNRYKRIKARRGHKKAIIAICRMILTAIWHILSDLKPYTPEGFLESRPVKEGKVLSTSQALNLLKQRGYIIKGEPLAVS

SEQ ID NO: 388465 - protein, 419 aa, unidentified
MSFKILKFKCCGLDVHKTWIYACIGITDSNNRTEYKQARFSSFTKGLNELCDWLAKYNCTDVCMESTGKYWIPVFNILEKNNVWVTLSHPKYTKPQKGNKTDRKDARWICDLYMCGMVKPSFIPPADIRELRDLVRYRYKLTCMITGEKNRAQNCLTVSNLKLDEVFSDVFGKSSRSITEQILQHPGEKFDVAPFVHGRCKTPIEEIQAAVDGAISKEQAVKLRQCLDHIDELNKHISELEQEILRLSDKYETALNLIRTVPGFDKNPMTAVQMLSEIGGDMSVFPTAKHLVSWAGCCPRNDQSNQKIKSTRISRAGSYFKPVLVQVANALIKSKKHLEFTNRYKRIKARRGHKKAIIAICRMILTAIWHILSDLKPYTPEGFLESHPVKEGKVLSSSQALNFFKQRGYIIKDEPLSVS

SEQ ID NO: 388466 - protein, 423 aa, unidentified
MKTDWTEQTYFAALDWAKAHHDVVVVDRLGAIAAGFQFPHTAEGWKEFDQQMQPFGKCPMAIETSSGPAVDQLLQRDYPVFPINPKAAQRYRERKCPSGNKTDRIDAWSLADALRTDGQGWVQLIAQDDATMTLRLICRDENVLIEQRTALVNQLQAALTEYYPLALQSFEDWTKPFAWAFLRSFPTPQALSKAGKRRWEKFLHTQKLWRPGTASTRLEAWQKGQQLNASAAVASAKALLALSLVNVLQSLQKQIDEYRQRIRAAFEQHPDHDIFGSLPGAKDKLAPRLLGEMGSQRQAFPDAQSLSCRAGTSPVSFQSGQLRKARIRWACNDFLRHTVHLWADLSRRTCLWAQVYYAAKRESGHSHASALRCLGKRWLKVLWRMWQDRTTYDESIHLKSLQEHGSFVAKLLTPPPTQSASSL

SEQ ID NO: 388467 - protein, 349 aa, unidentified
MNFYTNTHPFYCGIDLHTRLLYVCIIDNENNILVHEKIDDSPEKLLALLTPYLGNIVVGVECMHCWYWVSDFCEQHNIDFILGHALYMKAIHAGKTKNDKIDALKIAKLIRGGNFPLAHAYSKEHRSIRDALRRRTHIMRMSAQLKAHVASTISQYNLPALETRLNLQNSPDRQKMHHFFPDEAVQKSMDLNLNIISTMVHELYKIEHYVKIQAQTHNARDLHILKSFPGIGKILALTILYEVGDIQRFPSVQKFASYSRLVKCKAESAGKSYGTQGNKIGNAHLKWAFSEAAVLYLKGNDNAKRYLANLQKRMSKAKALSALAHKIGRCIYFMLKNQQVFDEERFLNG

SEQ ID NO: 388468 - protein, 245 aa, unidentified
MSEKAIFVGIDVAKKRLDVAVNPSGETKTFPHDHRGLSSLTTYIQSLAPALIVLEATGGYHKTVLSTLAAEGLPAVAVNPRQIRDFAKATGTLAKTDRIDALVIARFAEAVRPEVRPLRDEEAEKLQALITLRRQLIEMLTAEKNRLAMAPQWTRKDIRAVIQMLERQLKRIDDHLKDLIDQSPLWRQKDKILQSMPGVGPVLARTLLAELPELGTLNRRQVAALAGLASFNRDSGQFRFPIQAK

SEQ ID NO: 388469 - protein, 338 aa, unidentified
MNNVPVFVGLDYHQDSIQVCVLNQRGDVLLNRSATNDCEHLARLVNPLGQVQRVGIEACCGAADLGQQLVERLGWNVSLGHPTYIAKMKSSPDKSDYSDGRLLADLTRVGYLPHVWLAPAYIRSLRQLVNHRQRQVDAARAIKLQIGAVLREGRVKIPSDRGGRWSKAWTASVRDNERLCEASRWIVNDLLDDLAYARQKIAACEAKLRQATANDRVIEKLLKQEGIGEVTAWVLRACIGEFGRFKRAKQLSRYCGLSPRNVSSGNKVADAGLIDQCNKLLRATLVQAAHRLIRTSKRWSTLAASLQARGKPPCVIVAAVANRYMRTLHHAMKEPTMN

SEQ ID NO: 388470 - protein, 320 aa, unidentified
MSDRLAFGIDADSKTLVVAHHGTKGSARITNSASAITKWVSALPARSRIGVEATNRYHELVVQAAQKAGHAVFVLNPRDIKHYAKGVACRGKTDSGDAQVIARYIAKEADNLHEHVARSPAQEQLHVLLQQRDSLVRSKAKLNLSLGAGASESAIFGRIFGGLKEAIAMLDQQIQQLCRSGEQRDLYRRIMTIPGIGPTVAAFITHHITRWPLTSSDAWIACSGLDPRPNESGARIGRRRLSKRGNASLRQILYMAAMGLTRSKGGKALYTAIRERGHSSTASFNILARKLARIAWGVFKSGRDFDPAMLKVGQACFQQA

SEQ ID NO: 388471 - protein, 342 aa, unidentified
MQLTTIGLDIAKRVFQVHGVDAGGAVVVRRKLRRSELVQFFARLAPCLIGIEACATAHHWARELSALGHQVRLVPPSYVKAYVKRGKSDAADAEAICEAVTRPNMRFVPVKSVEQQGVLVLHRARELLVRQRTMLVNGLRAHMAEFGIIAPQGIQRVPELVAMLKDQTTGIPQIAREALAAVVVQIENLSASIRQMEKRIVAWCRANDAARRLATIPGVGPITASALAATITDPTLFRSGRHLAAWLGLVPRQHSTGGKAKLGRITKMGDQYLRKLLIVGMTAVIRSARRTKAPAFAWVNILLERRPARLVSVALANKAARVAWVILIRGEVYRAPTMAAAA

SEQ ID NO: 388472 - protein, 356 aa, unidentified
MDSTKYIGMDVHKEATTIAVMNPAGKLVMESIVETKAATMVQFLDGLRGELYVTFEEGTWAAWLYDLRKPHVTKVVVCNPRKNALLKAGNKSDRIDARKLAELLRAGLLSPVYHGETGLRTLKELGRSYLAISKDLTRTMNRVKALYRSWSIPCGGTSVYAPRHRVEWLSKITEPGVRRRAELFYQQLDGLQRLRQEARRDLLAESRKHGATNLLQRIPYIGPIRAALLIALLQTPHRFRTKRQLWAYSGLALETHSSGEYHYVQGQLQRSKKPIALRGLNQNHNHDLKSIFKGAATKAGSATGPFHDFYTALIAKGMKPTMARLTLARKIAAITLLVWKKGVCFDAQQLKQQVPV

SEQ ID NO: 388473 - protein, 347 aa, unidentified
MPVTIGVDPHKASHTAAALDEHGHLLGQQRITATLEGYQALRQWAGQWEDRRWAVEGAHGIGRALAQRLVGDGEQVLDVPAKLAARVRVLSVGHGRKSDPHDAISVAIAARSVPCLRQVGVEDQAVVLHLLTKRRQDLVAARTQTINRLHRLLMDLVPGGARRNLTAKRAAALLAAVTPAGAPAVTRWELATELVADVRQLEERIAAVEARIKTAVAQSNTTLLELFGVGPVLAARFLGEVGDVGRFPTKHHFAAHAGTAPLEASSGQVIRHRLSRAGDRKLNHALYMMAMVQVRRPSAGQAYYRRKLAEGKSPKEALRCLKRRLSDAVYRCLLADQHRQPSPVGLA

SEQ ID NO: 388474 - protein, 369 aa, unidentified
MNKFSKYVGLDVHQETIAVAVADTAGEVRYMGEIVNTPEAITKLVAQLKRSTGRLAFCYEAGPCGYTICRQLRELKQDCQVIAPSLIPKKPGERVKTDRRDALSLARLHRAGELSPVWIPDEAQEALRDLTRAREDMKHLQRQAKQRLLSFLSRHGHRYSGRSRWTQAHWRWLEGIKFARPEQQIVLQEYIDTVQACGRRVASLDREVETAAHASALWPVIEALMALRGISLLAAVTVVAELGDLSRFANAPQLMAYLGLVPSEHSSGKRERRGGITKTGNSHVRRVLIEAAWTYRHAARKTAILQRRAERTPPEVQEIAWSAQKRLCQRFRNLMARGKLKNQVCTAIARELVGFIWAIGQHVVPLSRA

SEQ ID NO: 388475 - protein, 427 aa, unidentified
MSAANETRQQPIAAFVGIDWADQKHDIALRAAGFEAKVERSKIANQPEALSDWVLALRERFADQGKILICLEQSRGALMHFLMGYDCFELYPINPKQLDSYRKAFRPSGAKDDPTDGELLCKYVSLHHQELRPWRPDDEQTRKLALLCEKRRQAVDARSALSNQLKSELKQYYPLALAVLDNDLTTVLAADFLLKWPDFASLKKASAHKVRSFFYGHQCRSEKKIQTRSQLMESAQPLTRDSAIIEAGALTAQMLARQLQALAPYIRQYDEQIAQLFSQHPDRVLFDNLPGAGDALAPRLLSAFGSNRDRFDNVLEPLSFFGLAPVTERSGKTTFIHFRWACPKFLRQTFHEFAGCSVRFCDWAAAFYDQQRARGKDHHVAVRALAYKWIRILFRCWKTRQPYDPQRYRAALAHRASPLATDVKNSP

SEQ ID NO: 388476 - protein, 340 aa, unidentified
MKHYGGIDLHSTNSVVVVINEQDEVVYQKRLPNDLKCILEQLSPYQSSLQGIVVESTYNWYWLVDGLMDKGHRVHLANTAAIQQYEGLKYTDDNSDARWLAHILRLGVLPQGYIYPKQERAVRDLLRKRSQMVHHRTANLLSIQNLVTRNTGGSISANRIKGLDDQQVEELLPNGDLALAVKANLSVMCTADEQTEILERTVRERVKLRAEFSFLKTVPGIGQILALTIMLETGDIRRFPGVGNFASYCRCVGSQKISNGKRKGSGNTKNGNKYLAWAFVEAANFAIRYQPRIKSFYQRKKAKSHGVVAIKAVAHKLCRACYYIMKDRVAFDVTKAFGAK

SEQ ID NO: 388477 - protein, 422 aa, unidentified
MNEQEVIGYSVYVGIDWADSKHDVCICPRDSQTREFDVIRHRAESIDVWVKDMHQRYGGRIAIAVELSKGPIVSALQKYDFIDIFPVNPASLAKYREAFQPSRAKDDPTDAELAVDMLLRHPEHFKVLKPQSVEMRALATMVEQRRRLVNDQGRITNRLRSALKQYYPQVLEWFEHIDTPLFCAFVKRWPTLTQARRARANTLKQFFHEHHMYREEVVERRRRAIKAASPLTLDKAVIMPYRMQVLVLVEQLELMFKAIGQFDDEIEKLASQHPDYVLFEPLPGAGPSLTPRLMVAFGEQRERFSSAGDVQKLSGIAPVTERSGQKHWVHWRLQCPTFMRQTFVEWAAQTINKSYWAGIYYRQQRDKGATYQAAIRSLAFKWIRILYRCWQTGVAYDESRYLKALERRGSPLVTRQKMTESA

SEQ ID NO: 388478 - protein, 320 aa, unidentified
MSKKKSKAFIGIDVSKTLLEVAAHESDYQFRCANKAKAFGELIVELIALRPALIVLEATGGLEIPVVAALHAAGLPVVVVNPRQVRDFAKALGQLAKTDRLDARVLAHFAAAIKPPLRPIKSADELELDALVGRRGQLVEMLTAEKNRSGSAATDTVREEIKEHIDWLEERIAELNKQLKAQLKNSTLWQGKDDILQSVPGIGAVVSFSLIADLPELGTLNRQKISKLVGVAPLNNDSGQQRGTRHIYGGRTRVRSMLYMAALTATRFNPVIKEFYERLLANKKLFKVAITACMRKLLAIINVMVRDSTLWKIKDAKVLA

SEQ ID NO: 388479 - protein, 411 aa, unidentified
MLKIVFKICCGIDVHKNFVIACIAKTDDNNVTTYQSKRFSTFTKGLRELREWLNSNSCKDVCMESTGKYWHPVFNILEDTCNVIIAHPKYVKAIRGKKTDKKDAKWIADLFKHDLVVSSFIPNLCIRQLRDLCRYYCKLTNFSTSETQRTQNCLTVSNIQLANVVSDINGKSSQRILAKILENPSDTNFNIEPLLHKSMLDKVDDIALAIDGVITQEQADKLKIIEQHYDSLQLCKSNLEKIILELAKPYEHEIALLQTIPGINSKLTAIRIISEVSNDVSAFPTSKHLCSWAGLTPTNNESAGKKKSVRISKAGCYIKPLLVQCGLAALKSKDNPEISNRYKNLKMRCGHKKAIIAIARMLMTIIYHILQDKVCYDKELYSHYNQLPISKEITVEQAIALAKRQGYKLVC

SEQ ID NO: 388480 - protein, 338 aa, unidentified
MKLYCGIDLHCNNSFVVLINEGDEVVYEKRLPNSLERILFEISRYRKKIVKVAVESTYNWYWLVDGLKEAGYSVHLANTSAIKQYEGIKRTDDRSDARWLAHLLRLGILPEGYIYPKEERAVRDLLRKRSQFVRQRSTHILSVSNLISRNTGKRISGANIKKLVEGEISSMFDNEDVATAVKCNLRACKYLSEEISTLEKIILEKISLREGYKNLLSVDGIGEILALTIMLETGEISRFEKAGNYASYCRCVDSKRISNDKKKGVNNGKNGNKYLAWAFMEAATFAVRYNPLIKRFYEKKKCKKNGMVAIKAVAHKLVRACYYILKDKTQFNVEMAFK

SEQ ID NO: 388481 - protein, 409 aa, unidentified
MERIVDRAAGLDVHKDVIVAEAHLPGGVVERGRFATTTPGLLVLRDWLVAWGVTRVGMESTGVYWKPPYYVLEDAMQVWLLNARHMRNIPGRKTDVADAAWICQLIEFGLVRPSFVPPQPIRELRNLTRYRKAQIEERTREAQRLDKILQDAGVKLSSVASDILGVSGRAMLTALVAGTTDATVLADLAKGVLRRKIPALREALTSRFGAHHAVIVAAILGKLEFLDELIAGLTAQIEVAIAPFSHQLDLLVTVPGIDRRTGQGLLAEIGTDMSVFTSAARLASWAGVCPGNHESAGKSKSGKTRRGPKWLGIYLHDAAMAAIRTKNTYLAAQYARLRPRLGHNKALVAVEHSIVVASFHLLDRDQPYHELGGDYFLRHTDPQHRARKLIRQLEAIGYTVHAEPPPAAA

SEQ ID NO: 388482 - protein, 353 aa, unidentified
MSSDKYIALDVHQATTVTSVLNVAGREVDQSVIATKSQPIRSYLEGFSGPLHVTLEEGTYAAWLYDLLEGRVAELVICDPRHNALLKEGSKTDRNDARKLADLLRTGMLRPVYHGSRSLRPLQELGHSYEALVEDTTRAMNRIKALYRGRGIDCAGRGVYTQKQRASWLEKLPAGASRLRAELLHDQLDYCRSLRRKARLALLQESGKHLIGARLRQIPGLGPLRVARLIAWIQTPHRFRTRRQFWSYCGLGLVVFDSGEYRLLKGQVVRRAQPVKIRGLNRNHQPRLKEIFKSAALSAIRQPGPFKEYYDVRVSQGRDPALLRLSVARKLAALVLSLWKKGGRYRAQDVKQA

SEQ ID NO: 388483 - protein, 412 aa, unidentified
MEAIYDSVCGLDVHSASVQACVRWRSQDGRTLQELRSFGTMTRDLLGLADWMKAKGVTQVAMESTGVYWKPIYNILEGHFTVLLVNAQHVKHVPGRKTDVKDCQWLAQLLQCGLLNASFVPDRPQRDMRDLTRHRAQLVAQQVAVVNRIHKTLEDTNIKLGLVASDILGASGRDMLRALIDGQQTPEQMAELARCRLRKKIPTLRVALQGHVTDHHRFVLAELMDQLQDLERRIERFSQRIEEISGPFKAAIQAVMTVPGFERRAAENLIAEIGIDMSRFPTAGHLASWAGICPGSHESAGKRKSGKTTRGSRWLKATLVQAGWAATHKKNSSYQAQYRRLAGRRGKKRALVAVGHSLLVTVYHMLSRGCAYKELGGDYLDKRQSDSAVKHHIRRLESLGYKVTATRMESAA

SEQ ID NO: 388484 - protein, 404 aa, unidentified
MIFVGDDWAEAHHDVYLMDESGRRLGSRRLPEGLSGIRQLHELIGEHAEEPDQVVIGIETDRGLWVGALTGAGYEVFAVNPLAVARYRDRHHVSGAKSDASDAKLLADLVRTDRHNHRSVAGDSADAEAIKVLARAHQNLIWTRTRHTNALRSALREYYPAALVAFEDLAHGDALGVPGRAPTPEQGAHLSLSVIQSGLKRGGRQRNIAARARQIQTALRSEQLAAPAPVAAAFGATTRAAVGIIAELNRQISELEASLAEHFETHPDADIYLSQPGLGVVLGARVLGEFGDDPNRYTRAKSRRNYAGTSPLTVASGKKRAVLARHVRNRRLYDAIDQWALCAISTSPGARAFYDQRRAADDTHHQALRTLGNRLVGILHGCLRHHRPYDEHTAWAHRTPAAAA

SEQ ID NO: 388485 - protein, 341 aa, unidentified
MSQNCSISYAFFVGIDMSKEKFDVGILNSNGEKISHKVFKNNYLGFEDCLIWTKSLVGDEQTIFVMEHTGLFSRLLWFFLQDNSCSLWMESGFEVKRGMGLAKGKNDKKDSYRIAEHALNRRHKIKITPDYDEDLVLLHDLLSNRNRLVTDLNRLETPLAEMKKYGNKRSYEALVKVNASAIKGLKISIKEIEEAINELISTQEEWQKNIELASSVKGIGKWTCLWILVYTRNFSKEFNSRNFASMAGVAPFESSSGSSVRNGSHNSHFSHKFLKGILHTAAMAAIRFNPAMKEYKERKKKEGKKGFLVMNNIKNKLLHQVFAVVRSGEMFKLDYKHPMAA

SEQ ID NO: 388486 - protein, 473 aa, unidentified
MRYIGLDLALTTAHKALVMDDRGQALTVVMSVNTSAVALEQLFRRAREGAAEDEPLAVVMEPTGMAWFPVAVFCQRRGVKVYLVNSQQVADLRRYYRKHAKSDRIDARVLAKLPIVSPEKLHPLQLISATQLACQRGCKELNRLMDLSTAIQNRLRAIDRFAWPGLEQVLTDNAAPLTRWFRENWYDPRQVLTLGATGLQQAWQKSGLKSTEMLESADDWAAAIVQLAQEVLSLYGSEAEYLDYAYLQAEVTREQALLAMLETEHRRLQLKTVRPLYRQLHPSRNLESLHGVGQDGAAVYFSFVGNPERFPDHASFRGWSGMIPRSSQSGARESKGLHISQAGPDLVKKFSFMGAEAARQWDPQIAAIYYNQIVRHGKHHTQALCACATHLLDRIWTILKEDRPYELRDVDGTPVTVSQARQIIAERYIVPKEVRQRNNQRTRRARQEQRAEKKQKRESRPNQVRGKSQTSSE

SEQ ID NO: 388487 - protein, 256 aa, unidentified
MEHRTFPTSAAGLHRALAWIRDRTQTRTCLVVVEGTGSYGAQLTEHFTQGGILVAEAPTVPAARRRGKDDVLDSARIARAVLGLRLDQLCWPRAGGTRTAIRVLVSARDQMSTERTKIINSLTALVRGVDLGVEARKALTSAQITTIAGWRTRDEDPATAACRREAIRLASRIRTLGRYLSANMAELRRFTAAEVPELLNLPGVGPVVAGTILLAWSHPGRVRSEAAFAALAGTSPIPASSGHTIRYRLTGEATDS

SEQ ID NO: 388488 - protein, 337 aa, unidentified
MKVTLIGIDLAKSIFQVCGVNQAGKRIFNRQIRRARLMEFLIQHPDATIAMEACSGSNYWGRELQQRGFQVKLIPPQHVKPFVKGNKNDRNDAFAITEAARRPNLKCVEPRTLVQTDMIQVHRVLDRMVRQRSALINQVRGFLNEYGIVVSRGKERLLSAMPDLLEDAGNGLTPSSRALFQAMYDDWRQMNEAIDRVEKVLKGQAKADEAAQRLMKMKGVAERIATATIAQVGNGHGYHSGRHFAANLGLVPREHSSGGKQKLGGITKRGNRYLRRMLIQGAWSVVRNAEKSDDRMSRWAKQLIERRGKHKAVVAVANKMARIMWSMLYHQTEFRAN

SEQ ID NO: 388489 - protein, 324 aa, unidentified
MAGNILGVDVSKRKFDVALLRADGKHRAHAFPNSEAGFGQLAQWLRGMGVEQMHACLESTGSYGLALASFLHDQGHLVSVVNPACIKAFADSELRRAKTDRVDAKVIARFCAAMHPAPWQPPAAELRELQALMRRVESLQQMIQQERNRLEAPGISAAVRASLERTLELLQEELVRLRRQIGDHLDQHPELKRRRDLLRSIPGIGETTAAWLLSEMSAIQFGRARQLAAYAGLVPSPRESGSSVRGRGRLSKRGNLRLRRALYWPAIVAMQHNPTLRAFAHRLRLAGKPTMVIIAALMRKLLHIAFGVLKHGRPFDPNYHPTTT

SEQ ID NO: 388490 - protein, 377 aa, unidentified
MNRIIKIGMDVHTVNYTLCALEPVIGADDRVFANIQVTPDYKNILMFIESLKLKLGLYDEYSIECGYEAGCLGYSLYNQLTSAGVKCVILAPTTMLTQQGKRLKTDARDALMIAQCLAYGGYHPVYVPTEDDDSVKEYLRMRDDHKQAIKKLKQQINALCLRHGYQYTATKWTDRHLIWLRKLDLSPMYRETLDEYLASYDEYDAKIARFDARIEEIAKQANYEEAAKRLGCLLGIKTHSALSLIVETGDFSRFAKGNIYAAYLGLAPGENSSGDRIHRSGMSKAGNSHLRRLLIEAAQGVCKGKVGHKSKKLRARQNGNTAEVIAYADKANTRMRSKYYRMIRHGKKKNVAVAAIARELACFIWGMMTDNIGIQTT

SEQ ID NO: 388491 - protein, 343 aa, unidentified
MNEVTTIGLDLAKNVFQVHGVDASGRAVVRRQLRRGQVLPFFEKQAACLVGIEACATSHHWAREIAKFGHEVRLMPARYVKPYVKRNKNDAADAEAICEAVTRPTMRFVEVKTEEQQSVLMLHRTRQLFVRQRTTLINAIRAHMAEFGIVAGIGRNGVERLLRLIDGGMDKRLPPAAEECLRALQTQLVLVKRQILEADRRILAWHRSNELSRRLEAIPGVGPLIATALVASIPDPHAFGSARDVSAWIGLVPKQNSTGGKERLGGISKAGNRYLRSLLVVGALSVIRRAKQVGYTRRPWLAELMARRPVKVAAIALANKIARIAWALMVRGTRYREPVLQAA

SEQ ID NO: 388492 - protein, 425 aa, unidentified
MNQSNHYTQNDYAAFIAIDWADKKHVFSLQAAGQTKKEAGTLEHKPEVIGPWVAKIRERFAGRPLAVAVEQSRGALIHALLTYDFLVIYPLHPTTVSKFREAFKSSGAKTDPLDADQILQILTKHLELLKPLTPDTEETRLLARLAEDRRKAVDLRTSHIQALTAALKEYFPQAIELVSGNLTSRLACDLLMKWPTFESFRQAKPSTIKRFYYGHNIRSSEVIQRVLDLAKAKSLTTDPAIVQSGSRLSQMYTQLIRALNPVIDDYDSSIEKAFEAHPEVNLFNRLPGAGPALAPRLLTFFGTDRSRYQSAQNVHSFSGIAPVTKSSGKTRAVYFRVACPKFDRQTFHEFARLSIAKSQWARNYVDYYTDKGKNFHTIIRALAFKWIRILWKCWQDRTPYCEEKYMQALKKRGSVFATLHLQNKS

SEQ ID NO: 388493 - protein, 391 aa, unidentified
MLEDAPRPAQAAIRTDLGAIFVSMELSRRAWLITPLSPGAGEKMSQYSVPASDVCGLLHRFAELRRKAAARTGRDFPIIVIQEAGLDGFWVHRVLQSEGIESHVVDPASILTSRRGRRAKTDRIDGETLVRTLMVFKRGELRVCSMARAPTPQEEDRRRVCRERRTLVGERVRHVNRIRGLLFTQGVSGYEPLRKRRRERLEDLRTGDGRPLPVHLKAQIIRELDRLELVLAQLKSVAAERDALLKTATDEAASPPAMLVQLKGIGPETAAVLWSEGLFRQFDNRRQVAAYAGLAPTPWQSGSIDHEQGVSKAGNPRLRTTMVELAWLWLQNQPTSALSLWFHERVRRLGGRMRKTTVVALARKLLIALWRYTTAGVVIEGAVMKSAPATI

SEQ ID NO: 388494 - protein, 346 aa, unidentified
MAKSSIAVLGIDLGKNSCSLVGFDAAGVVVLRRRARRETVVGLTAKLPACVVAMEACCGAHHLGQLLVAQGHTVRLMSPEYVRPYVKAQKNDDRDAEAIAEAATRPTMRFVPLKEQEQLDMQSLHRVRSRLVGMRTMLMNQLRAILLERGLTFPQGRRKFEMAIGALMQDPEAQIGPRIRSLIGEVRDEWTDLDRRIAALDREFVEHARADEAARRLVSIPGIGTMTATALRAAVDDGSTFTRARDLAAWLGLVPRQHTTGGKPKLLGISKRGNSYLRGLFIHGARAALPSMAKAEDATGRWLRGLLARAHYNAVVVALAAKLARIAWATLRKGVSFERQPEPAHA

SEQ ID NO: 388495 - protein, 415 aa, unidentified
MIQAVIERCAGIDVGKKFLAVCVMTGPAQEEPYVEGRKFGTVREQLAALRQWLQSHGCTHVVMESTGCYWKPVLNVLEDDAEYRVRVILANPQQVKGITGHKTDPHDARWLAHLLRHGMIRPSFIPPRALRDLRDFTRRRKQMIEAASQERNRVQKLLEDANVKIGDVLSDVFGMSGQLMLEALVDGVLTHIEIAQLARGTARKKLAELEKALEGHQMRAVHRSLIRHCMSHMAFLAREVELLDTDIRALIEQEQLSAAYELLQTLPGIRETAAATILAEAGPNMEQFPGEANFSSWAGVAPGNNESAGVRKKAPTVRGNPHLKAALVEAGWSATRTKDCEFRDRYERQKLRLGHKRALVSAAHLLAIRIYRVLASGQAYESPNQQLSQRKLQSLRRHHSRRLRCIDHWLQEAQS

SEQ ID NO: 388496 - protein, 346 aa, unidentified
MLYAGLDLSRKRLDVCLLDERGERVAVTAAPPDADGLRGLAVRLADCGEPVYAALEAMNGARFVHDGLERRGWRVELADAQKVKGLAPLAAKTDRIDAYVLAELARRDLVPAIWLPAPGVRAERELARFRLHLVRHRAALKARIHASLIACGHPCPVSDLFGVRGRALLGAFDLPEAWRASTEASLRVIGHLDGEIDACEAELRRQGADHPYVPLLMSAPGIGWVLAYTIAAEIGEIERFSGPKKLTGYTGLCPRVYQSGERDRRGPLAKNGPTYLRWALIEAAVHAARHPAYATHYEATKQRLGRQRGAKVARVEVARKLAEAIWYMLTREQTFAPQGPTPPLAA

SEQ ID NO: 388497 - protein, 463 aa, unidentified
MKRKKASGKGARRSRPLLERVNPNAAGIDCGSEMHYVAVPAERDPEPVRCFKTFTGDLHQLVDWVVSRGVKTVAMEATGVYWIPVYEILEARGLEVLLVNARHVKNVPGRKSDVSDCEWLQELHSVGLLRGSFRPIAEIAALRSYVRQRETLIESAATTINRMQKALVQMNVQLHVVISDITGATGQRILRDIVNGQTDPQHLAKHRDGRCQASEAEIAAALTGNYRPEHLFVLKQNLELYDEFQRQIKACDTQIEDHLKALAGKAAPPLAPLPAARTRHKPRRNEPRFDVRTPLHQLSGVDLSQIDGIGPYNSLRLISEIGTDMSRWPTENHFASWVTLAPHNRITGGRLISSRTQPSANRAADILRVAAMSVGYTQTALGAFYRRLASRIGKAKANTATARKLAILVYRVLKGEIVYKDPGAAAYDARHRETILRKLRRQAALLGFGLVNGQTGEILEGVS

SEQ ID NO: 388498 - protein, 426 aa, unidentified
MNETDRIRLEEFRQLKKEIRGSREYLIVGIDVAKERHHAFFGTATGKALLKRLIFDNTIEGFRKLRVQVEAIQVAQSLPKVVFGLEPTANYHKPLGEHLLKCGRMVVLVSGVAVKRNRELLDGRWDKHDTKDAANIADLISQGKCLFYEYPEMWLRDLRSLLTLKRKLKKQEHSYRVRIRNQLLAQYFPELDRYSGRPEIEAIVRWCLDPSRIAGLENDQFMRLVAPGRKTLAQHHRLHTIQELAVNSIGCEMGEGATFEAQVLVDGLRQIRETIKSTDDQIREICRQFPEYNYLLTIPGFGPDVSSKVLGALGNPHRFQNRKQVLKMAGLDLSADRSGKGSQTAIPIISKQGKADLRYALYQAALVASTQNIDFMRYYTQQLQGREKEPGIKTKRWVKLSAKLLIIAWTLMKKQESFDPHFFNQA

SEQ ID NO: 388499 - protein, 390 aa, unidentified
MNDIDVVVGVDVGKSFHWLHATGRDGTVIETRRIDQDETVLIDAFTRLAAGGRHVQVVVDQPKNIGALTLACAARAGCQTGYLPPLVMRRAADMFGGTAKTDRRDAQAIAATARALPGSVRPVHIDEQRAELEALANFDHDCQIDQTRHINQLRALLAEVNPAFEKTVGEQASSVFVLALLQRYGGPWGMRDAGVSRVNRWAKTQTRVPQQLLDAMLGAATSMRYRPGGATIKEQVAIRRVAARIHELATIRHDNQTRIQAMLADNPTYRALVTMPGVGPATAAALVLYADPAMFCDQDHLASYAGLAGRTCQSGTSIHHQTPTRACNHALKNALYLSAFASLRPDPAARAYYDQKRAQGKTHPAALTALARKRLKIMYAIIRDTRPYQT

SEQ ID NO: 388500 - protein, 397 aa, unidentified
MWYAGIDWANDHHDALVIDEKGHQVGSLRIDHSPSGLSKLNTFLEQVIGSQPKDQMACIIEITHGLLLAALLEAGWPVYPVNPRTVDRRRSASGAKTDTIDAYLLAKTGRADLADLRRLTPDSEKVAELKLLTRDQDSLIQMQTRLVNQLTACLKAYYPVALDLFGKLQQKSTLLFLQTYPTPQAAQAASCEQIQQLLQSCRHPQAKAVASSIVEQVHQAHLQADAVTIRTKSRLTLALIEQIAHYDKEIDTLFLTHEDHEIFESLPRAGQRLAPRLLAKIGDDRTRYQDASSLQALAGTSPVLFQSGMHAKAHRRLGCIKPLRNALHQFAWQTTQSEPWARDYYQRKRAEGKSHTVAVRALANVWVRIIFAIWFRHLTYETATFEHAQQQHARPAA

SEQ ID NO: 388501 - protein, 343 aa, unidentified
MNATTKTVIGVDTAKSVFQLHWIDVATGEVKSQQIKRAKFLEYFANLAACVIGMEACGGSHHWARKLEAMGHEVRLLPGKFVKAFVCGNKNDAGDARAIWLAVQQPGMRTVAIKTEAQQAVLALHRMRQQLVKFRTMQSNGLRGLLTEFGEVMPVGRAALNAGMPEALKRLAERQPAALIETLREQWNALAALDLQVKQIEMRLEAWKKQDKACLAISQIPGVGLLTATAAVATMGDPKAFKSGREFAAWLGLVPGQVGTGGKTRLTAISKRGDTYLRTLLIHAARSVLLHVKEPGEWLTKIRTRRPANIVIVALANKIARTIWAVLAYDRAYAKDHVSAKPT

SEQ ID NO: 388502 - protein, 337 aa, unidentified
MKTTENKFDTFIGIDVSKLTLDVTILNPRSRKLSHSVFDNSDAGFAKMKNWLSIHHKVGFSRTLFCLEHTGLYTRSIDRFLREREAFVWMESSLHIKKSLGLTRGKNDKIDSQRIAEYAYRFSDKAVIRQHCTAGLQTLRDLLTTCDRLNKSLKSIMVSINELKRADIHQALNLETYQLAAIRGLKTSIKEVEEAMFEAVEKNKQFKMYCEMATSIPGVGKILAIKLIIYTQVFTRFESVRQLACYCGVAPFEHRSGTSINGKTGVSKFANMDLKSTLHLASLSAIQHNPDMKAYYHRKVNEGKSKMSVINAVRNKLLSRIIAVINRQTPYVVLSQA

SEQ ID NO: 388503 - protein, 369 aa, unidentified
MVEYSEAFIGIDAAKSRNAIAIAEAGREGEIRYLGEVEATPQSMRKVVTRLAAKYQRLHFCYEAGPTGYGLYRQLTALGHDCIVVAPSLIPRKPGVRVKTNRRDAIALARLLRAGELTPVWVPDEAHEALRDLVRARDAVVEDLRRKRQSVTSLMLRHGRIFPGKTTWGARHARWLQEQHFEHPAHQIVLQELVLAIQHAHERLERIEAAIAEFVPDWSLAPVVEALQALRGVNLISAVTFLVEVGDLRRFETPRQLMGYLGLVPGERSTGDTVRKDGITKAGNSRARRTLVESAWTYRYPPRIGKVKLYHLQRVTPAIRDIAWKAQSRLCARFRALAARGKKSTVAVTAVARELAAFMWAIARAVPAT

SEQ ID NO: 388504 - protein, 386 aa, unidentified
MRDEAFVPRDYDVFAGLDVDKRSISVTFSNHQGFIRSLHMPYSAEHLINHVRKHFGDQKVAFAYEAGPTGYGLYDGIVAQGYRCLIAAPAMIPRAPGQRVKTNRLDGVRLSENLRGGQLKSIHVPTQIYRELRHLVQLRDTVVSEVVASKLRIKSLLLFEGIDFPAAPAGSQWSLIVKGKLRKIECSKMVRFKLDELLDSLEFLEKRVVKSTREIHRFCSDDPELSQCIEYMMSVSGIGWIVASQLLARIGNWREIKNVRQLAGFLGLVPTEHSTGDRTRRGSITHIGDGRLRSKLIQASWSAIRQDGELRDFYRSICRTHARYLGPRVAIVAVARKLSARIAVVLMQQRPYVVRKKVDSAPLTQEETVPQGTTRRIREPGATDNS

SEQ ID NO: 388505 - protein, 364 aa, unidentified
MKLVKDIANRIIRYIGMDVHKDSTTAVVLDAQGHVVMQVTLRTEGSVLVDFLRGLSGTLHLTFEEGTYSAWLYALLSPCVAKLIVCNPRQNALLKQGNKSDGIDARKLAELLRLGSLTAGYHGSPGMRTLKELAASYEALVSDSRRVMSRLKSLYRSRGIRCGGTQVYSPRHRARWLEQLGEPGARQRAKLLYQELDLLLELRPQARRALLAESRKHPAQKILRTIPGLGPIRVARLLALIQTPHRFRNKRKLWGYGGLGLLTRGSAQYRLQQGELVVSPKGVTVRGLNPAHNAQLKDIFKGAALAACQRPGPLREAYERCLREGMDEHLARLTIARKIATLVLTLWKRGERFDAQRLRREQAA

SEQ ID NO: 388506 - protein, 378 aa, unidentified
MSVTNDTQNICCAALELSKSTWVCAFLLPGEEKASIHNVAARDVDCLEALLERLQQTAERRLSRPLSVTICHEAGYDGFWIARSLIARGIATIVFDPASFLRPRRGRVAKTDRLDAEGMCRTLRVWLAGDRSVASAVRIQSVEEEDAKRLGRERKYLVHQRTRVVSRIKGLLALHGIHIDAKGIGKRLASRLTSLQTAEGRELPKFLRRDVARMLRHHALIAEQIAEVDAERTEAVRNSEAFPHADKVCRLARMSGVGEISATVLVAEVYHREFQNRRRLASFIGLAPSPYASGEMSRDRGINKAGTKLARSTLVELAWFWLRHQPTSALSLWWKTKFGGIGMRGRKVGIVALARKLAIALWRYVEFGVVPEGATLKS

SEQ ID NO: 388507 - protein, 328 aa, unidentified
MYFIGNDVSKKSLDLAFFDQQRKRWSKPCSLGNDPKGWDALIQWAEKQTQAPREDICIVMEATGVYHLKAAAHLSRKGLNVIIANPQLASQYAKSQNQQNKSDKLDARSLQEYGSQLKKYHLFTHDSQEISQLKALLSRMRQLGKDLHRERNRLEKCDFQEGSSWTRTSIERLIGFITSEQKLTQQQIDQLIKQNQVLRHNQKLLCSIKGIGKLTSQWLLPILSTQRFNNARETAAFLGLVPCHKSSGTSLRTRGRLSGRGDADLRARLYMPAVCAITYDPTMKAFYQQLVAKGKPSKVALTAVMRKLVHICYGVIKHQTPYVENYAA

SEQ ID NO: 388508 - protein, 541 aa, unidentified
MVGSALVPLCPPRSMTSVAAIHCLVASSPEKRPSSTPPESLCSRRQLSRAWQIQKQREYAMAKRKVSTFERLQSEKMNRTQRKELQQRLNAADPGLEVVHPDAGGIDVGNESHFVAVPAGRDAHPVREFGSWTAELHRMAEWLKSCGIRTVAMQSTGVYWIALQEVLEQHGIEVYLVNARGTKNLPGRKSDVQECQWLMKLHTYGLLRNSFRPPEEIRAVRTIWRLRDRFVQDAGRAIQQIQKALTTMNIRLANAISDVSGVTGMAIIRAILKGERDPRVLAKLRDGRIQASEEEVARSLEGHWRDDVLFELRQVVDCYDFWQQKLAVCDEQLRSYLAVLPDRKMESAKAEEPEPQGSKKPKRRISKTRRKNQPNFDIEAELRRSFGVDLTRIDGIKIMTAQVILAELGPDLSAFPDEDHFASWLELAPRRSITGGKVIKQKSRESKNRVANALRMAAEALSRSDSYLGARYRQLRGRMEGTKAVKAMARYLACLVYRLLTKGQDYVDRGAAYYEQKRAARDMVYLERRAAGLGMKLVPTA

SEQ ID NO: 388509 - protein, 341 aa, unidentified
MLIIGCDYHPSVQQIAWVDTATGECGERRLTHCAEAEQFYRDLKQKGVRVRVGMEATGHSRWFERLLAELELELWIGDPAQIRAKQVRKQKNDRRDAGHLLKLMLENNFPQLWVPTPEDRDVRQLVLHRHRLVQMRTRVMNQLQAIAMNEGVRRKRGLWTRRGRAQLEGLQLPPWTSRRRQELLEVLDRFNPSIDELTKAIEQEAQRRPEVERLQTHPGVGPITALAYVLVVGTPERFACGKQVASYLGLIPCEDSSADHWRLGHISKQGNALLRFLLVQSALSAAHVDEEWQRKYVHLAMRRNHAIAKIAIARKLAVRLFWMWRREWDYEQLKKFGAHAG

SEQ ID NO: 388510 - protein, 434 aa, unidentified
MDEVTDEPLYRDRVCGIDIGKAGMAATIRVPSDASPARRMAETRSFGTTRREVLALADWLRAWQVPAVVMEATSDYWKGPFYRLEAEGFECVLADAKQVKNLPGRPKRDPSDSRWLAACFERGAVTPCFVADPEFRVIRLHTRYRRDLIGERTREKQRAEKLLESAAVKLSSVVSDLHGVTGRDIMNHLIAGERNPRVLAQLARGRARAKISQLEAALDGAEFFTGHHAALLQLMLERIDRLAAEIAALTEAIEQLLAPHEEQLAQAESMPGWGRRTAQDALAETGPDMTRFPTGAHLASWAGRTPLDNSSGTRTRRPKSKKGNRYLAAVTGETAVAAGRTQTREGARYRRLARRRGKLKAQVGVGNTQLKVYHKLLSTPGLRYEDLGPDYYERQRGTRRQIAHHVAKLGALGFEVTLCRIPGPDPGPEANQAA

SEQ ID NO: 388511 - protein, 483 aa, unidentified
MVLRVPIGSWMPYKRINIPKANRHGAIFQTLKFKIMSKSKTKKEKVKRISQLTVINPTAAGIDVSDTEMMVAYPISPEQLEIRVFGCFTRDLHSIANCLKENGTTTIAMESTGVYWIPLFLLLQEYGFEVYLVNAKHVKNVTGRKDDESDAEWIQKLHSCGLLSASFQPDNMVRTLRSMVRHRKNLVRTSATYLNRMQKAMELMNIKLHTIISDIDGKTGLLILEAILAGERDPEVLADLRDKRIKASREDIIKSLEGHWTTEHLFELGQCYQLYCTHRQMIDECDKEIEKQLVIQIASKNEGVIPDIPKVKRKASGKHKVQFNLTADLKEILKVDVTEVFGINELSALTILSEVGCDMTKWKTEHHFTSWLGLAPNTKISGGKVISSRIMKKKHHAGQAFRMAANGLYNSKSPLGDYFRRLRAKAGAPKAVVATARKLAIIYYKMVANKEAFNPKALDDYRKKYNEKKINQLKRKIAQLEAA

SEQ ID NO: 388512 - protein, 340 aa, unidentified
MQIAVLGIDLGKNSCSIVGLDVGGAVVVRRRMRREGVINLAAKLKPCVAAMEACCGAHHLGRSLQMQGHEVRLMSPEYVRPYVKSQKNDDRDAEAIAEAATRPTMRFIRLKSEGQLDMQTLHRARDRLVGERTALINQLRAVLLERGITVAQGRRELERHLAGMTAQTGLSQRMRVLIEDMRAQWRDLDRRIAEIDKELAEWTRNEAAARRLMTIPGIGVLNATALIAAIGQGESFARGRDLAAWLGLVPRQVTTGGKPRLVGISKRGNKYLRKLLIHGARAALPTLLESPTSLGAWLRGLMARMHKNAAVVALANKLARMAWAVIRHGKTFSIAVSATA

SEQ ID NO: 388513 - protein, 348 aa, unidentified
MRCYSGQHRFYVGVDLHARTMYTHVLDHTGKTVFDKDLPADPDAFLEALAPFRPDLVVGAECMFAWYWLADLCQDHAIPFALGHALYMRMIHGGKSKTDRIDAAKLAGLLRGGLFPMGYVYPRAKRQTRDLLRRRSFFVRQRAQLLAHVVNTHTQFNRPPLTKKLTYAANRTPELLDRFTDPSTRLSITADLGLIDAYDERIAELERYLIPHAKVDDPVTFGLLRTAPGIGPILGLTLLYEIDTIARFPEPGNFLSYSRLVRCAHESAGKKKGTGGKKIGNAHLKWAFSEAACLMIRSCLPVKAWMQRQEKKRGKRVALSILEAKIGRAVYHLWRKQVPFDVKRFLNG

SEQ ID NO: 388514 - protein, 467 aa, unidentified
MVRKKKKLSKKQVASRSKRSLKAIQPNAAGIDPGSKEHWVAGPPGDNDKPNVKCFGTTTPKLNRLADWLQEQAVETVAMESTGVYWIPLFEVLDSRGFQVELVNARQISNVPARKTDILDCRRIQLLHACGLLRGSFRPSDDICRLRALIRERSTMVDERADWIRRMQKYLDQMNVRVHRAVSDITGLTGMAIIRAIVGGERDPYALAKLRHPHCRNSEQQIAEELTGNWRSEHLFNLGQALKMYDQLTTVIGDYDTEILSCIGELAHHDTDEPPLPPHHSKTKARGIAKRGREPLRQDLYRMCGVDLTSIDGMSVDTAAVIISELGLDYSVFPDESHFVSYLRLAPNVAISGDKKVPKKFKAITCSRVSTALRMAALTLRNSKTAPGGYYRRVAYHKGASIAVFATARKLAQLIYRLVCYGQAYIDVGVDAYEARFNQRRLTFYTNALKNMGFRVEAAAQMEPATT

SEQ ID NO: 388515 - protein, 325 aa, unidentified
MANLKTFAGFDVSKNSFDVCILINQKEHSKRFVYDKEGLKNLVNWLPIDSHCVMEATGPYYLKLAYYLHEHGFTVSVVNPLVIRRFCQMRLVRAKTDRADAKMIAAYSVTEQPSAWQPPADCIIKLQQLDAVLQQLQKQRTALLCQTEAFTAGGMMDKEMKQFLQKAIEHLDKQIVHLTERIEVIIEEHHQQMLNNIISIPGIGKKTAIILLVLSDCFKKFNNYKQLSAYIGLSPRIYESGSSVKGKVKICKMGMSRIRALLYVCAWSAKRCNKSCKDLYERLLTKGKSKRLALIAVANKLIKQVFAIATNNRTYEASYSKNICL

SEQ ID NO: 388516 - protein, 342 aa, unidentified
MEKRYIGIDLHRNRFTSCVRLENGRNYLSQWRLEELSGFVRKLRPDELAVEVTGNTRLFYDAVVARVARIAVVDTNQFRVISRSVKKTDSNDARLLALYLSKGLLPEVRMKNKEHGQLASLTQTRDTLVKLRSALKNKINNLLSARGINLPKEALSSERKLSEVLALPFDPPVQIELRVIVEQIRSLSQSIGELEKTIAQEASKLEGHKSLISIKGIGQITSAILLSVIGEVSDFPDESRLASYFGIVPRVVNSNETERSGHIHKRGSKLARTALVQSALIAVKYSPYLKNFYQRVKARRGAGKAIIALARKFLGIIYRTLKNKGVFEDFPNFVLAEPVETA

SEQ ID NO: 388517 - protein, 395 aa, unidentified
MRYAGIDIASEVHMVAVVDEGQVVTKPTKFAEDQVGYERLLALLGKPDECFVAMEATGHYWQNLFAALVAEGYAVALLNPIRTRRFSEVDLERTKTDAIDAAGIARFAAERRPPPTRLPDEATLELRELVRLRDRLVQDLGDRVRQLHRLVDLGFPEFTRYVKDLSGPLATAILKLYPTAQAFPVLARPLSKLEYTKHHRVGAELAQELIAAAKVSVGRHHGEPYRIQVRYFCEDIDTLRARIASLTGDIVRKLDQHEVGKLLTTITGIGPQTAARLIGELGNPADFRDGAALASYVGVIPGLKQSGKRTGKRARISPIGNARLRKALWMPTLVAVKFNPWLREHYQRLLAVGKLPKVALIAAMRKLLHAIFSVAKNRRPFVPRLNGVVLSEVVA

SEQ ID NO: 388518 - protein, 425 aa, unidentified
MKSTQNEKISQIKFETLVVGIDIGKETHYARAFDYRGIELARLLKFSNTDQGFQLFDQWMRDICKQQEKAEIIAGFEPTGHYWFTLGDHLKSQGHKLAIVNPFHVKRTKELDDNSPTKNDRKDPKTIAMLVKDGRYREVYIPDDIYQELREAVSERERLQEQLTSIHNRVVRWLDIRFPEFTTVFKDWRRNAALITLRSFPTPEKVMEMGVDKIVETWRKQMKRASLKRAEALVKAASRSVGRTSGKVASEASLQNLLAEYDLYCQQYDKQEQLMQDLLMQVPNADKLLDIKGVGLITAATFVGEVGDISRFQDPRQIQKLAGLNLVENSSGKHKGKTTISRRGRRRLRHSLFFSMIAMLGKNQEFRLLHQRNLTRENNPLNKMQSIIALCGKLIRVFFAILTKGVDYSPEKMLGDMEQSIRVAA

SEQ ID NO: 388519 - protein, 410 aa, unidentified
MPKIVFPVCCGIDVHKSFVVACIATTNVKLVTTYKSKRFSTFTGDLRRLADWLSENNCRDVCMESTGKYWIPVWNILETSCNLVLAHPKYTRAIKGKKTDKRDAKWIADVFKHDMINGSFIPPADIRQLRDLVRYRFKLTSYTTGEKNRAQNCLTVSNIKLDDVFTDVFGKAASAITARLLENNEPFDVKPYLTKGIKASPEEIQAAVDGEMCANQAEKLRIIRFHMDSLNLCKANLESEILTLAEKFLPQIDLVLTVPGIQTFSAIAIIAEIGTDMSVFETSRHLCSWAGLTPQNDQSAGKKKTTRISRAGVYIKPLLVQCALAAVKSNEHPEVKNRYQAIKKRRGHKKAIIAIARMMLTAIYNILKKNEPYNAELYRQSDKPPVQREVTVEQAIFILQRQGYLVTAAT

SEQ ID NO: 388520 - protein, 338 aa, unidentified
MKVKRIAIDISKHVFTLHGVDDQERPVLRRDLKRAEVETFFGKLDGTEVVMEACGGAHHWGRVLTRLGHQVRLIPAQYVRPFVRRAKNDRTDAEAINDAASRPGMPSVAVKTAQHQAELIILKHREILMAQRTQAINALRGHAAEFGVIAAKGTAQVQALLDKLAADPAIPAVACAMFVRIGEHVAGLDRQIAAVDADLLARHKATPVSQMLAEVPGIGPITAITLALGVEPTAFASGRHFAAWLGLTPKEHSTGGKQRLGRISKAGNERLRSLLVVGAMAVIRHAKAGKPSVSAWLLALLARKPRKLAAVALANKIARVVWAMMARGEVYRRQPVAA

SEQ ID NO: 388521 - protein, 439 aa, unidentified
MLQTINPHAAAIDVGSERLHVAVVNQAVQVFDTFTDSLQALRDYLLSAGVTTVAMEATGVYWLPVYEVLEAAGLEVCVVNGAHVKSLPGRKSDMQDCQWLAELHSHGLLRSGFVPPHDIRRLRDYQRLRQDHIRMGSAHIQHMQKALDRMNLKIHEVLSDLTGLSGLRLVRAILDGVRDRQQLLALCDVQIVQRKREAMLKALKGNWQPEHLFALRQAYEGWQFYQQQIAACDREISGVLEQLAAGAPPTTAAGGGAAPKRLQHNAPQIADLHSLLLRITGGQDLGALPALSDYSVLQLLSEVGSDMSRWPTVKHFTAWLGLAPSSRRSGKRRRREKRFRNSAGQLFCVCARSMARSKHLALGGFYRRLRAMHGAQVANIATARKLAVLFYNTLRYGLAYVEEGLERYQELYRQQCLRRLQRNARQFGLTVVPATHANA

SEQ ID NO: 388522 - protein, 350 aa, unidentified
MTIKHYIGFDVHKKTISYCVKAADGNIHEEGILRAIPMVLREWAGKRQEPWHGAMEATLFSGWVYDALKPFASALEIGNPSMMKAISAAKKKNDKLDARKIADLVRCNLLPACYVAPQEMRALRRLLRYRNVVVAQAVRMKNKMSGLLMEVGAEYSKQRLHSKKYFSELLDQLEEVPESVKDLLRLSRGSVEMFETTQRQLLNRLQKDPLLVKRVELLRSIGGVGEVTALTWALEICDPQRFHCIADAVSYCGLSSALVSSAGKQQRGPISKQRNAHLQTVLIEAAKLAPRWNRKLAELHERERKRGNRNRATLAVARKLVAYLLAVDKSGQAFQVRNPPPAEPGVDKVA

SEQ ID NO: 388523 - protein, 338 aa, unidentified
MVYGAIDLHTRYSQIRILDATGAVLGDRRVLTTRERLVAVFAGHGPIQILLETGTESEWVAQALEEAGYRVIVADPNFAPMYGDVRRTVKTDRRDVAALAEANRRGWYRPAYRCSAPQRALRQVLSARRQLVSMRSGTISVIRALLRQEGYRLPSGDTERLPARFARLALPPALGTTLTPLVETVAALTAQIATIDTRLQQHAANDPVVARLRSVPGVGLVVALTFRARIDDVGRFASASQVSAALGLVPHEASSAERRHRGHITKAGPPELRSLLVQAAWACWRSRQGQPLRRWAEAVASRRGRRIAIVGLARRLSRILFAMWRDGTTYRPEVLVAA

SEQ ID NO: 388524 - protein, 343 aa, unidentified
MIVLGADTHKRSHTIAGVGATTGELLGERTVQVGRAGFGALLAWARALGGERVWALEDCRHVSGSLERFLIERGERVLRIPTNLMAETRKSARQRGKSDAIDAVNVARAALREGLATFPAAHLDGPELDLRLLVDHRERLVIHRVELNNTLQWHLHDLWPELELPGGALFSKKWSTRIARRLSRAEQTMRVRIARDDLRRLRELTETIKALAREITQLIEQIAPRLLAEPGFGPLIAAKLVGEIAGAQRFATDAKLARAAGAAPIPASSGNTRRQRLDRGGNRQINAALHRVIVTRARCHQPTRDYIERRRGEGKTTRDAIRCLKRYLARQVWNLLRASPPRT

SEQ ID NO: 388525 - protein, 401 aa, unidentified
MNWMIGIDTDGKGIYYQIQNASGAKLAEGRAAKCMEGWHAFLDLCSSHGIVPGRTSVFLEATGRHHLPWCERLLEEGFTVYALNPLLTKRLYSCGNAIRDNKDDRIDADTLAEIGRIHRRELKRFRYRSQTDKIRVQTLVSARKAIRMQCTNLLKSAGDLLDLTFPEAKRLGFKLNSAAFRSLLRKSPTPALIAGTSKQTLEKTLGKKARDLQKAAAAGITPEAVAAACSQALVPMLEAIEHLFAQIGSLDHEIKRALSSNSSCGETERLIRSLPGFGKVTSATLAAFVPPDCTLWSKNRKKIVSKLQALIGSDPRRRESGAYKGKVKLSKRGIEAARTALYQASFCSIKYDPQLRKYYDKKKAEGDHHKKVVIDLMRKNLRRIVAVLVDRKPFEFRPENA

SEQ ID NO: 388526 - protein, 392 aa, unidentified
MKATNSRVVIGMDPHKRSATIEVMAADETVLGGGRFATDADGFAAMARYVSRFGERVWAIEGCNGIGHHIAMRLLAAGEEVIDVPPKLSARARVFTTGQGRKTDATDAHSVALVGTRMSGLRPVVNDEQLAVLRILVDRRRSLGEDHTRMVSQLHQLLLELIPGGAKKDLSARQARALLAKVRPRDVVGKTRRRVAAELIADLERIYARKKAANKELTELLAHTGTGLLDLNGIGPSGAARLLVEVGDITRFPNKAHFASWNGTAPIDASSGDQIRHRLSRKGNRQINRVLHIMARVQLRNPSQGRDYYDRKKADGKAPMEAMRCVKRRLSNIVFQQMLEDSMKQLGTGPGGHRGNDSDSSAAGSHPHTSSSEKSLPGPVTTQPKTPLPTAS

SEQ ID NO: 388527 - protein, 405 aa, unidentified
MSGGRFAGVDWASEEHAVCVVDERGRIVEGRRFRHDEPGIRALCARLSRLKVALVALERPDGLLIERLLDAGLAVIAVHPNQVKAMRPRYSVAAGKSDGFDSFVLAELARTDSHRFRVLTPDSDRTKALRALTRAREDLVRTRVALANQLRDELACFWPGASKVFFAVDSPIALAFLRRYPSPADARGLGEQRLAAFLARHSYTGRKPARELLARLRNGAEGRAGELEMQARRQIVLGLLDALEPIVAAIRELTSQIRQAVDDHPDGPTFRSLFIAPDSVLCAATMIAEIGDCRDRYPTYRQLAADGGQAPVAVESGKAKRAQFRWACDHRLREAFCVLADSSRRHNPWAADIYDRARTRGASHQHAARILGRAWCQIIWRLWHDHDTYDPARHTARQRLTAAAA

SEQ ID NO: 388528 - protein, 467 aa, unidentified
MGDVVRRRRRGQGQRRQRQIEELLEEVNLDAAGVDIGARAVVICVPKGRDPKGQQIRTFSTLMPQLREASEWLKQCGVRTVAMESTGVYWIPLYELLEEQGFEVYLVDARKVKNVSGRKKDETDAEWLQKLHRYGLLHPAFRPEGAICELRGYQRQRSMLVKMAATHIQHMHKALTQMGLQLHHVLRDLMGVTGQKIVRAILAGERDGRALAQFRDPNCKNSEETIAQALEGNYREEHVFSLRQAVELYDYYQEKIRDCDREIERKLREFEPRARGGSLPTGKHKKSGGNEPQFDLRSRLYEMTGVDLTRVPGLNSYTVLQAVSETGLDMSRWTDPKHFTSWLSLSPNHRESGGKILGRSTQSSANRAATAFRLGARALYNADNALGAFYRRVRARRGAPKAITATARKIAVIYYSMLCYGTEYVEKGQQWYDQQYRTRVERSLRRRAAALGFRLVPSGEVATCPPA

SEQ ID NO: 388529 - protein, 443 aa, unidentified
MKELPVLDTRAAFCDVGSEHMHVSIAGGPPKVFGTVTSQLHELRDWLLSEDANSVAMEATGVYWLALYSVLEDAGFDVMMVNGRQTRNLPGRKTDMLDCQWGATLHAHGLLRPGFVPPAHIRKLQDYQRLRTDHISLAASHVQHMQKALERMNIKLHTVISSLTGVSGLAVVHAILDGQRDPAKLLELCHPQIRDKKAQEVTESLRGTWAPEHLFALRQALQSWEHYQGQITECDRQIQTLLKDITFDDKADADKGEKTKPHVGKGRSVNAPQIPGLHNMLVELCQGKDLTTLPAHTDYSVLQIISEVGTDLSKWRTEKHFTSWMGLAPGTHQSGKRNANVKRSRNRVGRMFCVMARSLARSKDIALGGFYRRLSARRGGLVANIALARKLAVLFWRVSVKGMAFVEHGLAVYEAKVQQAKQRTLRRLAKELGQTVLPMPKTA

SEQ ID NO: 388530 - protein, 403 aa, unidentified
MKKFNPEKATNETQTASALVQIQQAKHKTEYPAFIGLDVHKETIAVSVAYEGRQAPKYRGEMANKPSKVPKLVERLTQEFDGQVLLFCYEAGPCGYGLYRQLMELGHDCQVVAPSKIPKKPGERIKTDRRDANKLAQMLRSGDLTAVWVPDEEQEAMRDLTRARDDLKAQEKKARQQLNAYVLRHGHAWPGHKTRWGKPHYNWLESLKFPHDWQQVVLQEYIDAVKAATRRVGDITAQMERVLPQWSLAPVVESLVALRGIDKLAAMILLAELGDISRFDSPKQLMAFLGLVPSEHTSGGRRWQGAITKTGNGHARRMLVESAWSYRFPARQTMYLKRKAQNASQEARAIAWKAQKRLCGRYRTLVQAGKNTKQTTVAIARELVGFIWDIVRHEMPKVQQVAQ

SEQ ID NO: 388531 - protein, 327 aa, unidentified
MNDRQVVYVGIDVSKDSLSVDAGALFKGDVPNTPAGIRSLVRKIRKRAGDGGVPHFCFESTGPYSESLFIECCGAGAAASVLNPVKVRRYAEAMSESAKTDPIDARVIRLFAEAKKPEPTHPPSASEIALRKLVLARDALTKCVVQLSGTMEGASGGDAGSVLKSTVVQLRGKIKKLDRLIAEALKGDARLAGLADALTGIAGVGVLSAAKIVALVPELGTLGRRRSAAIAGLAPFTRDSGRYKGKTFISGGRAEVRRALFMPATVAIKHNPVLKAAYQNLRKSGKAYKVAITAIMRRLFAHMDAVAAKWLRETAAAASSAALTALP

SEQ ID NO: 388532 - protein, 340 aa, unidentified
MSLYGGIDLHANNSVIVLLNEQDAVIYQKRLPNDLTMILGQLAPYHAELQGLVVESTYNWYWLVDGLMEASYRVHLANPAAIQQYSGLKYTNDHSDARWLAHLLHLGVLPEGYIYPKTERAVRDLLRKRTHLVRQHTANILSVQNILARNTGARFSGKRIHELTKQDLTTLLADETQVLAVASSLVVLDCLRQQIKTLEKSVHKRLHYTPSYEQLLTVQGIGTILAQTITLETGAISRFPTVGHYASYCRCVDSTKLSNGKRKGTGNVKNGNPYLAWAYMEAAQFALRFQPAAQRFYQRKLAKSRNNTILARKAVAHKLVRACYYIMRDLVPFEETKAFG

SEQ ID NO: 388533 - protein, 348 aa, unidentified
MKSSVQQPVIGLDIAKSVFQLHLVDAETGEIQRRQLKRAKVAEFFANCKRSVVALEACGGAHHWARTLRAMGHEIKLLPPKYVRAFVLRDKTDALDAQAIWVAAQQPHIKEVPVKSEQQQACLALHSLRRQLMKMRIMQTNALRGLLHEFGIVLPVGHDKLLKSVQGELARAQQENRLPDILVMSLQEQLRRIAALQEDIEALNRRLAAVLRQNQQMLAVQAIPGVGPLTATAVVATVGDMSTFKSGRQFAAWLGLTPRQMGTGGKTQQHGISKQGDTYLRTLLISGARAVICRSTRSCWIDRLLQRRPLNVVVAAFANKMARTVWAVLAKGLPFDLVKWNPTETVSA

SEQ ID NO: 388534 - protein, 395 aa, unidentified
MFIVGIDIAKRSHEAVIITEDGQTVRKAFNFRNNCTGYNLLLEQVRKLTLVKSQIVFAMESTAHYWLALYAKLSKDGYTVMVLNPIQSHSLRELYIRKAKTDTKDSLVIADLVRFGRCKASNVPQDKILALREMCRSRAYLIDMAADLKRKLIALLDRIFPEYESLFDPVFGKASIAVLRKYPTPQKVKNAHLEKLTELLMESSGGHFGEWKARQLKEAAHNSFGIDDSCGVYSALLGMFLEQILSLTDQADLLEKQITSLLEEFDSQLTSIPGVGIVLAATILSEIGDISRFSSSDKLLAYAGLDPSVKQSGEFKSNQNRMSKRGSPYLRRAIWLASTVAVQFDPMFRAYYEKKMSEGLHYMNVIGHVSRKMTAVIFAVLRDGQPYQPVLPTAG

SEQ ID NO: 388535 - protein, 412 aa, unidentified
MQVVYESCCGLDVHAKTVVACLIKQGRKEIRTFATMTAELLQLLDWLTREGCRHVAIESTGVYWKPVFNILEGGCQVILVNARHSKAVPGRKTDVRDCEGLADLLRHGLLKASFIPPVEIREVRELTRYRQTLVQEHTAVANRIQKLLESANIKLGQVASDGLGVSGRMMLGALAAGESDPEKLAEMAQGRLKNKKGELRQALAGRLTTAQRWVLSELLARGEELEGALSRVETRIRAEVQAGADPFVREAVELLDSIPGVGEHVAHTILAEIGVDMARFPSDGHLASWAGMCPGNNESAGKRKSGQTTKGSKYLRAALIEAAWAASHGKGTYWAAKYKRLAKRLGKKRALVALGHNSLRIAYHLLKRRVRDTDLGSDYFDRQQVQRQRQRLVQRLEALGGKVTIEEVAEAA

SEQ ID NO: 388536 - protein, 344 aa, unidentified
MKYFTGIDVSLRSVSICVVDEVGGVQYEAKVPAEVELIVAALRRFSAEIKQVGLEAGTLTQYLTYGLKKAGYAVACLEARQTAATLAAMRNKTDRNDARGLAQILRSGWYRTVHVKSLESHQVRALLASRKAILAKCVDLENELRGLLKIFGVRLASHVAHGSFDETVRAAVSAIPELSKSLLPLLDARTVLYKTYLKLDNVVKAVVRHDPVCQRLMTVPGVGPVTSLTFKAGVDDTDRFRSSRNVAAHFGLTPRRYQSGETDNPGRISKAGDVDVRQALYTAAHALLTRSYAWSTLKAWGLRLAKVRGLRRAVIAVARKLAVILHRMWVDGTDFRASRLQGAV

SEQ ID NO: 388537 - protein, 363 aa, unidentified
MSDGICFAGLDVHAHKTAAAAVQLGSGEVWRAQLPGSATAAIEWLQTLPGPVRAVYEAGPTGFGLARAAGAAGIEMMVCSPGAIPRQPGDRIKTDTRDALKLARLHAAGQLRAVVVPAPELEALRDLVRAREDLRGDLMSARHRISKLLLRRGLVWAGPGEAWAQRHLHWLSTIRFDRPLVEIVFGEYLAHHEVLLSRRDRLDDLLAEQSVQGPWAPKVTRLRCLRGVDTLTAVGLIAEIGDIAAFRHPKQLASYLGLVPSEQSSGTRRRQGSITKAGSSHARRLLIEAAWHYRRPPRVSLTLKRRQAGQPPAAIEAAWRAQIRLHRRWAHLDAARAKKRTTVAVAVARELACFVWEIAQQPD

SEQ ID NO: 388538 - protein, 351 aa, unidentified
MIIGIDPHKSSHTANALDQTTNTAASSLRIDATLAGYRQLLRWGRTFPERRWAIENARGLGCHLAQWLIGRGETVVDVRTTATARVRELSRGGRRKNDVLDASAAACVAAFQGDASPVAAEDQTTVFALLEERRANVAAQRVRLVNQLHALLRDLVPGGAGAALTAQAASALLRSVRPASAAERMRKELARELVQEIRAVDARLVGVARRMATALIAHGTRLLQVQGVGPVLAARLLGRTGHASRFRSPAAFASYAGVAPIEVASGDHARHRLSRSGDRQLNSALHLVAVTQVRMRSSTGRGYYDRKIGEGKTHNEAMRCLKRRIADHVWRVMRADEVLRDLGKERRPIAA

SEQ ID NO: 388539 - protein, 348 aa, unidentified
MTTQPHIIGIDLGKHWFHLIGLDRDGAIVLRRKLSRSQLSAFAATTPRNIVAMESCCGSQYWGRVFAQAGHEVRLAPAQFVKPYVKTNKNDFNDAQAIAEAASRATMRFVPLKTTEQLELQASHRIRRRLVHERTAVINQLRALLLEYGIVTPLGRETFARRWSQILGTASAQLSPRLLVLIQRLREHWRTLDTQIAEATQELTTWAEGSPLCQRVATVPGVGPMIATAVVSAVGDARMFARGRDMAAWLGLVPRQHSTGGKPTLGRISKRGNGYLRQLFLQGAVSAYLWMKRDRSALGAWVQQLDRRRQRPVVITALANKLVRICWKVLTSDTPFRLYPGRPVEHAV

SEQ ID NO: 388540 - protein, 442 aa, unidentified
MAKVAKLPVAEQEWAAYAAIDWADRKNVWMVLAAGNGAPQRGEMENTPEAVDAWAAELHRRFQGRPIAVCLEQKRGALVHTLTKYSHLVLMIVHPTTAAAYRKTFAPSGAKDDGNDTASLLDLLLRHPEQLRQLNPDTEETRLIQFLSEDRRRLVDLKTAQCNRLKARLKLYFPQLLQWFDDVATPLVGDLLERWPTLEELQGANPAKLRKFFTEHNCRNQDRMDQRVREIYAATVATQDRAVMRAGAATVRGLVRLIKELRSQTEELEQQLAQLVADHPDSRIFRSFPGSGNALTPRLIAAFGTQRDRYQDAGELQRFSGIAPITQASGKKKQTVFRWAAPKFLRQTFHEFAACSIAHCEWARAYYDHQRREKNKGHHAAVRSLAYKWIRILFRCWKDGTLYDEQIHLRALEQRASPLAATGTDTTKPQWKRVSGFHKFSQ

SEQ ID NO: 388541 - protein, 356 aa, unidentified
MLQKLNSEIAVIGIDIGKNSFHIVGQDQRGAIVLRQKWSRGQVESRLANLLPCLIGMEACVGAHHLSRKLTALGHDARLMPAKYVRPYSKGQKNDYRDAEAIAEAVQRPTMKFVATKTAEQLDLQAMHRVRERLVGQRTGVINQIRAFLLERGIAVRQGLRFLRAELPGILATRTDVLSPRISRIVEDLVGDWRRLDERIKGLSGEIETLARQDQGCARLMSVPGIGPIISSAMVAAIGSGDAFSKGRDFGAWLGLVPKQMSTGDRTILGSISKRGNRYLRALFVQAAWVVLVKLGPKQWDRYGLKSWIEAAKKRLHHNVLAIALANKLARIAWAVLHNGRAFECVRVNETASQSA

SEQ ID NO: 388542 - protein, 318 aa, unidentified
MTKIICGVDVSSDVLEARIGRDGTAACFSNTAAGITELTSFCRQQGVELVAMEATGGYEKQPYALLWAHGVAAAIVNPRAVRRFAEGMGLLEKTDRIDAGVIAWFAEVKRVVAGPPPSSEAEHLKALVTRLRQLTDLQTAQRNQRLLVQDATVLESFTQVLALVAAQMRQLESAIAQLIAADPLWEKLNQTFRTIKGVADRTVARLMAEMPEIGTLSNKKISKLAGLAPLARDSGKHKGKRPVRGGRSGIRGILFVVVSIVRRYNPDFADFDQRLNRAGKPKKVIRIALAHKLLVRLNAKARIARQELAMTALSPAKI

SEQ ID NO: 388543 - protein, 315 aa, unidentified
METSPLYVGIDVSKAQLDVAERPSGERAVIPHTEQDIAALAEQLGARRPACVVLEATGGLQAPLASALAIAGIPVAVVNPRQVRDFARATGQLAKTDAIDAQILARFAEAVRPAPRPLPDEATQEFSALLTRRRQLIEMLVAEQHRMRTAPRPIQRQIQTHLTWLKQQLAMLDEDLTHRIQATPLWREQEDLLRSVPGIGPVVSRTLLGELPELGTLTHKQIAALVGVAPLNRDSGRLRGRRMIWGGRAVVRGVLYMSAVVAARHNPIIKAFYQRLRTAGKAPKVALVACMRKLLTMLNAMVKHRTPWRLSAQGA

SEQ ID NO: 388544 - protein, 349 aa, unidentified
MRFYNQQHRFYCGIDLHARLLAVCILDQAGNIVLQTQLPAQKQLLLDTLAPFRADVVVCVECLFAWYWVADLCRAQNIPFVLGHALYMKAIHGGKAKNDDIDAEKIGRLLRGGNIPVAYVYPKGLRETRDLLRRRMYLVHKRGELITHIQIVNAQYNLPEFSKKLIYAKNRAELKVAERFEQPHLRKSVEVDLALIDVLDEQIADVELYLERTVKVEDPQTYHLLKTIGGVGKILGLTLLYEIHDIDRFPDVGEFLSYARLVRCTHESAGKKLGSGGKKIGNAHLKWAFSEAVCLLIRNYPAVKVWQARKEKKHGKKKTLGILAAKLGRAVFHMLRKKEAFDVRRFLGQ

SEQ ID NO: 388545 - protein, 392 aa, unidentified
MRKPKQRKPLNDLSRSLTTLDTDHTLIAVIEMGQKSWLVAGIVPGVERQPLKKLDTDENALLKLLERWRMEAEKAGHKIKRITVAFEAGRDGFWLARWLRARGIEAHVIHASSVAVSREHRRAKTDRLDTELLKRAFLGWLRGERDHCKTVAIPTIKDEDAKRPNRERDSLVGEQSRIVNRMKAALARLGIRNFNPKLKKAAERLGGLRTPEDEPIPPNTLAELHRDMERRRLVIDQIRQIETARLQRLAQAPSHGPNAMVRLLARVIGISIETADMLVQEVLSRNLRDRRAVARYAGLTGSPDESGSKRREKGLARAGNARVRRGMIQLAWRFLLFQKESALAQWYRARTENARGSRKTMIVALARKLLIALWHFARDGVVPEGVILRPAQ

SEQ ID NO: 388546 - protein, 451 aa, unidentified
MADSIDSQTIHPIHPHAAGIDIGSDTHWVSVGAGTASPSARKFGCFTADLYALAAWLKECKVTTVAMESTGVYWIPVFQILETQGFEVRLVNAHYVKTVPGRKSDVLDCQWLQQLHRYGLLSGSFRPEDQICVLRSYVRQRERLTQSASVHIQRMQKALVEMNLQLNRVVSDITGVTGMRIIRAILAGDRDPQHLATLKDPRARRSAADIAAALQGDYRVEHLFVLQQEVELYDMYREQIQRCDQQIEQCLSQFESRQGSDEPLSPRPKGRKPSRNAPAFDLRTHLYRISGVDFTQIDGLEALTVQTILSEVGLDPTRFPSVKHFVSWLGLCPGSRISGGKILSSKTRKVNNRAATAFRIAAHSLANSHTALGAFYRRIRSRLGPPKAITATAHKLARIFYRLWVTGERYEDPGVDYYEQQYQQRVLKSLEKRASQLGFQLTPMNVSQEVS

SEQ ID NO: 388547 - protein, 350 aa, unidentified
MWYVGLDWADTHHDVDVLDEAGKRVGARRFAHSHEGLNELKQFVLSITASPDQLACIVETNHGLLITFLLEAGFPVYPVNPKTANQLRKAAGAKTDQIDAHLLAKIGRLDLAELRRLEPDSATVAELKTLTRDQDALIQTQTRLVNQLTACLKEYYIFEELPRPQLVGSPVIVRAKSRLMLSVVKQLLVVIEEIASYDEAISTLFLTHKDQQMWHSLPRAGKRLAPRLLAEWGDDRRRYADATSVQTLAGTAPVPFQSGNYAKAHKRFACVKPLRNALHQFAWQSTRKEAWALAYYQRKRAEGKTHSMAVRALANVWVRIIYCMWEHETCYQTATFEAAKLAHAPRQHVA

SEQ ID NO: 388548 - protein, 487 aa, unidentified
MVKRKKSAFERISSGRLNRAQRRDLSRRVAAGDPGLAIVHPNAGGIDVGNESHFVAVPADRDSNPVQEFGCWTADLKRMAEWLQACRIDTVAMQATGVYSIALDDILTQHGIRVVLVNAQHTKNVPGRKSDIQECQWLMKLHTYGLLRDSFRLAENMEGVRTIWRLRDRHVKEAGRAVQHMQKALTKMNIQLANAISDIAGVSGQAIIAAILQGERDPWKLADLKNEKVQASREEVARSLEGNWREDLVFELRQAVDNYHFAHRQMRDCDLELERRLASLPTRTLDIPGQTAQTAEATGVKTGKKKKRKTKKARGNEPTVDLKGELKRICGVDLTSIDGIDVVTAQTIISEIGTDMSRFRTESHFASWLGLTPAKDISGGKVVGKGRRKVKNRVATALRMAATTLLKSGSYLGGRYRHLRRALPSNAAAVKAMARYLGVLVHRLLTHGQAWVDRGAAKFEQRRKELELASLNSRALAKGFKLVPLPD

SEQ ID NO: 388549 - protein, 354 aa, unidentified
MKPRYFIGVDCHCQFCEIAVVDTAGKVVRRDRRDTAIPALLELLEAVPKPRSLVIEEGPLAGWLWRNLRPAVEDMVVSEPRRNRLIAQDGDKDDDLDAEKLAQLLRGGFVKPVHQVASLERAVFKQQVALYHHRVRQRVREGLRLTSLFRQHGVMIREKDYAAAAGRPDLLARLPADQTLRDLVTLLWPAYDDLVAREEEWRRRLIAAAKGQEVVQRFQALPGVGPIRAATLYAYLDTPWRFRSKAALWKYLGVGLQRRRSGNGPEYLGVPAQAHRLLKGTILGAARSAVASGNNPFADLYGRWLEHGLSSKLARRNVARAQAATLWGMWKNGSAYRPEWVGVALAAQPAAELS

SEQ ID NO: 388550 - protein, 429 aa, unidentified
MFSIGIEKGTIRINDKPSFYIGIDTHSKIHTLCIINIDIDKLLTFTFKNQPEQFEEVLQKILQTTKSTNILFGLEDVNSFGLLFSLFLNDKGYDVKHVNPAYASAYRASLPNFHKSDDYDAFCVAKVLRDSYKQLPSFHYEQVFSNIRLLVAQRTIITKQKATNYKLLHQQLSKVYPRYSEFFSTLQTRSALAFFKHFPSSRHLKGYTKEELTAEMKEHTRIFRITTAEKILRMVRANPIPYDNVIVEETIMDLITSIFEKEQQIAKLEKQLEPLIEETGYQLHTIPGINIATAAMLISEIGNIERFKTSKQLSKFCGIAPVSIGSGGKNIEQSSKGGNRVLRATFYFIAMGSVTVSKDDTARHPLFRDYYLRKLLEGKSKSQALVCIMRQLVDIIFSMMKHKTEWKQPDYVRQIPSAPLKDTVLKKKH

SEQ ID NO: 388551 - protein, 500 aa, unidentified
MSKRKDKRRRFHNQQKEQRQLLNERRQREFIARVANIPPDRILYWPLDIGKNVHWMRAETGSGRIIHAPKALTTDYAGYLYGKQHLDGWLTSGQFDLVVMGHEPTGIYHETWCRHLLYDFAPYLADGAHPQLLYRFLNPYQVKLERLKLIQRSRKNDQIDLWAMSNLLQQGQGSPAVLPDPNNALLTQYIFFDRQATHALKAIRIDELRQFDRIWPGAIVNVKRFKQAHPDLPLPRPIVETKPFERDTFRVLLEHCPDPYRVRELGRAGIIALLHEHDVRCGPVTAQRILDCATRALLSPREVVAVYVHGLEQLRADEAHWLTRQTWAEQHLEERVAATPARHLLTIRGLSAPWAARYLDLVGAPPVFDWPDQVWACVGFDLIEKQSGDSTKTYGISHRGDPFHRQTLVWMANLVAGHHPTFGQVFMAAEARGLGVWGAAIHTAHKLNRVCFRLLAEDRPYVDDTRAEDFTRWRTYWIAYRQHHRDPKQFDDPGSWKPSR

SEQ ID NO: 388552 - protein, 412 aa, unidentified
MDVLVERCAGLDVHRDSVMATVRVPGKRRRQREQHKRAFGTTIAQLQELGEWLQGFGVTLVGMEATGVYWLPVFDVLERRFECWLLNAQHLHNVPGRKTDTIDSAWICQLVEHGLVRPSFVPPPEIRRLRDLTRLRKAQINERGRAIQRLEKVLQGVGIKLTSVASAAYSVSARAMLEALLAGTTDPNELAELARGSLRGKIPQLREALANRFELTHHGVLVSGLLAHIDALDQGIAALDARIVEATEPLAELVELVSTIPGVKQRNAQVLIAECGIDMSVFPTVHHFASWARICPGNNQSAGKHRSGKTLRGSRWLRQALTESARAAARTKGTYLASHYWQIRGRRGEPKAIGAIRHDILVAYYHIARDRVPFRELGADWLARRHSPEHRARRLVRQLEALGLNVTLEPAA

SEQ ID NO: 388553 - protein, 361 aa, unidentified
MMESMALVGLDAHQAQTVAAVLDPSTGELSVQRLRGEPASVVPVFLEELDCPVRAVHEAGPTGFALARVAEARGLDVRVIAPGSIPRAPGDRVKTDRRDAKRLVRLFAAGELSYAFVPSEADERFRDLVRCIEDARKDLMRSRHRLSKFLLRRGHRFPCKAWTQPHERWLGKLRFEDAPSQATFVDYLCAVQTLAGRRRTLIEVLEQTVPETSHAETVARLRCLRGINTLTAAGLCAEVGDFARFAKPALLSGFLGVVPSEHTSDEKRAQGQITKAGPPHARRLLVEAAHHYRHQPAVRLELKARQAGQDPRVVQVAWRCQRRLHERWVHLQGTRGKRTGTVAIACARELAAFCWEAATLS

SEQ ID NO: 388554 - protein, 324 aa, unidentified
MAKPTTICAGIDTGKRKLDIALNGSSEQLQIDNTPEGYKALLGWLRRHRVKRIGIEASGGYEQAVVAELRHQRLVVVVFQPAQVRAYAKFHLLRAKNDKIDAALIAACTAAVKKIHAPPDARLLPFAEHLTMIDQIGEDIARLKNRIETCRNPRFRQIWKADIAGLEKREKIELKALVAAIRQHRDLAERLDLIDSVVGIGLPTAVAILVRLPEIGRITREQAAALAGVAPYDDDSGEQIGIRHIDGGRQRLRRALYTAALPASLRWNPQLIALYNRLIAAGKEHKRALIACARKLLIFANTVVARGTPWHRERAPIVVITAVP

SEQ ID NO: 388555 - protein, 349 aa, unidentified
MGYYAGIEVSLELSSVCVVDSAGKIVKETKIASDPESFVLFFQGLGFLVERIGIEAGPLSQWLHAGLTKAGFETVLLETRHVKAALSAMTVKTDRKDARGIAQLIRMGWFRSVHCKSPGSQEVRALLVARKQLLGKLLDVEFSIRGILRGFGLRMGLVTRKSFEPRVRELCAGQAMLEQIAAAMLAARSALQTEYARLHKAMLSIVRGDEICRRLMTAPGVGPLVAITFKTAVDDPTRIKKSKAVGALFGLTPRKYQSGETDVTGGISRVGDEMVRTALYEAANVLLSRVTRFSALKRWGMDVAKRRGTKRAKVALARKIGVILHRMWVDSASFRWTKEAGGAGRLACA

SEQ ID NO: 388556 - protein, 419 aa, unidentified
MSKSMFCGCDVALENNTIWLMLDDGSQPIKLFNVDNNQLGAEVLVERIYAIAKEHCVSDIFIGTEATSMYDWHLLEYLAESKLALEFNLKLYRFNAKWIKNFKKSLAPRGKTDPIDSFAIAERLRMGRLPKEYVPDIKYQPLRKLTRFRFHLQQQIAREKDFFLANLFLKYSAYSHVAPFALTFSATSMSVINDFFSVDELAAMPIEELTEFILEKGKAHFSKPAEIVDNLKRVARESYRLKPELAPTVNLILASTFNNIRCYKDQVKLVDSAIAENLKAFKHTLESIPGIGPVYAAGIFAEIGGVNRFPNDSALAQFAGLTWPKHQSGKFQAEETRMSHTGNQYLRYYLVEAANSVKRYDATYKAFYEKKYAEAAKHHHKRALVLTARKLVRLVWTLLTRQVLYQPGYCSFEDLSKIG

SEQ ID NO: 388557 - protein, 345 aa, unidentified
MDEISRIGMDTSKHIFQLHGVNTAEQPVLRKKLRRKEMFAFLEELAPTVIAIEACGASHHCARLLQSFGHSVKLIAPQLVKPYLKRGKNDAADAEALCEAMSRPTMRFVPVKTAEQQAALMLVGVRDRLIRNRTQLSNAIRGYAGEFGLTAAKGKAHLDPLLERIQADESLPALARELFAAQAEEYAQLQAQIDQVDARLIAWHRADECSRRLIKIPGVGPIGAVLLKMKTPEPELFRSGRQFAAWIGLTPKDHSTAGKVRLGAITRAGDEALRSVLVVGATTVIQHAQRGGRPSPWLTELLKRKPPKLAAVALANKIARIAWKLMVTGENYAAKAAPATLPGAA

SEQ ID NO: 388558 - protein, 361 aa, unidentified
MKKTTHHLIAEVPRSITKVGMTIGIDLGDVWSHYCTLNEDGEVVDRGRFRTTPSGVEKWFTDVPRARVAMETGTHSIWVSERLREMGHEVIVANVRELRAISHSNRKSDTVDAEKIARYARVDPEILRPVSHRTVAQQEALTLIRARNLIIRLRTAAVNSVRGLAKPCGYRLPASSTLCFAKRCMAVLPPGLARALGPVLEQIAAMTVKIQQYDRTIKQLTETEYPETQALLQVYGVGQLTALTYVLTLGGKERFKRSRDVGCYLGLRPRRSQSGDRDPQLGITKAGNIYLRSLLVECANHVLGPHGRDSTLRQWGLHLATRGGKQSRNRAIVAVARKLAVLLHRIWVTQEPYLPFYAVAA

SEQ ID NO: 388559 - protein, 384 aa, unidentified
MEKFSTLYVGLDVHKESIDIAAAEAARDAEVRHLGSVAGGLDAVSKSMRKLVSAGHRLHIVYEAGPCGFVLQRHFSSLGWHCDVVAPSSIPRPSGERIKTDRRDAMKLARLARSNDLAVVRVPGPADEAIRDLVRARDDAVREQRNGRHRLKALLLRNGITYAGKSSWTAAHLRWLATLKMEHAAQQIGFQEYLHSITETTARIHRLEQAMRDALADWTLRPVVQALMSMRGVQLIAAMTLVAELQDFLRFESPRQLMGYVGLVPSEHSTGPKRRQGSITKAGNSAARRMFVEIAWHYQHSPRVSAVIATRHDQLPKAITDIAWAAQLRLHAKFKRLMARRLMKNKAVVAVARELAGFVWAIGCEVQTSGWQGIAVEPTTAAAS

SEQ ID NO: 388560 - protein, 355 aa, unidentified
MTSSKYIGLDVHKESISIAVRNAAGKIVMESVIETKASMILDFIDGLRGEIHVTFEEGTWSAWLYDLLRPHVTRLVVCDPRRNALLQEGNQNDRVDARNLAELLQNNQLRPVYHGDHGLRALKELVRSYLTITKDLSRVMTRVKAIYRSWGIPCSGTQVYTACHRAEWLEKIREPGVRRRAEIYYLQLDGLRLLRLQVRKDLLAESKKHQVWKRLCGIPSIGPIRAAVLLGIVQTAHRFRTKRQLWTYSGLGIEVHSSADHQVVKGQLQRKKKPIEIRGLNKNCNHHLKSLFKSAAITASTKPGPFQEFYAALLAKGMRPEIARLTLARKIATIVLIVWKKGERFDANHLKPQTA

SEQ ID NO: 388561 - protein, 436 aa, unidentified
MKDPLELPIVNPHAAGIDVGSEKFFASVGGQEPKVFLTVTRQMNELCEHFKAAGVRTVAMEATGVYWINLHGVLEDSGFKVVVVNGAHCRNFPGRKTDMKDCQWLAVLHAHGLLESGFVPPSDIRRLRDYMRLRADLVSMAAQHVQHMQKAMDRLNVKIHVVISDITGSSGMRIIKAILEGQREAEKLVELCDEQILKSKRAPMIEALRGLWRKEHLFALRLAVESYEAYQKQIAECDIQIAEVIETISAGKPVPELGKSKELRHNAIILPELHKQVAQIFGKDLTKLPCLNQSTLALLLAEIGSDMSRWKDWRHFGSWMALAPSSSQSGNRRWRLKRRLTRSGQILCRAVQCMAVGKHTWLAAFYRRIRAKRGAKVAIKATAYKLAKLIYLVLTQGWEYVEQGIAKYQEKIHQMQVRALQKLAKTLKFDLVPQNM

SEQ ID NO: 388562 - protein, 339 aa, unidentified
METGQRYVGIDVSKATLDVAQGTGKTASEFWQGSNDDEGIERLIARLTTDKAKPTLVVLEATGGYELLVASMLATAGIPVAIVNPRQVRDFAKALGILAKTDKLDAGVLYRFAEAMRPEARPLPDPQVRELQALVVRRRQLVDMLTMEKNRRAGAAVSARLRKSIEKHIAWLEEALRRANDDIDQAVRQSPLWREQEQLLRSVPGIGPVTARTILAELPELGQMHRKEAAKLVGVAPLNCDSGKFKGTRTIWGGRASVRTVLYMATLTAVRRNPVIAAMYNRLLGRGKKKKVALVACMHKLLTIVAAMMRSQERWAPRLPGTTVASPPGGPIPAAPAAA

SEQ ID NO: 388563 - protein, 341 aa, unidentified
MQIAVLGIDLGKNSCSVVGLDLAGRVVLRRRLHRDGVIKLAAGMSGCVMAMEACCGAHHLGRLLRDHGHQVRLMSPEYVRPYVKAQKNDDRDAEAIAEAATRPTMRFVELKSEAQLDMQSLHRVRDRLVGERTALINQLRAVLLERGIVVPQGRRKLERYVDALLAEEDRLSPRTGLLVEDLRAEWRELDRRILAFDDEFAAQARTDEIARLLTSIPGIGPLNATALTAAIGNAQTFGRGRDLAAWLGLVPKQVTTGGKPKLLGISKRGNRYLRKMLIHGARAALPTLPKGETPLGAWLRGLLARAHVNTVVVALAAKLARIAWAVIRSGEKFDMKAATAS

SEQ ID NO: 388564 - protein, 354 aa, unidentified
MQHRTTDPSPLTIGLDLGSRSTQCAVYSPGGSRLEERKIATTRASLRSLLERFPGARLVMEASTPSRWIKNLAVELGHEVIVANPRTIPIITASVRKCDRNDARLLAEIGQFRPHLLNPVQLREDRYQAVRTQLFARAQLVKQRTALVNFVRCEVKAIGESLPTCSTRSFVSKAGPLVPAQLRQAMEPILEVIKSVSDAIDVYDKRAERLAEESFPQTQILRPVHGVGPLVALAFVATIGDPRRFSKSRIVGPYLGLVPRLDQSGKHDPALSITKCGDRYMRSLLVSAATRILGPHGADSDLRRFGLRIADKGGKRAKARARIAVARKLAVVLHRLLSTGEVYEPLRNSSAAAA

SEQ ID NO: 388565 - protein, 352 aa, unidentified
MVVVGADVHKFKHTFVAVDEVGRKLGEKTVKATTDGHITAIMWAREQFGAELLWGIEDCRNMSARLERDLLAAGQKVVRVPTKLMAQVRKSSRTRGKSDPIDAEAVARAVLREPALPAASHDEVSRQLKLLTDRRDVLVAQRTSAINRLRWHVHEIDPERSPAARSLRTAKQQQALADWLNTQPGLLIVELARAELTDIIRLTADVNALEKRLSDQARALAPRLLELPGCAELTAAKILGEAAGISRFTSEAAFACHTGVAPIPVWSGNTEGQVRLSRSGNRQLNAAIHRIAVTQIRMQDSQGHAYYQKLTTAGKTKAAARRCLKRRLARIVYQALHADHQTRSKHPQPAAA

SEQ ID NO: 388566 - protein, 318 aa, unidentified
MIARQPMVAGIDVSKATLDIVILPSGKRLMAGNHPDGINRLTCQLREAQVAKVVLEATGGLEYPCARAIADAGITVSRVNPERIFGFRKSLGRRAKTDLLDAELMARFALVMDEPARPLPSIQAQNLKDLAARRRQLVEMIAMEKNRLKRSTDLVLTQSVKTMIAALAAERSRIEGLINNAIAAEAEAHRRYDILASIPGFGPVVATTIVTEMPELGQVDRRAAASLAGVAPHPEQSGTSLNRTNLHSGRPCVRTALYMAALAAARANPEMKAFKAQLVANGKAPKQAIIAVARKLITLANQLVRENRNWAPKDQLAT

SEQ ID NO: 388567 - protein, 351 aa, unidentified
MSQKTEAGLACTIGIDTGKNTLHLVGLDAKGAVVLREKLARGRIAARLANVPPCLIGIEAGMATHYVARELLVLGHDVRQVPPAYAKPFRQGHKNDFRDAHAIAEAVQRPSTHCVPIKTDAQLELQALHRVRSRLIGGRTAVINQIRSFLLERGITVRQGLRFLRQQLPQVLATRTDVLSPRMIRIIEDLSSDWRRLDERIEHVTEEIELLASDSEACRQLMTVPGIGPIIASAMVAAIGNGAAFAKGRDFAAWLGLVPKQMSTGDRTILGRITKRGNRYLRTLFMQGARVVLLRPTNWAKHSFGPWIAAAAKRLHHNVLATALANKLARIAWTVLAQGRSYERRAVPGIV

SEQ ID NO: 388568 - protein, 314 aa, unidentified
MSPLVFVGIDVSQTCLDIAIRPGASFSITHDEPAIAALVEQLRALSPTLIVLEATGGMEIPLTSALATAGLPVVVVNPRQIRDFAKASGRLAKTDALDAQVLAQFAEVMRPQPRPLPDADTRALAAVLTRRRQLVEMLTAEKNRLLSASSPIRKRVRVHIAWLERELDHTNVELSEAIRQSPVWREKDELLQSVPGVGPVLTSTLLASLPELGTLTNKQIAALVGVAPLNRDSGMLRGRRTVWGGRAQVRAVLYMGAIVAARFNPVIRAFYQRLQRAGKAKKVALTACMRKLLTILNAMLKHRTPWRQMETQHA

SEQ ID NO: 388569 - protein, 346 aa, unidentified
MTIVEDARAITGGVDTHADTHVAAALDPRGGLLGVKEFPATAAGYAGLLSWLAGFGTVALAGIEGTGSYGAGLARHVAATGIRVVEAVRADRQDRRRNGKSDPLDAVGAARAAQSGRAAGAPRGRDGAVEAIRALTGDGRSARNERTQAINQARSLILTGPDDLRARFARHSAAALAEAIAALRPRPGDAAGYAVRVALRELGRRVEFPDGQLERLDELIVPLVTARAPGLLALHGVGPDTAALLLVAAGDHPERLRSEAAWAHLCGTAPIPASSGKVRRHRLNPGGNREASHALWRIVITRMSSRPATRAYVERRTKEGLSKKEIIRCLKRYAAREVYRHLRAGG

SEQ ID NO: 388570 - protein, 344 aa, unidentified
MDHFAGLDVSVKETSVCIVDDTGRIVREVKVASEPEALLAALKNPAYHFKRIGLEAGPLSQWLFSALAEAELPVVCVETRHMQAVLKAQINKTDRNDARGIAQMMRVGLYRPVHVKTLRSQKLRMLLTHRKLLQSKVIAIENDLRGTLRNFGLKVGMVGKVKFEARIKELLENLPDLAELVEPLLIVRRALSEQIVILHRRLLAIVRDDEVCRRLMTIPGVGPVVALTYRATVDVPARFRKSKAVGAVFGLTCSKYQSGEIDRSGRISRRGDEMMRVMLYEAAQSMLCSKKWSWLKAWAMQIARRRGVKKAIVALARRLAVIMHRIWVDGTEFRWTREQAAAAA

SEQ ID NO: 388571 - protein, 370 aa, unidentified
MLNTTTFVGLDVHARSIKAVALDAMTGEVRSATFAYDAAAVAEWVRSLDPAAKCVYESGVTGFDLQKRLASMGIDCVVGAVSKMIKPPADRKRKNDRNDAEFLARMLSVGNVVEVWVPDDGCEAARDLSRALDDAREDLKRCKQRLSKFLMRHGCAFSETTPTGRRKGNWTAAHWAWIKSISFPEKADNDVLAYYVDAARRAMEDKARLERLVEAEASKPRWKRRVDSVRCLKGIDVTSAADPVFEAGEFSRFKSARSFAAWLGLTPSERSSGESVRQGGITKAGSKHLRRVLVESAWHYLGCSPRSKGLAKGQVPDPAARRHAAKGVRRLVERRRAMLERGVHKNKANVATARELACWCWAVGRMIENG

SEQ ID NO: 388572 - protein, 476 aa, unidentified
MANLGGRAQKGRRSKMPEKTNVESSEKRRQLQGLPVIRPNVAGIDLGSERHWACAPTLDGSGREIASFGATTPELIRMAEWLKARKVESVAMESTGVYWIAPHEVMEAQGLQVLLVDTRQLARVPGRDKKTDPTDCEWIQRLHSCGLLRGSFRPEEAVCMLRTLVRDKANLVAEAGDWLRRMQKSLDQMNVRVHRAVSDLDGVTGMAILRAIVGGERDAQKLAQLRDRRCSKTEQEIAEQLSGHWREDHLFSLQQALKMYDAVQERIAAYEKEILRKLGEMERDEHRGQTAPPLQNPTKTKTIQKRGQELKRQALYRMSGVDVTQIDAIGVETVEVVLSEYGSDLSRFPTEKEFVAHVTLAPHVARSGKKSFKRRKRNSASTRVAAALRMAALSLRHSRTALGAYYRRTAQRIGGDIAVFATARKLATLIYRLLRWGQPYVDEGAEAYENRYRQQRVSSLMAKAKDLGYELTPVSA

SEQ ID NO: 388573 - protein, 401 aa, unidentified
MVSDFMKGRYNLMKIFVGIDIAKLNHFAAAISSDGEILLEPFKFTNDADGFQLLVSKLESFDKNSIIIGLESTAHYGDNLVRYLVAEFYQVCVLNPIKTCQMRKNNIRKTKTDKVDTFVIAKTLMMQDDLRFITFFDLDMMDLKALGRFRQKTIKQRTRLKIQLTTYVDQVFPEIQYFFKSGLHQHAVYALLKEAPSPKEIASMHMTHLANLLKVNSHGHFTKELAKELRVLAQKSVGANDSAISIQITQTIQQIELLDSQLQKIEAEMTDIMKFNDSVIMTIPGIGYINGGMILGEIGDIHRFSNPNKLLAFAGLDPSVYQSGNFQAKTTRMSKRGSRVLRYALVNAAWNVVRNNATFKAYYDAKRAEGRSHYNALGHCAGKLVRVIWKMLTDEVEFNLE

SEQ ID NO: 388574 - protein, 391 aa, unidentified
MTYIVGIDIAKFSHECLILNHHGEVVVQSFSFDNNYLGFKMLGTILSRTAHSTQIKIGFEATGHYGNNLKNFLINSGYDFMEIHPVLINRFSKAISLRKTKTDKVDASLICSYLTSVEFKPYSLKSYHNTSLKSLIRTRDSLVKERSLQLQRMTNILDIIFPEFKPFFKHSLKSSTALYILKHYTLPSKIKRMTQSSYAKMASKLRRTISYARFIKLKELANNTVGTEDELLAFQLHSFLNLYNHFDNLIKEIDVLILNEYKKANSYIHTIPGIGEISAATIATEIGDIRKFSNPDKLVAFFGLDPALYQSGETEFTGRMVKRGSSLLRQTIMNCATYCLLHNPPLYDFYRKKRDEGKHHRVALSHVAKKLIRIIFALETKEIEFDFNQMK

SEQ ID NO: 388575 - protein, 391 aa, unidentified
MVCIGIDVAKDKHECCILDSEGTTLVDCFTIPNNMDGFKSLLQTIQDCSQKSDKIKVGLEATGHYSYNILGFLLDNDLPVYVMNPLHTNLYRKSLSLRKTKTDRVDAKTIATMLLSDVDLKSYTDTAYHNEELKSLTRYRFDKVQERAKLKQSVSRLVTILFPELEQLVSSIHGTSIYALLSEYPGAKQISEAHLTRLANILVKTSRGHYRKDKATHIRDAARTSIGSVMPAKSLELKHAIKLIQELTSEINEIEDAIRKIMDELKPPILSIPGMGFHSAAMILAEVGDFSNFNSPDKVLAYAGCSPSTYQSGKLTNCYAHMEKRGSRYLRYALYTATKYVCYWNPVFTEYLTKKQAEGKHYNVALSHATKKLVRLIYALQKSGKAYLAVT

SEQ ID NO: 388576 - protein, 320 aa, unidentified
MSKHSMVCAGIDISKHKLDVACGGRSERLQVDNTTDGHRKLSAWLRRQRVKRVGVEATGGYEQAVVVELRHAGFEVIVFQPAQVRAYARFHLQLAKNDKIDAALIAACTADTKKVFAPPDPRLAPWAQRLSFIDQITEDIVRLKTRLESCRDERLQRYWREDIARLKKLQKSELKALVAEIRQHRDLAERLELIASVDGIGLPTAVVILVRMPEIGRISREQVAALAGLAPFDDDSGQQHGARHIKGGRGRLRRSLYAAALPAALRWNTQLIALYRRLIAAGKKHKAALIACTRKLLIYANTVVERGTPWVGREQASVRP

SEQ ID NO: 388577 - protein, 265 aa, unidentified
MKTTTVGIDLAKNVMQVHGVDERSKTVLKKQLKRNQVVAFFANLAPCRIGMEACGSAHYWARKLESYGHTVKLMAPQFVKPYVKTNKNDAADAEAICEAVGRQNMRFVPIKNAEQQAVLSLHRARQGFVKARTAQANQVRGLLAEYGIVIPQGIGHIAKRLPEIMEDGENNLPAAFRLLLQRLGDHLKELDRQVGELEVQIQTWHQESDASRKLARIPGIGPITASALVASIGDVKSFENGRQLAAWLSLVPRQHSTGGKPTLLV

SEQ ID NO: 388578 - protein, 359 aa, unidentified
MDVRDPAKRHVVGGVDTHKDLHVAAVVDERDRVLGSQSFATTRQGYRQMLAWMRSFGEVQRIGIESTGSYGAGLLRFVQTVGIEVLEVTTPDRHDRRRRGKNDDLDAQNAAHAAFAGQRTVTPRSRDGMVESLRVLSACRKTAVAVRRVALQLIQNTIVCAPDGLREVLRSMTRMQLIRTLAAWRPDLTAYRDVEAAYRITFKSLARRYLELHDEIADLDIMIGAIVDELAPDLVARNSIGHVGAAQLLLAAGDNPDRLRSEASFAALCGTSPVPASSGKTIRHRLNRGGDRHANSALHIIAIGRLRTDPKTKKYVAKRIAEGHSKLEAIRALKRYIAREVFTLIMRRHKTINQTQIAA

SEQ ID NO: 388579 - protein, 415 aa, unidentified
MEKLLERCAALDVHKRQVTACARVPDRKGERAELRAEFETMTPDLLALRDWLKGLGITHVAMEATGVYWKPVYYLLEDDFELLLVNAAHVKNVPGRKTDVADAQWLCQLLEHGLLRASFVPPKPIRELRDLTRYRKSLIWERQREANRLQKLLEDANIKLASVATRTLGVSGRAMLAELCEGRNDPEALAELARGKLRRKLPELRRALQGRFSSHHALIVSRLLAHVDYLDETIAELSGEIEKRLRPFEPEVELLRTIPGVAQRTAEVILAELGPDMSRFPTHRHAASWAAICPGNDESAGKRKSGKTRKGDGWLRTALVEAANSAAGRTRGTYLNAQYARIKRRRGHNQAIVAVAHSILVSAYYILRDHRPYEDLGGDYFLDRERPERLTRHLVRQLERLGQRVTLEPVAAGAR

SEQ ID NO: 388580 - protein, 360 aa, unidentified
MASPTLTQPEGADHPDVVIGVDTHKEFHVAVALAPNGGRLGECSIPANRQGYGVLQDWALELGSRPVFAVEGTGSFGAGLCRELLAVGYSVVEINRPDRSTRRRLGKDDAIDAEAAARSFLAGTATIAPKGGTHLVEMIRLLKGNKDSASKSRTRAINQIKAILVTAPAVLREQLEPLAHDVLMATSSAFRVPLVDSPMAAAKKALRFLARRVLRLEREIDELLNDLDQLTQQACPGLRQTYGIGTDGAATLLVTVGDHPERLRSDAAFASLCGVSPLPASSGKTNRHRLNRGGNRQANATLHRIVVVRLRWHEQTKAYAARRLKEGRSKAEIMRCLKRFIAREVFHTLLGRPPVRITAA

SEQ ID NO: 388581 - protein, 354 aa, unidentified
MSQKLEITIAVVGIDIGKNSFHVVGHDERGAIVLRQKWSRGQVEARFANMPPCLVGMEACVGAHHLSRKLNSLGHNARLMPAKYVRPYSKGQKNDFRDAEAIAEAVQRPTMKFVATKTTDQLDLQALHRVRERLVSQRTGIINQIRAFLLERGIAVRQGQRFLRAELPRILATPPDVLSPRMMRIIEDLAGDWRRLDERVEDLSNEIEAIARQDAGCERLMSVPGIGPIISSAMVAAIGAGDVFTKGRDFAAWLGLVPKQISTGDRTILGKISKRGNRYLRVLFVQAAWVVLIKPQKWERHGLKSWIEAAKKRLHRNVLAIALANKLARIAWSVLAHGRDFEAQKMDQAANQSA

SEQ ID NO: 388582 - protein, 341 aa, unidentified
MNNINVIGIDLAKNVFQLHGSDKAGNRVYSKRVSRKKLYETVAQLPKCLIGIEACSSAHYWANQFQALGHEVRMMAPKYVKPYVLNNKNDANDAAAIAEAVTRPRTRFVPIKNREQQDIQALHRIREQQVKQRTMLSNQIRGLVGEEGIVMPQGISAIRKKLPFILEDASNNLSIVLRDLIGVLWEQFKGIDERLAYFNQQIESIAKNNEICQRLMRIPGIGAISATILLTVLGQISVFRNSRDFAAFLGLVPKQHSSGNTIVLKGISKQGNSYIRYLLIHGARAVIRHCDGKEDKRSQWLINKKNRSHVNVAAVALANKNARCCWAMINNNTEYHNELAA

SEQ ID NO: 388583 - protein, 357 aa, unidentified
MLSSNVKYIGLDVHKEAIAIAVVNGAGKLVMESIVENKSSTVLDFLHGLRGELHVTLEEGTWAAWLYDVLKPHVREMVVCNPRRNALLKEGSKSDKIDARKLAELLRAGLLRAVYHGENGLQTLRELARSYLTISKDLKRVKNRLKALYHSWGICCAGKQVYAARHGEQWLSKIAQVGVHRRAELFYQQLDGLLVLRNTVRGELLAESQKHQAVKILRQVPSIGPLRAALLLALMQTPHRFRSKRQLWTYSGLAVVTHDSAQHRYVDGQLQRSKKPQQIRGLNQNHNHAMKETFKSAALNASRCAGPLQDFYARLLAKGMKPDMARLTLARKIAAITLALWKKGGSFDVEQLKSQAA

SEQ ID NO: 388584 - protein, 328 aa, unidentified
MSNYVTAIGLDVHARSISACAFDPMTGEVSRARFGYDPASVAEWALGFESPKAVYESGPTGFHLCRALRAPGVDCAVGAVSKMHRPAADRGRKNDRRDAEWLARLLACRNVVEVWVPDERTEAARDLSRALEDARDDLQRARQRMSKFLLGHGLVFDETTPTGRRRSNWTEAYWRWARSIEFDEADDAAAYERYTDAVDRCGEAKRELERRVVEAASRPERAPTVDALCLVKGVDVATAFLLAAEAGDFSRFPSAPSFAAWCGLAPSERSSGETESRGGMLMSIRLSPIPPTQSRRSRQRVPAVSADVRRRFRRPGPARGPSCDRTSR

SEQ ID NO: 388585 - protein, 385 aa, unidentified
MTQASDLSRCLVALKQDSTLVAVVELSASSWLVAGMVPGVDGKPLKKLAPEPEALVGLLDRWRAAGLKAGRVIERVVVAYEAGRDGFWLARWLKARGMEAYVIHPTSVAVSREHKRAKTDQLDAAMLLRVFVGWLRGERDHCGMVAIPTVDEEDAKRPSRERESLVVESTPLVNRMKGALARLGIRGFKPQLRKAAQRVAALRTPDGLAIPPNTLDEMRRDLARLALVREQIAAIEAARLERLAQAPERGPHAMVLLLARIVGVGVGTADMLVHEVLCRRLRDGRAVARYAGLTGSPDESGSKRREKGLARSGNARVRSGLIQLAWRLLLFQKDSALVQWYRARTVAPGVRKTTMIVALARKLLVALWRMVATGEAPQGFVLRPA

SEQ ID NO: 388586 - protein, 382 aa, unidentified
MQASNVCTPTAGHHGTIFVSIELSQRTWLVTMHNPDRDRFSRHKLEGGDHAGLLRLIESVRSRVRRQLGGEPRVVSCYEAGYDGFWLHRLLTQAGITNLVFDPASIAVEQRARRAKTDRIDGELLLRTLMAHLRGEPRVVRIVRVPSVEQEDARRLNRERDRLVKEQTAHTNRIKALLRLVGMAVGNPRRSDWLRWLEDQRDWQGCPPPRELLAEVTREHTRLMLVREQLARLDQAPVASEASVPAPNSKSRDLLFRLKGIGAVFATTMANEVFYKDFDNRRQVGGYMGLASSPWRSGGTDRDQGISKAGNPRARLKAIELAWLWLLHQPDSALSRWYRERTANASKRVRRIMIVALARRLMVALWRYLTTGLIPEGAVLKA

SEQ ID NO: 388587 - protein, 401 aa, unidentified
MIGVDPHKCSHTAVAVGADEAVLGQVRVRASAVQAKRLLEWAAAWPERAWAVEGAGGLGHLLAQQLVAAGERVLDVQPKLAARVRLLAAEAVNKNDPNDARSVAVTALRSRTVREVVPDDHSTVLKVWSKRHRDLGRSRTQIACRLHSALCELVPGGIGKEITAAHAARVLAQVIPSDAVQQARWELAADLLEDLRRADERLREVNKKLTVAVQATGTTLTDIFGVGPVIAATVIGQVAHISRFASRDGFAAYNGTAPIEVSSGKRKVHRLSRRGNRKLNHAAHMAAVTQVRYQHSDGRAYYDKKLAEGKTAKEALRALKRQVSDAFYKHLKADAARAADSSTQGPGGQAGNDSVASAAGSHPECQLFGQATPGPQPTLRLQSPSGTKSTSQARKKPARTS

SEQ ID NO: 388588 - protein, 418 aa, unidentified
MNNGQYAALVGIDWAHQKHDICLQEAGSDKLEYSVLEHSPEAIDAWARGLRERFGGRPVAMGLELTRGPLVSALQKYDFIALCPINPTSLARYRNTWFVSGAKDDPSDAALALDMMKTHPERFTVLKPQSAEMRALQQLVEARRCLVDDRTRITNRIIDALKGYHPHVLKWFDDRSTALFGDFLERWPTLEAVQKVRRDVLERFFRQHNVRGQARIDGRIDAIKSAMTLTDDPGVVIPNQLLVRSLVAQLHPLRQSIAEYDVEIKRLCESHRDFAIFDSFPGAADVFAPRLLAAWGEDRSRFGSASEMQRYSGTAPVIRKSGQSKVVRWRFACPTFMRQSFVEWAGQTIPTSYWAGAYYRQQMARGKSRQTALRALAFKWQRIMYQCWQQRKPYDEVHYLQALQKSGSPLLQNAITAP

SEQ ID NO: 388589 - protein, 348 aa, unidentified
MKYYVGLDVSMKTTFISIVNQEKKIVFESEVITDPCTIFSAIKGTKLDIENCAIESGAISHWLVKELLKRKIPVVCVDSRKMAKILSININKTDKNDARLTAEALRCGFYSEVHQKNQEDAEMQILMGTRRTLIEVSTKLKNTIRGHLKIFEIRLGTASNKKFDNLVRSALQNKPEVVQLGLKSLLETFKCTNNEIEFLGKKIEEMAREDEDVKLLTTIPGVGVITAFTFKTCLGDPSRFKRSRSVGAYFGMTPTQYSSGDIVKQGKVSKCGNSEVRSLLNEAAFSIIYSTKSWNRIKAWGLKIKKKKGHKKAMMAVGRKLSVLMYRMLISRKQFEYGVPKDNSQKTA

SEQ ID NO: 388590 - protein, 342 aa, unidentified
MSGSQSTVSYSLFVGVDIAATTATVAWMRPGEKVCRPVMIEQTPEGYTNLERKLRATGAAPIEVLVVMEATGSYWITLATRLVQAGFQVRVINPAQAHHFAKALLKRAKTDAIDAQTLTQLAMMLRPAPWTPPPQIYYELQQRLAQRDALLDLQQQVRNQLHALEQLPEVITTVRERFESLLATFAAQLGTVEAEIMEVWQQDATWATAAQRLQSIKGIGWVTAAWTLVTTLNFTTCDTVEGLTAYAGLAPMPRQSGTSVWHRPTIGHTGNGRLRTAFYMATLSAAQHNPLIKAFYTRLRTAGKPEKVARCAAARKLLHIAWAVVTKAQDFDPNYAQKMHRA

SEQ ID NO: 388591 - protein, 265 aa, unidentified
MTLTLGIDVAKAKRDVALRLPNGQTRSKVVANTDSGLAELQAWRVHHDGIGAHVCMEATGVDWEAVAETRADAGFTVSGVNPARIKAYRVAQQVRTKTDAVDACLIADFCARQHPPAWIPPPPAQRELRAWGARREAWVVMRTQEQNRLPVAHPSVRPGIESLIAHRNSVIAEAEAAIRQRIDDDPPLKAQQRRLDSVPGLGDKTIPVLWSFYGGPGRFDPARPAAAFAGLDPRQHESGRSVRGKPRLAKVVMRGCARRFTCRPW

SEQ ID NO: 388592 - protein, 351 aa, unidentified
METQSKQIDFTGQNFYCGIDMHKKTWTVTVHSDEFILKTFSMDPEPGILDRHLRKHYSGGNFIIGYEAGYFGYGIQREFESLGISCWVLHPSDIPTTNKDQEQKRDPRDSRKIAKAIRNNEVSSIWIPPISIEQDRQLLRTREKLAKDKTRIKNRIKAFLQMYGITYPETFKNPSTHWSGRFIKWLDSLELKESTGTESLRSLIRCLRFQRGEILLVMRKIRELSRSDRYMKPLSKLIKKPGIALVTAMTILTETGDITRFKTVDNFRSFMGIVPRSHDSGDKVRPGRMTKRANSHLRSLLVEATWMAIRYNPYYLNVYKNYKKRMKENKALIRTSVKFTNELYYCMKNEA

SEQ ID NO: 388593 - protein, 405 aa, unidentified
MSEGRFAGVDWASEEHAVCVVDERGRIVQGRRYRHDESGLRALCARLVRLGVALVALERPDGLLIERLLDAGLAVVAVHPNQVKANRPRYSVAGGKSDSFDSFVLAELARTDSHRFRVLVPDSDQTKALRAMTRARDSLVHTRVGLANQLRDQLATFWPGASKVFCSVDTQIALAFLKRYPTPADARGLGEQRLAGFLKRHGYPGRKPARELLARLRNGAEGRAGELETQARRQVVLALVSALEPIVARISELTIEIRHALDAHPDGAIFRSLFIAQDSWLSAATMIAEIGDCRDRYPTYRALAADAGQAPVAVESGKSKHAQFRWACDHRLRQAICTLADASRRHNPWAADIYQRAIARGASHTHATRILGRAWCQIIWRLWHDHDTYDPARHTALQRLIAAAA

SEQ ID NO: 388594 - protein, 387 aa, unidentified
MSEMFNPSAAATAFDHNTTIVAVLELSGKNWLFGAVAPGVTKRAKRGFAARDIAAVTKALEQLKAQAQKAGFAVARIALAYEAGRDGFWIARALAQHGIEVHVMHPASIAIERRAKHAKTDRIDVDLLLTTLIGWLRGEPGRCTMAPIPTQEEEDMREPGRRRRALVQDRLKVENRIGGLLIRYGVAGFRPRLKNAEKKLAELKAHDGGALPPETSNSLKLLLAQHRLLSQQIHEIEAARAKVVEVEKPDRLQRRIQALAGLFGVGVETATVLVHEVLSRRFKGRRALGAFVGLTGTPYDSGGSKTEQGISKNGNPEVRRLLSQLAWRWLRHQPASALTRWFHARLSGAEGRMKKVLIVALTRKLLIALWRYVETGEIPAGARLAAK

SEQ ID NO: 388595 - protein, 365 aa, unidentified
MEKISTVKTKGKKILKGQLTIGLDLGDRSSCYCVLDENGEIIREQKIPTTPEGMQQAFGKMARSRIAMETGTHSPWVSRVLTELGHEVIVAHAQKVRLIVKSRRKDDRLDARTLARLARIDPELLSPVQHRSAQAQLHLAEIRARAGLVSARTALVNAARGLVKSYGERLRKCGTQQFGQETTSGLSAGLREALEPLMQEVESLNERIKEYDRRIEKMAKETYPETELLKQVKGVGDLIATTYVLTVEDPHRFRKSRDAGCFVGLQPGRRNSGESEPQLHITKEGDEYLRTLLVQGAHYILGPFGEDSDLRRWGLKLSARGGKNAKKRAVVAVARKLAVLLHRLWVSGEVYEPLRNSQKVMTAAA

SEQ ID NO: 388596 - protein, 337 aa, unidentified
MKRFAGLDVSLSTTSICVVDGQGRIVFEGVVTTDPDAIGAVLAPHGPDLVGLEAGPMSEWLHAGLSRHGLETVLMETRHVHAALKASLIKTDRRDACGIAQLLRMGWFRPVHVKTASARERRVLLGARDTLVRRLRDLDNSVRGLLRGFGLRPPRLLRERWSGAVRRLIAVHPVLVAAIDPILVARDRLSEELARLDKLVRDQARDDAVCRRLMTVPGVGAVVALSYVAAIDDPARFARSKAVGPALGLTPSRYQSGETDRPGAITKAGDARARVALFEAAHVMLTRVARWFPLKAWAMRVAARRGAKRAKVALARRLAVILHRMWVDGTDFQAQPA

SEQ ID NO: 388597 - protein, 320 aa, unidentified
MQSVCGIDVSKDRLDIMVLPEQQCFSVRNDAAGWVELVERLRGFSISAIGLEASGGYERGAMRALLAAGMPARQVNPFKLRQFARASGVLAKNDPLDARMIASFVAIMPTQPAQLRAPAIERLAEMLAVRRQLSAEKVAAENASRLLEDAMLQRLSRRRIRRLAADIEMLDRHLAEIVGTDAALAHRYRLLTSMPGVGLVLACTLIALLPELGRMSRKQVAALVGVAPYAFESGKFKGRRCIWGGRAPVRNVLYMGAMSASNWNPVLKAFHDRLKAAGKLPKVVIVAIMRKMITALNAMVRDDVVWADHLSGRHSVPTAR

SEQ ID NO: 388598 - protein, 408 aa, unidentified
MKRYYLGVDWADEFHQVWVSDFDGKKVAEMKVVQSPEGMSEFGSWLHQRKAEEIELWAAIEKPHGRIVDFLLDHAVVVYPVNPKALDRVRDRFRMSQSKSDSFDAYVLAEFLRTDHAHLRALEPSSNEAQELKMLTRDHHRLVRQKSRLLNQLDRTLKEYYPRPLEVFSDLESKIALDFLARYPTPAALGDLNRRKWNRFAKREHHLGEQRCKELWEKLNKPQLNVPEHVVRAKAQLLEVLLIQLKALIESVQSYSEKVQRFFASMPAADLVKTLPGGKSGTIVPMLWAELGDAKSRWQSFRHLQAEAGAVPVTKASGKSRVVQFRFSCNKLMRYASYWFAFVSLNQSEWANRYYRDQRAKSHNHPQALRALGAKWLKIIFVMWRDHKPYDENYHLANITRQKMRQAA

SEQ ID NO: 388599 - protein, 392 aa, unidentified
MNRIVYIGMDVHTSNYTLCSLDPGYGVEKDNYFAEVQFTNNFVTNVVNYVSNLKKKLKDCEFVCGYEAGCLGYSTYKDLTKVGIKCVLMAPSTMAVQKGGKKVKNDRRDARLIAQCLAYQTYKEVYVLSEHDEAVRGYLRMRDSHNKALKRIKQQIIAFCTGHGLFSPTKSNWTVAHLKWLKDLKFNDPVEQEILNEYLSSLTFLSDKIKAMDVRIEELASEKQYCENVKKLRCIKGIETNVALTLLAEIGDFNRFSKPTDFAAYLGLIPGEQSSGDKVRGTGITKAGNSTLRRKLTESAKGYWRGRIGIKSATFKKLEKELPKEVTEYALKANTRLQRKFFNMTHVKGKNMNVAASACAREMACFVWGLITNHYEKAPAVPKTDEELLDLN

SEQ ID NO: 388600 - protein, 396 aa, unidentified
MFYGFDVHKEFIQVCALDKDGETRRDFRVGGTAAAIEKFARGLDRADEVVLEATFHSWAIVQILSRHVERVVVADPAQLKAIANARIKTDKVDAHILAQLLRLDFLPEVELPTDGAWALRQLMAHRRQLRRQSVAAKNTIHAVLNRSLQRYPGKFLFSEKGFRWLAELELPAAERMVLDHQAALLREVQAHLQALDRVLLEQARLHPDAKLLVTIPGVDVVVAIGFLAATDSIDRFPSPQKLAAYFGLVPSVRQSVGPPRFGHITKAGSRNARWLAIEAAHTIARSSSPMAATYHRIRRRKGHQVAVTALARKLVVVVWHVLTTQQPYRYAAPERTRLKLRRLQKHERPARRSPSSLAEVYAEAGFELDPPSRGENRAAKSNRATITRSRDAAASP

SEQ ID NO: 388601 - protein, 308 aa, unidentified
MTTIYAGLDISKLNLQLHLSGRFHDLPNTAAGHRHLLDLLAAHPGVHVVCEATGGYEREVVATLHQAAIFVSVLNPARVRHFARAQGQRAKTDHIDAAVLTAYGSALMPKATEPRTEMEKQLVELVRRRVQVLDMLVAQRQQAERLVLPPLRRQAKMLIRHLERDLAQIQELLTELRRQSPALDQRAQKLEAITGVGAVTALGVLAELPELGTLNRREVAAIAGLAPHPRESGQWRGRRTIGGGRAEVRRALYMAALVAARANCRLKEFYERLRAAGKPAKVGLTAVMRKLIVLMNQILKNPNFVLAN

SEQ ID NO: 388602 - protein, 346 aa, unidentified
MDKFDSCGIEVSAQELVVALCRDGRAERLRSFANTAQGHAALCGFLASGPQRVRVALESTGLYGLDLAYALHREARIEVMVANPRAVRHFASALMQRSKNDRLDAVVLREFAARMPFQAWVAPSAHCFALCAVTRRLETFTEQCTAEKNRQHAASLSAAIPSAVRRDLQRSVRSIQRAIVRLTREAQRILEADPLLASSYRLLLTAKGIGPTSALRLLAETALLSEDLDVRQWVAYAGLDPREYQSGSSVHKRVRISKTGNRHLRRALYMPALVAVRHEPHLRAFYQHLLAQGKCKMQALVAAMRKLLHAVYAMLKHRQPYNGAKLYRLIDNLPPSSSATCSAEAA

SEQ ID NO: 388603 - protein, 427 aa, unidentified
MKEQSSTIVGIDWSADSHTCYDLQADKTFKITDSVEGYEKLLKNCSEAVFVIEEANNRIGDYLLINNREVYVLPPCRSKEARKYHFSSGAKSDNLDAKAIALTFRDHPSYCRRITYSELKATMIKLVTAYNIVSKMHSQQCNRLYSILLRYSPDYLHIMEKQYKSDRSLKILSLCPTVTELKKISNEKLKKMLNKDNHRMTSSLRKKLDKLRSEGIFWGDTSCEAKLILFLVNIILSLREELEALRKEMLRILESSPYRIILSIPGVGAVVGSYIVKAYLTHDFRSYQEMQKYAGTVPFLFQSGKKSIMSMRKKCDNKLRTMIHIAAFASLKNCGWAKNYYKRKRNEGKTYGHALRALGNILLKIAFSVLSNMKEYDESLFLNAKGIKTTQLNDTTFSETSSYPEYSQDAHLSLAATKDVIDNLIVT

SEQ ID NO: 388604 - protein, 452 aa, unidentified
MPARKDKNMQYQKVPKLLENIPYLSVGLDVGADFSWMSIMLPNGTLTGKPFKIVHSDPQSRELAVAKIKEAQEAYSLKSRCFLESTGIYHIPLLCFLRDKGFDCSVINPIITKNSTNMNVRKLHNDKFDSKKAAKVGLDASLKTSIIPDDAVIDLRNLVRDYYYFKDLQSAVVLKLTAELKVSFPAYRNVFCKATTQTSLKLLDAYPLAQDLLAAPKGTVVEMIRSTARFGEKYALAKYDALYAAAEDAAIFGRALPSNALRIRLYIKLYREYQEHLDGILEELHKAVDRLKGTPVHNRISLLQTLPGIGFLSAVVLLAEMGSFDLFSPPKKLYAYFGMDPGVNDSGKFHGDRVHMSKRGSSLARRILHMAAINNLKVDKAAKMPVNPVIYDYYVRKCAGKKKIVAVGAVMHKICNTIFAMLRDNKPFELITPEEHCQRYAAEHQGSVSTAA

SEQ ID NO: 388605 - protein, 354 aa, unidentified
MADEIAVIGGIDTHTDLHQAAVIDSIGRHLATEQFETTPEGYQRLLDWLRSHGEVLAVGVEGTGAYGAEIARFLTLNEVTVVEVDRPDRKARQDNGKSDPIDAYGAATAVLSGRAGGTPKSRNGIVEAIRALRVVRKSAVKARTQTINQIRTLIVTAPSAVRDKLRGLSARELVDTLAHSRPGGDLSDPAFAVRVALRRLARRYQQLDEEIKDADKEIGPLVTQAAPRLIALPGVGPETAGQLLTSAGDNPDRLRSQASFAHLCGAAPVPASSGRTNRHRLNRGGDRAANNALHTIVLVRMKYDQRTQEYVARRTAEGMAKKDIIRCLKRFVAREIYRHLPHVTHPTKPLPQTA

SEQ ID NO: 388606 - protein, 370 aa, unidentified
MAEPTTLFVGLDVHKDSIAVAHATIDHASDVVYVGQVGTREADIEKLLRRLHSHAARLVVAYEAGPCGYGLYRTLTQRGVSCLVVAPSLIPKKPGERVKTDRRDAVQLARLLRSGDLTSVYVPTVEDEAVRDLARAREASIGVLKDAKLRLKSFLLRHGLNYSGRATWNDAHLRYLAKVVCPTPAQQIVFQESLRAVSEQTERVRRLEDELLEVAATWRLRPIIDAFQSMRGVQSHTAVTIAAELGDLTRFDTPRQLAAFVGLIPSEYSTGESRRLGPITKAGNGHARRALVEAAWAYRYPAKVSAHLQKRIERCPKAIQDISWKAQVRLCKRYRRLVARGKNPNIVVTAIARELLAFLWAIAREVPIGA

SEQ ID NO: 388607 - protein, 311 aa, unidentified
MTQGISYVGIDVAKHRLDVRWGDEQFSVANDETGHSALLARLRASPLAAVGIEASGGYERRALKVLREAGLPVRVVDSWRLRQFAKACGRHAKTDPLDAAMIARFCQVMPAEAAVPSDPLRDKLERLVSYRQSLVADKVRLAHQIAQLDEDELIDMAQKRLQLSAHCLKQTDRHIRALIQSDRILKRKAQILQSAPGIGFVNAITLLAKLPELGQRGPKKIAALVGLAPYDDKSGRRDNGAHIARGRATPRAMLYLAVLSQLRRCPWAKAFRDNVTAQGKPKMVAVVALMRRLIVALNAMIKHDRIWFDPA

SEQ ID NO: 388608 - protein, 383 aa, unidentified
MPMRQVCGLDVHKDSVFVCILNENGIVFQDKYGVLTTELEQMLAVMMEYGVTEVCMESTSVYWMPVWRVLENYIPKLMLVNPYFIKQLPGKKSDVKDAEWIATCLLKDLIKGSYVPEDRIQQLRQYDRRIFDLNKEIAYKLTKLDMALQRCNIRISNYVATTDSKSYQEVVRLISEGVTSAEDLAKVIHGRTVNKYGRETIVGALSGVISETDIDIIRQLREEVLLDKKHKDECQSKMDALCQKWFPAEFANLQTIPGVKARSATAIIAELGTDMSSFEDAAHLVSWCGLKPRNEESAGKIKSRSITHGNKYLRKTLIECSWASSKTQGCFYNKFSYTQTVVRRKNKMKVQVAIARKMLTAIWFILHDSVPYRDFTPDIIPAE

SEQ ID NO: 388609 - protein, 392 aa, unidentified
MVVSVGIDVSKDKHDCFIVSSEGEVLADAFIIPNTMDGFHYLLQRIRHCTAPQDKIKVGLEATGHYSYNLLGFLLDNGLTTYVLNPLRTNLYRKSLSLRKTKTDRVDARTIASMLLSDAGLKPYTDTAYHNEELKSLTRYRFDKVKERAKLKSSIARLVCILFPELEKLVPSLHIASVYALLEEFPGAKQVANTHLTRLKALLETASNGHYKRDMALEIRNAAKNSIGSQMPAKSLELQHTIRLIRELDHEIAEIEEQIQSIMDELHSPITTIPGLGFRMAAMILAEVGDFTRFDSPDKLLAYAGMSPSTYQSGQLKNCYPHMEKRGSRYLRYALYNATKYVCHWDPAFADYLAKKRAEGKHYNIAISHAAKKLVRLIFAMEKSRQPYCSAA

SEQ ID NO: 388610 - protein, 337 aa, unidentified
MEQEVVTVGLDLAKNVFQVHAIAADGAVLIRRKLRRSEVVRFFAELSPCLIGMEACASAHHWARELIAIGHEVRLMPPAYVKPYVKRGKTDAADAEAICEAVTRPTMRFVAVKSVEQQAVLMLHKSRDLLVRQRTMLINALRGHLAEYGIVTGLGAGGVAASLKALHKEQDQFPAHARSALHGIAAQLRALASEIDRLEAQILDWHRNDETSRRLATIPGIGPITASAIAAAVPDASLFRSGRQFAAWLGLAPRANSSGGKERLGGITKQGDGYLRRLLVVGATAVMRMTRKNPARQPWMAGLLERKPTKIATVALANKTARIAWAVMTRKEVYAAA

SEQ ID NO: 388611 - protein, 412 aa, unidentified
MEVVYSRCCGLDVHKDTVVACVMIREGTKVVKDIRTFGTMTAELVVLSDWLGAHQVSHVAMESTGIYWKPIFNLLETSFHLILVNAAHIKKVPGRKTDVRDCEWIADLLAHGLLKGSFIPPEPIRDLRDLVRYRKSLTDERVRAVNRLQKVLESSNIKLSSVAADVMGVSGRAMLEALAKGSTDPEVLANLARGRLRQKLAALRQALEGRFRPHHQFLVGQMLSHLDFLDEAIAEISQEVAVRIGPFEPQVTVLKTIPGVDRKVAEAIVSEIGVDMSRFPDHRHLASWAGLCPGNNESAGKRLSGRTRKGNQWLRRMLIETAWTVSRAKESYLNALYHRLARRRGVKKAAVGVSHAILVMAYHILKTGRPYEELGMDHFDRLNIAQVKRHALRRLEALGYNVILEPTQANAS

SEQ ID NO: 388612 - protein, 346 aa, unidentified
MCQAAILDEDGKLLDEIRFANTPEEIEEFAGKLTTFHDEVKAVVESTGNLWIQIHDRLEEHGFDVALSNPSKTRLIAEAKVKTDKVDARTLAALLRADMLPTCYVPGEELRSRRELLRHRLNLVKTRTEVKNRVHGLLDKHGLRMPGTTAFSKGNIEWLRGLSLGFMDDAIVRSDLAVLEAVDGQVTLIEEKIAVLAVEDRRVRLLMTMTGVGYFTAMLVLSEVGDVGRFRGDKEFASWMGLVPSVHQSGERTRVGGVGPGNKRLRWALVESAQTAVRHDARLGGMYERVSRRRGSGCAVVAVAHEMARIMYFMLVRGEPYRGENRGLTERKLKNMSKRALDGLRN

SEQ ID NO: 388613 - protein, 457 aa, unidentified
MESYYMGIDVSKGYADFVILDAEKNVVEPNFQLDDTFSSHCRLFEILKRFFDRHSGSVLFAAVESTGGYENNWLHSLGGFQGALDIRSARLNPLGVRANSKASLRRVITDKISARDVAEYLIAHPEKVAYQQEDSLAGLRRQWGFVRLLVKQKTQILNQFESLLYTANPELIAYCKSGVPAWLLKLLKQYPTAAKLAKAKATTVARIPYVTAGRAKELIDQAKKSVASATDETTGNLVAAMAEQIIRMEETIRIQTQQMAQQCAIPEVALLKTFPGISDASAIGLMLEIQSVKRFSSVKKLAAFFGLHPAFKTSGDGTSGVRMSKQGRKEPRKILFMVAMVSLTANPHIRKIYEEHTEKGMKKMVAIGLCMHKILRIIYGMLKNNQAYDSQVDQKNRENRTARKATHTAKNENRRYEMFDQQAPISRRQSNKRKEWKQSQGDNITQCGIGVPIPSAA

SEQ ID NO: 388614 - protein, 338 aa, unidentified
MYVIGIDPHRGSHAAAVLDGDERVQAVLHLPADQQQRQRLLSWANRFMPRLWAVEGATGTGALLAQQLVAAGEIVVDVPPKLAARVRLLGNDHSDKTDSHDARSTAIVALRNARLRQVGIEDHTAVLRLLAKRHHDLIAARTRAMCRLHTTVCFLIEGHLPRRLRAERAAGILAGIRPATAIDVERKALARDLLAEVRRHDRELAEHLVRIREAVAASGTTLTGLHGVGPVVATYVLGYSGDIGRFPSAGHYARYNATAPIEASSGPVIRHRLNPRGNRQLNHAIHMIAVTQVRNDTPGRAYYRRKQAEGHSRKEAMRALKRRISDAVYRQLVSDSRR

SEQ ID NO: 388615 - protein, 342 aa, unidentified
MQESLYVGLDLGSSFCYQSVVERDGSLRFSRVVRTNERELRDSFAGLEGDVRVHMEAGELADWVGSVIGPLVSRVVVSHPRSLAWIGKDATKDDKIDARKLAELLRLNRVHEVYRGQDAERRTFRHLVTHHEQTSREQARRKSKIKARLRCLGIIRKDARLFSADGQADLLDAIESVEIKAMIAQSFAVLDRMLECEGEAKRAMLEYSRRFPEVRLLQTAPGVGAITACRFVGYLQTPRRFSNKRKLWRYCRLGITRRESNGKRLSHPRLDNAGVGSLKDVSRKVFEAARRCKGDNSFKRVYEQSLENTKNAVHARLATQRKILAVMRAMWLANRPYHNIGG

SEQ ID NO: 388616 - protein, 345 aa, unidentified
MSEFYEGRQFVGIDLHRRRSVLVRMTETGERLETVRISNDREYLREVMSRAGEAPEVVLEATYGWYWAADTLGELGATVHLAHPLGVKMFSYRRVKNDERDAADLADLLRMGRLPEAWIAPPATRELRGWVRHRAKLVGLRSNLKCQVHGILAGAGVTVAVSDLFGMAGQRLLAEAPLRTESRSRTDSLLRLITALDFEIELFGKLVAGRLRAHPGYQAIQVIPGVGPVLAAVFVAEIGDISRFPGPPQLASWAGLTPKHHESDTTVHRGRITKQGSRLVRWAAVEAVQRLPAHTRLGQLRDRVAARRGRSIGIVAAARELTGLVFYGLRDHRIRALPARTPASP

SEQ ID NO: 388617 - protein, 387 aa, unidentified
MEVLYGRCAGLDVHKDTVVACARIAEGGAETKREVRTFATTTRGLLELSDWMAQHGCTHVAMEATGVYWKPVWHVLEDSFELVLANAAHIRNVPGRKTDINDATWIADLLAHGLIRGSFVPPAAIQHVRDLTRTRKQLVREVAQHTQRIQKTLEDANIKLTGTISDVLGLTGRAILDALVAGESDPERLADLADRRIKAPRIKLVETLRGRVTEHHRFLLKLHLGQVDALRAAIAEVDEQLGKALGEATAMAKLLTTMPGVGELVAQVVVGEIGTDMGRFPSAAHLVSWAGLCPRSDESARKRRNTRVRHGAPWLKTTLVQAAWSAAAKKNSYHRAQFQRLKARRGPKKAIVAVAASMLTAAYHMLRDGTAFHDLGPTTSTAKTVAR

SEQ ID NO: 388618 - protein, 456 aa, unidentified
MEKNTEPVFEEISRNVAGIDLAGHSDHYVCGPRREDGSCEIVAFGTTTSELHRMLKWLQEREVVSVAMESTSVYWIPLYDLFESNGIETILVDSREVSMVPGRKSDVKDCQWLQKLHSCGLLRGAFRPSEDVVAIRSILREKETIVAMRTQSIQQMQKSLDQMNIRVHHAVSDIDGVTGLAIIGAIVNGERNPVTLASLRDRRCKKSVEEIAEHLRGTWREEHLFNLKQAYETLLFLNIKVTEYDSKILEMFAVLAKPTAESDEQASPPSLPAKKQTAKERKNATGKADIKNYLGFDLTIIPGIDYDTATIIASEIGNNFDRFPDEHHFASYIGLTPSLGKSAGKNVRQKRRCKNTSRVGRALRMSASTLYHSKSALGAYFRNVARRSDRKTAVKATARRIAHMIYRGVRYGIDYIDSGAEAYEKYLREKTLKTVNKLIKTFNINMLEIENALLQN

SEQ ID NO: 388619 - protein, 466 aa, unidentified
MENNYILYVGMDVSKGKADAAILKVSDRRSVKPKFLRKKLSFKFVKSEVASFLETVRSYSDVNCTSICFALEVTGIYSTNVYDYIKANLYENESIKFLNTDFVNQWRIAHNIAKSDPLDAQTISTIIGTDSDVQYVNDNVFENKKGYQDLKALVHRHYQIKKIYSQEINRLIAQCDCLFPELQYVFEPKSAAFIAVLSSYPTTHDIINASRVEVFDVVYEATKHRCSMDKVDKLFELCQDTLVPDDISSYGKSIILDLVENIKNIKGQLKSIERYIKDIASLNPAYKLLLTITGCGPITAATVIAETGNIRRFKNADCFVSYSGTSPRNKRSGTSVETMGKISKKGSRYLRHAIYMIAEFARRHNPVLKHQFERIKNGNKKRHKLANIAIANKIARYIYSIMKNKSSFVILHDHIMRLPEETRDTFFNSISLDFPKNTRKQIYQYSDINGELHRFVYIKTDEMIPA

SEQ ID NO: 388620 - protein, 400 aa, unidentified
MIAIGIDVSKGKSMIAAISASRDILIAPREFLHTKEGFDELANTIHALGNNIKIVMEATGHYHEPVAKALHEARFFVSVVHPLLVYSYSDNSVRRVKTDKKDSLKIARYCLDNWLLLREYVPQETVRQQLKLFSRQYNLCIKLVHTMENNLISLLDKTFPGAAKFFSSRKKKNGRQKWVDFAASFWHVDMVANITEDEFCQKYQHWCVSNNYKFTFEKAREIWAGSQGHSTTLHMNDETRMLISSAVLQVTTIAGNLAQIRQRLVQLSSMLPEYEIVMSLYGVGELTAAQLLAEIGDVRRFHSGRALIAFAGIDPLPRQSGTYEKRSVKTSKRGSAPLRKTLFQITVTHIRLSPEQEAVYQFIKRKRAEGKPYFVYMTAAANKFLRIYYARVKEYLDAAQ

SEQ ID NO: 388621 - protein, 356 aa, unidentified
MQKQQFVGIDWATRRARWCAVTPAGVVIGEDWTPADADGLASLVARLGPDAVACLEMMSGAAWVRDQLQAAGWTVQVADARKAKAVGSLAAKTDKLDARVLAELARRDLVPQVHVPTFADREVKERLGRRMHMVRLRTAAINRAHGVLSQFGVMLAFKRLREPDREQLLIARGIPEVWRRSIAEAVAVVAMLDQRLIPLEQELRPLARADPRVKLLVTIPGVGDLLGLTIASEIGDISRFPSARKLIGYSGLTPRVYQSGQKARTGKLSKSGSTMLRWAAIEAAQQAWRPSNPWHQLYLDVKQRCGGKGNPAKAAVARKVLIASWHVLALQQPFNPSRPRGANAPVPANSSFALAY

SEQ ID NO: 388622 - protein, 411 aa, unidentified
MLVGIDWADAEHTYCLMDDTGATLATGTIDHTAEGLERFMTLVRARAQDPQDILVALETSQGPLVGALLDQQFTVYAINPKAVDRHRDRFGVAGAKSDLRDAWVLANLLRTDRMLYRPLLPDSEVAQELRALTRDRAELVQTRTMLSNQLTSCLKAYFPEFLTLFADPDRPVALVLLQAFPTREALQAVSPTRLEAFLRRRHCPHSHDRAVEIHTQMQARGFHIAPPLVRAKARLAGTLVSQLQALAEHLEAYDREIQRVLRLHPDGELYHSLPGAGDFLAARMVGELGDNRDRYRDASSAQCEAGTAPVTRKSATVRTVHVRRACSHPLRSTMWQFAFASKRHCEWAQAYYLRARKRGKKHAEAVRMLGNVWLRIIIAMRRNRRPYDEALFLSRSSHPSLALCPSVVHHK

SEQ ID NO: 388623 - protein, 410 aa, unidentified
MRKENIIYVGIDLHKETHTAVMLDCWNHKLGEITIENKPAEFHKLTRKVSRFVTEEKTAVYGLENAYGYGRALAVWLFEKGFVVKDVNTALSYAQRKSVPMYQKSDSYDAEAVALVLINMLDRLPDAIPDDKYWTLSQLVNRRDNINIHQQRLKNQLHEQLCMAYPSYKKFYQDIGRPTALYFFHEYPSPVHLRGKTAEELAGELRPVSHNNCSVKRAEKILELVKSDGETYRDCQESRDIITRSLAYDLEHYRKQMEEVEAAIEAMLPEFDCTLMTMPGIDIITAANILAEIGNIDRFPNAKKLTKFAGIAPINFSSAGKGKDVCPKQGNRRLQAIFYFLAIQMVQVAPSGTPRNAVFREYFLKKLEEGKNKSQALICIARRLVNIVYGMLKNHTEYREPESKTGDETV

SEQ ID NO: 388624 - protein, 360 aa, unidentified
MAKTKAVHLSCVIGGVDTHKDLHVVAVVDQNNCVLGSEFFATTRQGYRQLLAWMASFGTVKRIGVECTGSYGAGLLRYLQSAGVDVLEVTAPDKMERRRRGKSDTIDAESAAHAAFSRIRTVTPKTRSGMIEALRVLKVCRKTAVAARRTALQMIQMNIVSAPDESRDQIRSLTRMQLIRTLASWRPDVTAYRNVQDAYRIALKSLARRYLELHDEIADLDVMLASIVDELAPELIKRNSVGYECASQLLITAGDNPQRLHSEAGFAALCGVSPVPASSGKKNRHRLNRGGDRAANSALHIIAIGRLRTDTKTQEYVAKRVAEGHSKMEALRCLKRYISREVYTLLRNQNRQINSTQITT

SEQ ID NO: 388625 - protein, 322 aa, unidentified
MKTKRVCVGIDVSKAELSMALWPEQRVWTCPQEPVALAKLAGDICRLRPRLVVLEATGGLELDIVDLLVKRGVPVHRCEPSRPRHYAKALGIYAKTDRVDALLLARFAASGELKPQTFASDQVRDLEALVARRRQIVKMITIEKNHLAAGRDRACKASIRVVLRMLIGQRRQLEAKIAAALAHAPELKAKAELLQSAPGVGAVTAASLLGGIPELGQLNRWQAAALTGTAPMKNRSGTWIGRERIFGGRADVRSTLFMAALVATRHDPWMKDIYTRLLARGLAKKKALTACMRQLVIRLNVMLRDGQPWCPKPLRQTAPAAA

SEQ ID NO: 388626 - protein, 340 aa, unidentified
MTRYIGVDLHTNSLTACYLEEGKGICFKTYQLTPAALRCFIQSLKLSDELAVEATGNTEFFIEAISNAVSRVVVVNPREFKVIRNSVNKTDKNDARALAYFLSKDMLPEARRKSKQHQKVGSLSQTRDKFVKSRTYFMNKVHGILNSCGIKLKKESLGTEKGLQRVLTHQIDEVSKFEVEVLVDQIRVLNDSIKKLDNKLVSVGSQLKGHQNLVSIKGIGDRSAAILLSAIGDVNDFENESKLFAYFGIVPRVSNSNETERSGRITKRGTKLGRTTLVQCTLIAIRYSKYLRRFYDKLKAKKGSGKAIIATAKKMLGIIYKTLKYNWVFEDFENFVLVKK

SEQ ID NO: 388627 - protein, 412 aa, unidentified
MDQIYERCCGLDVHQASVSACVRVPDRNGKRCEFKARFSTVTSDLLALRDWLQGYGVTQVAMEATGVYWKPVWYLLEDDFELLLCNAAHVKNVPGRKTDASDAQWLCQLLEHGLLQGSFVPPKPIRQLRDLTRYRKTLIKERQQEANRLHKVLEDAGIKLSSVASDILGVSGRAMLEALVGGQADPEVLAELARGRLRAKLPALREALNGHFSAHHRRLAGHILDHLDYLERMIETLSEEITELIAPFEPQVEQLQTIVGVGRRGAECILAELGPDMSVFGSHRRCARWARICPGNNESGGKRRNATTGKGNPWLREILIECAHAASHSRDTYLKAQYLRLRRRGDNKAIVAVAHSILVSAYYILERNQPYTDPGFDYHARLDNNNHNRRTRHLTKQLEALGHRVTLQPLAA

SEQ ID NO: 388628 - protein, 368 aa, unidentified
MNTVKFIGMDVHKKTITIAIAEEGRQNQPRVYGTIANDLDALNKFCRKMVSTSTQIHFVYEAGPCGYGIYRHLNEKGFDCMVAAPSMIPKKSGDRIKNDNRDAVMLARLHRAGDLTAVFVPDAQDEAMRDLSRARGDAVIVAKKAKQRLKAFLLRNSVVFNGRSQWSKAYFSWLADIAMPHPAQQIALQEYLDAVHESLNRVNRLTDQIRQMIAGWRLAPMVSALQAARGVSLIVAVTVLAELGDLSRFKKPSQLMAYLGLIPSEHSSGSNIKKGGITKTGNGHARKALVEAAWAYRMQARVSRVLLKRQKDLPQQICRIAWKAQLRLCARFRRLAAKGIPKQKVVTAIARELSAFLWAIAKQVPSVV

SEQ ID NO: 388629 - protein, 338 aa, unidentified
MNKITTIGMDLAKDVFHVVCCDARGKIVRKRMLKRSQVLEYFGNREQCLVGMEACASAHYWGRELEALGHEVKLIPAQYVKAFVRGNKNDYNDALAIAEAVVRPEMRFVTIKTPEQQDIQALHRLRKGSVGMRTALCNQIRGLVGEYGLVAPKGVATLRRRIPEWLEDGDNGLSDLFRRLLSESYIRLQELDTHIAFYTEEVERQSKQDEACQRLQTIPGFGPIVSSVFHSQIGNGEAYRRGRDASAALGLVPRQHRSAGKDTLLGISKRGDSYLRSLLVHGARAVVSRAEHKDDRLSLWINKIRAKRGFNKAVVALANKMARIGWAVLANKTVYQAI

SEQ ID NO: 388630 - protein, 392 aa, unidentified
MIYLGIDVSKDKHDCCFLSQDGELLSKPFSVPNSREGFEKLFSLVSSFENNPENVKAGLEATGHYSFAILGYLLEKGVTCFVFNPLHTNLYRKAVSLRKTKTDKVDSKTIALLLLSSVGLKPYSKALYHNEQLKSLSRYRFSKVRERAVLKQQLARLVNILFPELEKLVPSLHLSSVYALLEQFPGASYVANAHLTKLTNLLSSSSSGHYKKEKAIQIRNASVSSVGCIMPAKSLELKHTVALIRVLSEEIEEIETEIKKLMDELHSPITSIPGISYRMAAMILSEIGDFSNFDSPDKILAFAGLSPSTYQSGKLDNAHSHMEKRGSRYLRYALFTAATYVCIWDKTFSDYLHKKLAEGKHYYVALSHAIKKLVRVIYALQTTGQTYFSAVA

SEQ ID NO: 388631 - protein, 368 aa, unidentified
MIYSIGIDMSKDDFSACLQSYDLRSQSHQVISRKTFKNKPSGFKACMSWLARHTRKDPAPIRLTMEATGVYYESFALFIGEHHRQIHLSVVLPSQSKRYIESRGLRSKTDKIDAYGLALMGAERKLDAWKGIDPFWRKLRVHTRTRAELLDQRTQLRNQLHALDHSGVQACQAEQALRACIQTISSQIDELTKLIGKQLRSQKDLRTQIECLRSIPGIGTLTIACILAETNGFAEFHKISQLISFSGYDVKIKQSGKWTGQPKLSKQGSKYIRRAMFMPASAVVRSKQGPIYEFYQRLLGKHNIKMKAHVAVQKKLLSYMYFLWNRQETYDPEKIRRDKAIHQALQTQKKVASTNAEATVDTSLVVSQ

SEQ ID NO: 388632 - protein, 321 aa, unidentified
MAMLSFCGIDVSKDRLDVMVLPGRQSFAVRNDAAGWAELIARLRGLTIAAIGLEASGGYERGAIRTLLAAGLPACQVNPFKLRQFARASGVLAKNDPLDTRMIASFVAIMPTRPAQPRPPAIERLIEMLAVRRQLNAEKVAAENASRLLEDAMLQRLYRRRIARLAADIDRLDRRLVEITASDAALAHRYRLLASMPGVGLVLACTLIALLPELGTMSRKQVAALVGVAPYAFESGKFKGRRCIWGGRAPVREVLYMAAMSASNWNPVFKAFHKRLKAAGKLPKVAIVAVMRKIITTLNAMVRDDVVWADHLHGRHIVPTA

SEQ ID NO: 388633 - protein, 464 aa, unidentified
MNPVTVSASRSSDCLLVGDDVSSIRNDVCVLSATGEVLLNHQPFANDVPGYHALRDTVLALLDQTSAGGVDYAGEATGWYWFHTFYALAHDEALNGIDLRLSLFNPRQTHAFKKVMASRDHSDPKDARVVAERARFARAEHPPVLEDTWLGRRLLTRHYYHLSHALAAEKTYFSAFLFLKASAYRQLKLFTDVFGATSSAILTQYSTIQELADLPLAELEGLLKTLSHNHLPDVEEKAQRLHAVAVNSFPVPPHMIEPLNFVLRSTLEHIRFLEQQLGDTVAAIEQAFAGVRELAWLMSIPGMGLTLAACLLAELGPFDRFFNGTVTNHKTGHTRAKNARDAEASIAKWVGLWWPRHQSGTFEGEITRMAKDGNRYARYALIQLANCLREHSAEFAAYYDRKHAESKTHAHKRALVLSARKAIGLIVALLHTGQTYRAPEPYRNVLSPHQARKQAVDSPTATAP

SEQ ID NO: 388634 - protein, 319 aa, unidentified
MLSYCGVDVSKDRLDVAVLPQEQSWSVTNDAAGWITLIERLREFSIEAIGLEASGGYERGVARVLCAAGMSVRHVNPYKLRQFARASGVLAKNDPLDARMIASFVAVMPTRPAQRAPEAEQLAEILAVRRQLSVEKIAAENASRLLEDAMLQRLSRRRIARLAADIALLDKRLIEIVANNPALDQRFRLLTSVPGVGVVLACTLIALLPELGQLGRRQIAALVGVAPYAFDSGKLKGARCIWGGRAPVRGVLYMAAMSASNWNPVFKAFHDRLRATGKKPKVVIVAVMRKMLTILNAMVRDDLVWADSCNGRHSVPAAR

SEQ ID NO: 388635 - protein, 316 aa, unidentified
MICGVDVSSKSLDARIGRDGATARFTNNPKGIAELAEFCQCHKVHLVAMEATGGYEKKPFALLWAAGIQVAVVNPRAVRNFAQGMGLFEKTDRIDAGVIAWYAQTKPCVAVSPASVEQQHLKAMVTRLRQLTELRAAQRNQRLLVTDKVVLKSFRKLLDLVQRQIRDLEVAIAGLIEADAVWHKLDQSFRSIKGVADRTVARLMAEMPEIGRLSNKKISKLAGLAPLACDSGQQKGKRSVRGGRRTIREILFVVAAGVSRHNADFRAFRERLAAAGKAKKVIRIALAHKLLVRLNAKARDVLQQLRAATPAAVLLS

SEQ ID NO: 388636 - protein, 342 aa, unidentified
MKDTMIGVDLAKSVFQLHGASLAGHLKFRKKVTRVQLRHFMAKHEPAVVVMEACGSASYWAREMVKLGHEVRLIAPQYVRPFVKRQKNDAADAEAIVAAAQRPEMRFVEPKSEDQQACAVLFRARERLLHQRTELVNALRSVLYEYGHVFPKGIAHLRRIEAVLTDPASDLPALVRDECQDLLEQISEQTARIEAKTAKTRGLAGTNDTARRLQTMPGVGPQTALAISGFAPPMDSFKRGRDFAAWLGLVPRQYSSGGKERLGRISKAGQTDIRYLLIIGAMSRLTVLARKSIQEGSWLARMLHRKPLMLVAIALANKMARAIWAMMTKKEDYRDPARAVST

SEQ ID NO: 388637 - protein, 352 aa, unidentified
MEEYKRSGQEGKTVFVGVDLHRFKWHVTARTEDQELFSGTLPGQWEALRQLLNRYRGDSIQVAYEAGYFGFWLHDRVVAYGADCIVTPPSLLPQEYGNRVKTDRRDSRKLAHLLAKGMLRHVWVPTLEERYHRQVVRRRRQLTGDRVRVQNRIKSELQFYGVELVGPRGPWPRVYVQRLWCIRFGNRWMQESFQRLLEQYEFLTEQICTQTKLLRELSQTPLYRGRVEILQSVPGIGLIGAMELLVELQDVSRFRRAEHLAAYVGLTPSQYSSADKIRMGRITGIGKNSLRAILVEASWQLITKDGVMRDKYERIKARSGAKRAIVAIARTLLLRSRRMLLDGRPYAVGLIR

SEQ ID NO: 388638 - protein, 428 aa, unidentified
MDEVDRNRLREFRQLRQEVRHSGEYLIVGIDIAKDQHHAFFGTATGKTLLRRLVFSNDYEGFRKLLDQAEALRVRHGLKKVVYGMEPTANYHKPLGEYLITLGRTVVLVSGVTAKRNRESLDGRWDKHDVKDSANVADLISQGKCLYYEYPSAELRGLRGLLSLKRRLKKQEHGYRVRIRNHLIAQYFPEMDRDFERLGAEGLSIVKWCFPPSQITELDVDPFIQRVTSRRIRMEKRRRLEGVWEKAGESIGCEGVPGVEHEAKMTVEGLRQIREMIKETEDKIQELCEQFPEYKYLLTIPGFGPDVSAKVLGAIGEPDRFQNGKQVLKLAGLDLSADRSGKDSDKAIPQISKRGKADLRYALYQAALIASTKNQDFMRYYTRKLRGREREKGIKPKMWVKLSAKMLLIAWTLMNKKEAFDPAYLNME

SEQ ID NO: 388639 - protein, 343 aa, unidentified
MKFYAGIDLHTRNCVVCVIDQKERKLVTETAPNELPSILSLLEKVPRRPTVAIEATLNWYWLVDGLEEAGYKVKLAHTMGLYMITGAKVKTDRRDAFSLARLLRLDAIPEAYIYPKDTRPIRDLLRRRTRLVRLRAEAYVAIKRKFQQYGLPYDDKAIQGAKEEELLQWFTHPGIRAGLEMELARIRMYSRELKTVEKYILSTVKNKPIFEHLQTIPGVGKTLALTIYYEVGDIARFPSARQFCSYARVVPGLAQSGDTIRRGTGSKQGNPHLKWAFNQAACVAVRHYGYVRSFREKHLARRRSKARRLISLSIVAHKLAIAAYHVLRDDVPFNKELMFGKAS

SEQ ID NO: 388640 - protein, 435 aa, unidentified
MKDQEEIAAWIGVDWADEGHQVWEYNLGTGGKETYVVQHNAESLQEWLSQLRSRYRGSGVAVVLEQARGGLIYALMGTDFIVMYPVNPQSLSKYRKALYPSGAKSDPSDAELLGEMVRQNPQRFRAWIPGDAQTRSLQLLTEDRRKLVEDLTARTNQLTSVLKTYYPQALEWAGHLGSEQACAFLEKWPTLVELQRSRPFRVREFYQKYGRPTREVLNQRVDQILKAQPLTSDRAVVKASVMMVQALVAQIRPLRLAIENYDQEIERVFRQHPDRVVFESFPGAGKVLAPRLLAAFGADRDRFQTALEVQEFSGTAPVTERSGKAIWVHRRLACPKFMLQTFHEFANCAWRFCAWSKLYYQQQRARGKDHHAAVRALAYKWIRIMFRCWKDRAPYDDSIYVKSLIKRGSHLAKGLNQTRPDSVVEISSNVCESRA

SEQ ID NO: 388641 - protein, 355 aa, unidentified
MNDAKYIGLDVHQATISVAVLDSTGKLVMECILETKAAILLPLFHGLRGSLPVTFEEGTCAAWLHDLLKPHVTEVLVCDPRKNALLQAGNKNDRIDARKLADLLRTGLLCAVYHGENGARPLKELARSYLAVTQDLTRVMNRLKALYRSWAIPCTGQRVYAPRYRSEWLAKITEAGVRRRAEFYYQQLDALQALRREVRHDLLAESQKHNARKWLRQIPSIGPIRAALLIALLQTPHRFRTKRQLWAYCGLALKTSTSGEYRFVEGQLKRSRKFLAIRGLNANHNHDLKNIFKGAATRAAAIPGPFHEFHAALIAKGMKPPMARLTLARKIAAITLLVWKKGVRFDAEYLKPQAA

SEQ ID NO: 388642 - protein, 433 aa, unidentified
MLKLNYMSTLFVGIDVSSKTNAVYAMDFEENKYISSSFGNNQPGADQLVNMIAECMQKHKNLDTVLIVLESTSVYSVHISNFLSASEVLMPYRPYVFCVNPKATSNYRKSYIGMEKTDPTDAYLIADFGRVGRTKKLEPWRGGQFIALKRLTRHRMHLSECITREKTYMVSNLYLKFSELQLLEGDDKPFGSLYGATSSAVLTEFLSPQEIIDMPEEELLTFLAGKSRNRISDLSKTSELLRKAARDSYRLDKCMYEPLSISLASSFNCIHAYQKEIKLIEQAIEKCINGMNPNALLILQSIPGIGPIWASGILSEIGDITVFHSSDALAKYAGLYWPKGDSGDFTSEDNKMSKAGNPYLRCYLGEAANSVRKHIPEYADFYARKYAEVTKHQHKRALALTSRKLVRLVFGLLVKNQLYTGEKLDTEYNIESN

SEQ ID NO: 388643 - protein, 355 aa, unidentified
MVTLGIDAHKRTHTVVAVDEVGRELGQKTTTATTSDDHLEMLRWAERFGPDRTWAVEDCRHLSRRLEADLVAAGERIVRVPPKLMAHARDAARTYGKSDPIDALAVARAVLRHPDLPAAQLDGPARELRLLVDHREDLVAERTRCVNRLRWHLHELDPSWDPPARSLCRYKSLDASAARLRGVDGPVARIAGEIVAHARDLTVRERALEREIRVLVADLAPTLMALAGVGALTAAKLVAETADVRRFRSKDAFARHNGTAPLPVWSGNRERHRLSRTGNRQLNAAIHRIAITQMRWHDDARGYLERRLANGNTRTEALRALKRRLSDVVYRALLADAPPLSATRVASPGCNAEAA

SEQ ID NO: 388644 - protein, 408 aa, unidentified
MEVVYSRCCGLDIHKASVVACVITPEGQETRTFGTMTPDLLELADWLGQRGVTHVAMESTGVYWKPAFNLLEESFTVWVVNAQHIKAVPGRKTDVKDAQWIADLLRHGLVKGSFIPERPQRELRELLRGRRRLIQDRAQVVNRLQHVLEGANIKLGSVASDVVGKSGLAMLRAMAAGEEDPKVLAELAQGQLRDKIPALRKALEGSMGAHQRLMLQSHLRHLDFLDQEIALMDEEVGRRMGPFEEVIQRIDGITGIGRRSAEDILGEIGTDMSRFPTDAHLASWAKLCPGNNESAGKRKSGRTGKGNPWLKAALTEAAKAAGRAKKGYLAAQYRCLSARRGSKKAAIAVAHSILITIYHMLKDGTEYQDLGENYFDKQHHNRTLMRAVRKIEALGYHVELKPMKIDAA

SEQ ID NO: 388645 - protein, 478 aa, unidentified
MAKKTFKLSGKPVGITIVAGIDVHKYKLQVFVLGRVDREDRPLGEQAFGNDTNGRNEMCCFLDKYYPDEIVMEKTGKLSDPVLASIEKHPGWKRSVPRVSVVPPDTIKRFAGEPHTDPRSAYDLARLGISGLLNASYLPSLEGQHLRELTRQAEHMTGQSTSLINEIKDKLSGLGYTLPDFTLTSAWGIALLKLLLADGIDGNIAKIYELIEKGGVNLNSASRKALLDRKVQYLKYAYLSLSKFDVRLLNRLFAMLNMIEAFKASNSKHIEDVVNETPVIKDRVKVIGQIAGISAPGAAIIAAEVDDMSRFQTCKKFLLYAGRTIAPDSSGEHIGKSHMTKRCNHHLKNVLKQAGQTACFKLTEDNDIRRYALRQLGKHPLHPIIASANTSAKIAKIVYKVLHDGVIYDPFHASRYKTNEPFHVGYEPGEEWKLELKEARRRGNRFRNFARRAVKELPPGEMKTMLARILEIFETTRK

SEQ ID NO: 388646 - protein, 316 aa, unidentified
MSTNEEKTFVGIDVSKSTLDIRIEPASESMHVPYDEQGVKEVCQHLVKAAPTLIVMEATGGLETRLASILVAKGLPVAVVNPRQTRDFAKATGELAKTDRIDAAVLCRFAQAIRPAVRPFQDADTRDLEDLVNRRHQLVENRVQETLRLGTAASKALQRSLKSHIAWLDRQIATLDDDLGKRLRASDAWKAKDDLLRGIPGVGVVTSLTMTAKCPELGQLNRQRIAKLVGVAPLANDSGKHRGKRFVWGGRADVRAVLYMATVSAIRCNPVIKAFADRLKQAGKPAKVVIVACMRKLLTIMNAMIKDNAPWDPKRA

SEQ ID NO: 388647 - protein, 424 aa, unidentified
MSYRIAGIDVHKKMLAVVVSDVEVDGECQFERVRYSSSPEHLRFLAQWLIAQRVEEVVMESTAQYWKPVWGALERYWKPICRERADAGPKSGTLHLAQAQSNRGRRGRKKDFPDAERLVKRLVADELVLSFVPDTEQRLWRTVTRRKYQLTRNHVRLQNQLEGLLEECHIKLSSLVSDLLGASARRMLKALAEGETNPVALAAMADRNLRATQAQLCDALGACAELTPIYRRLLKMFLEELQFIDQQISKLDQELASLLSRHHDAVVHLAEIPGLGVDSAQQIIAEVGAGATTFPSAKQLSSWVGACPGEEESAEVSKSHRSPKGNRHMRRILNQAANAAAKSKGTIFEIVYHRLVSRLGHNQTIGAIAHRLCRLIWIILHRGVRYQERGPLVNAKTRRHRTNRMIRELRSLGYRVEPLSTLYE

SEQ ID NO: 388648 - protein, 356 aa, unidentified
MREHSALAVGVDLGDRWSAVCVLDADGAIVEESRLRTQAEGLRAWFGLRGRMRVAMEVGTHSPWVSRLVESLGHEVYVANPRRVRLIWQQENKSDRIDAEALARLVRVDPKLLSPVRHRGEGAQRDLAAVRARAALVRVRTTLVTHVRGVVKASGERMPVCSVEQFGQRLERVPEGLREVMRPMFESLTMVTVQIRECDARIKTLVEEHYPDAARLQQVPNIGPVTALTYVLTLEDPHRFRKSRSVGAFVGLTPGRSQSGERDPQRRITHAGDPYLRQLLVGCAQRTLGPHGRDSDLRRWGLRLAASGGRRAKKRAVVAVARKLAVILHQLWISGDDYEPFCSEGRKVRAKVAATA

SEQ ID NO: 388649 - protein, 357 aa, unidentified
MVHKHTILDWLGQHVFVGLDVHKRSWIVAIVTEQADFKTFTQLPDVKLLVSYLHRHFPNATYHCVYEAGYCGYWICEQLRAHGIDCIVINPADVPTTNKEKKYKTNKVDARKLVRSLRNGELVPIYVPSRTALEDRSLVRSRHTLVSKQTRCKNQIKALLSFYGITVPEDIIDRHWSARYVAWLESLTLHSPSGTYALRTLLDELAHLRKSVLETTRAIRRLARTEGYTVNVGHLITISGISTLVAMILLTEIITLDRFRSLDQLACFVGLIPGEKSSGDERTMTGITERKNRYLRWVLTESAWAAIRDDESLALAFNTLSRRMPKNQAIVRIARKLLNRIHFVLKHQQPCIVLQAA

SEQ ID NO: 388650 - protein, 415 aa, unidentified
MELLHERCAALDIGKKDLKACVRTPSVSRRKRLRSQEIRTFATTTNALLELRDWLVAEQVTLVVLEATGDYWRGAFYLLEDDLNVILVNAAHAKGLPGRKTDVCDASWLCQMGECGLLRASFVPPEPIRQLRDLTRYRTTLTAERSREAQRLEKELEDAGIKLSAVATDILGVSGREMLAALIDGERDAQVLAEMAKARMRPKIPQLVAALTGNFGEHHAFLCRLHLERIDQLTAAIGELSARIEEQMLPFARQLEHLATIPGVGQSVAEVIVAETGADMSRFRTAANLASWAGVCPGHHESAGKRRSGKTRHGNRWLSGALGTAAMAAARTKDTTYLGARYRRLVPRLGKKKAIVAVEHSILTAVWHMLTDDVDYHDLGGDYFARLDPERAMHRIVRQANALGFTVRFDPIQAA

SEQ ID NO: 388651 - protein, 336 aa, unidentified
MDLAKNVFQVHGVDRSEKAVWCRKLRRENWLKVLRETVEPGCEIGMESCGGAHHWARQLQGHGFRVRLVAPQFVKPYVKSNKNDARDAEAICEAMSRPHMRFVAVKTIEQQDLQAAHRIRAELTKQRTAKANQIRGLVTEYGLVASKELGQLRRALPCWLEDAQNGLSGRFRRLLDGLWGDLQALDERVAELDREITRLAQNDPLARRLQQLRGVGPITATALVAAVGNGAQFSKGRQMSAALGLTPRQQSSGGKERLLGISKRGDTYLRTLLIHGARAVIQMAKDKDDRLSQWVTRLAARSHPNVAAVALANKTARMAWAMLRNGTDYQPDLVAG

SEQ ID NO: 388652 - protein, 405 aa, unidentified
MSNDVFVGLDWAVHTHAVCVIDAAGAALERFEVAHDRDGLADLMRRLARFGDRLRIAIERPSGLIVDALVEAGHEVFPIHPNAVKASRPRYRSHGAKSDASDAYLLADLLRTDGHRWRALAPQSDAIRALRALVRSRDDLVAARVAAANQLNSTLQAFWPGAACIFADIASPIGLAFLRRYPSPSSAKRLTEAQLQRFCLRQHYSGRRSPAALLDRLRGAAAGHVGVHTEQAMAKVVRAQVGVLLSVVTHIADLTRRIEQFMHSLPDGVLMMSFPRAGQVCAAQILAELGDVRERFPSADQLAAEAGTVPVTYQSGKTRSVAFRWACNHRLRRAITCLADNSRHANSWARSIYQAARDRGCDHTHAIRILARAWLRVIWRAWTNRIPYDPKLHAGALRLVALQGG

SEQ ID NO: 388653 - protein, 395 aa, unidentified
MFIVGIDVAKRSHEVCMITSDGQTVQRPFSIRNNCTGYNLMLEKIRKHTNIKSQIVFAMESTAHYWLALFTRLRKDGYHVILLNPIQTSAMRDMFIRKIKTDAKDSFIIAELIRFGRYAESNVAQDRLLALKELCRNRFYLVDMAGDLKRKLIALIDRVFPEYEAQFDTIFCKSSVALLKKYPTPQKLSNAHLDKLTELLWNSSNGHFGEWKARELRELARNSFGVEDCDGAYSTLILLMLDQIQSLSEKADALEKEISRLFQSFDTMVTTIPGVGPIIGAVILSEAGDISRFSSADKLAAYIGVDPSVNQSGEFQAAHAHMSKRGSPYLRRCIWMASQVAVQRDPMFRAYYEKKAAEGLKYMTIIGHVTRKMTAVVFAILRDHKVYEPVLPTAA

SEQ ID NO: 388654 - protein, 422 aa, unidentified
MNRVTIGVDPHKLSATIEVVTHEEKVLGSGRFTTDHAGYTAMRSYAKAWPDRVWAVEGANGTGRPLAQRLLAAGEQVVDVPAKLAARVRLFDTGHNRKTDALDAHSIAMVAVRTRNLRVLKADGQLEALRLLADRREALTRRRVQTVDRLQALLAELLPGQAKKDITPLQAKVMLAGVRPRDVAGKTRRRIAAEELAELIAVDAKIKKATAELKAMVLARKSRLMDLHGVGPVVAARILADVGDVARFADRNRFASWTGTAPLDASSGEQNRHRLSRAGNRRVNHMIHIAAVTQLRLNTEGRAYYRRKRAAGKKPLEAMRCLKRRISDAIYRQLSADAQRAALLATVPDNAGPGGHCGASHQSSAVDLPPHIDTSDQPLPGPAHPTLRPIQAPANPHAAPAPQPRVGALEPSTWSAPPDERR

SEQ ID NO: 388655 - protein, 412 aa, unidentified
MTATNQFAAHVGLDWADKKHDVCVQFKNGERVFHVIEHTAEALDVWLTELHQKVKGRIAIALELKKGPVVYALQKYPFITVFPVHALSLARYRQAFSPSGAKDDPQDAELALELMLRYPQKIKAIEPDNADIRLLQQLVEQRRQLVEDKRRFVNRLINTLKQYYPQPLEWFSHRGSLLLCELLIRWPSLQQLKRARHDTIRNFLNAKGGRAMALTEQRVVSIDNAIPLTTDPSVIEANALMATALATQIKVVSEIIKTYDERIETLFDTLPDSGLFKSRPGMGPCMGPRMLAALGDNRDRFNSAEEIQNYAGIAPVTERSGQKSWVHWRWLCAKFVRQTFVEWAAKTVNSSYWARLYYQGLREKGKSHQSAIRALAFKWIRIIYRCWKTRTQYDEAKYLLALEARRSPLLKP

SEQ ID NO: 388656 - protein, 343 aa, unidentified
MQIRSVGIDLGKTTFHLVALGDNGKVLLRKKFTQKQLIAFTANMQTCLIGMEACSGSHFLGRALREQGHDVKLIPAQFVKPFVKSNKNDFIDAEAIAEAVDRENMRFVPIKTDDQLDLQALHRVRDRLMARRTSLINQIRAFLLERGIVFAKSPIRLREALPEVLENVNENLTPRMRNLVAMLWSEWKDLELQIVQMNDEVERIASSDAACRRLRQIPGIGPLVATAIVASIGNGAAFRKGREFAAWMGLLPKQHSTGGKARLYGISKRGNSYLRKILIHGARAVVLRSKRDRIAMGAWMTSLETRAPRNVLIVATAHKLARIAWAVLSTGQDYRAVPEALTV

SEQ ID NO: 388657 - protein, 348 aa, unidentified
MSTFAGFDVSQTKTHISVVDVQGNELWHGSVVTSPEALALAIKDHASGVLRIGMESGPLSPWLFHALKAKGLPIICIDAKAAKAGLQLQGPNKTDRKDAKGIARIMQTGWYREVTVKEIEGHKRQTALTVRKQLVGMRTECINQIRGILKMYGKVLPSGQLPALQALMLADDLLAKSISAIYSTLRTLGSEIKQIDKEIELLAGEDEYCKVLQTIPGIGKITAIAFVASIGDPKRFQKSRSVGAYLGMTCRRDQSGQKDVNGRISKCGNGMLRSYLFEAAGVILARTKSFSALKAWGLRIKKRSGWKKACIAVARKLAVIMHRMMVTGECFRFSNSAAAQMDALPSAA

SEQ ID NO: 388658 - protein, 388 aa, unidentified
MIYIGIDIAKFNHFAAAISSDGEILIEPFKFTNDYDGFYLLLSNLAPLDQNSIIIGLESTAHYGDNLVRFLISKGFKVCVLNPIQTSAMRKNNVRKTKTDKVDTFVIAKTLLMQDSLRFMTLENLDYIELKELGRFRQKLVKQRTRLKIQLTSYLDQVFPELQYFFKSGLHQNSVYALLKEAPTPNAIASMHMTHLAHILEVASHGHFGKEKARELRVLAQKSVGVNDSSLSIQITHTIEQIELLDSQLFHTELEMANLVTCLHSVIMTIPGIGVVNGGIILGEIGDIYRFSEPKKLLAFAGLDPSVHQSGNFQAQRTRMSKRGSRVLRYALMNAAHNVVKNNATFKAYYDTKRAEGRTHYSALGHCAGKLVRVIWKMLTDEVEFNLE

SEQ ID NO: 388659 - protein, 343 aa, unidentified
MKNDNRKYLSVGIDVGADFSLMAIALPSQELLGKSYRIFHNSKRSLDGAIDRIYSVMEQYDLPARIFMESTGIYHFPVYHKMREAGLDAYVLNPLVTHASKDINVRNIHNDKFDAQKIALLGLRPDLKTSIVPSDDVAAMKAILREYYAMKKETSMYICRLKDQLRQVFPQFIPVFSKVNGVAAMAVLYEYLTPDSILAAGADELERFMKTVISKGPLHIRKKAEALVEAARDAQNFGHGNTGVFYLIRHYIEMIRLLDAQTKQILTQVKVLLKEQKNSQMAKQVRLLQSIPGIGFLSAVTVVCEIGDFSAFKRPKQLFAYFGLDPAVRQSGNFSGAVKASPR

SEQ ID NO: 388660 - protein, 410 aa, unidentified
MTERLVGIDVALREHRIAVLDRDGEAVGPSFTVAASPDGVATLLRTLAARDATAAQTLIGLEASGHLWENLEAALVGAGYRVLVLNPLQTRRYRDVVRRKAQTDDIDAHVIAGLLRSGAAQASYVPDEQIQSLRELARLRARLMADRQDYQRQLVAQLDVVLPEHRAVLGDLLTARARGILAQFPTAQHLATANPRAIRRAAADAGARGFSLDDATGVRDSARRSFYRGKAAAARAHVVRTLVSQLERLTSAIDEVDHAATSLLPPSAPGTGPSDAELLQTIPGIGSQTVATLIGELGTLTRFTDARALVAYVGFYPVINQSGDRAATPRLARVGSRIARPSLYLAAVNAVRRSAEWRTIYLRKKAQGKTAKQALIVVAVKLLHAVYAMLKHRQPYNPSRLLVAPATIGS

SEQ ID NO: 388661 - protein, 370 aa, unidentified
MAKSTPLFVGLDVHKDSIAVAHAQGQSADPPVFLGEIGTRQADLAKLIRRLQAKTSKLVFAYEAGPCGYILHRDLTGQGFDCHVVAPSLIPKKPGDKVKTDRRNAVDLARLLRSGDLTRVYVPTVEDEAIRDLCRARDAARLTLKNAKLRLKAFLLRLGLHYVGRADWNDAHRRYLAKVVCPTPAQQIVFQESVRAVDEQVDRLARLEAELRELAPAWRLYPVVQALQALRGVQWLVAITVVAELGDLTRFTSPRQLAAFVGLIPSEYSSGPARRQGGITKAGNGRARRALIEGAWAYRHPAKVSQHIQTRIDALPKPIQDIGWKAQVRLCKRFRRLVARGKHPNVAVTAIARELIAFMWAIATEVPVTV

SEQ ID NO: 388662 - protein, 398 aa, unidentified
MNAVGIDVSKGKSTVAVIQPFGVVIAEPFDVSHTESDLNKLVQLIKSLSGETKVVMEYTGAYYEPIANALHNQGIFVSVVNPLLIDDYGTNRVRKVKTDKKDSLKIASFAIDKWLDLREYIPANDIRKTLKILNRQYVQYNKILVMQKNNLISLLDSCFPNANTLFTSPRRESDGHEKWVDFVLKFPHIHSISKLSLSAFKVKYQSWCRKNNYNYSDKKVADIHSYCKTQISVLPMTDSVIKIITEAAVMLNSTLETLCTFRDEMDRLSSTLPEYNAVMGIYGVGKVLCSQLIAEIGDVRKLNNSKSLVAMAGIDPPPNQSGKVDTKSRSISKRGSPVLRKTLFQIMTIIIQNKPVDDPVYQFLNKKRSEGKPYRVYMIAAAHKFLRIYYARVMQALN

SEQ ID NO: 388663 - protein, 343 aa, unidentified
MHIASIGIDLGKTTFHLVALGERSKVLARKKFSRTQLLAHTANLSPSLIGLEACSGAHFLGSALREQGHDVRLIPAQFVKPYRKSNKNDFIDAEAIAEAVTKQNMRFVPIKTEEQLDVQAMHRVRDRLVQRRTALINEIRGFLLERGITFPVQPIHLRKNLPTVVEDAEQNLTPRLRWLRNRLWQEWKQTEIDIETVTDEIERISAEDERCRRLRQIPGFGPLVSTAMVAAIGNGAAFRRGRDFAAWVGVVPRQYSTGGKQKRFGISKRGNIYLRRMLIHGARAVLFRIKYDTAGLGQWVHRLRQRAPRNKVVVAIANKLARIAWAVLSSGKDYRHQTLQPAA

SEQ ID NO: 388664 - protein, 357 aa, unidentified
MDTIVAQTYSYVIGVDTHAATHTYAIITADNQHVDAQTFPTTTAGMNRAIAWAARRTGGDMAALWVIEGIGSYGAGLARTVADTGYRVVEAARMSNRSRRGIGKSDPVDAARIAVAVLPLPEARLREPRLDEGNRAALQVLLTARDEIGRERTRAINALTALARTTDLGIDARRALNHQTIAEIAGWRARQRDDIAIATARAEAIRLAKRIFDCDGDLKTNDARIRDLVADSPAAGLVNYTGIGPVTAATTLVAWSHPGRIKSEAAYAAIAGASPIPASSGKTIRYRLNRGGDRKLNRALNVMAMVRMVHDPTTRDYAQRRRREDKSDREIRRVLKRYLARSIYRQLNAAAATPQSS

SEQ ID NO: 388665 - protein, 364 aa, unidentified
MPSIALKRSDVIIGVDTHKDEHVAVAVDGFGGIIGEAQVLPATPAGYADLLDWATSLGAIYAFGVEGCGSYGSGLARFLRRHDHKVYEVARPPRRGERRASGKSDTIDAEHAARTVLSGAGTATPKVGDGQIEAIRLVKIARDTAVKAHTATIITLKAVLVTASDEVRGELEPLTDHKLVVACAGLDTAGDIADPEVSMRHTLASLAHRYLQLHEEIKTHTCHLKTLTKTAAPQLLERFGIGFDTTAEMLVTAGDNTDRIRSEAAFAKMCGVCPIPTGSGKTSGRHRLNRGGNRQANAALYRVVIVRMRWHPPTIAYVERRTAEGLTKKDIIRCLKRYVAREIYQLLPEPASTRTEPIDLHQAA

SEQ ID NO: 388666 - protein, 342 aa, unidentified
MQITTIGLDIAKNVFQVHGIDADEKVVVRKQLRRSKLIAFFKALPPCLIGMEACATAHYWARELTKLGHEVRLMPAKDVKAYVKRNKNDAADAEAICEAVRRPRMRFVRIKSAEQQGQLMQHRTRDLLMRQRTQLINALRAHLAELGIVAAQGDQGVAELLAAVADDRDARLPIDARASVIVLAAQLEALQTMIGSLEKRIKMQHRGNEASVRLETIPGIGVIGASAIAATVTDAAVFRSGRDFAAWIGMVPRQDSTGGKQKLGPISKQGDRYLRRILVLGAISVLRCAMHNPDKYPWLTQLLARRPFKVVAVALANKMARTAWALLAHGGIYRAPQLAAAA

SEQ ID NO: 388667 - protein, 347 aa, unidentified
MRCYTKQPKMYWGIDLHARTMYICILSQAGEGMVHQHCTANAETFLKVIAPYRDDVVVAVECIFTWYWLADLCVREGIPFVLGHALYMKAIHGGKAKNDRIDAQKVAVLLRGGMLPQAYVYPAEMRATRDLLRRRIHLMRKRAELLTHVQQTNSQYNLPDIGKKIAYKTNRAGVAERFADPAVQKSIEVDLALIDYYDQLLRDLELTIVKTAKQHDATTLYLLQTVPGIGKILSLVLLYEMHDIARFPRVQDFVSYCRLVKCAKESAGKRYGTSGTKIGNAYLKWAFSEAAVLFLRNNPAGQKSLTRLEKKHGKGQALPVLAHKLARAVYYMLKRGTAFEMDKLLHS

SEQ ID NO: 388668 - protein, 343 aa, unidentified
MKLQVLGIDLGKTVFHLVGVDSSGRVVIRKRCSRTQLLVFTANLQVQLIGMEACSGAHFLGRALREQGHEVRLMPAQYVKPYVQTNKSDYLDAEAIAEAVQRPRMRFVPIKTDEQLDLQALHRVRERWVMRRTAVVNQIRSLLLERGLTLPKGRSHLDEQLPRILEDAELNLSDSFRVLLAQLKLELEQLAARIEEMDRVIQKTARENEACQRLTEIPGIGPVTATALIAAVGNGSTFKKGRNLSAWMGIVPGEYSTGGKQKLLGISKRGNKYLRRLFVQGARSVLQQRHKQTPGLSSWLAQLLGRTHQNVVVVALANKLVRMAWAVLCENERYRAPVFAVTT

SEQ ID NO: 388669 - protein, 352 aa, unidentified
MDTQSTASIPKLYVGIDIHKRSWKIHCSTDLFAGKSFTMPPVPEQLFQYVNKHFQGYEVSTAYEAGCCGYYAHRSFKSYGWKSLVVNPADIHRKGKERYTKTDKIDAQLISRELKDDRLESIVVPDKKREELRSLFRRRNDLVKEMRRIKSMIKMQLLYFGIKEPEEFDNDHWSHNFRDWLDNLSFEFDTARETLNSRMRSFRFIDQELRQVTNELRAYCRKHYKKDYYLLKSIPGIGGIVAVGILSELGDLRRFNSLKHLAGYVGLAPGMHQSGASNKAMGMNPRSNRLIRSYFVEASWQAIRTDPVMQAYYRTHIGKDVKKIIVKIAHKLLSRTLAVIKTETPYEIGVIE

SEQ ID NO: 388670 - protein, 340 aa, unidentified
MSNVATIGLDIAKSVFQVHGVDAAGEVAVRRKLTRGRVLAFFESLPRCLVGIEACSSSHYWARELIALGHEVRLLPAQYVKPYLKRQKNDAADAEAICEAVTRPTMRFVPVKSPEQQSVMMLHRVRLMLNRQRTQISNALRSHLSEFGVVAPIGRNGIEQLLVVINDENDARIPADARLCLRMLEAQLKVVKEQILENDRRVRASARETDLGRRLMEIPGVGPLLASAFVATVADAHAFKSGRCLSAWIGLVPKQNSSGGKERLGSISKAGNRYLRQLLVVGAMAVIRYAERNGTRRPWLLQLMARRTTKVAAVALANKTARMVWALMTSGERYREPIIA

SEQ ID NO: 388671 - protein, 387 aa, unidentified
MGVIIGMDPHKRSATIEVIDERGAVLAKARFGTDTAGYQQMLAEGRRFADRVWAVEGCNGIGKHLAHRLVHDGETVFDVPPKLSAQVRVFATGNGRKTDPVDAHSVALVALRTPGLVRVEVDEDLVVMGMLADRRDELGRARTQTINRLHRLLLELFHGGAKQFLSAQQARALIATIKPRDLPGKTRRRLAVELIGELERTDRKIKALKKDLTALVTARGSTLLELHGIGPSSAARLLADVGDIHRFADRDRFASWNGTAPIDASSGNQQRHRLSRAGNRRINRALHIMAIVQLRNHTEGRAYYDARKAGGMPSMMALRALKRRLSNVVFARMLADQLRREATGPGGQSGTTLQSSATDLPPDIGSSDKPHPGPATTHHRTAIPAAS

SEQ ID NO: 388672 - protein, 338 aa, unidentified
MMTTISMLAIDLAKGSFQVCAIGLDGAVLYNRVLSRTRLTNLLAEQPACVVAMEACATSHYWGRVAQSHGHEVRLVPAVYVKPFVKRQKNDKADAEAIAEAASRPTMRFVAVKSAETQGRAVAFRTHQCLVRQRTQLINALRGHLAEFGLVAPKGPASLKVLENALADPASDVPSHVREMGAIYVEQIARLTEVIGRLAEELEAASRTDTQLRRLCTIPGIGPVTAGAVAAFAPDLATFDSGRNFAAWLGLVPRQRSTGGKTRLGSVSKMGQTDIRRLLIVGAMSVIRWVVRKGGSANRWLAALVMRKPKMVAAVALANKMARMIWALTTKEQDYRMA

SEQ ID NO: 388673 - protein, 333 aa, unidentified
MEKKWFIGIDISKKTLDVVIYVPTKKHADETNYERFLNKEEGYKSLLCWLKKKNMAKKRLVISMENTGIYSFDLCLFLEAASIDYCSFNPLHLKRSLGLVRGKNARVDAERIAYFAYLHRDELSYSKLSGSSIIRLRDFAAERKRFVKQQAEYKGFLTDRKDCEMTSTIERAAHMVKILDEEIASVEEEMLQIINSDPSILRNYELLNSIKGIGTINAMNTIIHTNNFQAFETARQYACYLGIAPFEHSSGTSIKGKTRVYPTGAKLLKADLSQAANSAIVWDKEMKEYYERKRTEGKAYGVVLNAVKFKLVGRMFAVVKRGTPFVELMTYKK

SEQ ID NO: 388674 - protein, 348 aa, unidentified
MTIVETTCLVTAGVDTHADLHVVAVLDSVGGVLGIETFPVSADGFEQLVGWVRSHGEIDLVGVEGTGSYGAALCRHLTRAGIRVVEVDRPNRQLRRREGKSDPVDAVAAARAALSGQALGRPKSRDGDVEAIRVLEVACRSATEDRIATLNQLRHLVICADEEVHRRFAGLSVARLTAEAASLRPRPTDTVRYSTLFAMRVLGRRVTALDAELVELKAVMRPLIDRTAPGLLSMHGVGYDVAAKLLVAAGDNPDRLRSEAAFARLCGVAPLEASSGKTVRHRLNRGGNRQANKALYHVVITRMASHEPTKKYVARRRAEGKSTGEIARILKRYVAREVYKHLPRPATT

SEQ ID NO: 388675 - protein, 327 aa, unidentified
MNTTEIDIVLGLDVGKTDHWGCAVTVEGTTIWNKTLPNDEAKLTKVYQDLSAKGAVLVVVDQPATIGALAVAVAQHLCITVAYLPGLTMRRIADMYPGTAKTDEKDSFIIADAARTMPHTLRSLQVSDEEEAALGMLTGFDLDLSRQITQTSNRIRGLFTQIHPCLERVVGPWLEHDAVLEVLAAWPIPAALKHAGKARIDAKLTKHGARRHTAWAGAILDAVDEQTVVVVGTEAAGMVIPHLARQLIALHAQRADVASHLEAMVEFRPLCPVLTSMPGVAVRTTAVFIAETSGKIFDSAAALASNAGLAPVTHQSGTSIKSERVSH

SEQ ID NO: 388676 - protein, 358 aa, unidentified
MKIIGCDYHPSFQQIAMLDLSTGEYSELRLLHAGGEAQRFYESLRGPVRVGVECTGNMLWFERLLQKLGHELWLGDAGVIRAKAPRKQKTDVRDARHLLQLMQENHFPRIWVPSVAERDLRQRLKHRHTLVQMRTRVKNQLQHIALNQGMQKKGKLWTQAGQELLRGLELDRWTGRRRDDLLHLLAYLEKQIRELDQAVKAEAEQRPQVRLLMTHPGVGPVVGLATVLTLGEVGRFPRGREVASYVGLIPSEDSSGQRRRLGAITKQGSSFLRFLLVQAAASAVKGDAEWARAYKRLARKKHHGVAKVAIARKLVVRLYWMLRTQTRYPEVVRMSGSPSHPVARLQAERLSGHPASRE

SEQ ID NO: 388677 - protein, 351 aa, unidentified
MERYIGLDVHAASTTCAVIDARGKRVRVDVVETNGQALIEFLRMQPGTLRLCLEEGTQAQWLAEILSPHVAQLAVVHVRESRGPKDDERDALALAEQMRTGKLDTTVYKQVGAFGALRNLVKTHSMVVQDVVRTQNRIRALFRSRGVPVAGKSVYATKERETWIAKLPEHARSAGRLLYAQYEAVNDVRADAEHKLIEESHRHPITRVLETCPGVGPIRAAQIVSVVVTPDRFRKRQQFWSYCGLGLVMRSSSDWVKNDSGTWARATINKTRGLNFNHNHMLKQVFKGAATTIITQLPEHPLRADYQRMLDAGTKPNLAKVTLARKVASIVLAMWKHQEGYDTVKHSKPSS

SEQ ID NO: 388678 - protein, 391 aa, unidentified
MERPMPQRNDLSRSLLALDQNSTIIAVIEMSRSNWLVAGVIPGVDRQPLKKLEPDEEGLLHLLRRWQDEAARAGRTISRIAVAFEAGRDGFWLARWLRARGIEAYVIHPASIPVSREHRRAKTDRLDTELLKRAFLGWLRGEPNHCGMAAVPTLEQEDAKRPNREREVLVGERTRIVNRMKGTLARLGIRGFKPALRRAPERLETLRTPEGATLPPNTRAELQRDMARLRFVTDQIRELEAARAERLEHAPETGPNAMIRLLARVVGVGIETADMLVQEVLSRNLRDRRAVARYAGLTGAPDESGAKRREKGLAKAGNARVRRGMIQLAWRFLLFQKDSALSQWYRARTTDARGATRKTLIVALARKLLIALWRFGATGEVPQGVVLRPAA

SEQ ID NO: 388679 - protein, 319 aa, unidentified
MNAADDSFVGIDVSKNSLDVCLLPDQRRWTTTNDRDGVRRLLEALPPAGACLIVVEATGGYQRIVVAELIAAGHQVAVANPRQVRDFARGLGRLAKTDRIDAETIARFGQHVQPRPAQKVPEKQGRLEELTARRRQLIELRTAEKCRLETASTRFVIKSVRGVIEQLDKFIRQVEKELSELVESDQELQCRAAALQTAPGVGAVTAVTLVAELPELGQLNRQEISALVGVAPFNRDSGKFHGRRGIWGGRAAVRSVLYMATLTARRCNPVIRKFAERLEAAGKPFKVVMVACMRKLLVILNTILKNNSAWNSNYQLNRG

SEQ ID NO: 388680 - protein, 343 aa, unidentified
MEHYVGLDVSLKQTSICVVDRSGSVVREGVVDSDPEAISVYVRSKAPGAVRIGLETGPTSTWLWTELKRLGLPVICIDARHAKAVLKMQINKSDRNDAIGIARIMQTGWFKEVHVKDIDSHSVRALLASRALLVKIKRDLENHVRGLLKNLGLVIGRAKFNVFAVRAEELIEGRPELIATIRPLLEARNAVEQQVSELDRKVMKLARHDAQVRRFMTVPGVGPITALAFKATIDDPARFTRSRSVGAYVGLTSRRHASGEVDWTGRISKCGDAMLRSYLFEAAGVLLTRVPKWSAVKAWGVRLAKRNGLRKAKVAVARKLAVILHRMWIDGTEFNWSKKEIAA

SEQ ID NO: 388681 - protein, 304 aa, unidentified
MYIGMDVSKEWLDVSEGSEAFRIANDEAGIRSIVGRLKAATLVVMEASGGYEAPVAAILTAAGIPVAIVNARQVRDFARATGQLAKTDAIDATLLARFAEMVKPAVRALPSEELQEFAELVGRRRQLMEMKVAEQNRLSIAHGRMRKGIRTHIEWLERQIRIIDSDLDNRIRKSPIWREKDNLLQSVPGVGPGLARTLLADLPELGTLTRRQIAALAGLAPFNRDSGTMRGRRCIWGGRHTVRAALYMPTVTATRCNPVLRAHYLHLAGSGKPPKVALTACMRKLLTILNAIVRDGRPWQELTA

SEQ ID NO: 388682 - protein, 425 aa, unidentified
MHNNCNSKMRKSKIDNSYLIVGIDIGKINQYARITDSEGNEIGKKIVFQRDIFGLNQLIMRINTLKLQYKKTKVLVAMEPTGIYWKNVYEGLKSLDSSLECVLVDVKDVINVRSLFFGTVKSDIVDSLAIAKTATLKGFNKRLELNEREQNIKDLNTAREDLLSKILSIKNILTSILDEVFPEYNKLFKDYFKKSSMVFLDTIFCPQDIINTDLQSLYNKIKSKSKTCISLSKLAKIKAVASESIGIKPTIGKKFHFRTNFELLQSLLHSIEEIDNEIYELMLEDDMAGRMMDIKGISAISTANLLSQIGSFDKFNSPKQLISYCGLNLRVNESGKHKGKTTISKRGNSMIRAYLFRVMLPLIKNNDEFKRLHNHFKTRKDNPLKPMQSMIALSCKLLRVLFGMAKNNQAYIPEVAFQCNYVEVA

SEQ ID NO: 388683 - protein, 359 aa, unidentified
MGAQEAQERHVVGGVDTHKDLHVAAVVDDRDRVLASASFAATRQGYRQMLTWMRSFGVLRRVGVESTGSYGAGLLRFLQQAGIEVLEVTTPDAQDRRRRGKNDDFDAQSAAHAAFAGTRTVTPRTRDGMVEALRVLNACRKTAVAARRIALQMIHNTIVCAPDGLRETLRRMTRMQLVRTLAAWRPDLSAYRDVEAAYRIGLKSLARRYLELHDEIADLDAMIGTIVNELAPELVARNSIGRNGAAQLLLTAGDNPERLRSEAGFAALCGVSPVPASSGKTVRHRLNRGGDRAANSALHIIAIGRLRTDARTKAYMARRIAEGHSKLEAIRCLKRYIAREVFTLITHRQRTINQTRIAA

SEQ ID NO: 388684 - protein, 350 aa, unidentified
MNVNHYIGFDVHKKSVSYCVKTADGRIVEEGKLPATHQALRQWAQKRKEPWFGAMEATLFSGWIYDTLKPFAAELQMGHPAMMKAIGASKKKNDKLDARKVADLVRCNLLPACYVAPVEIRELRRMLRYRNLVVGQAVRMKNKMSGLLMEVGAKYNKQQLHGKKYFTGLLETVEEVPESVKDMLRLSRGALEMFETVQHQLLMRLQTDSRLARRVTLLKSIRGVGEVTALTWVLEVGDPQRFSSVAHAVSYCGLTSALVSSADKQQRGPISKQRNAHLQTVLVEAAKLAPRWNPQLAAVHARELERGNRNRATLAVARKLVAYLLAVDKSGQPFQLRSRPAATQETVRAA

SEQ ID NO: 388685 - protein, 390 aa, unidentified
MSVSPSVALPAARGEHVTMHVAFELSKMKWKIGIVAPGSSKMSRFTVAGGDRVGLAMLLARKQGEAAARCGRPVRIVSCYEAGYDGFWLHRWLGEHGVENHVLDPASIEVERRHRRAKTDRIDLDKLMRVLLALCRGEPRVCSVVRVPSVEEEDAKRRNRERERLIRERTAHVNRIKALLHGQGIRDVKPLAKSFATQLAVRRTGDGHDLPPLLAAEIAREHTRLRLIVEQIGVIETESRQALHKAPAHATAAARARQLNRLVGIGMAGAQTLANEVYYRAFANRRQVGGYTGLTGTPYDSGETRREQGISKAGNPRARAILIELAWLWLRLQPDSALTRWFKERVGNGKGRIAKIAIVALARKLAVALWRYLETGLVPTGARLRAGVAG

SEQ ID NO: 388686 - protein, 370 aa, unidentified
MGNRNMFVGLDVHKETTDVSIAEGARHGEVRHYGVIASDLEPLDKVVRALGAPDRRLHFVYEAGPCGFGIYRHLTKHGEDCVVVSPSMIPKRSGDRVKTDRRDSQMLARLHRAGELRAIYIPDATDEAMRDLVRAREDAVGVGTQVKYRLKAFLLRQGRRYPGREGWTLPYRRWLTDLSFPSAAQHIALQEYRDAIAETEQRIDRLTEQLRQLAPPWRWAPLVAALQALRGVSFVTAVGLVAELGDLTRFRHPRELMAYLGLVPSEHSSGPTVRRGAITKAGNPHVRHLLAEAAWAYQGIPRIGRQHAYRQEALPKVVCDIAWKAQLRLTTRFRRLVARGKAKPKVATAIARELTGFIWAIAQEVSPAPR

SEQ ID NO: 388687 - protein, 433 aa, unidentified
MPEKIPPTSIPEFAALVGLDWGDEKHALSLCAGSGGPIERTELDQTPEALAEWANNLRRRFPDGKIAICLEQSRGGLISALLGYEHLVLFPINPKMMARFREALYPSRSKDDPIDANLLLELILKHRDHLRAWQPDTVQTRQLDLLNQQRRHFVDMRTGLTNQMLAHLKAIFPQAVSLVGENLANRLATDFLLKWPTLQAVKKVKPATLRKFYYGHNSRAEALITKRLEQVKSAVALTSDVALLAAHSLGIQTLAAQLAALRPCIEKHDAQIAELFAAHPDGAIFASLPGAGAVLAPRLLASLGTDRGRFEQPVSVSCYTGIAPVTEKSGTSQRWVHVRWSCPKFTRQSWHEFANSSRKFCGWARACYEEWIKKMDHHEAIRKLAYKWQRVVWRMWQDCKQYDDAHYVRALQKRGVALAATLLVPTLETGEQK

SEQ ID NO: 388688 - protein, 404 aa, unidentified
MYNAVGIDVSKSKSTVAVLQPGGTVIRKPFDVSHTSQNLNELADYLSSLDGTTKIVMECTGRYHEPMVKALSEAGLFVSIVNPHLIKNFGNNSLRKVKSDPADARKIARYTLDNWTELRQYSGMDNTRTQLKTLNSQFSFFMKQKVAAKANLIALLDNTYPGVNKLFESPTREDGSEKWVDYAYSFWHADCVRKIGLKAFTERYKSFCKKHHYIFQQDKPEKLFNASKELVAVFPKEKTYKLLIQQSIQQLNLASEHVERLRREMNELASTLPEYSTVMGIYGVGKTYGPQLIAEIGDVSRFTHREALTAFAGVDPGVDESGQHKSKSNRASKVGSARLRKTLFQIMTTLLQNAPEDDPVYRFINKKRSQGKPYYVYMTAGANKFLRIYYGKVKECLRNLEQTE

SEQ ID NO: 388689 - protein, 418 aa, unidentified
MNEDGNTRGSRRYIALDIHKKYCVIGGVDREGRVVLHAVRVEHADLEERLKKNLRSTDHVVFESTTNAWHVYDLLEPLVERVVVANPAKVKQIANARVKTDVRDTFILARLLAANLVPDVWVPPVHVRELRQLLSQRRQLVETHTQIVNRMHSVAHRHHLKHERGKRFNEKNTGWQKDKRLSKMEQFQLELEMENRVYIAKQISRIGKEVAKMSHQQPWAEGMTYLMQLPGFGVITGMTVLAAIGEIQRFESAKHLASYSGLTGGLDQSGTKLVQKGITKEGRKELRWALVEVAQRAVKSDPLWKHRFQEMQKRMHRNQAIVAVARRLLELVWYVLTRRQPYRHFSQERIAYKYLTWAWQMDEQARDGLTRQQFTRYYLMRLGIGHDLTRIALDPKHPRKLASEAELLALRPELNHIE

SEQ ID NO: 388690 - protein, 387 aa, unidentified
MQKPHDNSKVCRAAFVQDSTLVVVIEMALTSWLVAGMIPGVDREPLKKIAPDPEELLQLLYRWRDEAIKAGKEITRIAVAYETGRDSFWLARWLRARGIDAHVIHATSVAISREHRRAKTDRIDTAMLRRGFLGWLRGEPGHCSLAIVPTVAEEDAKRPHRERESLVQERTSTVNRMKSILIQFGVRNFNPVLRKASEKLDAVRTPEGIPLPPNAAAALRRHMERLRVIKEQITAIERTRLQRLQRDPADKMNAMVFLLVRIIGFGVETAEQLVHEILFRDLRDRKAVARYAGLTGSPDESGSKRREKGLSRSGNGRVRTILIQLSWRLLKLQPGSELVLWYQKRTADAKGSRKPMIVAFARKLIIALWRYVNTGLLPEGFELKPAA

SEQ ID NO: 388691 - protein, 311 aa, unidentified
MSAAEKELSHKSFDNTPEGIQSLLDWIAGYHLSLSKLLFCAENMGSYVTELSVSSVSMGFSLALVCPLTIKKSMGLQRGKNDRIDAKRIANYAVLHYRKLELYKLPNKDLVRLRGWIIIRDNLVKQKVSNIKLLETFSQMAKLADVTESISFLEEQLKSIKEKILEVEKDMEQLIAASTSLYTNYLLLRSIKGIGIINAIVLLCVTDNFQRFDNPRKFACYCGVAPFEHTSGISIRGKTQTSSLANKEVKVDFTRAAITAISWDPQMKAYYKRKIAEGKHKASVINAVRAKIIARSFAVIRRQTPFVTLAV

SEQ ID NO: 388692 - protein, 424 aa, unidentified
MKFKMQDKQNQLIERISDKHLVVGVDIAQQTHVARAVNYRGIVVGDPLTFENNENGFARLIEWINHLKLLKGLKTEIVGMEPTGHYWLSLSKWLYGQDIDVVTVNPHHVKRNKENRDNTQSKSDKKDALVIADMVKNGYYSFIRPNSEAFEKLRVLMANRDVIVKRLTSSINQINRWVDIVFPELREVFKDVKAKGAIATLRLFPTPSELCSMKAHDIVEGWKTVMKRHAGLKKAQSLIDLAKSSVGSKQAHEAYKLHLEHLLEEFDLAKIQLERVEKEVTSVLDQITFAKKVLAIEGISEISLAGILGESGDLSGFAHGNSLLRHAGLHLVEASSGKWKGQIVVSKRGRSRLRRFLFLTTLSLVSNNSDFKQIHFNNVNVKKMKKMKSIMKLVGKLARILVAIAKSNEPYCSQKVQPLVPIAA

SEQ ID NO: 388693 - protein, 343 aa, unidentified
MQAITTIGLDIAKSVFQVHGIDAEGNVVLRRQLKRRYVLAFFQKLPPCLVGIEACASAHYWSRELQALGHVVRLMPPAYVKPYVKRHKNDATDAEAICEAVTRPNMRFVATKTPEQQSCLTLHRTRHLFIRQQTSVINAIRAHLAEFGIVAPVGRNGVAQLLGIAADANDKRLPEVARACVTALGAQLRMLKAQILEFDRMINAWHRSNEASRRLDDIPGVGPALATALIASIADPKAFRSGRDFSAWIGLVPKQNSSGGKDRLGNISKRGDRYLRSLFTTGALAVIRYAKIHGTRHRPWLTALLARRPTKVAAIALANKIARMAWAMMARGERYKEPAALAA

SEQ ID NO: 388694 - protein, 336 aa, unidentified
MAKNIFQVHGADAEGSPVFNRKLRRAEVLRFFEKLPPCLVGLEACGGSHYWAREIAALGHDVRLIPPIYVKPFVKRGKTDAADAEAISEAVTRKTMRFVPIKTADQQAAAMVLKTRALLVRQQTQAINALRGHLSELGVIAAIGTAKVAALIEIVRDEEDVRLPKAARLALAEIADQIEALTRQIEKLERGIVSEAKRDEDMRRLTTIPGVGAITAANVKALVPDPDGFKSGRHFAAWLGLTPKPHSSGGKERLGGISKMGNPTLRSLLVCGATSVLRRAKGNDKAPQWLTGLLVRKPFKVVAVALANKMARIIWALLTKGGTYRNTGAASSAASA

SEQ ID NO: 388695 - protein, 388 aa, unidentified
MQTVADRSEAPNAIRTDLGAIFVSLELSRSRWLITSLSPDGGEKMSKHAVRGGDVAGLLERFAQLRKKALARTGKVFPFVVIQEAGLDGFWIDRVLRKEGIESHVVDPASITTSRRRRRAKTDGIDGEALVRALLAHKRGEPRVCAMVKVPTAEEEDRRRLCRERKVLIGERVRHVNRVKGLLFSQGISGYQPLRHDRRERLDTLQTGDGRLLPDHLKAQVRRELDRLELLLEQIKAVEAERDVLLAVQQGAAPAPAAMLLNIKGIGPEFAAILWSEGLFRHFDNRRQVASYAGLAPTPWQSGSVDREQGVSKAGNPRLRTTLIQLAWLWLRNQPQSALALWFKERVNRNGGRLKKTTIVALARKLLVALWKYVTAGVVIEGAIVKSA

SEQ ID NO: 388696 - protein, 316 aa, unidentified
MQEATVNVGIDVSKARLDVKVLPSGETWQCGQTPEEHEALALRLEELGPACIVLEATGGLELPVVAVLGARGLPVAVVNPRQVRDFAKALGRLAKTDGIDAEVLALFAERVQPPMRPLPDEASAELSALVARRRQLVDMLTMEKNRLHSTRSPRVRRSIEGIIAALRAQLGEVEDDLERAIKASPLWREKDELLRSVPGIGARVSSLLIAELPELGQLSHKAIAALVGVAPLNRDSGTLHGRRSVWGGRAAVRSALYMGALVASRHNPVIRAFYARLRARGKPAKVALVACMRKLLCILNAMLRDNRPWRPMATAA

SEQ ID NO: 388697 - protein, 327 aa, unidentified
MYLCIIDQEGDIKLQRNIPTVPEVFLKTIAKYREDIVVAVECIFTWYWLADLCARENIAFVLGHALYMKAIHGGKAKNDKIDAHKIGLLLRGSMIPMAYVYPPEMRSTRDLLRRRMHLVRKRGELLAHVQNTNYQYNLPEMSRKIDCKSNREGIAERFADVSVQKSIELDVSLLDNYDKLLSRLEREIILIAKKHDADSYFRLQSVPGIGKILGLVMLYEIHDIDRFPSVQDFVSYCRLVKSARESAGKHLGSSGKKIGNAHLKWAFLEAAVMFLRKNPDAMKYREKLQKKHGKAKSMTILAHKLARAVYYILKRKEVFNMETFFQR

SEQ ID NO: 388698 - protein, 438 aa, unidentified
MSNKVIFNLDELFISVGIDVGADFSWMSIALPNQQFVGKPYKILHNSIDSLTTAVSKIKEAEELYSLESRIFLESTGIYHYPLFCYLRDKGFNCSVINPIITKNSTNINIRKVHNDRFDSKKAALVGLKPDLKVSLMPSDLALNCRNLCREYYDLMDNRSAYVNKLQGELRMAFPQYLGIFSKVTINTSLTLLETYTSPSAFLKADKQEMIDIIKSTARFGLTYAQNKYNAIIQAATDANQFGYIIDSNIKRIRLYISFIRKYDEEINSILESLHELVDANEDSDFVKQIHLIETFKGAGFLSAVSIMGEIGDFSAFSKPKQLFAYFGLDPAVKQSGKFEGTKVQMSKRGSAIARRVIHTLTLQSISISRNREAKNPVLREYYLKKCDSKPKLVAMGAVSHKVCNMIFAILRDNKPFKIIAPQEHIKQYNSAKCDIAA

SEQ ID NO: 388699 - protein, 391 aa, unidentified
MSMYFIGIDISKYKHDCCIISAADQKVVSKVTIKNNKAGFNELLTIIHSLANPADIRIGFESTAHYALNLELFLENSLLTFMEVNPVLISEYKKSKTLRRTKTDSVDCESIARWLMTVEYKPHSKGFYHAYSLKSLTRLRDKLIRQRSFYLVKITNVLDHTFPEFKPFFNERLSKTALYLLENYGSAEKMARMNSASYEKLRSVSRGKFSPQQFLRLKELAANTVGVNNSIFDVELNSLLSLYKSLVKEIDTIEKEINKLIEEVHPHYMSVPGIGPLSAAVIYSEYGDISNFTNPGQMLAFAGIEPGINESGTESHGGKMVKRGSSQLRYTLINCCLPLIRFDMTFATYYAKKRGEGKPHRVAITHVAKKLIRVIYALESQDIDFNDQKLR

SEQ ID NO: 388700 - protein, 351 aa, unidentified
MNYVGVDIHKRYSVLVAVDERGRELGRSRINGNTAFGFAQFFGGLEGKSKVVLEACWNWGRIYDLLSEIGQVEEVVLAHPLKTRLIADAQIKTDGLDAYALATILRGDLIARAHVPAKPTRQRKEVLRQRLYWARLRTRIRNRIHALIDRQRELKMPQCSDLFGRKGLSALNKLVLSEPDATLLREELGLLELIQGQIKAQEARIVEFNSNDEMTLRLQSIPGMGKILAAVAAAEIDSIERFSSAAKLCAYAGLVPRTHASGGKVYQSHLLKSRNKWLQWAFIEAAWVAVGCSAYFGGLYRQHRARGKNANIAITIIARRMSQICWTLLKERRDFIETFPGRSAVRLTAAA

SEQ ID NO: 388701 - protein, 345 aa, unidentified
MKIVGCDLHTRYQQIAMLDAETGELVERRLEHESGEARAFYAGLSGPVRVGIEATGHTRWFERMLRELGHELWIGDAAQIRASMVRKQKTDARDAAHLLELLLSDRFPRIWRPSLEERDLRQLVWHRQKLVWMRNAVGNQLHALAMGEGVCRKKKLFTKKGRVELEGLKLGRWASHRRQELLTMLDQLDASMKELDQAVAEQAEQNQSATLLMTHPGVGPVTSLAFVLTLGPVQRFERSKQVVSYLGLNPREHSSGGRQRLGTISKQGNPMMRSLLVEAGHTAARLDSELRQDYQRLKMRRGSGVAKVAMARKLAVRMYWMLRSPASYAQLVRMQGSPRGTLVGR

SEQ ID NO: 388702 - protein, 352 aa, unidentified
MERYVGVDAHASSCTLGVMSASGRRLKSSVVETNGRALVEAVKEIGGRVHVCLEEGTQSAWLYELLKPHVAEVVVAVAPERKGPKDDQRDAWARANELRTGAIETRVFKAPEHLAGLRNAVRAYGFAVTDAVRAKNRLKSVFLSRGINTDASVYNATKRSSWLAKLPSPHRELAEWLGRQLDQLEPLRDEAERLLQAEAKKHPIIRKLATAPGMGPIRTAQVVAIVATPERFRTSRQFWSYSGLGIVTRSSSDWVQDRTGMWVRAQHAQARGLSRKRHPRLKAVFKGAATTVIAQLAGDPLHADYERMVQSGIKPTLAKLTLARKIAAMVLSMWKHQEVYDPKRHRPTPEQK

SEQ ID NO: 388703 - protein, 411 aa, unidentified
MKNNIKTTKMQLAKKHAVKPQINDAQTKKVSIEREQVSERMKHSLRNRGRRARAVKQVSCYVGMDLGDKNSNYCFIDAKGNIFAEGTLATAQAELNELFSSIPKCRIAIEVGTHSPWICALLKSHGHEVIVANPRKVEAIHKNKRKNDKIDARTLARLVRVDPELLYPIQHRGDPARQDLVLLRAREGLISARTKLINCVRGQVKSLGGRLPNCSAESFHYTVVEKIPDSVKESLLPLVHQIGEMSQTIRTFDAQVIRMSEQKYPETERLRQVRGVGPITSLTYVLTLEKPERFEKSRDVGCYLGLVPRQDESGEISKQLRITKTGDSMLRQLLVSCGQYILGPFGEDCDLQRFGLKLAERGGKNAKKRAVVAVARKLAVLLHRLWLSGEKYEPLYNSQLQTKTLAIAANG

SEQ ID NO: 388704 - protein, 346 aa, unidentified
MENIALDVHKKYTWARVEDSEGRELYASRLAHSRGCIKNFIGRWTPGCSVAVETVGNWYWVVDEIEAGGGKPQLVNARLAKLMMGNVNKSDKLDAKGMNRLQRTGTLPTVWVASSAVRDARELARTRMVLSRQRTQLKNRVHATLSKYGHVVDEVSDAFGKRGREIINELLTKLPPHTGQALQHVLDQLDEVVKNLQAIERDMIGAFSPCSQTALLKSLPGVGEILAVVIWTEIGIIERFNRAEQLASYSGLVAREHSSGGTFYRGAVRRDVNVYLKWAFVEAANSSILNRERSNYQHIDRLYQRIKGRRGHQRAKVAVARHLAEATFWMLKKGEPYREPMLSTQR

SEQ ID NO: 388705 - protein, 402 aa, unidentified
MKASKQYLRFCGIDMAKQKHVACIVDCNGKSLLRPKSIRNDTEGFQQILNCLKQTGRAKSMLVGMEATGHYWYSLHDFLARNGYDVAVLNPIQTALQAKQAIRKCKTDKHDAYHIANLLRTNQYKPAVIPDELAMTCRQLTRIRYRIVKQISMTKQLVHSRLHPAWPEYDELFCDTFGVTSMKLLKTASTPREFMESDFDDISEVIRKASRGRFGSVHTQRILHSAQNSVGMQRGHYGISTAIKFLLEQIETLVPVRKNLEGEIQKLAAQMPQYLFTLPGATDLTIVSLYGEIGPIEVFVNPSQLVAFAGLDPKVFQTGQYDAPRRKISKRGSPYLRRTIWLMAHRAVCKEGDLRDYWRRKRRQNKHHLVAVTASANKLCHIIWRIMTDRRDYISKDYNPKS

SEQ ID NO: 388706 - protein, 355 aa, unidentified
MTSTKYIGMDVHKESISIAVRNAAGKIVMECVIETKASTILQFVDGLQGEVDVTFEEGTWAAWLYDLLKPHVTRVLVCDPRRNALLQEGNQNDRVDARKLAELLHNNQLRSVYHGDHGLRTLKELVRSYLTITQDLSRVMTRVKAIYRSWAIPCTGKQVYAPRHRGEWLGKINEPGVHRRAEFYYQQLDALRWLRQEVRRDLLAESKKHKAWKLLCQIPSIGPIRAAVLLGILQTPHRFRTKRQLWAYGGVGIETSSSADHHVVKGQLERKKKQVEIRGLNRNHNHDLKNLFKGAAIVAATKPGPFQEFYTALLTKGMRPEMARLTLARKIATIVLIVWKRGVRFDAQHLKPQTA

SEQ ID NO: 388707 - protein, 349 aa, unidentified
MTSLAEVVDVVIGVDTHKHTHTAGVVSAGTGGELEVLTAPADPDGYAAFVELGDGHSGLRAWAIESTGGYGAGLARHLRERGEWVIELDRPDRPARRHGAKSDPLDAVRAAREALSRTELAEPRAGGERAALSVLLAARRSAVEASTVAQRQLHALVTAAPECLRARFRGQTTTAMIATAARLRCHASWDVETTTTAMVLRSLARRAQAMAAEAADHERQILGIVRSWRPDLLELTGVGPIVAAVVLCAWSHPGRVRSDAAFAKLGGVCPIPASSGQTVRHRLNRYGDRQLNRALHTVVLSRLRYDPDTRAYKDRRRAQGKTDREIKRCLKRYVARQLYRQLQTAPSPT

SEQ ID NO: 388708 - protein, 334 aa, unidentified
MQNVTLIGIDLGKHSFHVHCQDKSGKALLRKKLTRTKLIEFLAGCTSATVVMEACAGAHFMARRIADLGHEAKLISPQFVRPFVKSNKNDFADAEAICEAASRPSMRFVQPRTEAQQAMRALHRVRESLVRDKVKTTNQMHAFLLEFGISMPTGAAVIKRLSTVLAENELPPYLAQLLMRLHAHYLYLVEQITELETALEQELLRDETGQRLQTIPGIGPITASVLSSQLGDGKQYGCSRDFAASTGLVPRQYSTGGKNTLLGISKRGDKNLRRLLVQCARVFIQRIEHQSGSLAEWVKAQLERKHSNVVTCALANKMARIAWAITTRQTVFGR

SEQ ID NO: 388709 - protein, 346 aa, unidentified
MKHYAGLDVSVKETSVCVVDETGRICREMKVPSHPDDLAEVLHNPAWRLERIGLEAGPLSQWLFSGLAEASLPIVCIETRHTKAFLKAQVNKSDRNDARGIAQMMRVNLFRPVHVKTLTSQKRRVLLTARKLLQEKAIAFENDIRGLLRNFGLKVGVVGTAKFDTRIRELIDRLPDLAEIVEPLLASRRKLREEFERLHRKLLSIVRNDGVCRRLMTIPGVGPVVALAFTSTIDVPARFRNSKAVGASLGLTPVLHQSGESNRIGRVSLCGDGMMRTLLYEAAQVLLTNVHAKWSWLKAWAMNVAKRRGGRKAIVALARRLGVIMHRIWSDGTVFRWTRESVTAAV

SEQ ID NO: 388710 - protein, 414 aa, unidentified
MDVIVARCAGLDVHKKTVMVSVRTPKRGGGRAEVVREFSTFTDGLVELRDWLVEERVSQVAMEATGSYWKPVWHVLEDAAGFELRLVNPTHVKKVPGRKTDVSDASWLAQLLECGLLRGSFVPPVEIVRLRDLTRYRKKLIQERTREVQRIQKLLEDAGIKLHSVATNVVGKSGREMLEALIAGERDPEVLAEMAKTRMRSKIPELRRALVGRFEEHHALLARMHLDHVDQLDELVGRLDTEVDQLMAPFAEPATRLTSIPGIAKRNAEVIVAEIGTDMSRFPDPAHLASWAGLAPGNYESAGKRKTGRAPKGNPALCSALCESAWVATRSDTYLAAQYRRFRRRFGAKSEPKAIFAVAHTMLGIVWHVLADETTYQDLGPDYFERRTDNEARQRYLVRQLEALGHQVTLQPAA

SEQ ID NO: 388711 - protein, 406 aa, unidentified
MNAVGIDISKGKSMVAIMRSAGEVLQKPFEVLHGENDLKELSVKILSYGENTRVVMEATGRYHEPVAKILHEAGIFVCVLNPVVIKQSGAGSVRKVKSDKKDALKIAKYGIDNWRDLRQHSVMDITRQQLKLFSRQYNLHMKTVTALQNNLISSLDATYPNVNRLFSSPARDDGSQKWIDFAMHFWHIDLVAKVKFETFADRYLKWCKRNGYKFSLTKARQIHSTSKGLFATLPKSDETKLLITSAISALNQTMKVRAAVRFEVIRQASLLPEYEAVSALYGVGEITAAQLMAELGDVRQFANRGAIVAFAGVDPEVNQSGLQNRISNKASKRGSPHLRKTLFQVVSAYLKRSPENEPVYQFLDKKRREGKPFYVYMTAGANKFLRIYHARIKEYLNSLDESHLVQ

SEQ ID NO: 388712 - protein, 338 aa, unidentified
MKYTPVGVDIAKHLIQVHFIDEHTGEVIDKQLRRQDFLMFFCNREPCLIGMEACRGSQHWVRELTKLGHKVRLLQAHFVKAFVMGNKNDVMDARAIWMAVQQPGKDIAVKTEEQQSVLVLHRSRRQLVKFRTMQINSLHGTLLEFGKTIHKGRAAMERELPEALERMKERLPPYLITVLENQYNRLNELDSLIEDIEKKLTSVARQNETCKRLLDIPGVGPLIATAAVATMGEASAFKSGREFAAYVGLVPKQTGSGGKIRLLGISKRGNTYLRALFIHSARAAALLPKEPGPWITELKKRRPTSVAIVAMANKLARTVWAIAAHGSEMYFPAAKQNQ

SEQ ID NO: 388713 - protein, 355 aa, unidentified
MLAELVDAVVGIDTHRDTHQVEIALPNGAPIALTTISNDSTGYAELLAWIVDHAPGPRLALSIEGTRSYGVGLARAATAAGLTVLECEQPNRKARRGKGKSDPIDAHLAVLAALRLDADRLPIPRTDGDREALRILLGARGELTTASTAQTNRLRALLLGGDDTDRTLARGTLTESRLAGLARRRPPREASREQAVRHAEIRRLALALREAARALKANRVQLQTIVNDIVPGLTERRGIGPVSAAQAIVSFSHPGRCRNDAAFAALAGASPLPASSGRTVRHRLNRGGDRALNRALHTIAVTRMRSCPTTQAYVARRTAQGKNPKEIRRCLKRYIARQLYRTLTPAMTPAVEVSG

SEQ ID NO: 388714 - protein, 415 aa, unidentified
MNTTNQSQTKSTQVSKPGKARGPVQRDAKDVMAELVARLSQRLEAKPTLSCDESNVDRAVEPNRDRLTVGVDLGDKWSNYCILGLDGETLVEGALQTSPHDFSEFFSAVMPARVVMEVGTHSAWARDAVAGCGHEVLVANPRQMEGPKKRKRKNDRIDAHKLARVGRMDPQSLFPIHHRSVGVRRDLLALRARGALVAVRTELINSTRGLVKSMGARLPKCSTQAFANKVERELPGEVREILLPLVEIVKSVSESIRSYDERIEALATEKYPQTGLLRQVKGVGPLTSLAYVLTLENPKRFTRSRDVGPYIGLVPKQEDSGDRQPQLRISKMGDEMLRSLLVGSAQHILGPFGPDTELRRYGLRLCDRGGKNAKKRAVVAVARKLAVLLHKLWASGAVYEPLRQNIPRPATQNAA

SEQ ID NO: 388715 - protein, 403 aa, unidentified
MNAVGIDVSKGKSTVAVLRPKGEIVLSPFDVFHNPKELGELVTLLKSLDGETKVVMEYTGNYYFPVAQFLQNNGFFVSVINAILIHDYGNKSLRKAKTDMKDSLKLASFALDRWLDLPSFSLSSDTRNLLKSYNRQYNQYNKLKVMLKNNLIYLLDLTFPNVNSLFASPLRKDNGHEKWINFVLKFPHAECISKKSLSTFSKSYLSWCHKNGYRFSESKVQEIHEFACNCSPSLSLNESTSLLISSAISQLNCIAETLANLASEMNRLASSLPEYNVVMSMFGVGPVLGSQLIAEIGDVSRFHNKRALVAFAGLDAPPFQSGNFNAQSRSISKRGSASLRKTLFQVMSDILQQAPADNAVFQFMDKKRFEGKHFYVYMTAAANKFWRIYYARVTELLNSLQVA

SEQ ID NO: 388716 - protein, 340 aa, unidentified
MNKITKKSEFIGVDISKDYIDCALISESKPGEFQEKRFSNNLNGFESLDKWLSGNLTEIKRALFCMEHTGTYGLLFCAWLSHKGIDFCVEPGLKIKRSIGMVRGKNDRIDARRIADYAFTQKNKLTLFLFPSRLILEVKQLLTYREQMVRFRTSLKNSLKSHQQYEQITGKNKISASIEDQIRKYDIIIDDIEKELIRIIESDQELKTNFNLATSVKGIGLIIATFMMVTTNNFTSFNDGRKYACYSGLAPFENSSGSSIKGRTSTSYLANKKIKALLLNGANAAKKCDPELKAYFKRKQQEGKDYKVIMNAIGCKLINRVFAVVKRQTPYVITYQQKIV

SEQ ID NO: 388717 - protein, 334 aa, unidentified
MKQVNQIGVDVDSEELVCAMQCAQQRLPLARFANTASGHKKFIRWATKGGHPVRVCLEATGIYSLEFALALHQAMNVEVMVVNPRAIKDFIRACMQRAKTDAVDAGGILDYLERMPFVAWQPPAPEILELQAINRRIDQLHTELTREKNRRHATEFAGASADAIAHDIEVNIHHLERRLERMQESGLRLVRRVPALAAKLAHLVSAKGIGEASAMRILAELLVLPDDLAAPQWVAHAGLDPRPYESGTSIHRPRRISKVGNSRLRAALYMPALVAIQHEPNVKAFYDKLVAAGKKPMQAVVAVMRKLLHAIWGMLKHDQDFDGNKFFKLTEKTA

SEQ ID NO: 388718 - protein, 366 aa, unidentified
MQKKNVRAQTLFVGVDVHKDSHTAVGLSPFGEKVFEVTLGNHERDFASLMTRSQDEAKKASLSVRFGLEDVHSWGERLSSFLCEAHQPVVAVAPILVDRVRKRTTHPEKNDSLDAQGVAQVMIQRIDTLPEYTITDESRRAKHIRELACDREWLVKERARLKNQLHTLLYRIHNSDYKTKFSNPFALKALRHWLRSVPKDVDPLLVRRMKRAIRRLRTLRDEIKELEEELAQLLADGNYTLPTLSGCGTVIAGEIIGEIGDITRFSSPGALAKYAGCAPREYSSGATIRWRKTRSGNRRLNRAFHRIALSQISRSGNSAAKEYFQKKVGEGKTKAQALVCLRRHLVTIVWMMMKHRVEYSYPQKSA

SEQ ID NO: 388719 - protein, 339 aa, unidentified
MQVTTIGVDLAKNIFQVHGIARDEEVVFNRPLRRAQLLPFFTRLEPCLIGMEACSSAHHWARELTALGHDVRLIPPMYVKPYVKRGKSDAIDAEAICEAVTRPTMRFVAIKTVEQQALLSLHRARALLVRQRTQLINGLRGMVAEFGVYIAKGLARVIGFAEDILVGEVLDLPEIANEVIHNLCEHLMALHARIQWYEERLKLVAKEDARVRLLRTIPGVGVVTASAIIASIGDGHQFRNGREFAAWLGLTPANKSSGGKEKLGRITKMGDQYLRCLLVVGMTSLVRQTKSHPERASKWLTSLLERKPARVATVAMANKTARIVWAVLTRNEPYTPHTV

SEQ ID NO: 388720 - protein, 429 aa, unidentified
MNCTQNKKIEQVKETTMIVGIDVGSEKHYFRAFNWRGIELTRKPIAFSNSMEGFNSFYNTIVELMQKSELEEALVGIEPTGHYWFALGQFMGEKDIKFVMVNPHHVHKTKELDDNSPSKNDRKDPRVIAGLVRDGRYFYSYMPTGVYAELRNASNRRFVLVEEQTRAKNRLQKWIAVYFPEYKGIYTHIDAKGGMLVLKKAPTPEEIVRLGVEGIIKIWKDAKLRGNGHKKAMLILNAAMKSIGLKSGLTEARMEIQDLIEDYELQTKRLERVNDLIKGLCQQVRYADKLLEIKGIGITTVAGFIAEVGDITRFDSTKELQKLAGLELVADSSGKHNGKTKISKRGRKRLRYLLFEAAISVVGKNEEFKEIHSYYTTREKNPLKKMQSLIAVACKLIRVFHAILTKGIRYDASKMLKDIRHPGEQLKAA

SEQ ID NO: 388721 - protein, 313 aa, unidentified
MSELCVGIDVSKAQLDVAVEEGERFSVSNDLAGRVQLCERLAAVKPRLIVMEATGGLERAVAAHLTAQELPIRVVNPRQVRQFAQAAGILAKTDQLDAAVLVRFARAMQLEPRALPSEQVQALQALIARRNELTEMLTAERNRLRLAHKSIRPHLKKSIRWLESQLVSTDHDIGGLLRECGVWRDKVELLESVPGIARITSLRLVTTLPELGTLNRRQISALAGVAPFNQDSGQWRGKRRIYGGRAAARTALYMAALVGSRHNPVLRAFYRRLRAAGKPAKVALTACMRKLLTIINTMLREGRAWSPRLASAA

SEQ ID NO: 388722 - protein, 404 aa, unidentified
MWYAGIDWADTHHDALVIDEKGGQVASLRVDHTPQGMSKLNTFLEQIIGTAPKEQMACIIETTHGLLIAHLLEAGWPVYPVNPRTVDRRRSASGAKTDTIDAYLLAKTGRADLADLHRLTPDSEKVRELKQLTRDQDALIQMQTRLVNQLTACLKAYYPVGLELFTKLQQKSTLVFLQTYPTPQAAMAASGEQIEHVLRAAKHSNPSLVAAQIVERLQQPHLQADVVTTRTKSRLMVALMSQLLPLIAQIAQYNKEIATLFLTHEDHEIFASLPRAGKRLAPRLLAEIGDDRTRYQDESLLQALGGTSPVLYQSGMYSKAHRRLGCIKPLRNVLHQFAWQTTQSEPWAMQYYQRKRTEGKSHTVAVRALANVWVRIIFAMWLHHRCYETATFEHAQQQHARPAA

SEQ ID NO: 388723 - protein, 405 aa, unidentified
MDVIVERGCGLDVHKETVVACINGGVTKKEIRTYSTFTNELVKLKEWLKGNDITHVAMESTGIYWKPVYNILEEDFEVVLVNARHIKHVPGRKTDVCDSEWLCKLLRNGLVKGSFVPERDMRELRDLTRYRKKLVQAMSSEKNRIQKVLEDANVKLSSVVSDTFGVSGSKIIEALLGGELTPEEMSDLARGRLRKKKDFIREALVGKVTKHHVFMIKASLEHIKSVEKLIEGIDREIETTLERYKEEYELLQTIPGVKEQGAASVLAEIGTDMERFPTAEHLSSWAGMSPGNNESAGKKKACGATHGNKSLKTTLTECAWAASRKKDCYLRAKYNSLVGRRGKKRALIAVGHKILIASYYILKNKVSYRELGGDYLDKRRKDKITKSYVKRLASLGYQVTLSAVA

SEQ ID NO: 388724 - protein, 382 aa, unidentified
MQTTDHLHHETAAAQSNFARVLVSLELSRSTWLITALAPDGEKMSRHQVEGGDAEALLVLLDLLKVRTAQRLGRPVQIVTIQEAGLDGFWLHRRLEHHGILSYIVEPASIAVPRRHRRAKTDRIDGEVLIRTLAAWLRGEPRVCSMVRPPSPEEEDRRRLTREREQLIAERIRLVNRIKGLLFGQGIRDYQPLHRDRWQRLEALATGDGQPLPPQLKAELSRMLERLDLVCRQLEAVEQERDSMAAAVEPVAALMQLKGIGPEIAARLWLEALYRTFSNRRQVAAYAGLTPTPWQSGDSSREQGVSKSGNPRPRTTIIELAWLWLRHQPGSALSQGFRERVGDRRGRVRMVAIVAVARKLLIALWRYVTQGVLPEGADLKTA

SEQ ID NO: 388725 - protein, 342 aa, unidentified
METVYVGLDMGSSAFQQVAMNTNGSVRVNRSFTTSEANLRAAFADQRGEIHVHLEAGELAPWAAAVIMPLVTRVVCSHPKDNAWIAKDADKCDRVDAFKLAELLRLNRFKEVHYAPDQPRRNFKQMVQHYDELTGQQARLKTKIKARLRMQGVIVTGERPFSSKGRKEVLARVESRDLRTAIKQLYEVLDQSVTAQEQARLLMLRAAQAFPEIKLMRTVPGVGPIGACRFSAYIHTPNRFSSKRKLWKYCRLSVSHRSSNGKPLRRPRLDRSGCGRLKDVSRKAFDVAVRSRQDNGFKRTYQRALETTHDKTHARLTVQRKIVSTLRAMWITRTPYCDELSR

SEQ ID NO: 388726 - protein, 348 aa, unidentified
MTRVADRVVVGGVDTHKEIHVAAAVDGAGRILGTKEFATTPAGHKAMLRWWARKGRLARVGVEGTGAYGAGLARFLAEEGVDIVEVDRPNRQLRRRRGKSDPVDAEAAARAALSGEASGAPKARNGNVEMIRALRVAQRSAIKARAQATNQMHALVATAPDSVREPLRGLSSIRLVERCARFRPGDVDTPEAAMKLALLELARRHQSLTQEIKRLDGHLDRLVAATSPGLVARFGVSTDTAGALLVAAGDNPGRLRSESSFAALCGVSPVQCSSGQLQRHRLNRGGDRAANQALWRIVMVRLAHDPRTRHYMEMKRKQGRSKKEVIRCLKRYVAREVFADLSRVPDLT

SEQ ID NO: 388727 - protein, 358 aa, unidentified
MAQHVGVQVLAFVGNPNSYLNSFRMLQGRDMTNADVRELTSLAFVGVDMAKESFDWAVHGEASRHTLPNDDKGFEGLLVALKAYRVGLVVLEATGGWEKRLARFLLGYGLLVAVVNPRAAREFARSMGHLAKTDAIDAMALAHLAQTLAAKADQAGVAFAPPPAEVERLQLLVTRRAQLIDMRTAETNRLSGAGRALQRSITAVVKTLDKEIARIEGDIDAHLKSHFEEQARRFDAIKGIGPITCAVMLAFMPELGRVSNARAAKLAGLAPLNRDSGKERGQRHIFGGRSIVRSTLYMAMCSAVRFNPVMKIFHDRLIAAGKPKKVVLTACAHKMLRILNAMARKGQPWNEDLHPVAP

SEQ ID NO: 388728 - protein, 337 aa, unidentified
MTLYCAADLHSNNHFLTIIDEQDKRIVEKRLSNDLAVTLKTLEPYRSEIAGIAVESTFNWYWLVDGLAEAGYNVKLVNTSKVRQYEGLKYTDDRHDAFWLAHQMRLGILPTGYIYPKEQRAVRDLLRERRRLVRQRTTNVLSTQSTLWRHTAIRLSKKVILGEKEAPWPELSDKNVELGVRAHRATIKVLNRQIESIESTVLKYLKPSPEYKMLLSVPGIGPVIAWTILLEAGDLNRFANVGHFASYCRCVDSRRTSNEKRKGKNNVKNGNEYLAWAFFEAAHFAIQYLPAAKRFYERKAGQRHPMVAMKALSHKMARACYYVMRDKVPFDPARLFA

SEQ ID NO: 388729 - protein, 339 aa, unidentified
MGLYTGFDLHSSNTYVGIIDEDGGRLWKKKLRNEPSLIVETLLPFKKDIEGIVEESTYNWYWLVDLMMEEGYHVHLANPSRVQQYSGLKHGDDEDDAFWLAEMLRLKILPEGFIYPKEQRPLRDLLRKRGHLVRLRTSLIVSLQNILARNLGAKMKTNHIKVLKEDRVTPLLAGNDDISLAGRVSKDAIDSLTRQITAIEVAVEKKMRLQKPYDLLLTMPGVGRVLALTIMMETGPIDRFADVGNYVSYCRKVPAARFSNDKKKGTNNRKNGNKYLSWAFAEAGELARRFDVEARAYYDRKQKRTNAPIAHSALSHKLARAAFYIMRDGVPFMPEKMFV

SEQ ID NO: 388730 - protein, 378 aa, unidentified
MSSSINFWVGLDVHKDSITAAVFKDRDPEPLHVDRLPYDLHKIRRYFQRLQAQGTVRACYEASGAGYVLQRSLLQWGVECHLAAPSLIPRRPGERRKTDRRDAIKIGRDFRDDRLVLIHIPTEEDERVRDLVRCRETFQREIVKSRHYILKFMRRRGFVFREANNWTVRHLNWIRQVLAPGTLAEEDHTVLSEYLALLEYKLQRRDELDRRIEALALTPRYKPVVERLCCFRGFKTQAAMVIATELGDLRRFSSPRQLMAYVGLVPSEHSSGPRQRLGSITKAGNSRVRHTLIQAAWPYRKRPAVGAPLRRRQQGQDPGVIRHSWKCQQRLYSLFHRLAVKKPAQVAVTAIAREMVGFLWAVLHEVDVSKLQEVSATA

SEQ ID NO: 388731 - protein, 423 aa, unidentified
MKLAAEQPFTALVGIDWSDKKHDFCLQGADSQQREFGVVAHRPEAIEHWARALYQRFGGPIAVCLEIAKGPLVHALQRYPFMVLFPVNPATVAKYREAFVPSHAKDDPTDAEIALELLLRHRDKLQVLKPQSAAMRALTTLVEQRRNLIGDKTRITNRLCSTLKEYFPQALDWFEDRDTALFCDFLQRWPSLKHVKRARQATLRSFFCEHNMRRTELIEERIRGIRSARALTEDVAVIGPHQLLVLALIAQLRVTLQAIDQFDVEIADVAKRLPDYALFAALPGAGAILAPRLLVAFGEHRERYASAAQLQQYAGVAPVLERSGNKCWVHWRIACPTFLRQTFVEWAGSTIPRSFWASAYYQRQRDKGCSHQAALRALAYKWIRIVYRCWQTRTPYDESTYLHALKRRGSPLIAALSVALQSP

SEQ ID NO: 388732 - protein, 345 aa, unidentified
MSMVIYVGLDVHLNSIAAVWGRAKDKPRSMTVTPDEEGLTALVKSVGPGEVLGVYEASSCGFEVYDRLRELGWKMSVVAPTHIAKSVHRKKRKTDLRDAKHLWEILMSHGELGTELAEIWIPSRELQEEREIVRRRLKLSESSCRVKNGILSVLRMHKIKRPEGMKSAWTHKHLAWLRGLSKDESLGASVRTVLASYLRELEFVREEIETIDQAVEALAEKVQYRGAVEKMTEVPGVGTLTALTFLLEMGDLRRFDNRRQVGCYLGLVPTSYESGDADDRKGHITRLGPPRVRKVLNQAAWHLVRLDPLWRKRYEGIAGRGGAKTAIVAIMRKLGIELWQRGKSA

SEQ ID NO: 388733 - protein, 369 aa, unidentified
MKSIVYVGMDVHKDSYTLCSYRQEFGEVFAIHKMTGEHQNILKYLARVREEVGYDCDFICGYEAGSLGFSLYHQLTDKGVKCIVIAPTSIPQEKRKRIKTDKRDAIRIAEALAFNTYKSVNMPTVEDEAVKEYIRMRCAQKRALKKIKQQILAFCTRHGKKFTDGRSNWTGIHLAWLSKLDFDNDLLKETLSEQLVSYYEAVNKLALFDKRIEAIAQSERYRDDVKRLLCFLGIRTHTALSLIVEVGDFKRFRNARHFAAYLGLVPGETSSGESIQRTGITKAGNSHLRRLMIEAAQCYSRGALGKKSKTLLLKQAGNNPRVIAYADKAIDRMRRKFYRLSFRTKRNIIVTAIARELACFAWGMMTASF

SEQ ID NO: 388734 - protein, 356 aa, unidentified
MAKEYHIGVDLHKRFSQVAVIDEKGEEIENKRLENNAFEVSEFFSSFPKETPVSFESTIGYEWLADTLAENGFTNLHMAHPYKVRLIAEATIKTDKVDAATLAHLERTNFLPLSYLPPVAVRETRELLRHRLKLVTIRAQLKNRIHAVLAKRGIFSYPVTDLFGKAGRQFLSNLTLPAVYQKEITNYLLLLDQIAKIVSTLEKDIKRQVKEDYPQAGLLLTIPGISYFSALLLMAEIGDIERFPSSKRLASHAGLVPATRETADKLHQGHIKKDSNKYIRWVLLEAVDILIRKDPGLAFIYRKLVCRKGKNRARVAIAHRVLVSIFYMLKKNEPYRTHLLKQNTISGKPVLVTGTK

SEQ ID NO: 388735 - protein, 346 aa, unidentified
MEQYVGLDVSLKLTAICIVDRTGKIEREGVVASDPEAIAAFVKSHAPHIARIGLETGATSTWLWTELNKMGLPVICIDARHAKAALKMQINKSDRNDAVGIARIMQCGWYKEVRVKDLDSHAIKALLVSRALLVKIKRDIENQIRGLLKNLGLVIGRAKMKVFAVRAAELAEARPELAAAVEPLLKAREAVGRQIADLDRKVMRLARNDAQVRRFMTAPGVGPITALCFLATVDDPTRFKRSRSVGAYVGLTTRRYASGEIDWTGRISKCGDAMLRSYLYEAANVLLTRVVKWSTLKAWGVRLAKRSGLRKAKVAVARKLAVILHRMWIEGTEFKWSSKEVANQPA

SEQ ID NO: 388736 - protein, 411 aa, unidentified
MHNRQNYLYVGVDLHKEHHTAVIINCWQEKLGEIQFDNKPSAFSKFLLEVETYVSDGLSVVFGLEDVGGYGRALAKYLVDHEQVVKEVNPALSFLERKSQVMIHKNDSWDAECVARILINKFNQLPDAKPNDLLWSIQQLVSRRNALVKAQSALKNQLHIQLNHHYPSYKKFFSELDGKTALAFWQQYPSPSCLEGANIKQLTAFLLDVSNNTCSVKKTSEILKLVKEDGHTMKEYQETRDFLVRSIVRDIEFKKKEMKYIERELKQLVNLLDYQLETMPGIELVTASALIAEIGDVRRFPNANKLARFAGIAPVYFGSGGKGKTHKSKQGNRALHALFYNLAVQQVQVAKGSKMPRNPVFHAYYQKKLKEGKTKGQALVCIMRRLVNIVYGMMKYKTAYELPIVEEKEVV

SEQ ID NO: 388737 - protein, 338 aa, unidentified
MEQVITIGLDLAKNVFQVHGIDAAGKVLVRRQLRRGDVLRFFGGLPRCPVGMEACATAHYWARELTKLGHTVRLMPPAYVKPYVKRGKTDVADAEAIAEAVTRPTMRFVAVKTADQQAALMLHKVRDLLVRQRTMLINALRGHLAEFGIIAARGPGGVTAAIISLHEAQDSLPELARVALHGLIDQLRIVRDEIARVEKRMVAWHRASNASRRLATIPGIGPITASAIAAAVPDATLFQSGRQFAAWLGLTPRAHSSGGKERRVGISKQGDGYIRRLLVTGATAVIRLARQGNASKTWAAKLLERKSARLVSVALANKTARIAWAVLARNQSYVAPAM

SEQ ID NO: 388738 - protein, 375 aa, unidentified
MKKKRDREGMVTAALDLGDSESLATILSPDGDVVDSFSMSMSDDGYSSFASKVPKDARIAFEATSMAYPVSRRLTALGYSDITVAHSKELAWIVKSKKKNDRIDSLKIARLHMAHMLPESHLLSREEQVKRDLLIQRVTLGKEIGKMKLKLIAYLKREDVYLSLPESSDSFSRERRQAIRSMRFGGDGDDDGRGLVVGTMMDRLEFLERQCAPLEEKVRTIVKDSEDIRRLMSIKGVDFYLASLASSYVGDVNRFPDDDHLASFLGIVPESWDSANVKRRGHMSKEGPSTARWAFSVMTDTVMRYNPRLKTYYLSVKKRKNSGSLAHVATMRKLVRMIDHMLRYKENWRWEDEASTAKKLANLDREAEAKTTGGD

SEQ ID NO: 388739 - protein, 344 aa, unidentified
MNYYAGIDVSLESSSVCIVDATGEIVKETRVESHPDALVKFFKAFGLPLTVIGLEAGPLSQWLYAGLTKAGFVTTLMETRHVNAALSATTVKTDRRDARGISQLLRMGWFRPVHAKSTGSQEVRALLVARKQIQHKLKDIELSLRGILRGFGLKVGKVTEKTFEARIRELVTSHPMLEEIAEAMLAARAALLEQFKKLHKAVLKIVRHDEVCRRLMTTPSVGAIVAITYKSALDDPGRIKKSRNAGPLFGLTPKRYQSGETDITGGISRVGDEMVRTALYEAANVLLSRVTRFSALKRWGMEVAKRRGLKRAKVAVARKLAVILHRMWIDGSTFRWTKTEAAYA

SEQ ID NO: 388740 - protein, 350 aa, unidentified
MLIIGCDFHSRFQQIAMLDTQTGEIVERQLEHETGEAEKFYRSLPPPVRVGMECSGHAHWFERLLAGLGHELWVGDAARIRAAEVRKQKTDTRDAAHLLDLLVANRFPRVWRPSPGDRDVRQLLVHRQKLVWARSSVKNQLQALAMNQGVCRRRKLWASAGRRALEELALGPWTSRRRKELLALLDQLDGSIEELDRAVEEEAQKRTEAVRLMTHCGVGPVTALAFVLTLGPVERFRRSKQVVSYLGLNPREHSSGGRQRLGAISKQGNTLLRSLLVEAAHTASRFHPELRRNYQRLKFRRGSAVAKVAIARKLAVRLYWMLREQAHPAQPVRMQGSPGANLVDASPSHF

SEQ ID NO: 388741 - protein, 408 aa, unidentified
METLHRRCAGLDVHQKEIVACRRIVSGRKVRSELGRFPTTTQGLLALSAWLAEAKVTHVAMEATGVYWKPVWHVLCHDFSLVLANASHIRNVPGRKSDANDATWIADLLAHGLIRASFVPPQPIQELRDLTRTRRELTREIVRHTQRIQAALEEANIKLASVISDILGFSGRRILKAIVAGQSDPQRLAELGHSRLACTREELAAALEGRLRDHHRFLIGQHLKTIEQIEATIGEFDARLETALAPFLDAAERLKAIPGFGGNVVQTVLAEIGADMSAFPTDAHLVSWAGMCPRLDESAGRKRSKRLRKGAPWLKPVLVQAALAAIKVKNSSLRARYYSLKLRLGHKKAIVAVAAAMLRIAYHMLKDGTFYQDLGPDYRGRRNPQRAAQNLAKRIRALGFEVKLNRAA

SEQ ID NO: 388742 - protein, 359 aa, unidentified
MQTQSNKIDFNGQNIYAGLDVHLKDWKVTIMTEKLTHKTFSQPPKPEALHHYLTKTFPGGTYHTAYEAGFSGYWIHNKLRNFGINSIVVNPADIPTTGKENVMKNDVRDSIKIARSLRNGDLNPIYVPSLPTLEDRGLVRTRSTLVRDLTRYKNRIKSFLYFHGIEYPESFSRPQTHWSNRFNKWLEDVEMTEASGKASLNILLQQSSHLRTSILQVTKQIQELAKTDRYKTQHELLRSIPGIGLLTAMVILTEIETIDRFQTFDQFCGFIGLVPSTHSSGDHDVIGDITPRGHSVLRSAIIESAWMAARLDPALNKCYHDYCKRMEANKAIIRIARKLVSRIRFVLKNNQPYVCSVVK

SEQ ID NO: 388743 - protein, 369 aa, unidentified
MNTTTFVGLDVHARSIKAVALDAMTGEVRSATFGYDAAEVAGWVSSVDPSAKCVYESGATGFDLQKRLASMGIDCAVGAVSKMIKPPADRKRKNDRNDAEFLARMLSVGNVVEVWVPDDGCEAARDLSRALDDAREDLKRCKQRLSKFLLRHGHAFSETTPTGRRKGSWTAAHWAWIKSISFPEKADDDVLAYYVDAVRQAMEDKKRLEKLVEAEASKPRWKKRVDSVRCLKGIDVTSAADLVFEAGEFSRFKSARSFAAWLGLTPSEHSSGESVRQGGITKAGNKHLRRVLVESAWHYLGCSPHSKDLAKGQVPDPAARRHAAKGVRRLVERRRAMLERGVHKNKANVATARELACWCWAVGRMIENG

SEQ ID NO: 388744 - protein, 332 aa, unidentified
MTEYIGIDVSRQTLAVWDGTQEEEVPNEKGLKTLKKLLKKKYGGEWDQAVRFIYEPTGPYSNYLRAFAAEHEVQVYEVNPKKSANFAKVMGNRSKTDAVDAKMLSTFHALLTEEDFRIPEIDESAEQLGAELGSYEIIQKTRTMLANHVHSLEYKSGVTRKLKESLERELGRLGAMEDQLENEMEAVAEDHEETREALHNLLSMNGTLVISAINLLYLFRKYPDANRNEITALAGLDPVRRQSGSSLNGGRKISRAGDPMLRKVLYLACMNSIQHNECIQAFYKHLVSDNHKKPKVALVACMRKLLLIAHHLTVTKSQYRTLEHDATLCLTS

SEQ ID NO: 388745 - protein, 357 aa, unidentified
MQKKNTKIDFSDQDIYVGLDTGKKSWKVTILTKDFEHKTFSQPPKPEALVKYLHNNFPGARYLCVYEAGYFGFWIHDALRQQGVDCLVAHPADVPTKDKERRNRNDTVDARKLARSLRNGELIALYVPERKALEDRSLVRMRMSMVKKQTRCKNQIKASLNFYGHTIPDELVKSHWSRNFINWLESLEFQGESGRQALQALLDELKHLRQSIAQLTGQIRTLAQQEPYRTKVRYLKSIPGISTFTAMVLLTEIVDINRFKGLDHLASFVGIVPGEDSSGEQERNTGISRRRNAYIRALLIESSWIAVKKDPALLMAFNKLTQRMPKNRAIVRIARKLLNRIRYVLRNQESYEPCVVS

SEQ ID NO: 388746 - protein, 415 aa, unidentified
MPDPLFVGIDVSSKDNVVCCLSNNDEKRPLSRFTVLNNRPGILELKQRINQLVQKHSFDEILFGLEHTGCYSTHAAMYLQHHLDFGCKDVNVYLFNPSLIKEFKKAHFLDAPKNDRVDAWYIASKLMAGHLPHPFTWSEPLMALQRLTRARYHLMQALVRESNFLMTNLYLKCSDYTLVFDNKLSATSLAVMEEFQSAEALAEASLDELTQFLIQHGKNRFDDPQAVAKELQKAARSSYRLPKAMADSVNLAMASSIRVIRTLQEQLKSLKKAIEDHLDTIPQTLDSVPGIGPIFASGILAEIGDINQFENHKQLAKFAGLAWTQHQSGNFTANNTRLIRSGNRFLRYYLIEAADSVRMHDPVFAQYYALKKAEPKQYAHKRALALTARKLVRLVFYLLKTNQLYQPGGRNRHDS

SEQ ID NO: 388747 - protein, 380 aa, unidentified
MKKCTVGIDAHKESNVLALAFNDMKPSILHGKVSADLNRTVDAIRKIQKKHDLQKEDLQICYEAGPTGFVLARRLIKLGYDCQVIAPSLIPTKPGEKRKTDKRDARKLAEMHRSGHLTAVHIPEVDDEVVRDVCRGRTDAVNDLKASKKQLLSFLLRNGYRYPEKARWTEAHMRYLRELVMAHPTQKILLEEYIRRIDNAGEQIKRLEDQMEKILSTWKRKPLVEALMGMRGFKMVAAMVIVSEIGNFGRFKHPKQLMAYLGLIPSEESSGETRRMGSITKCGNAHARWILIECAGHYKLPAKVSKALSVRQEGLSRDVKKVSWHAQNRLSKRWYKLALRGLHTNKIRTAIARELSSYIWDIAIIIEQQDAPCPSSALLA

SEQ ID NO: 388748 - protein, 326 aa, unidentified
MVNVVGIDVSKDSLDVVLVKDGRKQHKVFRNGKVGHRRIQNWLVSREAGQVHACLEATGQYGERISAYLYQCGHQVSVVNPARIKRYGESKLHRNKTDKADAALIAEFCQKEQPNLWRPLPEPVRHLRSLVRRLDDLQNNFQQERNRLLAGERNPWVLADLQAHLDDLQARIIAVRQAIQQHIDQNPDLKSQQDLLTSIPGIGQLTAARLLAEIGDITAFESAPQLAAYAGLNPMGSRSGSSVLKKTRISKQGRAFLRKLLYMPALVARKHNPVIHQFCLRLSQRKLPEMAIVAAAMRKLLHIVFGVLKNQLPFDPDFGKQFDFST

SEQ ID NO: 388749 - protein, 458 aa, unidentified
MYRELIPLRQALSVELKANLPPDIPGLDPEHLLQAYLDRLTMYVGGDVADQTFTLFAVDAAGNELGHLLDVPNTPAGFDTAWAWLEHLRCQHCLRIILLAIETSGVYYWAWWDFLAARPNLARVLYNPRTTEHMTEVLSKKVRNELVDAYALAEQVRLGSTPEVVPTEDADLLSARFCSRAARDLAQQVNRHKNQLRSLLRAYNPALGQVFPGAKLHHPAVYALLQHYLFPDEFVAVGVDPITTILSEHCRTAFGRDHAHQLVTLCAQTLTHPIGRPPIHQRVRQLTQDILSDQQHKQNFLKTGYTLIQDRTETKLLRAASGAGISNTLALVSELGGFSRFPDGEHMASFLGLTTSKHISGTTLFESKRITKQGSPNGRYAAVNLALHLKRHVPKYQQMYERITNRKPPHKGHFVALVAIARDFIANVLYDMWRHQRPFFEKVEDYRAYRQTHPRSKD

SEQ ID NO: 388750 - protein, 313 aa, unidentified
MSETGIYIGIDVSKSYLDVHAPSLGAFRVEYTDDGLDKLVERLSHLEIALVVMEATGKMESVCATFLSKAGMPVAVINPRQIRDFARASGRLAKTDKIDAEVIALFGVSFKPEPRKIRNEDEQRFDELLTRRRQMIGMTTTEKNRLGTVHDRKLHRRITAHIKWLEHELRGVDREMSNAIEASPVWRVKDALLRSVPGVGETTSRVLLAELPELGELTRKEIASLVGVAPMNRDSGAMRGRRTISGGRSVVRTALYMAALSASRYNPDLRSFYQRLVAAGKPKKVALTATMRKLIVMLNAVVARGTRWQPECP

SEQ ID NO: 388751 - protein, 465 aa, unidentified
MKSKTSKRKKQSKKVSIDAAWEPVNAHAAGVDIGSREHWACVPAEATPNNVRKFGTFTADLEAMAEWFQECGVTSVAMEATGVYWIPLFQILERRGFHVILANARQTKNVAGRKSDVQDCQWIQRLHTYGLLQGSFRPEDPYCVLRSYLRYRDELVGARSTQCQHLQKALQQMNVQLHHVLSDVTGVSGLAIIQAILDGERDAVKLAALVDRRVRASQETMQKALVGDYRTEHLFVLKSAFELYHTYEAKINACDEQIAREITLLPDKVNLTLKPMPAGKEGRKPFLDKMAGLDMRQELYEKLGVDVTGVEGIGVLTGLILLTEVGPNLSRFRSEKHFCSWLGLCPDNRISGGKVLSSRTRRVVNRASDALRMAATTLERSQSALGGFYRRMKARLGAAEAVTATAHKLARIIYRLIKHGEAYVRQGMEEYEKNFRARKLYALQKAAKTMGFELVPNQTLPSGVS

SEQ ID NO: 388752 - protein, 319 aa, unidentified
MHRTFIGVDVSKDHLDVHVRPTGLSRRFANTPAGITELLAFVRPHTAERILFESTGPYQKAAVAALLAEALPAVVVNARQVRDFAKAMNYLAKTDTIDAAVIAHFGEVATTTVRPLESQEIRDLRDLYDRRGQLVGMLAMEKNQRHSATVAQASAKVLKSIDKHIDYLEGQIQDLEGRMDRIIESSAAFRARDEILQTITGIGPQVSRTLLAYLPELGQCSRQVIAALVGLAPFNDDSGTHSGQRHIRGGRSKVRVGLYQAAIAAIRHCPRMKGFYAALKARGKASRVAIIAVARKLLVLANALVRDMVPYRAPANSVC

SEQ ID NO: 388753 - protein, 328 aa, unidentified
MNKSHFCVGIDVGKDELVVAVEQGKPRVFGTSMTEIRRLELWVLKQAGERQVHIGMEATGVYSRGVAATLSRYEQFTVSVINPAQIKAFGRAMLTRTKTDQVDAGVIREFVRSQSPSAWTPPQPVREQLSALVAQADAIQQEIQQWKNRQHAQQHHGNTPRTLTRSTATIIRSLERERQRLDDAINQLCETDTALTKDMALLTTISGVATRSAAQILAYGGDSLISRSRRQLDAHAGLVPAERQSGTSVRGKSHLAKQGNARLRRALYMPTLVAVQFNPLLKRFYQRLLEKGKAKKVALTACMRKLLNIIRAMLIKRTPFNPKYQPLT

SEQ ID NO: 388754 - protein, 342 aa, unidentified
MTYYAGIDVSLECSSMCLVDGSGKIVREAKVASEPEALVAWFGSLGFEVGRIGLEAGPLSQWLFAGLKEAGHAVELLETRHVRAAFKTMPVKTDRKDAQGIAELMRLGWFRPVHCKSMEAQETRAVLTARTLVQAKLHDIEMSLRGILRGFGLKVGRTTSNRFAGRIKELVGGHATLQVIAEALLGVHAALLREFKGFEKRVRMMAREDANTRLLMTASGVGSVVSLTYASAIDDPGRFKRSKMVGAHFGLAQKKYQSGETDITGGISRCGDESVRTALFQAAHIILTRPVKSSALKSWGHRLARRIGMKRAKVAVARKLAVIMHRMLVEQKPFNPAAGAAA

SEQ ID NO: 388755 - protein, 362 aa, unidentified
MPMLAELIDAVVGVDTHRDTHEVELALPTGTAIGTRKISNDNSGFAELLAWIGDHAPGPRVVVSIEGTRSFGVGLARAVAAAGLTVIECEQPNHKARRGKGKSDPIDAHLAVLAALRLDADRLPVPRADGDREALRILLGTRHELTVVTTAQTNRLRALLLGGQDTERDLARATLTDPVLLALVRRREPPQASREQAVRHGEIRRLAHAIRAGRHALAANRAQLQTIVDQMAPGLTERRGIGAVTAAQAIVSFSHPGRCRSDAAFAALSGTSPLQASSGKTVRHRLNRGGDRALNSAIHTIAITRIRCCPTTKNYVARRTAEGKSSREIQRCLKRYIARQLYRALNTSTTLTAQISAAPAAA

SEQ ID NO: 388756 - protein, 346 aa, unidentified
MKNYYFIGIDVSKKNLDCCLLHDGVALKQDVIPNHQKSIESYLSIVCEEQDIDAEQIIVCAEFTGLYINPLIIACQTDSYKLWMEDPTQIKYSSGLQRGKNDSIDAKRIALYAFRYFDRIKIYKKPSASIEAIKLLSTELNMLCVDKAKYQAQLSDQKEYMPNDIYKMKQKRLALLIKELEKAIKNIEDEIETTIKGDTLLSRQMELLLSIEGIGKKTSLKMILETQAFTKFSDSRKFCCHAGVAPFSYSSGSSQHSKNRVSQRANKSIKTLLHLAALSAIQNKNSELRKYYERKIAEGKNKMSVLNAIRAKLIARMFAVIKSDLHYKFEHINQYQNKNTVRGFAN

SEQ ID NO: 388757 - protein, 320 aa, unidentified
MQQPHRFIGIDVSKHALDVAVRPDGTTTQFPNTPEGIAQCVAFVTPFTPEVIVIEATGGLERAVTTALIVVHQPVAVINPRQAYNFAKATGQLAKTDQLDAQLLAWFGEALRPSLTQLKPEITQQLEALVVRAHQLIEMRTMELNRRDTAPAVLQASLNDHIDWLSEQIAAFEQETQSLIATHAEWQAQADLLQRVPGVGPGLTRTLLARLPELGTLTRRRVAALVGVAPFVRESGTLRGKRTIWGGRSDVRTALYMSTMSAIRWNPVITPYYQRLRAAGKTFKVAIVACMRKLLTILNAMMRTQTPWDENFCKKITSGT

SEQ ID NO: 388758 - protein, 395 aa, unidentified
MFIGIDVGKSDHWATALTGEGKKLFDKALPNDEAKLRDLYDRLSQQGRVLVVVDQPATIGALAVAVAQDMGLTVGYLPGLSMRRIADLTPGNAKTDARDAAVIAEAARSMPHTLRALNASDEDAAALSMLTGFDLDLARQVNQVSNRIRGLYTQVHPALEKVLGPWLEHDSVVEVIATWPTPAALKHAGRARVDAKLKAHGTRRHTAWAEAIINALGAQSVVVAGTDAAGVVLPHLARQLIALHAQRRDVAAQVEALVETHPLHQVLTSMPGIGVRTAAVFIAETLGHTFASGAHLASYAGLTPVTRRSGSSIRGEYTSHAGNKRLKRAMFLSAFASLRSDPTSRAYYDRKITQGKRHNQAVIALAHRRILTPHAMIRDGTLYNPQPTHQLPAAA

SEQ ID NO: 388759 - protein, 356 aa, unidentified
MSQKLDTSPAVIGIDIGKNSFHIVGQNQRGAIVLRQKWSRGQAEARLANLPPCRIGMEACVGAHHLSRTLKALGHDARLMPAKYVRPYSKGQKNDYRDAEAIAEAVQRPTMKFVATKTADQLDLQALHRVRERFVGQRTGIINQIRAFLLERGIAVRQGLRFLRAELPGILATRTDVLSPRMLRIIEDLAGDWRRLDERIGGLSSEIETLARQDQACERLMTVPGIGPIISSAMVAAIGTGDVFSKGRDFGAWLGLVPKQISTGDRTILGNISRRGNRYLRSLFVQAAWVVLVKIGPKHWDRYGLKSWIEAARKRLHHNVLAIALANKLARIAWAVLNKGRAFECVKTEETASRPA

SEQ ID NO: 388760 - protein, 436 aa, unidentified
MGRKRDRYLQVVHPHCAGIDIGAKEHFVAVDPQACETPVRHFGCFTDELEAMGRWLLECGVTTVAMESTGVYWIPVYELLERMGLEVHLVDSRASRRISGRKSDVLDCQWLWQLMSYGLLRSAFRPADAVCELRAYVRQHGRIVAERARTVQHMHKALTQMNIQVHTVLSDMTGKTGMRILRAIDAGERDGAVLARFRDPRVKASTETLARSLQGNWRDEHLFELHQALESYDLHCQQLKDCERAIARTAAKLSTGEVLAEVDPKDCAKHIGDAVQQLLGVDLTAIPTIGPDTALLIASELGPDLSRFESMAHFCSWLNVAPPTNISGGKKLPGRSKQRSANRVGQALLRCAVNARNSKTFIGAGHRARLRRLDKPRAVKATAHHLARLIYAMHTKGEEYVERGMQAHDEVRKQRELKALTSRAEKHGYTLVAKAC

SEQ ID NO: 388761 - protein, 339 aa, unidentified
MQVTTVGLDLAANVFQVHGVSENGEVAFSQALRRAQMLAFFERLPPCLVGMEACGSSHYWARQLSKLGHDMRLIPAMYVKPYVKRGKSDAVDAAAICEAVTRPTMRFVAIKPEEQQGVLFLHRARDLIVRQRTQLSNMLRGLLAEFGIVIAQGIGSAVRFAKGVLDGDKPGIPEVAIDVLGNLSNQLVALHLRVRWYEMRMQLQARQDPRAMLLRTIPGVGPVTASAIVATAGDASQFRNGREFAAWLGLTPLNRSGGGKEKLGRITKMGDRYIRRLLVAGMTSRPRQMKTHPDRVDPWSRALLERKPVRLATVAMANKTARIIWAVLTRNQHCRPHMV

SEQ ID NO: 388762 - protein, 418 aa, unidentified
MEVVRGYVGIDWATEAHQVCAMDAGGAVRWERSVPHSGAGLGLLSDWLAELAQGSPATVCVAIEVPRGAVVETLLERGFSVFAINPKQLDRFRDRFSVAGAKDDRLDARVLATSLRTDAPRFRRLRAEAPEVIELREWSRLNDELKQERNRLTNRFREQLRRYYPQALSLTNDPAEPWFLDLWQRLPTPQAAQRVRETSVRAILKAHRIRRLKPAEVLARLREQPVIVAPGTAEAAQAYLQMLLPRLRLVTRQIGEAEHRLEGLLQAMMDSTHNQTEPKNKQRDATILRSLPGVGSVVLATLLSEASQPLAQRDYHTLRALCGVAPVTKQSGKRRVVVRRMACHPRLREALYHWARVASQHDPLSRTRYTAFRARGHSHGRALRGVGDRLLYVACVLLERGLLFDPGYRRDGNQPAAA

SEQ ID NO: 388763 - protein, 408 aa, unidentified
MKDSRKRYIGLDVHKHYLIAIGVDDDLNVVLPVRRVEFSYLEAWMKKTLTNQDSVVLEMTTNTWQLYDELCVYAGSVLVVHPPHVALITRSLVMNDKIAASILARLLAKGLLVGVWVPPQEIRELRGLVAQRKKMTGLATQAKNRLHAVLQRHHWLPPEGNPFHDAQKKWWLTLPMGPLEKVNVESDLETLQFAEKQLMQLTSMMAEIANQNEEVTRLLQLPGFGVVTAITVWAAIGDIQRFEDPQHLVGYAGLGTKIHDSGMTSRSGRITKAGRRDLRVVLTEAAQVAANSHPHWKAELARLQPRLGRNKAIVAIARKLLVAVWYILAQHKTDRFAQPEAVAQKLLKFAYQVGKEHRPAGQSAAQFVRQRLDVLELGQELTSIAWGSKKPIPLPPSTNKVSDVPNTK

SEQ ID NO: 388764 - protein, 330 aa, unidentified
MLGPVEGVVAEGGVKTTEASLRVLFEGKGRMRIALEAGTHSPWMSRLLIALGHEVLVANPRKLRLIAESDAKHDRADAQLLARLAHVGPALLAPIHTRSAQTQIDLTLIRAREVAVQTRTKIVNAVRGMVKSTGQRLPPSARLTFARKATEACPKVLQPALLPLLRLVQTLTDDIAAYDRLVVEKARAYPETAAIQTIPGVGALSAVAFVLVLNNDRSRFKRSRDVGCYLGLKPKQRDSGRQSPQLGITKAGDPLIRRLATQSAQYVLGPFGRDSALRRWGLVLASRGGKNAKKRAVVAVARKLVVLMHRIWITQELYDPMRGIRVRPAA

SEQ ID NO: 388765 - protein, 402 aa, unidentified
MAAGQLWAGVDVGNEHHWVAVVDSAGTMVLSRKLANDEQQISKLVAEVDRLGAQVSWTVDLTTVYATLLLAVLAEAGKSVRYLSGRSVWQASVIYRGGEAKTDAKDARVIADQSRMRGDDLPVLHPDDDLVTELRMLTAHRADLVADRTRTINRLRQQLVAVCPALERAAQPAQDRGWVALLARYQRPKAIRHSGITRLTRVLADAGVRNAPMIAQAAVTAAKTQTVRLPGEEVAAALVAQLAQGVIALDERIKQIDADIEDRFRRHPLAEVITSLPGIGFRLGAEFLAAVGDPALINSADQLAAWAGLAPVPKDSGKRTRRMHTPQRYSRRLRRVMYMSALTAIRCDPHARSYYQRKRNEGKRAVPATICLARRRTNVLYALIRDNRTWQPDSPPITTTAA

SEQ ID NO: 388766 - protein, 458 aa, unidentified
MYRELQPFREALSQELKARLFPAVAGVDPNKLLETYLDRLTMYIGIDVADQTFTALAIDAGKEILGSLERCANDPGGFQRFVTWARSLRDQHGLRILVIAAETTGIYYWSLWDFLGEQTDIARVLYNPRTTEHMGEVLSKKVRNELVDALLLAEQLRLGSTPEVLLQDDADLLTARYYSRAARDLAQQINRRKNQLRALLRAYCPPLSQVFPGSKLHHPAVYALLQENLFPDEFVRAGTQALATTLVTHCDTAFGLSEAQQLVEACRQALSRPIGRDAIRLLVHAYTKDITTFQQRKAFYLKTGYALIDDRPQTKLLRTVKGAGVSNTLALVSEIGDVQRFPSGEHLASFLGLTTSKHISGTTLFQAKRITKQGSPNGRYAAVNVAQHLSQRVPRYQAMYRRIKQRKPPGKGHFIALVAIARDFVSNVLYDMWLNQRPFFMEVSDYRAYRRQHARANS

SEQ ID NO: 388767 - protein, 373 aa, unidentified
MPKYSTAFGMDVHLRSTTVCALDADTGEAVTRRFPGNPWGEIAGWMDGFPGPSLAAYESGYLGFAPQRELAGLGVECVVAAVSKIPRSAADSASKNDRNDAARMAKAILAHDISPVWIPSPEVEGIRDLAGAYDGATARLATAKQRLLAFLAKRGFVYGGTTPAGNPRKYWTYDFLRWLDKVRPEDDGGVRTLAALRNEVEAAAEARADLLSEYRAAVDASPIAAEVAALQSIKGCAFALAAAFSAEVGDFTRFRSGRQVTAYFGLAPSQRSSGDSVRLGGISGAGNALVRKLAVEGSWCYAAARHQPKLMPRDTGVPLEIRMHGRKGSERLLRRRKEMLAGGVPAAKANAATAAERVRGLWALGMMCREGAE

SEQ ID NO: 388768 - protein, 335 aa, unidentified
MKFTHFLGADISKGKLDFCLFDGESILISTDCTNDHKPMKIFFQQLIKHQLISKDNLVICAEHTGRYGFHLMHVATELGLNLWLENPATVKWSSGVQRGKNDKIDAERLAVYAYRFIDRVKLYNPDNEVIGELKQLNAERELLVADRAKYTGQLRDQARFTPKHIFKQKRNRLERLINVLSISIQEIERQIEKLISNNLVYKQQFDQITSIQGIGTQLAVCVITTTHGFTKFKDPRAYCCHAGVAPFAYTSGSSIRSGWKVSHRANKRIKSLLHMAALSAVRYNLDMKAFYERKVKEGKSKMSVLNAVRAKLVHRIFAIIRDNRKYEDFYVNSLG

SEQ ID NO: 388769 - protein, 362 aa, unidentified
MAQVRSWVGLDVHRASVVAATMDRDTGELRVRRLPGETREVVAFCVALPGPTRVAYEAGPTGFGLARALVAAGVQCVIAAPGKIERPSSDRVKTDQRDAERLLRLLMIDGLHAVRVPSSEEEALRDLVRAREDIRGDLMRARHRMSKLLLRHDVRFDGTAAAWTTHHRRWLGAVDLGDRGAQITLLDYLGAIDALLIRRDTLEHTIDELVPDSPWADTIARLRCLRGIDTLSAVGLCAEIGDWQRFPKAGHVMSYLGLVPSEDSTGQTRRQGSITKTGSGHGRRLLVEAAWHYRRAPAKGQALKRRQAGQPAHVIAISWQAQQRLHRTWRRLDTERGKRRTIVAVAVARELAGFCWAAANAD

SEQ ID NO: 388770 - protein, 364 aa, unidentified
MKIIGCDFHPSFQRIAMVDTETGELVERTLLHADGEAQRFYEALGGEVLVGLESSGNTLWFERLLEKLGHKLLIGNPTAIAAANPRRQKCDPRDARHILQMLLEKRFPAIWVPSMAERDVRQLLKHRHTLVQMRTRAKNQLQHIALNQGVQKKKQLWTKAGLEQFQNLPLEPWTKRRRDDLLKILEQMDGHITKLDQAVAAEAQRWPKAVLLMTHPGVGPIVALATVVTLGDVSRFARGKNVASYVGLIPSEESSGEHRRMGAITKQGNSFMRFLLVQGGMSAARGDAELGRAYKRLCQKKHHGVAKVAIARKLVVRLYWMLRTNTRYPEVVRMRGSSSHSVAAGTAERLSGHPASHGSISPGQ

SEQ ID NO: 388771 - protein, 388 aa, unidentified
MLPSIHHAPTEQTAIVGSDLTLYASLELSRATWLVTCLLPERDRMSKFSTPGGNGGALLSLLERMQARAQQLTGRPARIVVIQEAGLDGFWVHRLLEAKGVESHVVDPASIAVPRRRRRAKTDSIDGETLLRTLLAWKRGEPRVCAMVVPPTPEEEDRRRVCRERAILLRERIRHTNRIKGLLAGQGITGFNPLHKDRRQLLDAASTGDGRPLPNQLKAEILREIELIELLLRQIADVEAAREVLAGPKTAKSPSPVVVLKQLKGIGPEIASVLYLEGLFRSFGNRRQLAAYAGLAPTPWRSGTVDQEQGISKAGNPRLRSTMIELAWLWQRHQPDSALSRWFRTRIGAERGRIRRIAIVALARKLLIAIWRYVTQGEVPEGAVLKAA

SEQ ID NO: 388772 - protein, 344 aa, unidentified
MVTFGVDAHNRTHTIVAVDDHGTPLGQTTIGTTSKDHLGLVRWAARFGAERRWAVEDCRHLSRRLERDLLGAGEQIVRVPPKLMAHVRDSARTYGKSDPIDALAVARAAQREPDLPAARLDGPERELRLLVDHRESLVAERTRLICRLRWHLHELDPGWEPKARSLDSQRTLDAILGRLADQPGLVARLARELTNRCADLTVSINALKVEIAELAQQLAPALLAIPGCGALTAAKIVGETAGVDRFKSRDAYARYNGTAPLPVWSANKARHRLSRTGNRQLNAALHRIALSQARWHPPAQALIERRRSGGNSGREATRILKRRLSDAVFQALQTDQFEHSSLAA

SEQ ID NO: 388773 - protein, 315 aa, unidentified
MMSTSPSVVGIDVSKQHLDVHLLPEGRWLNFTNDPSGRQALIEALASRQVQCVAMEATGGYEMALAVDLDQAGLPVAVLNPRWVRDFARAIGRLAKTDKIDAQHIAQYAQKVQPQPRPVPDATSRRMQALVARRRQLVELHSAEANRREHAEDRDISRSIQTVLKALERQIERLDRLLAETIQASPLWREKVEQIESVPGLGRQTATMLATRLPELGRMNRREVAAMVGLAPINRDSGQYRGKRMTGGGRRDVRAALYMPLLSAIQHNPVLRRFYRRLVEAGKAKMVALVACMRKLLVILNTMLKNNEAWKPKMT

SEQ ID NO: 388774 - protein, 348 aa, unidentified
MIIIGVDFHPEFQQIALVDTDTGELQERRLEHREEAETFYRALAGQQVRVGMEASGHARWFERLVAELQFELWIGDAAEIRTKRVRKQKTDRQDAQLILRLLLEDRFPKIWVPSWENRDLRQLLWHRHRMVQARTRIMNQLQAVALNEGLRCKKRLWREHGREQLESIRLAPWASRRRRDLLELLDRLNPTIAELSQAIEQEVEKCREAQRLLTHPGVGPLTALAFVLIIGRAERFQCGKQIASYLGLVPLEDSSGKRRRLGHITKQGSSMLRFLLVEAAQVTARSIPDWRSKYFHLAMRRGRKIAKVAMARRLAIQLFWMWRKGWDYEQVKRFGSHAGQPGTGDGVQ

SEQ ID NO: 388775 - protein, 343 aa, unidentified
MAIVILGVDLGKNSCSVVGVDGTGAVITRRSMRRQTLIGYAAKLPACMIAMEACCGAHHLGRLFEANGHQVRLMSPEYVRPYVKAHKNDDRDAEGIAEAASRPTMRFVDIKTQEQLDVQTLHRVRSRLVAERTNLINQLRAILLDRGIIFPAGRRKLEQGVDSLLVDESSILSSRIRQLTGDLRQEWKELDVKIEGLNGEFVNLTRTDDNMRRLTSIPGIGVLNATALVAAVGDGRSFAKARDLGAWLGLVPRQHTTGGKPRLLGISKRGNTYLRTLLIHGARAALPVLSQNNTPLGHWLKAMIERGVHRNAVVVALANKLARVAWAVLRRQKSFECGYPVAV

SEQ ID NO: 388776 - protein, 387 aa, unidentified
MPQRNDLSRSLLALDQNSTIIAVIEMSRSNWLVAGVIPGVDRQPLKKLEPDEEGLLHLLRRWQDEAARAGRTISRMAVAFEAGRDGFWLARWLRARGIEAYVIHPASIPVSREHRRAKTDRLDTELLKRAFLGWLRGEPNHCSMAAVPTLEQEDAKRPNREREVLVGERTRIVNRMKGTLARLGIRGFKPALPRAPERLETLRTPEGATLPPNTRAELQRDMARLRFVTDQIRELEAARAERLEHAPETGPNAMIRLLARVVGVGIETADMLVQEVLSRNLRDRRAVARYAGLTGAPDESGAKRREKGLAKAGNARVRRGMIQLAWRFLLFQKDSALSQWYRARTTDARGATRKTLIVALARKLLIALWRFGATGEVPQGVVLRPAA

SEQ ID NO: 388777 - protein, 392 aa, unidentified
MSQHCHFDASRSLTTLEQDSTIIAVIEMSQTKWLVAALIPGVERQPLKKFDAHEETLLKLLHRWRREAGQAGRNIKRIVVAFEAGRDGFWLARWLRARDIEVYVIHPTSIAVSREHRRAKTDRLDTELLMRVFLGWLRGERRHCSMVAIPTIEEEDARRPNRERQTLVTEQTRIINQMKAIFARFGIRTLRPTMRKVAEKLEDLRTAEGTPLPQNTLAELRRHLARLRIVRDQIRAVEQERLRKLAVASAAEKKSPHAMVRLIARVLGVGVETADMLVNEIFSRHWRDRKAVARYAGLTGSPDESGSRRRERGLARAGNVRVRSGMIQLAWRFVRFQKNSALAQWFAARTADGRASTRKTMIVALARKLLIALWRLVTRGEVPQGVALRPAS

SEQ ID NO: 388778 - protein, 377 aa, unidentified
MSKDTLYVGLDTDKKHIDVALAEALPGGEVRYWGKIANEASAVARLVKRLRAGGRPLEMCYEAGPCGYGLHRLLDGQPGVRCRVVAPSMTPRRPGDRVKTNRRDAIALARLLRAGELTAVWVPDATHEAMRDLVRARGAGVADLVRCRQRIAGFLLRHDIRYVGKPWTKKHRVWLGQLVPARALPAHRLMLGEALQALDEATARRARLTDHIAELVPDWSLAWLVDALQALRGFALINAATLAVEIGDPRRFAKPSQLMAYLGLVPSEHSTGNSVRRGGLTKTGNGHTRKALIEAAWTYSRPPRGPLDGARYAPAVAAIAAKACHRLSLRYRRLTNTRGKRPVIAVAAIARELSGFVWAIAHAAGPAAATPERSTQR

SEQ ID NO: 388779 - protein, 300 aa, unidentified
MKNSSGKLSYIGKKVFVGIDVHKRTYSVVTVVEGVIVKKWTTAAIPEKLAIQLGRYFPGAFIHTAYESGFSGFVLHRVLSKAGINNLVVNPGSIEVAVHNRVKTDKRDALKIATLLEVGRLRGIRVPTQQQEQQRLLTRTRQQLIEDRTAIKNKIRMKCHQMGLINPDDHREMSHKLVGELLSRTNSPELSLVIEAYWQVGKSIETQIKKIEQQLNEQAKVDPNETIYRSAPGIGPLSSRILSNELGDLSQFANERQLFSYTGLTPSEHSSGDTIRKGHITRQGNSRVRYIRVASGLASH

SEQ ID NO: 388780 - protein, 340 aa, unidentified
MNSTVIGIDIAKRVFQLYWVDIETGEIVSLQLKREKFLAYFVNRQPCLIGMEACGGAQHWARELIKLGHEVKLLAGKFVKSFVMGNKSDAADAKAIWIAVQQPGVKPIAIKTEQQQAILALHRMRQGLIKVRTMQVNALRGLLTEYGEVMPQGKAGLRKGIAVALERTAERLPGIVIEALREQWQRITELDTQMVEIERKLQSWLKSNLAAKAIANIPGVGLLTATAAVATMGDAKAFRSGREFAAWVGLVPKQTGTGGKTRLLGISKRGDTYLRTLLIHGARSVLMHAKQPGAWVDELGKRRPSNVVVVALANKMARTIWAMLAHERAYQGDWVSIKPA

SEQ ID NO: 388781 - protein, 395 aa, unidentified
MKHILSFDIAKGKSVYCFIDELRNVIIDASLIEHKKDEFDNLFNLIKDYPNLIVVMESTSVYHLPVETYFRSKGVDTVVINPKLVKQFKDTLNKSKTDKLDCFKIARCYLGTIDNFYQKQDEYFMYSPLARQYWSLIEGQTRLKNRYRQLIDIVFPEFVLIFNDLYDDLALNFIHDFPHPVLFVNRRIDYLMNYLKEKNGTTQAYRFKNKVLKMKEFASNSLCFVAFDSYQVQNLVQVIEMIQYHKSEINKIKKQLINDMKDKELFKIINSIPGFGEFSTALFLAEVGDITRFDDKYQFISFIGIDSVTSQSGVSAYHGPISKTGCKFGRTILFNIVTTILQISAHTDKTNPIYLFFRKKQSEGKHHYKCIIACETKLCKIIYKLCSSNCLYENK

SEQ ID NO: 388782 - protein, 323 aa, unidentified
MTQVSVKGNMKFVGIDISKHKLDVCFNDNTTISLSNAEGGFGKLMKKLPPPEECLIVLEPTGGYEKSIIVSLQKKYYNVVLANALKVRRYAEAMGFLAKNDPIDSYVIKSFGEDLYPKGKLAVLVPKTDEFRQLELWLGRSRQLVKLIAIEKQRVEKAFDKMIIKSMHRTIRHLEKELKQVEQKIEKMSDKCQLSEQAEKYKTVKGIGDVCANALVTYLPELGVFNHSQIAALVGVAPYCHESGKSQGKNKIRGGRKILRSLLYMGTLTAIAHNPAIKVFYDRLMRKGKHHNVAMIACLRKLLCILNAMTKNDTVWQENYKVA

SEQ ID NO: 388783 - protein, 410 aa, unidentified
MEAIIKRCCGLDVHQATVVACLISSVAGKKPSKVIKTFSTMTRDLIALRDWLLAQGCTHVGMESTGIYWIPVYSILEGHFQLIVGNAQHIKNVPGRKTDVKDAEWIADLVRHGLIKPSFVPDKPFRELRDLLRYRRKLVEGRAAERNRLIKLLEQANVKLSGVATNVFGMSGMLMIKAIVEGKATPEQMAQLAKGKLRSKIVELELALDGRVEEHHRFILIIQIQRLERLDCDIETLEQRIKEKLTPYQKQHELLMQIPGVDWIVGAVIIAELGTDMSVFGTAERAASWAGLCPGNHESAGKRLSGKKRKGNLFLTINLVEAATAATRAKGTYLKDKFYRLKARRGYKRAAVAIAHKILVSAFHMLSTGTPYHELGDTYLDKMDKNRVAANLVRRLQRLGYEVVVKPKAA

SEQ ID NO: 388784 - protein, 353 aa, unidentified
MLAELVHHVIGVDPDRDWITLAVVDAHTTGVTAHDRFPATAVGYAEAVEFVAGHSVDTERAWAIEGTASYGCGLSVALSRLGEWVIEFDRPTRKTKDGAKSDHLDAVRAARETLGRDRLSEPRAHQGAREAIRVHAVTRAGAVRARTAAINELKAMIVSADEELRGSLRGLRTSQQVARCARFRERASMSIEGRGTRLSMRALARRIEHLNDEIDDHDRALKALLDDTAPQLLTERGIGYITAAAFYLAWSHPGRCRSEAAFARLGGTSPVEATSGQKQTCHRLNRGGDRQLNRALYLVAVTRRRCDPATRAYIARRAADGISERFAIRCLKRFIARRVWRLLEHPESALDKT

SEQ ID NO: 388785 - protein, 433 aa, unidentified
MTVKYEDRLKQKLLAITTDTLVVGVDIAKNYQWARFVDFRGIEHSHALKFKNSKNGFETILARIQKICKAENFAKVVVGMEPTGHYWKAFANWLNKQEGITVVLVNPYATKQAKELDDNSQTKSDKKDTLTIAKLVKDGRYFELYMPHDVYAQLRGLSTTRTGLNKRKNALKNTVTAVMDEYFPEYAEIFKCPFSGKASRHILKTCPFPKYILELGKDGVTEEIKKAVKKTVGRKKAVELVEAAGESIGVDYGEEAARMKLRLMLEELELLEKQTEELEEQMKAALQKTDYAKFLLSIKGIGVVTLAACLGELGDPTRFDSPRQMSRMAGYNLVEDSSGKNKSGTKISKRGRKNLRSVLYQMALTMVATNDEMRQLYHYLKAREKAPLRKMQALIVVSKKILTLIHTLVKKKENYDPDKVFGYVRREQLKGAA

SEQ ID NO: 388786 - protein, 342 aa, unidentified
MKFYCGIDLSARDCHVCVIDEQLKVMVQQKLRNELPKIVQLLEPYKANLKIVVESTFNWYWLIDGLQAEGFEVMLAHTLGLYLITGAKVKTDRRDAYSLAKLLLVGAVPAAYIYPVETRPVRDLLRRRMHLVQVRAGEYGSLRRLLLRQGILSSKQQEIKTATEAELEHWFAHPLVRLHASQELQRIELYSQQIAELEKTILALAKTEQSYELLLKLPGVGQTIALTILYEVGELSRFANVKVFSSYCRVVPGIAQSGNVSRRGRASKQGNHYLKAAFSQAAVHAVRCYPKVRRYYERQLKRHQGRGRQMICYNIIAHKLAQAAFHILKEQTEYRAELLFGR

SEQ ID NO: 388787 - protein, 424 aa, unidentified
MAIRRRTNKVDINALVDLYERCAGIDVHKETVTVCVIRPGTDGSAQGEMATYGTTTRELRQLSQWLQECGVTHAVMESTGVYWRPVWQILETGGFRLFLANAKQVRNMPGRKTDQADAVWLATLLRKGLIKGSFIAPPQIRALRDLCRSRASLVHDRTRVVQRIEKVLEEANIKLDTVASDLMGVGPRMMLEELIQGETDTTKIAELALGRMRSKIPQLVGALEGYFRPHQTFLLKQLLSQFDDLCRRIERFEQQIEEYSRPFDKQVARLDSVPGIDRLSAAAILSETGVDMDPFPTPQQFCRWATIAPGNNKTAGKQRSGKIGRGNRWLRGSLTQCAWAATHDKNSSFAAQYRRLLHRGKGRALVGVGHSMIAAIWHMLRRDVEYRELGADYFEKQNLEGLKKTYLKKLERLGFKVSLEPVAA

SEQ ID NO: 388788 - protein, 314 aa, unidentified
MRTQVFVGIDVSKAQLDVAFRPEGRFSAPNDEAGCAQVLERLRAVPPTLVVLEATGGLEIPLTGVLAAAGVPVVVVNPRQVRDFAKATGRLAKTDTLDARTLAHFAQVMRPELRPLPDEQTQALAAILARRRQLVEMLTAEKNRLGSAPKPVRKSLRTHIAWLERELSHTDSNLAHAIRESPVWREKDALLRSTPGVGPVMTTTLLANLPELGTLTGKQIAALAGVAPLNRDSGTWRGKRTVWGGRAQIRATLYMAALVAARFNPVIRAFYQRLCATGKAKKVALTACMRKLLIILNAMLKHRTPWRTELVQCA

SEQ ID NO: 388789 - protein, 355 aa, unidentified
MNSEKYIGLDVHQATISVAVMDSRGKVVIESILETKAATLLEFLAGLRGTLSVTFEEGTWAAWLYDLLKPRVQKLVVCNPRKTALLKDGNKNDRIDARKLAELLRLDNLKPVYHGETGVRMLRELARSYLTLVKDLTRVMNRLKAMYRSWAIPCAGRDVYYTRHRAEWLSKIREAGVRRRAEHLYQQPDMLQHLRQQARRELLAESRKHVITAKLRQIPSLGPIRAALAVALIQTPHRFRTKRQLWAYSGLALETRTSGEHCYVQGQLRRSKKQVSIRGLNKDHNHDLKGLFKAAATRASVQPGPFQDFYERSLAKGIKPTMVRLTLARKIAAITLTLWKKGENFDAEKLKSQAA

SEQ ID NO: 388790 - protein, 406 aa, unidentified
MRGPVITVDVSKGSCHYQPFLEKGKPFRKPKVLHDTIEGFADLQAVIQKVKEKSGCDAVPVIFEATGIYHRCLQKYLDDHEMPYYIISPLLSAAYRKTNLHSNKTDDLDCAHIAKAYYDEGKLFPYQKQKDLFIRLQRLNRYYEVELNHLRMYKVTFRSYLDIIYPRMDKCFKGHSSLYDPVAMEVLKKYPHPSLLLKHKEETIVKAIVKKTNHKLAFVYEIVHRMYECATRCYSGCDITEIEVIKLPELIEQLQSQMTLCDSILSELVEEARAVPYFASIRSIVGIGDNLAARIIAELGDTSRFTNRRAIAAYAGLNPKIRQSGDVDGTHLRISKKGNRHLRCLLYLGASCNYRLRKNDPIYQFNQKKRQQSQCPLRSKAANIAAAHKLLVVIYALSKSGELYRS

SEQ ID NO: 388791 - protein, 344 aa, unidentified
MKHFVGLDVSLAETAICVVDQDGIITAEGKSPSDPDAISTWLRNAGVEIDRIGLEIGGLSRWLCIELKALGWPAFCIDPRRLRGVTKTMPVKTDRNDARAIAQVMRVGWFNVVHIKGAQSQELRMLLANRKALLTKQIDIENEIRGTLRVFGLKLSGRIQHAAFEQRALDLLADRPRLAAIMRPMLIARTALRDQCAVLHRMLLQIIRKDEVCRRLMTIPGVGALTAITFVTTVDDPARFERSRDVGPHLGLTPRKYASGEVDRNGAISKCGDGLCRSTLYQASLSLLTRTQRWSSLKAWGMSVAKRRGLRRAVVAVARKLAIIMHRIWTDGTEFRWSREEATA

SEQ ID NO: 388792 - protein, 346 aa, unidentified
MLHLGLDLSRKCVDFHLLDEGGETLEIGAAPPDADGLRQLARRLSRHGQPLRAAIESMTGARFVHDQLELSGLEVEIADAVKVKGLAPLACKTDRIDAWVLAELSRLALVPAIWLPDPAVRGERERARFRLHLVRKRTSLKQRVHATLMSHGVPCLVSDLFGAAGRCLLASLALPEPWVGTLEASLRLVDELEREIEAIERELRALGAAHPYVPLLETVPGIGWVLGYTIAAEIGDIARFPSPAKLAGYTGLCPRVYQSGESDRRGPLSKKGPRYLRWALIEATMHASRHPAFHERYERTKRRLGTQRGAKVAQVDLARRLAEAIWHMLTRNRPFAPAGATAPMTA

SEQ ID NO: 388793 - protein, 384 aa, unidentified
MYKHNILFIGLDTHKVSTEVAHVEDHRGVKPVHCGKIKTTKAAITKLARQYQSKYPQATLHFVYEAGPCGYWIYRLLTSLGHCCYVVAPSLIPKKPGERVKTDKRDALKLAKLIKDEELTPIYVPESEDEAIRDLSRARETAMKDLKDAKYQLKALFLRNNITCKVNDNWSLQHLRWLTELILPHPSQQIVLQEMIQIITERIQREKRLANELFHQVKSWRYYPVVKALQAIRGVRLLIATGLVAELGDLRRFDHPRKLMAYLGLVSKEHSSGDKRRLGSITKCGNSRARRLLVQGAHTYKHNAKISTELQKRQEGLPKEITDIAWQAQLRLCRRYNRLLSRGKHRNVVVIAIAREMAAYLWAIAREVVITPVNTRLRISRVPA

SEQ ID NO: 388794 - protein, 290 aa, unidentified
MIQSALIGIDLGKHNFHLHSQDKSGREVFRKKLSRAQMMQLFGNMPSCVVVMEACAGAHFVARQLAAMGHTAKLISPQFVKPFVKGNKNDFVDAEAICEAASRPSMRFVTPKSESQQTLSVLHRMRESLVHDRTKTANQMHGFLLEFGVSLPRGLTIMKRLTNVLAEHELPVRLTVLLQRLHDHFVYLDEQIKVLDKELASQLADDDLGSRLLSMPCVGPITASLLAVEMGDAKQYRCSRDFAASVGLVPRQYSTGGKANLLGISKRGDKHLRQLLVQCSRVYMQRLEHQ

SEQ ID NO: 388795 - protein, 341 aa, unidentified
MKNYIGLDAHSASCTFVNLDWQGNMISRTRVETTESNLINFVQSQKGEKKLTFEQSGLSKWLYTVLKGQVDELIVCNPVFLSPRSGPKNDYRDALHLADELRCQHLTPVYIEDNELMTMRTLVSSYTDVVREIVRAKNRYKALFREEALVTHGQTIYKKPERISELSQSTHRFVATNIMDNLMFLEEIKSKYLKEFRGNMKKYEVLRNLDSVPGIDVIRAHVIAALVCTASRFENKHKFWAYSMLVKYTQESDGKVYGRKMVHGRRELKNVFLGSAMRILKGKSSMRSFYDRLRSKGLSDGAARYDVARKIAAICLSVMRQNRKYKDKYEEEQKRLKKKIR

SEQ ID NO: 388796 - protein, 351 aa, unidentified
MKYYTTETEFNCGIDLHAREMYACIMDRQGNKVVHTNIRGNDFSYFLKKAAPYRHSMTVVSECTFNWYWLADSCYEAKLPFVLAHALYLKHIHGGKNKNDRIDSEKLAHLLRANLIPQAYVYPAERRPVRALLRQRMSYVWQRGSLMAHIATNQMAEGLKPASRTGCNRDDWMERVLIQYENPLHRLSASCEMDMIRAYDVQILKLEDEIFKYAKGHEGNYYALLNTVPGIGRILAMTIIFEMDTVERFPSVGDFLSYSRLVKGSVASAGKFKGLAGGKMGNAYLRWAFGEAAVLGKGHHPLLAPYADRLIAKHGKFKGNAILASKLARCVYFMLQNGTAFDAEKLVATSL

SEQ ID NO: 388797 - protein, 277 aa, unidentified
MAVIGVDIAKRSFDLAVLQSNGKHRTKGRLSNDPSGFAVFADWLQQHAEPGAWIVMEATGTYHEALAEHFHALGYRIAVLNPAQIARYAQSQLQRSKTDKLDAKLIATYGQRHEDSLRAWHPEPVSIRTLRALTRRLEDLQSLRQMELNRLEVSPEKVQDSIQAVVQRLDEQIAWTLEQIKRHIDDDPDLSGKRDLLVSIDGIADKTAALILAELGDIGRFADARAVTAFAGLNPRLQESGLYRVVYAIGQSAAEAQRVTRPTRRPASSTSTPAQEA

SEQ ID NO: 388798 - protein, 352 aa, unidentified
MARLTGEADVIIGVDTHLDSHTAAACSTTGRQLALTQIPATPAGYAQVLAWARAAAGGGRVAWAMEGTRSYGAGLARYLAAEGEQVTEIDGSRHLGKRRAGKSDAIDAVRAARELLARPHPAQMRADGEREALRLLLIGRDHAVQAAKAARTALASILVTAPAPLREQLRRLPAKRRPAACAAWQCPPGADRVTATTCQVLASLGQRVTALTAEAAHAEAQIAAIVEGMAPGLVAAEHGVGALTAARILLGWSHPGRIRSEAAFAMLSGSAPVPVSSGRTSRHRLNRLGDRQLNCALHTIALTRMRSHPATLAYVARRRAEGKTDREIRRCLKRYLARHLYRELNRRARPAT

SEQ ID NO: 388799 - protein, 391 aa, unidentified
MNQTKGKRIIGLDLHPDVFAAAALVGPDAGQARAEWVQDRQATAGLEAWAKKWLQPGDVVVLEASGNSFAVAGRLHDCGHTALVLESAQAGKLRDNFCNDDRHSAVKLARVYLSGLAKTVWQPDVQTREYREVFFAHRNAVKDATRCRNRIHSFLNEHCVRLPSGVRLTTASGEATARAAKAWTPLQADLVAQKFAQLREVEGRRQQLERTMVRELAAQPRRASLWRLMGIRHRVAFALMAMVGDIHRFPTPKKLVGYFGLAPRKDQSGNDRAGTDQGVGRFGRGDVRGLLLQSAHNALIQRDSPLHKWGWKLLIRKHRNQAAVAVARKLTVSIWHLLMGHFTPLVETTAHLHAKLLKLATILGKSMLLSLGFADRDAFVTAQIKSLQLST

SEQ ID NO: 388800 - protein, 343 aa, unidentified
MTNFVGLDVSQKITSICVVDDGGRRIWRGQCASRPDDIERIVRKQAGGDARIGIETGPMTPWLVHELRRFGLDPICLDARHARAALRMQLNKTDANDAEGLAHIMRTGWYRSVHVKSYVAHRARALLGARAQLVGMITRLSNHIRGVLKIFGLLPGGMRGLSFATRVETLLADRPDVIPIVSPMLAAWRQLRAQVTAFDKAVHAIVKSNPDCRLLMTVPGIGTLSVLAYVSAVEDPERFRRSRSVGAHLGLTPRQYQSGEVDRSGRISRCGDGLTRTLLYEAAVVILYRVKRSSPLKDWALAIAKRGGAGKARIALARKLSAILHSIWRSGVPFRWAEGSVPA

SEQ ID NO: 388801 - protein, 344 aa, unidentified
MPMYQLGIDVSKNTLDLCLLREGIKGRIKTRKLKNTADAAKVVAEWLKKQSCELGEVHIIMEATGVYHEPLAYGLHFAGARISLANPHRTREFARGMNILTKNDKVDAWMLACYGSLKEPEAWTPPPESVRYLRALLRRRDALVADSTREKNRLEKSVFTDSPDAVRASIENMLQELSNEIEHLDVLIQEHIKTHPELNQDFRLLTSIKSVGYLLGLNMLAILKSHSFESAEQAAAFLGVVPVERRSGTSVKGKPKLSKIGPPEIRTKLYLAALCGLRFNPVMKQMYTKLCQRGKSKMCAIGALMRKLVHWCYGVLKTQLPFDAEHNQQSYYKTTCYSTPSEQC

SEQ ID NO: 388802 - protein, 415 aa, unidentified
MHIFEELTHFAGFDWAKDHHDAVILDRTGATVQSLTFAHTAEGWAQWREMIKAHPALGVAIETNQGAAVEQLLQSQVTVYPMQPKAAERYRDRHVPSGSKTDQTDAWCFADALRVDGQHWRPLAPEDPLTEELRLLCRDEVELITQRTALVNQLQQALYEYYPAALEAFDDWTAPYAWEFVLAYPTAELLVKAGKRKWEKFLHTHKLWRPDTAPKRLEIFGRADRFCGPEAVTRAKSRLAVSTAQVLRTLQRQLEEYRSAIEKLFAQHPDHDLFGSLPGAGAKLAPRLLSEIGTDREQYPDAQGLQCVAGTAPVSFESGKIQRAKIRWHCNRHLRHAVHLWADCSRKFCAWAGTYYKAQREKGKSHACALRCLGQRWLKILWKIWQSRQPYDETIHALNQQKHGSWLLQLKPKTT

SEQ ID NO: 388803 - protein, 320 aa, unidentified
MMAQNDLVVVGIDVAKDKVDACIRSLSLRGTWPNTVQDRRKLIAWLRKHKVGKAVMEASGGYERDWAKALREAGIEVRIVDPKRVRSFARSAGRLAKNDAIDAEMIAWFAETFSEAPGQAHDAAREKLAQIVNARQGLLDLQTRLKNRSEHAGPEPVQRMHARLLKKIAVEVATLEVAIAAMIKANPHFAELAEIIESVPGLAGTTSAGLIAGMSELGQVSNKVAPALLGAAPYDDDSGRHRGERHIKGGRRKVRNLFYMACLGAATQHNPVLKAFYRRLIAKGKEPKVALVACMRKLIVILNTMIARRQRWDPNLYGLD

SEQ ID NO: 388804 - protein, 411 aa, unidentified
MRLFVGDDWAEDHHDIEVMDEAGAVLAKKRLPEGVAGITQLHELTGRCLPQDGADAEVVIGIETDRGPWVAALVAAGYLVFPVNPLQASRYRERHGVSGAKSDGGDAHMLADMVRTDSHQLRPAAGNSPEAEAIKVVARTHKTLIWERTRGVQRLRHQLREYFPAALDAFEDLDAPDVLELLGKAPDPARAAKLTRAQISAALKRARRRNITDKATAILAALRGQQLGQPAALTAAYAATARSLIAVITTLNEQVKVLQGQVEDHFGRHPDAEIYRSQPGMGAILGARVLGEFGDDPHRYAGAKNRKNFASTSPITRASGKKKVVAARFIHNDRLLDALMAQAFAALNASPGARAFYDELRARGIEHNDALRRLANRLVGILHGCLKARTLYDEATAWAHRENLPQPSVAA

SEQ ID NO: 388805 - protein, 341 aa, unidentified
MSIFVLGVDLGKNVCSLVGLDETGAVVLRRRLRRDRVVEFVSQLSSCIVAMEACCGAHHLGRVLGAAGHTIRLMSPEYVRPYVKANKNDDRDAEAIAEAATRPTMRFVPVKSEMQSDIQALHRARSRLVAERTALINHLRALLLERGIVVAQGRRKLEDALSVFANEDDPRLSPRIQLLVKDLRAEWRCLDERIAAFDAEFVQMAREDEAARRLSTIPGIGVINATALVAAVGDARSFGRGRDLAAWLGLTPRQVTTGGKPRLLGISKRGNRYLRANLIHGARAVLPRILSQDTPFGRWARSLSERTHKNVVVVALAAKLARIVWAVLRKERSFDPAIMAA

SEQ ID NO: 388806 - protein, 411 aa, unidentified
MNITTLFVGIDVSKKSNTVRFMDGGGDTLSLFTVPNNADGAAKLQEKLRHTLLHTDYSEVTIGMEATSVYGDHLNDFLHRDPFLQKWCCKIYMLNAKQVKNFKKSYPEIPKDDNIDSLVIADYLRFNRLPAEVHHDEKYLALRNLTRARFQAAQNLSREKTRFLDNLFQKFSSLDSSNVFSNTFGATSIAAACEFMSVDEIIYTPIDDLTEFVNSKGKGKFADPSEVAKALQAAARSSYRIPKTVNDSLNQLLAIRLIGIRSIEDQVKSLDKAIEKFMDAFQNVLVSIPGIGPVYSAGIIAETGDVHRFRKGQSSLAKYAGLMWSRYQSGDYEAANTKLVSSGNKYLRYYLLEAANKVRMHDAEFERYYRVKFREVPKHQHKRALALTARKLVRLVYSLLSTNRLYTPPTK

SEQ ID NO: 388807 - protein, 339 aa, unidentified
MPHYAALDVSNAETAIHVVDETGRTVWRGKRASDPEALAAALRRHAPDLVRVGLETGFLTPWLYHSLKAIGLPIVCLEARHARAATALQRNKTDANDAETLAQLVRTGWYREARVKSFAAHAVRHLVGARAQLKGVSVDLSNQIRSILKTFGLRAGKGAGHPFAIRVRELLKGRPSLAAIIDPLLAAWQAVREQIAVLDRRLIRLAKGDPTCRLLMTCPGVGVIVATSFAASIEAPEHFRRSRSVGAYLGLTPARHQSGETDRTGGISRRGDRLMRTYLFEAAASLLIRVRQDSALKTWGRDLAKRMGFKHAAAALARKLSVVLHAMWRSKTPFRAWPV
